United States Patent Application Publication US 2011/0183924 A1 - sequence listing, part 275

SEQ ID NO: 827196 - protein, 2726 aa, Homo sapiens
MLSWVPWRRVTGLHGVALPHGLDKIEEAQKELNGAEVSKKEILQAGVKGTSESLKGVKRKKIVAENHLKKIPKSPLRNPLQAKHKQNTEESSFAVLHSASESHKKQNYIPVKNGKQFTKQNGETPGIIAEASKSEESVSPKKPLFLQQPSELRRWRSEGADPAKFSDLDEQCDSSSLSSKTRTDNSECISSHCGTTSPSYTNTAFDVLLKAMEPELSTLSQKGSPCAIKTEKLRPNKTARSPPKLKNSSMDAPNQTSQELVAESQSSCTSYTVHMSAAQKNEQGAMQSASHLYHQHEHFVPKSNQHNQQLPGCSGFTGSLTNLQNQENAKLEQVYNIAVTSSVGLTSPSSRSQVTPQNQQMDSASPLSISPANSTQSPPMPIYNSTHVASVVNQSVEQMCNLLLKDQKPKKQGKYICEYCNRACAKPSVLLKHIRSHTGERPYPCVTCGFSFKTKSNLYKHKKSHAHTIKLGLVLQPDAGGLFLSHESPKALSIHSDVEDSGESEEEGATDERQHDLGAMELQPVHIIKRMSNAETLLKSSFTPSSPENVIGDFLLQDRSAESQAVTELPKVVVHHVTVSPLRTDSPKAMDPKPELSSAQKQKDLQVTNVQPLSANMSQGGVSRLETNENSHQKGDMNPLEGKQDSHVGTVHAQLQRQQATDYSQEQQGKLLSPRSLGSTDSGYFSRSESADQTVSPPTPFARRFPAQNKTLEGVTDPLQLLSPRQHPLLCHREKALLLPGQMRPPLATKTLEERISKLISDNEALVDDKQLDSVKPRRTSLSRRGSIDSPKSYIFKDSFQFDLKPVGRRTSSSSDIPKSPFTPTEKSKQVFLLSVPSLDCLPITRSNSMPTTGYSAVPANIIPPPHPLRGSQSFDDKIGAFYDDVFVSGPNAPVPQSGHPRTLVRQAAIEDSSANESHVLGTGQSLDESHQGCHAAGEAMSVRSKALAQGPHIEKKKSHQGRGTMFECETCRNRYRKLENFENHKKFYCSELHGPKTKVAMREPEHSPVPGGLQPQILHYRVAGSSGIWEQTPQIRKRRKMKSVGDDEELQQNESGTSPKSSEGLQFQNALGCNPSLPKHNVTIRSDQQHKNIQLQNSHIHLVARGPEQTMDPKLSTIMEQQISSAAQDKIELQRHGTGISVIQHTNSLSRPNSFDKPEPFERASPVSFQELNRTGKSGSLKVIGISQEESHPSRDGSHPHQLALSDALRGELQESSRKSPSERHVLGQPSRLVRQHNIQVPEILVTEEPDRDLEAQCHDQEKSEKFSWPQRSETLSKLPTEKLPPKKKRLRLAEIEHSSTESSFDSTLSRSLSRESSLSHTSSFSASLDIEDVSKTEASPKIDFLNKAEFLMIPAGLNTLNVPGCHREMRRTASEQINCTQTSMEVSDLRSKSFDCGSITPPQTTPLTELQPPSSPSRVGVTGHVPLLERRRGPLVRQISLNIAPDSHLSPVHPTSFQNTALPSVNAVPYQGPQLTSTSLAEFSANTLHSQTQVKDLQAETSNSSSTNVFPVQQLCDINLLNQIHAPPSHQSTQLSLQVSTQGSKPDKNSVLSGSSKSEDCFAPKYQLHCQVFTSGPSCSSNPVHSLPNQVISDPVGTDHCVTSATLPTKLIDSMSNSHPLLPPELRPLGSQVQKVPSSFMLPIRLQSSVPAYCFATLTSLPQILVTQDLPNQPICQTNHSVVPISEEQNSVPTLQKGHQNALPNPEKEFLCENVFSEMSQNSSLSESLPITQKISVGRLSPQQESSASSKRMLSPANSLDIAMEKHQKRAKDENGAVCATDVRPLEALSSRVNEASKQKKPILVRQVCTTEPLDGVMLEKDVFSQPEISNEAVNLTNVLPADNSSTGCSKFVVIEPISELQEFENIKSSTSLTLTVRSSPAPSENTHISPLKCTDNNQERKSPGVKNQGDKVNIQEQSQQPVTSLSLFNIKDTQQLAFPSLKTTTNFTWCYLLRQKSLHLPQKDQKTSAYTDWTVSASNPNPLGLPTKVALALLNSKQNTGKSLYCQAITTHSKSDLLVYSSKWKSSLSKRALGNQKSTVVEFSNKDASEINSEQDKENSLIKSEPRRIKIFDGGYKSNEEYVYVRGRGRGKYICEECGIRCKKPSMLKKHIRTHTDVRPYHCTYCNFSFKTKGNLTKHMKSKAHSKKCVDLGVSVGLIDEQDTEESDEKQRFSYERSGYDLEESDGPDEDDNENEDDDEDSQAESVLSATPSVTASPQHLPSRSSLQDPVSTDEDVRITDCFSGVHTDPMDVLPRALLTRMTVLSTAQSDYNRKTLSPGKARQRAARDENDTIPSVDTSRSPCHQMSVDYPESEEILRSSMAGKAVAITQSPSSVRLPPAAAEHSPQTAAGMPSVASPHPDPQEQKQQITLQPTPGLPSPHTHLFSHLPLHSQQQSRTPYNMVPVGGIHVVPAGLTYSTFVPLQAGPVQLTIPAVSVVHRTLGTHRNTVTEVSGTTNPAGVAELSSVVPCIPIGQIRVPGLQNLSTPGLQSLPSLSMETVNIVGLANTNMAPQVHPPGLALNAVGLQVLTANPSSQSSPAPQAHIPGLQILNIALPTLIPSVSQVAVDAQGAPEMPASQSKACETQPKQTSVASANQVSRTESPQGLPTVQRENAKKVLNPPAPAGDHARLDGLSKMDTEKAASANHVKPKPELTSIQGQPASTSQPLLKAHSEVFTKPSGQQTLSPDRQVPRPTALPRRQPTVHFSDVSSDDDEDRLVIAT

SEQ ID NO: 827197 - protein, 2114 aa, Homo sapiens
RGTKGKKVRPESLKNQCTPEPSGDMNPLEGKQDSHVGTVHAQLQRQQATDYSQEQQGKLLSPRSLGSTDSGYFSRSESADQTVSPPTPFARRFPAQNKTLEGVTDPLQLLSPRQHPLLCHREKALLLPGQMRPPLATKTLEERISKLISDNEALVDDKQLDSVKPRRTSLSRRGSIDSPKSYIFKDSFQFDLKPVGRRTSSSSDIPKSPFTPTEKSKQVFLLSVPSLDCLPITRSNSMPTTGYSAVPANIIPPPHPLRGSQSFDDKIGAFYDDVFVSGPNAPVPQSGHPRTLVRQAAIEDSSANESHVLGTGQSLDESHQGCHAAGEAMSVRSKALAQGPHIEKKKSHQGRGTMFECETCRNRYRKLENFENHKKFYCSELHGPKTKVAMREPEHSPVPGGLQPQILHYRVAGSSGIWEQTPQIRKRRKMKSVGDDEELQQNESGTSPKSSEGLQFQNALGCNPSLPKHNVTIRSDQQHKNIQLQNSHIHLVARGPEQTMDPKLSTIMEQQISSAAQDKIELQRHGTGISVIQHTNSLSRPNSFDKPEPFERASPVSFQELNRTGKSGSLKVIGISQEESHPSRDGSHPHQLALSDALRGELQESSRKSPSERHVLGQPSRLVRQHNIQVPEILVTEEPDRDLEAQCHDQEKSEKFSWPQRSETLSKLPTEKLPPKKKRLRLAEIEHSSTESSFDSTLSRSLSRESSLSHTSSFSASLDIEDVSKTEASPKIDFLNKAEFLMIPAGLNTLNVPGCHREMRRTASEQINCTQTSMEVSDLRSKSFDCGSITPPQTTPLTELQPPSSPSRVGVTGHVPLLERRRGPLVRQISLNIAPDSHLSPVHPTSFQNTALPSVNAVPYQGPQLTSTSLAEFSANTLHSQTQVKDLQAETSNSSSTNVFPVQQLCDINLLNQIHAPPSHQSTQLSLQVSTQGSKPDKNSVLSGSSKSEDCFAPKYQLHCQVFTSGPSCSSNPVHSLPNQVISDPVGTDHCVTSATLPTKLIDSMSNSHPLLPPELRPLGSQVQKVPSSFMLPIRLQSSVPAYCFATLTSLPQILVTQDLPNQPICQTNHSVVPISEEQNSVPTLQKGHQNALPNPEKEFLCENVFSEMSQNSSLSESLPITQKISVGRLSPQQESSASSKRMLSPANSLDIAMEKHQKRAKDENGAVCATDVRPLEALSSRVNEASKQKKPILVRQVCTTEPLDGVMLEKDVFSQPEISNEAVNLTNVLPADNSSTGCSKFVVIEPISELQEFENIKSSTSLTLTVRSSPAPSENTHISPLKCTDNNQERKSPGVKNQGDKVNIQEQSQQPVTSLSLFNIKDTQQLAFPSLKTTTNFTWCYLLRQKSLHLPQKDQKTSAYTDWTVSASNPNPLGLPTKVALALLNSKQNTGKSLYCQAITTHSKSDLLVYSSKWKSSLSKRALGNQKSTVVEFSNKDASEINSEQDKENSLIKSEPRRIKIFDGGYKSNEEYVYVRGRGRGKYICEECGIRCKKPSMLKKHIRTHTDVRPYHCTYCNFSFKTKGNLTKHMKSKAHSKKCVDLGVSVGLIDEQDTEESDEKQRFSYERSGYDLEESDGPDEDDNENEDDDEDSQAESVLSATPSVTASPQHLPSRSSLQDPVSTDEDVRITDCFSGVHTDPMDVLPRALLTRMTVLSTAQSDYNRKTLSPGKARQRAARDENDTIPSVDTSRSPCHQMSVDYPESEEILRSSMAGKAVAITQSPSSVRLPPAAAEHSPQTAAGMPSVASPHPDPQEQKQQITLQPTPGLPSPHTHLFSHLPLHSQQQSRTPYNMVPVGGIHVVPAGLTYSTFVPLQAGPVQLTIPAVSVVHRTLGTHRNTVTEVSGTTNPAGVAELSSVVPCIPIGQIRVPGLQNLSTPGLQSLPSLSMETVNIVGLANTNMAPQVHPPGLALNAVGLQVLTANPSSQSSPAPQAHIPGLQILNIALPTLIPSVSQVAVDAQGAPEMPASQSKACETQPKQTSVASANQVSRTESPQGLPTVQRENAKKVLNPPAPAGDHARLDGLSKMDTEKAASANHVKPKPELTSIQGQPASTSQPLLKAHSEVFTKPSGQQTLSPDRQVPRPTALPRRQPTVHFSDVSSDDDEDRLVIAT

SEQ ID NO: 827198 - protein, 645 aa, Homo sapiens
MLSWVPWRRVTGLHGVALPHGLDKIEEAQKELNGAEVSKKEILQAGVKGTSESLKGNLTKHMKSKAHSKKCVDLGVSVGLIDEQDTEESDEKQRFSYERSGYDLEESDGPDEDDNENEDDDEDSQAESVLSATPSVTASPQHLPSRSSLQDPVSTDEDVRITDCFSGVHTDPMDVLPRALLTRMTVLSTAQSDYNRKTLSPGKARQRAARDENDTIPSVDTSRSPCHQMSVDYPESEEILRSSMAGKAVAITQSPSSVRLPPAAAEHSPQTAAGMPSVASPHPDPQEQKQQITLQPTPGLPSPHTHLFSHLPLHSQQQSRTPYNMVPVGGIHVVPAGLTYSTFVPLQAGPVQLTIPAVSVVHRTLGTHRNTVTEVSGTTNPAGVAELSSVVPCIPIGQIRVPGLQNLSTPGLQSLPSLSMETVNIVGLANTNMAPQVHPPGLALNAVGLQVLTANPSSQSSPAPQAHIPGLQILNIALPTLIPSVSQVAVDAQGAPEMPASQSKACETQPKQTSVASANQVSRTESPQGLPTVQRENAKKVLNPPAPAGDHARLDGLSKMDTEKAASANHVKPKPELTSIQGQPASTSQPLLKAHSEVFTKPSGQQTLSPDRQVPRPTALPRRQPTVHFSDVSSDDDEDRLVIAT

SEQ ID NO: 827199 - protein, 2598 aa, Homo sapiens
MPRTKQIHPRNLRDKIEEAQKELNGAEVSKKEILQAGVKGTSESLKGVKRKKIVAENHLKKIPKSPLRNPLQAKHKQNTEESSFAVLHSASESHKKQNYIPVKNGKQFTKQNGETPGIIAEASKSEESVSPKKPLFLQQPSELRRWRSEGADPAKFSDLDEQCDSSSLSSKTRTDNSECISSHCGTTSPSYTNTAFDVLLKAMEPELSTLSQKGSPCAIKTEKLRPNKTARSPPKLKNSSMDAPNQTSQELVAESQSSCTSYTVHMSAAQKNEQGAMQSASHLYHQHEHFVPKSNQHNQQLPGCSGFTGSLTNLQNQENAKLEQVYNIAVTSSVGLTSPSSRSQVTPQNQQMDSASPLSISPANSTQSPPMPIYNSTHVASVVNQSVEQMCNLLLKDQKPKKQGKYICEYCNRACAKPSVLLKHIRSHTGERPYPCVTCGFSFKTKSNLYKHKKSHAHTIKLGLVLQPDAGGLFLSHESPKALSIHSDVEDSGESEEEGATDERQHDLGAMELQPVHIIKRMSNAETLLKSSFTPSSPENVIGDFLLQDRSAESQAVTELPKVVVHHVTVSPLRTDSPKAMDPKPELSSAQKQKDLQVTNVQPLSANMSQGGVSRLETNENSHQKGDMNPLEGKQDSHVGTVHAQLQRQQATDYSQEQQGKLLSPRSLGSTDSGYFSRSESADQTVSPPTPFARRFPAQNKTLEGVTDPLQLLSPRQHPLLCHREKALLLPGQMRPPLATKTLEERISKLISDNEALVDDKQLDSVKPRRTSLSRRGSIDSPKSYIFKDSFQFDLKPVGRRTSSSSDIPKSPFTPTEKSKQVFLLSVPSLDCLPITRSNSMPTTGYSAVPANIIPPPHPLRGSQSFDDKIGAFYDDVFVSGPNAPVPQSGHPRTLVRQAAIEDSSANESHVLGTGQSLDESHQGCHAAGEAMSVRSKALAQGPHIEKKKSHQGRGTMFECETCRNRYRKLENFENHKKFYCSELHGPKTKVAMREPEHSPVPGGLQPQILHYRVAGSSGIWEQTPQIRKRRKMKSVGDDEELQQNESGTSPKSSEGLQFQNALGCNPSLPKHNVTIRSDQQHKNIQLQNSHIHLVARGPEQTMDPKLSTIMEQQISSAAQDKIELQRHGTGISVIQHTNSLSRPNSFDKPEPFERASPVSFQELNRTGKSGSLKVIGISQEESHPSRDGSHPHQLALSDALRGELQESSRKSPSERHVLGQPSRLVRQHNIQVPEILVTEEPDRDLEAQCHDQEKSEKFSWPQRSETLSKLPTEKLPPKKKRLRLAEIEHSSTESSFDSTLSRSLSRESSLSHTSSFSASLDIEDVSKTEASPKIDFLNKAEFLMIPAGLNTLNVPGCHREMRRTASEQINCTQTSMEVSDLRSKSFDCGSITPPQTTPLTELQPPSSPSRVGVTGHVPLLERRRGPLVRQISLNIAPDSHLSPVHPTSFQNTALPSVNAVPYQGPQLTSTSLAEFSANTLHSQTQVKDLQAETSNSSSTNVFPVQQLCDINLLNQIHAPPSHQSTQLSLQVSTQGSKPDKNSVLSGSSKSEDCFAPKYQLHCQVFTSGPSCSSNPVHSLPNQVISDPVGTDHCVTSATLPTKLIDSMSNSHPLLPPELRPLGSQVQKVPSSFMLPIRLQSSVPAYCFATLTSLPQILVTQDLPNQPICQTNHSVVPISEEQNSVPTLQKGHQNALPNPEKEFLCENVFSEMSQNSSLSESLPITQKISVGRLSPQQESSASSKRMLSPANSLDIAMEKHQKRAKDENGAVCATDVRPLEALSSRVNEASKQKKPILVRQVCTTEPLDGVMLEKDVFSQPEISNEAVNLTNVLPADNSSTGCSKFVVIEPISELQEFENIKSSTSLTLTVRSSPAPSENTHISPLKCTDNNQERKSPGVKNQGDKVNIQEQSQQPVTSLSLFNIKDTQQLAFPSLKTTTNFTWCYLLRQKSLHLPQKDQKTSAYTDWTVSASNPNPLGLPTKVALALLNSKQNTGKSLYCQAITTHSKSDLLVYSSKWKSSLSKRALGNQKSTVVEFSNKDASEINSEQDKENSLIKSEPRRIKIFDGGYKSNEEYVYVRGRGRGKYICEECGIRCKKPSMLKKHIRTHTDVRPYHCTYCNFSFKTKGNLTKHMKSKAHSKKCVDLGVSVGLIDEQDTEESDEKQRFSYERSGYDLEESDGPDEDDNENEDDDEDSQAESVLSATPSVTASPQHLPSRSSLQDPVSTDEDVRITDCFSGVHTDPMDVLPRALLTRMTVLSTAQSDYNRKTLSPGKARQRAARDENDTIPSVDTSRSPCHQMSVDYPESEEILRSSMAGKAVAITQSPSSVRLPPAAAEHSPQTAAGMPSVASPHPDPQEQKQQITLQPTPGLPSPHTHLFSHLPLHSQQQSRTPYNMVPVGGIHVVPAGLTYSTFVPLQAGPVQLTIPAVSVVHRTLGTHRNTVTEVSGTTNPAGVAELSSVVPCIPIGQIRVPGLQNLSTPGLQSLPSLSMETVNIVGLANTNMAPQVHPPGLALNAVGLQVLTANPSSQSSPAPQAHIPGLQILNIALPTLIPSVSQVAVDAQGAPEMPASQSKACETQPKQTSVASANLSNKSND

SEQ ID NO: 827200 - protein, 2293 aa, Homo sapiens
MPRTKQIHPRNLRDKIEEAQKELNGAEVSKKEILQAGVKGTSESLKGVKRKKIVAENHLKKIPKSPLRNPLQAKHKQNTEESSFAVLHSASESHKKQNYIPVKNGKQFTKQNGETPGIIAEASKSEESVSPKKPLFLQQPSELRRWRSEGADPAKFSDLDEQCDSSSLSSKTRTDNSECISSHCGTTSPSYTNTAFDVLLKAMEPELSTLSQKGSPCAIKTEKLRPNKTARSPPKLKNSSMDAPNQTSQELVAESQSSCTSYTVHMSAAQKNEQGAMQSASHLYHQHEHFVPKSNQHNQQLPGCSGFTGSLTNLQNQENAKLEQVYNIAVTSSVGLTSPSSRSQVTPQNQQMDSASPLSISPANSTQSPPMPIYNSTHVASVVNQSVEQMCNLLLKDQKPKKQGKYICEYCNRACAKPSVLLKHIRSHTGERPYPCVTCGFSFKTKSNLYKHKKSHAHTIKLGLVLQPDAGGLFLSHESPKALSIHSDVEDSGESEEEGATDERQHDLGAMELQPVHIIKRMSNAETLLKSSFTPSSPENVIGDFLLQDRSAESQAVTELPKVVVHHVTVSPLRTDSPKAMDPKPELSSAQKQKDLQVTNVQPLSANMSQGGVSRLETNENSHQKGDMNPLEGKQDSHVGTVHAQLQRQQATDYSQEQQGKLLSPRSLGSTDSGYFSRSESADQTVSPPTPFARRFPAQNKTLEGVTDPLQLLSPRQHPLLCHREKALLLPGQMRPPLATKTLEERISKLISDNEALVDDKQLDSVKPRRTSLSRRGSIDSPKSYIFKDSFQFDLKPVGRRTSSSSDIPKSPFTPTEKSKQVFLLSVPSLDCLPITRSNSMPTTGYSAVPANIIPPPHPLRGSQSFDDKIGAFYDDVFVSGPNAPVPQSGHPRTLVRQAAIEDSSANESHVLGTGQSLDESHQGCHAAGEAMSVRSKALAQGPHIEKKKSHQGRGTMFECETCRNRYRKLENFENHKKFYCSELHGPKTKVAMREPEHSPVPGGLQPQILHYRVAGSSGIWEQTPQIRKRRKMKSVGDDEELQQNESGTSPKSSEGLQFQNALGCNPSLPKHNVTIRSDQQHKNIQLQNSHIHLVARGPEQTMDPKLSTIMEQQISSAAQDKIELQRHGTGISVIQHTNSLSRPNSFDKPEPFERASPVSFQELNRTGKSGSLKVIGISQEESHPSRDGSHPHQLALSDALRGELQESSRKSPSERHVLGQPSRLVRQHNIQVPEILVTEEPDRDLEAQCHDQEKSEKFSWPQRSETLSKLPTEKLPPKKKRLRLAEIEHSSTESSFDSTLSRSLSRESSLSHTSSFSASLDIEDVSKTEASPKIDFLNKAEFLMIPAGLNTLNVPGCHREMRRTASEQINCTQTSMEVSDLRSKSFDCGSITPPQTTPLTELQPPSSPSRVGVTGHVPLLERRRGPLVRQISLNIAPDSHLSPVHPTSFQNTALPSVNAVPYQGPQLTSTSLAEFSANTLHSQTQVKDLQAETSNSSSTNVFPVQQLCDINLLNQIHAPPSHQSTQLSLQVSTQGSKPDKNSVLSGSSKSEDCFAPKYQLHCQVFTSGPSCSSNPVHSLPNQVISDPVGTDHCVTSATLPTKLIDSMSNSHPLLPPELRPLGSQVQKVPSSFMLPIRLQSSVPAYCFATLTSLPQILVTQDLPNQPICQTNHSVVPISEEQNSVPTLQKGHQNALPNPEKEFLCENVFSEMSQNSSLSESLPITQKISVGRLSPQQESSASSKRMLSPANSLDIAMEKHQKRAKDENGAVCATDVRPLEALSSRVNEASKQKKPILVRQVCTTEPLDGVMLEKDVFSQPEISNEAVNLTNVLPADNSSTGCSKFVVIEPISELQEFENIKSSTSLTLTVRSSPAPSENTHISPLKCTDNNQERKSPGVKNQGDKVNIQEQSQQPVTSLSLFNIKDTQQLAFPSLKTTTNFTWCYLLRQKSLHLPQKDQKTSAYTDWTVSASNPNPLGLPTKVALALLNSKQNTGKSLYCQAITTHSKSDLLVYSSKWKSSLSKRALGNQKSTVVEFSNKDASEINSEQDKENSLIKSEPRRIKIFDGGYKSNEEYVYVRGRGRGKYICEECGIRCKKPSMLKKHIRTHTDVRPYHCTYCNFSFKTKGNLTKHMKSKAHSKKCVDLGVSVGLIDEQDTEESDEKQRFSYERSGYDLEESDGPDEDDNENEDDDEDSQAESVLSATPSVTASPQHLPSRSSLQDPVSTDEDVRITDCFSGVHTDPMDVLPRALLTRMTVLSTAQSDYNRKTLSPGKARQRAARDENDTISSDSG

SEQ ID NO: 827201 - protein, 1110 aa, Homo sapiens
MSNSHPLLPPELRPLGSQVQKVPSSFMLPIRLQSSVPAYCFATLTSLPQILVTQDLPNQPICQTNHSVVPISEEQNSVPTLQKGHQNALPNPEKEFLCENVFSEMSQNSSLSESLPITQKISVGRLSPQQESSASSKRMLSPANSLDIAMEKHQKRAKDENGAVCATDVRPLEALSSRVNEASKQKKPILVRQVCTTEPLDGVMLEKDVFSQPEISNEAVNLTNVLPADNSSTGCSKFVVIEPISELQEFENIKSSTSLTLTVRSSPAPSENTHISPLKCTDNNQERKSPGVKNQGDKVNIQEQSQQPVTSLSLFNIKDTQQLAFPSLKTTTNFTWCYLLRQKSLHLPQKDQKTSAYTDWTVSASNPNPLGLPTKVALALLNSKQNTGKSLYCQAITTHSKSDLLVYSSKWKSSLSKRALGNQKSTVVEFSNKDASEINSEQDKENSLIKSEPRRIKIFDGGYKSNEEYVYVRGRGRGKYICEECGIRCKKPSMLKKHIRTHTDVRPYHCTYCNFSFKTKGNLTKHMKSKAHSKKCVDLGVSVGLIDEQDTEESDEKQRFSYERSGYDLEESDGPDEDDNENEDDDEDSQAESVLSATPSVTASPQHLPSRSSLQDPVSTDEDVRITDCFSGVHTDPMDVLPRALLTRMTVLSTAQSDYNRKTLSPGKARQRAARDENDTIPSVDTSRSPCHQMSVDYPESEEILRSSMAGKAVAITQSPSSVRLPPAAAEHSPQTAAGMPSVASPHPDPQEQKQQITLQPTPGLPSPHTHLFSHLPLHSQQQSRTPYNMVPVGGIHVVPAGLTYSTFVPLQAGPVQLTIPAVSVVHRTLGTHRNTVTEVSGTTNPAGVAELSSVVPCIPIGQIRVPGLQNLSTPGLQSLPSLSMETVNIVGLANTNMAPQVHPPGLALNAVGLQVLTANPSSQSSPAPQAHIPGLQILNIALPTLIPSVSQVAVDAQGAPEMPASQSKACETQPKQTSVASANQVSRTESPQGLPTVQRENAKKVLNPPAPAGDHARLDGLSKMDTEKAASANHVKPKPELTSIQGQPASTSQPLLKAHSEVFTKPSGQQTLSPDRQVPRPTALPRRQPTVHFSDVSSDDDEDRLVIAT

SEQ ID NO: 827202 - protein, 78 aa, Homo sapiens
RCWAAAGWRTERGTGERRPRGGYVCVWGCQVKEGSQAPPPPPRGSRDPEPRPPPSAAQLQGRLQRQRLRRASWQQHMD

SEQ ID NO: 827203 - protein, 443 aa, Homo sapiens
MQRRDDPAARMSRSSGRSGSMDPSGAHPSVRQTPSRQPPLPHRSRGGGGGSRGGARASPATQPPPLLPPSATGPDATVGGPAPTPLLPPSATASVKMEPENKYLPELMAEKDSLDPSFTHAMQLLTAEIEKIQKGDSKKDDEENYLDLFSHKNMKLKERVLIPVKQYPKFNFVGKILGPQGNTIKRLQEETGAKISVLGKGSMRDKAKEEELRKGGDPKYAHLNMDLHVFIEVFGPPCEAYALMAHAMEEVKKFLVPDMMDDICQEQFLELSYLNGVPEPSRGRGVPVRGRGAAPPPPPVPRGRGVGPPRGALVRGTPVRGAITRGATVTRGVPPPPTVRGAPAPRARTAGIQRIPLPPPPAPETYEEYGYDDTYAEQSYEGYEGYYSQSQGDSEYYDYGHGEVQDSYEAYGQDDWNGTRPSLKAPPARPVKGAYREHPYGRY

SEQ ID NO: 827204 - protein, 443 aa, Homo sapiens; identical to SEQ ID NO: 827203

SEQ ID NO: 827205 - protein, 381 aa, Homo sapiens
MQRRDDPAARMSRSSGRSGSMDPSGAHPSVRQTPSRQPPLPHRSRGGGGGSRGGARASPATQPPPLLPPSATGPDATVGGPAPTPLLPPSATASVKMEPENKYLPELMAEKDSLDPSFTHAMQLLTAEIEKIQKGDSKKDDEENYLDLFSHKNMKLKERVLIPVKQYPKFNFVGKILGPQGNTIKRLQEETGAKISVLGKGSMRDKAKEEELRKGGDPKYAHLNMDLHVFIEVFGPPCEAYALMAHAMEEVKKFLVPDMMDDICQEQFLELSYLNGVPEPSRGRGVPVRGRGAAPPPPPVPRGRGVGPPRGALVRGTPVRGAITRGATVTRGVPPPPTVRGAPAPRARTAGIQRIPLPPPPAPETYEEYVRNLNNVPFPST

SEQ ID NO: 827206 - protein, 443 aa, Homo sapiens; identical to SEQ ID NO: 827203

SEQ ID NO: 827207 - protein, 443 aa, Homo sapiens; identical to SEQ ID NO: 827203

SEQ ID NO: 827208 - protein, 436 aa, Homo sapiens
MQRRDDPAARMSRSSGRSGSMDPSGAHPSVRQTPSRQPPLPHRSRGGGGGSRGGARASPATQPPPLLPPSATGPDATVGGPAPTPLLPPSATASVKMEPENKYLPELMAEKDSLDPSFTHAMQLLTAEIEKIQKGDSKKDDEENYLDLFSHKNMKLKERVLIPVKQYPKFNFVGKILGPQGNTIKRLQEETGAKISVLGKGSMRDKAKEEELRKGGDPKYAHLNMDLHVFIEVFGPPCEAYALMAHAMEEVKKFLVPDMMDDICQEQFLELSYLNGVPEPSRGRGVPVRGRGAAPPPPPVPRGRGVGPPRGALVRGTPVRGAITRGATVTRGVPPPPTVRGAPAPRARTAGIQRIPLPPPPAPETYEEYGYDDTYAEQSYEGYEGYYSQSQGDSEYYDYGHGEVQDSYEAYGQDDWNGTRPSPVKGAYREHPYGRY

SEQ ID NO: 827209 - protein, 443 aa, Homo sapiens; identical to SEQ ID NO: 827203

SEQ ID NO: 827210 - protein, 404 aa, Homo sapiens
MQRRDDPAARMSRSSGRSGSMDPSGAHPSVRQTPSRQPPLPHRSRGGGGGSRGGARASPATQPPPLLPPSATGPDATVGGPAPTPLLPPSATASVKMEPENKYLPELMAEKDSLDPSFTHAMQLLTAEIEKIQKGDSKKDDEENYLDLFSHKNMKLKERVLIPVKQYPKEEELRKGGDPKYAHLNMDLHVFIEVFGPPCEAYALMAHAMEEVKKFLVPDMMDDICQEQFLELSYLNGVPEPSRGRGVPVRGRGAAPPPPPVPRGRGVGPPRGALVRGTPVRGAITRGATVTRGVPPPPTVRGAPAPRARTAGIQRIPLPPPPAPETYEEYGYDDTYAEQSYEGYEGYYSQSQGDSEYYDYGHGEVQDSYEAYGQDDWNGTRPSLKAPPARPVKGAYREHPYGRY

SEQ ID NO: 827211 - protein, 321 aa, Homo sapiens
RTRAASFPVLSLAGSLGSASVATAPALPPPPTAARASVAAASLSRSLDRTSSQMQRRDDPAARMSRSSGRSGSMDPSGAHPSVRQTPSRQPPLPHRSRGGGGGSRGGARASPATQPPPLLPPSATGPDATVGGPAPTPLLPPSATASVKMEPENKYLPELMAEKDSLDPSFTHAMQLLTAEIEKIQKGDSKKDDEENYLDLFSHKNMKLKERVLIPVKQYPKFNFVGKILGPQGNTIKRLQEETGAKISVLGKGSMRDKAKEEELRKGGDPKYAHLNMDLHVFIEVFGPPCEAYALMAHAMEEVKKFLVPARTTGMGPGRR

SEQ ID NO: 827212 - protein, 443 aa, Homo sapiens; identical to SEQ ID NO: 827203

SEQ ID NO: 827213 - protein, 443 aa, Homo sapiens; identical to SEQ ID NO: 827203

SEQ ID NO: 827214 - protein, 443 aa, Homo sapiens; identical to SEQ ID NO: 827203

SEQ ID NO: 827215 - protein, 443 aa, Homo sapiens; identical to SEQ ID NO: 827203

SEQ ID NO: 827216 - protein, 443 aa, Homo sapiens; identical to SEQ ID NO: 827203

SEQ ID NO: 827217 - protein, 443 aa, Homo sapiens; identical to SEQ ID NO: 827203

SEQ ID NO: 827218 - protein, 381 aa, Homo sapiens; identical to SEQ ID NO: 827205

SEQ ID NO: 827219 - protein, 436 aa, Homo sapiens; identical to SEQ ID NO: 827208

SEQ ID NO: 827220 - protein, 151 aa, Homo sapiens
RGGARASPATQPPPLLPPSATGPDATVGGPAPTPLLPPSATASVKMEPENKYLPELMAEKDSLDPSFTHAMQLLTAGKGASRVPLGRPAIPGMSGPGFVPLASRPLGTEAVGSSGLILIFGSLDSTFPPQPGVRGRISRLQWRPEGDFAIP

SEQ ID NO: 827221 - protein, 536 aa, Homo sapiens
METMASPGKDNYRMKSYKNNALNPEEMRRRREEEGIQLRKQKREQQLFKRRNVELINEEAAMFDSLLMDSYVSSTTGESVITREMVEMLFSDDSDLQLATTQKFRKLLSKEPSPPIDEVINTPRVVDRFVEFLKRNENCTLQFEAAWALTNIASGTSQQTKIVIEAGAVPIFIELLNSDFEDVQEQAVWALGNIAGDSSVCRDYVLNCSILNPLLTLLTKSTRLTMTRNAVWALSNLCRGKNPPPEFAKVSPCLPVLSRLLFSSDSDLLADACWALSYLSDGPNEKIQAVIDSGVCRRLVELLMHNDYKVASPALRAVGNIVTGDDIQTQVILNCSALPCLLHLLSSPKESIRKEACWTISNITAGNRAQIQAVIDANIFPVLIEILQKAEFRTRKEAAWAITNATSGGTPEQIRYLVSLGCIKPLCDLLTVMDSKIVQVALNGLENILRLGEQEGKRSGSGVNPYCGLIEEAYGLDKIEFLQSHENQEIYQKAFDLIEHYFGVEDDDSSLAPQVDETQQQFIFQQPEAPMEGFQL

SEQ ID NO: 827222 - protein, 536 aa, Homo sapiens; identical to SEQ ID NO: 827221

SEQ ID NO: 827223 - protein, 536 aa, Homo sapiens; identical to SEQ ID NO: 827221

SEQ ID NO: 827224 - protein, 568 aa, Homo sapiens
LSMALLPASLSAVLEGEASVQDSPGSVMKSYVSETMASPGKDNYRMKSYKNNALNPEEMRRRREEEGIQLRKQKREQQLFKRRNVELINEEAAMFDSLLMDSYVSSTTGESVITREMVEMLFSDDSDLQLATTQKFRKLLSKEPSPPIDEVINTPRVVDRFVEFLKRNENCTLQFEAAWALTNIASGTSQQTKIVIEAGAVPIFIELLNSDFEDVQEQAVWALGNIAGDSSVCRDYVLNCSILNPLLTLLTKSTRLTMTRNAVWALSNLCRGKNPPPEFAKVSPCLPVLSRLLFSSDSDLLADACWALSYLSDGPNEKIQAVIDSGVCRRLVELLMHNDYKVASPALRAVGNIVTGDDIQTQVILNCSALPCLLHLLSSPKESIRKEACWTISNITAGNRAQIQAVIDANIFPVLIEILQKAEFRTRKEAAWAITNATSGGTPEQIRYLVSLGCIKPLCDLLTVMDSKIVQVALNGLENILRLGEQEGKRSGSGVNPYCGLIEEAYGLDKIEFLQSHENQEIYQKAFDLIEHYFGVEDDDSSLAPQVDETQQQFIFQQPEAPMEGFQL

SEQ ID NO: 827225 - protein, 533 aa, Homo sapiens
MASPGKDNYRMKSYKNNALNPEEMRRRREEEGIQLRKQKREQQLFKRRNVELINEEAAMFDSLLMDSYVSSTTGESVITREMVEMLFSDDSDLQLATTQKFRKLLSKEPSPPIDEVINTPRVVDRFVEFLKRNENCTLQFEAAWALTNIASGTSQQTKIVIEAGAVPIFIELLNSDFEDVQEQAVWALGNIAGDSSVCRDYVLNCSILNPLLTLLTKSTRLTMTRNAVWALSNLCRGKNPPPEFAKVSPCLPVLSRLLFSSDSDLLADACWALSYLSDGPNEKIQAVIDSGVCRRLVELLMHNDYKVASPALRAVGNIVTGDDIQTQVILNCSALPCLLHLLSSPKESIRKEACWTISNITAGNRAQIQAVIDANIFPVLIEILQKAEFRTRKEAAWAITNATSGGTPEQIRYLVSLGCIKPLCDLLTVMDSKIVQVALNGLENILRLGEQEGKRSGSGVNPYCGLIEEAYGLDKIEFLQSHENQEIYQKAFDLIEHYFGVEDDDSSLAPQVDETQQQFIFQQPEAPMEGFQL

SEQ ID NO: 827226 - protein, 536 aa, Homo sapiens; identical to SEQ ID NO: 827221

SEQ ID NO: 827227 - protein, 536 aa, Homo sapiens; identical to SEQ ID NO: 827221

SEQ ID NO: 827228 - protein, 536 aa, Homo sapiens; identical to SEQ ID NO: 827221

SEQ ID NO: 827229 - protein, 536 aa, Homo sapiens; identical to SEQ ID NO: 827221

SEQ ID NO: 827230 - protein, 750 aa, Homo sapiens
RNWASSGPFLLGLSLWRMGWMGEKTGKILTEFLQFYEDQYGVALFNSMRHEIEGTGLPQAQLLWRKVPLDERIVFSGNLFQHQEDSKKWRNRFSLVPHNYGLVLYENKAAYERQVPPRAVINSAGYKILTSVDQYLELIGNSLPGTTAKSGSAPILKCPTQFPLILWHPYARHYYFCMMTEAEQDKWQAVLQDCIRHCNNGIPEDSKVEGPAFTDAIRMYRQSKELYGTWEMLCGNEVQILSNLVMEELGPELKAELGPRLKGKPQERQRQWIQISDAVYHMVYEQAKARFEEVLSKVQQVQPAMQAVIRTDMDQIITSKEHLASKIRAFILPKAEVCVRNHVQPYIPSILEALMVPTSQGFTEVRDVFFKEVTDMNLNVINEGGIDKLGEYMEKLSRLAYHPLKMQSCYEKMESLRLDGLQQRFDVSSTSVFKQRAQIHMREQMDNAVYTFETLLHQELGKGPTKEELCKSIQRVLERVLKKYDYDSSSVRKRFFREALLQISIPFLLKKLAPTCKSELPRFQELIFEDFARFILVENTYEEVVLQTVMKDILQAVKEAAVQRKHNLYRDSMVMHNSDPNLHLLAEGAPIDWGEEYSNSGGGGSPSPSTPESATLSEKRRRAKQVVSVVQDEEVGLPFEASPESPPPASPDGVTEIRGLLAQGLRPESPPPAGPLLNGAPAGESPQPKAAPEASSPPASPLQHLLPGKAVDLGPPKPSDQETGEQVSSPSSHPALHTTTEDSAGVQTEF

SEQ ID NO: 827231 - protein, 96 aa, Homo sapiens
AKAAGWRDGARPGAEPERKPQPGGGSGGSGGSRAGRAPWRQRRPPEQRGQQRRRRPDRAATPPGHGGRAVHAPGRRPAPAHRRKNREDPDGVPPVL

SEQ ID NO: 827232 - protein, 126 aa, Homo sapiens
REFVLVLREFVLVLRDFVLVLREFVLVLYENKAAYERQVPPRAVINSAGYKILTSVDQYLELIGNSLPGKGAPIPGHNALHRHLELARGGVALSPLLSAPCLRRDQLGLELWMETSLFAFRISLSP

SEQ ID NO: 827233 - protein, 810 aa, Homo sapiens
PRRPAGGTGPDRERSRSGSRSRAAGAAGAGEAGRAGLHGASGVRLSSAGNSGGVGRIGPRHLLAMGDVLSTHLDDARRQHIAEKTGKILTEFLQFYEDQYGVALFNSMRHEIEGTGLPQAQLLWRKVPLDERIVFSGNLFQHQEDSKKWRNRFSLVPHNYGLVLYENKAAYERQVPPRAVINSAGYKILTSVDQYLELIGNSLPGTTAKSGSAPILKCPTQFPLILWHPYARHYYFCMMTEAEQDKWQAVLQDCIRHCNNGIPEDSKVEGPAFTDAIRMYRQSKELYGTWEMLCGNEVQILSNLVMEELGPELKAELGPRLKGKPQERQRQWIQISDAVYHMVYEQAKARFEEVLSKVQQVQPAMQAVIRTDMDQIITSKEHLASKIRAFILPKAEVCVRNHVQPYIPSILEALMVPTSQGFTEVRDVFFKEVTDMNLNVINEGGIDKLGEYMEKLSRLAYHPLKMQSCYEKMESLRLDGLQQRFDVSSTSVFKQRAQIHMREQMDNAVYTFETLLHQELGKGPTKEELCKSIQRVLERVLKKYDYDSSSVRKRFFREALLQISIPFLLKKLAPTCKSELPRFQELIFEDFARFILVENTYEEVVLQTVMKDILQAVKEAAVQRKHNLYRDSMVMHNSDPNLHLLAEGAPIDWGEEYSNSGGGGSPSPSTPESATLSEKRRRAKQVVSVVQDEEVGLPFEASPESPPPASPDGVTEIRGLLAQGLRPESPPPAGPLLNGAPAGESPQPKAAPEASSPPASPLQHLLPGKAVDLGPPKPSDQETGEQVSSPSSHPALHTTTEDSAGVQTEF

SEQ ID NO: 827234 - protein, 955 aa, Homo sapiens
PRRPAGGTGPDRERSRSGSRSRAAGAAGAGEAGRAGLHGASGVRLSSAGNSGGVGRIGPRHLLAMGDVLSTHLDDARRQHIAEKTGKILTEFLQFYEDQYGVALFNSMRHEIEGTGLPQAQLLWRKVPLDERIVFSGNLFQHQEDSKKWRNRFSLVPHNYGLVLYENKAAYERQVPPRAVINSAGYKILTSVDQYLELIGNSLPGTTAKSGSAPILKCPTQFPLILWHPYARHYYFCMMTEAEQDKWQAVLQDCIRHCNNGIPEDSKVEGPAFTDAIRMYRQSKELYGTWEMLCGNEVQILSNLVMEELGPELKAELGPRLKGKPQERQRQWIQISDAVYHMVYEQAKARFEEVLSKVQQVQPAMQAVIRTDMDQIITSKEHLASKIRAFILPKAEVCVRNHVQPYIPSILEALMVPTSQGFTEVRDVFFKEVTDMNLNVINEGGIDKLGEYMEKLSRLAYHPLKMQSCYEKMESLRLDGLQQRFDVSSTSVFKQRAQIHMREQMDNAVYTFETLLHQELGKGPTKEELCKSIQRVLERVLKKYDYDSSSVRKRFFREALLQISIPFLLKKLAPTCKSELPRFQELIFEDFARFILVENTYEEVVLQTVMKDILQGGSTRRGGDCCQEDAGGAAEKWWQLRGSAKAQRKAQTCTWGLGEAHSSLCGLRSSLSLASLCFSFFSRPWLCWEGQRSDEMTCGQQPGPGDSITALLLSATRPGMSHIPTTDPQGGMRRVFFEQSPAQGRLWDQCCVLTFPCGPVAVKEAAVQRKHNLYRDSMVMHNSDPNLHLLAEGAPIDWGEEYSNSGGGGSPSPSTPESATLSEKRRRAKQVVSVVQDEEVGLPFEASPESPPPASPDGVTEIRGLLAQGLRPESPPPAGPLLNGAPAGESPQPKAAPEASSPPASPLQHLLPGKAVDLGPPKPSDQETGEQVSSPSSHPALHTTTEDSAGVQTEF

SEQ ID NO: 827235 - protein, 438 aa, Homo sapiens
HPSSSGCLIQWHALIQWHALIQWHVLIQWHALIQWPSSSSMPSSSVMPSSSGIPSSSGKEVTDMNLNVINEGGIDKLGEYMEKLSRLAYHPLKMQSCYEKMESLRLDGLQQRFDVSSTSVFKQRAQIHMREQMDNAVYTFETLLHQELGKGPTKEELCKSIQRVLERVLKKYDYDSSSVRKRFFREALLQISIPFLLKKLAPTCKSELPRFQELIFEDFARFILVENTYEEVVLQTVMKDILQAVKEAAVQRKHNLYRDSMVMHNSDPNLHLLAEGAPIDWGEEYSNSGGGGSPSPSTPESATLSEKRRRAKQVVSVVQDEEVGLPFEASPESPPPASPDGVTEIRGLLAQGLRPESPPPAGPLLNGAPAGESPQPKAAPEASSPPASPLQHLLPGKAVDLGPPKPSDQETGEQVSSPSSHPALHTTTEDSAGVQTEF

SEQ ID NO: 827236 - protein, 439 aa, Homo sapiens
RGCLSTALCHWTAPSMPSEPHASVLGPPGFTFVAMSTRWPSLVAGASPRAWTSRTQAKCVGGAAWPQGGPAQPPRPRPLQYMEKLSRLAYHPLKMQSCYEKMESLRLDGLQQRFDVSSTSVFKQRAQIHMREQMDNAVYTFETLLHQELGKGPTKEELCKSIQRVLERVLKKYDYDSSSVRKRFFREALLQISIPFLLKKLAPTCKSELPRFQELIFEDFARFILVENTYEEVVLQTVMKDILQAVKEAAVQRKHNLYRDSMVMHNSDPNLHLLAEGAPIDWGEEYSNSGGGGSPSPSTPESATLSEKRRRAKQVVSVVQDEEVGLPFEASPESPPPASPDGVTEIRGLLAQGLRPESPPPAGPLLNGAPAGESPQPKAAPEASSPPASPLQHLLPGKAVDLGPPKPSDQETGEQVSSPSSHPALHTTTEDSAGVQTEF

SEQ ID NO: 827237 - protein, 327 aa, Homo sapiens
EFLWIVPSPPKQRAQIHMREQMDNAVYTFETLLHQELGKGPTKEELCKSIQRVLERVLKKYDYDSSSVRKRFFREALLQISIPFLLKKLAPTCKSELPRFQELIFEDFARFILVENTYEEVVLQTVMKDILQAVKEAAVQRKHNLYRDSMVMHNSDPNLHLLAEGAPIDWGEEYSNSGGGGSPSPSTPESATLSEKRRRAKQVVSVVQDEEVGLPFEASPESPPPASPDGVTEIRGLLAQGLRPESPPPAGPLLNGAPAGESPQPKAAPEASSPPASPLQHLLPGKAVDLGPPKPSDQETGEQVSSPSSHPALHTTTEDSAGVQTEF

SEQ ID NO: 827238 - protein, 201 aa, Homo sapiens
MKDILQAVKEAAVQRKHNLYRDSMVMHNSDPNLHLLAEGAPIDWGEEYSNSGGGGSPSPSTPESATLSEKRRRAKQVVSVVQDEEVGLPFEASPESPPPASPDGVTEIRGLLAQGLRPESPPPAGPLLNGAPAGESPQPKAAPEASSPPASPLQHLLPGKAVDLGPPKPSDQETGEQVSSPSSHPALHTTTEDSAGVQTEF

SEQ ID NO: 827239 - protein, 810 aa, Homo sapiens; identical to SEQ ID NO: 827233

SEQ ID NO: 827240 - protein, 810 aa, Homo sapiens; identical to SEQ ID NO: 827233

SEQ ID NO: 827241 - protein, 106 aa, Homo sapiens [sequence omitted]

SEQ ID NO: 827242 - protein, 810 aa, Homo sapiens; identical to SEQ ID NO: 827233

SEQ ID NO: 827243 - protein, 810 aa, Homo sapiens; identical to SEQ ID NO: 827233

SEQ ID NO: 827244 - protein, 810 aa, Homo sapiens; identical to SEQ ID NO: 827233

SEQ ID NO: 827245 - protein, 810 aa, Homo sapiens; identical to SEQ ID NO: 827233

SEQ ID NO: 827246 - protein, 715 aa, Homo sapiens
PRRPAGGTGPDRERSRSGSRSRAAGAAGAGEAGRAGLHGASGVRLSSAGNSGGVGRIGPRHLLAMGDVLSTHLDDARRQHIAEKTGKILTEFLQFYEDQYGVALFNSMRHEIEGTGLPQAQLLWRKVPLDERIVFSGNLFQHQEDSKKWRNRFSLVPHNYGLVLYENKAAYERQVPPRAVINSAGYKILTSVDQYLELIGNSLPGTTAKSGSAPILKCPTQFPLILWHPYARHYYFCMMTEAEQDKWQAVLQDCIRHCNNGIPEDSKVEGPAFTDAIRMYRQSKELYGTWEMLCGNEVQILSNLVMEELGPELKAELGPRLKGKPQERQRQWIQISDAVYHMVYEQAKARFEEVLSKVQQVQPAMQAVIRTDMDQIITSKEHLASKIRAFILPKAEVCVRNHVQPYIPSILEALMVPTSQGFTEVRDVFFKEVTDMNLNVINEGGIDKLGEYMEKLSRLAYHPLKMQSCYEKMESLRLDGLQQRFDVSSTSVFKQRAQIHMREQMDNAVYTFETLLHQELGKGPTKEELCKSIQRVLERVLKKYDYDSSSVRKRFFREALLQISIPFLLKKLAPTCKSELPRFQELIFEDFARFILVENTYEEVVLQTVMKDILQAVKEAAVQRKHNLYRDSMVMHNSDPNLHLLAEGAPIDWGEEGLERIHGIVHLLPHVDLGSLLEHGRAGHIKSLLQPVQSQRLHLLIQLCIFRGCTTPGTE

SEQ ID NO: 827247 - protein, 645 aa, Homo sapiens
PRRPAGGTGPDRERSRSGSRSRAAGAAGAGEAGRAGLHGASGVRLSSAGNSGGVGRIGPRHLLAMGDVLSTHLDDARRQHIAEKTGKILTEFLQFYEDQYGVALFNSMRHEIEGTGLPQAQLLWRKVPLDERIVFSGNLFQHQEDSKKWRNRFSLVPHNYGLVLYENKAAYERQVPPRAVINSAGYKILTSVDQYLELIGNSLPGTTAKSGSAPILKCPTQFPLILWHPYARHYYFCMMTEAEQDKWQAVLQDCIRHCNNGIPEDSKVEGPAFTDAIRMYRQSKELYGTWEMLCGNEVQILSNLVMEELGPELKAELGPRLKGKPQERQRQWIQISDAVYHMVYEQAKARFEEVLSKVQQVQPAMQAVIRTDMDQIITSKEHLASKIRAFILPKAEVCVRNHVQPYIPSILEALMVPTSQGFTEVRDVFFKEVTDMNLNVINEGGIDKLGEYMEKLSRLAYHPLKMQSCYEKMESLRLDGLQQRFDVSSTSVFKQRAQIHMREQMDNAVYTFETLLHQELGKGPTKEELCKSIQRVLERVLKKYDYDSSSVRKRFFREALLQISIPFLLKKLAPTCKSELPRFQELIFEDFARFILVENTYEEVVLQTVMKDILQAVKEAAVQRKHNLYRDSMVMHNSDPTERKG

SEQ ID NO: 827248 - protein, 617 aa, Homo sapiens
PRRPAGGTGPDRERSRSGSRSRAAGAAGAGEAGRAGLHGASGVRLSSAGNSGGVGRIGPRHLLAMGDVLSTHLDDARRQHIAEKTGKILTEFLQFYEDQYGVALFNSMRHEIEGTGLPQAQLLWRKVPLDERIVFSGNLFQHQEDSKKWRNRFSLVPHNYGLVLYENKAAYERQVPPRAVINSAGYKILTSVDQYLELIGNSLPGTTAKSGSAPILKCPTQFPLILWHPYARHYYFCMMTEAEQDKWQAVLQDCIRHCNNGIPEDSKVEGPAFTDAIRMYRQSKELYGTWEMLCGNEVQILSNLVMEELGPELKAELGPRLKGKPQERQRQWIQISDAVYHMVYEQAKARFEEVLSKVQQVQPAMQAVIRTDMDQIITSKEHLASKIRAFILPKAEVCVRNHVQPYIPSILEALMVPTSQGFTEVRDVFFKEVTDMNLNVINEGGIDKLGEYMEKLSRLAYHPLKMQSCYEKMESLRLDGLQQRFDVSSTSVFKQRAQIHMREQMDNAVYTFETLLHQELGKGPTKEELCKSIQRVLERVLKKYDYDSSSVRKRFFREALLQISIPFLLKKLAPTCKSNHEEEMNALRGQVGGDVNVEMDAAPGVDLSRILNEMRDR

SEQ ID NO: 827249 - protein, 558 aa, Homo sapiens
PRRPAGGTGPDRERSRSGSRSRAAGAAGAGEAGRAGLHGASGVRLSSAGNSGGVGRIGPRHLLAMGDVLSTHLDDARRQHIAEKTGKILTEFLQFYEDQYGVALFNSMRHEIEGTGLPQAQLLWRKVPLDERIVFSGNLFQHQEDSKKWRNRFSLVPHNYGLVLYENKAAYERQVPPRAVINSAGYKILTSVDQYLELIGNSLPGTTAKSGSAPILKCPTQFPLILWHPYARHYYFCMMTEAEQDKWQAVLQDCIRHCNNGIPEDSKVEGPAFTDAIRMYRQSKELYGTWEMLCGNEVQILSNLVMEELGPELKAELGPRLKGKPQERQRQWIQISDAVYHMVYEQAKARFEEVLSKVQQVQPAMQAVIRTDMDQIITSKEHLASKIRAFILPKAEVCVRNHVQPYIPSILEALMVPTSQGFTEVRDVFFKEVTDMNLNVINEGGIDKLGEYMEKLSRLAYHPLKMQSCYEKMESLRLDGLQQRFDVSSTSVFKQRAQIHMREVDPRLRPPPHTLSTAFHRPPRPGGPFCSVPSCHSHACLARSLLLCLEHLCLCPPG

SEQ ID NO: 827250 - protein, 515 aa, Homo sapiens
PRRPAGGTGPDRERSRSGSRSRAAGAAGAGEAGRAGLHGASGVRLSSAGNSGGVGRIGPRHLLAMGDVLSTHLDDARRQHIAEKTGKILTEFLQFYEDQYGVALFNSMRHEIEGTGLPQAQLLWRKVPLDERIVFSGNLFQHQEDSKKWRNRFSLVPHNYGLVLYENKAAYERQVPPRAVINSAGYKILTSVDQYLELIGNSLPGTTAKSGSAPILKCPTQFPLILWHPYARHYYFCMMTEAEQDKWQAVLQDCIRHCNNGIPEDSKVEGPAFTDAIRMYRQSKELYGTWEMLCGNEVQILSNLVMEELGPELKAELGPRLKGKPQERQRQWIQISDAVYHMVYEQAKARFEEVLSKVQQVQPAMQAVIRTDMDQIITSKEHLASKIRAFILPKAEVCVRNHVQPYIPSILEALMVPTSQGFTEVRDVFFKEVTDMNLNVINEGGIDKLGEVRPAPPLGGGLLRVGLVCPRGPRLRDSGQPFPSKAVPVDGEGLLGTRGRGCEARAVGVLVGPAV

SEQ ID NO: 827251 - protein, 147 aa, Homo sapiens
PRRPAGGTGPDRERSRSGSRSRAAGAAGAGEAGRAGLHGASGVRLSSAGNSGGVGRIGPRHLLAMGDVLSTHLDDARRQHIAGQRSTSLWPWTPGVFSEFLEDGGMGLWFQQEKTGKILTEFLQFYEDQYGLVSGASLPSCPEDLRL

SEQ ID NO: 827252 - protein, 267 aa, Homo sapiens
RGTSPAGVGRVGGVGSSVDGSGGGGWEMAEYLASIFGTEKDKVNCSFYFKIGACRHGDRCSRLHNKPTFSQTIALLNIYRNPQNSSQSADGLRCAVSDVEMQEHYDEFFEEVFTEMEEKYGEVEEMNVCDNLGDHLVGNVYVKFRREEDAEKAVIDLNNRWFNGQPIHAELSPVTDFREACCRQYEMGECTRGGFCNFMHLKPISRELRRELYGRRRKKHRSRSRSRERRSRSRDRGRGGGGGGGGGGGGRERDRRRSRDRERSGRF

SEQ ID NO: 827253 - protein, 68 aa, Homo sapiens
SGLADRPTSGPPSRRLPEAASSRAESCLEHPGLLDVDTFVPTFGCECPVEQALVPASPVFSRLSNLGS

SEQ ID NO: 827254 - protein, 532 aa, Homo sapiens
MRSGVQDQSGQHGEDPISTKDTKISWAWWQMPAIPASREAEAENRLNPGGGGCSELRSCRCTPAWAQSETPSPKKKKKTVWSCCCPFFLYFGRHPRRECTGIKRRVIFFPLRATKFECFSHFLEFLKSKLFKLFFQILFLISLFSLNSIWSAPCSCKSIVLRAFPKWGLQLALTPEFLTHQPRADPSNPCGGAPLKYGPWQKRLSVLSTHCLDTVSSSRRWNWFAPFRNRSKLGIQYDGTNIFLYWEILNLDCEYLPNDNFQRRRYHEMSMIGKFRKLKFDFYSHPTIESLEFSHLWIIKMNTWTLVKIRKSKPKIGTSHSPFCFKAVKIEVPLDIHKPKLSTPLNQSPSVNGVTDSGVADPRGHSPLELALHWVAWGLCFLAQWCTFLCVDEIFLSTFPAKTLNAFHANTDLIVEISFPESDGSRIYLVTLGLKYLFFCLFVFFLFFKEIRSIGGGKLFLYALIKKFLLTTLPWDKSEWKYMTEYTVINSSALIVYLGTVYAFLTDIECCISFHCVFICSSQHFCFAYATN

SEQ ID NO: 827255 - protein, 532 aa, Homo sapiens; identical to SEQ ID NO: 827254

SEQ ID NO: 827256 - protein, 270 aa, Homo sapiens
KKTTNTKEHGEDEEVRLNGRGDGSGGGGWEMAEYLASIFGTEKDKVNCSFYFKIGACRHGDRCSRLHNKPTFSQTIALLNIYRNPQNSSQSADGLRCAVSDVEMQEHYDEFFEEVFTEMEEKYGEVEEMNVCDNLGDHLVGNVYVKFRREEDAEKAVIDLNNRWFNGQPIHAELSPVTDFREACCRQYEMGECTRGGFCNFMHLKPISRELRRELYGRRRKKHRSRSRSRERRSRSRDRGRGGGGGGGGGGGGRERDRRRSRDRERSGRF

SEQ ID NO: 827257 - protein, 532 aa, Homo sapiens; identical to SEQ ID NO: 827254

SEQ ID NO: 827258 - protein, 267 aa, Homo sapiens; identical to SEQ ID NO: 827252

SEQ ID NO: 827259 - protein, 532 aa, Homo sapiens; identical to SEQ ID NO: 827254

SEQ ID NO: 827260 - protein, 167 aa, Homo sapiens
MQEHYDEFFEEVFTEMEEKYGEVEEMNVCDNLGDHLVGNVYVKFRREEDAEKAVIDLNNRWFNGQPIHAELSPVTDFREACCRQYEMGECTRGGFCNFMHLKPISRELRRELYGRRRKKHRSRSRSRERRSRSRDRGRGGGGGGGGGGGGRERDRRRSRDRERSGRF

SEQ ID NO: 827261 - protein, 167 aa, Homo sapiens; identical to SEQ ID NO: 827260

SEQ ID NO: 827262 - protein, 237 aa, Homo sapiens
MSDLREKNKRLAICKQIVSLQLSNICTAASRIPLFIFFSPQTILIQNIYRNPQNSAQTADGSHCAVSDVEMQEHYDEFFEEVFTEMEEKYGEVEEMNVCDNLGDHLVGNVYVKFRREEDAEKAVIDLNNRWFNGQPIHAELSPVTDFREACCRQYEMGECTRGGFCNFMHLKPISRELRRELYGRRRKKHRSRSRSRERRSRSRDRGRGGGGGGGGGGGGRERDRRRSRDRERSGRF

SEQ ID NO: 827263 - protein, 532 aa, Homo sapiens; identical to SEQ ID NO: 827254

SEQ ID NO: 827264 - protein, 231 aa, Homo sapiens
APVSMTTCSRFIVQPRASVSMTTCSRLHNKPTFSQTIALLNIYRNPQNSSQSADGLRCAVSDVEMQEHYDEFFEEVFTEMEEKYGEVEEMNVCDNLGDHLVGNVYVKFRREEDAEKAVIDLNNRWFNGQPIHAELSPVTDFREACCRQYEMGECTRGGFCNFMHLKPISRELRRELYGRRRKKHRSRSRSRERRSRSRDRGRGGGGGGGGGGGGRERDRRRSRDRERSGRF

SEQ ID NO: 827265 - protein, 270 aa, Homo sapiens
KKTTNTKEHGEDEEVRLNGRGDGSGGGGWEMAEYLASIFGTEKDKVNCSFYFKIGACRHGDRCSRLHNKPTFSQTILIQNIYRNPQNSAQTADGSHCAVSDVEMQEHYDEFFEEVFTEMEEKYGEVEEMNVCDNLGDHLVGNVYVKFRREEDAEKAVIDLNNRWFNGQPIHAELSPVTDFREACCRQYEMGECTRGGFCNFMHLKPISRELRRELYGRRRKKHRSRSRSRERRSRSRDRGRGGGGGGGGGGGGRERDRRRSRDRERSGRF

SEQ ID NO: 827266 - protein, 257 aa, Homo sapiens
GGRLPRASAGSAASAAVSTAAAAAGGKWRSIWPPSSAPRKTKSTVHFISKLEHVVMETGALGCTINRRLASTESQLKHLPEAAGAVSDVEMQEHYDEFFEEVFTEMEEKYGEVEEMNVCDNLGDHLVGNVYVKFRREEDAEKAVIDLNNRWFNGQPIHAELSPVTDFREACCRQYEMGECTRGGFCNFMHLKPISRELRRELYGRRRKKHRSRSRSRERRSRSRDRGRGGGGGGGGGGGGRERDRRRSRDRERSGRF

SEQ ID NO: 827267 - protein, 532 aa, Homo sapiens; identical to SEQ ID NO: 827254

SEQ ID NO: 827268 - protein, 161 aa, Homo sapiens
MFFEEVFTEMEEKYGEVEEMNVCDNLGDHLVGNVYVKFRREEDAEKAVIDLNNRWFNGQPIHAELSPVTDFREACCRQYEMGECTRGGFCNFMHLKPISRELRRELYGRRRKKHRSRSRSRERRSRSRDRGRGGGGGGGGGGGGRERDRRRSRDRERSGRF

SEQ ID NO: 827269 - protein, 219 aa, Homo sapiens
RGTSPAGVGRVGGVGSSVDGSGGGGWEMAEYLASIFGTEKDKVNCSFYFKIGACRHGDRCSRLHNKPTFSQTIALLNIYRNPQNSSQSADGLRCAVSDVEMQEHYDEFFEEVFTEMEEKYGEVEEMNVCDNLGDHLVGNVYVKFRREEDAEKAVIDLNNRWFNGQPIHAELSPVTDFREACCRQYEMGECTRGGFCNFMHLKPISRELRRELYGRRRKK

SEQ ID NO: 827270 - protein, 219 aa, Homo sapiens
RGTSPAGVGRVGGVGSSVDGSGGGGWEMAEYLASIFGTEKDKVNCSFYFKIGACRHGDRCSRLHNKPTFSQTILIQNIYRNPQNSAQTADGSHCAVSDVEMQEHYDEFFEEVFTEMEEKYGEVEEMNVCDNLGDHLVGNVYVKFRREEDAEKAVIDLNNRWFNGQPIHAELSPVTDFREACCRQYEMGECTRGGFCNFMHLKPISRELRRELYGRRRKK

SEQ ID NO: 827271 - protein, 106 aa, Homo sapiens
KKTTNTKEHGEDEEVRLNGRGDGSGGGGWEMAEYLASIFGTEKDKVNCSFYFKIGACRHGDRCSRLHNKPTFSQVCLPFFHVNYKNFMFFSKTVNFYILSKSFFLS

SEQ ID NO: 827272 - protein, 278 aa, Homo sapiens
MSRVPSPPPPAEMSSGPVAESWCYTQIKVVKFSYMWTINNFSFCREEMGEVIKSSTFSSGANDKLKWCLRVNPKGLDEESKDYLSLYLLLVSCPKSEVRAKFKFSILNAKGEETKAMESQRAYRFVQGKDWGFKKFIRRDFLLDEANGLLPDDKLTLFCEVSVVQDSVNISGQNTMNMVKVPECRLADELGGLWENSRFTDCCLCVAGQEFQAHKAILAARPRFKCLLDLNGEAKDPCTRWPQFKKKALTGATSQVGLREISRNVTPRKNAQNAKYWG

SEQ ID NO: 827273 - protein, 374 aa, Homo sapiens
MSRVPSPPPPAEMSSGPVAESWCYTQIKVVKFSYMWTINNFSFCREEMGEVIKSSTFSSGANDKLKWCLRVNPKGLDEESKDYLSLYLLLVSCPKSEVRAKFKFSILNAKGEETKAMESQRAYRFVQGKDWGFKKFIRRDFLLDEANGLLPDDKLTLFCEVSVVQDSVNISGQNTMNMVKVPECRLADELGGLWENSRFTDCCLCVAGQEFQAHKAILAARSPVFSAMFEHEMEESKKNRVEINDVEPEVFKEMMCFIYTGKAPNLDKMADDLLAAADKYALERLKVMCEDALCSNLSVENAAEILILADLHSADQLKTQAVDFINYHASDVLETSGWKSMVVSHPHLVAEAYRSLASAQCPFLGPPRKRLKQS

SEQ ID NO: 827274 - protein, 374 aa, Homo sapiens; identical to SEQ ID NO: 827273

SEQ ID NO: 827275 - protein, 374 aa, Homo sapiens; identical to SEQ ID NO: 827273

SEQ ID NO: 827276 - protein, 374 aa, Homo sapiens; identical to SEQ ID NO: 827273

SEQ ID NO: 827277 - protein, 374 aa, Homo sapiens; identical to SEQ ID NO: 827273

SEQ ID NO: 827278 - protein, 374 aa, Homo sapiens; identical to SEQ ID NO: 827273

SEQ ID NO: 827279 - protein, 374 aa, Homo sapiens; identical to SEQ ID NO: 827273

SEQ ID NO: 827280 - protein, 374 aa, Homo sapiens; identical to SEQ ID NO: 827273

SEQ ID NO: 827281 - protein, 374 aa, Homo sapiens; identical to SEQ ID NO: 827273

SEQ ID NO: 827282 - protein, 374 aa, Homo sapiens; identical to SEQ ID NO: 827273

SEQ ID NO: 827283 - protein, 374 aa, Homo sapiens; identical to SEQ ID NO: 827273

SEQ ID NO: 827284 - protein, 374 aa, Homo sapiens; identical to SEQ ID NO: 827273

SEQ ID NO: 827285 - protein, 374 aa, Homo sapiens; identical to SEQ ID NO: 827273

SEQ ID NO: 827286 - protein, 448 aa, Homo sapiens
MSRVPSPPPPAEMSSGPVAESWCYTQIKVVKFSYMWTINNFSFCREEMGEVIKSSTFSSGANDKLKWCLRVNPKGLDEESKDYLSLYLLLVSCPKSEVRAKFKFSILNAKGEETKAMESQRAYRFVQGKDWGFKKFIRRDFLLDEANGLLPDDKLTLFCEILIKIEAYGLSCWSNCEIRRRNYRSLTLPLGLCLRLRDDLHLEGEKKSGSLRMFLSCLSHLTVRNSKSGELILKVSVVQDSVNISGQNTMNMVKVPECRLADELGGLWENSRFTDCCLCVAGQEFQAHKAILAARSPVFSAMFEHEMEESKKNRVEINDVEPEVFKEMMCFIYTGKAPNLDKMADDLLAAADKYALERLKVMCEDALCSNLSVENAAEILILADLHSADQLKTQAVDFINYHASDVLETSGWKSMVVSHPHLVAEAYRSLASAQCPFLGPPRKRLKQS

SEQ ID NO: 827287 - protein, 449 aa, Homo sapiens
MNLLVKQAGCSGRNPGRCGSKLSVKRRRTVTISCRRRISGMKSEEQIIIVDLLVRIERIVARNTYNMCDECQRELPESHPTIRTANVELARCRLESGSYYTIKVVKFSYMWTINNFSFCREEMGEVIKSSTFSSGANDKLKWCLRVNPKGLDEESKDYLSLYLLLVSCPKSEVRAKFKFSILNAKGEETKAMESQRAYRFVQGKDWGFKKFIRRDFLLDEANGLLPDDKLTLFCEVSVVQDSVNISGQNTMNMVKVPECRLADELGGLWENSRFTDCCLCVAGQEFQAHKAILAARSPVFSAMFEHEMEESKKNRVEINDVEPEVFKEMMCFIYTGKAPNLDKMADDLLAAADKYALERLKVMCEDALCSNLSVENAAEILILADLHSADQLKTQAVDFINYHASDVLETSGWKSMVVSHPHLVAEAYRSLASAQCPFLGPPRKRLKQS

SEQ ID NO: 827288 - protein, 147 aa, Homo sapiens
MFEHEMEESKKNRVEINDVEPEVFKEMMCFIYTGKAPNLDKMADDLLAAADKYALERLKVMCEDALCSNLSVENAAEILILADLHSADQLKTQAVDFINYHASDVLETSGWKSMVVSHPHLVAEAYRSLASAQCPFLGPPRKRLKQS

SEQ ID NO: 827289 - protein, 121 aa, Homo sapiens
MMCFIYTGKAPNLDKMADDLLAAADKYALERLKVMCEDALCSNLSVENAAEILILADLHSADQLKTQAVDFINYHASDVLETSGWKSMVVSHPHLVAEAYRSLASAQCPFLGPPRKRLKQS

SEQ ID NO: 827290 - protein, 281 aa, Homo sapiens
MSRVPSPPPPAEMSSGPVAESWCYTQIKVVKFSYMWTINNFSFCREEMGEVIKSSTFSSGANDKLKWCLRVNPKGLDEESKDYLSLYLLLVSCPKSEVRAKFKFSILNAKGEETKAMESQRAYRFVQGKDWGFKKFIRRDFLLDEANGLLPDDKLTLFCEVSVVQDSVNISGQNTMNMVKVPECRLADELGGLWENSRFTDCCLCVAGQEFQAHKAILAARSPVFSAMFEHEMEESKKNRVEINDVEPEVFKEMMCFIYTGKAPNLDKMADDLLAAADKVR

SEQ ID NO: 827291 - protein, 335 aa, Homo sapiens
MSRVPSPPPPAEMSSGPVAESWCYTQIKVVKFSYMWTINNFSFCREEMGEVIKSSTFSSGANDKLKWCLRVNPKGLDEESKDYLSLYLLLVSCPKSEVRAKFKFSILNAKGEETKAMESQRAYRFVQGKDWGFKKFIRRDFLLDEANGLLPDDKLTLFCEVSVVQDSVNISGQNTMNMVKVPECRLADELGGLWENSRFTDCCLCVAGQEFQAHKAILAARSPVFSAMFEHEMEESKKNRVEINDVEPHHRGGFHASHGFIVVHVGPVPFRPNLESLAPFPTGERELKSSLARPKINNYNINRTHKNKKRYIKTQRYIYIDKTQMTSGGTHSKYT

SEQ ID NO: 827292 - protein, 149 aa, Homo sapiens
MSRVPSPPPPAEMSSGPVAESWCYTQIKVVKFSYMWTINNFSFCREEMGEVIKSSTFSSGANDKLKWCLRVNPKGLDEESKDYLSLYLLLVSCPKSEVRAKFKFSILNAKGEETKAMESQRAYRFVQGKDWGFKKFIRRDFLLDEARVS

SEQ ID NO: 827293 - protein, 278 aa, Homo sapiens; identical to SEQ ID NO: 827272

SEQ ID NO: 827294 - protein, 916 aa, Homo sapiens
LGRAAWFYRRGQMDAGFFRGTSAEQDNRFSNKQKKLLKQLKFAECLEKKVDMSKVNLEVIKPWITKRVTEILGFEDDVVIEFIFNQLEVKNPDSKMMQINLTGFLNGKNAREFMGELWPLLLSAQENIAGIPSAFLELKKEEIKQRQIEQEKLASMKKQDEDKDKRDKEEKESSREKRERSRSPRRRKSRSPSPRRRSSPVRRERKRSHSRSPRHRTKSRSPSPAPEKKEKTPELPEPSVKVKEPSVQEATSTSDILKVPKPEPIPEPKEPSPEKNSKKEKEKEKTRPRSRSRSKSRSRTRSRSPSHTRPRRRHRSRSRSYSPRRRPSPRRRPSPRRRTPPRRMPPPPRHRRSRSPVRRRRRSSASLSGSSSSSSSSRSRSPPKKPPKRTSSPPRKTRRLSPSASPPRRRHRPSPPATPPPKTRHSPTPQQSNRTRKSRVSVSPGRTSGKVTKHKGTEKRESPSPAPKPRKVELSESEEDKGGKMAAADSVQQRRQYRRQNQQSSSDSGSSSSSEDERPKRSHVKNGEVGRRRRHSPSRSASPSPRKRQKETSPRGRRRRSPSPPPTRRRRSPSPAPPPRRRRTPTPPPRRRTPSPPPRRRSPSPRRYSPPIQRRYSPSPPPKRRTASPPPPPKRRASPSPPPKRRVSHSPPPKQRSSPVTKRRSPSLSSKHRKGSSPSRSTREARSPQPNKRHSPSPRPRAPQTSSSPPPVRRGASSSPQRRQSPSPSTRPIRRVSRTPEPKKIKKAASPSPQSVRRVSSSRSVSGSPEPAAKKPPAPPSPVQSQSPSTNWSPAVPVKKAKSPTPSPSPPRNSDQEGGGKKKKKKKDKKHKKDKKHKKHKKHKKEKAVAAAAAAAVTPAAIAAATTTLAQEEPVAAPEPKKETESEAEDNLDDLEKHLREKALRSMRKAQVSPQS

SEQ ID NO: 827295 - protein, 248 aa, Homo sapiens
MDAGFFRGTSAEQDNRFSNKQKKLLKQLKFAECLEKKVDMSKVNLEVIKPWITKRVTEILGFEDDVVIEFIFNQLEVKNPDSKMMQINLTGFLNGKNAREFMGELWPLLLSAQENIAGIPSAFLELKKEEIKQRQIEQEKLASMKKQDEDKDKRDKEEKESSENLAECLEKNRWTLSHKLHSGGSLKPGLTKKKYGKLLGLKMTVATRNYIQPVEVKNPIPNGAITDGFDGHMSAIWGMAPRYSRKTG

SEQ ID NO: 827296 - protein, 168 aa, Homo sapiens
MLNVFSFLSRAASPSPQSVRRVSSSRSVSGSPEPAAKKPPAPPSPVQSQSPSTNWSPAVPVKKAKSPTPSPSPPRNSDQEGGGKKKKKKKDKKHKKDKKHKKHKKHKKEKAVAAAAAAAVTPAAIAAATTTLAQEEPVAAPEPKKEVERKRRKRRTRNTKRIRSTRST

SEQ ID NO: 827297 - protein, 918 aa, Homo sapiens
MDAGFFRGTSAEQDNRFSNKQKKLLKQLKFAECLEKKVDMSKVNLEVIKPWITKRVTEILGFEDDVVIEFIFNQLEVKNPDSKMMQINLTGFLNGKNAREFMGELWPLLLSAQENIAGIPSAFLELKKEEIKQRQIEQEKLASMKKQDEDKDKRDKEEKESSREKRERSRSPRRRKSRSPSPRRRSSPVRRERKRSHSRSPRHRTKSRSPSPAPEKKEKTPELPEPSVKVKEPSVQEATSTSDILKVPKPEPIPEPKEPSPEKNSKKEKEKEKTRPRSRSRSKSRSRTRSRSPSHTRPRRRHRSRSRSYSPRRRPSPRRRPSPRRRTPPRRMPPPPRHRRSRSPVRRRRRSSASLSGSSSSSSSSRSRSPPKKPPKRTSSPPRKTRRLSPSASPPRRRHRPSPPATPPPKTRHSPTPQQSNRTRKSRVSVSPGRTSGKVTKHKGTEKRESPSPAPKPRKVELSESEEDKGGKMAAADSVQQRRQYRRQNQQSSSDSGSSSSSEDERPKRSHVKNGEVGRRRRHSPSRSASPSPRKRQKETSPRMQMGKRWQSPVTKSGRRRRSPSPPPTRRRRSPSPAPPPRRRRTPTPPPRRRTPSPPPRRRSPSPRRYSPPIQRRYSPSPPPKRRTASPPPPPKRRASPSPPPKRRVSHSPPPKQRSSPVTKRRSPSLSSKHRKGSSPSRSTREARSPQPNKRHSPSPRPRAPQTSSSPPPVRRGASSSPQRRQSPSPSTRPIRRVSRTPEPKKIKKAASPSPQSVRRVSSSRSVSGSPEPAAKKPPAPPSPVQSQSPSTNWSPAVPVKKAKSPTPSPSPPRNSDQEGGGKKKKKKKDKKHKKDKKHKKHKKHKKEKAVAAAAAAAVTPAAIAAATTTLAQEEPVAAPEPKKETESEAEDNLDDLEKHLREKALRSMRKAQVSPQS

SEQ ID NO: 827298 - protein, 693 aa, Homo sapiens
MDAGFFRGTSAEQDNRFSNKQKKLLKQLKFAECLEKKVDMSKVNLEVIKPWITKRVTEILGFEDDVVIEFIFNQLEVKNPDSKMMQINLTGFLNGKNAREFMGELWPLLLSAQENIAGIPSAFLELKKEEIKQRQIEQEKLASMKKQDEDKDKRDKEEKESSREKRERSRSPRRRKSRSPSPRRRSSPVRRERKRSHSRSPRHRTKSRSPSPAPEKKEKTPELPEPSVKVKEPSVQEATSTSDILKVPKPEPIPEPKEPSPEKNSKKEKEKEKTRPRSRSRSKSRSRTRSRSPSHTRPRRRHRSRSRSYSPRRRPSPRRRPSPRRRTPPRRMPPPPRHRRSRSPVRRRRRSSASLSGSSSSSSSSRSRSPPKKPPKRTSSPPRKTRRLSPSASPPRRRHRPSPPATPPPKTRHSPTPQQSNRTRKSRVSVSPGRTSGKVTKHKGTEKRESPSPAPKPRKVELSESEEDKGGKMAAADSVQQRRQYRRQNQQSSSDSGSSSSSEDERPKRSHVKNGEVGDGLLLPPLLLDGAGLPHHHHDEGLLLLPHVGAHLLLEDTLLQYRGDTLLLHLQREERLHLLPLLNEEHHHLHHQSGGSPILHLPNKEAPQSPRDVHLHYHPSIGKGLPQAALPGRPDHHNQTNGIRPHHGLELLRPPQVLHPFEEERRHHPKEGSPRLQVLGPLGESPGLRNLKR

SEQ ID NO: 827299 - protein, 835 aa, Homo sapiens
MMQINLTGFLNGKNAREFMGELWPLLLSAQENIAGIPSAFLELKKEEIKQRQIEQEKLASMKKQDEDKDKRDKEEKESSREKRERSRSPRRRKSRSPSPRRRSSPVRRERKRSHSRSPRHRTKSRSPSPAPEKKEKTPELPEPSVKVKEPSVQEATSTSDILKVPKPEPIPEPKEPSPEKNSKKEKEKEKTRPRSRSRSKSRSRTRSRSPSHTRPRRRHRSRSRSYSPRRRPSPRRRPSPRRRTPPRRMPPPPRHRRSRSPVRRRRRSSASLSGSSSSSSSSRSRSPPKKPPKRTSSPPRKTRRLSPSASPPRRRHRPSPPATPPPKTRHSPTPQQSNRTRKSRVSVSPGRTSGKVTKHKGTEKRESPSPAPKPRKVELSESEEDKGGKMAAADSVQQRRQYRRQNQQSSSDSGSSSSSEDERPKRSHVKNGEVGRRRRHSPSRSASPSPRKRQKETSPRMQMGKRWQSPVTKSGRRRRSPSPPPTRRRRSPSPAPPPRRRRTPTPPPRRRTPSPPPRRRSPSPRRYSPPIQRRYSPSPPPKRRTASPPPPPKRRASPSPPPKRRVSHSPPPKQRSSPVTKRRSPSLSSKHRKGSSPSRSTREARSPQPNKRHSPSPRPRAPQTSSSPPPVRRGASSSPQRRQSPSPSTRPIRRVSRTPEPKKIKKAASPSPQSVRRVSSSRSVSGSPEPAAKKPPAPPSPVQSQSPSTNWSPAVPVKKAKSPTPSPSPPRNSDQEGGGKKKKKKKDKKHKKDKKHKKHKKHKKEKAVAAAAAAAVTPAAIAAATTTLAQEEPVAAPEPKKETESEAEDNLDDLEKHLREKALRSMRKAQVSPQS

SEQ ID NO: 827300 - protein, 897 aa, Homo sapiens
MDAGFFRGTSAEQDNRFSNKQKKLLKQLKFAECLEKKVDMSKVNLEVIKPWITKRVTEILGFEDDVVIEFIFNQLEVKNPDSKMMQINLTGFLNGKNAREFMGELWPLLLSAQENIAGIPSAFLELKKEEIKQRQIEQEKLASMKKQDEDKDKRDKEEKESSREKRERSRSPRRRKSRSPSPRRRSSPVRRERKRSHSRSPRHRTKSRSPSPAPEKKEKTPELPEPSVKVKEPSVQEATSTSDILKVPKPEPIPEPKEPSPEKNSKKEKEKEKTRPRSRSRSKSRSRTRSRSPSHTRPRRRHRSRSRSYSPRRRPSPRRRPSPRRRTPPRRMPPPPRHRRSRSPVRRRRRSSASLSGSSSSSSSSRSRSPPKKPPKRTSSPPRKTRRLSPSASPPRRRHRPSPPATPPPKTRHSPTPQQSNRTRKSRVSVSPGRTSGKVTKHKGTEKRESPSPAPKPRKVELSESEEDKGGKMAAADSVQQRRQYRRQNQQSSSDSGSSSSSEDERPKRSHVKNGEVGRRRRHSPSRSASPSPRKRQKETSPRMQMGKRWQSPVTKSGRRRRSPSPPPTRRRRSPSPAPPPRRRRTPTPPPRRRTPSPPPRRRSPSPRRYSPPIQRRYSPSPPPKRRTASPPPPPKRRASPSPPPKRRVSHSPPPKQRSSPVTKRRSPSLSSKHRKGSSPSRSTREARSPQPNKRHSPSPRPRAPQTSSSPPPVRRGASSSPQRRQSPSPSTRPIRRVSRTPEPKKIKKAASPSPQSVRRVSSSRSVSGSPEPAAKKPPAPPSPVQSQSPSTNWSPAVPVKKAKSPTPSPSPPRNSDQEGGGKKKKKKKDKKHKKDKKHPAAIAAATTTLAQEEPVAAPEPKKETESEAEDNLDDLEKHLREKALRSMRKAQVSPQS

SEQ ID NO: 827301 - protein, 894 aa, Homo sapiens
RHEVCPKPVFAFHHANFPQYVMDVLMDQHFTVTEILGFEDDVVIEFIFNQLEVKNPDSKMMQINLTGFLNGKNAREFMGELWPLLLSAQENIAGIPSAFLELKKEEIKQRQIEQEKLASMKKQDEDKDKRDKEEKESSREKRERSRSPRRRKSRSPSPRRRSSPVRRERKRSHSRSPRHRTKSRSPSPAPEKKEKTPELPEPSVKVKEPSVQEATSTSDILKVPKPEPIPEPKEPSPEKNSKKEKEKEKTRPRSRSRSKSRSRTRSRSPSHTRPRRRHRSRSRSYSPRRRPSPRRRPSPRRRTPPRRMPPPPRHRRSRSPVRRRRRSSASLSGSSSSSSSSRSRSPPKKPPKRTSSPPRKTRRLSPSASPPRRRHRPSPPATPPPKTRHSPTPQQSNRTRKSRVSVSPGRTSGKVTKHKGTEKRESPSPAPKPRKVELSESEEDKGGKMAAADSVQQRRQYRRQNQQSSSDSGSSSSSEDERPKRSHVKNGEVGRRRRHSPSRSASPSPRKRQKETSPRMQMGKRWQSPVTKSGRRRRSPSPPPTRRRRSPSPAPPPRRRRTPTPPPRRRTPSPPPRRRSPSPRRYSPPIQRRYSPSPPPKRRTASPPPPPKRRASPSPPPKRRVSHSPPPKQRSSPVTKRRSPSLSSKHRKGSSPSRSTREARSPQPNKRHSPSPRPRAPQTSSSPPPVRRGASSSPQRRQSPSPSTRPIRRVSRTPEPKKIKKAASPSPQSVRRVSSSRSVSGSPEPAAKKPPAPPSPVQSQSPSTNWSPAVPVKKAKSPTPSPSPPRNSDQEGGGKKKKKKKDKKHKKDKKHKKHKKHKKEKAVAAAAAAAVTPAAIAAATTTLAQEEPVAAPEPKKETESEAEDNLDDLEKHLREKALRSMRKAQVSPQS

SEQ ID NO: 827302 - protein, 935 aa, Homo sapiens
RTRGSTHASGSRSRGGKMDAGFFRGTSAEQDNRFSNKQKKLLKQLKFAECLEKKVDMSKVNLEVIKPWITKRVTEILGFEDDVVIEFIFNQLEVKNPDSKMMQINLTGFLNGKNAREFMGELWPLLLSAQENIAGIPSAFLELKKEEIKQRQIEQEKLASMKKQDEDKDKRDKEEKESSREKRERSRSPRRRKSRSPSPRRRSSPVRRERKRSHSRSPRHRTKSRSPSPAPEKKEKTPELPEPSVKVKEPSVQEATSTSDILKVPKPEPIPEPKEPSPEKNSKKEKEKEKTRPRSRSRSKSRSRTRSRSPSHTRPRRRHRSRSRSYSPRRRPSPRRRPSPRRRTPPRRMPPPPRHRRSRSPVRRRRRSSASLSGSSSSSSSSRSRSPPKKPPKRTSSPPRKTRRLSPSASPPRRRHRPSPPATPPPKTRHSPTPQQSNRTRKSRVSVSPGRTSGKVTKHKGTEKRESPSPAPKPRKVELSESEEDKGGKMAAADSVQQRRQYRRQNQQSSSDSGSSSSSEDERPKRSHVKNGEVGRRRRHSPSRSASPSPRKRQKETSPRMQMGKRWQSPVTKSGRRRRSPSPPPTRRRRSPSPAPPPRRRRTPTPPPRRRTPSPPPRRRSPSPRRYSPPIQRRYSPSPPPKRRTASPPPPPKRRASPSPPPKRRVSHSPPPKQRSSPVTKRRSPSLSSKHRKGSSPSRSTREARSPQPNKRHSPSPRPRAPQTSSSPPPVRRGASSSPQRRQSPSPSTRPIRRVSRTPEPKKIKKAASPSPQSVRRVSSSRSVSGSPEPAAKKPPAPPSPVQSQSPSTNWSPAVPVKKAKSPTPSPSPPRNSDQEGGGKKKKKKKDKKHKKDKKHKKHKKHKKEKAVAAAAAAAVTPAAIAAATTTLAQEEPVAAPEPKKETESEAEDNLDDLEKHLREKALRSMRKAQVSPQS

SEQ ID NO: 827303 - protein, 835 aa, Homo sapiens; identical to SEQ ID NO: 827299

SEQ ID NO: 827304 - protein, 932 aa, Homo sapiens
KNPASILPPRSEIAPYPRVHRGTSAEQDNRFSNKQKKLLKQLKFAECLEKKVDMSKVNLEVIKPWITKRVTEILGFEDDVVIEFIFNQLEVKNPDSKMMQINLTGFLNGKNAREFMGELWPLLLSAQENIAGIPSAFLELKKEEIKQRQIEQEKLASMKKQDEDKDKRDKEEKESSREKRERSRSPRRRKSRSPSPRRRSSPVRRERKRSHSRSPRHRTKSRSPSPAPEKKEKTPELPEPSVKVKEPSVQEATSTSDILKVPKPEPIPEPKEPSPEKNSKKEKEKEKTRPRSRSRSKSRSRTRSRSPSHTRPRRRHRSRSRSYSPRRRPSPRRRPSPRRRTPPRRMPPPPRHRRSRSPVRRRRRSSASLSGSSSSSSSSRSRSPPKKPPKRTSSPPRKTRRLSPSASPPRRRHRPSPPATPPPKTRHSPTPQQSNRTRKSRVSVSPGRTSGKVTKHKGTEKRESPSPAPKPRKVELSESEEDKGGKMAAADSVQQRRQYRRQNQQSSSDSGSSSSSEDERPKRSHVKNGEVGRRRRHSPSRSASPSPRKRQKETSPRMQMGKRWQSPVTKSGRRRRSPSPPPTRRRRSPSPAPPPRRRRTPTPPPRRRTPSPPPRRRSPSPRRYSPPIQRRYSPSPPPKRRTASPPPPPKRRASPSPPPKRRVSHSPPPKQRSSPVTKRRSPSLSSKHRKGSSPSRSTREARSPQPNKRHSPSPRPRAPQTSSSPPPVRRGASSSPQRRQSPSPSTRPIRRVSRTPEPKKIKKAASPSPQSVRRVSSSRSVSGSPEPAAKKPPAPPSPVQSQSPSTNWSPAVPVKKAKSPTPSPSPPRNSDQEGGGKKKKKKKDKKHKKDKKHKKHKKHKKEKAVAAAAAAAVTPAAIAAATTTLAQEEPVAAPEPKKETESEAEDNLDDLEKHLREKALRSMRKAQVSPQS

SEQ ID NO: 827305 - protein, 918 aa, Homo sapiens; identical to SEQ ID NO: 827297

SEQ ID NO: 827306 - protein, 775 aa, Homo sapiens
MKKQDEDKDKRDKEEKESSREKRERSRSPRRRKSRSPSPRRRSSPVRRERKRSHSRSPRHRTKSRSPSPAPEKKEKTPELPEPSVKVKEPSVQEATSTSDILKVPKPEPIPEPKEPSPEKNSKKEKEKEKTRPRSRSRSKSRSRTRSRSPSHTRPRRRHRSRSRSYSPRRRPSPRRRPSPRRRTPPRRMPPPPRHRRSRSPVRRRRRSSASLSGSSSSSSSSRSRSPPKKPPKRTSSPPRKTRRLSPSASPPRRRHRPSPPATPPPKTRHSPTPQQSNRTRKSRVSVSPGRTSGKVTKHKGTEKRESPSPAPKPRKVELSESEEDKGGKMAAADSVQQRRQYRRQNQQSSSDSGSSSSSEDERPKRSHVKNGEVGRRRRHSPSRSASPSPRKRQKETSPRMQMGKRWQSPVTKSGRRRRSPSPPPTRRRRSPSPAPPPRRRRTPTPPPRRRTPSPPPRRRSPSPRRYSPPIQRRYSPSPPPKRRTASPPPPPKRRASPSPPPKRRVSHSPPPKQRSSPVTKRRSPSLSSKHRKGSSPSRSTREARSPQPNKRHSPSPRPRAPQTSSSPPPVRRGASSSPQRRQSPSPSTRPIRRVSRTPEPKKIKKAASPSPQSVRRVSSSRSVSGSPEPAAKKPPAPPSPVQSQSPSTNWSPAVPVKKAKSPTPSPSPPRNSDQEGGGKKKKKKKDKKHKKDKKHKKHKKHKKEKAVAAAAAAAVTPAAIAAATTTLAQEEPVAAPEPKKETESEAEDNLDDLEKHLREKALRSMRKAQVSPQS

SEQ ID NO: 827307 - protein, 888 aa, Homo sapiens
MDAGFFRGTSAEQDNRFSNKQKKLLKQLKFAECLEKKVDMSKVNLEVIKPWITKRVTEILGFEDDVVIEFIFNQLEVKNPDSKMMQINLTGFLNGKNAREFMGELWPLLLSAQENIAGIPSAFLELKKEEIKQRQIEQEKLASMKKQDEDKDKRDKEEKESSREKRERSRSPRRTKSRSPSPAPEKKEKTPELPEPSVKVKEPSVQEATSTSDILKVPKPEPIPEPKEPSPEKNSKKEKEKEKTRPRSRSRSKSRSRTRSRSPSHTRPRRRHRSRSRSYSPRRRPSPRRRPSPRRRTPPRRMPPPPRHRRSRSPVRRRRRSSASLSGSSSSSSSSRSRSPPKKPPKRTSSPPRKTRRLSPSASPPRRRHRPSPPATPPPKTRHSPTPQQSNRTRKSRVSVSPGRTSGKVTKHKGTEKRESPSPAPKPRKVELSESEEDKGGKMAAADSVQQRRQYRRQNQQSSSDSGSSSSSEDERPKRSHVKNGEVGRRRRHSPSRSASPSPRKRQKETSPRMQMGKRWQSPVTKSGRRRRSPSPPPTRRRRSPSPAPPPRRRRTPTPPPRRRTPSPPPRRRSPSPRRYSPPIQRRYSPSPPPKRRTASPPPPPKRRASPSPPPKRRVSHSPPPKQRSSPVTKRRSPSLSSKHRKGSSPSRSTREARSPQPNKRHSPSPRPRAPQTSSSPPPVRRGASSSPQRRQSPSPSTRPIRRVSRTPEPKKIKKAASPSPQSVRRVSSSRSVSGSPEPAAKKPPAPPSPVQSQSPSTNWSPAVPVKKAKSPTPSPSPPRNSDQEGGGKKKKKKKDKKHKKDKKHKKHKKHKKEKAVAAAAAAAVTPAAIAAATTTLAQEEPVAAPEPKKETESEAEDNLDDLEKHLREKALRSMRKAQVSPQS

SEQ ID NO: 827308 - protein, 805 aa, Homo sapiens
MMQINLTGFLNGKNAREFMGELWPLLLSAQENIAGIPSAFLELKKEEIKQRQIEQEKLASMKKQDEDKDKRDKEEKESSREKRERSRSPRRTKSRSPSPAPEKKEKTPELPEPSVKVKEPSVQEATSTSDILKVPKPEPIPEPKEPSPEKNSKKEKEKEKTRPRSRSRSKSRSRTRSRSPSHTRPRRRHRSRSRSYSPRRRPSPRRRPSPRRRTPPRRMPPPPRHRRSRSPVRRRRRSSASLSGSSSSSSSSRSRSPPKKPPKRTSSPPRKTRRLSPSASPPRRRHRPSPPATPPPKTRHSPTPQQSNRTRKSRVSVSPGRTSGKVTKHKGTEKRESPSPAPKPRKVELSESEEDKGGKMAAADSVQQRRQYRRQNQQSSSDSGSSSSSEDERPKRSHVKNGEVGRRRRHSPSRSASPSPRKRQKETSPRMQMGKRWQSPVTKSGRRRRSPSPPPTRRRRSPSPAPPPRRRRTPTPPPRRRTPSPPPRRRSPSPRRYSPPIQRRYSPSPPPKRRTASPPPPPKRRASPSPPPKRRVSHSPPPKQRSSPVTKRRSPSLSSKHRKGSSPSRSTREARSPQPNKRHSPSPRPRAPQTSSSPPPVRRGASSSPQRRQSPSPSTRPIRRVSRTPEPKKIKKAASPSPQSVRRVSSSRSVSGSPEPAAKKPPAPPSPVQSQSPSTNWSPAVPVKKAKSPTPSPSPPRNSDQEGGGKKKKKKKDKKHKKDKKHKKHKKHKKEKAVAAAAAAAVTPAAIAAATTTLAQEEPVAAPEPKKETESEAEDNLDDLEKHLREKALRSMRKAQVSPQS

SEQ ID NO: 827309 - protein, 776 aa, Homo sapiens
MLENLWENCGPCYKEEKESSREKRERSRSPRRRKSRSPSPRRRSSPVRRERKRSHSRSPRHRTKSRSPSPAPEKKEKTPELPEPSVKVKEPSVQEATSTSDILKVPKPEPIPEPKEPSPEKNSKKEKEKEKTRPRSRSRSKSRSRTRSRSPSHTRPRRRHRSRSRSYSPRRRPSPRRRPSPRRRTPPRRMPPPPRHRRSRSPVRRRRRSSASLSGSSSSSSSSRSRSPPKKPPKRTSSPPRKTRRLSPSASPPRRRHRPSPPATPPPKTRHSPTPQQSNRTRKSRVSVSPGRTSGKVTKHKGTEKRESPSPAPKPRKVELSESEEDKGGKMAAADSVQQRRQYRRQNQQSSSDSGSSSSSEDERPKRSHVKNGEVGRRRRHSPSRSASPSPRKRQKETSPRMQMGKRWQSPVTKSGRRRRSPSPPPTRRRRSPSPAPPPRRRRTPTPPPRRRTPSPPPRRRSPSPRRYSPPIQRRYSPSPPPKRRTASPPPPPKRRASPSPPPKRRVSHSPPPKQRSSPVTKRRSPSLSSKHRKGSSPSRSTREARSPQPNKRHSPSPRPRAPQTSSSPPPVRRGASSSPQRRQSPSPSTRPIRRVSRTPEPKKIKKAASPSPQSVRRVSSSRSVSGSPEPAAKKPPAPPSPVQSQSPSTNWSPAVPVKKAKSPTPSPSPPRNSDQEGGGKKKKKKKDKKHKKDKKHKKHKKHKKEKAVAAAAAAAVTPAAIAAATTTLAQEEPVAAPEPKKETESEAEDNLDDLEKHLREKALRSMRKAQVSPQS

SEQ ID NO: 827310 - protein, 587 aa, Homo sapiens
MPPPPRHRRSRSPVRRRRRSSASLSGSSSSSSSSRSRSPPKKPPKRTSSPPRKTRRLSPSASPPRRRHRPSPPATPPPKTRHSPTPQQSNRTRKSRVSVSPGRTSGKVTKHKGTEKRESPSPAPKPRKVELSESEEDKGGKMAAADSVQQRRQYRRQNQQSSSDSGSSSSSEDERPKRSHVKNGEVGRRRRHSPSRSASPSPRKRQKETSPRMQMGKRWQSPVTKSGRRRRSPSPPPTRRRRSPSPAPPPRRRRTPTPPPRRRTPSPPPRRRSPSPRRYSPPIQRRYSPSPPPKRRTASPPPPPKRRASPSPPPKRRVSHSPPPKQRSSPVTKRRSPSLSSKHRKGSSPSRSTREARSPQPNKRHSPSPRPRAPQTSSSPPPVRRGASSSPQRRQSPSPSTRPIRRVSRTPEPKKIKKAASPSPQSVRRVSSSRSVSGSPEPAAKKPPAPPSPVQSQSPSTNWSPAVPVKKAKSPTPSPSPPRNSDQEGGGKKKKKKKDKKHKKDKKHKKHKKHKKEKAVAAAAAAAVTPAAIAAATTTLAQEEPVAAPEPKKETESEAEDNLDDLEKHLREKALRSMRKAQVSPQS

SEQ ID NO: 827311 - protein, 641 aa, Homo sapiens
MDAGFFRGTSAEQDNRFSNKQKKLLKQLKFAECLEKKVDMSKVNLEVIKPWITKRVTEILGFEDDVVIEFIFNQLEVKNPDSKMMQINLTGFLNGKNAREFMGELWPLLLSAQENIAGIPSAFLELKKEEIKQRQIEQEKLASMKKQDEDKDKRDKEEKESSREKRERSRSPRRRKSRSPSPRRRSSPVRRERKRSHSRSPRHRTKSRSPSPAPEKKEKTPELPEPSVKVKEPSVQEATSTSDILKVPKPEPIPEPKEPSPEKNSKKEKEKEKTRPRSRSRSKSRSRTRSRSPSHTRPRRRHRSRSRSYSPRRRPSPRRRPSPRRRTPPRRMPPPPRHRRSRSPVRRRRRSSASLSGSSSSSSSSRSRSPPKKPPKRTSSPPRKTRRLSPSASPPRRRHRPSPPATPPPKTRHSPTPQQSNRTRKSRVSVSPGRTSGKVTKHKGTEKRESPSPAPKPRKVELSESEEDKGGKMAAADSVQQRRQYRRQNQQSSSDSGSSSSSEDERPKRSHVKNGEVGRRRRHSPSRSASPSPRKRQKETSPRMQMGKRWQSPVTKSGRRRRSPSPPPTRRRRSPSPAPPPRRRRTPTPPPRRRTPSPPPRRRSPSPRRYSPPIQRRYSPSPPPKRRTASPPPPPKRRASP

SEQ ID NO: 827312 - protein, 587 aa, Homo sapiens; identical to SEQ ID NO: 827310

SEQ ID NO: 827313 - protein, 301 aa, Homo sapiens
MPRKKAPKRRTASPPPPPKRRASPSPPPKRRVSHSPPPKQRSSPVTKRRSPSLSSKHRKGSSPSRSTREARSPQPNKRHSPSPRPRAPQTSSSPPPVRRGASSSPQRRQSPSPSTRPIRRVSRTPEPKKIKKAASPSPQSVRRVSSSRSVSGSPEPAAKKPPAPPSPVQSQSPSTNWSPAVPVKKAKSPTPSPSPPRNSDQEGGGKKKKKKKDKKHKKDKKHKKHKKHKKEKAVAAAAAAAVTPAAIAAATTTLAQEEPVAAPEPKKETESEAEDNLDDLEKHLREKALRSMRKAQVSPQS

SEQ ID NO: 827314 - protein, 907 aa, Homo sapiens
MDAGFFRGTSAEQDNRFSNKQKKLLKQLKFAECLEKKVDMSKVNLEVIKPWITKRVTEILGFEDDVVIEFIFNQLEVKNPDSKMMQINLTGFLNGKNAREFMGELWPLLLSAQENIAGIPSAFLELKKEEIKQRQIEQEKLASMKKQDEDKDKRDKEEKESSREKRERSRSPRRRKSRSPSPRRRSSPVRRERKRSHSRSPRHRTKSRSPSPAPEKKEKTPELPEPSVKVKEPSVQEATSTSDILKVPKPEPIPEPKEPSPEKNSKKEKEKEKTRPRSRSRSKSRSRTRSRSPSHTRPRRRHRSRSRSYSPRRRPSPRRRPSPRRRTPPRRMPPPPRHRRSRSPVRRRRRSSASLSGSSSSSSSSRSRSPPKKPPKRTSSPPRKTRRLSPSASPPRRRHRPSPPATPPPKTRHSPTPQQSNRTRKSRVSVSPGRTSGKVTKHKGTEKRESPSPAPKPRKVELSESEEDKGGKMAAADSVQQRRQYRRQNQQSSSDSGSSSSSEDERPKRSHVKNGEVGRRRRHSPSRSASPSPRKRQKETSPRMQMGKRWQSPVTKSGRRRRSPSPPPTRRRRSPSPAPPPRRRRTPTPPPRRRTPSPPPRRRSPSPRRYSPPIQRRYSPSPPPKRRTASPPPPPKRRASPSPPPKRRVSHSPPPKQRSSPVTKRRSPSLSSKHRKGSSPSRSTREARSPQPNKRHSPSPRPRAPQTSSSPPPVRRGASSSPQRRQSPSPSTRPIRRVSRTPEPKKIKKAASPSPQSVRRVSSSRSVSGSPEPAAKKPPAPPSPVQSQSPSTNWSPAVPVKKAKSPTPSPSPPRNSDQEGGGKKKKKKKDKKHKKDKKHKKHKKHKKEKAVAAAAAAAVTPAAIAAATTTLAQEEPVAAPEPKKEVERKRRKRRTRNTKRIRSTRST

SEQ ID NO: 827315 - protein, 891 aa, Homo sapiens
MDAGFFRGTSAEQDNRFSNKQKKLLKQLKFAECLEKKVDMSKVNLEVIKPWITKRVTEILGFEDDVVIEFIFNQLEVKNPDSKMMQINLTGFLNGKNAREFMGELWPLLLSAQENIAGIPSAFLELKKEEIKQRQIEQEKLASMKKQDEDKDKRDKEEKESSREKRERSRSPRRRKSRSPSPRRRSSPVRRERKRSHSRSPRHRTKSRSPSPAPEKKEKTPELPEPSVKVKEPSVQEATSTSDILKVPKPEPIPEPKEPSPEKNSKKEKEKEKTRPRSRSRSKSRSRTRSRSPSHTRPRRRHRSRSRSYSPRRRPSPRRRPSPRRRTPPRRMPPPPRHRRSRSPVRRRRRSSASLSGSSSSSSSSRSRSPPKKPPKRTSSPPRKTRRLSPSASPPRRRHRPSPPATPPPKTRHSPTPQQSNRTRKSRVSVSPGRTSGKVTKHKGTEKRESPSPAPKPRKVELSESEEDKGGKMAAADSVQQRRQYRRQNQQSSSDSGSSSSSEDERPKRSHVKNGEVGRRRRHSPSRSASPSPRKRQKETSPRMQMGKRWQSPVTKSGRRRRSPSPPPTRRRRSPSPAPPPRRRRTPTPPPRRRTPSPPPRRRSPSPRRYSPPIQRRYSPSPPPKRRTASPPPPPKRRASPSPPPKRRVSHSPPPKQRSSPVTKRRSPSLSSKHRKGSSPSRSTREARSPQPNKRHSPSPRPRAPQTSSSPPPVRRGASSSPQRRQSPSPSTRPIRRVSRTPEPKKIKKAASPSPQSVRRVSSSRSVSGSPEPAAKKPPAPPSPVQSQSPSTNWSPAVPVKKAKSPTPSPSPPRNSDQEGGGKKKKKKKDKKHKKDKKHKKHKKHKKEKAVAAAAAAAVTPAAIAAATTTLAQEEPVAAPEPKKVFMNSVY

SEQ ID NO: 827316 - protein, 824 aa, Homo sapiens
MDAGFFRGTSAEQDNRFSNKQKKLLKQLKFAECLEKKVDMSKVNLEVIKPWITKRVTEILGFEDDVVIEFIFNQLEVKNPDSKMMQINLTGFLNGKNAREFMGELWPLLLSAQENIAGIPSAFLELKKEEIKQRQIEQEKLASMKKQDEDKDKRDKEEKESSREKRERSRSPRRRKSRSPSPRRRSSPVRRERKRSHSRSPRHRTKSRSPSPAPEKKEKTPELPEPSVKVKEPSVQEATSTSDILKVPKPEPIPEPKEPSPEKNSKKEKEKEKTRPRSRSRSKSRSRTRSRSPSHTRPRRRHRSRSRSYSPRRRPSPRRRPSPRRRTPPRRMPPPPRHRRSRSPVRRRRRSSASLSGSSSSSSSSRSRSPPKKPPKRTSSPPRKTRRLSPSASPPRRRHRPSPPATPPPKTRHSPTPQQSNRTRKSRVSVSPGRTSGKVTKHKGTEKRESPSPAPKPRKVELSESEEDKGGKMAAADSVQQRRQYRRQNQQSSSDSGSSSSSEDERPKRSHVKNGEVGRRRRHSPSRSASPSPRKRQKETSPRMQMGKRWQSPVTKSGRRRRSPSPPPTRRRRSPSPAPPPRRRRTPTPPPRRRTPSPPPRRRSPSPRRYSPPIQRRYSPSPPPKRRTASPPPPPKRRASPSPPPKRRVSHSPPPKQRSSPVTKRRSPSLSSKHRKGSSPSRSTREARSPQPNKRHSPSPRPRAPQTSSSPPPVRRGASSSPQRRQSPSPSTRPIRRVSRTPEPKKIKKAASPSPQSVRRVSSSRSVSGSPEPAAKKPPAPPSPVQSQSPSTNWSPAVPVKKAKSPTLGTQSELKYLLEKQEQE

SEQ ID NO: 827317 - protein, 783 aa, Homo sapiens
MDAGFFRGTSAEQDNRFSNKQKKLLKQLKFAECLEKKVDMSKVNLEVIKPWITKRVTEILGFEDDVVIEFIFNQLEVKNPDSKMMQINLTGFLNGKNAREFMGELWPLLLSAQENIAGIPSAFLELKKEEIKQRQIEQEKLASMKKQDEDKDKRDKEEKESSREKRERSRSPRRRKSRSPSPRRRSSPVRRERKRSHSRSPRHRTKSRSPSPAPEKKEKTPELPEPSVKVKEPSVQEATSTSDILKVPKPEPIPEPKEPSPEKNSKKEKEKEKTRPRSRSRSKSRSRTRSRSPSHTRPRRRHRSRSRSYSPRRRPSPRRRPSPRRRTPPRRMPPPPRHRRSRSPVRRRRRSSASLSGSSSSSSSSRSRSPPKKPPKRTSSPPRKTRRLSPSASPPRRRHRPSPPATPPPKTRHSPTPQQSNRTRKSRVSVSPGRTSGKVTKHKGTEKRESPSPAPKPRKVELSESEEDKGGKMAAADSVQQRRQYRRQNQQSSSDSGSSSSSEDERPKRSHVKNGEVGRRRRHSPSRSASPSPRKRQKETSPRMQMGKRWQSPVTKSGRRRRSPSPPPTRRRRSPSPAPPPRRRRTPTPPPRRRTPSPPPRRRSPSPRRYSPPIQRRYSPSPPPKRRTASPPPPPKRRASPSPPPKRRVSHSPPPKQRSSPVTKRRSPSLSSKHRKGSSPSRSTREARSPQPNKRHSPSPRPRAPQTSSSPPPVRRGASSSPQRRQSPSPSTRPIRRVSRTPEPKKIKKAASPSPQSVRRVSSSRSVSGSPEPAAKKPPAPPS

SEQ ID NO: 827318 - protein, 741 aa, Homo sapiens
MDAGFFRGTSAEQDNRFSNKQKKLLKQLKFAECLEKKVDMSKVNLEVIKPWITKRVTEILGFEDDVVIEFIFNQLEVKNPDSKMMQINLTGFLNGKNAREFMGELWPLLLSAQENIAGIPSAFLELKKEEIKQRQIEQEKLASMKKQDEDKDKRDKEEKESSREKRERSRSPRRRKSRSPSPRRRSSPVRRERKRSHSRSPRHRTKSRSPSPAPEKKEKTPELPEPSVKVKEPSVQEATSTSDILKVPKPEPIPEPKEPSPEKNSKKEKEKEKTRPRSRSRSKSRSRTRSRSPSHTRPRRRHRSRSRSYSPRRRPSPRRRPSPRRRTPPRRMPPPPRHRRSRSPVRRRRRSSASLSGSSSSSSSSRSRSPPKKPPKRTSSPPRKTRRLSPSASPPRRRHRPSPPATPPPKTRHSPTPQQSNRTRKSRVSVSPGRTSGKVTKHKGTEKRESPSPAPKPRKVELSESEEDKGGKMAAADSVQQRRQYRRQNQQSSSDSGSSSSSEDERPKRSHVKNGEVGRRRRHSPSRSASPSPRKRQKETSPRMQMGKRWQSPVTKSGRRRRSPSPPPTRRRRSPSPAPPPRRRRTPTPPPRRRTPSPPPRRRSPSPRRYSPPIQRRYSPSPPPKRRTASPPPPPKRRASPSPPPKRRVSHSPPPKQRSSPVTKRRSPSLSSKHRKGSSPSRSTREARSPQPNKRHSPSPRPRAPQTSSSPPPVRRGASSSPQRRQSPSPSSQQHECIRGP

SEQ ID NO: 827319 - protein, 263 aa, Homo sapiens
  misc_feature (1)..(1): Xaa can be any naturally occurring amino acid
  misc_feature (7)..(7): Xaa can be any naturally occurring amino acid
XLAEGRXTYEFSEGGWNVPLGRLLWWCTVNEMKEDDELTPQTRMLTNVFFVLLEIYSFYALVEEAFFLAEFFFEEMTRPIRRVSRTPEPKKIKKAASPSPQSVRRVSSSRSVSGSPEPAAKKPPAPPSPVQSQSPSTNWSPAVPVKKAKSPTPSPSPPRNSDQEGGGKKKKKKKDKKHKKDKKHKKHKKHKKEKAVAAAAAAAVTPAAIAAATTTLAQEEPVAAPEPKKETESEAEDNLDDLEKHLREKALRSMRKAQVSPQS

SEQ ID NO: 827320 - protein, 179 aa, Homo sapiens [sequence omitted]

SEQ ID NO: 827321 - protein, 543 aa, Homo sapiens
MDAGFFRGTSAEQDNRFSNKQKKLLKQLKFAECLEKKVDMSKVNLEVIKPWITKRVTEILGFEDDVVIEFIFNQLEVKNPDSKMMQINLTGFLNGKNAREFMGELWPLLLSAQENIAGIPSAFLELKKEEIKQRQIEQEKLASMKKQDEDKDKRDKEEKESSREKRERSRSPRRRKSRSPSPRRRSSPVRRERKRSHSRSPRHRTKSRSPSPAPEKKEKTPELPEPSVKVKEPSVQEATSTSDILKVPKPEPIPEPKEPSPEKNSKKEKEKEKTRPRSRSRSKSRSRTRSRSPSHTRPRRRHRSRSRSYSPRRRPSPRRRPSPRRRTPPRRMPPPPRHRRSRSPVRRRRRSSASLSGSSSSSSSSRSRSPPKKPPKRTSSPPRKTRRLSPSASPPRRRHRPSPPATPPPKTRHSPTPQQSNRTRKSRVSVSPGRTSGKVTKHKGTEKRESPSPAPKPRKVELSESEEDKGGKMAAADSVQQRRQYRRQNQQSSSDSGSSSSSEDERPKRSHVKNGEVGRRRRHSPSRSASPSPRKRQKETSPR

SEQ ID NO: 827322 - protein, 98 aa, Homo sapiens
DAWVDPRVRDKKHKKDKKHKKHKKHKKEKAVAAAAAAAVTPAAIAAATTTLAQEEPVAAPEPKKETESEAEDNLDDLEKHLREKALRSMRKAQVSPQS

SEQ ID NO: 827323 - protein, 498 aa, Homo sapiens
MDAGFFRGTSAEQDNRFSNKQKKLLKQLKFAECLEKKVDMSKVNLEVIKPWITKRVTEILGFEDDVVIEFIFNQLEVKNPDSKMMQINLTGFLNGKNAREFMGELWPLLLSAQENIAGIPSAFLELKKEEIKQRQIEQEKLASMKKQDEDKDKRDKEEKESSREKRERSRSPRRRKSRSPSPRRRSSPVRRERKRSHSRSPRHRTKSRSPSPAPEKKEKTPELPEPSVKVKEPSVQEATSTSDILKVPKPEPIPEPKEPSPEKNSKKEKEKEKTRPRSRSRSKSRSRTRSRSPSHTRPRRRHRSRSRSYSPRRRPSPRRRPSPRRRTPPRRMPPPPRHRRSRSPVRRRRRSSASLSGSSSSSSSSRSRSPPKKPPKRTSSPPRKTRRLSPSASPPRRRHRPSPPATPPPKTRHSPTPQQSNRTRKSRVSVSPGRTSGKVTKHKGTEKRESPSPAPKPRKVELSESGKFVVFFCDFGLFVFVFLKADFDFLHIWSSPSA

SEQ ID NO: 827324 - protein, 433 aa, Homo sapiens
MDAGFFRGTSAEQDNRFSNKQKKLLKQLKFAECLEKKVDMSKVNLEVIKPWITKRVTEILGFEDDVVIEFIFNQLEVKNPDSKMMQINLTGFLNGKNAREFMGELWPLLLSAQENIAGIPSAFLELKKEEIKQRQIEQEKLASMKKQDEDKDKRDKEEKESSREKRERSRSPRRRKSRSPSPRRRSSPVRRERKRSHSRSPRHRTKSRSPSPAPEKKEKTPELPEPSVKVKEPSVQEATSTSDILKVPKPEPIPEPKEPSPEKNSKKEKEKEKTRPRSRSRSKSRSRTRSRSPSHTRPRRRHRSRSRSYSPRRRPSPRRRPSPRRRTPPRRMPPPPRHRRSRSPVRRRRRSSASLSGSSSSSSSSRSRSPPKKPPKRTSRCVGDGVCALSDADTIKDLLANCAIQGDLESRDCSRMVPAEKTRAESVELVLPP

SEQ ID NO: 827325 - protein, 383 aa, Homo sapiens
MDAGFFRGTSAEQDNRFSNKQKKLLKQLKFAECLEKKVDMSKVNLEVIKPWITKRVTEILGFEDDVVIEFIFNQLEVKNPDSKMMQINLTGFLNGKNAREFMGELWPLLLSAQENIAGIPSAFLELKKEEIKQRQIEQEKLASMKKQDEDKDKRDKEEKESSREKRERSRSPRRRKSRSPSPRRRSSPVRRERKRSHSRSPRHRTKSRSPSPAPEKKEKTPELPEPSVKVKEPSVQEATSTSDILKVPKPEPIPEPKEPSPEKNSKKEKEKEKTRPRSRSRSKSRSRTRSRSPSHTRPRRRHRSRSRSYSPRRRPSPRRRPSPRRRTPPRRMPPPPRHRRSRSPVRRRTTFVSTPALGSQPHSSSFTLRPFDRATAYPSLEIR

SEQ ID NO: 827326 - protein, 109 aa, Homo sapiens
MDAGFFRGTSAEQDNRFSNKQKKLLKQLKFAECLEKKVDMSKVNLEVIKPWITKRVTEILGFEDDVVIEFIFNQLEVKALNQNGSYSLRLKYSTITLLGHSRVSVPMSL

SEQ ID NO: 827327 - protein, 696 aa, Homo sapiens
MRSGDKDHSGKHGEDTVSTKSIKISWMWWHVAVVSATREAAEAGESLEPGEAEVAVSRDHATTLESGDRMRLHLKKKKMICEMNLFENISLFSVVIHLKLVQSPFSFMCECIDNIVVLTTSFLISSSVFTEADERFPCILWWYDVALEHFSFEISAVFVYKYFGRSVDRMNEKQKLEVMVLVISGDFHVGKGTDKSEGIREFLILLSLVVFFDYFGELCLTVNEMIKMEKLVQKICLTLYRMSCFRHLLLDNICPFLYCYKEILDTGYFINKRDLLAHDSAGCTGNMILESAWLLERPQETENDDTRQRGSRHILHGRSREQERVKREVLHTFNNPDLSQAIAAYAYNPSTFGRPRQADHLRVRSSRPAWPTWCNLMSTKSTKISWVWLHLLIIPAAQEAEAGELLNPGGRCFSEPRLHHCTPAWVNRVRLCLKSKNKIKLKLKTRSCKNSLSEEQHQGYGAEPFMKEPSSRSSHLIPGPPPSNIGNYNFIMRVGGDMDPSHVTYYPDCSGLNNNFYLTIYFEYRHDLAVSLVQYLFKAVIRFFMCLSSTERLTEYGSEISQVIIGRIKFLFDSWSYFFTIYYSAFLPCSPFYGASHNTAACFIRASKQDKLQQMQVTWKSLLSNHGIDIVKNKSLGRLQIDQNMVIGQNHDCSGGCIMGSHFTSSTMGVMGDFITFVLLLRVESTLKMCKSVVCS

SEQ ID NO: 827328 - protein, 2557 aa, Homo sapiens
MTAITHGSPVGGNDSQGQVLDGQSQHLFQQNQTSSPDSSNENSVATPPPEEQGQGDAPPQHEDEEPAFPHTELANLDDMINRPRWVVPVLPKGELEVLLEAAIDLSVKGLDVKSEACQRFFRDGLTISFTKILMDEAVSGWKFEIHRCIINNTHRLVELCVAKLSQDWFPLLELLAMALNPHCKFHIYNGTRPCELISSNAQLPEEELFARSSDPRSPKGWLVDLINKFGTLNGFQILHDRFFNGSALNIQIIAALIKPFGQCYEFLSQHTLKKYFIPVIEIVPHLLENLTDEELKKEAKNEAKNDALSMIIKSLKNLASRISGQDETIKNLEIFRLKMILRLLQISSFNGKMNALNEINKVISSVSYYTHRHSNPEEEEWLTAERMAEWIQQNNILSIVLQDSLHQPQYVEKLEKILRFVIKEKALTLQDLDNIWAAQAGKHEAIVKNVHDLLAKLAWDFSPGQLDHLFDCFKASWTNASKKQREKLLELIRRLAEDDKDGVMAHKVLNLLWNLAQSDDVPVDIMDLALSAHIKILDYSCSQDRDAQKIQWIDHFIEELRTNDKWVIPALKQIREICSLFGEASQNLSQTQRSPHIFYRHDLINQLQQNHALVTLVAENLATYMNSIRLYAGDHEDYDPQTVRLGSRYSHVQEVQERLNFLRFLLKDGQLWLCAPQAKQIWKCLAENAVYLCDREACFKWYSKLMGDEPDLDPDINKDFFESNVLQLDPSLLTENGMKCFERFFKAVNCRERKLIAKRRSYMMDDLELIGLDYLWRVVIQSSDEIANRAIDLLKEIYTNLGPRLKANQVVIHEDFIQSCFDRLKASYDTLCVFDGDKNSINCARQEAIRMVRVLTVIKEYINECDSDYHKERMILPMSRAFCGKHLSLIVRFPNQGRQVDELDIWSHTNDTIGSVRRCIVNRIKANVAHKKIELFVGGELIDSEDDRKLIGQLNLKDKSLITAKLTQINFNMPSSPDSSSDSSTASPGNHRNHYNDGPNLEVESCLPGVIMSVHPRYISFLWQVADLGSNLNMPPLRDGARVLMKLMPPDRTAVEKLRAVCLDHAKLGEGKLSPPLDSLFFGPSASQVLYLTEVVYALLMPAGVPLTDGSSDFQVHFLKSGGLPLVLSMLIRNNFLPNTDMETRRGAYLNALKIAKLLLTAIGYGHVRAVAEACQPVVDGTDPITQINQVTHDQAVVLQSALQSIPNPSSECVLRNESILLAQEISNEASRYMPDICVIRAIQKIIWASACGALGLFFSPNEEITKIYQMTTNGSNKLEVEDEQVCCEALEVMTLCFALLPTALDALSKEKAWQTFIIDLLLHCPSKTVRQLAQEQFFLMCTRCCMGHRPLLFFITLLFTILGSTAREKGKYSGDYFTLLRHLLNYAYNGNINIPNAEVLLVSEIDWLKRIRDNVKNTGETGVEEPILEGHLGVTKELLAFQTSEKKYHFGCEKGGANLIKELIDDFIFPASKVYLQYLRSGELPAEQAIPVCSSPVTINAGFELLVALAIGCVRNLKQIVDCLTEMYYMGTAITTCEALTEWEYLPPVGPRPPKGFVGLKNAGATCYMNSVIQQLYMIPSIRNSILAIEGTGSDLHDDMFGDEKQDSESNVDPRDDVFGYPHQFEDKPALSKTEDRKEYNIGVLRHLQVIFGHLAASQLQYYVPRGFWKQFRLWGEPVNLREQHDALEFFNSLVDSLDEALKALGHPAILSKVLGGSFADQKICQGCPHRFECEESFTTLNVDIRNHQNLLDSLEQYIKGDLLEGANAYHCEKCDKKVDTVKRLLIKKLPRVLAIQLKRFDYDWERECAIKFNDYFEFPRELDMGPYTVAGVANLERDNVNSENELIEQKEQSDNETAGGTKYRLVGVLVHSGQASGGHYYSYIIQRNGKDDQTDHWYKFDDGDVTECKMDDDEEMKNQCFGGEYMGEVFDHMMKRMSYRRQKRWWNAYIPFYEQMDMIDEDDEMIRYISELTIARPHQIIMSPAIERSVRKQNVKFMHNRLQYSLEYFQFVKKLLTCNGVYLNPAPGQDYLLPEAEEITMISIQLAARFLFTTGFHTKKIVRGPASDCVLYDALCVLLRHSKNVRFWFTHNVLFNVSNRFSEYLLECPSAEVRGAFAKLIVFIAHFSLQDGSCPSPFASPGPSSQACDNLSLSDHLLRATLNLLRREVSEHGHHLQQYFNLFVMYANLGVAEKTQLLKLNVPATFMLVSLDEGPGPPIKYQYAELGKLYSVVSQLIRCCNVSSTMQSSINGNPPLPNPFGDLNLSQPIMPIQQNVLDILFVRTSYVKKIIEDCSNSEDTIKLLRFCSWENPQFSSTVLSELLWQVAYSYTYELRPYLDLLFQILLIEDSWQTHRIHNALKGIPDDRDGLFDTIQRSKNHYQKRAYQCIKCMVALFSSCPVAYQILQGNGDLKRKWTWAVEWLGDELERRPYTGNPQYSYNNWSPPVQSNETANGYFLERSHSARMTLAKACELCPEEEPDDQDAPDEHEPSPSEDAPLYPHSPASQYQQNNHVHGQPYTGPAAHHLNNPQKTGQRTQENYEGNEEVSSPQMKDQ

SEQ ID NO: 827329 - protein, 2707 aa, Homo sapiens
MRLHLKKKKMICEMNLFENISLFSVVIHLKLVQSPFSFMCECIDNIVVLTTSFLISSSVFTEADERFPCILWWYDWPLEHFSFEISAVFVYKYFGRELGDNSGGCVEYVLEVLNFHSIYKAAIDRPFTDSSDNYIKRQKKEKRAKICAVSSMTAITHGSPVGGNDSQGQVLDGQSQHLFQQNQTSSPDSSNENSVATPPPEEQGQGDAPPQHEDEEPAFPHTELANLDDMINRPRWVVPVLPKGELEVLLEAAIDLSVKGLDVKSEACQRFFRDGLTISFTKILMDEAVSGWKFEIHRCIINNTHRLVELCVAKLSQDWFPLLELLAMALNPHCKFHIYNGTRPCELISSNAQLPEEELFARSSDPRSPKGWLVDLINKFGTLNGFQILHDRFFNGSALNIQIIAALIKPFGQCYEFLSQHTLKKYFIPVIEIVPHLLENLTDEELKKEAKNEAKNDALSMIIKSLKNLASRISGQDETIKNLEIFRLKMILRLLQISSFNGKMNALNEINKVISSVSYYTHRHSNPEEEEWLTAERMAEWIQQNNILSIVLQDSLHQPQYVEKLEKILRFVIKEKALTLQDLDNIWAAQAGKHEAIVKNVHDLLAKLAWDFSPGQLDHLFDCFKASWTNASKKQREKLLELIRRLAEDDKDGVMAHKVLNLLWNLAQSDDVPVDIMDLALSAHIKILDYSCSQDRDAQKIQWIDHFIEELRTNDKWVIPALKQIREICSLFGEASQNLSQTQRSPHIFYRHDLINQLQQNHALVTLVAENLATYMNSIRLYAGDHEDYDPQTVRLGSRYSHVQEVQERLNFLRFLLKDGQLWLCAPQAKQIWKCLAENAVYLCDREACFKWYSKLMGDEPDLDPDINKDFFESNVLQLDPSLLTENGMKCFERFFKAVNCRERKLIAKRRSYMMDDLELIGLDYLWRVVIQSSDEIANRAIDLLKEIYTNLGPRLKANQVVIHEDFIQSCFDRLKASYDTLCVFDGDKNSINCARQEAIRMVRVLTVIKEYINECDSDYHKERMILPMSRAFCGKHLSLIVRFPNQGRQVDELDIWSHTNDTIGSVRRCIVNRIKANVAHKKIELFVGGELIDSEDDRKLIGQLNLKDKSLITAKLTQINFNMPSSPDSSSDSSTASPGNHRNHYNDGPNLEVESCLPGVIMSVHPRYISFLWQVADLGSNLNMPPLRDGARVLMKLMPPDRTAVEKLRAVCLDHAKLGEGKLSPPLDSLFFGPSASQVLYLTEVVYALLMPAGVPLTDGSSDFQVHFLKSGGLPLVLSMLIRNNFLPNTDMETRRGAYLNALKIAKLLLTAIGYGHVRAVAEACQPVVDGTDPITQINQVTHDQAVVLQSALQSIPNPSSECVLRNESILLAQEISNEASRYMPDICVIRAIQKIIWASACGALGLFFSPNEEITKIYQMTTNGSNKLEVEDEQVCCEALEVMTLCFALLPTALDALSKEKAWQTFIIDLLLHCPSKTVRQLAQEQFFLMCTRCCMGHRPLLFFITLLFTILGSTAREKGKYSGDYFTLLRHLLNYAYNGNINIPNAEVLLVSEIDWLKRIRDNVKNTGETGVEEPILEGHLGVTKELLAFQTSEKKYHFGCEKGGANLIKELIDDFIFPASKVYLQYLRSGELPAEQAIPVCSSPVTINAGFELLVALAIGCVRNLKQIVDCLTEMYYMGTAITTCEALTEWEYLPPVGPRPPKGFVGLKNAGATCYMNSVIQQLYMIPSIRNSILAIEGTGSDLHDDMFGDEKQDSESNVDPRDDVFGYPHQFEDKPALSKTEDRKEYNIGVLRHLQVIFGHLAASQLQYYVPRGFWKQFRLWGEPVNLREQHDALEFFNSLVDSLDEALKALGHPAILSKVLGGSFADQKICQGCPHRFECEESFTTLNVDIRNHQNLLDSLEQYIKGDLLEGANAYHCEKCDKKVDTVKRLLIKKLPRVLAIQLKRFDYDWERECAIKFNDYFEFPRELDMGPYTVAGVANLERDNVNSENELIEQKEQSDNETAGGTKYRLVGVLVHSGQASGGHYYSYIIQRNGKDDQTDHWYKFDDGDVTECKMDDDEEMKNQCFGGEYMGEVFDHMMKRMSYRRQKRWWNAYIPFYEQMDMIDEDDEMIRYISELTIARPHQIIMSPAIERSVRKQNVKFMHNRLQYSLEYFQFVKKLLTCNGVYLNPAPGQDYLLPEAEEITMISIQLAARFLFTTGFHTKKIVRGPASDCLYDALCVLLRHSKNVRFWFTHNVLFNVSNRFSEYLLECPSAEVRGAFAKLIVFIAHFSLQDGSCPSPFASPGPSSQACDNLSLSDHLLRATLNLLRREVSEHGHHLQQYFNLFVMYANLGVAEKTQLLKLNVPATFMLVSLDEGPGPPIKYQYAELGKLYSVVSQLIRCCNVSSTMQSSINGNPPLPNPFGDLNLSQPIMPIQQNVLDILFVRTSYVKKIIEDCSNSEDTIKLLRFCSWENPQFSSTVLSELLWQVAYSYTYELRPYLDLLFQILLIEDSWQTHRIHNALKGIPDDRDGLFDTIQRSKNHYQKRAYQCIKCMVALFSSCPVAYQILQGNGDLKRKWTWAVEWLGDELERRPYTGNPQYSYNNWSPPVQSNETANGYFLERSHSARMTLAKACELCPEEEPDDQDAPDEHEPSPSEDAPLYPHSPASQYQQNNHVHGQPYTGPAAHHLNNPQKTGQRTQENYEGNEEVSSPQMKDQ

SEQ ID NO: 827330 - protein, 2776 aa, Homo sapiens
MRSGDKDHSGKHGEDTVSTKSIKISWMWWHVAVVSATREAAEAGESLEPGEAEVAVSRDHATTLESGDRMRLHLKKKKMICEMNLFENISLFSVVIHLKLVQSPFSFMCECIDNIVVLTTSFLISSSVFTEADERFPCILWWYDVALEHFSFEISAVFVYKYFGRELGDNSGGCVEYVLEVLNFHSIYKAAIDRPFTDSSDNYIKRQKKEKRAKICAVSSMTAITHGSPVGGNDSQGQVLDGQSQHLFQQNQTSSPDSSNENSVATPPPEEQGQGDAPPQHEDEEPAFPHTELANLDDMINRPRWVVPVLPKGELEVLLEAAIDLSVKGLDVKSEACQRFFRDGLTISFTKILMDEAVSGWKFEIHRCIINNTHRLVELCVAKLSQDWFPLLELLAMALNPHCKFHIYNGTRPCELISSNAQLPEEELFARSSDPRSPKGWLVDLINKFGTLNGFQILHDRFFNGSALNIQIIAALIKPFGQCYEFLSQHTLKKYFIPVIEIVPHLLENLTDEELKKEAKNEAKNDALSMIIKSLKNLASRISGQDETIKNLEIFRLKMILRLLQISSFNGKMNALNEINKVISSVSYYTHRHSNPEEEEWLTAERMAEWIQQNNILSIVLQDSLHQPQYVEKLEKILRFVIKEKALTLQDLDNIWAAQAGKHEAIVKNVHDLLAKLAWDFSPGQLDHLFDCFKASWTNASKKQREKLLELIRRLAEDDKDGVMAHKVLNLLWNLAQSDDVPVDIMDLALSAHIKILDYSCSQDRDAQKIQWIDHFIEELRTNDKWVIPALKQIREICSLFGEASQNLSQTQRSPHIFYRHDLINQLQQNHALVTLVAENLATYMNSIRLYAGDHEDYDPQTVRLGSRYSHVQEVQERLNFLRFLLKDGQLWLCAPQAKQIWKCLAENAVYLCDREACFKWYSKLMGDEPDLDPDINKDFFESNVLQLDPSLLTENGMKCFERFFKAVNCRERKLIAKRRSYMMDDLELIGLDYLWRVVIQSSDEIANRAIDLLKEIYTNLGPRLKANQVVIHEDFIQSCFDRLKASYDTLCVFDGDKNSINCARQEAIRMVRVLTVIKEYINECDSDYHKERMILPMSRAFCGKHLSLIVRFPNQGRQVDELDIWSHTNDTIGSVRRCIVNRIKANVAHKKIELFVGGELIDSEDDRKLIGQLNLKDKSLITAKLTQINFNMPSSPDSSSDSSTASPGNHRNHYNDGPNLEVESCLPGVIMSVHPRYISFLWQVADLGSNLNMPPLRDGARVLMKLMPPDRTAVEKLRAVCLDHAKLGEGKLSPPLDSLFFGPSASQVLYLTEVVYALLMPAGVPLTDGSSDFQVHFLKSGGLPLVLSMLIRNNFLPNTDMETRRGAYLNALKIAKLLLTAIGYGHVRAVAEACQPVVDGTDPITQINQVTHDQAVVLQSALQSIPNPSSECVLRNESILLAQEISNEASRYMPDICVIRAIQKIIWASACGALGLFFSPNEEITKIYQMTTNGSNKLEVEDEQVCCEALEVMTLCFALLPTALDALSKEKAWQTFIIDLLLHCPSKTVRQLAQEQFFLMCTRCCMGHRPLLFFITLLFTILGSTAREKGKYSGDYFTLLRHLLNYAYNGNINIPNAEVLLVSEIDWLKRIRDNVKNTGETGVEEPILEGHLGVTKELLAFQTSEKKYHFGCEKGGANLIKELIDDFIFPASKVYLQYLRSGELPAEQAIPVCSSPVTINAGFELLVALAIGCVRNLKQIVDCLTEMYYMGTAITTCEALTEWEYLPPVGPRPPKGFVGLKNAGATCYMNSVIQQLYMIPSIRNSILAIEGTGSDLHDDMFGDEKQDSESNVDPRDDVFGYPHQFEDKPALSKTEDRKEYNIGVLRHLQVIFGHLAASQLQYYVPRGFWKQFRLWGEPVNLREQHDALEFFNSLVDSLDEALKALGHPAILSKVLGGSFADQKICQGCPHRFECEESFTTLNVDIRNHQNLLDSLEQYIKGDLLEGANAYHCEKCDKKVDTVKRLLIKKLPRVLAIQLKRFDYDWERECAIKFNDYFEFPRELDMGPYTVAGVANLERDNVNSENELIEQKEQSDNETAGGTKYRLVGVLVHSGQASGGHYYSYIIQRNGKDDQTDHWYKFDDGDVTECKMDDDEEMKNQCFGGEYMGEVFDHMMKRMSYRRQKRWWNAYIPFYEQMDMIDEDDEMIRYISELTIARPHQIIMSPAIERSVRKQNVKFMHNRLQYSLEYFQFVKKLLTCNGVYLNPAPGQDYLLPEAEEITMISIQLAARFLFTTGFHTKKIVRGPASDWWYDALCVLLRHSKNVRFWFTHNVLFNVSNRFSEYLLECPSAEVRGAFAKLIVFIAHFSLQDGSCPSPFASPGPSSQACDNLSLSDHLLRATLNLLRREVSEHGHHLQQYFNLFVMYANLGVAEKTQLLKLNVPATFMLVSLDEGPGPPIKYQYAELGKLYSVVSQLIRCCNVSSTMQSSINGNPPLPNPFGDLNLSQPIMPIQQNVLDILFVRTSYVKKIIEDCSNSEDTIKLLRFCSWENPQFSSTVLSELLWQVAYSYTYELRPYLDLLFQILLIEDSWQTHRIHNALKGIPDDRDGLFDTIQRSKNHYQKRAYQCIKCMVALFSSCPVAYQILQGNGDLKRKWTWAVEWLGDELERRPYTGNPQYSYNNWSPPVQSNETANGYFLERSHSARMTLAKACELCPEEEPDDQDAPDEHEPSPSEDAPLYPHSPASQYQQNNHVHGQPYTGPAAHHLNNPQKTGQRTQENYEGNEEVSSPQMKDQ

SEQ ID NO: 827331 - protein, 2265 aa, Homo sapiens
MRLHLKKKKMICEMNLFENISLFSVVIHLKLVQSPFSFMCECIDNIVVLTTSFLISSSVFTEADERFPCILWWYDWPLEHFSFEISAVFVYKYFGRELGDNSGGCVEYVLEVLNFHSIYKAAIDRPFTDSSDNYIKRQKKEKRAKICAVSSMTAITHGSPVGGNDSQGQVLDGQSQHLFQQNQTSSPDSSNENSVATPPPEEQGQGDAPPQHEDEEPAFPHTELANLDDMINRPRWVVPVLPKGELEVLLEAAIDLSVKGLDVKSEACQRFFRDGLTISFTKILMDEAVSGWKFEIHRCIINNTHRLVELCVAKLSQDWFPLLELLAMALNPHCKFHIYNGTRPCELISSNAQLPEEELFARSSDPRSPKGWLVDLINKFGTLNGFQILHDRFFNGSALNIQIIAALIKPFGQCYEFLSQHTLKKYFIPVIEIVPHLLENLTDEELKKEAKNEAKNDALSMIIKSLKNLASRISGQDETIKNLEIFRLKMILRLLQISSFNGKMNALNEINKVISSVSYYTHRHSNPEEEEWLTAERMAEWIQQNNILSIVLQDSLHQPQYVEKLEKILRFVIKEKALTLQDLDNIWAAQAGKHEAIVKNVHDLLAKLAWDFSPGQLDHLFDCFKASWTNASKKQREKLLELIRRLAEDDKDGVMAHKVLNLLWNLAQSDDVPVDIMDLALSAHIKILDYSCSQDRDAQKIQWIDHFIEELRTNDKWVIPALKQIREICSLFGEASQNLSQTQRSPHIFYRHDLINQLQQNHALVTLVAENLATYMNSIRLYAGDHEDYDPQTVRLGSRYSHVQEVQERLNFLRFLLKDGQLWLCAPQAKQIWKCLAENAVYLCDREACFKWYSKLMGDEPDLDPDINKDFFESNVLQLDPSLLTENGMKCFERFFKAVNCRERKLIAKRRSYMMDDLELIGLDYLWRVVIQSSDEIANRAIDLLKEIYTNLGPRLKANQVVIHEDFIQSCFDRLKASYDTLCVFDGDKNSINCARQEAIRMVRVLTVIKEYINECDSDYHKERMILPMSRAFCGKHLSLIVRFPNQGRQVDELDIWSHTNDTIGSVRRCIVNRIKANVAHKKIELFVGGELIDSEDDRKLIGQLNLKDKSLITAKLTQINFNMPSSPDSSSDSSTASPGNHRNHYNDGPNLEVESCLPGVIMSVHPRYISFLWQVADLGSNLNMPPLRDGARVLMKLMPPDRTAVEKLRAVCLDHAKLGEGKLSPPLDSLFFGPSASQVLYLTEVVYALLMPAGVPLTDGSSDFQVHFLKSGGLPLVLSMLIRNNFLPNTDMETRRGAYLNALKIAKLLLTAIGYGHVRAVAEACQPVVDGTDPITQINQVTHDQAVVLQSALQSIPNPSSECVLRNESILLAQEISNEASRYMPDICVIRAIQKIIWASACGALGLFFSPNEEITKIYQMTTNGSNKLEVEDEQVCCEALEVMTLCFALLPTALDALSKEKAWQTFIIDLLLHCPSKTVRQLAQEQFFLMCTRCCMGHRPLLFFITLLFTILGSTAREKGKYSGDYFTLLRHLLNYAYNGNINIPNAEVLLVSEIDWLKRIRDNVKNTGETGVEEPILEGHLGVTKELLAFQTSEKKYHFGCEKGGANLIKELIDDFIFPASKVYLQYLRSGELPAEQAIPVCSSPVTINAGFELLVALAIGCVRNLKQIVDCLTEMYYMGTAITTCEALTEWEYLPPVGPRPPKGFVGLKNAGATCYMNSVIQQLYMIPSIRNSILAIEGTGSDLHDDMFGDEKQDSESNVDPRDDVFGYPHQFEDKPALSKTEDRKEYNIGVLRHLQVIFGHLAASQLQYYVPRGFWKQFRLWGEPVNLREQHDALEFFNSLVDSLDEALKALGHPAILSKVLGGSFADQKICQGCPHRFECEESFTTLNVDIRNHQNLLDSLEQYIKGDLLEGANAYHCEKCDKKVDTVKRLLIKKLPRVLAIQLKRFDYDWERECAIKFNDYFEFPRELDMGPYTVAGVANLERDNVNSENELIEQKEQSDNETAGGTKYRLVGVLVHSGQASGGHYYSYIIQRNGKDDQTDHWYKFDDGDVTECKMDDDEEMKNQCFGGEYMGEVFDHMMKRMSYRRQKRWWNAYIPFYEQMDMIDEDDEMIRYISELTIARPHQIIMSPAIERSVRKQNVKFMHNRLQYSLEYFQFVKKLLTCNGVYLNPAPGQDYLLPEAEEITMISIQLAARFLFTTGFHTKKIVRGPASDCVGMMHCAFFSVTAKMYVFGLLIMSFLMYQIASLNTSWSALVQK

SEQ ID NO: 827332 - protein, 1845 aa, Homo sapiens
MRLHLKKKKMICEMNLFENISLFSVVIHLKLVQSPFSFMCECIDNIVVLTTSFLISSSVFTEADERFPCILWWYDWPLEHFSFEISAVFVYKYFGRELGDNSGGCVEYVLEVLNFHSIYKAAIDRPFTDSSDNYIKRQKKEKRAKICAVSSMTAITHGSPVGGNDSQGQVLDGQSQHLFQQNQTSSPDSSNENSVATPPPEEQGQGDAPPQHEDEEPAFPHTELANLDDMINRPRWVVPVLPKGELEVLLEAAIDLSVKGLDVKSEACQRFFRDGLTISFTKILMDEAVSGWKFEIHRCIINNTHRLVELCVAKLSQDWFPLLELLAMALNPHCKFHIYNGTRPCELISSNAQLPEEELFARSSDPRSPKGWLVDLINKFGTLNGFQILHDRFFNGSALNIQIIAALIKPFGQCYEFLSQHTLKKYFIPVIEIVPHLLENLTDEELKKEAKNEAKNDALSMIIKSLKNLASRISGQDETIKNLEIFRLKMILRLLQISSFNGKMNALNEINKVISSVSYYTHRHSNPEEEEWLTAERMAEWIQQNNILSIVLQDSLHQPQYVEKLEKILRFVIKEKALTLQDLDNIWAAQAGKHEAIVKNVHDLLAKLAWDFSPGQLDHLFDCFKASWTNASKKQREKLLELIRRLAEDDKDGVMAHKVLNLLWNLAQSDDVPVDIMDLALSAHIKILDYSCSQDRDAQKIQWIDHFIEELRTNDKWVIPALKQIREICSLFGEASQNLSQTQRSPHIFYRHDLINQLQQNHALVTLVAENLATYMNSIRLYAGDHEDYDPQTVRLGSRYSHVQEVQERLNFLRFLLKDGQLWLCAPQAKQIWKCLAENAVYLCDREACFKWYSKLMGDEPDLDPDINKDFFESNVLQLDPSLLTENGMKCFERFFKAVNCRERKLIAKRRSYMMDDLELIGLDYLWRVVIQSSDEIANRAIDLLKEIYTNLGPRLKANQVVIHEDFIQSCFDRLKASYDTLCVFDGDKNSINCARQEAIRMVRVLTVIKEYINECDSDYHKERMILPMSRAFCGKHLSLIVRFPNQGRQVDELDIWSHTNDTIGSVRRCIVNRIKANVAHKKIELFVGGELIDSEDDRKLIGQLNLKDKSLITAKLTQINFNMPSSPDSSSDSSTASPGNHRNHYNDGPNLEVESCLPGVIMSVHPRYISFLWQVADLGSNLNMPPLRDGARVLMKLMPPDRTAVEKLRAVCLDHAKLGEGKLSPPLDSLFFGPSASQVLYLTEVVYALLMPAGVPLTDGSSDFQVHFLKSGGLPLVLSMLIRNNFLPNTDMETRRGAYLNALKIAKLLLTAIGYGHVRAVAEACQPVVDGTDPITQINQVTHDQAVVLQSALQSIPNPSSECVLRNESILLAQEISNEASRYMPDICVIRAIQKIIWASACGALGLFFSPNEEITKIYQMTTNGSNKLEVEDEQVCCEALEVMTLCFALLPTALDALSKEKAWQTFIIDLLLHCPSKTVRQLAQEQFFLMCTRCCMGHRPLLFFITLLFTILGSTAREKGKYSGDYFTLLRHLLNYAYNGNINIPNAEVLLVSEIDWLKRIRDNVKNTGETGVEEPILEGHLGVTKELLAFQTSEKKYHFGCEKGGANLIKELIDDFIFPASKVYLQYLRSGELPAEQAIPVCSSPVTINAGFELLVALAIGCVRNLKQIVDCLTEMYYMGTAITTCEALTEWEYLPPVGPRPPKGFVGLKNAGATCYMNSVIQQLYMIPSIRNSILAIEGTGSDLHDDMFGDEKQDSEVNFNTVFFEESDSRCCCSPSDYYTFMGCYGDYILMIQTESLRYYVWHTCSTHYVIDLKLQLIIKHCFFVCLQSTVNIIAFCVTW

SEQ ID NO: 827333 - protein, 812 aa, Homo sapiens
MRLHLKKKKMICEMNLFENISLFSVVIHLKLVQSPFSFMCECIDNIVVLTTSFLISSSVFTEADERFPCILWWYDWPLEHFSFEISAVFVYKYFGRELGDNSGGCVEYVLEVLNFHSIYKAAIDRPFTDSSDNYIKRQKKEKRAKICAVSSMTAITHGSPVGGNDSQGQVLDGQSQHLFQQNQTSSPDSSNENSVATPPPEEQGQGDAPPQHEDEEPAFPHTELANLDDMINRPRWVVPVLPKGELEVLLEAAIDLSVKGLDVKSEACQRFFRDGLTISFTKILMDEAVSGWKFEIHRCIINNTHRLVELCVAKLSQDWFPLLELLAMALNPHCKFHIYNGTRPCELISSNAQLPEEELFARSSDPRSPKGWLVDLINKFGTLNGFQILHDRFFNGSALNIQIIAALIKPFGQCYEFLSQHTLKKYFIPVIEIVPHLLENLTDEELKKEAKNEAKNDALSMIIKSLKNLASRISGQDETIKNLEIFRLKMILRLLQISSFNGKMNALNEINKVISSVSYYTHRHSNPEEEEWLTAERMAEWIQQNNILSIVLQDSLHQPQYVEKLEKILRFVIKEKALTLQDLDNIWAAQAGKHEAIVKNVHDLLAKLAWDFSPGQLDHLFDCFKASWTNASKKQREKLLELIRRLAEDDKDGVMAHKVLNLLWNLAQSDDVPVDIMDLALSAHIKILDYSCSQDRDAQKIQWIDHFIEELRTNDKWVIPALKQIREICSLFGEASQNLSQTQRSPHIFYRHDLINQLQQNHALVTLVAENLATYMNSIRLYAGEFCSCCTGRLECNGTISAHCKVCPPGNY

SEQ ID NO: 827334 - protein, 1556 aa, Homo sapiens
MDQLALQWEELIEARLTIGLVILLPENALRQLCQAESTRKVLRMELVPHGTDTTASDGLPTPMAERSPAVMVMELTEWTSIQFKEGASRKTGEAVPTNKALWVARQCPWLKGSFPTLGDCSHHTWVRTWLRNPFGNIASCPSHESLLHQTPLRSESRRSALGARSGSLLSALYPGWEQRSKHSVEKKVGGSRWGSRPSHSAQRRDWSQSLLCNEYRQNAQDAMIALEHGSPSQQSVSGRMHNGPWALWQCQGPAIPAPDPQALSPGRPCDPACLAKCFLPASALTATLACISVEVSHELIQLEQLLTFYEGGGDSFGSWASTVDIELLDIGSIHELRRQGTCVILNRKDLRSLIKVSLLSGIADPGEEELGWNIHHCPEGWSVPVPPIRHLTLPLSYIQDALVSQAVRNSFATGCVVNGGDVRCSCKAGYTGTQCERCAPGYFGNPQKFGGSCQPCSCNSNGQLGSCHPLTGDCINQEPKDSSPAEECDDCDSCVMTLLNDLATMGEQLRLVKSQLQGLSASAGLLEQMRHMETQAKDLRNQLLNYRSAISNHGSKIEGLERELTDLNQEFETLQEKAQVNSRKAQTLNNNVNRATQSAKELDVKIKNVIRNVHILLKQISGTDGEGNNVPSGDFSREWAEAQRMMRELRNRNFGKHLREAEADKRESQLLLNRIRTWQKTHQGENNGLANSIRDSLNEYEAKLSDLRARLQEAAAQAKQANGLNQENERALGAIQRQVKEINSLQSDFTKYLTTADSSLLQTNIALQLMEKSQKEYEKLAASLNEARQELSDKVRELSRSAGKTSLVEEAEKHARSLQELAKQLEEIKRNASGDELVRCAVDAATAYENILNAIKAAEDAANRAASASESALQTVIKEDLPRKAKTLSSNSDKLLNEAKMTQKKLKQEVSPALNNLQQTLNIVTVQKEVIDTNLTTLRDGLHGIQRGDIDAMISSAKSMVRKANDITDEVLDGLNPIQTDVERIKDTYGRTQNEDFKKALTDADNSVNKLTNKLPDLWRKIESINQQLLPLGNISDNMDRIRELIQQARDAASKVAVPMRFNGKSGVEVRLPNDLEDLKGYTSLSLFLQRPNSRENGGTENMFVMYLGNKDASRDYIGMAVVDGQLTCVYNLGDREAELQVDQILTKSETKEAVMDRVKFQRIYQFARLNYTKGATSSKPETPGVYDMDGRNSNTLLNLDPENVVFYVGGYPPDFKLPSRLSFPPYKGCIELDDLNENVLSLYNFKKTFNLNTTEVEPCRRRKEESDKNYFEGTGYARVPTQPHAPIPTFGQTIQTTVDRGLLFFAENGDRFISLNIEDGKLMVRYKLNSELPKERGVGDAINNGRDHSIQIKIGKLQKRMWINVDVQNTIIDGEVFDFSTYYLGGIPIAIRERFNISTPAFRGCMKNLKKTSGVVRLNDTVGVTKKCSEDWKLVRSASFSRGGQLSFTDLGLPPTDHLQASFGFQTFQPSGILLDHQTWTRNLQVTLEDGYIELSTSDSGGPIFKSPQTYMDGLLHYVSVISDNSGLRQEGCLRPRVRDQSWKHSETMSLRKLK

SEQ ID NO: 827335 - protein, 53 aa, Homo sapiens
WVLGSGEQASCHTFTLLGEANHGALQFGDIPTSHLLFKLPQELLKPRYYLAFL

SEQ ID NO: 827336 - protein, 1729 aa, Homo sapiens
TSRNRDASSSEAVSCSMGWLWIFGAALGQCLGYSSQQQRVPFLQPPGQSQLQASYVEFRPSQGCSPGYYRDHKGLYTGRCVPCNCNGHSNQCQDGSGICVNCQHNTAGEHCERCQEGYYGNAVHGSCRACPCPHTNSFATGCVVNGGDVRCSCKAGYTGTQCERCAPGYFGNPQKFGGSCQPCSCNSNGQLGSCHPLTGDCINQEPKDSSPAEECDDCDSCVMTLLNDLATMGEQLRLVKSQLQGLSASAGLLEQMRHMETQAKDLRNQLLNYRSAISNHGSKIEGLERELTDLNQEFETLQEKAQVNSRKAQTLNNNVNRATQSAKELDVKIKNVIRNVHILLKQISGTDGEGNNVPSGDFSREWAEAQRMMRELRNRNFGKHLREAEADKRESQLLLNRIRTWQKTHQGENNGLANSIRDSLNEYEAKLSDLRARLQEAAAQAKQANGLNQENERALGAIQRQVKEINSLQSDFTKYLTTADSSLLQTNIALQLMEKSQKEYEKLAASLNEARQELSDKVRELSRSAGKTSLVEEAEKHARSLQELAKQLEEIKRNASGDELVRCAVDAATAYENILNAIKAAEDAANRAASASESALQTVIKEDLPRKAKTLSSNSDKLLNEAKMTQKKLKQEVSPALNNLQQTLNIVTVQKEVIDTNLTTLRDGLHGIQRGDIDAMISSAKSMVRKANDITDEVLDGLNPIQTDVERIKDTYGRTQNEDFKKALTDADNSVNKLTNKLPDLWRKIESINQQLLPLGNISDNMDRIRELIQQARDAASKVAVPMRFNGKSGVEVRLPNDLEDLKGYTSLSLFLQRPNSRENGGTENMFVMYLGNKDASRDYIGMAVVDGQLTCVYNLGDREAELQVDQILTKSETKEAVMDRVKFQRIYQFARLNYTKGATSSKPETPGVYDMDGRNSNTLLNLDPENVVFYVGGYPPDFKLPSRLSFPPYKGCIELDDLNENVLSLYNFKKTFNLNTTEVEPCRRRKEESDKNYFEGTGYARVPTQPHAPIPTFGQTIQTTVDRGLLFFAENGDRFISLNIEDGKLMVRYKLNSELPKERGVGDAINNGRDHSIQIKIGKLQKRMWINVDVQNTIIDGEVFDFSTYYLGGIPIAIRERFNISTPAFRGCMKNLKKTSGVVRLNDTVGVTKKCSEDWKLVRSASFSRGGQLSFTDLGLPPTDHLQASFGFQTFQPSGILLDHQTWTRNLQVTLEDGYIELSTSDSGGPIFKSPQTYMDGLLHYVSVISDNSGLRLLIDDQLLRNSKRLKHISSSRQSLRLGGSNFEGCISNVFVQRLSLSPEVLDLTSNSLKRDVSLGGCSLNKPPFLMLLKGSTRFNKTKTFRINQLLQDTPVASPRSVKVWQDACSPLPKTQANHGALQFGDIPTSHLLFKLPQELLKPRSQFAVDMQTTSSRGLVFHTGTKNSFMALYLSKGRLVFALGTDGKKLRIKSKEKCNDGKWHTVVFGHDGEKGRLVVDGLRAREGSLPGNSTISIRAPVYLGSPPSGKPKSLPTNSFVGCLKNFQLDSKPLYTPSSSFGVSSCLGGPLEKGIYFSEEGGHVVLAHSVLLGPEFKLVFSIRPRSLTGILIHIGSQPGKHLCVYLEAGKVTASMDSGAGGTSTSVTPKQSLCDGQWHSVAVTIKQHILHLELDTDSSYTAGQIPFPPASTQEPLHLGGAPANLTTLRIPVWKSFFGCLRNIHVNHIPVPVTEALEVQGPVSLNGCPDQ

SEQ ID NO: 827337 - protein, 1813 aa, Homo sapiens
PTSYLGDKVSSYGGYLTYQAKSFGLPGDMVLLEKKPDVQLTGQHMSIIYEETNTPRPDRLHHGRVHVVEGNFRHASSRAPVSREELMTVLSRLADVRIQGLYFTETQRLTLSEVGLEEASDTGSGRIALAVEICACPPAYAGDSCQGCSPGYYRDHKGLYTGRCVPCNCNGHSNQCQDGSGICVNCQHNTAGEHCERCQEGYYGNAVHGSCRACPCPHTNSFATGCVVNGGDVRCSCKAGYTGTQCERCAPGYFGNPQKFGGSCQPCSCNSNGQLGSCHPLTGDCINQEPKDSSPAEECDDCDSCVMTLLNDLATMGEQLRLVKSQLQGLSASAGLLEQMRHMETQAKDLRNQLLNYRSAISNHGSKIEGLERELTDLNQEFETLQEKAQVNSRKAQTLNNNVNRATQSAKELDVKIKNVIRNVHILLKQISGTDGEGNNVPSGDFSREWAEAQRMMRELRNRNFGKHLREAEADKRESQLLLNRIRTWQKTHQGENNGLANSIRDSLNEYEAKLSDLRARLQEAAAQAKQANGLNQENERALGAIQRQVKEINSLQSDFTKYLTTADSSLLQTNIALQLMEKSQKEYEKLAASLNEARQELSDKVRELSRSAGKTSLVEEAEKHARSLQELAKQLEEIKRNASGDELVRCAVDAATAYENILNAIKAAEDAANRAASASESALQTVIKEDLPRKAKTLSSNSDKLLNEAKMTQKKLKQEVSPALNNLQQTLNIVTVQKEVIDTNLTTLRDGLHGIQRGDIDAMISSAKSMVRKANDITDEVLDGLNPIQTDVERIKDTYGRTQNEDFKKALTDADNSVNKLTNKLPDLWRKIESINQQLLPLGNISDNMDRIRELIQQARDAASKVAVPMRFNGKSGVEVRLPNDLEDLKGYTSLSLFLQRPNSRENGGTENMFVMYLGNKDASRDYIGMAVVDGQLTCVYNLGDREAELQVDQILTKSETKEAVMDRVKFQRIYQFARLNYTKGATSSKPETPGVYDMDGRNSNTLLNLDPENVVFYVGGYPPDFKLPSRLSFPPYKGCIELDDLNENVLSLYNFKKTFNLNTTEVEPCRRRKEESDKNYFEGTGYARVPTQPHAPIPTFGQTIQTTVDRGLLFFAENGDRFISLNIEDGKLMVRYKLNSELPKERGVGDAINNGRDHSIQIKIGKLQKRMWINVDVQNTIIDGEVFDFSTYYLGGIPIAIRERFNISTPAFRGCMKNLKKTSGVVRLNDTVGVTKKCSEDWKLVRSASFSRGGQLSFTDLGLPPTDHLQASFGFQTFQPSGILLDHQTWTRNLQVTLEDGYIELSTSDSGGPIFKSPQTYMDGLLHYVSVISDNSGLRLLIDDQLLRNSKRLKHISSSRQSLRLGGSNFEGCISNVFVQRLSLSPEVLDLTSNSLKRDVSLGGCSLNKPPFLMLLKGSTRFNKTKTFRINQLLQDTPVASPRSVKVWQDACSPLPKTQANHGALQFGDIPTSHLLFKLPQELLKPRSQFAVDMQTTSSRGLVFHTGTKNSFMALYLSKGRLVFALGTDGKKLRIKSKEKCNDGKWHTVVFGHDGEKGRLVVDGLRAREGSLPGNSTISIRAPVYLGSPPSGKPKSLPTNSFVGCLKNFQLDSKPLYTPSSSFGVSSCLGGPLEKGIYFSEEGGHVVLAHSVLLGPEFKLVFSIRPRSLTGILIHIGSQPGKHLCVYLEAGKVTASMDSGAGGTSTSVTPKQSLCDGQWHSVAVTIKQHILHLELDTDSSYTAGQIPFPPASTQEPLHLGGAPANLTTLRIPVWKSFFGCLRNIHVNHIPVPVTEALEVQGPVSLNGCPDQ

SEQ ID NO: 827338 - protein, 1008 aa, Homo sapiens
MHNLTFLFFFSPTVNKLTNKLPDLWRKIESINQQLLPLGNISDNMDRIRELIQQARDAASKVAVPMRFNGKSGVEVRLPNDLEDLKGYTSLSLFLQRPNSRENGGTENMFVMYLGNKDASRDYIGMAVVDGQLTCVYNLGDREAELQVDQILTKSETKEAVMDRVKFQRIYQFARLNYTKGATSSKPETPGVYDMDGRNSNTLLNLDPENVVFYVGGYPPDFKLPSRLSFPPYKGCIELDDLNENVLSLYNFKKTFNLNTTEVEPCRRRKEESDKNYFEGTGYARVPTQPHAPIPTFGQTIQTTVDRGLLFFAENGDRFISLNIEDGKLMVRYKLNSELPKERGVGDAINNGRDHSIQIKIGKLQKRMWINVDVQNTIIDGEVFDFSTYYLGGIPIAIRERFNISTPAFRGCMKNLKKTSGVVRLNDTVGVTKKCSEDWKLVRSASFSRGGQLSFTDLGLPPTDHLQASFGFQTFQPSGILLDHQTWTRNLQVTLEDGYIELSTSDSGGPIFKSPQTYMDGLLHYVSVISDNSGLRLLIDDQLLRNSKRLKHISSSRQSLRLGGSNFEGCISNVFVQRLSLSPEVLDLTSNSLKRDVSLGGCSLNKPPFLMLLKGSTRFNKTKTFRINQLLQDTPVASPRSVKVWQDACSPLPKTQANHGALQFGDIPTSHLLFKLPQELLKPRSQFAVDMQTTSSRGLVFHTGTKNSFMALYLSKGRLVFALGTDGKKLRIKSKEKCNDGKWHTVVFGHDGEKGRLVVDGLRAREGSLPGNSTISIRAPVYLGSPPSGKPKSLPTNSFVGCLKNFQLDSKPLYTPSSSFGVSSCLGGPLEKGIYFSEEGGHVVLAHSVLLGPEFKLVFSIRPRSLTGILIHIGSQPGKHLCVYLEAGKVTASMDSGAGGTSTSVTPKQSLCDGQWHSVAVTIKQHILHLELDTDSSYTAGQIPFPPASTQEPLHLGGAPANLTTLRIPVWKSFFGCLRNIHVNHIPVPVTEALEVQGPVSLNGCPDQ

SEQ ID NO: 827339 - protein, 685 aa, Homo sapiens
ARTPEPSMRYKLNSELPKERGVGDAINNGRDHSIQIKIGKLQKRMWINVDVQNTIIDGEVFDFSTYYLGGIPIAIRERFNISTPAFRGCMKNLKKTSGVVRLNDTVGVTKKCSEDWKLVRSASFSRGGQLSFTDLGLPPTDHLQASFGFQTFQPSGILLDHQTWTRNLQVTLEDGYIELSTSDSGGPIFKSPQTYMDGLLHYVSVISDNSGLRLLIDDQLLRNSKRLKHISSSRQSLRLGGSNFEGCISNVFVQRLSLSPEVLDLTSNSLKRDVSLGGCSLNKPPFLMLLKGSTRFNKTKTFRINQLLQDTPVASPRSVKVWQDACSPLPKTQANHGALQFGDIPTSHLLFKLPQELLKPRSQFAVDMQTTSSRGLVFHTGTKNSFMALYLSKGRLVFALGTDGKKLRIKSKEKCNDGKWHTVVFGHDGEKGRLVVDGLRAREGSLPGNSTISIRAPVYLGSPPSGKPKSLPTNSFVGCLKNFQLDSKPLYTPSSSFGVSSCLGGPLEKGIYFSEEGGHVVLAHSVLLGPEFKLVFSIRPRSLTGILIHIGSQPGKHLCVYLEAGKVTASMDSGAGGTSTSVTPKQSLCDGQWHSVAVTIKQHILHLELDTDSSYTAGQIPFPPASTQEPLHLGGAPANLTTLRIPVWKSFFGCLRNIHVNHIPVPVTEALEVQGPVSLNGCPDQ

SEQ ID NO: 827340 - protein, 261 aa, Homo sapiens
MIPWTLKGRLVVDGLRAREGSLPGNSTISIRAPVYLGSPPSGKPKSLPTNSFVGCLKNFQLDSKPLYTPSSSFGVSSCLGGPLEKGIYFSEEGGHVVLAHSVLLGPEFKLVFSIRPRSLTGILIHIGSQPGKHLCVYLEAGKVTASMDSGAGGTSTSVTPKQSLCDGQWHSVAVTIKQHILHLELDTDSSYTAGQIPFPPASTQEPLHLGGAPANLTTLRIPVWKSFFGCLRNIHVNHIPVPVTEALEVQGPVSLNGCPDQ

SEQ ID NO: 827341 - protein, 1773 aa, Homo sapiens
PTSYLGDKVSSYGGYLTYQAKSFGLPGDMVLLEKKPDVQLTGQHMSIIYEETNTPRPDRLHHGRVHVVEGNFRHASSRAPVSREELMTVLSRLADVRIQGLYFTETQRLTLSEVGLEEASDTGSGRIALAVEICACPPAYAGDSCQGCSPGYYRDHKGLYTGRCVPCNCNGHSNQCQDGSGICVNCQHNTAGEHCERCQEGYYGNAVHGSCRACPCPHTNSFATGCVVNGGDVRCSCKAGYTGTQCERCAPGYFGNPQKFGGSCQPCSCNSNGQLGSCHPLTGDCINQEPKDSSPAEECDDCDSCVMTLLNDLATMGEQLRLVKSQLQGLSASAGLLEQMRHMETQAKDLRNQLLNYRSAISNHGSKIEGLERELTDLNQEFETLQEKAQVNSRKAQTLNNNVNRATQSAKELDVKIKNVIRNVHILLKQISGTDGEGNNVPSGDFSREWAEAQRMMRELRNRNFGKHLREAEADKRESQLLLNRIRTWQKTHQGENNGLANSIRDSLNEYEAKLSDLRARLQEAAAQAKQANGLNQENERALGAIQRQVKEINSLQSDFTKYLTTADSSLLQTNIALQLMEKSQKEYEKLAASLNEARQELSDKVRELSRSAGKTSLVEEAEKHARSLQELAKQLEEIKRNASGDELVRCAVDAATAYENILNAIKAAEDAANRAASASESALQTVIKEDLPRKAKTLSSNSDKLLNEAKMTQKKLKQEVSPALNNLQQTLNIVTVQKEVIDTNLTTLRDGLHGIQRGDIDAMISSAKSMVRKANDITDEVLDGLNPIQTDVERIKDTYGRTQNEDFKKALTDADNSVNKLTNKLPDLWRKIESINQQLLPLGNISDNMDRIRELIQQARDAASKVAVPMRFNGKSGVEVRLPNDLEDLKGYTSLSLFLQRPNSRENGGTENMFVMYLGNKDASRDYIGMAVVDGQLTCVYNLGDREAELQVDQILTKSETKEAVMDRVKFQRIYQFARLNYTKGATSSKPETPGVYDMDGRNSNTLLNLDPENVVFYVGGYPPDFKLPSRLSFPPYKGCIELDDLNENVLSLYNFKKTFNLNTTEVEPCRRRKEESDKNYFEGTGYARVPTQPHAPIPTFGQTIQTTVDRGLLFFAENGDRFISLNIEDGKLMVRYKLNSELPKERGVGDAINNGRDHSIQIKIGKLQKRMWINVDVQNTIIDGEVFDFSTYYLGGIPIAIRERFNISTPAFRGCMKNLKKTSGVVRLNDTVGVTKKCSEDWKLVRSASFSRGGQLSFTDLGLPPTDHLQASFGFQTFQPSGILLDHQTWTRNLQVTLEDGYIELSTSDSGGPIFKSPQTYMDGLLHYVSVISDNSGLRLLIDDQLLRNSKRLKHISSSRQSLRLGGSNFEGCISNVFVQRLSLSPEVLDLTSNSLKRDVSLGGCSLNKPPFLMLLKGSTRFNKTKTFRINQLLQDTPVASPRSVKVWQDACSPLPKTQANHGALQFGDIPTSHLLFKLPQELLKPRSQFAVDMQTTSSRGLVFHTGTKNSFMALYLSKGRLVFALGTDGKKLRIKSKEKCNDGKWHTVVFGHDGEKGRLVVDGLRAREGSLPGNSTISIRAPVYLGSPPSGKPKSLPTNSFVGCLKNFQLDSKPLYTPSSSFGVSSCLGGPLEKGIYFSEEGGHVVLAHSVLLGPEFKLVFSIRPRSLTGILIHIGSQPGKHLCVYLEAGKVTASMDSGAGGTSTSVTPKQSLCDGQWHSVAANLTTLRIPVWKSFFGCLRNIHVNHIPVPVTEALEVQGPVSLNGCPDQ

SEQ ID NO: 827342 - protein, 1607 aa, Homo sapiens
PTSYLGDKVSSYGGYLTYQAKSFGLPGDMVLLEKKPDVQLTGQHMSIIYEETNTPRPDRLHHGRVHVVEGNFRHASSRAPVSREELMTVLSRLADVRIQGLYFTETQRLTLSEVGLEEASDTGSGRIALAVEICACPPAYAGDSCQGCSPGYYRDHKGLYTGRCVPCNCNGHSNQCQDGSGICVNCQHNTAGEHCERCQEGYYGNAVHGSCRACPCPHTNSFATGCVVNGGDVRCSCKAGYTGTQCERCAPGYFGNPQKFGGSCQPCSCNSNGQLGSCHPLTGDCINQEPKDSSPAEECDDCDSCVMTLLNDLATMGEQLRLVKSQLQGLSASAGLLEQMRHMETQAKDLRNQLLNYRSAISNHGSKIEGLERELTDLNQEFETLQEKAQVNSRKAQTLNNNVNRATQSAKELDVKIKNVIRNVHILLKQISGTDGEGNNVPSGDFSREWAEAQRMMRELRNRNFGKHLREAEADKRESQLLLNRIRTWQKTHQGENNGLANSIRDSLNEYEAKLSDLRARLQEAAAQAKQANGLNQENERALGAIQRQVKEINSLQSDFTKYLTTADSSLLQTNIALQLMEKSQKEYEKLAASLNEARQELSDKVRELSRSAGKTSLVEEAEKHARSLQELAKQLEEIKRNASGDELVRCAVDAATAYENILNAIKAAEDAANRAASASESALQTVIKEDLPRKAKTLSSNSDKLLNEAKMTQKKLKQEVSPALNNLQQTLNIVTVQKEVIDTNLTTLRDGLHGIQRGDIDAMISSAKSMVRKANDITDEVLDGLNPIQTDVERIKDTYGRTQNEDFKKALTDADNSVNKLTNKLPDLWRKIESINQQLLPLGNISDNMDRIRELIQQARDAASKVAVPMRFNGKSGVEVRLPNDLEDLKGYTSLSLFLQRPNSRENGGTENMFVMYLGNKDASRDYIGMAVVDGQLTCVYNLGDREAELQVDQILTKSETKEAVMDRVKFQRIYQFARLNYTKGATSSKPETPGVYDMDGRNSNTLLNLDPENVVFYVGGYPPDFKLPSRLSFPPYKGCIELDDLNENVLSLYNFKKTFNLNTTEVEPCRRRKEESDKNYFEGTGYARVPTQPHAPIPTFGQTIQTTVDRGLLFFAENGDRFISLNIEDGKLMVRYKLNSELPKERGVGDAINNGRDHSIQIKIGKLQKRMWINVDVQNTIIDGEVFDFSTYYLGGIPIAIRERFNISTPAFRGCMKNLKKTSGVVRLNDTVGVTKKCSEDWKLVRSASFSRGGQLSFTDLGLPPTDHLQASFGFQTFQPSGILLDHQTWTRNLQVTLEDGYIELSTSDSGGPIFKSPQTYMDGLLHYVSVISDNSGLRLLIDDQLLRNSKRLKHISSSRQSLRLGGSNFEGCISNVFVQRLSLSPEVLDLTSNSLKRDVSLGGCSLNKPPFLMLLKGSTRFNKTKTFRINQLLQDTPVASPRSVKVWQDACSPLPKTQANHGALQFGDIPTSHLLFKLPQELLKPRSQFAVDMQTTSSRGLVFHTGTKNSFMALYLSKGRLVFALGTDGKKLRIKSKEKCNDGKWHTVVFGHDGEKGRLVVDGLRAREGSLPGNSTISIRAPVYLGSPPSGKPKVQVETQALKG

SEQ ID NO: 827343 - protein, 1636 aa, Homo sapiens
PTSYLGDKVSSYGGYLTYQAKSFGLPGDMVLLEKKPDVQLTGQHMSIIYEETNTPRPDRLHHGRVHVVEGNFRHASSRAPVSREELMTVLSRLADVRIQGLYFTETQRLTLSEVGLEEASDTGSGRIALAVEICACPPAYAGDSCQGCSPGYYRDHKGLYTGRCVPCNCNGHSNQCQDGSGICVNCQHNTAGEHCERCQEGYYGNAVHGSCRACPCPHTNSFATGCVVNGGDVRCSCKAGYTGTQCERCAPGYFGNPQKFGGSCQPCSCNSNGQLGSCHPLTGDCINQEPKDSSPAEECDDCDSCVMTLLNDLATMGEQLRLVKSQLQGLSASAGLLEQMRHMETQAKDLRNQLLNYRSAISNHGSKIEGLERELTDLNQEFETLQEKAQVNSRKAQTLNNNVNRATQSAKELDVKIKNVIRNVHILLKQISGTDGEGNNVPSGDFSREWAEAQRMMRELRNRNFGKHLREAEADKRESQLLLNRIRTWQKTHQGENNGLANSIRDSLNEYEAKLSDLRARLQEAAAQAKQANGLNQENERALGAIQRQVKEINSLQSDFTKYLTTADSSLLQTNIALQLMEKSQKEYEKLAASLNEARQELSDKVRELSRSAGKTSLVEEAEKHARSLQELAKQLEEIKRNASGDELVRCAVDAATAYENILNAIKAAEDAANRAASASESALQTVIKEDLPRKAKTLSSNSDKLLNEAKMTQKKLKQEVSPALNNLQQTLNIVTVQKEVIDTNLTTLRDGLHGIQRGDIDAMISSAKSMVRKANDITDEVLDGLNPIQTDVERIKDTYGRTQNEDFKKALTDADNSVNKLTNKLPDLWRKIESINQQLLPLGNISDNMDRIRELIQQARDAASKVAVPMRFNGKSGVEVRLPNDLEDLKGYTSLSLFLQRPNSRENGGTENMFVMYLGNKDASRDYIGMAVVDGQLTCVYNLGDREAELQVDQILTKSETKEAVMDRVKFQRIYQFARLNYTKGATSSKPETPGVYDMDGRNSNTLLNLDPENVVFYVGGYPPDFKLPSRLSFPPYKGCIELDDLNENVLSLYNFKKTFNLNTTEVEPCRRRKEESDKNYFEGTGYARVPTQPHAPIPTFGQTIQTTVDRGLLFFAENGDRFISLNIEDGKLMVRYKLNSELPKERGVGDAINNGRDHSIQIKIGKLQKRMWINVDVQNTIIDGEVFDFSTYYLGGIPIAIRERFNISTPAFRGCMKNLKKTSGVVRLNDTVGVTKKCSEDWKLVRSASFSRGGQLSFTDLGLPPTDHLQASFGFQTFQPSGILLDHQTWTRNLQVTLEDGYIELSTSDSGGPIFKSPQTYMDGLLHYVSVISDNSGLRLLIDDQLLRNSKRLKHISSSRQSLRLGGSNFEGCISNVFVQRLSLSPEVLDLTSNSLKRDVSLGGCSLNKPPFLMLLKGSTRFNKTKTFRINQLLQDTPVASPRSVKVWQDACSPLPKTQANHGALQFGDIPTSHLLFKLPQELLKPRSQFAVDMQTTSSRGLVFHTGTKNSFMALYLSKGRLVFALGTDGKKLRIKSKEKCNDGKWHTVVFGHDGEKGRLVVDGLRAREGSLPGNSTISIRAPVYLGSPPSGKPKSLPTNSFVGCLKNFQLDRGCLVLVKKKKKKKKVETYSSH

SEQ ID NO: 827344 - protein, 1339 aa, Homo sapiens
PTSYLGDKVSSYGGYLTYQAKSFGLPGDMVLLEKKPDVQLTGQHMSIIYEETNTPRPDRLHHGRVHVVEGNFRHASSRAPVSREELMTVLSRLADVRIQGLYFTETQRLTLSEVGLEEASDTGSGRIALAVEICACPPAYAGDSCQGCSPGYYRDHKGLYTGRCVPCNCNGHSNQCQDGSGICVNCQHNTAGEHCERCQEGYYGNAVHGSCRACPCPHTNSFATGCVVNGGDVRCSCKAGYTGTQCERCAPGYFGNPQKFGGSCQPCSCNSNGQLGSCHPLTGDCINQEPKDSSPAEECDDCDSCVMTLLNDLATMGEQLRLVKSQLQGLSASAGLLEQMRHMETQAKDLRNQLLNYRSAISNHGSKIEGLERELTDLNQEFETLQEKAQVNSRKAQTLNNNVNRATQSAKELDVKIKNVIRNVHILLKQISGTDGEGNNVPSGDFSREWAEAQRMMRELRNRNFGKHLREAEADKRESQLLLNRIRTWQKTHQGENNGLANSIRDSLNEYEAKLSDLRARLQEAAAQAKQANGLNQENERALGAIQRQVKEINSLQSDFTKYLTTADSSLLQTNIALQLMEKSQKEYEKLAASLNEARQELSDKVRELSRSAGKTSLVEEAEKHARSLQELAKQLEEIKRNASGDELVRCAVDAATAYENILNAIKAAEDAANRAASASESALQTVIKEDLPRKAKTLSSNSDKLLNEAKMTQKKLKQEVSPALNNLQQTLNIVTVQKEVIDTNLTTLRDGLHGIQRGDIDAMISSAKSMVRKANDITDEVLDGLNPIQTDVERIKDTYGRTQNEDFKKALTDADNSVNKLTNKLPDLWRKIESINQQLLPLGNISDNMDRIRELIQQARDAASKVAVPMRFNGKSGVEVRLPNDLEDLKGYTSLSLFLQRPNSRENGGTENMFVMYLGNKDASRDYIGMAVVDGQLTCVYNLGDREAELQVDQILTKSETKEAVMDRVKFQRIYQFARLNYTKGATSSKPETPGVYDMDGRNSNTLLNLDPENVVFYVGGYPPDFKLPSRLSFPPYKGCIELDDLNENVLSLYNFKKTFNLNTTEVEPCRRRKEESDKNYFEGTGYARVPTQPHAPIPTFGQTIQTTVDRGLLFFAENGDRFISLNIEDGKLMVRYKLNSELPKERGVGDAINNGRDHSIQIKIGKLQKRMWINVDVQNTIIDGEVFDFSTYYLGGIPIAIRERFNISTPAFRGCMKNLKKTSGVVRLNDTVGVTKKCSEDWKLVRSASFSRGGQLSFTDLGLPPTDHLQASFGFQTFQPSGILLDHQTWTRNLQVTLEDGYIELSTSDSGGPIFKSPQTYMDGLLHYVSVISDNSG

SEQ ID NO: 827345 - protein, 202 aa, Homo sapiens
PHNNTAYSDCQKNGSVWMQRAVPYALGKLLSEEGGHVVLAHSVLLGPEFKLVFSIRPRSLTGILIHIGSQPGKHLCVYLEAGKVTASMDSGAGGTSTSVTPKQSLCDGQWHSVAVTIKQHILHLELDTDSSYTAGQIPFPPASTQEPLHLGGAPANLTTLRIPVWKSFFGCLRNIHVNHIPVPVTEALEVQGPVSLNGCPDQ

SEQ ID NO: 827346 - protein, 139 aa, Homo sapiens
SRGSLKASRVALMCYLKAGKVTASMDSGAGGTSTSVTPKQSLCDGQWHSVAVTIKQHILHLELDTDSSYTAGQIPFPPASTQEPLHLGGAPANLTTLRIPVWKSFFGCLRNIHVNHIPVPVTEALEVQGPVSLNGCPDQ

SEQ ID NO: 827347 - protein, 1051 aa, Homo sapiens
TSRNRDASSSEAVSCSMGWLWIFGAALGQCLGYSSQQQRVPFLQPPGQSQLQASYVEFRPSQGCSPGYYRDHKGLYTGRCVPCNCNGHSNQCQDGSGICVNCQHNTAGEHCERCQEGYYGNAVHGSCRACPCPHTNSFATGCVVNGGDVRCSCKAGYTGTQCERCAPGYFGNPQKFGGSCQPCSCNSNGQLGSCHPLTGDCINQEPKDSSPAEECDDCDSCVMTLLNDLATMGEQLRLVKSQLQGLSASAGLLEQMRHMETQAKDLRNQLLNYRSAISNHGSKIEGLERELTDLNQEFETLQEKAQVNSRKAQTLNNNVNRATQSAKELDVKIKNVIRNVHILLKQISGTDGEGNNVPSGDFSREWAEAQRMMRELRNRNFGKHLREAEADKRESQLLLNRIRTWQKTHQGENNGLANSIRDSLNEYEAKLSDLRARLQEAAAQAKQANGLNQENERALGAIQRQVKEINSLQSDFTKYLTTADSSLLQTNIALQLMEKSQKEYEKLAASLNEARQELSDKVRELSRSAGKTSLVEEAEKHARSLQELAKQLEEIKRNASGDELVRCAVDAATAYENILNAIKAAEDAANRAASASESALQTVIKEDLPRKAKTLSSNSDKLLNEAKMTQKKLKQEVSPALNNLQQTLNIVTVQKEVIDTNLTTLRDGLHGIQRGDIDAMISSAKSMVRKANDITDEVLDGLNPIQTDVERIKDTYGRTQNEDFKKALTDADNSVNKLTNKLPDLWRKIESINQQLLPLGNISDNMDRIRELIQQARDAASKVAVPMRFNGKSGVEVRLPNDLEDLKGYTSLSLFLQRPNSRENGGTENMFVMYLGNKDASRDYIGMAVVDGQLTCVYNLGDREAELQVDQILTKSETKEAVMDRVKFQRIYQFARLNYTKGATSSKPETPGVYDMDGRNSNTLLNLDPENVVFYVGGYPPDFKLPSRLSFPPYKGCIELDDLNENVLSLYNFKKTFNLNTTEVEPCRRRKEESDKNYFEGTGYARVPTPLSFGSSEFSLYLTMSLPSSIFRDMKRSPFSAKNSKPLSTVV

SEQ ID NO: 827348 - protein, 780 aa, Homo sapiens
TSRNRDASSSEAVSCSMGWLWIFGAALGQCLGYSSQQQRVPFLQPPGQSQLQASYVEFRPSQGCSPGYYRDHKGLYTGRCVPCNCNGHSNQCQDGSGICVNCQHNTAGEHCERCQEGYYGNAVHGSCRACPCPHTNSFATGCVVNGGDVRCSCKAGYTGTQCERCAPGYFGNPQKFGGSCQPCSCNSNGQLGSCHPLTGDCINQEPKDSSPAEECDDCDSCVMTLLNDLATMGEQLRLVKSQLQGLSASAGLLEQMRHMETQAKDLRNQLLNYRSAISNHGSKIEGLERELTDLNQEFETLQEKAQVNSRKAQTLNNNVNRATQSAKELDVKIKNVIRNVHILLKQISGTDGEGNNVPSGDFSREWAEAQRMMRELRNRNFGKHLREAEADKRESQLLLNRIRTWQKTHQGENNGLANSIRDSLNEYEAKLSDLRARLQEAAAQAKQANGLNQENERALGAIQRQVKEINSLQSDFTKYLTTADSSLLQTNIALQLMEKSQKEYEKLAASLNEARQELSDKVRELSRSAGKTSLVEEAEKHARSLQELAKQLEEIKRNASGDELVRCAVDAATAYENILNAIKAAEDAANRAASASESALQTVIKEDLPRKAKTLSSNSDKLLNEAKMTQKKLKQEVSPALNNLQQTLNIVTVQKEVIDTNLTTLRDGLHGIQRGDIDAMISSAKSMVRKANDITDEVLDGLNPIQTDVERIKDTYGRTQNEDFKKALTDADNSVNKLTNKLPDLWRKIESINQLSVPTRVLLQMLSGKIAPSCFSHGII

SEQ ID NO: 827349 - protein, 478 aa, Homo sapiens
TSRNRDASSSEAVSCSMGWLWIFGAALGQCLGYSSQQQRVPFLQPPGQSQLQASYVEFRPSQGCSPGYYRDHKGLYTGRCVPCNCNGHSNQCQDGSGICVNCQHNTAGEHCERCQEGYYGNAVHGSCRACPCPHTNSFATGCVVNGGDVRCSCKAGYTGTQCERCAPGYFGNPQKFGGSCQPCSCNSNGQLGSCHPLTGDCINQEPKDSSPAEECDDCDSCVMTLLNDLATMGEQLRLVKSQLQGLSASAGLLEQMRHMETQAKDLRNQLLNYRSAISNHGSKIEGLERELTDLNQEFETLQEKAQVNSRKAQTLNNNVNRATQSAKELDVKIKNVIRNVHILLKQISGTDGEGNNVPSGDFSREWAEAQRMMRELRNRNFGKHLREAEADKRESQLLLNRIRTWQKTHQGENNGLANSIRDSLNEYEAKLSDLRARLQEAAAQAKQANGLNQEKKKKKKKKKLGGARAAGPPRKALF

SEQ ID NO: 827350 - protein, 376 aa, Homo sapiens
MLKKISVGVAGDLNTVTMKLGCVLMAWALYLSLGVLWVAQMLLAASFETLQCEGPVCTEESSCHTEDDLTDAREAGFQVKAYTFSEPFHLIVSYDWLILQGPAKPVFEGDLLVLRCQAWQDWPLTQVTFYRDGSALGPPGPNREFSITVVQKADSGHYHCSGIFQSPGPGIPETASVVAITVQELFPAPILRAVPSAEPQAGSPMTLSCQTKLPLQRSAARLLFSFYKDGRIVQSRGLSSEFQIPTASEDHSGSYWCEAATEDNQVWKQSPQLEIRVQGASSSAAPPTLNPAPQKSAAPGTAPEEAPGPLPPPPTPSSEDPGFSSPLGMPDPHLYHQMGLLLKHMQDVRVLLGHLLMELRELSGHRKPGTTKATAE

SEQ ID NO: 827351 - protein, 172 aa, Homo sapiens [sequence omitted]

SEQ ID NO: 827352 - protein, 382 aa, Homo sapiens
MLKKISVGVAGDLNTVTMKLGCVLMAWALYLSLGVLWVAQMLLAAGCHAAASFETLQCEGPVCTEESSCHTEDDLTDAREAGFQVKAYTFSEPFHLIVSYDWLILQGPAKPVFEGDLLVLRCQAWQDWPLTQVTFYRDGSALGPPGPNREFSITVVQKADSGHYHCSGIFQSPGPGIPETASVVAITVQELFPAPILRAVPSAEPQAGSPMTLSCQTKLPLQRSAARLLFSFYKDGRIVQSRGLSSEFQIPTASEDHSGSYWCEAATEDNQVWKQSPQLEIRVQGASSSAAPPTLNPAPQKSAAPGTAPEEAPGPLPPPPTPSSEDPGFSSPLGMPDPHLYHQMGLLLKHMQDVRVLLGHLLMELRELSGHRKPGTTKATAE

SEQ ID NO: 827353 - protein, 198 aa, Homo sapiens
MLKKISVGVAGDLNTVTMKLGCVLMAWALYLSLGVLWVAQMLLAASFETLQCEGPVCTEESSCHTEDDLTDAREAGFQVKAYTFSEPFHLIVSYDWLILQGPAKPVFEGDLLVLRCQAWQDWPLTQVTFYRDGSALGPPGPNREFSITVVQKADSGHYHCSGIFQSPGPGIPETASVVAITVQGQLPASSSPSTRMEG

SEQ ID NO: 827354 - protein, 236 aa, Homo sapiens
MLKKISVGVAGDLNTVTMKLGCVLMAWALYLSLGVLWVAQMLLELFPAPILRAVPSAEPQAGSPMTLSCQTKLPLQRSAARLLFSFYKDGRIVQSRGLSSEFQIPTASEDHSGSYWCEAATEDNQVWKQSPQLEIRVQGASSSAAPPTLNPAPQKSAAPGTAPEEAPGPLPPPPTPSSEDPGFSSPLGMPDPHLYHQMGLLLKHMQDVRVLLGHLLMELRELSGHRKPGTTKATAE

SEQ ID NO: 827355 - protein, 204 aa, Homo sapiens
MLKKISVGVAGDLNTVTMKLGCVLMAWALYLSLGVLWVAQMLLAAGCHAAASFETLQCEGPVCTEESSCHTEDDLTDAREAGFQVKAYTFSEPFHLIVSYDWLILQGPAKPVFEGDLLVLRCQAWQDWPLTQVTFYRDGSALGPPGPNREFSITVVQKADSGHYHCSGIFQSPGPGIPETASVVAITVQGQLPASSSPSTRMEG

SEQ ID NO: 827356 - protein, 287 aa, Homo sapiens
MLKKISVGVAGDLNTVTMKLGCVLMAWALYLSLGVLWVAQMLLAASFETLQCEGPVCTEESSCHTEDDLTDAREAGFQVKAYTFSEPFHLIVSYELFPAPILRAVPSAEPQAGSPMTLSCQTKLPLQRSAARLLFSFYKDGRIVQSRGLSSEFQIPTASEDHSGSYWCEAATEDNQVWKQSPQLEIRVQGASSSAAPPTLNPAPQKSAAPGTAPEEAPGPLPPPPTPSSEDPGFSSPLGMPDPHLYHQMGLLLKHMQDVRVLLGHLLMELRELSGHRKPGTTKATAE

SEQ ID NO: 827357 - protein, 281 aa, Homo sapiens
MLKKISVGVAGDLNTVTMKLGCVLMAWALYLSLGVLWVAQMLLAASFETLQCEGPVCTEESSCHTEDDLTDAREAGFQVKAYTFSEPFHLIVSYDWLILQGPAKPVFEGDLLVLRCQAWQDWPLTQVTFYRDGSALGPPGPNREFSITVVQKADSGHYHCSGIFQSPGPGIPETASVVAITVQGASSSAAPPTLNPAPQKSAAPGTAPEEAPGPLPPPPTPSSEDPGFSSPLGMPDPHLYHQMGLLLKHMQDVRVLLGHLLMELRELSGHRKPGTTKATAE

SEQ ID NO: 827358 - protein, 135 aa, Homo sapiens
GRGTQSWAISVEGHLSQWPVLPGLERKPASVVAITVQGASSSAAPPTLNPAPQKSAAPGTAPEEAPGPLPPPPTPSSEDPGFSSPLGMPDPHLYHQMGLLLKHMQDVRVLLGHLLMELRELSGHRKPGTTKATAE

SEQ ID NO: 827359 - protein, 287 aa, Homo sapiens
MLKKISVGVAGDLNTVTMKLGCVLMAWALYLSLGVLWVAQMLLAASFETLQCEGPVCTEESSCHTEDDLTDAREAGFQVKAYTFSEPFHLIVSYDWLILQGPAKPVFEGDLLVLRCQAWQDWPLTQVTFYRDGSALGPPGPNREFSITVVQKADSGHYHCSGIFQSPGPGIPETASVVAITVQELFPAPILRAVPSAEPQAGSPMTLSCQTKLPLQRSAARLLFSFYKDGRIVQSRGLSSEFQIPTASEDHSGSYWCEAATEDNQVWKQSPQLEIRVQGEFASECRL

SEQ ID NO: 827360 - protein, 192 aa, Homo sapiens
MLKKISVGVAGDLNTVTMKLGCVLMAWALYLSLGVLWVAQMLLAASFETLQCEGPVCTEESSCHTEDDLTDAREAGFQVKAYTFSEPFHLIVSYGASSSAAPPTLNPAPQKSAAPGTAPEEAPGPLPPPPTPSSEDPGFSSPLGMPDPHLYHQMGLLLKHMQDVRVLLGHLLMELRELSGHRKPGTTKATAE

SEQ ID NO: 827361 - protein, 82 aa, Homo sapiens
VKADPAGHSWALFSGSGEYSEPCILSREAELLSNARPATQTLWQKPVLWAASQNGGGASSVDAGLCPRSWLDTAHTCCLGIR

SEQ ID NO: 827362 - protein, 122 aa, Homo sapiens
ASRLPFIEHLLCARHFTHMLPVCTHDNPVGQGLIITSKETGVHVPKVMLQIGGRTGAQTPEPDFLTRGHAGPHCTPALQPTRPIPVQAGRVLLGEWPPSPWPWLLPLEDTGIWAGEQEPGVG

SEQ ID NO: 827363 - protein, 238 aa, Homo sapiens
MLTTLLPILLLSGWAFCSQDASDGLQRLHMLQISYFRDPYHVWYQGNASLGGHLTHVLEGPDTNTTIIQLQPLQEPESWARTQSGLQSYLLQFHGLVRLVHQERTLAFPLTIRCFLGCELPPEGSRAHVFFEVAVNGSSFVSFRPERALWQADTQVTSGVVTFTLQQLNAYNRTRYELREFLEDTCVQYVQKHISAENTKGSQTSRSYTSLVLGVLVGSFIIAGVAVGIFLCTGGRRC

SEQ ID NO: 827364 - protein, 275 aa, Homo sapiens
MLGGVTLKLFYLLPRTAASGARSRPEPGTQVRSLNFRMLTTLLPILLLSGWAFCSQDASDGLQRLHMLQISYFRDPYHVWYQGNASLGGHLTHVLEGPDTNTTIIQLQPLQEPESWARTQSGLQSYLLQFHGLVRLVHQERTLAFPLTIRCFLGCELPPEGSRAHVFFEVAVNGSSFVSFRPERALWQADTQVTSGVVTFTLQQLNAYNRTRYELREFLEDTCVQYVQKHISAENTKGSQTSRSYTSLVLGVLVGSFIIAGVAVGIFLCTGGRRC

SEQ ID NO: 827365 - protein, 238 aa, Homo sapiens; identical to SEQ ID NO: 827363

SEQ ID NO: 827366 - protein, 194 aa, Homo sapiens
ARYEAWGESAEAVLEGPDTNTTIIQLQPLQEPESWARTQSGLQSYLLQFHGLVRLVHQERTLAFPLTIRCFLGCELPPEGSRAHVFFEVAVNGSSFVSFRPERALWQADTQVTSGVVTFTLQQLNAYNRTRYELREFLEDTCVQYVQKHISAENTKGSQTSRSYTSLVLGVLVGSFIIAGVAVGIFLCTGGRRC

SEQ ID NO: 827367 - protein, 203 aa, Homo sapiens
MLTTLLPILLLSGWAFCSQDASDGLQRLHMLQISYFRDPYHVWYQGNASLGGHLTHVLEGPDTNTTIIQLQPLQEPESWARTQSGLQSYLLQFHGLVRLVHQERTLAFPLTIRCFLGCELPPEGSRAHVFFEVAVNGSSFVSFRPERALWQADTQVTSGVVTFTLQQLNAYNRTRYELREFLEDTCVQYVQKHISAENTKDLY

SEQ ID NO: 827368 - protein, 238 aa, Homo sapiens; identical to SEQ ID NO: 827363

SEQ ID NO: 827369 - protein, 238 aa, Homo sapiens; identical to SEQ ID NO: 827363

SEQ ID NO: 827370 - protein, 110 aa, Homo sapiens
MLQISYFRDPYHVWYQGNASLGGHLTHVLEGPDTFTLQQLNAYNRTRYELREFLEDTCVQYVQKHISAENTKGSQTSRSYTSLVLGVLVGSFIIAGVAVGIFLCTGGRRC

SEQ ID NO: 827371 - protein, 249 aa, Homo sapiens
MLTTLLPILLLSGWAFCSQDASDGLQRLHMLQISYFRDPYHVWYQGNASLGGHLTHVLEGPDTNTTIIQLQPLQEPESWARTQSGLQSYLLQFHGLVRLVHQERTLAFPLTIRCFLGCELPPEGSRAHVFFEVAVNGSSFVSFRPERALWQADTQVTSGVVTFTLQQLNAYNRTRYELREFLEDTCVQYVQKHISAENTKGMMGRGPGLQAGERAGSRQMDGPEGWMPREARNGLSLRAFGVGVALSIT

SEQ ID NO: 827372 - protein, 695 aa, Homo sapiens
MDTSTQWAIYIYLLNGNGSIQNYLGCWLKISRIIQFLFIWNLIVQFGVSDVTKILMTYIIGVILKFIRCSASSMMIVYWRKCTMHTDLPRSEKTDVNLQHYLIISNCCMNTHTNTHPQNSHYKIGGQIMTFDKNELLQSSTSLSFLPNILTGYSIHRLLSQCTCYPNTSRHLTGIQEHFVKKEKNKPKKKKSREFPSCFTTSQLQKNQACPCLVPDGSASRVNELEQISGFKMPPNIIWADELTWLDIVLPATGNVLFLLEALTATATVKYQEPPKFFLISLRVNIRHIKNNNPIIKPCEVFLGASSIALIRLRTTHSHPSHLSSLFTHTPSGILLSIKKYVIKIETTKDLSLFTVLSNIYLPSLVSKQRSTLVLIKAGMMLIISEVWDCFVYNKGLLKAEIVRRPGPRSHLPVCVSSVRVSSLRMAEADVSLSQKVFFALFCFVWFLSPRFYCPFYGLELNGSTMQFALLLLSTNSHDEPELEVKPPHKEHGRKIATVRSQTLATGNFSGSEYPSYLRGTAYFSPYLSYYKPKWEPFRLSNKLLKIENVGLNRLPAAKCDEETCHLEATTAGRAGRESPGSPGVGREDKQERKRRPGLSTTARSRHFTAKPKSLHTVEHSSLDFRRGTCEAGTPCRFCFHDLYSAMKWEQVDYVFFFFFNGVSILSPRLECSGVISVHCNLCHPCSSDSPASAP

SEQ ID NO: 827373 - protein, 711 aa, Homo sapiens
MGVFKIIWVVGFKISRIIQFLFIWNLIVQFGVSDVTKILMTYIIGVILKFIRCSASSMMIVYWRKCTMHTDLPRSEKTDVNLQHYLIISNCCMNTHTNTHPQNSHYKIGGQIMTFDKNELLQSSTSLSFLPNILTGYSIHRLLSQCTCYPNTSRHLTGIQEHFVKKEKNKPKKKKSREFPSCFTTSQLQKNQACPCLVPDGSASRVNELEQISGFKMPPNIIWADELTWLDIVLPATGNVLFLLEALTATATVKYQEPPKFFLISLRVNIRHIKNNNPIIKPCEVFLGASSIALIRLRTTHSHPSHLSSLFTHTPSGILLSIKKYVIKIENNKRPFIIYSVKNIYLPSLVSKQRSTLVLIKAGMMLIISEVWDCFVYNKGLLKAEIVRRPGPRSHLPVCVSSVRVSSLRMAEADVSLSQKVFFALFCFVWFLSPRFYCPFYGLELNGSTMQFALLLLSTNSHDEAIIRSKTTTINNMVEKLPQGEARLWRRETSAGPEYPSYLRGTAYFSPYLSYYKPKWEPFRLSNKLLKIENVGLNRLPAAKCDEETCHLEATTAGRAGRESPGSPGVGREDKQERKRRPGLSTTARSRHFTAKPKSLHTVEHSSLDFRRGTCEAGTPCRFCFHDLYSAMKWEQVDKFFFFFLMESHSVTQAGVQWRDLGSLQPLPPMFKRFSCLSPLSSWDYRCLPLRLANFCIFSRDGVSPSWPGWS

SEQ ID NO: 827374 - protein, 195 aa, Homo sapiens
MAAEDVVATGADPSDLESGGLLHEIFTSPLNLLLLGLCIFLLYKIVRGDQPAASGDSDDDEPPPLPRLKRRDFTPAELRRFDGVQDPRILMAINGKVFDVTKGRKFYGPEGPYGVFAGRDASRGLATFCLDKEALKDEYDDLSDLTAAQQETLSDWESQFTFKYHHVGKLLKEGEEPTVYSDEEEPKDESARKND

SEQ ID NO: 827375 - protein, 195 aa, Homo sapiens; identical to SEQ ID NO: 827374

SEQ ID NO: 827376 - protein, 195 aa, Homo sapiens; identical to SEQ ID NO: 827374

SEQ ID NO: 827377 - protein, 143 aa, Homo sapiens
MAAEDVVATGADPSDLESGGLLHEIFTSPLNLLLLGLCIFLLYKIVRGDQPAASGDSDDDEPPPLPRLKRRDFTPAELRRFDGVQDPRILMAINGKVFDVTKGRKFYGPVKYHHVGKLLKEGEEPTVYSDEEEPKDESARKND

SEQ ID NO: 827378 - protein, 193 aa, Homo sapiens
MAAEDVVATGADPSDLESGGLLHEIFTSPLNLLLLGLCIFLLYKIVRGDQPAASGDSDDDEPPPLPRLKRRDFTPAELRRFDGVQDPRILMAINGKVFDVTKGRKFYGPEGPYGVFAGRDASRGLATFCLDKEALKDEYDDLSDLTAAQQETLSDWESQFTFKYHHVGKLLKEGEEPTVYSDEEEPKDESARN

SEQ ID NO: 827379 - protein, 195 aa, Homo sapiens; identical to SEQ ID NO: 827374

SEQ ID NO: 827380 - protein, 196 aa, Homo sapiens
TSLLSNARPSGLASVASHIDVTLELLPQRGRRDRLSPHLPPYSPLYSRFDHLSPSAAPSHFGQSQAPIRLPPPPGAPSISLSPLPQNLCKGYERDPLPSRCIGGNVTGRCGIGTSLPVRARVVRNQNNPLPFISPRIQSLGARLGREWHGDVGRPFKLRTERKNIVFSLSECAWVTLRAPSSSARRKAALRLRVAD

SEQ ID NO: 827381 - protein, 213 aa, Homo sapiens
TSLLSNARPSGLASVASHIDVTLELLPQRGRRDRLSPHLPPYSPLYSRFDHLSPSAAPSHFGQSQAPIRLPPPPGAPSISLSPLPQNLCKGYERDPLPSRPPLRAVRSKKQKLVGGWLGLCPVPRWINCLFSHPLLVPDLLCPRGQTHCAVFCQSVAQHQALPAPVPDRARRTAWSAGLQSPSAVFRGSRDVSGVIAQRQTSQEKELESGLLS

SEQ ID NO: 827382 - protein, 366 aa, Homo sapiens
MTVRNIASICNMGTNASALEKDIGPEQFPINEHYFGLVNFGNTCYCNSVLQALYFCRPFRENVLAYKAQQKKKENLLTCLADLFHSIATQKKKVGVIPPKKFISRLRKENDLFDNYMQQDAHEFLNYLLNTIADILQEEKKQEKQNGKLKNGNMNEPAENNKPELTWVHEIFQGTLTNETRCLNCETVSSKDEDFLDLSVDVEQNTSITHCLRDFSNTETLCSEQKYYCETCCSKQEAQKRMRVKKLPMILALHLKRFKYMEQLHRYTKLSYRVVFPLELRLFNTSSDAVNLDRMYDLVAVVVHCGSGPNRGHYITIVKSHGFWLLFDDDIVEKIDAQAIEEFYGLTSDISKNSESGYILFYQSRE

SEQ ID NO: 827383 - protein, 366 aa, Homo sapiens; identical to SEQ ID NO: 827382

SEQ ID NO: 827384 - protein, 366 aa, Homo sapiens; identical to SEQ ID NO: 827382

SEQ ID NO: 827385 - protein, 341 aa, Homo sapiens
MTVRNIASICNMGTNASALEKDIGPEQFPINEHYFGLVNFGNTCYCNSVLQALYFCRPFRENVLAYKAQQKKKENLLTCLADLFHSIATQKKKVGVIPPKKFISRLRKENDLFDNYMQQDAHEFLNYLLNTIADILQEEKKQEKQNGKLKNGNMNEPAENNKPELTWVHEIFQGTLTNETRCLNCETVSSKDEDFLDLSVDVEQNTSITHCLRDFSNTETLCSEQKYYCETCCSKQEAQKRMRVKKLPMILALHLKRFKYMEQLHRYTKLSYRVVFPLELRLFNTSSDAVNLDRMYDLVAVVVHCGSGPNRGHYITIVKSHGFWLLFDDDIVEVGLQIILQ

SEQ ID NO: 827386 - protein, 369 aa, Homo sapiens
MPLLWKKTLVQSSFQSMNTISDWSMSCPLNWGQALLKGVWGKFGNTCYCNSVLQALYFCRPFRENVLAYKAQQKKKENLLTCLADLFHSIATQKKKVGVIPPKKFISRLRKENDLFDNYMQQDAHEFLNYLLNTIADILQEEKKQEKQNGKLKNGNMNEPAENNKPELTWVHEIFQGTLTNETRCLNCETVSSKDEDFLDLSVDVEQNTSITHCLRDFSNTETLCSEQKYYCETCCSKQEAQKRMRVKKLPMILALHLKRFKYMEQLHRYTKLSYRVVFPLELRLFNTSSDAVNLDRMYDLVAVVVHCGSGPNRGHYITIVKSHGFWLLFDDDIVEKIDAQAIEEFYGLTSDISKNSESGYILFYQSRE

SEQ ID NO: 827387 - protein, 161 aa, Homo sapiens
MTVRNIASICNMGTNASALEKDIGPEQFPINEHYFGLVNFGNTCYCNSVLQALYFCRPFRENVLAYKAQQKKKENLLTCLADLFHSIATQKKKVGVIPPKKFISRLRKENDLFDNYMQQDAHEFLNYLLNTIADILQEEKKQEKQNGKLNQDAEGEQDCWP

SEQ ID NO: 827388 - protein, 165 aa, Homo sapiens
MAESHQEILILLRQSTCYKGLRRLLSKQETGTEFSQELRQLVGLLSPMVYQEVEEQKLHQAACLIQAYWKGFQTRKRLKKLPSAVIALQRSFRSKRSKMLLEINRQKEEEDLKLQLQLQRQRAMRLSQELWLSMLKVVHPGQVEKHNWEMEEKSALIIQKHWRGY

SEQ ID NO: 827389 - protein, 981 aa, Homo sapiens
PPSSPAGPLPGGIIWSPAMDAPKAGYAFEYLIETLNDSSHKKFFDVSKLGTKYDVLPYSIRVLLEAAVRNCDGFLMKKEDVMNILDWKTKQSNVEVPFFPARVLLQDFTGIPAMVDFAAMREAVKTLGGDPEKVHPACPTDLTVDHSLQIDFSKCAIQNAPNPGGGDLQKAGKLSPLKVQPKKLPCRGQTTCRGSCDSGELGRNSGTFSSQIENTPILCPFHLQPVPEPETVLKNQEVEFGRNRERLQFFKWSSRVFKNVAVIPPGTGMAHQINLEYLSRVVFEEKDLLFPDSVVGTDSHITMVNGLGILGWGVGGIETEAVMLGLPVSLTLPEVVGCELTGSSNPFVTSIDVVLGITKHLRQVGVAGKFVEFFGSGVSQLSIVDRTTIANMCPEYGAILSFFPVDNVTLKHLEHTGFSKAKLESMETYLKAVKLFRNDQNSSGEPEYSQVIQINLNSIVPSVSGPKRPQDRVAVTDMKSDFQACLNEKVGFKGFQIAAEKQKDIVSIHYEGSEYKLSHGSVVIAAVISCTNNCNPSVMLAAGLLAKKAVEAGLRVKPYIRTSLSPGSGMVTHYLSSSGVLPYLSKLGFEIVGYGCSTCVGNTAPLSDAVLNAVKQGDLVTCGILSGNKNFEGRLCDCVRANYLASPPLVVAYAIAGTVNIDFQTEPLGTDPTGKNIYLHDIWPSREEVHRVEEEHVILSMFKALKDKIEMGNKRWNSLEAPDSVLFPWDLKSTYIRCPSFFDKLTKEPIALQAIENAHVLLYLGDSVTTDHISPAGSIARNSAAAKYLTNRGLTPREFNSYGARRGNDAVMTRGTFANIKLFNKFIGKPAPKTIHFPSGQTLDVFEAAELYQKEGIPLIILAGKKYGSGNSRDWAAKGPYLLGVKAVLAESYEKIHKDHLIGIGIAPLQFLPGENADSLGLSGRETFSLTFPEELSPGITLNIQTSTGKVFSVIASFEDDVEITLYKHGGLLNFVARKFS

SEQ ID NO: 827390 - protein, 981 aa, Homo sapiens; identical to SEQ ID NO: 827389

SEQ ID NO: 827391 - protein, 659 aa, Homo sapiens [sequence omitted]

SEQ ID NO: 827392 - protein, 713 aa, Homo sapiens
MAHQINLEYLSRVVFEEKDLLFPDSVVGTDSHITMVNGLGILGWGVGGIETEAVMLGLPVSLTLPEVVGCELTGSSNPFVTSIDVVLGITKHLRQVGVAGKFVEFFGSGVSQLSIVDRTTIANMCPEYGAILSFFPVDNVTLKHLEHTGFSKAKLESMETYLKAVKLFRNDQNSSGEPEYSQVIQINLNSIVPSVSGPKRPQDRVAVTDMKSDFQACLNEKVGFKGFQIAAEKQKDIVSIHYEGSEYKLSHGSVVIAAVISCTNNCNPSVMLAAGLLAKKAVEAGLRVKPYIRTSLSPGSGMVTHYLSSSGVLPYLSKLGFEIVGYGCSTCVGNTAPLSDAVLNAVKQGDLVTCGILSGNKNFEGRLCDCVRANYLASPPLVVAYAIAGTVNIDFQTEPLGTDPTGKNIYLHDIWPSREEVHRVEEEHVILSMFKALKDKIEMGNKRWNSLEAPDSVLFPWDLKSTYIRCPSFFDKLTKEPIALQAIENAHVLLYLGDSVTTDHISPAGSIARNSAAAKYLTNRGLTPREFNSYGARRGNDAVMTRGTFANIKLFNKFIGKPAPKTIHFPSGQTLDVFEAAELYQKEGIPLIILAGKKYGSGNSRDWAAKGPYLLGVKAVLAESYEKIHKDHLIGIGIAPLQFLPGENADSLGLSGRETFSLTFPEELSPGITLNIQTSTGKVFSVIASFEDDVEITLYKHGGLLNFVARKFS

SEQ ID NO: 827393 - protein, 281 aa, Homo sapiens [sequence omitted]

SEQ ID NO: 827394 - protein, 981 aa, Homo sapiens; identical to SEQ ID NO: 827389

SEQ ID NO: 827395 - protein, 953 aa, Homo sapiens
PPSSPAGPLPGGIIWSPAMDAPKAGYAFEYLIETLNDSSHKKFFDVSKLGTKYDVLPYSIRVLLEAAVRNCDGFLMKKEDVMNILDWKTKQSNVEVPFFPARVLLQDFTGIPAMVDFAAMREAVKTLGGDPEKVHPACPTDLTVDHSLQIDFSKCAIQNAPNPGGGDLQKAGKLSPLKVQPKKLPCRGQTTCRGSCDSGELGRNSGTFSSQIENTPILCPFHLQPVPEPETVLKNQEVEFGRNRERLQFFKWSSRVFKNVAVIPPGTGMAHQINLEYLSRVVFEEKDLLFPDSVVGTDSHITMVNGLGILGWGVGGIETEAVMLGLPVSLTLPEVVGCELTGSSNPFVTSIDVVLGITKHLRQVGVAGKFVEFFGSGVSQLSIVDRTTIANMCPEYGAILSFFPVDNVTLKHLEHTGFSKAKLESMETYLKAVKLFRNDQNSSGEPEYSQVIQINLNSIVPSVSGPKRPQDRVAVTDMKSDFQACLNEKVGFKGFQIAAEKQKDIVSIHYEGSEYKLSHGSVVIAAVISCTNNCNPSVMLAAGLLAKKAVEAGLRVKPYIRTSLSPGSGMVTHYLSSSGVLPYLSKLGFEIVGYGCSTCVGNTAPLSDAVLNAVKQGDLVTCGILSGNKNFEGRLCDCVRANYLASPPLVVAYAIAGTVNIDFQTEPLGTDPTGKNIYLHDIWPSREEVHRVEEEHVILSMFKALKDKIEMGNKRWNSLEAPDSVLFPWDLKSTYIRCPSFFDKLTKEPIALQAIENAHVLLYLGDSVTTDHISPAGSIARNSAAAKYLTNRGLTPREFNSYGARRGNDAVMTRGTFANIKLFNKFIGKPAPKTIHFPSGQTLDVFEAAELYQKEGIPLIILAGKKYGSGNSRDWAAKGPYLLGVKAVLAESYEKIHKDHLIGIGIAPLQFLPGENADSLGLSGRETFSLTFPEELSPGITLNIQVSLNFSNI

SEQ ID NO: 827396 - protein, 50 aa, Homo sapiens
MVDFAAMREAVKTLGGDPEKVHPACPTDLTVDHSLQIDFSKWYFNADIYR

SEQ ID NO: 827397 - protein, 72 aa, Homo sapiens
IARATVLEAAVSCDHTTALQPGQQSETLFLKERKKKGCHLNRHTIELRYPDFKDMKMLIIATLSFQAPFYPD

SEQ ID NO: 827398 - protein, 165 aa, Homo sapiens
MASGVQVADEVCRIFYDMKVRKCSTPEEIKKRKKAVIFCLSADKKCIIVEEGKEILVGDVGVTITDPFKHFVGMLPEKDCRYALYDASFETKESRKEELMFFLWAPELAPLKSKMIYASSKDAIKKKFQGIKHECQANGPEDLNRACIAEKLGGSLIVAFEGCPV

SEQ ID NO: 827399 - protein, 165 aa, Homo sapiens; identical to SEQ ID NO: 827398

SEQ ID NO: 827400 - protein, 165 aa, Homo sapiens; identical to SEQ ID NO: 827398

SEQ ID NO: 827401 - protein, 104 aa, Homo sapiens
MASGVQVADEVCRIFYDMKVRKCSTPEEIKKRKKAVIFCLSADKKCIIVEEGKEILVGDVGVTITDPFKHFVGMLPEKDCRYALYDASFETKESRKEELMFFLW

SEQ ID NO: 827402 - protein, 165 aa, Homo sapiens; identical to SEQ ID NO: 827398

SEQ ID NO: 827403 - protein, 165 aa, Homo sapiens; identical to SEQ ID NO: 827398

SEQ ID NO: 827404 - protein, 165 aa, Homo sapiens; identical to SEQ ID NO: 827398

SEQ ID NO: 827405 - protein, 165 aa, Homo sapiens; identical to SEQ ID NO: 827398

SEQ ID NO: 827406 - protein, 165 aa, Homo sapiens; identical to SEQ ID NO: 827398

SEQ ID NO: 827407 - protein, 148 aa, Homo sapiens
MKVRKCSTPEEIKKRKKAVIFCLSADKKCIIVEEGKEILVGDVGVTITDPFKHFVGMLPEKDCRYALYDASFETKESRKEELMFFLWAPELAPLKSKMIYASSKDAIKKKFQGIKHECQANGPEDLNRACIAEKLGGSLIVAFEGCPV

SEQ ID NO: 827408 - protein, 165 aa, Homo sapiens; identical to SEQ ID NO: 827398

SEQ ID NO: 827409 - protein, 181 aa, Homo sapiens
KYTGSLLMEMLVYYSFPASGVQVADEVCRIFYDMKVRKCSTPEEIKKRKKAVIFCLSADKKCIIVEEGKEILVGDVGVTITDPFKHFVGMLPEKDCRYALYDASFETKESRKEELMFFLWAPELAPLKSKMIYASSKDAIKKKFQGIKHECQANGPEDLNRACIAEKLGGSLIVAFEGCPV

SEQ ID NO: 827410 - protein, 165 aa, Homo sapiens; identical to SEQ ID NO: 827398

SEQ ID NO: 827411 - protein, 165 aa, Homo sapiens; identical to SEQ ID NO: 827398

SEQ ID NO: 827412 - protein, 168 aa, Homo sapiens
MASGVQVADEVCRIFYDMKVRKCSTPEEIKKRKKAVIFCLSADKKCIIVEEGKEILVGDVGVTITDPFKHFVGMLPEKDCRYALYDASFETKESRKEELMFFLWAPELAPLKSKMIYASSKDAIKKKFQGIKHECQANGPEDLNRACIIIQCHKLKASMFNVILLLYK

SEQ ID NO: 827413 - protein, 73 aa, Homo sapiens
MIEVVCNDRLGKKVRVKCNTDDTIGDLKKLIAAQTGTRWNKIVLKKWYTIFKDHVSLGDYEIHDGMNLELYYQ

SEQ ID NO: 827414 - protein, 130 aa, Homo sapiens
  misc_feature (4)..(4): Xaa can be any naturally occurring amino acid
  misc_feature (41)..(41): Xaa can be any naturally occurring amino acid
  misc_feature (43)..(43): Xaa can be any naturally occurring amino acid
LGHXLWGYESTWLLGFIINSEILIFLPVSSPILIPHTGIEXRXGGVGRFEAIRAPARMIEVVCNDRLGKKVRVKCNTDDTIGDLKKLIAAQTGTRWNKIVLKKWYTIFKDHVSLGDYEIHDGMNLELYYQ

SEQ ID NO: 827415 - protein, 95 aa, Homo sapiens
  misc_feature (1)..(1): Xaa can be any naturally occurring amino acid
  misc_feature (13)..(13): Xaa can be any naturally occurring amino acid
XRRRQKGEGGVGXFEAIRAPARMIEVVCNDRLGKKVRVKCNTDDTIGDLKKLIAAQTGTRWNKIVLKKWYTIFKDHVSLGDYEIHDGMNLELYYQ

SEQ ID NO: 827416 - protein, 72 aa, Homo sapiens
LFKSKAPFWGKKFRVKCNTDDTIGDLKKLIAAQTGTRWNKIVLKKWYTIFKDHVSLGDYEIHDGMNLELYYQ

SEQ ID NO: 827417 - protein, 130 aa, Homo sapiens; identical to SEQ ID NO: 827414
  misc_feature (4)..(4): Xaa can be any naturally occurring amino acid
  misc_feature (41)..(41): Xaa can be any naturally occurring amino acid
  misc_feature (43)..(43): Xaa can be any naturally occurring amino acid

SEQ ID NO: 827418 - protein, 73 aa, Homo sapiens; identical to SEQ ID NO: 827413

SEQ ID NO: 827419 - protein, 73 aa, Homo sapiens; identical to SEQ ID NO: 827413

SEQ ID NO: 827420 - protein, 101 aa, Homo sapiens
TSNLPTPPAPHPSAEPRSQFGAIRAPARMIEVVCNDRLGKKVRVKCNTDDTIGDLKKLIAAQTGTRWNKIVLKKWYTIFKDHVSLGDYEIHDGMNLELYYQ

SEQ ID NO: 827421 - protein, 73 aa, Homo sapiens; identical to SEQ ID NO: 827413

SEQ ID NO: 827422 - protein, 73 aa, Homo sapiens; identical to SEQ ID NO: 827413

SEQ ID NO: 827423 - protein, 73 aa, Homo sapiens; identical to SEQ ID NO: 827413

SEQ ID NO: 827424 - protein, 73 aa, Homo sapiens; identical to SEQ ID NO: 827413

SEQ ID NO: 827425 - protein, 73 aa, Homo sapiens; identical to SEQ ID NO: 827413

SEQ ID NO: 827426 - protein, 73 aa, Homo sapiens; identical to SEQ ID NO: 827413

SEQ ID NO: 827427 - protein, 787 aa, Homo sapiens
MSVQSSSGSLEGPPSWSQLSTSPTPGSAAAARSLLNHTPPSGRPREGAMDELHSLDPRRQELLEARFTGVASGSTGSTGSCSVGAKASTNNESSNHSFGSLGSLSDKESETPEKKQSESSRGRKRKAENQNESSQGFPNLPVFQSLAYWEMGRTAGGKSIGGRGHKISDYFEYQGGNGSSPVRGIPPAIRSPQNSHSHSTPSSSVRPNSPSPTALAFGDHPIVQPKQLSFKIIQTDLTMLKLAALESNKIQDLEKKEGRIDDLLRANCDLRRQIDEQQKLLEKYKERLNKCISMSKKLLIEKSTQEKLSSREKSMQDRLRLGHFTTVRHGASFTEQWTDGFAFQNLVKQQEWVNQQREDIERQRKLLAKRKPPTANNSQAPSTNSEPKQRKNKAVNGAENDPFVRPNLPQLLTLAEYHEQEEIFKLRLGHLKKEEAEIQAELERLERVRNLHIRELKRINNEDNSQFKDHPTLNERYLLLHLLGRGGFSEVYKAFDLYEQRYAAVKIHQLNKSWRDEKKENYHKHACREYRIHKELDHPRIVKLYDYFSLDTDTFCTVLEYCEGNDLDFYLKQHKLMSEKEARSIVMQIVNALRYLNEIKPPIIHYDLKPGNILLVDGTACGEIKITDFGLSKIMDDDSYGVDGMDLTSQGAGTYWYLPPECFVVGKEPPKISNKVDVWSVGVIFFQCLYGRKPFGHNQSQQDILQENTILKATEVQFPVKPVVSSEAKAFIRRCLAYRKEDRFDVHQLANDPYLLPHMRRSNSSGNLHMAGLTASPTPPSSSIITY

SEQ ID NO: 827428 - protein, 787 aa, Homo sapiens; identical to SEQ ID NO: 827427

SEQ ID NO: 827429 - protein, 787 aa, Homo sapiens; identical to SEQ ID NO: 827427

SEQ ID NO: 827430 - protein, 766 aa, Homo sapiens
MSVQSSSGSLEGPPSWSQLSTSPTPGSAAAARSLLNHTPPSGRPREGAMDELHSLDPRRQELLEARFTGVASGSTGSTGSCSVGAKASTNNESSNHSFGSLGSLSDKESETPEKKQSESSRGRKRKAENQNESSQGKSIGGRGHKISDYFEYQGGNGSSPVRGIPPAIRSPQNSHSHSTPSSSVRPNSPSPTALAFGDHPIVQPKQLSFKIIQTDLTMLKLAALESNKIQDLEKKEGRIDDLLRANCDLRRQIDEQQKLLEKYKERLNKCISMSKKLLIEKSTQEKLSSREKSMQDRLRLGHFTTVRHGASFTEQWTDGFAFQNLVKQQEWVNQQREDIERQRKLLAKRKPPTANNSQAPSTNSEPKQRKNKAVNGAENDPFVRPNLPQLLTLAEYHEQEEIFKLRLGHLKKEEAEIQAELERLERVRNLHIRELKRINNEDNSQFKDHPTLNERYLLLHLLGRGGFSEVYKAFDLYEQRYAAVKIHQLNKSWRDEKKENYHKHACREYRIHKELDHPRIVKLYDYFSLDTDTFCTVLEYCEGNDLDFYLKQHKLMSEKEARSIVMQIVNALRYLNEIKPPIIHYDLKPGNILLVDGTACGEIKITDFGLSKIMDDDSYGVDGMDLTSQGAGTYWYLPPECFVVGKEPPKISNKVDVWSVGVIFFQCLYGRKPFGHNQSQQDILQENTILKATEVQFPVKPVVSSEAKAFIRRCLAYRKEDRFDVHQLANDPYLLPHMRRSNSSGNLHMAGLTASPTPPSSSIITY

SEQ ID NO: 827431 - protein, 549 aa, Homo sapiens
MLKLAALESNKIQDLEKKEGRIDDLLRANCDLRRQIDEQQKLLEKYKERLNKCISMSKKLLIEKSTQEKLSSREKSMQDRLRLGHFTTVRHGASFTEQWTDGFAFQNLVKQQEWVNQQREDIERQRKLLAKRKPPTANNSQAPSTNSEPKQRKNKAVNGAENDPFVRPNLPQLLTLAEYHEQEEIFKLRLGHLKKEEAEIQAELERLERVRNLHIRELKRINNEDNSQFKDHPTLNERYLLLHLLGRGGFSEVYKAFDLYEQRYAAVKIHQLNKSWRDEKKENYHKHACREYRIHKELDHPRIVKLYDYFSLDTDTFCTVLEYCEGNDLDFYLKQHKLMSEKEARSIVMQIVNALRYLNEIKPPIIHYDLKPGNILLVDGTACGEIKITDFGLSKIMDDDSYGVDGMDLTSQGAGTYWYLPPECFVVGKEPPKISNKVDVWSVGVIFFQCLYGRKPFGHNQSQQDILQENTILKATEVQFPVKPVVSSEAKAFIRRCLAYRKEDRFDVHQLANDPYLLPHMRRSNSSGNLHMAGLTASPTPPSSSIITY

SEQ ID NO: 827432 - protein, 766 aa, Homo sapiens; identical to SEQ ID NO: 827430

SEQ ID NO: 827433 - protein, 211 aa, Homo sapiens
MSEKEARSIVMQIVNALRYLNEIKPPIIHYDLKPGNILLVDGTACGEIKITDFGLSKIMDDDSYGVDGMDLTSQGAGTYWYLPPECFVVGKEPPKISNKVDVWSVGVIFFQCLYGRKPFGHNQSQQDILQENTILKATEVQFPVKPVVSSEAKAFIRRCLAYRKEDRFDVHQLANDPYLLPHMRRSNSSGNLHMAGLTASPTPPSSSIITY

SEQ ID NO: 827434 - protein, 766 aa, Homo sapiens; identical to SEQ ID NO: 827430

SEQ ID NO: 827435 - protein, 674 aa, Homo sapiens
MSVQSSSGSLEGPPSWSQLSTSPTPGSAAAARSLLNHTPPSGRPREGAMDELHSLDPRRQELLEARFTGVASGSTGSTGSCSVGAKASTNNESSNHSFGSLGSLSDKESETPEKKQSESSRGRKRKAENQNESSQGKSIGGRGHKISDYFEYQGGNGSSPVRGIPPAIRSPQNSHSHSTPSSSVRPNSPSPTALAFGDHPIVQPKQLSFKIIQTDLTMLKLAALESNKIQDLEKKEGRIDDLLRANCDLRRQIDEQQKLLEKYKERLNKCISMSKKLLIEKSTQEKLSSREKSMQDRLRLGHFTTVRHGASFTEQWTDGFAFQNLVKQQEWVNQQREDIERQRKLLAKRKPPTANNSQAPSTNSEPKQRKNKAVNGAENDPFVRPNLPQLLTLAEYHEQEEIFKLRLGHLKKEEAEIQAELERLERVRNLHIRELKRINNEDNSQFKDHPTLNERYLLLHLLGRGGFSEVYKAFDLYEQRYAAVKIHQLNKSWRDEKKENYHKHACREYRIHKELDHPRIVKLYDYFSLDTDTFCTVLEYCEGNDLDFYLKQHKLMSEKEARSIVMQIVNALRYLNEIKPPIIHYDLKPGNILLVDGTACGEIKITDFGLSKIMDDDSYGVDGMDLTSQGAGTYWYLPPECFVGGISPDTTTWIKFQINVYNPIEPYIIKSFKV

SEQ ID NO: 827436 - protein, 445 aa, Homo sapiens
MSVQSSSGSLEGPPSWSQLSTSPTPGSAAAARSLLNHTPPSGRPREGAMDELHSLDPRRQELLEARFTGVASGSTGSTGSCSVGAKASTNNESSNHSFGSLGSLSDKESETPEKKQSESSRGRKRKAENQNESSQGKSIGGRGHKISDYFEYQGGNGSSPVRGIPPAIRSPQNSHSHSTPSSSVRPNSPSPTALAFGDHPIVQPKQLSFKIIQTDLTMLKLAALESNKIQDLEKKEGRIDDLLRANCDLRRQIDEQQKLLEKYKERLNKCISMSKKLLIEKSTQEKLSSREKSMQDRLRLGHFTTVRHGASFTEQWTDGFAFQNLVKQQEWVNQQREDIERQRKLLAKRKPPTANNSQAPSTNSEPKQRKNKAVNGAENDPFVRPNLPQLLTLAEYHEQEEIFKLRLGHLKKEEAEIQAELERLERVRNLHIRELKRINNEDNSQ

SEQ ID NO: 827437 - protein, 478 aa, Homo sapiens
SSAPPTYHAVKATPAPARTVSKLVLKSRPLFLGRPVDRASAAETMSADGAEADGSTQVTVEEPVQQPSVVDRVASMPLISSTCDMVSAAYASTKESYPHIKTVCDAAEKGVRTLTAAAVSGAQPILSKLEPQIASASEYAHRGLDKLEENLPILQQPTEKVLADTKELVSSKVSGAQEMVSSAKDTVATQLSEAVDATRGAVQSGVDKTKSVVTGGVQSVMGSRLGQMVLSGVDTVLGKSEEWADNHLPLTDAELARIATSLDGFDVASVQQQRQEQSYFVRLGSLSERLRQHAYEHSLGKLRATKQRAQEALLQLSQALSLMETVKQGVDQKLVEGQEKLHQMWLSWNQKQLQGPEKEPPKPEQVESRALTMFRDIAQQLQATCTSLGSSIQGLPTNVKDQVQQARRQVEDLQATFSSIHSFQDLSSSILAQSRERVASAREALDHMVEYVAQNTPVTWLVGPFAPGITEKAPEEKK

SEQ ID NO: 827438 - protein, 467 aa, Homo sapiens
MSGGINRHEAKLVLKSRPLFLGRPVDRASAAETMSADGAEADGSTQVTVEEPVQQPSVVDRVASMPLISSTCDMVSAAYASTKESYPHIKTVCDAAEKGVRTLTAAAVSGAQPILSKLEPQIASASEYAHRGLDKLEENLPILQQPTEKVLADTKELVSSKVSGAQEMVSSAKDTVATQLSEAVDATRGAVQSGVDKTKSVVTGGVQSVMGSRLGQMVLSGVDTVLGKSEEWADNHLPLTDAELARIATSLDGFDVASVQQQRQEQSYFVRLGSLSERLRQHAYEHSLGKLRATKQRAQEALLQLSQALSLMETVKQGVDQKLVEGQEKLHQMWLSWNQKQLQGPEKEPPKPEQVESRALTMFRDIAQQLQATCTSLGSSIQGLPTNVKDQVQQARRQVEDLQATFSSIHSFQDLSSSILAQSRERVASAREALDHMVEYVAQNTPVTWLVGPFAPGITEKAPEEKK

SEQ ID NO: 827439 - protein, 434 aa, Homo sapiens
MSADGAEADGSTQVTVEEPVQQPSVVDRVASMPLISSTCDMVSAAYASTKESYPHIKTVCDAAEKGVRTLTAAAVSGAQPILSKLEPQIASASEYAHRGLDKLEENLPILQQPTEKVLADTKELVSSKVSGAQEMVSSAKDTVATQLSEAVDATRGAVQSGVDKTKSVVTGGVQSVMGSRLGQMVLSGVDTVLGKSEEWADNHLPLTDAELARIATSLDGFDVASVQQQRQEQSYFVRLGSLSERLRQHAYEHSLGKLRATKQRAQEALLQLSQALSLMETVKQGVDQKLVEGQEKLHQMWLSWNQKQLQGPEKEPPKPEQVESRALTMFRDIAQQLQATCTSLGSSIQGLPTNVKDQVQQARRQVEDLQATFSSIHSFQDLSSSILAQSRERVASAREALDHMVEYVAQNTPVTWLVGPFAPGITEKAPEEKK

SEQ ID NO: 827440 - protein, 478 aa, Homo sapiens; identical to SEQ ID NO: 827437

SEQ ID NO: 827441 - protein, 492 aa, Homo sapiens
SSAPPTYHAVKATPAPARTVSKLVLKSRPLFLGRPVDRASAAETMSADGAEADGSTQVTVEEPVQQPSVVDRVASMPLISSTCDMVSAAYASTKESYPHIKTVCDAAEKGVRTLTAAAVSGAQPILSKLEPQIASASEYAHRGLDKLEENLPILQQPTEKVLADTKELVSSKVSGAQEMVSSAKDTVATQLSEAVDATRGAVQSGVDKTKSVVTGGVQSVMGSRLGQMVLSGVDTVLGKSEEWADNHLPLTDAELARIATSLDGFDVASVQQQRQEQSYFVRLGSLSERLRQHAYEHSLGKLRATKQRAQEALLQLSQALSLMETVKQGVDQKLVEGQEKLHQMWLSWNQKQLQGPEKEPPKPEQVESRALTMFRDIAQQLQATCTSLGSSIQAPTSEDRSQPRSGDSGSVRSLFRPVRRLAKAGGFPGPEGGTLGTCGRTLSGRDLARKLKPAKYGAGQCAQYEFGTSEDNLYTQCCNIIRRRYVGEKVEI

SEQ ID NO: 827442 - protein, 457 aa, Homo sapiens
EAGWWSRPLFLGRPVDRASAAETMSADGAEADGSTQVTVEEPVQQPSVVDRVASMPLISSTCDMVSAAYASTKESYPHIKTVCDAAEKGVRTLTAAAVSGAQPILSKLEPQIASASEYAHRGLDKLEENLPILQQPTEKVLADTKELVSSKVSGAQEMVSSAKDTVATQLSEAVDATRGAVQSGVDKTKSVVTGGVQSVMGSRLGQMVLSGVDTVLGKSEEWADNHLPLTDAELARIATSLDGFDVASVQQQRQEQSYFVRLGSLSERLRQHAYEHSLGKLRATKQRAQEALLQLSQALSLMETVKQGVDQKLVEGQEKLHQMWLSWNQKQLQGPEKEPPKPEQVESRALTMFRDIAQQLQATCTSLGSSIQGLPTNVKDQVQQARRQVEDLQATFSSIHSFQDLSSSILAQSRERVASAREALDHMVEYVAQNTPVTWLVGPFAPGITEKAPEEKK

SEQ ID NO: 827443 - protein, 477 aa, Homo sapiens
  misc_feature (7)..(7): Xaa can be any naturally occurring amino acid
MLRRTAXYCRRAGIRAASVIDWQQEATSTSCDRVDTRLDLCSNTLGRTRCAGHIRVLDWSSVVEMCSSRCHGYACCICIIGCDMVSAAYASTKESYPHIKTVCDAAEKGVRTLTAAAVSGAQPILSKLEPQIASASEYAHRGLDKLEENLPILQQPTEKVLADTKELVSSKVSGAQEMVSSAKDTVATQLSEAVDATRGAVQSGVDKTKSVVTGGVQSVMGSRLGQMVLSGVDTVLGKSEEWADNHLPLTDAELARIATSLDGFDVASVQQQRQEQSYFVRLGSLSERLRQHAYEHSLGKLRATKQRAQEALLQLSQALSLMETVKQGVDQKLVEGQEKLHQMWLSWNQKQLQGPEKEPPKPEQVESRALTMFRDIAQQLQATCTSLGSSIQGLPTNVKDQVQQARRQVEDLQATFSSIHSFQDLSSSILAQSRERVASAREALDHMVEYVAQNTPVTWLVGPFAPGITEKAPEEKK

SEQ ID NO: 827444 - protein, 320 aa, Homo sapiens
EAGWWSRPLFLGRPVDRASAAETMSADGAEADGSTQVTVEEPVQQPSVVDRVASMPLISSTCDMVSAAYASTKESYPHIKTVCDAAEKGVRTLTAAAVSGAQPILSKLEPQIASASEYAHRGLDKLEENLPILQQPTEKVLADTKELVSSKVSGAQEMVSSAKDTVATQLSEAVDATRGAVQSGVDKTKSVVTGGVQSVMGSRLGQMVLSGVDTVLGKSEEWADNHLPLTDAELAESAHPWIGSTSSQCTEERGTRLLDVWPRGKVRNAEDLGVYHQRGRSCAVSLLRNQSYKLERKPMCDKLARAEAAMNKVRKLRTEV

SEQ ID NO: 827445 - protein, 478 aa, Homo sapiens; identical to SEQ ID NO: 827437

SEQ ID NO: 827446 - protein, 478 aa, Homo sapiens; identical to SEQ ID NO: 827437

SEQ ID NO: 827447 - protein, 414 aa, Homo sapiens
SSAPPTYHAVKATPAPARTVSKLVLKSRPLFLGRPVDRASAAETMSADGAEADGSTQVTVEEPVQQPSVVDRVASMPLISSTCDMVSAAYASTKESYPHIKTVCDAAEKGVRTLTAAAVSGAQPILSKLEPQIASASEYAHRGLDKLEENLPILQQPTEKVLADTKELVSSKVSGAQEMVSSAKDTVATQLSEAVDATRGAVQSGVDKTKSVVTGGVQSVMGSRLGQMVLSGVDTVLGKSEEWADNHLPLTDAELARIATSLDGFDVASVQQQRQEQSYFVRLGSLSERLRQHAYEHSLGKLRATKQRAQEALLQLSQALSLMETVKQGVDQKLVEGQEKLHQMWLSWNQKQLQGPEKEPPKPEQVESRALTMFRDIAQQLQATCTSLGSSIQGLPTNVKIAPLHSSLGDKSET

SEQ ID NO: 827448 - protein, 436 aa, Homo sapiens
SSAPPTYHAVKATPAPARTVSKLVLKSRPLFLGRPVDRASAAETMSADGAEADGSTQVTVEEPVQQPSVVDRVASMPLISSTCDMVSAAYASTKESYPHIKTVCDAAEKGVRTLTAAAVSGAQPILSKLEPQIASASEYAHRGLDKLEENLPILQQPTEKVLADTKELVSSKVSGAQEMVSSAKDTVATQLSEAVDATRGAVQSGVDKTKSVVTGGVQSVMGSRLGQMVLSGVDTVLGKSEEWADNHLPLTDAELARIATSLDGFDVASVQQQRQEQSYFMETVKQGVDQKLVEGQEKLHQMWLSWNQKQLQGPEKEPPKPEQVESRALTMFRDIAQQLQATCTSLGSSIQGLPTNVKDQVQQARRQVEDLQATFSSIHSFQDLSSSILAQSRERVASAREALDHMVEYVAQNTPVTWLVGPFAPGITEKAPEEKK

SEQ ID NO: 827449 - protein, 403 aa, Homo sapiens [sequence omitted]

SEQ ID NO: 827450 - protein, 271 aa, Homo sapiens
MSGRGKQGGKARAKAKTRSSRAGLQFPVGRVHRLLRKGNYSERVGAGAPVYLAAVLEYLTAEILELAGNAARDNKKTRIIPRHLQLAIRNDEELNKLLGKVTIAQGGVLPNIQAVLLPKKTESHHKAKAGFEKFAMARTKQTARKSTGGKAPRKQLATKAARKSAPATGGVKKPHRYRPGTVALREIRRYQKSTELLIRKLPFQRLVREIAQDFKTDLRFQSSAVMALQEACEAYLVGLFEDTNLCAIHAKRVTIMPKDIQLARRIRGERA

SEQ ID NO: 827451 - protein, 1588 aa, Homo sapiens
MVQKKKFCPRLLDYLVIVGARHPSSDSVAQTPELLRRYPLEDHTEFPLPPDVVFFCQPEGCLSVRQRRMSLRDDTSFVFTLTDKDTGVTRYGICVNFYRSFQKRISKEKGEGGAGSRGKEGTHATCASEEGGTESSESGSSLQPLSADSTPDVNQSPRGKRRAKAGSRSRNSTLTSLCVLSHYPFFSTFRECLYTLKRLVDCCSERLLGKKLGIPRGVQRDTMWRIFTGSLLVEEKSSALLHDLREIEAWIYRLLRSPVPVSGQKRVDIEVLPQELQPALTFALPDPSRFTLVDFPLHLPLELLGVDACLQVLTCILLEHKVVLQSRDYNALSMSVMAFVAMIYPLEYMFPVIPLLPTCMASAEQLLLAPTPYIIGVPASFFLYKLDFKMPDDVWLVDLDSNRVIAPTNAEVLPILPEPESLELKKHLKQALASMSLNTQPILNLEKFHEGQEIPLLLGRPSNDLQSTPSTEFNPLIYGNDVDSVDVATRVAMVRFFNSANVLQGFQMHTRTLRLFPRPVVAFQAGSFLASRPRQTPFAEKLARTQAVEYFGEWILNPTNYAFQRIHNNMFDPALIGDKPKWYAHQLQPIHYRVYDSNSQLAEALSVPPERDSDSEPTDDSGSDSMDYDDSSSSYSSLGDFVSEMMKCDINGDTPNVDPLTHAALGDASEVEIDELQNQKEAEEPGPDSENSQENPPLRSSSSTTASSSPSTVIHGANSEPADSTEMDDKAAVGVSKPLPSVPPSIGKSNVDRRQAEIGEGSVRRRIYDNPYFEPQYGFPPEEDEDEQGESYTPRFSQHVSGNRAQKLLRPNSLRLASDSDAESDSRASSPNSTVSNTSTEGFGGIMSFASSLYRNHSTSFSLSNLTLPTKGAREKATPFPSLKGNRRALVDQKSSVIKHSPTVKREPPSPQGRSSNSSENQQFLKEVVHSVLDGQGVGWLNMKKVRRLLESEQLRVFVLSKLNRMVQSEDDARQDIIPDVEISRKVYKGMLDLLKCTVLSLEQSYAHAGLGGMASIFGLLEIAQTHYYSKEPDKRKRSPTESVNTPVGKDPGLAGRGDPKAMAQLRVPQLGPRAPSATGKGPKELDTRSLKEENFIASIGPEVIKPVFDLGETEEKKSQISADSGVSLTSSSQRTDQDSVIGVSPAVMIRSSSQDSEVSTVVSNSSGETLGADSDLSSNAGDGPGGEGSVHLASSRGTLSDSEIETNSATSTIFGKAHSLKPSIKEKLAGSPIRTSEDVSQRVYLYEGLLGKERSTLWDQMQFWEDAFLDAVMLEREGMGMDQGPQEMIDRYLSLGEHDRKRLEDDEDRLLATLLHNLISYMLLMKVNKNDIRKKVRRLMGKSHIGLVYSQQINEVLDQLANLNGRDLSIWSSGSRHMKKQTFVVHAGTDTNGDIFFMEVCDDCVVLRSNIGTVYERWWYEKLINMTYCPKTKVLCLWRRNGSETQLNKFYTKKCRELYYCVKDSMERAAARQQSIKPGPELGGEFPVQDLKTGEGGLLQVTLEGINLKFMHNQVFIELNHIKKCNTVRGVFVLEEFVPEIKEVVSHKYKTPMAHEICYSVLCLFSYVAAVHSSEEDLRTPPRPVSS

SEQ ID NO: 827452 - protein, 1588 aa, Homo sapiens; identical to SEQ ID NO: 827451

SEQ ID NO: 827453 - protein, 1581 aa, Homo sapiens
MVQKKKFCPRLLDYLVIVGARHPSSDSVAQTPELLRRYPLEDHTEFPLPPDVVFFCQPEGCLSVRQRRMSLRDDTSFVFTLTDKDTGVTRYGICVNFYRSFQKRISKEKGEGGAGSRGKEGTHATCASEEGGTESSESGSSLQPLSADSTPDVNQSPRGKRRAKAGSRSRNSTLTSLCVLSHYPFFSTFRECLYTLKRLVDCCSERLLGKKLGIPRGVQRDTMWRIFTGSLLVEEKSSALLHDLREIEAWIYRLLRSPVPVSGQKRVDIEVLPQELQPALTFALPDPSRFTLVDFPLHLPLELLGVDACLQVLTCILLEHKVVLQSRDYNALSMSVMAFVAMIYPLEYMFPVIPLLPTCMASAEQLLLAPTPYIIGVPASFFLYKLDFKMPDDVWLVDLDSNRVIAPTNAEVLPILPEPESLELKKHLKQALASMSLNTQPILNLEKFHEGQEIPLLLGRPSNDLQSTPSTEFNPLIYGNDVDSVDVATRVAMVRFFNSANVLQGFQMHTRTLRLFPRPVVAFQAGSFLASRPRQTPFAEKLARTQAVEYFGEWILNPTNYAFQRIHNNMFDPALIGDKPKWYAHQLQPIHYRVYDSNSQLAEALSVPPERDSDSEPTDDSGSDSMDYDDSSSSYSSLGDFVSEMMKCDINGDTPNVDPLTHAALGDASEVEIDELQNQKEAEEPGPDSENSQENPPLRSSSSTTASSSPSTVIHGANSEPADSTEMDDKAAVGVSKPLPSVPPSIGKSNVDRRQAEIGEGSVRRRIYDNPYFEPQYGFPPEEDEDEQGESYTPRFSQHVSGNRAQKLLRPNSLRLASDSDAESDSRASSPNSTVSNTSTEGFGGIMSFASSLYRNHSTSFSLSNLTLPTKGAREKATPFPSLKVFGLNTLMEIVTEAGPGSGEGNRRALVDQKSSVIKHSPTVKREPPSPQGRSSNSSENQQFLKEVVHSVLDGQGVGWLNMKKVRRLLESEQLRVFVLSKLNRMVQSEDDARQDIIPDVEISRKVYKGMLDLLKCTVLSLEQSYAHAGLGGMASIFGLLEIAQTHYYSKEPDKRKRSPTESVNTPVGKDPGLAGRGDPKAMAQLRVPQLGPRAPSATGKGPKELDTRSLKEENFIASIELWNKHQEVKKQKALEKQRPEVIKPVFDLGETEEKKSQISADSGVSLTSSSQRTDQDSVIGVSPAVMIRSSSQDSEVSTVVSNSSGETLGADSDLSSNAGDGPGGEGSVHLASSRGTLSDSEIETNSATSTIFGKAHSLKPSIKEKLAGSPIRTSEDVSQRVYLYEGLLGRDKGSMWDQLEDAAMETFSISKERSTLWDQMQFWEDAFLDAVMLEREGMGMDQGPQEMIDRYLSLGEHDRKRLEDDEDRLLATLLHNLISYMLLMKVNKNDIRKKVRRLMGKSHIGLVYSQQINEVLDQLANLNGRDLSIWSSGSRHMKKQTFVVHAGTDTNGDIFFMEVCDDCVVLRSNIGTVYERWWYEKLINMTYCPKTKVLCLWRRNGSETQLNKFYTKKCRELYYCVKDSMERAAARQQSIKPGPELGGEFPVQDLKTGEGGLLQVTLEGINLKFMHNQFLKLKKW

SEQ ID NO: 827454 - protein, 1545 aa, Homo sapiens
MVQKKKFCPRLLDYLVIVGARHPSSDSVAQTPELLRRYPLEDHTEFPLPPDVVFFCQPEGCLSVRQRRMSLRDDTSFVFTLTDKDTGVTRYGICVNFYRSFQKRISKEKGEGGAGSRGKEGTHATCASEEGGTESSESGSSLQPLSADSTPDVNQSPRGKRRAKAGSRSRNSTLTSLCVLSHYPFFSTFRECLYTLKRLVDCCSERLLGKKLGIPRGVQRDTMWRIFTGSLLVEEKSSALLHDLREIEAWIYRLLRSPVPVSGQKRVDIEVLPQELQPALTFALPDPSRFTLVDFPLHLPLELLGVDACLQVLTCILLEHKVVLQSRDYNALSMSVMAFVAMIYPLEYMFPVIPLLPTCMASAEQLLLAPTPYIIGVPASFFLYKLDFKMPDDVWLVDLDSNRVIAPTNAEVLPILPEPESLELKKHLKQALASMSLNTQPILNLEKFHEGQEIPLLLGRPSNDLQSTPSTEFNPLIYGNDVDSVDVATRVAMVRFFNSANVLQGFQMHTRTLRLFPRPVVAFQAGSFLASRPRQTPFAEKLARTQAVEYFGEWILNPTNYAFQRIHNNMFDPALIGDKPKWYAHQLQPIHYRVYDSNSQLAEALSVPPERDSDSEPTDDSGSDSMDYDDSSSSYSSLGDFVSEMMKCDINGDTPNVDPLTHAALGDASEVEIDELQNQKEAEEPGPDSENSQENPPLRSSSSTTASSSPSTVIHGANSEPADSTEMDDKAAVGVSKPLPSVPPSIGKSNVDRRQAEIGEGAQKLLRPNSLRLASDSDAESDSRASSPNSTVSNTSTEGFGGIMSFASSLYRNHSTSFSLSNLTLPTKGAREKATPFPSLKGNRRALVDQKSSVIKHSPTVKREPPSPQGRSSNSSENQQFLKEVVHSVLDGQGVGWLNMKKVRRLLESEQLRVFVLSKLNRMVQSEDDARQDIIPDVEISRKVYKGMLDLLKCTVLSLEQSYAHAGLGGMASIFGLLEIAQTHYYSKEPDKRKRSPTESVNTPVGKDPGLAGRGDPKAMAQLRVPQLGPRAPSATGKGPKELDTRSLKEENFIASIGPEVIKPVFDLGETEEKKSQISADSGVSLTSSSQRTDQDSVIGVSPAVMIRSSSQDSEVSTVVSNSSGETLGADSDLSSNAGDGPGGEGSVHLASSRGTLSDSEIETNSATSTIFGKAHSLKPSIKEKLAGSPIRTSEDVSQRVYLYEGLLGKERSTLWDQMQFWEDAFLDAVMLEREGMGMDQGPQEMIDRYLSLGEHDRKRLEDDEDRLLATLLHNLISYMLLMKVNKNDIRKKVRRLMGKSHIGLVYSQQINEVLDQLANLNGRDLSIWSSGSRHMKKQTFVVHAGTDTNGDIFFMEVCDDCVVLRSNIGTVYERWWYEKLINMTYCPKTKVLCLWRRNGSETQLNKFYTKKCRELYYCVKDSMERAAARQQSIKPGPELGGEFPVQDLKTGEGGLLQVTLEGINLKFMHNQVFIELNHIKKCNTVRGVFVLEEFVPEIKEVVSHKYKTPMAHEICYSVLCLFSYVAAVHSSEEDLRTPPRPVSS

SEQ ID NO: 827455 - protein, 1545 aa, Homo sapiens; identical to SEQ ID NO: 827454

SEQ ID NO: 827456 - protein, 1673 aa, Homo sapiens
MVQKKKFCPRLLDYLVIVGARHPSSDSVAQTPELLRRYPLEDHTEFPLPPDVVFFCQPEGCLSVRQRRMSLRDDTSFVFTLTDKDTGVTRYGICVNFYRSFQKRISKEKGEGGAGSRGKEGTHATCASEEGGTESSESGSSLQPLSADSTPDVNQSPRGKRRAKAGSRSRNSTLTSLCVLSHYPFFSTFRECLYTLKRLVDCCSERLLGKKLGIPRGVQRDTMWRIFTGSLLVEEKSSALLHDLREIEAWIYRLLRSPVPVSGQKRVDIEVLPQELQPALTFALPDPSRFTLVDFPLHLPLELLGVDACLQVLTCILLEHKVVLQSRDYNALSMSVMAFVAMIYPLEYMFPVIPLLPTCMASAEQLLLAPTPYIIGVPASFFLYKLDFKMPDDVWLVDLDSNRVIAPTNAEVLPILPEPESLELKKHLKQALASMSLNTQPILNLEKFHEGQEIPLLLGRPSNDLQSTPSTEFNPLIYGNDVDSVDVATRVAMVRFFNSANVLQGFQMHTRTLRLFPRPVVAFQAGSFLASRPRQTPFAEKLARTQAVEYFGEWILNPTNYAFQRIHNNMFDPALIGDKPKWYAHQLQPIHYRVYDSNSQLAEALSVPPERDSDSEPTDDSGSDSMDYDDSSSSYSSLGDFVSEMMKCDINGDTPNVDPLTHAALGDASEVEIDELQNQKEAEEPGPDSENSQENPPLRSSSSTTASSSPSTVIHGANSEPADSTEMDDKAAVGVSKPLPSVPPSIGKSNVDRRQAEIGEGSVRRRIYDNPYFEPQYGFPPEEDEDEQGESYTPRFSQHVSGNRESLGIPSRWVTEGPHLSGPWARVNQKALRSLNALVVLPSPEDGVLIQGLRNYGKGVATVVSIIMAHTPKIRYPCLGIIGASVHSRAQKLLRPNSLRLASDSDAESDSRASSPNSTVSNTSTEGFGGIMSFASSLYRNHSTSFSLSNLTLPTKGAREKATPFPSLKGNRRALVDQKSSVIKHSPTVKREPPSPQGRSSNSSENQQFLKEVVHSVLDGQGVGWLNMKKVRRLLESEQLRVFVLSKLNRMVQSEDDARQDIIPDVEISRKVYKGMLDLLKCTVLSLEQSYAHAGLGGMASIFGLLEIAQTHYYSKEPDKRKRSPTESVNTPVGKDPGLAGRGDPKAMAQLRVPQLGPRAPSATGKGPKELDTRSLKEENFIASIGPEVIKPVFDLGETEEKKSQISADSGVSLTSSSQRTDQDSVIGVSPAVMIRSSSQDSEVSTVVSNSSGETLGADSDLSSNAGDGPGGEGSVHLASSRGTLSDSEIETNSATSTIFGKAHSLKPSIKEKLAGSPIRTSEDVSQRVYLYEGLLGKERSTLWDQMQFWEDAFLDAVMLEREGMGMDQGPQEMIDRYLSLGEHDRKRLEDDEDRLLATLLHNLISYMLLMKVNKNDIRKKVRRLMGKSHIGLVYSQQINEVLDQLANLNGRDLSIWSSGSRHMKKQTFVVHAGTDTNGDIFFMEVCDDCVVLRSNIGTVYERWWYEKLINMTYCPKTKVLCLWRRNGSETQLNKFYTKKCRELYYCVKDSMERAAARQQSIKPGPELGGEFPVQDLKTGEGGLLQVTLEGINLKFMHNQVFIELNHIKKCNTVRGVFVLEEFVPEIKEVVSHKYKTPMAHEICYSVLCLFSYVAAVHSSEEDLRTPPRPVSS

SEQ ID NO: 827457 - protein, 1099 aa, Homo sapiens
MVHEGQEIPLLLGRPSNDLQSTPSTEFNPLIYGNDVDSVDVATRVAMVRFFNSANVLQGFQMHTRTLRLFPRPVVAFQAGSFLASRPRQTPFAEKLARTQAVEYFGEWILNPTNYAFQRIHNNMFDPALIGDKPKWYAHQLQPIHYRVYDSNSQLAEALSVPPERDSDSEPTDDSGSDSMDYDDSSSSYSSLGDFVSEMMKCDINGDTPNVDPLTHAALGDASEVEIDELQNQKEAEEPGPDSENSQENPPLRSSSSTTASSSPSTVIHGANSEPADSTEMDDKAAVGVSKPLPSVPPSIGKSNVDRRQAEIGEGAQKLLRPNSLRLASDSDAESDSRASSPNSTVSNTSTEGFGGIMSFASSLYRNHSTSFSLSNLTLPTKGAREKATPFPSLKGNRRALVDQKSSVIKHSPTVKREPPSPQGRSSNSSENQQFLKEVVHSVLDGQGVGWLNMKKVRRLLESEQLRVFVLSKLNRMVQSEDDARQDIIPDVEISRKVYKGMLDLLKCTVLSLEQSYAHAGLGGMASIFGLLEIAQTHYYSKEPDKRKRSPTESVNTPVGKDPGLAGRGDPKAMAQLRVPQLGPRAPSATGKGPKELDTRSLKEENFIASIGPEVIKPVFDLGETEEKKSQISADSGVSLTSSSQRTDQDSVIGVSPAVMIRSSSQDSEVSTVVSNSSGETLGADSDLSSNAGDGPGGEGSVHLASSRGTLSDSEIETNSATSTIFGKAHSLKPSIKEKLAGSPIRTSEDVSQRVYLYEGLLGKERSTLWDQMQFWEDAFLDAVMLEREGMGMDQGPQEMIDRYLSLGEHDRKRLEDDEDRLLATLLHNLISYMLLMKVNKNDIRKKVRRLMGKSHIGLVYSQQINEVLDQLANLNGRDLSIWSSGSRHMKKQTFVVHAGTDTNGDIFFMEVCDDCVVLRSNIGTVYERWWYEKLINMTYCPKTKVLCLWRRNGSETQLNKFYTKKCRELYYCVKDSMERAAARQQSIKPGPELGGEFPVQDLKTGEGGLLQVTLEGINLKFMHNQVFIELNHIKKCNTVRGVFVLEEFVPEIKEVVSHKYKTPMAHEICYSVLCLFSYVAAVHSSEEDLRTPPRPVSS

SEQ ID NO: 827458 - protein, 461 aa, Homo sapiens
MIRSSSQDSEVSTVVSNSSGETLGADSDLSSNAGDGPGGEGSVHLASSRGTLSDSEIETNSATSTIFGKAHSLKPSIKEKLAGSPIRTSEDVSQRVYLYEGLLGRDKGSMWDQLEDAAMETFSISKERSTLWDQMQFWEDAFLDAVMLEREGMGMDQGPQEMIDRYLSLGEHDRKRLEDDEDRLLATLLHNLISYMLLMKVNKNDIRKKVRRLMGKSHIGLVYSQQINEVLDQLANLNGRDLSIWSSGSRHMKKQTFVVHAGTDTNGDIFFMEVCDDCVVLRSNIGTVYERWWYEKLINMTYCPKTKVLCLWRRNGSETQLNKFYTKKCRELYYCVKDSMERAAARQQSIKPGPELGGEFPVQDLKTGEGGLLQVTLEGINLKFMHNQVFIELNHIKKCNTVRGVFVLEEFVPEIKEVVSHKYKTPMAHEICYSVLCLFSYVAAVHSSEEDLRTPPRPVSS

SEQ ID NO: 827459 - protein, 229 aa, Homo sapiens
HEGPTCSLNVCVVSVPAWTDTKDISVVSVPACTTNVCFFMEVCDDCVVLRSNIGTVYERWWYEKLINMTYCPKTKVLCLWRRNGSETQLNKFYTKKCRELYYCVKDSMERAAARQQSIKPGPELGGEFPVQDLKTGEGGLLQVTLEGINLKFMHNQVFIELNHIKKCNTVRGVFVLEEFVPEIKEVVSHKYKTPMAHEICYSVLCLFSYVAAVHSSEEDLRTPPRPVSS

SEQ ID NO: 827460 - protein, 142 aa, Homo sapiens [sequence omitted]

SEQ ID NO: 827461 - protein, 142 aa, Homo sapiens [sequence omitted]

SEQ ID NO: 827462 - protein, 1652 aa, Homo sapiens
MVQKKKFCPRLLDYLVIVGARHPSSDSVAQTPELLRRYPLEDHTEFPLPPDVVFFCQPEGCLSVRQRRMSLRDDTSFVFTLTDKDTGVTRYGICVNFYRSFQKRISKEKGEGGAGSRGKEGTHATCASEEGGTESSESGSSLQPLSADSTPDVNQSPRGKRRAKAGSRSRNSTLTSLCVLSHYPFFSTFRECLYTLKRLVDCCSERLLGKKLGIPRGVQRDTMWRIFTGSLLVEEKSSALLHDLREIEAWIYRLLRSPVPVSGQKRVDIEVLPQELQPALTFALPDPSRFTLVDFPLHLPLELLGVDACLQVLTCILLEHKVVLQSRDYNALSMSVMAFVAMIYPLEYMFPVIPLLPTCMASAEQLLLAPTPYIIGVPASFFLYKLDFKMPDDVWLVDLDSNRVIAPTNAEVLPILPEPESLELKKHLKQALASMSLNTQPILNLEKFHEGQEIPLLLGRPSNDLQSTPSTEFNPLIYGNDVDSVDVATRVAMVRFFNSANVLQGFQMHTRTLRLFPRPVVAFQAGSFLASRPRQTPFAEKLARTQAVEYFGEWILNPTNYAFQRIHNNMFDPALIGDKPKWYAHQLQPIHYRVYDSNSQLAEALSVPPERDSDSEPTDDSGSDSMDYDDSSSSYSSLGDFVSEMMKCDINGDTPNVDPLTHAALGDASEVEIDELQNQKEAEEPGPDSENSQENPPLRSSSSTTASSSPSTVIHGANSEPADSTEMDDKAAVGVSKPLPSVPPSIGKSNVDRRQAEIGEGAQKLLRPNSLRLASDSDAESDSRASSPNSTVSNTSTEGFGGIMSFASSLYRNHSTSFSLSNLTLPTKGAREKATPFPSLKGNRRALVDQKSSVIKHSPTVKREPPSPQGRSSNSSENQQFLKEVVHSVLDGQGVGWLNMKKVRRLLESEQLRVFVLSKLNRMVQSEDDARQDIIPDVEISRKVYKGMLDLLKCTVLSLEQSYAHAGLGGMASIFGLLEIAQTHYYSKEPDKRKRSPTESVNTPVGKDPGLAGRGDPKAMAQLRVPQLGPRAPSATGKGPKELDTRSLKEENFIASIGPEVIKPVFDLGETEEKKSQISADSGVSLTSSSQRTDQDSVIGVSPAVMIRSSSQDSEVSTVVSNSSGETLGADSDLSSNAGDGPGGEGSVHLASSRGTLSDSEIETNSATSTIFGKAHSLKPSIKEKLAGSPIRTSEDVSQRVYLYEGLLGKERSTLWDQMQFWEDAFLDAVMLEREGMGMDQGPQEMIDRYLSLGEHDRKRLEDDEDRLLATLLHNLISYMLLMKVNKNDIRKKVRRLMGKSHIGLVYSQQINEVLDQLANLNGRDLSIWSSGSRHMKKQTFVVHAGTDTNGDIFFMEVCDDCVVLRSNIGTVYERWWYEKLINMTYCPKTKVLCLWRRNGSETQLNKFYTKKCRELYYCVKDSMERAAARQQSIKPGPELGGEFPVQDLKTGEGGLLQVTLEGINLKFMHNQVFIELNHIKKCNTVRGVFVLEEFGNYTILLLGLDSHGSNSNLGAPEEGLGAGRRRTSVEKSGGAGVTRKKRDPWMRAGMWKGKIDNGSQKSKWGLRWVSSLEVVLKQLSEVAPPPRAGPASGQKVWDTADWRPPSSTMSMSPAAISLAAQCASQPPWRRSGLHLASVPDKGAPGVAGRLT

SEQ ID NO: 827463 - protein, 904 aa, Homo sapiens
MVQKKKFCPRLLDYLVIVGARHPSSDSVAQTPELLRRYPLEDHTEFPLPPDVVFFCQPEGCLSVRQRRMSLRDDTSFVFTLTDKDTGVTRYGICVNFYRSFQKRISKEKGEGGAGSRGKEGTHATCASEEGGTESSESGSSLQPLSADSTPDVNQSPRGKRRAKAGSRSRNSTLTSLCVLSHYPFFSTFRECLYTLKRLVDCCSERLLGKKLGIPRGVQRDTMWRIFTGSLLVEEKSSALLHDLREIEAWIYRLLRSPVPVSGQKRVDIEVLPQELQPALTFALPDPSRFTLVDFPLHLPLELLGVDACLQVLTCILLEHKVVLQSRDYNALSMSVMAFVAMIYPLEYMFPVIPLLPTCMASAEQLLLAPTPYIIGVPASFFLYKLDFKMPDDVWLVDLDSNRVIAPTNAEVLPILPEPESLELKKHLKQALASMSLNTQPILNLEKFHEGQEIPLLLGRPSNDLQSTPSTEFNPLIYGNDVDSVDVATRVAMVRFFNSANVLQGFQMHTRTLRLFPRPVVAFQAGSFLASRPRQTPFAEKLARTQAVEYFGEWILNPTNYAFQRIHNNMFDPALIGDKPKWYAHQLQPIHYRVYDSNSQLAEALSVPPERDSDSEPTDDSGSDSMDYDDSSSSYSSLGDFVSEMMKCDINGDTPNVDPLTHAALGDASEVEIDELQNQKEAEEPGPDSENSQENPPLRSSSSTTASSSPSTVIHGANSEPADSTEMDDKAAVGVSKPLPSVPPSIGKSNVDRRQAEIGEGSVRRRIYDNPYFEPQYGFPPEEDEDEQGESYTPRFSQHVSGNRAQKLLRPNSLRLASDSDAESDSRASSPNSTVSNTSTEGFGGIMSFASSLYRNHSTMLAAACHSLCDCSGAANSLWPATPSASEDGVVEASGVPGTAGCSA

SEQ ID NO: 827464 - protein, 116 aa, Homo sapiens
RGKEGTHATCASEEGGTESSESGSSLQPLSADSTPDVNQSPRGKRRAKAGSRSRNSTLTSLCVLSHYPFFSTFRECLYTLKRLVDCCSERLLGKKLGIPRGVQRYSLLLMPNGGSI

SEQ ID NO: 827465 - protein, 141 aa, Homo sapiens
MFFRHPSSDSVAQTPELLRRYPLEDHTEFPLPPDVVFFCQPEGCLSVRQRRMSLRDDTSFVFTLTDKDTGVTRYGICVNFYRSFQKRISKEKGEGGAGSRGKEGTHATCASEEGGTESSESGSSLQPLSADSTPDVNQSPR

SEQ ID NO: 827466 - protein, 120 aa, Homo sapiens [sequence omitted]

SEQ ID NO: 827467 - protein, 444 aa, Homo sapiens
MSSSYDEASLAPEETTDSFWEVGNYKRTVKRIDDGHRLCNDLMNCVQERAKIEKAYGQQLTDWAKRWRQLIEKGPQYGSLERAWGAIMTEADKVSELHQEVKNNLLNEDLEKVKNWQKDAYHKQIMGGFKETKEAEDGFRKAQKPWAKKMKELEAAKKAYHLACKEEKLAMTREMNSKTEQSVTPEQQKKLQDKVDKCKQDVQKTQEKYEKVLEDVGKTTPQYMENMEQVFEQCQQFEEKRLVFLKEVLLDIKRHLNLAENSSYIHVYRELEQAIRGADAQEDLRWFRSTSGPGMPMNWPQFEEWNPDLPHTTTKKEKQPKKAEGVALTNATGAVESTSQAGDRGSVSSYDRGQPYATEWSDDESGNPFGGSETNGGANPFEDDSKGVRVRALYDYDGQEQDELSFKAGDELTKLGEEDEQGWCRGRLDSGQLGLYPANYVEAI

SEQ ID NO: 827468 - protein, 444 aa, Homo sapiens; identical to SEQ ID NO: 827467

SEQ ID NO: 827469 - protein, 444 aa, Homo sapiens; identical to SEQ ID NO: 827467

SEQ ID NO: 827470 - protein, 444 aa, Homo sapiens; identical to SEQ ID NO: 827467

SEQ ID NO: 827471 - protein, 295 aa, Homo sapiens
RRWRKHRVSGLLSGLGYRAIYTETRKLEKPSSYTRRSGSHRLATSLPFSPMAHVLQKPKHSGTHSIVQEFQVPDYVPWQQSKQETKPSTLPPVQQANSLHTSKMKTLTRVQPVFHFKPTTVVTSCQPKNPRELHRRRKLDPGKMHAKIWLMKTSLRSGRAALRELRSRENFLSKLNRELIETIQEMENSTTLHVRALLQQQDTLATIIDILEYSNKKRLQQLKSELQEWEEKKKCKMSYLEQQAEQLNAKIEKTQEEVNFLSTYMDHEYSIKSVQISTLMRQLQQVKDSQQDEAG

SEQ ID NO: 827472 - protein, 310 aa, Homo sapiens
MKTLTRVQPVFHFKPTTVVTSCQPKNPRELHRRRKLDPGKMHAKIWLMKTSLRSGRAALRELRSRENFLSKLNRELIETIQEMENSTTLHVRALLQQQDTLATIIDILEYSNKKRLQQLKSELQEWEEKKKCKMSYLEQQAEQLNAKIEKTQEEVNFLSTYMDHEYSIKSVQISTLMRQLQQVKDSQQDELDDLGEMRRKVLESLSDKIQKKKKKILSSVVAETQRPYEEALLQKMWESQDFLKCMQRFREFIDQFEENMPVLRAEVEELQAQTREPREVIFEDVLLRRPKCTPDMDVILNIPVEEPLPF

SEQ ID NO: 827473 - protein, 297 aa, Homo sapiens
MKTLTRVQPVFHFKPTTVVTSCQPKNPRELHRRRKLDPGKMHAKIWLMKTSLRSGRAALRELRSRENFLSKLNRELIETIQEMENSTTLHVRALLQQQDTLATIIDILEYSNKKRLQQLKSELQEWEEKKKCKMSYLEQQAEQLNAKIEKTQEEVNFLSTYMDHEYSIKSVQISTLMRQLQQVKDSQQDELDDLGEMRRKVLESLSDKIQKKKKKILSSVVAVSSQLLCGSGDPGLTPTPPSSPSSASRPTAAPSVSTMFCCPGRGTWGPDLFFLHRKPSVPMKRLSYRRCGKARTS

SEQ ID NO: 827474 - protein, 261 aa, Homo sapiens
MKTLTRVQPVFHFKPTTVVTSCQPKNPRELHRRRKLDPGKMHAKIWLMKTSLRSGRAALRELRSRENFLSKLNRELIETIQEMENSTTLHVRALLQQQDTLATIIDILEYSNKKRLQQLKSELQEWEEKKKCKMSYLEQQAEQLNAKIEKTQEEVNFLSTYMDHEYSIKSVQISTLMRQLQQVKDSQQDELDDLGEMRRKVLESLSDKIQKKKKKILSSVVAETQRPYEEALLQKMWESQDFLKCMQRFREVRGQGRWWSL

SEQ ID NO: 827475 - protein, 413 aa, Homo sapiens
RRWRKHRVSGLLSGLGYRAIYTETRKLEKPSSYTRRSGSHRLATSLPFSPMAHVLQKPKHSGTHSIVQEFQVPDYVPWQQSKQETKPSTLPPVQQANSLHTSKMKTLTRVQPVFHFKPTTVVTSCQPKNPRELHRRRKLDPGKMHAKIWLMKTSLRSGRAALRELRSRENFLSKLNRELIETIQEMENSTTLHVRALLQQQDTLATIIDILEYSNKKRLQQLKSELQEWEEKKKCKMSYLEQQAEQLNAKIEKTQEEVNFLSTYMDHEYSIKSVQISTLMRQLQQVKDSQQDELDDLGEMRRKVLESLSDKIQKKKKKILSSVVAETQRPYEEALLQKMWESQDFLKCMQRFREFIDQFEENMPVLRAEVEELQAQTREPREVIFEDVLLRRPKCTPDMDVILNIPVEEPLPF

SEQ ID NO: 827476 - protein, 351 aa, Homo sapiens
  misc_feature (2)..(2): Xaa can be any naturally occurring amino acid
AXGGDHCSRPQDYVPWQQSKQETKPSTLPPVQQANSLHTSKMKTLTRVQPVFHFKPTTVVTSCQPKNPRELHRRRKLDPGKMHAKIWLMKTSLRSGRAALRELRSRENFLSKLNRELIETIQEMENSTTLHVRALLQQQDTLATIIDILEYSNKKRLQQLKSELQEWEEKKKCKMSYLEQQAEQLNAKIEKTQEEVNFLSTYMDHEYSIKSVQISTLMRQLQQVKDSQQDELDDLGEMRRKVLESLSDKIQKKKKKILSSVVAETQRPYEEALLQKMWESQDFLKCMQRFREFIDQFEENMPVLRAEVEELQAQTREPREVIFEDVLLRRPKCTPDMDVILNIPVEEPLPF

SEQ ID NO: 827477 - protein, 472 aa, Homo sapiens
RRWRKHRVSGLLSGLGYRAIYTETRKLEKPSSYTRRSGSHRLATSLPFSPMAHVLQKPKHSGTHSIVQEFQVPDYVPWQQSKQETKPSTLPPVQQANSLHTSKMKTLTRVQPGRTTALRVFQRQPVGVLRGCCAFVWCCGPTSQVTRSKSNNWYCVSSTEYASGTIPNTFEVFHFKPTTVVTSCQPKNPRELHRRRKLDPGKMHAKIWLMKTSLRSGRAALRELRSRENFLSKLNRELIETIQEMENSTTLHVRALLQQQDTLATIIDILEYSNKKRLQQLKSELQEWEEKKKCKMSYLEQQAEQLNAKIEKTQEEVNFLSTYMDHEYSIKSVQISTLMRQLQQVKDSQQDELDDLGEMRRKVLESLSDKIQKKKKKILSSVVAETQRPYEEALLQKMWESQDFLKCMQRFREFIDQFEENMPVLRAEVEELQAQTREPREVIFEDVLLRRPKCTPDMDVILNIPVEEPLPF

SEQ ID NO: 827478 - protein, 361 aa, Homo sapiens
HSRGAIVPGKLQFLVRDSNPVSNCCLLPLGLGIMEVLSLPNSFQTQALWDSLHSPGVPGSVFHFKPTTVVTSCQPKNPRELHRRRKLDPGKMHAKIWLMKTSLRSGRAALRELRSRENFLSKLNRELIETIQEMENSTTLHVRALLQQQDTLATIIDILEYSNKKRLQQLKSELQEWEEKKKCKMSYLEQQAEQLNAKIEKTQEEVNFLSTYMDHEYSIKSVQISTLMRQLQQVKDSQQDELDDLGEMRRKVLESLSDKIQKKKKKILSSVVAETQRPYEEALLQKMWESQDFLKCMQRFREFIDQFEENMPVLRAEVEELQAQTREPREVIFEDVLLRRPKCTPDMDVILNIPVEEPLPF

SEQ ID NO: 827479 - protein, 312 aa, Homo sapiens
HSRGAIVPGKLQFLVRDSNPVSNCCLLPLGLGIMEVLSLPNSFQTQALWDSLHSPGVPGSVFHFKPTTVVTSCQPKNPRELHRRRKLDPGKMHAKIWLMKTSLRSGRAALRELRSRENFLSKLNRELIETIQEMENSTTLHVRALLQQQDTLATIIDILEYSNKKRLQQLKSELQEWEEKKKCKMSYLEQQAEQLNAKIEKTQEEVNFLSTYMDHEYSIKSVQISTLMRQLQQVKDSQQDELDDLGEMRRKVLESLSDKIQKKKKKILSSVVAETQRPYEEALLQKMWESQDFLKCMQRFREVRGQGRWWSL

SEQ ID NO: 827480 - protein, 312 aa, Homo sapiens
MGNRPAWAAFTSRRPHGGGRLAGPGRRVHGLSGAQAGQGAAPPLCSSLRPQTSLRSGRAALRELRSRENFLSKLNRELIETIQEMENSTTLHVRALLQQQDTLATIIDILEYSNKKRLQQLKSELQEWEEKKKCKMSYLEQQAEQLNAKIEKTQEEVNFLSTYMDHEYSIKSVQISTLMRQLQQVKDSQQDELDDLGEMRRKVLESLSDKIQKKKKKILSSVVAETQRPYEEALLQKMWESQDFLKCMQRFREFIDQFEENMPVLRAEVEELQAQTREPREVIFEDVLLRRPKCTPDMDVILNIPVEEPLPF

SEQ ID NO: 827481 - protein, 299 aa, Homo sapiens
MGNRPAWAAFTSRRPHGGGRLAGPGRRVHGLSGAQAGQGAAPPLCSSLRPQTSLRSGRAALRELRSRENFLSKLNRELIETIQEMENSTTLHVRALLQQQDTLATIIDILEYSNKKRLQQLKSELQEWEEKKKCKMSYLEQQAEQLNAKIEKTQEEVNFLSTYMDHEYSIKSVQISTLMRQLQQVKDSQQDELDDLGEMRRKVLESLSDKIQKKKKKILSSVVAVSSQLLCGSGDPGLTPTPPSSPSSASRPTAAPSVSTMFCCPGRGTWGPDLFFLHRKPSVPMKRLSYRRCGKARTS

SEQ ID NO: 827482 - protein, 95 aa, Homo sapiens
HSRGAIVPGKLQFLVRDSNPVSNCCLLPLGLGIMEVLSLPNSFQTQALWDSLHSPGVPGSGLCSMAAVQAGNQAIYSASSPTSQQPSYKQNEDFD

SEQ ID NO: 827483 - protein, 144 aa, Homo sapiens
RRWRKHRVSGLLSGLGYRAIYTETRKLEKPSSYTRRSGSHRLATSLPFSPMAHVLQKPKHSGTHSIVQEFQVPDYVPWQQSKQETKPSTLPPVQQANSLHTSKMKTLTRVQPGGRRHLGAGVGVGDRIEWLLLALGDTTYIRVG

SEQ ID NO: 827484 - protein, 40 aa, Homo sapiens
MRRKVLESLSDKIQKKKKKILSSVVAVSSQLLCGSGDPGL

SEQ ID NO: 827485 - protein, 74 aa, Homo sapiens
TACYLVDCGSKSGRVGNPAQELQPRLGVVLPGRGPTEVRGEEDSGADSAHFTRSCSSDCEDSSLSWNPTDHQQK

SEQ ID NO: 827486 - protein, 1257 aa, Homo sapiens
MKAADEPAYLTVGTDVSAKYRGAFCEAKIKTVKRLVKVKVLLKQDNTTQLVQDDQVKGPLRVGAIVETRTSDGSFQEAIISKLTDASWYTVVFDDGDERTLRRTSLCLKGERHFAESETLDQLPLTNPEHFGTPVIAKKTNRGRRSSLPVTEDEKEEESSEEEDEDKRRLNDELLGKVVSVVSATERTEWYPALVISPSCNDDITVKKDQCLVRSFIDSKFYSIARKDIKEVDILNLPESELSTKPGLQKASIFLKTRVVPDNWKMDISEILESSSSDDEDGPAEENDEEKEKEAKKTEEEVPEEELDPEERDNFLQQLYKFMEDRGTPINKPPVLGYKDLNLFKLFRLVYHQGGCDNIDSGAVWKQIYMDLGIPILNSAASYNVKTAYRKYLYGFEEYCRSANIQFRTVHHHEPKVKEEKKDLEESMEEALKLDQEMPLTEVKSEPEENIDSNSESEREEIELKSPRGRRRIARDVNSIKKEIEEEKTEDKLKDNDTENKDVDDDYETAEKKENELLLGRKNTPKQKEKKIKKQEDSDKDSDEEEEKSQEREETESKCDSEGEEDEEDMEPCLTGTKVKVKYGRGKTQKIYEASIKSTEIDDGEVLYLVHYYGWNVRYDEWVKADRIIWPLDKGGPKKKQKKKAKNKEDSEVDEKRDEERQKSKRGRPPLKSTLSSNMPYGLSKTANSEGKSDSCSSDSETEDALEKNLINEELSLKDELEKNENLNDDKLDEENPKISAHILKENDRTQMQPLETLKLEVGENEQIVQIFGNKMEKTEEVKKEAEKSPKGKGRRSKTKDLSLEIIKISSFGQNEAGSEPHIEAHSLELSSLDNKNFSSATEDEIDQCVKEKKLKRKILGQSSPEKKIRIENGMEMTNTVSQERTSDCIGSEGMKNLNFEQHFERENEGMPSLIAESNQCIQQLTSERFDSPAEETVNIPLKEDEDAMPLIGPETLVCHEVDLDDLDEKDKTSIEDVAVESSESNSLVSIPPALPPVVQHNFSVASPLTLSQDESRSVKSESDITIEVDSIAEESQEGLCERESANGFETNVASGTCSIIVQERESREKGQKRPSDGNSGLMAKKQKRTPKRTSAAAKNEKNGTGQSSDSEDLPVLDNSSKCTPVKHLNVSKPQKLARSPARISPHIKDGEKDKHREKHPNSSPRTYKWSFQLNELDNMNSTERISFLQEKLQEIRKYYMSLKSEVATIDRRRKRLKKKDREVSHAGASMSSASSDTGMSPSSSSPPQNVLAVECR

SEQ ID NO: 827487 - protein, 1257 aa, Homo sapiens; identical to SEQ ID NO: 827486

SEQ ID NO: 827488 - protein, 1188 aa, Homo sapiens
MKAADEPAYLTVGTDVSAKYRGAFCEAKIKTVKRLVKVKVLLKQDNTTQLVQDDQVKGPLRVGAIVETRTSDGSFQEAIISKLTDASWYTVVFDDGDERTLRRTSLCLKGERHFAESETLDQLPLTNPEHFGTPVIAKKTNRGRRSSLPVTEDEKEEESSEEEDEDKRRLNDELLGKVVSVVSATERTEWYPALVISPSCNDDITVKKDQCLVRSFIDSKFYSIARKDIKEVDILNLPESELSTKPGLQKASIFLKTRVVPDNWKMDISEILESSSSDDEDGPAEENDEEKEKEAKKTEEEVPEEELDPEERDNFLQQLYKFMEDRGTPINKPPVLGYKDLNLFKLFRLVYHQGGCDNIDSGAVWKQIYMDLGIPILNSAASYNVKTAYRKYLYGFEEYCRSANIQFRTVHHHEPKVKEEKKDLEESMEEALKLDQEMPLTEVKSEPEENIDSNSESEREEIELKSPRGRRRIARDVNSIKKEIEEEKTEDKLKDNDTENKDVDDDYETAEKKENELLLGRKNTPKQKEKKIKKQEDSDKDSDEEEEKSQEREETESKCDSEGEEDEEDMEPCLTGTKVKVKYGRGKTQKIYEASIKSTEIDDGEVLYLVHYYGWNVRYDEWVKADRIIWPLDKGGPKKKQKKKAKNKEDSEVDEKRDEERQKSKRGRPPLKSTLSSNMPYGLSKTANSEGKSDSCSSDSETEDALEKNLINEELSLKDELEKNENLNDDKLDEENPKISAHILKENDRTQMQPLETLKLEVGENEQIVQIFGNKMEKTEEVKKEAEKSPKGKGRRSKTKDLSLEIIKISSFGQNEAGSEPHIEAHSLELSSLDNKNFSSATEDEIDQCVKEKKLKRKILGQSSPEKKIRIENGMEMTNTVSQERTSDCIGSEGMKNLNFEQHFERENEGMPSLIAESNQCIQQLTSERFDSPAEETVNIPLKEDEDAMPLIGPETLVCHEVDLDDLDEKDKTSIEDVAVESSESNSLVSIPPALPPVVQHNFSVASPLTLSQDESRSVKSESDITIEVDSIAEESQEGLCERESANGFETNVASGTCSIIVQERESREKGQKRPSDGNSGLMAKKQKRTPKRTSAAAKNEKNGTDELDNMNSTERISFLQEKLQEIRKYYMSLKSEVATIDRRRKRLKKKDREVSHAGASMSSASSDTGMSPSSSSPPQNVLAVECR

SEQ ID NO: 827489 - protein, 1203 aa, Homo sapiens
MKAADEPAYLTVGTDVSAKYRGAFCEAKIKTVKRLVKVKVLLKQDNTTQLVQDDQVKGPLRVGAIVETRTSDGSFQEAIISKLTDASWYTVVFDDGDERTLRRTSLCLKGERHFAESETLDQLPLTNPEHFGTPVIAKKTNRGRRSSLPVTEDEKEEESSEEEDEDKRRLNDELLGKVVSVVSATERTEWYPALVISPSCNDDITVKKDQCLVRSFIDSKFYSIARKDIKEVDILNLPESELSTKPGLQKASIFLKTRVVPDNWKMDISEILESSSSDDEDGPAEENDEEKEKEAKKTEEEVPEEELDPEERDNFLQQLYKFMEDRGTPINKPPVLGYKDLNLFKLFRLVYHQGGCDNIDSGAVWKQIYMDLGIPILNSAASYNVKTAYRKYLYGFEEYCRSANIQFRTVHHHEPKVKEEKKDLEESMEEALKLDQEMPLTEVKSEPEENIDSNSESEREEIELKSPRGRRRIARDVNSIKKEIEEEKTEDKLKDNDTENKDVDDDYETAEKKENELLLGRKNTPKQKEKKIKKQEDSDKDSDEEEEKSQEREETESKCDSEGEEDEEDMEPCLTGTKVKVKYGRGKTQKIYEASIKSTEIDDGEVLYLVHYYGWNVRYDEWVKADRIIWPLDKGGPKKKQKKKAKNKEDSEVDEKRDEERQKSKRGRPPLKSTLSSNMPYGLSKTANSEGKSDSCSSDSETEDALEKNLINEELSLKDELEKNENLNDDKLDEENPKISAHILKENDRTQMQPLETLKLEVGENEQIVQIFGNKMEKTEEVKKEAEKSPKGKGRRSKTKDLSLEIIKISSFGQNEAGSEPHIEAHSLELSSLDNKNFSSATEDEIDQCVKEKKLKRKILGQSSPEKKIRIENGMEMTNTVSQERTSDCIGSEGMKNLNFEQHFERENEGMPSLIAESNQCIQQLTSERFDSPAEETVNIPLKEDEDAMPLIGPETLVCHEVDLDDLDEKDKTSIEDVAVESSESNSLVSIPPALPPVVQHNFSVASPLTLSQDESRSVKSESDITIEVDSIAEESQEGLCERESANGFETNVASGTCSIIVQERESREKGQKRPSDGNSGLMAKKQKRTPKRTSAAAKNEKNGTGQSSDSEDLPVLDNSNELDNMNSTERISFLQEKLQEIRKYYMSLKSEVATIDRRRKRLKKKDREVSHAGASMSSASSDTGMSPSSSSPPQNVLAVECR

SEQ ID NO: 827490 - protein, 935 aa, Homo sapiens
MEDRGTPINKPPVLGYKDLNLFKLFRLVYHQGGCDNIDSGAVWKQIYMDLGIPILNSAASYNVKTAYRKYLYGFEEYCRSANIQFRTVHHHEPKVKEEKKDLEESMEEALKLDQEMPLTEVKSEPEENIDSNSESEREEIELKSPRGRRRIARDVNSIKKEIEEEKTEDKLKDNDTENKDVDDDYETAEKKENELLLGRKNTPKQKEKKIKKQEDSDKDSDEEEEKSQEREETESKCDSEGEEDEEDMEPCLTGTKVKVKYGRGKTQKIYEASIKSTEIDDGEVLYLVHYYGWNVRYDEWVKADRIIWPLDKGGPKKKQKKKAKNKEDSEVDEKRDEERQKSKRGRPPLKSTLSSNMPYGLSKTANSEGKSDSCSSDSETEDALEKNLINEELSLKDELEKNENLNDDKLDEENPKISAHILKENDRTQMQPLETLKLEVGENEQIVQIFGNKMEKTEEVKKEAEKSPKGKGRRSKTKDLSLEIIKISSFGQNEAGSEPHIEAHSLELSSLDNKNFSSATEDEIDQCVKEKKLKRKILGQSSPEKKIRIENGMEMTNTVSQERTSDCIGSEGMKNLNFEQHFERENEGMPSLIAESNQCIQQLTSERFDSPAEETVNIPLKEDEDAMPLIGPETLVCHEVDLDDLDEKDKTSIEDVAVESSESNSLVSIPPALPPVVQHNFSVASPLTLSQDESRSVKSESDITIEVDSIAEESQEGLCERESANGFETNVASGTCSIIVQERESREKGQKRPSDGNSGLMAKKQKRTPKRTSAAAKNEKNGTGQSSDSEDLPVLDNSSKCTPVKHLNVSKPQKLARSPARISPHIKDGEKDKHREKHPNSSPRTYKWSFQLNELDNMNSTERISFLQEKLQEIRKYYMSLKSEVATIDRRRKRLKKKDREVSHAGASMSSASSDTGMSPSSSSPPQNVLAVECR

SEQ ID NO: 827491 - protein, 688 aa, Homo sapiens
MEPCLTGTKVKVKYGRGKTQKIYEASIKSTEIDDGEVLYLVHYYGWNVRYDEWVKADRIIWPLDKGGPKKKQKKKAKNKEDSEVDEKRDEERQKSKRGRPPLKSTLSSNMPYGLSKTANSEGKSDSCSSDSETEDALEKNLINEELSLKDELEKNENLNDDKLDEENPKISAHILKENDRTQMQPLETLKLEVGENEQIVQIFGNKMEKTEEVKKEAEKSPKGKGRRSKTKDLSLEIIKISSFGQNEAGSEPHIEAHSLELSSLDNKNFSSATEDEIDQCVKEKKLKRKILGQSSPEKKIRIENGMEMTNTVSQERTSDCIGSEGMKNLNFEQHFERENEGMPSLIAESNQCIQQLTSERFDSPAEETVNIPLKEDEDAMPLIGPETLVCHEVDLDDLDEKDKTSIEDVAVESSESNSLVSIPPALPPVVQHNFSVASPLTLSQDESRSVKSESDITIEVDSIAEESQEGLCERESANGFETNVASGTCSIIVQERESREKGQKRPSDGNSGLMAKKQKRTPKRTSAAAKNEKNGTGQSSDSEDLPVLDNSSKCTPVKHLNVSKPQKLARSPARISPHIKDGEKDKHREKHPNSSPRTYKWSFQLNELDNMNSTERISFLQEKLQEIRKYYMSLKSEVATIDRRRKRLKKKDREVSHAGASMSSASSDTGMSPSSSSPPQNVLAVECR

SEQ ID NO: 827492 - protein, 127 aa, Homo sapiens
QHSLFPLISGQKRPSDGNSGLMAKKQKRTPKRTSAAAKNEKNGTDELDNMNSTERISFLQEKLQEIRKYYMSLKSEVATIDRRRKRLKKKDREVSHAGASMSSASSDTGMSPSSSSPPQNVLAVECR

SEQ ID NO: 827493 - protein, 1268 aa, Homo sapiens
  misc_feature (533)..(533): Xaa can be any naturally occurring amino acid
  misc_feature (551)..(551): Xaa can be any naturally occurring amino acid
  misc_feature (567)..(567): Xaa can be any naturally occurring amino acid
MKAADEPAYLTVGTDVSAKYRGAFCEAKIKTVKRLVKVKVLLKQDNTTQLVQDDQVKGPLRVGAIVETRTSDGSFQEAIISKLTDASWYTVVFDDGDERTLRRTSLCLKGERHFAESETLDQLPLTNPEHFGTPVIAKKTNRGRRSSLPVTEDEKEEESSEEEDEDKRRLNDELLGKVVSVVSATERTEWYPALVISPSCNDDITVKKDQCLVRSFIDSKFYSIARKDIKEVDILNLPESELSTKPGLQKASIFLKTRVVPDNWKMDISEILESSSSDDEDGPAEENDEEKEKEAKKTEEEVPEEELDPEERDNFLQQLYKFMEDRGTPINKPPVLGYKDLNLFKLFRLVYHQGGCDNIDSGAVWKQIYMDLGIPILNSAASYNVKTAYRKYLYGFEEYCRSANIQFRTVHHHEPKVKEEKKDLEESMEEALKLDQEMPLTEVKSEPEENIDSNSESEREEIELKSPRGRRRIARDVNSIKKEIEEEKTEDKLKDNDTENKDVDDDYETAEKKENELLLGRKNTPKQKEKKGXPKTLKKKEKEKPPRGGGXFKNPFFFEKRGDFLGXFFGPPFPGGGTNVVFLIIGGGGTPPKIFFEAPLFKNPPEFCAAGKCFLFLGAPFSKGWELSRYDEWVKADRIIWPLDKGGPKKKQKKKAKNKEDSEVDEKRDEERQKSKRGRPPLKSTLSSNMPYGLSKTANSEGKSDSCSSDSETEDALEKNLINEELSLKDELEKNENLNDDKLDEENPKISAHILKENDRTQMQPLETLKLEVGENEQIVQIFGNKMEKTEEVKKEAEKSPKGKGRRSKTKDLSLEIIKISSFGQNEAGSEPHIEAHSLELSSLDNKNFSSATEDEIDQCVKEKKLKRKILGQSSPEKKIRIENGMEMTNTVSQERTSDCIGSEGMKNLNFEQHFERENEGMPSLIAESNQCIQQLTSERFDSPAEETVNIPLKEDEDAMPLIGPETLVCHEVDLDDLDEKDKTSIEDVAVESSESNSLVSIPPALPPVVQHNFSVASPLTLSQDESRSVKSESDITIEVDSIAEESQEGLCERESANGFETNVASGTCSIIVQERESREKGQKRPSDGNSGLMAKKQKRTPKRTSAAAKNEKNGTGQSSDSEDLPVLDNSSKCTPVKHLNVSKPQKLARSPARISPHIKDGEKDKHREKHPNSSPRTYKWSFQLNELDNMNSTERISFLQEKLQEIRKYYMSLKSEVATIDRRRKRLKKKDREVSHAGASMSSASSDTGMSPSSSSPPQNVLAVECR

SEQ ID NO: 827494 - protein, 579 aa, Homo sapiens [sequence omitted]

SEQ ID NO: 827495 - protein, 603 aa, Homo sapiens
MKAADEPAYLTVGTDVSAKYRGAFCEAKIKTVKRLVKVKVLLKQDNTTQLVQDDQVKGPLRVGAIVETRTSDGSFQEAIISKLTDASWYTVVFDDGDERTLRRTSLCLKGERHFAESETLDQLPLTNPEHFGTPVIAKKTNRGRRSSLPVTEDEKEEESSEEEDEDKRRLNDELLGKVVSVVSATERTEWYPALVISPSCNDDITVKKDQCLVRSFIDSKFYSIARKDIKEVDILNLPESELSTKPGLQKASIFLKTRVVPDNWKMDISEILESSSSDDEDGPAEENDEEKEKEAKKTEEEVPEEELDPEERDNFLQQLYKFMEDRGTPINKPPVLGYKDLNLFKLFRLVYHQGGCDNIDSGAVWKQIYMDLGIPILNSAASYNVKTAYRKYLYGFEEYCRSANIQFRTVHHHEPKVKEEKKDLEESMEEALKLDQEMPLTEVKSEPEENIDSNSESEREEIELKSPRGRRRIARDVNSIKKEIEEEKTEDKLKDNDTENKDVDDDYETAEKKENELLLGRKNTPKQKEKKIKKQEDSDKDSDEEEEKSQEREETESKCDSEGEEDEEDMEPCLTGTKVKVKYGRGKTQYHTIYLCDIPAPIP

SEQ ID NO: 827496 - protein, 185 aa, Homo sapiens
PLLSPQSGIGSRALWVLIGRGPLYSTQLALPSRKSAALCPSALGAFCVASRCACAVPPRPTRGLALRFPQTCSQHPAVFPVRPAARGASTMLFYSFFKSLVGKDVVVELKNDLSICGTLHSVDQYLNIKLTDISVTDPEKYPHMLSVKNCFIRGSVVRYVQLPADEVDTQLLQDAARKEALQQKQ

SEQ ID NO: 827497 - protein, 162 aa, Homo sapiens
PLLSPQSGIGSRALWVLIGRGLSTLPSLRSPAASRPRFARQRLELSASLPAAPARSRLAPRAGSRFGFPRPARSTLLSSRSGPLPAAPAPCICGTLHSVDQYLNIKLTDISVTDPEKYPHMLSVKNCFIRGSVVRYVQLPADEVDTQLLQDAARKEALQQKQ

SEQ ID NO: 827498 - protein, 178 aa, Homo sapiens
PLLSPQSGIGSRALWVLIGRGPLYSTQLALPSRKSAALCPSALGAFCVASRCACAVPPRPTRGLALRFPQTCSQHPAVFPVRPAARGASTMSLVGKDVVVELKNDLSICGTLHSVDQYLNIKLTDISVTDPEKYPHMLSVKNCFIRGSVVRYVQLPADEVDTQLLQDAARKEALQQKQ

SEQ ID NO: 827499 - protein, 847 aa, Homo sapiens
MEPLKSLFLKSPLGSWNGSGSGGGGGGGGGRPEGSPKAAGYANPVWTALFDYEPSGQDELALRKGDRVEVLSRDAAISGDEGWWAGQVGGQVGIFPSNYVSRGGGPPPCEVASFQELRLEEVIGIGGFGKVYRGSWRGELVAVKAARQDPDEDISVTAESVRQEARLFAMLAHPNIIALKAVCLEEPNLCLVMEYAAGGPLSRALAGRRVPPHVLVNWAVQIARGMHYLHCEALVPVIHRDLKSNNILLLQPIESDDMEHKTLKITDFGLAREWHKTTQMSAAGTYAWMAPEVIKASTFSKGSDVWSFGVLLWELLTGEVPYRGIDCLAVAYGVAVNKLTLPIPSTCPEPFAQLMADCWAQDPHRRPDFASILQQLEALEAQVLREMPRDSFHSMQEGWKREIQGLFDELRAKEKELLSREEELTRAAREQRSQAEQLRRREHLLAQWELEVFERELTLLLQQVDRERPHVRRRRGTFKRSKLRARDGGERISMPLDFKHRITVQASPGLDRRRNVFEVGPGDSPTFPRFRAIQLEPAEPGQAWGRQSPRRLEDSSNGERRACWAWGPSSPKPGEAQNGRRRSRMDEATWYLDSDDSSPLGSPSTPPALNGNPPRPSLEPEEPKRPVPAERGSSSGTPKLIQRALLRGTALLASLGLGRDLQPPGGPGRERGESPTTPPTPTPAPCPTEPPPSPLICFSLKTPDSPPTPAPLLLDLGIPVGQRSAKSPRREEEPRGGTVSPPPGTSRSAPGTPGTPRSPPLGLISRPRPSPLRSRIDPWSFVSAGPRPSPLPSPQPAPRRAPWTLFPDSDPFWDSPPANPFQGGPQDCRAQTKDMGAQAPWVPEAGP

SEQ ID NO: 827500 - protein, 67 aa, Homo sapiens
MEPLKSLFLKSPLGSWNGSGSGGGGGGGGGRPEGSPKAAGYANPVWTALFDYEPSGQGIEALGPPLF

SEQ ID NO: 827501 - protein, 847 aa, Homo sapiens; identical to SEQ ID NO: 827499

SEQ ID NO: 827502 - protein, 847 aa, Homo sapiens; identical to SEQ ID NO: 827499

SEQ ID NO: 827503 - protein, 847 aa, Homo sapiens; identical to SEQ ID NO: 827499

SEQ ID NO: 827504 - protein, 263 aa, Homo sapiens
MDEATWYLDSDDSSPLGSPSTPPALNGNPPRPSLEPEEPKRPVPAERGSSSGTPKLIQRALLRGTALLASLGLGRDLQPPGGPGRERGESPTTPPTPTPAPCPTEPPPSPLICFSLKTPDSPPTPAPLLLDLGIPVGQRSAKSPRREEEPRGGTVSPPPGTSRSAPGTPGTPRSPPLGLISRPRPSPLRSRIDPWSFVSAGPRPSPLPSPQPAPRRAPWTLFPDSDPFWDSPPANPFQGGPQDCRAQTKDMGAQAPWVPEAGP

SEQ ID NO: 827505 - protein, 539 aa, Homo sapiens
MEPLKSLFLKSPLGSWNGSGSGGGGGGGGGRPEGSPKAAGYANPVWTALFDYEPSGQDELALRKGDRVEVLSRDAAISGDEGWWAGQVGGQVGIFPSNYVSRGGGPPPCEVASFQELRLEEVIGIGGFGKVYRGSWRGELVAVKAARQDPDEDISVTAESVRQEARLFAMLAHPNIIALKAVCLEEPNLCLVMEYAAGGPLSRALAGRRVPPHVLVNWAVQIARGMHYLHCEALVPVIHRDLKSNNILLLQPIESDDMEHKTLKITDFGLAREWHKTTQMSAAGTYAWMAPEVIKASTFSKGSDVWSFGVLLWELLTGEVPYRGIDCLAVAYGVAVNKLTLPIPSTCPEPFAQLMADCWAQDPHRRPDFASILQQLEALEAQVLREMPRDSFHSMQEGWKREIQGLFDELRAKEKELLSREEELTRAAREQRSQAEQLRRREHLLAQWELEVFERELTLLLQQVDRERPHVRRRRGTFKRSKLRARDGGERISMPLDPGAQESSEAGHSLTAIVPLPMWPGSWPWAPAGWGPGSTSSQT

SEQ ID NO: 827506 - protein, 142 aa, Homo sapiens
VSQPSCRSLCGLGAGLGPLQVGVLALLHHKPEPCSPQPKSQTSSTASPCRPHPALTGGETSSRSGLGIRPPFPGSEPSSVRNFTSHAPLRPPAPYSLSDLILGGGNSLSPLPPRPQAPCLRSSLLPLNSPSSINFTYFFLVK

SEQ ID NO: 827507 - protein, 393 aa, Homo sapiens
MAQENAAFSPGQEEPPRRRGRQRYVEKDGRCNVQQGNVRETYRYLTDLFTTLVDLQWRLSLLFFVLAYALTWLFFGAIWWLIAYGRGDLEHLEDTAWTPCVNNLNGFVAAFLFSIETETTIGYGHRVITDQCPEGIVLLLLQAILGSMVNAFMVGCMFVKISQPNKRAATLVFSSHAVVSLRDGRLCLMFRVGDLRSSHIVEASIRAKLIRSRQTLEGEFIPLHQTDLSVGFDTGDDRLFLVSPLVISHEIDAASPFWEASRRALERDDFEIVVILEGMVEATGMTCQARSSYLVDEVLWGHRFTSVLTLEDGFYEVDYASFHETFEVPTPSCSARELAEAAARLDAHLYWSIPSRLDEKVEEEGVGEGAGGEAGADKEQNGCLPPPESESKV

SEQ ID NO: 827508 - protein, 342 aa, Homo sapiens [sequence omitted]

SEQ ID NO: 827509 - protein, 125 aa, Homo sapiens
VSFVCVSPLPFSLIFFSDVFLQGKRFHEALESILSPQETLKERDENLLKSGYIESVQHILKDVSGVRALESAVQHETLNYIGLLDCVAEYQLRQENHLTPGGRGCSEPISPTTLQPGRQRETPSK

SEQ ID NO: 827510 - protein, 173 aa, Homo sapiens [sequence omitted]

SEQ ID NO: 827511 - protein, 262 aa, Homo sapiens
MKLFQTICRQLRSSKFSVESAALVAFSTSSYSCGRKKKVNPYEEVDQEKYSNLVQSVLSSRGVAQTPGSVEEDALLCGPVSKHKLPNQDVFLQGKRFHEALESILSPQETLKERDENLLKSGYIESVQHILKDVSGVRALESAVQHETLNYIGLLDCVAEYQGKLCVIDWKTSEKPKPFIQSTFDNPLQVVAYMGAMNHDTNYSFQVQCGLIVVAYKDGSPAHPHFMDAELCSQYWTKWLLRLEEYTEKKKNQNIQKPEYSE

SEQ ID NO: 827512 - protein, 342 aa, Homo sapiens [sequence omitted]

SEQ ID NO: 827513 - protein, 342 aa, Homo sapiens [sequence omitted]

SEQ ID NO: 827514 - protein, 183 aa, Homo sapiens [sequence omitted]

SEQ ID NO: 827515 - protein, 342 aa, Homo sapiens [sequence omitted]

SEQ ID NO: 827516 - protein, 342 aa, Homo sapiens [sequence omitted]

SEQ ID NO: 827517 - protein, 299 aa, Homo sapiens
MWPEEKYSNLVQSVLSSRGVAQTPGSVEEDALLCGPVSKHKLPNQGEDRRVPQNWFPIFNPERSDKPNASDPSVPLKIPLQRNVIPSVTRVLQQTMTKQQVFLLERWKQRMILELGEDGFKEYTSNVFLQGKRFHEALESILSPQETLKERDENLLKSGYIESVQHILKDVSGVRALESAVQHETLNYIGLLDCVAEYQGKLCVIDWKTSEKPKPFIQSTFDNPLQVVAYMGAMNHDTNYSFQVQCGLIVVAYKDGSPAHPHFMDAELCSQYWTKWLLRLEEYTEKKKNQNIQKPEYSE

SEQ ID NO: 827518 - protein, 342 aa, Homo sapiens [sequence omitted]

SEQ ID NO: 827519 - protein, 352 aa, Homo sapiens
AELIVGSCRAVLPSCEGNGGEIKGNGSESAPAAAARPRRRHRDSEALCTPGRSPLCAAEPVLDATSPPSVFGAEIAKTEGLEMADHMMAMNHGRFPDGTNGLHHHPAHRMGMGQFPSPHHHQQQQPQHAFNALMGEHIHYGAGNMNATSGIRHAMGPGTVNGGHPPSALAPAARFNNSQFMGPPVASQGGSLPASMQLQKLNNQYFNHHPYPHNHYMPDLHPAAGHQMNGTNQHFRDCNPKHSGGSSTPGGSGGSSTPGGSGSSSGGGAGSSNSGGGSGSGNMPASVAHVPAAMLPPNVIDTDFIDEEVLMSLVIEMGLDRIKELPELWLGQNEFDFMTDFVCKQQPSRVSC

SEQ ID NO: 827520 - protein, 281 aa, Homo sapiens
AELIVGSCRAVLPSCEGNGGEIKGNGSESAPAAAARPRRRHRDSEALCTPGRSPLCAAEPVLDATSPPSVFGAEIAKTEGLEMADHMMAMNHGRFPDGTNGLHHHPAHRMGMGQFPSPHHHQQQQPQHAFNALMGEHIHYGAGNMNATSGIRHAMGPGTVNGGHPPSALAPAARFNNSQFMGPPVASQGGSLPASMQLQKLNNQYFNHHPYPHKEKCGIEPVAGPDNEENNVRMNPPKEENPGLWGPGSDNLVRENKLRRGTQNTRQAQEYEKSHQLLVAR

SEQ ID NO: 827521 - protein, 352 aa, Homo sapiens; identical to SEQ ID NO: 827519

SEQ ID NO: 827522 - protein, 265 aa, Homo sapiens
MAMNHGRFPDGTNGLHHHPAHRMGMGQFPSPHHHQQQQPQHAFNALMGEHIHYGAGNMNATSGIRHAMGPGTVNGGHPPSALAPAARFNNSQFMGPPVASQGGSLPASMQLQKLNNQYFNHHPYPHNHYMPDLHPAAGHQMNGTNQHFRDCNPKHSGGSSTPGGSGGSSTPGGSGSSSGGGAGSSNSGGGSGSGNMPASVAHVPAAMLPPNVIDTDFIDEEVLMSLVIEMGLDRIKELPELWLGQNEFDFMTDFVCKQQPSRVSC

SEQ ID NO: 827523 - protein, 352 aa, Homo sapiens; identical to SEQ ID NO: 827519

SEQ ID NO: 827524 - protein, 352 aa, Homo sapiens; identical to SEQ ID NO: 827519

SEQ ID NO: 827525 - protein, 295 aa, Homo sapiens
AELIVGSCRAVLPSCEGNGGEIKGNGSESAPAAAARPRRRHRDSEALCTPGRSPLCAAEPVLDATSPPSVFGAEIAKTEGLEMADHMMAMNHGRFPDGTNGLHHHPAHRMGMGQFPSPHHHQQQQPQHAFNALMGEHIHYGAGNMNATSGIRHAMGPGTVNGGHPPSALAPAARFNNSQFMGPPVASQGGSLPASMQLQKLNNQYFNHHPYPHNHYMPDLHPAAGHQMNGTNQHFRDCNPNVIDTDFIDEEVLMSLVIEMGLDRIKELPELWLGQNEFDFMTDFVCKQQPSRVSC

SEQ ID NO: 827526 - protein, 265 aa, Homo sapiens; identical to SEQ ID NO: 827522

SEQ ID NO: 827527 - protein, 241 aa, Homo sapiens
MGQFPSPHHHQQQQPQHAFNALMGEHIHYGAGNMNATSGIRHAMGPGTVNGGHPPSALAPAARFNNSQFMGPPVASQGGSLPASMQLQKLNNQYFNHHPYPHNHYMPDLHPAAGHQMNGTNQHFRDCNPKHSGGSSTPGGSGGSSTPGGSGSSSGGGAGSSNSGGGSGSGNMPASVAHVPAAMLPPNVIDTDFIDEEVLMSLVIEMGLDRIKELPELWLGQNEFDFMTDFVCKQQPSRVSC

SEQ ID NO: 827528 - protein, 166 aa, Homo sapiens
MAGKDIPGQASLVFDVALLDLHNPKDSISIENKVVPENCERISQSGDFLRYHYNGTLLDGTLFDSSYSRNRTFDTYIGQGYVIPGMDEGLLGVCIGEKRRIVVPPHLGYGEEGRGRSLTLLPRLEYSGAILTHCSLDLLASSNPPASTSRVSGTTSAHHHAQLIFL

SEQ ID NO: 827529 - protein, 216 aa, Homo sapiens
LFRLWAKALSGDHSVSLGDTPSLGPDLVPTGVPSPPPRCGTHIPNAGRGRAQQARPRRAARLGSSPGAAAGRAGGRGDGVAAAARVGPGDPVHVCKRSRTPRPTRAARAPRCVRATLLAAPMAFRGWRPPPPPLLLLLLWVTGQAAPVAGLGSDAELQIERRFVPDECPRTVRSGDFVRYHYVGTFPDGQKFDSRYRALGARRGLSGCASLSPDRP

SEQ ID NO: 827530 - protein, 338 aa, Homo sapiens
MAGKDIPGQASLVFDVALLDLHNPKDSISIENKVVPENCERISQSGDFLRYHYNGTLLDGTLFDSSYSRNRTFDTYIGQGYVIPGMDEGLLGVCIGEKRRIVVPPHLGYGEEGRGNIPGSAVLVFDIHVIDFHNPSDSISITSHYKPPDCSVLSKKGDYLKYHYNASLLDGTLLDSTWNLGKTYNIVLGSGQVVLGMDMGLREMCVGEKRTVIIPPHLGYGEAGVDGEVPGSAVLVFDIELLELVAGLPEGYMFIWNGEVSPNLFEEIDKDGNGEVLLEEFSEYIHAQVASGKGKLAPGFDAELIVKNMFTNQDRNGDGKVTAEEFKLKDQEAKHDEL

SEQ ID NO: 827531 - protein, 691 aa, Homo sapiens
LFRLWAKALSGDHSVSLGDTPSLGPDLVPTGVPSPPPRCGTHIPNAGRGRAQQARPRRAARLGSSPGAAAGRAGGRGDGVAAAARVGPGDPVHVCKRSRTPRPTRAARAPRCVRATLLAAPMAFRGWRPPPPPLLLLLLWVTGQAAPVAGLGSDAELQIERRFVPDECPRTVRSGDFVRYHYVGTFPDGQKFDSSYDRDSTFNVFVGKGQLITGMDQALVGMCVNERRFVKIPPKLAYGNEGVSGVIPPNSVLHFDVLLMDIWNSEDQVQIHTYFKPPSCPRTIQVSDFVRYHYNGTFLDGTLFDSSHNRMKTYDTYVGIGWLIPGMDKGLLGMCVGEKRIITIPPFLAYGEDGDGKDIPGQASLVFDVALLDLHNPKDSISIENKVVPENCERISQSGDFLRYHYNGTLLDGTLFDSSYSRNRTFDTYIGQGYVIPGMDEGLLGVCIGEKRRIVVPPHLGYGEEGRGNIPGSAVLVFDIHVIDFHNPSDSISITSHYKPPDCSVLSKKGDYLKYHYNASLLDGTLLDSTWNLGKTYNIVLGSGQVVLGMDMGLREMCVGEKRTVIIPPHLGYGEAGVDGEVPGSAVLVFDIELLELVAGLPEGYMFIWNGEVSPNLFEEIDKDGNGEVLLEEFSEYIHAQVASGKGKLAPGFDAELIVKNMFTNQDRNGDGKVTAEEFKLKDQEAKHDEL

SEQ ID NO: 827532 - protein, 691 aa, Homo sapiens; identical to SEQ ID NO: 827531

SEQ ID NO: 827533 - protein, 691 aa, Homo sapiens; identical to SEQ ID NO: 827531

SEQ ID NO: 827534 - protein, 691 aa, Homo sapiens; identical to SEQ ID NO: 827531

SEQ ID NO: 827535 - protein, 678 aa, Homo sapiens
LFRLWAKALSGDHSVSLGDTPSLGPDLVPTGVPSPPPRCGTHIPNAGRGRAQQARPRRAARLGSSPGAAAGRAGGRGDGVAAAARVGPGDPVHVCKRSRTPRPTRAARAPRCVRATLLAAPMAFRGWRPPPPPLLLLLLWVTGQAAPVAGLGSDAELQIERRFVPDECPRTVRSGDFVRYHYVGTFPDGQKFDSSYDRDSTFNVFVGKGQLITGMDQALVGMCVNERRFVKIPPKLAYGNEGVSGVIPPNSVLHFDVLLMDIWNSEDQVQIHTYFKPPSCPRTIQVSDFVRYHYNGTFLDGTLFDSSHNRMKTYDTYVGIGWLIPGMDKGLLGMCVGEKRIITIPPFLAYGEDGDGKDIPGQASLVFDVALLDLHNPKDSISIENKVVPENCERISQSGDFLRYHYNGTLLDGTLFDSSYSRNRTFDTYIGQGYVIPGMDEGLLGVCIGEKRRIVVPPHLGYGEEGRGNIPGSAVLVFDIHVIDFHNPSDSISITSHYKPPDCSVLSKKGDYLKYHYNASLLDGTLLDSTWNLGKTYNIVLGSGQVVLGMDMGLREMCVGEKRTVIIPPHLGYGEAGVDGEVPGSAVLVFDIELLELVAGLPEGYMFIWNGEVSPNLFEEIDKDGNGEVLLEEFSEYIHAQVASGKGKLAPGFDAELIVKNMFTNQDRNGDGKFCPNR

SEQ ID NO: 827536 - protein, 693 aa, Homo sapiens
LFRLWAKALSGDHSVSLGDTPSLGPDLVPTGVPSPPPRCGTHIPNAGRGRAQQARPRRAARLGSSPGAAAGRAGGRGDGVAAAARVGPGDPVHVCKRSRTPRPTRAARAPRCVRATLLAAPMAFRGWRPPPPPLLLLLLWVTGQAAPVAGLGSDAELQIERRFVPDECPRTVRSGDFVRYHYVGTFPDGQKFDSSYDRDSTFNVFVGKGQLITGMDQALVGMCVNERRFVKIPPKLAYGNEGVSGVIPPNSVLHFDVLLMDIWNSEDQVQIHTYFKPPSCPRTIQVSDFVRYHYNGTFLDGTLFDSSHNRMKTYDTYVGIGWLIPGMDKGLLGMCVGEKRIITIPPFLAYGEDGDGKDIPGQASLVFDVALLDLHNPKDSISIENKVVPENCERISQSGDFLRYHYNGTLLDGTLFDSSYSRNRTFDTYIGQGYVIPGMDEGLLGVCIGEKRRIVVPPHLGYGEEGRGNIPGSAVLVFDIHVIDFHNPSDSISITSHYKPPDCSVLSKKGDYLKYHYNASLLDGTLLDSTWNLGKTYNIVLGSGQVVLGMDMGLREMCVGEKRTVIIPPHLGYGEAGVDGEVPGSAVLVFDIELLELVAGLPEGYMFIWNGEVSPNLFEEIDKDGNGEVLLEEFSEYIHAQVASGKGKLAPGFDAELIVKNMFPNGGGTYPEVVNDFPLKLLYFTNLNYFVLM

SEQ ID NO: 827537 - protein, 498 aa, Homo sapiens
LFRLWAKALSGDHSVSLGDTPSLGPDLVPTGVPSPPPRCGTHIPNAGRGRAQQARPRRAARLGSSPGAAAGRAGGRGDGVAAAARVGPGDPVHVCKRSRTPRPTRAARAPRCVRATLLAAPMAFRGWRPPPPPLLLLLLWVTGQAAPVAGLGSDAELQIERRFVPDECPRTVRSGDFVRYHYVGTFPDGQKFDSSYDRDSTFNVFVGKGQLITGMDQALVGMCVNERRFVKIPPKLAYGNEGVSGVIPPNSVLHFDVLLMDIWNSEDQVQIHTYFKPPSCPRTIQVSDFVRYHYNGTFLDGTLFDSSHNRMKTYDTYVGIGWLIPGMDKGLLGMCVGEKRIITIPPFLAYGEDGDGKDIPGQASLVFDVALLDLHNPKDSISIENKVVPENCERISQSGDFLRYHYNGTLLDGTLFDSSYSRNRTFDTYIGQGYVIPGMDEGLLGVCIGEKRRIVVPPHLGYGEEGRGEHQHHLPSSLAVAASTLLETGLLFLFLLSF

SEQ ID NO: 827538 - protein, 519 aa, Homo sapiens
LFRLWAKALSGDHSVSLGDTPSLGPDLVPTGVPSPPPRCGTHIPNAGRGRAQQARPRRAARLGSSPGAAAGRAGGRGDGVAAAARVGPGDPVHVCKRSRTPRPTRAARAPRCVRATLLAAPMAFRGWRPPPPPLLLLLLWVTGQAAPVAGLGSDAELQIERRFVPDECPRTVRSGDFVRYHYVGTFPDGQKFDSSYDRDSTFNVFVGKGQLITGMDQALVGMCVNERRFVKIPPKLAYGNEGVSGVIPPNSVLHFDVLLMDIWNSEDQVQIHTYFKPPSCPRTIQVSDFVRYHYNGTFLDGTLFDSSHNRMKTYDTYVGIGWLIPGMDKGLLGMCVGEKRIITIPPFLAYGEDGDGKDIPGQASLVFDVALLDLHNPKDSISIENKVVPENCERISQSGDFLRYHYNGTLLDGTLFDSSYSRNRTFDTYIGQGYVIPGMDEGLLGVCIGEKRRIVVPPHLGYGEEGRGRSLTLLPRLEYSGAILTHCSLDLLASSNPPASTSRVSGTTSAHHHAQLIFL

SEQ ID NO: 827539 - protein, 69 aa, Homo sapiens
  misc_feature (12)..(12): Xaa can be any naturally occurring amino acid
  misc_feature (30)..(30): Xaa can be any naturally occurring amino acid
TGKQAYDPMNDXPSLEINPLTYKGNKKPGXLPTAVAARLLEPSGSPRACQEFGTEIFLLPICVLETVVP

SEQ ID NO: 827540 - protein, 691 aa, Homo sapiens; identical to SEQ ID NO: 827531

SEQ ID NO: 827541 - protein, 639 aa, Homo sapiens
LFRLWAKALSGDHSVSLGDTPSLGPDLVPTGVPSPPPRCGTHIPNAGRGRAQQARPRRAARLGSSPGAAAGRAGGRGDGVAAAARVGPGDPVHVCKRSRTPRPTRAARAPRCVRATLLAAPMAFRGWRPPPPPLLLLLLWVTGQAAPVAGLGSDAELQIERRFVPDECPRTVRSGDFVRYHYVGTFPDGQKFDSSYDRDSTFNVFVGKGQLITGMDQALVGMCVNERRFVKIPPKLAYGNEGVSGVIPPNSVLHFDVLLMDIWNSEDQVQIHTYFKPPSCPRTIQVSDFVRYHYNGTFLDGTLFDSSHNRMKTYDTYVGIGWLIPGMDKGLLGMCVGEKRIITIPPFLAYGEDGDGKDIPGQASLVFDVALLDLHNPKDSISIENKVVPENCERISQSGDFLRYHYNGTLLDGTLFDSSYSRNRTFDTYIGQGYVIPGMDEGLLGVCIGEKRRIVVPPHLGYGEEGRGNIPGSAVLVFDIHVIDFHNPSDSISITSHYKPPDCSVLSKKGDYLKYHYNASLLDGTLLDSTWNLGKTYNIVLGSGQVVLGMDMGLREMCVGEKRTVIIPPHLGYGEAGVDGEVPGSAVLVFDIELLELVAGLPEGYMFIWNGEVSPNLFEEIDKDGNGEVLLEEVTNWPL

SEQ ID NO: 827542 - protein, 691 aa, Homo sapiens; identical to SEQ ID NO: 827531

SEQ ID NO: 827543 - protein, 691 aa, Homo sapiens; identical to SEQ ID NO: 827531

SEQ ID NO: 827544 - protein, 691 aa, Homo sapiens; identical to SEQ ID NO: 827531

SEQ ID NO: 827545 - protein, 605 aa, Homo sapiens
LFRLWAKALSGDHSVSLGDTPSLGPDLVPTGVPSPPPRCGTHIPNAGRGRAQQARPRRAARLGSSPGAAAGRAGGRGDGVAAAARVGPGDPVHVCKRSRTPRPTRAARAPRCVRATLLAAPMAFRGWRPPPPPLLLLLLWVTGQAAPVAGLGSDAELQIERRFVPDECPRTVRSGDFVRYHYVGTFPDGQKFDSSYDRDSTFNVFVGKGQLITGMDQALVGMCVNERRFVKIPPKLAYGNEGVSGVIPPNSVLHFDVLLMDIWNSEDQVQIHTYFKPPSCPRTIQVSDFVRYHYNGTFLDGTLFDSSHNRMKTYDTYVGIGWLIPGMDKGLLGMCVGEKRIITIPPFLAYGEDGDGKDIPGQASLVFDVALLDLHNPKDSISIENKVVPENCERISQSGDFLRYHYNGTLLDGTLFDSSYSRNRTFDTYIGQGYVIPGMDEGLLGVCIGEKRRIVVPPHLGYGEEGRGNIPGSAVLVFDIHVIDFHNPSDSISITSHYKPPDCSVLSKKGDYLKYHYNASLLDGTLLDSTWNLGKTYNIVLGSGQVVLGMDMGLREMCVGEKRTVIIPPHLGYGEAGVDGEVPGSAVLVFDIDCRKTAMTVHLPT

SEQ ID NO: 827546 - protein, 480 aa, Homo sapiens
LFRLWAKALSGDHSVSLGDTPSLGPDLVPTGVPSPPPRCGTHIPNAGRGRAQQARPRRAARLGSSPGAAAGRAGGRGDGVAAAARVGPGDPVHVCKRSRTPRPTRAARAPRCVRATLLAAPMAFRGWRPPPPPLLLLLLWVTGQAAPVAGLGSDAELQIERRFVPDECPRTVRSGDFVRYHYVGTFPDGQKFDSSYDRDSTFNVFVGKGQLITGMDQALVGMCVNERRFVKIPPKLAYGNEGVSGVIPPNSVLHFDVLLMDIWNSEDQVQIHTYFKPPSCPRTIQVSDFVRYHYNGTFLDGTLFDSSHNRMKTYDTYVGIGWLIPGMDKGLLGMCVGEKRIITIPPFLAYGEDGDGKDIPGQASLVFDVALLDLHNPKDSISIENKVVPENCERISQSGDFLRYHYNGTLLDGTLFDSSYSRNRTFDTYIGQGYVIPGMDEGLLGVCIGEKRRIVVPPHLGYGEEGRGGETPSIHPSKIY

SEQ ID NO: 827547 - protein, 423 aa, Homo sapiens
MALKVLLEQEKTFFTLLVLLGYLSCKVTCESGDCRQQEFRDRSGNCVPCNQCGPGMELSKECGFGYGEDAQCVTCRLHRFKEDWGFQKCKPCLDCAVVNRFQKANCSATSDAICGDCLPGFYRKTKLVGFQDMECVPCGDPPPPYEPHCASKVNLVKIASTASSPRDTALAAVICSALATVLLALLILCVIYCKRQFMEKKPSWSLRSQDIQYNGSELSCFDRPQLHEYAHRACCQCRRDSVQTCGPVRLLPSMCCEEACSPNPATLGCGVHSAASLQARNAGPAGEMVPTFFGSLTQSICGEFSDAWPLMQNPMGGDNISFCDSYPELTGEDIHSLNPELESSTSLDSNSSQDLVGGAVPVQSHSENFTAATDLSRYNNTLVESASTQDALTMRSQLDQESGAVIHPATQTSLQVRQRLGSL

SEQ ID NO: 827548 - protein, 417 aa, Homo sapiens
MALKVLLEQEKTFFTLLVLLGYLSCKVTCESGDCRQQEFRDRSGNCVPCNQCGPGMELSKECGFGYGEDAQCVTCRLHRFKEDWGFQKCKPCLDCAVVNRFQKANCSATSDAICGDCLPGFYRKTKLVGFQDMECVPCGDPPPPYEPHCASKVNLVKIASTASSPRDTALAAVICSALATVLLALLILCVIYCKRQFMEKKPSWSLRSQDIQYNGSELSCFDRPQLHEYAHRACCQCRRDSVQTCGPVRLLPSMCCEEACSPNPATLGCGVHSAASLQARNAGPAGEMVPTFFGSLTQSICGEFSDAWPLMQNPMGGDNISFCDSYPELTGEDIHSLNPELESSTSLDSNSSQDLVGGAVPVQSHSENFTAATDLSRYNNTLVESASTQDALTMRSQLDQESGAVIHPATQTSLQEA

SEQ ID NO: 827549 - protein, 417 aa, Homo sapiens; identical to SEQ ID NO: 827548

SEQ ID NO: 827550 - protein, 417 aa, Homo sapiens; identical to SEQ ID NO: 827548

SEQ ID NO: 827551 - protein, 87 aa, Homo sapiens
GEGLRPQARRAGLLPSFLLLSRGVCPGPEQSVQFRNSIGGSSWSPTTLKIIRSGALRASPRGGKLSSESSASGFEIYILRQCRKSVF

SEQ ID NO: 827552 - protein, 103 aa, Homo sapiens
MALPADARSGRSTPCVGAEGTRWVRPGRGWARAWRPPGARLPGALPFGERSQGTAPTSLHKPGTLRPTAAGELRPGAPSPTTPGSLPGSPSRDCAFCNRAVLQ

SEQ ID NO: 827553 - protein, 154 aa, Homo sapiens
MASHRHSGPSSYKVGTMAEKFDCHYCRDPLQGKKYVQKDGHHCCLKCFDKFCANTCVECRKPIGADSKEVHYKNRFWHDTCFRCAKCLHPLANETFVAKDNKILCNKCTTREDSPKCKGCFKAIVAGTASFPPRVPREEALRADVMWACLSWWG

SEQ ID NO: 827554 - protein, 280 aa, Homo sapiens
MAEKFDCHYCRDPLQGKKYVQKDGHHCCLKCFDKFCANTCVECRKPIGADSKEVHYKNRFWHDTCFRCAKCLHPLANETFVAKDNKILCNKCTTREDSPKCKGCFKAIVAGDQNVEYKGTVWHKDCFTCSNCKQVIGTGSFFPKGEDFYCVTCHETKFAKHCVKCNKAITSGGITYQDQPWHADCFVCVTCSKKLAGQRFTAVEDQYYCVDCYKNFVAKKCAGCKNPITGFGKGSSVVAYEGQSWHDYCFHCKKCSVNLANKRFVFHQEQVYCPDCAKKL

SEQ ID NO: 827555 - protein, 280 aa, Homo sapiens; identical to SEQ ID NO: 827554

SEQ ID NO: 827556 - protein, 280 aa, Homo sapiens; identical to SEQ ID NO: 827554

SEQ ID NO: 827557 - protein, 296 aa, Homo sapiens
MASHRHSGPSSYKVGTMAEKFDCHYCRDPLQGKKYVQKDGHHCCLKCFDKFCANTCVECRKPIGADSKEVHYKNRFWHDTCFRCAKCLHPLANETFVAKDNKILCNKCTTREDSPKCKGCFKAIVAGDQNVEYKGTVWHKDCFTCSNCKQVIGTGSFFPKGEDFYCVTCHETKFAKHCVKCNKAITSGGITYQDQPWHADCFVCVTCSKKLAGQRFTAVEDQYYCVDCYKNFVAKKCAGCKNPITGFGKGSSVVAYEGQSWHDYCFHCKKCSVNLANKRFVFHQEQVYCPDCAKKL

SEQ ID NO: 827558 - protein, 323 aa, Homo sapiens
MAEKFDCHYCRDPLQGKKYVQKDGHHCCLKCFDKFCANTCVECRKPIGADSKEVHYKNRFWHDTCFRCAKCLHPLANETFVAKDNKILCNKCTTREDSPKCKGCFKAIVAGDQNVEYKGTVWHKDCFTCSNCKQVIGTGSFFPKGEDFYCVTCHETKFAKHCVKCNKAITSGGITYQDQPWHADCFVCVTCSKKLAGQRFTAVEDQYYCVDCYKNFVAKKCAGCKNPITGKRTVSRVSHPVSKARKPPVCHGKRLPLTLFPSANLRGRHPGGERTCPSWVVVLYRKNRSLAAPRGPGLVKAPVWWPMKDNPGTTTASTAKNAP

SEQ ID NO: 827559 - protein, 105 aa, Homo sapiens
MASHRHSGPSSYKVGTMAEKFDCHYCRDPWPMRPLWPRTTRSCATSAPLGRTPPSARGASRPLWQEIKTWSTRGPSGTKTASPVVTASKSSGLEASSLKGRTSTA

SEQ ID NO: 827560 - protein, 230 aa, Homo sapiens
MAEKFDCHYCRDPLQGKKYVQKDGHHCCLKCFDKFCANTCVECRKPIGADSKEVHYKNRFWHDTCFRCAKCLHPLANETFVAKDNKILCNKCTTREDSPKCKGCFKAIVAGDQNVEYKGTVWHKDCFTCSNCKQVIGTGSFFPKGEDFYCVTCHETKFAKHCVKCNKAITSGGITYQDQPWHADCFVCVTCSKKLAGQRFTAVEDQYYCVDCYKNFVAKKCAGCKNPITG

SEQ ID NO: 827561 - protein, 194 aa, Homo sapiens
MAEKFDCHYCRDPLQGKKYVQKDGHHCCLKCFDKFCANTCVECRKPIGADSKEVHYKNRFWHDTCFRCAKCLHPLANETFVAKDNKILCNKCTTREDSPKCKGCFKAIVAGDQNVEYKGTVWHKDCFTCSNCKQVIGTGSFFPKGEDFYCVTCHETKFAKHCVKCNKGLVKAPVWWPMKDNPGTTTASTAKNAP

SEQ ID NO: 827562 - protein, 78 aa, Homo sapiens
DQRIPTASTGYKNFVAKKCAGCKNPITGFGKGSSVVAYEGQSWHDYCFHCKKCSVNLANKRFVFHQEQVYCPDCAKKL

SEQ ID NO: 827563 - protein, 280 aa, Homo sapiens; identical to SEQ ID NO: 827554

SEQ ID NO: 827564 - protein, 117 aa, Homo sapiens
PYSVQHLIPPSNISSLLPTSHLSLQHLIAFQHLISFQHLISFQHLMAPSNISYSFQHLIAFQHLISFQHLITPSNISSLLPTSHDPFQHLIPVAAAAPTHCSPSSVSRKRTLLTCMV

SEQ ID NO: 827565 - protein, 280 aa, Homo sapiens; identical to SEQ ID NO: 827554

SEQ ID NO: 827566 - protein, 280 aa, Homo sapiens; identical to SEQ ID NO: 827554

SEQ ID NO: 827567 - protein, 149 aa, Homo sapiens
MAEKFDCHYCRDPLQGKKYVQKDGHHCCLKCFDKFCANTCVECRKPIGADSKEVHYKNRFWHDTCFRCAKCLHPLANETFVAKDNKILCNKCTTREDSPKCKGCFKAIVAGTASFPPRVPREEALRADVMWACLSWWGCHQHGYDISQQ

SEQ ID NO: 827568 - protein, 138 aa, Homo sapiens
MAEKFDCHYCRDPLQGKKYVQKDGHHCCLKCFDKFCANTCVECRKPIGADSKEVHYKNRFWHDTCFRCAKCLHPLANETFVAKDNKILCNKCTTREDSPKCKGCFKAIVAGTASFPPRVPREEALRADVMWACLSWWG

SEQ ID NO: 827569 - protein, 67 aa, Homo sapiens
RALHPPPGGGGSVRSRRRHRRASASVQAAAAAAETAARASIPTQHLGSCFQPYPAFAEYILSATHPA

SEQ ID NO: 827570 - protein, 280 aa, Homo sapiens; identical to SEQ ID NO: 827554

SEQ ID NO: 827571 - protein, 280 aa, Homo sapiens; identical to SEQ ID NO: 827554

SEQ ID NO: 827572 - protein, 280 aa, Homo sapiens; identical to SEQ ID NO: 827554

SEQ ID NO: 827573 - protein, 280 aa, Homo sapiens; identical to SEQ ID NO: 827554

SEQ ID NO: 827574 - protein, 280 aa, Homo sapiens; identical to SEQ ID NO: 827554

SEQ ID NO: 827575 - protein, 320 aa, Homo sapiens
RALHPPPGGGGSVRSRRRHRRASASVQAAAAAAETAARASIPTQHLGSCFQPYPAFAEYVQKDGHHCCLKCFDKFCANTCVECRKPIGADSKEVHYKNRFWHDTCFRCAKCLHPLANETFVAKDNKILCNKCTTREDSPKCKGCFKAIVAGDQNVEYKGTVWHKDCFTCSNCKQVIGTGSFFPKGEDFYCVTCHETKFAKHCVKCNKAITSGGITYQDQPWHADCFVCVTCSKKLAGQRFTAVEDQYYCVDCYKNFVAKKCAGCKNPITGFGKGSSVVAYEGQSWHDYCFHCKKCSVNLANKRFVFHQEQVYCPDCAKKL

SEQ ID NO: 827576 - protein, 244 aa, Homo sapiens
MAEKFDCHYCRDPLQGKKYVQKDGHHCCLKCFDKFCANTCVECRKPIGADSKEVHYKNRFWHDTCFRCAKCLHPLANETFVAKDNKILCNKCTTREDSPKCKGCFKAIVAGDQNVEYKGTVWHKDCFTCSNCKQVIGTGSFFPKGEDFYCVTCHETKFAKHCVKCNKAITSGGITYQDQPWHADCFVCVTCSKKLAGQRFTAVEDQYYCVDFPLQKMLRESGQQALCFPPGASVLSRLCQKAVN

SEQ ID NO: 827577 - protein, 280 aa, Homo sapiens; identical to SEQ ID NO: 827554

SEQ ID NO: 827578 - protein, 67 aa, Homo sapiens; identical to SEQ ID NO: 827569

SEQ ID NO: 827579 - protein, 218 aa, Homo sapiens
MAEKFDCHYCRDPLQGKKYVQKDGHHCCLKCFDKFCANTCVECRKPIGADSKEVHYKNRFWHDTCFRCAKCLHPLANETFVAKDNKILCNKCTTREDSPKCKGCFKAIVAGDQNVEYKGTVWHKDCFTCSNCKQVIGTGSFFPKGEDFYCVTCHETKFAKHCVKCNKAATAAPRPRCRQRPPPLKTAARASIPTQHLGSCFQPYPAFAEYILSATHPA

SEQ ID NO: 827580 - protein, 280 aa, Homo sapiens; identical to SEQ ID NO: 827554

SEQ ID NO: 827581 - protein, 230 aa, Homo sapiens; identical to SEQ ID NO: 827560

SEQ ID NO: 827582 - protein, 136 aa, Homo sapiens
MAEKFDCHYCRDPLQGKKYVQKDGHHCCLKCFDKFCANTCVECRKPIGADSKEVHYKNRFWHDTCFRCAKCLHPLANETFVAKDNKILCNKCTTREDSPKCKGCFKAIVAGRSKLGLIASHAVEVLPFTGRSFQSR

SEQ ID NO: 827583 - protein, 149 aa, Homo sapiens [sequence omitted]

SEQ ID NO: 827584 - protein, 253 aa, Homo sapiens
AKFLLREEAAAPRARRLGEQKRVGGAGGLGLSPGARGPGVVTLLAEEGRRPDARSGAAFPPTPAPGHAPCPVPRPAPLPVRREMPSTFLLSLQPLDCQMRLCASWADQLTEEQIAEFKEAFSLFDKDGDGTITTKELGTVMRSLGQNPTEAELQDMINEVDADGNGTIDFPEFLTMMARKMKDTDSEEEIREAFRVFDKDGNGYISAAELRHVMTNLGEKLTDEEVDEMIREADIDGDGQVNYEEFVQMMTAK

SEQ ID NO: 827585 - protein, 149 aa, Homo sapiens [sequence omitted]

SEQ ID NO: 827586 - protein, 149 aa, Homo sapiens [sequence omitted]

SEQ ID NO: 827587 - protein, 149 aa, Homo sapiens [sequence omitted]

SEQ ID NO: 827588 - protein, 149 aa, Homo sapiens [sequence omitted]

SEQ ID NO: 827589 - protein, 149 aa, Homo sapiens [sequence omitted]

SEQ ID NO: 827590 - protein, 149 aa, Homo sapiens [sequence omitted]

SEQ ID NO: 827591 - protein, 149 aa, Homo sapiens [sequence omitted]

SEQ ID NO: 827592 - protein, 113 aa, Homo sapiens; identical to SEQ ID NO: 766393

SEQ ID NO: 827593 - protein, 149 aa, Homo sapiens [sequence omitted]

SEQ ID NO: 827594 - protein, 149 aa, Homo sapiens [sequence omitted]

SEQ ID NO: 827595 - protein, 109 aa, Homo sapiens
MKWYDYKRIVLLSPGVTCCLSRERHHSHSGVTMARKMKDTDSEEEIREAFRVFDKDGNGYISAAELRHVMTNLGEKLTDEEVDEMIREADIDGDGQVNYEEFVQMMTAK

SEQ ID NO: 827596 - protein, 149 aa, Homo sapiens [sequence omitted]

SEQ ID NO: 827597 - protein, 149 aa, Homo sapiens [sequence omitted]

SEQ ID NO: 827598 - protein, 149 aa, Homo sapiens [sequence omitted]

SEQ ID NO: 827599 - protein, 149 aa, Homo sapiens [sequence omitted]

SEQ ID NO: 827600 - protein, 149 aa, Homo sapiens [sequence omitted]

SEQ ID NO: 827601 - protein, 149 aa, Homo sapiens [sequence omitted]

SEQ ID NO: 827602 - protein, 149 aa, Homo sapiens [sequence omitted]

SEQ ID NO: 827603 - protein, 149 aa, Homo sapiens [sequence omitted]

SEQ ID NO: 827604 - protein, 149 aa, Homo sapiens [sequence omitted]

SEQ ID NO: 827605 - protein, 68 aa, Homo sapiens
  misc_feature (3)..(3): Xaa can be any naturally occurring amino acid
  misc_feature (12)..(12): Xaa can be any naturally occurring amino acid
TRXARSRTPGSXGLHEFGTFLLPVFLAFCSLLDFLPEGWVRAVEGRHRPCASATGPWAGWLVEEMLTL

SEQ ID NO: 827606 - protein, 149 aa, Homo sapiens [sequence omitted]

SEQ ID NO: 827607 - protein, 149 aa, Homo sapiens [sequence omitted]

SEQ ID NO: 827608 - protein, 115 aa, Homo sapiens
MADQLTEEQIAEFKEAFSLFDKDGDGTITTKELGTVMRSLGQNPTEAELQDMINEVDADGNGTIDLPGLMPFSCLSLPRCWDYRREPLGPACIFYQPQIQQQAEDSAHKTGLVSW

SEQ ID NO: 827609 - protein, 78 aa, Homo sapiens
MAIISENLPVGQRAKVFSLRYTLTNVGYATGPMLGVVIAGQMPLAPFLIASAIAFGSLFLMIGIPPTQRDDSNKPLSF

SEQ ID NO: 827610 - protein, 149 aa, Homo sapiens [sequence omitted]

SEQ ID NO: 827611 - protein, 149 aa, Homo sapiens [sequence omitted]

SEQ ID NO: 827612 - protein, 149 aa, Homo sapiens [sequence omitted]

SEQ ID NO: 827613 - protein, 149 aa, Homo sapiens [sequence omitted]

SEQ ID NO: 827614 - protein, 149 aa, Homo sapiens [sequence omitted]

SEQ ID NO: 827615 - protein, 149 aa, Homo sapiens [sequence omitted]

SEQ ID NO: 827616 - protein, 253 aa, Homo sapiens; identical to SEQ ID NO: 827584

SEQ ID NO: 827617 - protein, 177 aa, Homo sapiens
QAVEEIRLSLRQCALGSADAVHSVHGRRLADQLTEEQIAEFKEAFSLFDKDGDGTITTKELGTVMRSLGQNPTEAELQDMINEVDADGNGTIDFPEFLTMMARKMKDTDSEEEIREAFRVFDKDGNGYISAAELRHVMTNLGEKLTDEEVDEMIREADIDGDGQVNYEEFVQMMTAK

SEQ ID NO: 827618 - protein, 302 aa, Homo sapiens
MASPGCLWLLAVALLPWTCASRALQHLDPPAPLPLVIWHGMGDSCCNPLSMGAIKKMVEKKIPGIYVLSLEIGKTLMEDVENSFFLNVNSQVTTVCQALAKDPKLQQGYNAMGFSQGGQFLRAVAQRCPSPPMINLISVGGQHQGVFGLPRCPGESSHICDFIRKTLNAGAYSKVVQERLVQAEYWHDPIKEDVYRNHSIFLADINQERGINESYKKNLMALKKFVMVKFLNDSIVDPVDSEWFGFYRSGQAKETIPLQETSLYTQTLGLRPGHAGHYFLATQGPSFAERFCPLSSGYRFTR

SEQ ID NO: 827619 - protein, 317 aa, Homo sapiens
RTRCVTQREAKMASPGCLWLLAVALLPWTCASRALQHLDPPAPLPLVIWHGMGDSCCNPLSMGAIKKMVEKKIPGIYVLSLEIGKTLMEDVENSFFLNVNSQVTTVCQALAKDPKLQQGYNAMGFSQGGQFLRAVAQRCPSPPMINLISVGGQHQGVFGLPRCPGESSHICDFIRKTLNAGAYSKVVQERLVQAEYWHDPIKEDVYRNHSIFLADINQERGINESYKKNLMALKKFVMVKFLNDSIVDPVDSEWFGFYRSGQAKETIPLQETSLYTQDRLGLKEMDNAGQLVFLATEGDHLQLSEEWFYAHIIPFLG

SEQ ID NO: 827620 - protein, 340 aa, Homo sapiens
LTYYTGPFYVSATRHLSDGRTLPEPPYVPRAEAKMASPGCLWLLAVALLPWTCASRALQHLDPPAPLPLVIWHGMGDSCCNPLSMGAIKKMVEKKIPGIYVLSLEIGKTLMEDVENSFFLNVNSQVTTVCQALAKDPKLQQGYNAMGFSQGGQFLRAVAQRCPSPPMINLISVGGQHQGVFGLPRCPGESSHICDFIRKTLNAGAYSKVVQERLVQAEYWHDPIKEDVYRNHSIFLADINQERGINESYKKNLMALKKFVMVKFLNDSIVDPVDSEWFGFYRSGQAKETIPLQETSLYTQDRLGLKEMDNAGQLVFLATEGDHLQLSEEWFYAHIIPFLG

SEQ ID NO: 827621 - protein, 318 aa, Homo sapiens
IAVWNSDDSRAKMASPGCLWLLAVALLPWTCASRALQHLDPPAPLPLVIWHGMGDSCCNPLSMGAIKKMVEKKIPGIYVLSLEIGKTLMEDVENSFFLNVNSQVTTVCQALAKDPKLQQGYNAMGFSQGGQFLRAVAQRCPSPPMINLISVGGQHQGVFGLPRCPGESSHICDFIRKTLNAGAYSKVVQERLVQAEYWHDPIKEDVYRNHSIFLADINQERGINESYKKNLMALKKFVMVKFLNDSIVDPVDSEWFGFYRSGQAKETIPLQETSLYTQDRLGLKEMDNAGQLVFLATEGDHLQLSEEWFYAHIIPFLG

SEQ ID NO: 827622 - protein, 318 aa, Homo sapiens; identical to SEQ ID NO: 827621

SEQ ID NO: 827623 - protein, 266 aa, Homo sapiens [sequence omitted]

SEQ ID NO: 827624 - protein, 294 aa, Homo sapiens
IAVWNSDDSRAKMASPGCLWLLAVALLPWTCASRALQHLDPPAPLPLVIWHGMGDSCCNPLSMGAIKKMVEKKIPGIYVLSLEIGKTLMEDVENSFFLNVNSQVTTVCQALAKDPKLQQGYNAMGFSQGGQFLRAVAQRCPSPPMINLISVGGQHQGVFGLPRCPGESSHICDFIRKTLNAGAYSKVVQERLVQAEYWHDPIKEDVYRNHSIFLADINQERGINESYKKNLMALKKFVMVKFLNDSIVDPVDSEDRLGLKEMDNAGQLVFLATEGDHLQLSEEWFYAHIIPFLG

SEQ ID NO: 827625 - protein, 186 aa, Homo sapiens
RTRCVTQREAKMASPGCLWLLAVALLPWTCASRALQHLDPPAPLPLVIWHGMGDSCCNPLSMGAIKKMVEKKIPGIYVLSLEIGKTLMEDVENSFFLNVNSQVTTVCQALAKDPKLQQGYNAMGFSQGGQFLRAVAQRCPSPPMINLISVGGQHQGVFGLPRCPGESSHICDFIRTSCKPNTGMTP

SEQ ID NO: 827626 - protein, 318 aa, Homo sapiens; identical to SEQ ID NO: 827621

SEQ ID NO: 827627 - protein, 306 aa, Homo sapiens
MASPGCLWLLAVALLPWTCASRALQHLDPPAPLPLVIWHGMGDSCCNPLSMGAIKKMVEKKIPGIYVLSLEIGKTLMEDVENSFFLNVNSQVTTVCQALAKDPKLQQGYNAMGFSQGGQFLRAVAQRCPSPPMINLISVGGQHQGVFGLPRCPGESSHICDFIRKTLNAGAYSKVVQERLVQAEYWHDPIKEDVYRNHSIFLADINQERGINESYKKNLMALKKFVMVKFLNDSIVDPVDSEWFGFYRSGQAKETIPLQETSLYTQDRLGLKEMDNAGQLVFLATEGDHLQLSEEWFYAHIIPFLG

SEQ ID NO: 827628 - protein, 318 aa, Homo sapiens; identical to SEQ ID NO: 827621

SEQ ID NO: 827629 - protein, 318 aa, Homo sapiens; identical to SEQ ID NO: 827621

SEQ ID NO: 827630 - protein, 297 aa, Homo sapiens
MGPWQLHSGSMTALHLWNLARDSRALVIWHGMGDSCCNPLSMGAIKKMVEKKIPGIYVLSLEIGKTLMEDVENSFFLNVNSQVTTVCQALAKDPKLQQGYNAMGFSQGGQFLRAVAQRCPSPPMINLISVGGQHQGVFGLPRCPGESSHICDFIRKTLNAGAYSKVVQERLVQAEYWHDPIKEDVYRNHSIFLADINQERGINESYKKNLMALKKFVMVKFLNDSIVDPVDSEWFGFYRSGQAKETIPLQETSLYTQDRLGLKEMDNAGQLVFLATEGDHLQLSEEWFYAHIIPFLG

SEQ ID NO: 827631 - protein, 318 aa, Homo sapiens; identical to SEQ ID NO: 827621

SEQ ID NO: 827632 - protein, 268 aa, Homo sapiens
IAVWNSDDSRAKMASPGCLWLLAVALLPWTCASRALQHLDPPAPLPLVIWHGMGDSCCNPLSMGAIKKMVEKKIPGIYVLSLEIGKTLMEDVENSFFLNVNSQVTTVCQALAKDPKLQQGYNAMGFSQGGQFLRAVAQRCPSPPMINLISVGGQHQGVFGLPRCPGESSHICDFIRKTLNAGAYSKVVQERLVQAEYWHDPIKEDVYRNHSIFLADINQERGINESYKKNLMALKKFVMVKFLNDSIVDPVDSEWFGFHRSGSRARLG

SEQ ID NO: 827633 - protein, 330 aa, Homo sapiens
MKIPSLLFGCMLSQNCFLSCLNHPDKKIVAYSSMILFTSLNHERMKELEENLNIAIDVIDAYQKHPESEWPFLIITDLFLKSPELVQAMFPKLNNQERVTLLDLMIAKITSDEPLTKDDIPVFLRHAELIASTFVDQCKTVLKLASEEPPDDEEALATIRLLDVLCEMTVNTELLGYLQVFPGLLERVIDLLRVIHVAGKETTNIFSNCGCVRAEGDISNVANGFKSHLIRLIGNLCYKNKDNQDKVNELDGIPLILDNCNISDSNPFLTQWVIYAIRNLTEDNSQNQDLIAKMEEQGLADASLLKKVGFEVEKKGEKLILKSTRDTPKP

SEQ ID NO: 827634 - protein, 330 aa, Homo sapiens; identical to SEQ ID NO: 827633

SEQ ID NO: 827635 - protein, 330 aa, Homo sapiens; identical to SEQ ID NO: 827633

SEQ ID NO: 827636 - protein, 330 aa, Homo sapiens; identical to SEQ ID NO: 827633

SEQ ID NO: 827637 - protein, 330 aa, Homo sapiens; identical to SEQ ID NO: 827633

SEQ ID NO: 827638 - protein, 327 aa, Homo sapiens
MKIPSLLFGCMLSQNCFLSCLNHPDKKIVAYSSMILFTSLNHERMKELEENLNIAIDVIDAYQKHPESEWPFLIITDLFLKSPELVQAMFPKLNNQERVTLLDLMIAKITSDEPLTKDDIPVFLRHAELIASTFVDQCKTVLKLASEEPPDDEEALATIRLLDVLCEMTVNTELLGYLQVFPGLLERVIDLLRVIHVAGKETTNIFSNCGCVRAEGDISNVANGFKSHLIRLIGNLCYKNKDNQDKVNELDGIPLILDNCNISDSNPCILACELPCTSLQPGPLAKQVPCLMFIHATIQSTLASLLALNFGSDFLTHLSVSAPAGSR

SEQ ID NO: 827639 - protein, 198 aa, Homo sapiens
MKIPSLLFGCMLSQNCFLSCLNHPDKKIVAYSSMILFTSLNHERMKELEENLNIAIDVIDAYQKHPESEWPFLIITDLFLKSPELVQAMFPKLNNQERVTLLDLMIAKITSDEPLTKDDIPVFLRHAELIASTFVDQCKTVLKLASEEPPDDEEALATIRLLDVLCEMTVNTELLGYLQVFPGLLERVIDLIAVIHVT

SEQ ID NO: 827640 - protein, 245 aa, Homo sapiens
PDQHANGLINQERVTLLDLMIAKITSDEPLTKDDIPVFLRHAELIASTFVDQCKTVLKLASEEPPDDEEALATIRLLDVLCEMTVNTELLGYLQVFPGLLERVIDLLRVIHVAGKETTNIFSNCGCVRAEGDISNVANGFKSHLIRLIGNLCYKNKDNQDKVNELDGIPLILDNCNISDSNPFLTQWVIYAIRNLTEDNSQNQDLIAKMEEQGLADASLLKKVGFEVEKKGEKLILKSTRDTPKP

SEQ ID NO: 827641 - protein, 108 aa, Homo sapiens
MAAPRPPPARLSGVMVPAPIQDLEALRALTALFKEQRNRETAPRTIFQRVLDILKKSSHAVELACRDPSQVENLASSLQLITECFRSERAAEPINSTQDYLPKMFWIS

SEQ ID NO: 827642 - protein, 330 aa, Homo sapiens; identical to SEQ ID NO: 827633

SEQ ID NO: 827643 - protein, 330 aa, Homo sapiens; identical to SEQ ID NO: 827633

SEQ ID NO: 827644 - protein, 330 aa, Homo sapiens; identical to SEQ ID NO: 827633

SEQ ID NO: 827645 - protein, 258 aa, Homo sapiens
MKIPSLLFGCMLSQNCFLSCLNHPDKKIVAYSSMILFTSLNHERMKELEENLNIAIDVIDAYQKHPESEWPFLIITDLFLKSPELVQAMFPKLNNQERVTLLDLMIAKITSDEPLTKDDIPVFLRHAELIASTFVDQCKTVLKLASEEPPDDEEALATIRLLDVLCEMTVNTELLGYLQVFPGLLERVIDLLRVIHVAGKETTNIFSNCGCVRAEGDISNVANGFKSHLIRLIGNLCYKNKDNQDKVNELVVDEQIDE

SEQ ID NO: 827646 - protein, 282 aa, Homo sapiens
HRCLPKTILNQNAYQKHSDSGWPFLIITDLFLKSPELVQAMFPKLNNQERVTLLDLMIAKITSDEPLTKDDIPVFLRHAELIASTFVDQCKTVLKLASEEPPDDEEALATIRLLDVLCEMTVNTELLGYLQVFPGLLERVIDLLRVIHVAGKETTNIFSNCGCVRAEGDISNVANGFKSHLIRLIGNLCYKNKDNQDKVNELDGIPLILDNCNISDSNPFLTQWVIYAIRNLTEDNSQNQDLIAKMEEQGLADASLLKKVGFEVEKKGEKLILKSTRDTPKP

SEQ ID NO: 827647 - protein, 185 aa, Homo sapiens
MAAPRPPPARLSGVMVPAPIQDLEALRALTALFKEQRNRETAPRTIFQRVLDILKKSSHAVELACRDPSQVENLASSLQLITECFRCLRNACIECSVNQNSIRNLDTIGVAVDLILLFRELRVEQESLLTAFRCGLQFLGNIASRNEDSQSIVWVHAFPELFFVLLKSSGQKNCCLLFNDFVYIP

SEQ ID NO: 827648 - protein, 635 aa, Homo sapiens
MASSGMADSANHLPFFFGNITREEAEDYLVQGGMSDGLYLLRQSRNYLGGFALSVAHGRKAHHYTIERELNGTYAIAGGRTHASPADLCHYHSQESDGLVCLLKKPFNRPQGVQPKTGPFEDLKENLIREYVKQTWNLQGQALEQAIISQKPQLEKLIATTAHEKMPWFHGKISREESEQIVLIGSKTNGKFLIRARDNNGSYALCLLHEGKVLHYRIDKDKTGKLSIPEGKKFDTLWQLVEHYSYKADGLLRVLTVPCQKIGTQGNVNFGGRPQLPGSHPATWSAGGIISRIKSYSFPKPGHRKSSPAQGNRQESTVSFNPYEPELAPWAADKGPQREALPMDTEVYESPYADPEEIRPKEVYLDRKLLTLEDKELGSGNFGTVKKGYYQMKKVVKTVAVKILKNEANDPALKDELLAEANVMQQLDNPYIVRMIGICEAESWMLVMEMAELGPLNKYLQQNRHVKDKNIIELVHQVSMGMKYLEESNFVHRDLAARNVLLVTQHYAKISDFGLSKALRADENYYKAQTHGKWPVKWYAPECINYYKFSSKSDVWSFGVLMWEAFSYGQKPYRGMKGSEVTAMLEKGERMGCPAGCPREMYDLMNLCWTYDVENRPGFAAVELRLRNYYYDVVN

SEQ ID NO: 827649 - protein, 612 aa, Homo sapiens
MASSGMADSANHLPFFFGNITREEAEDYLVQGGMSDGLYLLRQSRNYLGGFALSVAHGRKAHHYTIERELNGTYAIAGGRTHASPADLCHYHSQESDGLVCLLKKPFNRPQGVQPKTGPFEDLKENLIREYVKQTWNLQGQALEQAIISQKPQLEKLIATTAHEKMPWFHGKISREESEQIVLIGSKTNGKFLIRARDNNGSYALCLLHEGKVLHYRIDKDKTGKLSIPEGKKFDTLWQLVEHYSYKADGLLRVLTVPCQKIGTQGNVNFGGRPQLPGSHPASSPAQGNRQESTVSFNPYEPELAPWAADKGPQREALPMDTEVYESPYADPEEIRPKEVYLDRKLLTLEDKELGSGNFGTVKKGYYQMKKVVKTVAVKILKNEANDPALKDELLAEANVMQQLDNPYIVRMIGICEAESWMLVMEMAELGPLNKYLQQNRHVKDKNIIELVHQVSMGMKYLEESNFVHRDLAARNVLLVTQHYAKISDFGLSKALRADENYYKAQTHGKWPVKWYAPECINYYKFSSKSDVWSFGVLMWEAFSYGQKPYRGMKGSEVTAMLEKGERMGCPAGCPREMYDLMNLCWTYDVENRPGFAAVELRLRNYYYDVVN

SEQ ID NO: 827650 - protein, 635 aa, Homo sapiens; identical to SEQ ID NO: 827648

SEQ ID NO: 827651 - protein, 635 aa, Homo sapiens; identical to SEQ ID NO: 827648

SEQ ID NO: 827652 - protein, 635 aa, Homo sapiens; identical to SEQ ID NO: 827648

SEQ ID NO: 827653 - protein, 635 aa, Homo sapiens; identical to SEQ ID NO: 827648

SEQ ID NO: 827654 - protein, 635 aa, Homo sapiens; identical to SEQ ID NO: 827648

SEQ ID NO: 827655 - protein, 635 aa, Homo sapiens; identical to SEQ ID NO: 827648

SEQ ID NO: 827656 - protein, 135 aa, Homo sapiens
CWDYRHEPMCPAHNFILNGISPSALLLAQTHGKWPVKWYAPECINYYKFSSKSDVWSFGVLMWEAFSYGQKPYRGMKGSEVTAMLEKGERMGCPAGCPREMYDLMNLCWTYDVENRPGFAAVELRLRNYYYDVVN

SEQ ID NO: 827657 - protein, 635 aa, Homo sapiens; identical to SEQ ID NO: 827648

SEQ ID NO: 827658 - protein, 635 aa, Homo sapiens; identical to SEQ ID NO: 827648

SEQ ID NO: 827659 - protein, 635 aa, Homo sapiens; identical to SEQ ID NO: 827648

SEQ ID NO: 827660 - protein, 635 aa, Homo sapiens; identical to SEQ ID NO: 827648

SEQ ID NO: 827661 - protein, 612 aa, Homo sapiens; identical to SEQ ID NO: 827649

SEQ ID NO: 827662 - protein, 193 aa, Homo sapiens [sequence omitted]

SEQ ID NO: 827663 - protein, 325 aa, Homo sapiens
MLLFLSVPQPRPPGARTRAGAARVARWRRLRLQQLRRLRGLLRVLRGRPGAGSRRRGRMALCGQAAGAASLPSELIVHIFSFLPAPDRLRASASCSHWRECLFYPALWPQLRICLRVSPAEQPRLEFLMRKCGWFVRELRVEFAAENYLSGGGPGDGGGADTGTGGEEVEALQLSARWLEVLRTYLELVLCVLVSIRNNRNLQKFSLFGDISVLQQQGSLSNTYLSKVDPDGKKKQLKWLSCGFMLEIVTPTSLSSLSNAVANTMEHLSLLDNNIPGNSTLITAVELERFVNLHSLALDFCDFTAEMARVLTDSNHVPLQRLSLL

SEQ ID NO: 827664 - protein, 217 aa, Homo sapiens [sequence omitted]

SEQ ID NO: 827665 - protein, 99 aa, Homo sapiens
TVLSFVYFSGYTVWAHNLIAIARLRGSDLKVLEVTEESIDFDQGELADQDVDPVHNLIEQVSLGLGQPWHAVMDIESLSVFTEPNRHFYREMQSFSEDI

SEQ ID NO: 827666 - protein, 243 aa, Homo sapiens
MLLFLSVPQPRPPGARTRAGAARVARWRRLRLQQLRRLRGLLRVLRGRPGAGSRRRGRMALCGQAAGAASLPSELIVHIFSFLPAPDRLRASASCSHWRECLFYPALWPQLRICLRVSPAEQPRLEFLMRKCGWFVRELRVEFAAENYLSGGGPGDGGGADTGTGGEEVEALQLSARWLEVLRTYLELVLCVLVSIRNNRNLQKFSLFGDISVLQQQGSLSNTYLSKVDPDGKKKFSNCLKKS

SEQ ID NO: 827667 - protein, 217 aa, Homo sapiens [sequence omitted]

SEQ ID NO: 827668 - protein, 160 aa, Homo sapiens
RIHFDSYITCVSGAIVDLISRQYDKFLTHFILMNDVIDTSGFPDLSDNRNEDPLVLLAWRCTKLSLLAIHGYTVWAHNLIAIARLRGSDLKVLEVTEESIDFDQGELADQDVDPVHNLIEQVSLGLGQPWHAVMDIESLSVFTEPNRHFYREMQSFSEDI

SEQ ID NO: 827669 - protein, 217 aa, Homo sapiens [sequence omitted]

SEQ ID NO: 827670 - protein, 1369 aa, Homo sapiens
AWLGLGFRGSAVLGVCWQLRSPPSRAARMMNRTTPDQELAPASEPVWERPWSVEEIRRSSQSWSLAADAGLLQFLQEFSQQTISRTHEIKKQVDGLIRETKATDCRLHNVFNDFLMLSNTQFIENRVYDEEVEEPVLKAEAEKTEQEKTREQKEVDLIPKVQEAVNYGLQVLDSAFEQLDIKAGNSDSEEDDANGRVELILEPKDLYIDRPLPYLIGSKLFMEQEDVGLGELSSEEGSVGSDRGSIVDTEEEKEEEESDEDFAHHSDNEQNRHTTQMSDEEEDDDGCDLFADSEKEEEDIEDIEENTRPKRSRPTSFADELAARIKGDAVGRVDEEPTTLPSGEAKPRKTLKEKKERRTPSDDEEDNLFAPPKLTDEDFSPFGSGGGLFSGGKGLFDDEDEESDLFTEAPQDRQAGASVKEESSSSKPGKKIPAGAVSVFLGDTDVFGAASVPSMKEPQKPEQPTPRKSPYGPPPTGLFDDDDGDDDDDFFSAPHSKPSKTGKVQSTADIFGDEEGDLFKEKAVASPEATVSQTDENKARAEKKVTLSSSKNLKPSSETKTQKGLFSDEEDSEDLFSSQSASKLKGASLLPGKLPTLVSLFDDEDEEDNLFGGTAAKKQTLCLQAQREEKAKASELSKKKASALLFSSDEEDQWNIPASQTHLASDSRSKGEPRDSGTLQSQEAKAVKKTSLFEEDEEDDLFAIAKDSQKKTQRVSLLFEDDVDSGGSLFGSPPTSVPPATKKKETVSEAPPLLFSDEEEKEAQLGVKSVDKKVESAKESLKFGRTDVAESEKEGLLTRSAQETVKHSDLFSSSSPWDKGTKPRTKTVLSLFDEEEDKMEDQNIIQAPQKEVGKGRDPDAHPKSTGVFQDEELLFSHKLQKDNDPDVDLFAGTKKTKLLEPSVGSLFGDDEDDDLFSSAKSQPLVQEKKRVVKKDHSVDSFKNQKHPESIQGSKEKGIWKPETPQDSSGLAPFKTKEPSTRIGKIQANLAINPAALLPTAASQISEVKPVLPELAFPSSEHRRSHGLESVPVLPGSGEAGVSFDLPAQADTLHSANKSRVKMRGKRRPQTRAARRLAAQESSETEDMSVPRGPIAQWADGAISPNGHRPQLRAASGEDSTEEALAAAAAPWEGGPVPGVDRSPFAKSLGHSRGEADLFDSGDIFSTGTGSQSVERTKPKAKIAENPANPPVGGKAKSPMFPALGEASSDDDLFQSAKPKPAKKTNPFPLLEDEDDLFTDQKVKKNETKSNSQQDVILTTQDIFEDDIFATEAIKPSQKTREKEKTLESNLFDDNIDIFADLTVKPKEKSKKKVEAKSIFDDDMDDIFSSGIQAKTTKPKSRSAQAAPEPRFEHKVSNIFDDPLNAFGGQ

SEQ ID NO: 827671 - protein, 1254 aa, Homo sapiens
MLSNTQFIENRVYDEEVEEPVLKAEAEKTEQEKTREQKEVDLIPKVQEAVNYGLQVLDSAFEQLDIKAGNSDSEEDDANGRVELILEPKDLYIDRPLPYLIGSKLFMEQEDVGLGELSSEEGSVGSDRGSIVDTEEEKEEEESDEDFAHHSDNEQNRHTTQMSDEEEDDDGCDLFADSEKEEEDIEDIEENTRPKRSRPTSFADELAARIKGDAVGRVDEEPTTLPSGEAKPRKTLKEKKERRTPSDDEEDNLFAPPKLTDEDFSPFGSGGGLFSGGKGLFDDEDEESDLFTEAPQDRQAGASVKEESSSSKPGKKIPAGAVSVFLGDTDVFGAASVPSMKEPQKPEQPTPRKSPYGPPPTGLFDDDDGDDDDDFFSAPHSKPSKTGKVQSTADIFGDEEGDLFKEKAVASPEATVSQTDENKARAEKKVTLSSSKNLKPSSETKTQKGLFSDEEDSEDLFSSQSASKLKGASLLPGKLPTLVSLFDDEDEEDNLFGGTAAKKQTLCLQAQREEKAKASELSKKKASALLFSSDEEDQWNIPASQTHLASDSRSKGEPRDSGTLQSQEAKAVKKTSLFEEDEEDDLFAIAKDSQKKTQRVSLLFEDDVDSGGSLFGSPPTSVPPATKKKETVSEAPPLLFSDEEEKEAQLGVKSVDKKVESAKESLKFGRTDVAESEKEGLLTRSAQETVKHSDLFSSSSPWDKGTKPRTKTVLSLFDEEEDKMEDQNIIQAPQKEVGKGRDPDAHPKSTGVFQDEELLFSHKLQKDNDPDVDLFAGTKKTKLLEPSVGSLFGDDEDDDLFSSAKSQPLVQEKKRVVKKDHSVDSFKNQKHPESIQGSKEKGIWKPETPQDSSGLAPFKTKEPSTRIGKIQANLAINPAALLPTAASQISEVKPVLPELAFPSSEHRRSHGLESVPVLPGSGEAGVSFDLPAQADTLHSANKSRVKMRGKRRPQTRAARRLAAQESSETEDMSVPRGPIAQWADGAISPNGHRPQLRAASGEDSTEEALAAAAAPWEGGPVPGVDRSPFAKSLGHSRGEADLFDSGDIFSTGTGSQSVERTKPKAKIAENPANPPVGGKAKSPMFPALGEASSDDDLFQSAKPKPAKKTNPFPLLEDEDDLFTDQKVKKNETKSNSQQDVILTTQDIFEDDIFATEAIKPSQKTREKEKTLESNLFDDNIDIFADLTVKPKEKSKKKVEAKSIFDDDMDDIFSSGIQAKTTKPKSRSAQAAPEPRFEHKVSNIFDDPLNAFGGQ

SEQ ID NO: 827672 - protein, 1093 aa, Homo sapiens
MSDEEEDDDGCDLFADSEKEEEDIEDIEENTRPKRSRPTSFADELAARIKGDAVGRVDEEPTTLPSGEAKPRKTLKEKKERRTPSDDEEDNLFAPPKLTDEDFSPFGSGGGLFSGGKGLFDDEDEESDLFTEAPQDRQAGASVKEESSSSKPGKKIPAGAVSVFLGDTDVFGAASVPSMKEPQKPEQPTPRKSPYGPPPTGLFDDDDGDDDDDFFSAPHSKPSKTGKVQSTADIFGDEEGDLFKEKAVASPEATVSQTDENKARAEKKVTLSSSKNLKPSSETKTQKGLFSDEEDSEDLFSSQSASKLKGASLLPGKLPTLVSLFDDEDEEDNLFGGTAAKKQTLCLQAQREEKAKASELSKKKASALLFSSDEEDQWNIPASQTHLASDSRSKGEPRDSGTLQSQEAKAVKKTSLFEEDEEDDLFAIAKDSQKKTQRVSLLFEDDVDSGGSLFGSPPTSVPPATKKKETVSEAPPLLFSDEEEKEAQLGVKSVDKKVESAKESLKFGRTDVAESEKEGLLTRSAQETVKHSDLFSSSSPWDKGTKPRTKTVLSLFDEEEDKMEDQNIIQAPQKEVGKGRDPDAHPKSTGVFQDEELLFSHKLQKDNDPDVDLFAGTKKTKLLEPSVGSLFGDDEDDDLFSSAKSQPLVQEKKRVVKKDHSVDSFKNQKHPESIQGSKEKGIWKPETPQDSSGLAPFKTKEPSTRIGKIQANLAINPAALLPTAASQISEVKPVLPELAFPSSEHRRSHGLESVPVLPGSGEAGVSFDLPAQADTLHSANKSRVKMRGKRRPQTRAARRLAAQESSETEDMSVPRGPIAQWADGAISPNGHRPQLRAASGEDSTEEALAAAAAPWEGGPVPGVDRSPFAKSLGHSRGEADLFDSGDIFSTGTGSQSVERTKPKAKIAENPANPPVGGKAKSPMFPALGEASSDDDLFQSAKPKPAKKTNPFPLLEDEDDLFTDQKVKKNETKSNSQQDVILTTQDIFEDDIFATEAIKPSQKTREKEKTLESNLFDDNIDIFADLTVKPKEKSKKKVEAKSIFDDDMDDIFSSGIQAKTTKPKSRSAQAAPEPRFEHKVSNIFDDPLNAFGGQ

SEQ ID NO: 827673 - protein, 1348 aa, Homo sapiens
AWLGLGFRGSAVLGVCWQLRSPPSRAARMMNRTTPDQELAPASEPVWERPWSVEEIRRSSQSWSLAADAGLLQFLQEFSQQTISRTHEIKKQVDGLIRETKATDCRLHNVFNDFLMLSNTQFIENRVYDEEVEEPVLKAEAEKTEQEKTREQKEVDLIPKVQEAVNYGLQVLDSAFEQLDIKAGNSDSEEDDANGRVELILEPKDLYIDRPLPYLIGSKLFMEQEDVGLGELSSEEGSVGSDRGSIVDTEEEKEEEESDEDFAHHSDNEQNRHTTQMSDEEEDDDGCDLFADSEKEEEDIEDIEENTRPKRSRPTSFADELAARIKGDAVGRVDEEPTTLPSGEAKPRKTLKEKKERRTPSDDEEDNLFAPPKLTDEDFSPFGSGGGLFSGGKGLFDDEDEESDLFTEAPQDRQAGASVKEESSSSKPGKKIPAGAVSVFLGDTDVFGAASVPSMKEPQKPEQPTPRKSPYGPPPTGLFDDDDGDDDDDFFSAPHSKPSKTGKVQSTADIFGDEEGDLFKEKAVASPEATVSQTDENKARAEKKVTLSSSKNLKPSSETKTQKGLFSDEEDSEDLFSSQSASKLKGASLLPGKLPTLVSLFDDEDEEDNLFGGTAAKKQTLCLQAQREEKAKASELSKKKASALLFSSDEEDQWNIPASQTHLASDSRSKGEPRDSGTLQSQEAKAVKKTSLFEEDEEDDLFAIAKDSQKKTQRVSLLFEDDVDSGGSLFGSPPTSVPPATKKKETVSEAPPLLFSDEEEKEAQLGVKSVDKKVESAKESLKFGRTDVAESEKEGLLTRSAQETVKHSDLFSSSSPWDKGTKPRTKTVLSLFDEEEDKMEDQNIIQAPQKEVGKGRDPDAHPKSTGVFQDEELLFSHKLQKDNDPDVDLFAGTKKTKLLEPSVGSLFGDDEDDDLFSSAKSQPLVQEKKRVVKKDHSVDSFKNQKHPESIQGSKEKGIWKPETPQANLAINPAALLPTAASQISEVKPVLPELAFPSSEHRRSHGLESVPVLPGSGEAGVSFDLPAQADTLHSANKSRVKMRGKRRPQTRAARRLAAQESSETEDMSVPRGPIAQWADGAISPNGHRPQLRAASGEDSTEEALAAAAAPWEGGPVPGVDRSPFAKSLGHSRGEADLFDSGDIFSTGTGSQSVERTKPKAKIAENPANPPVGGKAKSPMFPALGEASSDDDLFQSAKPKPAKKTNPFPLLEDEDDLFTDQKVKKNETKSNSQQDVILTTQDIFEDDIFATEAIKPSQKTREKEKTLESNLFDDNIDIFADLTVKPKEKSKKKVEAKSIFDDDMDDIFSSGIQAKTTKPKSRSAQAAPEPRFEHKVSNIFDDPLNAFGGQ

SEQ ID NO: 827674 - protein, 1348 aa, Homo sapiens; identical to SEQ ID NO: 827673

SEQ ID NO: 827675 - protein, 1369 aa, Homo sapiens; identical to SEQ ID NO: 827670

SEQ ID NO: 827676 - protein, 893 aa, Homo sapiens
  misc_feature (881)..(881): Xaa can be any naturally occurring amino acid
AWLGLGFRGSAVLGVCWQLRSPPSRAARMMNRTTPDQELAPASEPVWERPWSVEEIRRSSQSWSLAADAGLLQFLQEFSQQTISRTHEIKKQVDGLIRETKATDCRLHNVFNDFLMLSNTQFIENRVYDEEVEEPVLKAEAEKTEQEKTREQKEVDLIPKVQEAVNYGLQVLDSAFEQLDIKAGNSDSEEDDANGRVELILEPKDLYIDRPLPYLIGSKLFMEQEDVGLGELSSEEGSVGSDRGSIVDTEEEKEEEESDEDFAHHSDNEQNRHTTQMSDEEEDDDGCDLFADSEKEEEDIEDIEENTRPKRSRPTSFADELAARIKGDAVGRVDEEPTTLPSGEAKPRKTLKEKKERRTPSDDEEDNLFAPPKLTDEDFSPFGSGGGLFSGGKGLFDDEDEESDLFTEAPQDRQAGASVKEESSSSKPGKKIPAGAVSVFLGDTDVFGAASVPSMKEPQKPEQPTPRKSPYGPPPTGLFDDDDGDDDDDFFSAPHSKPSKTGKVQSTADIFGDEEGDLFKEKAVASPEATVSQTDENKARAEKKVTLSSSKNLKPSSETKTQKGLFSDEEDSEDLFSSQSASKLKGASLLPGKLPTLVSLFDDEDEEDNLFGGTAAKKQTLCLQAQREEKAKASELSKKKASALLFSSDEEDQWNIPASQTHLASDSRSKGEPRDSGTLQSQEAKAVKKTSLFEEDEEDDLFAIAKDSQKKTQRVSLLFEDDVDSGGSLFGSPPTSVPPATKKKETVSEAPPLLFSDEEEKEKTLESNLFDDNIDIFADLTVKPKEKSKKKVEAKSIFDDDMDDIFSSGIQAKTTKPKSRSAQAAPEPRFFETPKSFVFSTTMLSEHILLSQIVLFILSQGALDLQLVEIAFSPSRNLCLXGFKNESVMAMSY

SEQ ID NO: 827677 - protein, 276 aa, Homo sapiens
AWLGLGFRGSAVLGVCWQLRSPPSRAARMMNRTTPDQELAPASEPVWERPWSVEEIRRSSQSWSLAADAGLLQFLQEFSQQTISRTHEIKKQVDGLIRETKATDCRLHNVFNDFLMLSNTQFIENRVYDEEVEEPVLKAEAEKTEQEKTREQKEVDLIPKVQEAVNYGLQVLDSAFEQLDIKAGNSDSEEDDANGRVELILEPKDLYIDRPLPYLIGSKLFMEQEDVGLGELSSEEGSVGSDRGSIVDTEEEKEEEVRAVWYDQVTVGSKLNLRWA

SEQ ID NO: 827678 - protein, 1338 aa, Homo sapiens
AWLGLGFRGSAVLGVCWQLRSPPSRAARMMNRTTPDQELAPASEPVWERPWSVEEIRRSSQSWSLAADAGLLQFLQEFSQQTISRTHEIKKQVDGLIRETKATDCRLHNVFNDFLMLSNTQFIENRVYDEEVEEPVLKAEAEKTEQEKTREQKEVDLIPKVQEAVNYGLQVLDSAFEQLDIKAGNSDSEEDDANGRVELILEPEEGSVGSDRGSIVDTEEEKEEEESDEDFAHHSDNEQNRHTTQMSDEEEDDDGCDLFADSEKEEEDIEDIEENTRPKRSRPTSFADELAARIKGDAVGRVDEEPTTLPSGEAKPRKTLKEKKERRTPSDDEEDNLFAPPKLTDEDFSPFGSGGGLFSGGKGLFDDEDEESDLFTEAPQDRQAGASVKEESSSSKPGKKIPAGAVSVFLGDTDVFGAASVPSMKEPQKPEQPTPRKSPYGPPPTGLFDDDDGDDDDDFFSAPHSKPSKTGKVQSTADIFGDEEGDLFKEKAVASPEATVSQTDENKARAEKKVTLSSSKNLKPSSETKTQKGLFSDEEDSEDLFSSQSASKLKGASLLPGKLPTLVSLFDDEDEEDNLFGGTAAKKQTLCLQAQREEKAKASELSKKKASALLFSSDEEDQWNIPASQTHLASDSRSKGEPRDSGTLQSQEAKAVKKTSLFEEDEEDDLFAIAKDSQKKTQRVSLLFEDDVDSGGSLFGSPPTSVPPATKKKETVSEAPPLLFSDEEEKEAQLGVKSVDKKVESAKESLKFGRTDVAESEKEGLLTRSAQETVKHSDLFSSSSPWDKGTKPRTKTVLSLFDEEEDKMEDQNIIQAPQKEVGKGRDPDAHPKSTGVFQDEELLFSHKLQKDNDPDVDLFAGTKKTKLLEPSVGSLFGDDEDDDLFSSAKSQPLVQEKKRVVKKDHSVDSFKNQKHPESIQGSKEKGIWKPETPQDSSGLAPFKTKEPSTRIGKIQANLAINPAALLPTAASQISEVKPVLPELAFPSSEHRRSHGLESVPVLPGSGEAGVSFDLPAQADTLHSANKSRVKMRGKRRPQTRAARRLAAQESSETEDMSVPRGPIAQWADGAISPNGHRPQLRAASGEDSTEEALAAAAAPWEGGPVPGVDRSPFAKSLGHSRGEADLFDSGDIFSTGTGSQSVERTKPKAKIAENPANPPVGGKAKSPMFPALGEASSDDDLFQSAKPKPAKKTNPFPLLEDEDDLFTDQKVKKNETKSNSQQDVILTTQDIFEDDIFATEAIKPSQKTREKEKTLESNLFDDNIDIFADLTVKPKEKSKKKVEAKSIFDDDMDDIFSSGIQAKTTKPKSRSAQAAPEPRFEHKVSNIFDDPLNAFGGQ

SEQ ID NO: 827679 - protein, 972 aa, Homo sapiens
AVTLDDPVSLSAPRIGKLEPLFKEESSSSKPGKKIPAGAVSVFLGDTDVFGAASVPSMKEPQKPEQPTPRKSPYGPPPTGLFDDDDGDDDDDFFSAPHSKPSKTGKVQSTADIFGDEEGDLFKEKAVASPEATVSQTDENKARAEKKVTLSSSKNLKPSSETKTQKGLFSDEEDSEDLFSSQSASKLKGASLLPGKLPTLVSLFDDEDEEDNLFGGTAAKKQTLCLQAQREEKAKASELSKKKASALLFSSDEEDQWNIPASQTHLASDSRSKGEPRDSGTLQSQEAKAVKKTSLFEEDEEDDLFAIAKDSQKKTQRVSLLFEDDVDSGGSLFGSPPTSVPPATKKKETVSEAPPLLFSDEEEKEAQLGVKSVDKKVESAKESLKFGRTDVAESEKEGLLTRSAQETVKHSDLFSSSSPWDKGTKPRTKTVLSLFDEEEDKMEDQNIIQAPQKEVGKGRDPDAHPKSTGVFQDEELLFSHKLQKDNDPDVDLFAGTKKTKLLEPSVGSLFGDDEDDDLFSSAKSQPLVQEKKRVVKKDHSVDSFKNQKHPESIQGSKEKGIWKPETPQDSSGLAPFKTKEPSTRIGKIQANLAINPAALLPTAASQISEVKPVLPELAFPSSEHRRSHGLESVPVLPGSGEAGVSFDLPAQADTLHSANKSRVKMRGKRRPQTRAARRLAAQESSETEDMSVPRGPIAQWADGAISPNGHRPQLRAASGEDSTEEALAAAAAPWEGGPVPGVDRSPFAKSLGHSRGEADLFDSGDIFSTGTGSQSVERTKPKAKIAENPANPPVGGKAKSPMFPALGEASSDDDLFQSAKPKPAKKTNPFPLLEDEDDLFTDQKVKKNETKSNSQQDVILTTQDIFEDDIFATEAIKPSQKTREKEKTLESNLFDDNIDIFADLTVKPKEKSKKKVEAKSIFDDDMDDIFSSGIQAKTTKPKSRSAQAAPEPRFEHKVSNIFDDPLNAFGGQ

SEQ ID NO: 827680 - protein, 1369 aa, Homo sapiens; identical to SEQ ID NO: 827670

SEQ ID NO: 827681 - protein, 848 aa, Homo sapiens
AWLGLGFRGSAVLGVCWQLRSPPSRAARMMNRTTPDQELAPASEPVWERPWSVEEIRRSSQSWSLAADAGLLQFLQEFSQQTISRTHEIKKQVDGLIRETKATDCRLHNVFNDFLMLSNTQFIENRVYDEEVEEPVLKAEAEKTEQEKTREQKEVDLIPKVQEAVNYGLQVLDSAFEQLDIKAGNSDSEEDDANGRVELILEPKDLYIDRPLPYLIGSKLFMEQEDVGLGELSSEEGSVGSDRGSIVDTEEEKEEEESDEDFAHHSDNEQNRHTTQMSDEEEDDDGCDLFADSEKEEEDIEDIEENTRPKRSRPTSFADELAARIKGDAVGRVDEEPTTLPSGEAKPRKTLKEKKERRTPSDDEEDNLFAPPKLTDEDFSPFGSGGGLFSGGKGLFDDEDEESDLFTEAPQDRQAGASVKEESSSSKPGKKIPAGAVSVFLGDTDVFGAASVPSMKEPQKPEQPTPRKSPYGPPPTGLFDDDDGDDDDDFFSAPHSKPSKTGKVQSTADIFGDEEGDLFKEKAVASPEATVSQTDENKARAEKKVTLSSSKNLKPSSETKTQKGLFSDEEDSEDLFSSQSASKLKGASLLPGKLPTLVSLFDDEDEEDNLFGGTAAKKQTLCLQAQREEKAKASELSKKKASALLFSSDEEDQWNIPASQTHLASDSRSKGEPRDSGTLQSQEAKAVKKTSLFEEDEEDDLFAIAKDSQKKTQRVSLLFEDDVDSGGSLFGSPPTSVPPATKKKETVSEAPPLLFSDEEEKEKTLESNLFDDNIDIFADLTVKPKEKSKKKVEAKSIFDDDMDDIFSSGIQAKTTKPKSRSAQAAPEPRFEHKVSNIFDDPLNAFGGQ

SEQ ID NO: 827682 - protein, 344 aa, Homo sapiens
AWLGLGFRGSAVLGVCWQLRSPPSRAARMMNRTTPDQELAPASEPVWERPWSVEEIRRSSQSWSLAADAGLLQFLQEFSQQTISRTHEIKKQVDGLIRETKATDCRLHNVFNDFLMLSNTQFIENRVYDEEVEEPVLKAEAEKTEQEKTREQKEVDLIPKVQEAVNYGLQVLDSAFEQLDIKAGNSDSEEDDANGRVELILEPKDLYIDRPLPYLIGSKLFMEQEDVGLGELSSEEGSVGSDRGSIVDTEEEKEEEESDEDFAHHSDNEQNRHTTQMSDEEEDDDGCDLFADSEKEEEDIEDIEENTRPKRSRPTSFADELAARIKGDAVGRVDEEPTSEPQPR

SEQ ID NO: 827683 - protein, 114 aa, Homo sapiens
AWLGLGFRGSAVLGVCWQLRSPPSRAARMMNRTTPDQELAPASEPVWERPWSVEEIRRSSQSWSLAADAGVRGGPRGRESGRGDAWLARRRAGPRLPLHLARPVACPLRNTRPV

SEQ ID NO: 827684 - protein, 339 aa, Homo sapiens
MPECWDGEHDIETPYGLLHVVIRGSPKGNRPAILTYHDVGLNHKLCFNTFFNFEDMQEITKHFVVCHVDAPGQQVGASQFPQGYQFPSMEQLAAMLPSVVQHFGFKYVIGIGVGAGAYVLAKFALIFPDLVEGLVLVNIDPNGKGWIDWAATKLSGLTSTLPDTVLSHLFSQEELVNNTELVQSYRQQIGNVVNQANLQLFWNMYNSRRDLDINRPGTVPNAKTLRCPVMLVVGDNAPAEDGVVECNSKLDPTTTTFLKMADSGGLPQVTQPGKLTEAFKYFLQGMGYMPSASMTRLARSRTASLTSASSVDGSRPQACTHSESSEGLGQVNHTMEVSC

SEQ ID NO: 827685 - protein, 407 aa, Homo sapiens
LAARTCTRASAAPKPRSPPARLSRPHLRGLLLHDVTMAGLQELRFPEEKPLLRGQDATELESSDAFLLAADTDWKEHDIETPYGLLHVVIRGSPKGNRPAILTYHDVGLNHKLCFNTFFNFEDMQEITKHFVVCHVDAPGQQVGASQFPQGYQFPSMEQLAAMLPSVVQHFGFKYVIGIGVGAGAYVLAKFALIFPDLVEGLVLVNIDPNGKGWIDWAATKLSGLTSTLPDTVLSHLFSQEELVNNTELVQSYRQQIGNVVNQANLQLFWNMYNSRRDLDINRPGTVPNAKTLRCPVMLVVGDNAPAEDGVVECNSKLDPTTTTFLKMADSGGLPQVTQPGKLTEAFKYFLQGMGYMPSASMTRLARSRTASLTSASSVDGSRPQACTHSESSEGLGQVNHTMEVSC

SEQ ID NO: 827686 - protein, 339 aa, Homo sapiens; identical to SEQ ID NO: 827684

SEQ ID NO: 827687 - protein, 352 aa, Homo sapiens
MPECWDGEHDIETPYGLLHVVIRGSPKGNRPAILTYHDVGLNHKLCFNTFFNFEDMQEITKHFVVCHVDAPGQQVGASQFPQGYQFPSMEQLAAMLPSVVQHFGFKYVIGIGVGAGAYVLAKFALIFPDLVEGLVLVNIDPNGKGWIDWAATKLSGLTSTLPDTVLSHLFSQEELVNNTELVQSYRQQIGNVVNQANLQLFWNMYNSRRDLDINRPGTVPNAKTLRCPVMLVVGDNAPAEDGVVECNSKLDPTTTTFLKMADSGGLPQVTQPGKLTEAFKYFLQGMGYIAYLKDRRLSGGAVPSASMTRLARSRTASLTSASSVDGSRPQACTHSESSEGLGQVNHTMEVSC

SEQ ID NO: 827688 - protein, 341 aa, Homo sapiens
MLNQFRPFLLEHDIETPYGLLHVVIRGSPKGNRPAILTYHDVGLNHKLCFNTFFNFEDMQEITKHFVVCHVDAPGQQVGASQFPQGYQFPSMEQLAAMLPSVVQHFGFKYVIGIGVGAGAYVLAKFALIFPDLVEGLVLVNIDPNGKGWIDWAATKLSGLTSTLPDTVLSHLFSQEELVNNTELVQSYRQQIGNVVNQANLQLFWNMYNSAEKTRALNRARNGANGQNSEVPEKRGRGQVATLEERRGDKPKEPAKTLQRTKPKETHKRHNAQQREETHTNMHGGNTQNPKRKRQNTERYRRAQTRGTSRQSYTNRRRENTHSAKHSNNYHPQRADTSRSK

SEQ ID NO: 827689 - protein, 430 aa, Homo sapiens
LGFALSCRSAPGLPRSSPRLGRARCPDAATQSRAAPGAEMKVLGHRLELLTGLLLHDVTMAGLQELRFPEEKPLLRGQDATELESSDAFLLAADTDWKEHDIETPYGLLHVVIRGSPKGNRPAILTYHDVGLNHKLCFNTFFNFEDMQEITKHFVVCHVDAPGQQVGASQFPQGYQFPSMEQLAAMLPSVVQHFGFKYVIGIGVGAGAYVLAKFALIFPDLVEGLVLVNIDPNGKGWIDWAATKLSGLTSTLPDTVLSHLFSQEELVNNTELVQSYRQQIGNVVNQANLQLFWNMYNSRRDLDINRPGTVPNAKTLRCPVMLVVGDNAPAEDGVVECNSKLDPTTTTFLKMADSGGLPQVTQPGKLTEAFKYFLQGMGYMPSASMTRLARSRTASLTSASSVDGSRPQACTHSESSEGLGQVNHTMEVSC

SEQ ID NO: 827690 - protein, 339 aa, Homo sapiens; identical to SEQ ID NO: 827684

SEQ ID NO: 827691 - protein, 438 aa, Homo sapiens
LAARTCTRASAAPKPRSPPARLSRPHLRGLLLHDVTMAGLQELRFPEEKPLLRGQDATELESSDAFLLAADTDWKAYTGTRLRHLIPQRSQERRLPRVSSTVSPLQEHDIETPYGLLHVVIRGSPKGNRPAILTYHDVGLNHKLCFNTFFNFEDMQEITKHFVVCHVDAPGQQVGASQFPQGYQFPSMEQLAAMLPSVVQHFGFKYVIGIGVGAGAYVLAKFALIFPDLVEGLVLVNIDPNGKGWIDWAATKLSGLTSTLPDTVLSHLFSQEELVNNTELVQSYRQQIGNVVNQANLQLFWNMYNSRRDLDINRPGTVPNAKTLRCPVMLVVGDNAPAEDGVVECNSKLDPTTTTFLKMADSGGLPQVTQPGKLTEAFKYFLQGMGYMPSASMTRLARSRTASLTSASSVDGSRPQACTHSESSEGLGQVNHTMEVSC

SEQ ID NO: 827692 - protein, 408 aa, Homo sapiens
RLGTRPGWYHSSCPRPLDPSDSGLCLSFLVEAGSLPRQDAGVLGWGLTGTRLRHLIPQRSQERRLPRVSSTVSPLQEHDIETPYGLLHVVIRGSPKGNRPAILTYHDVGLNHKLCFNTFFNFEDMQEITKHFVVCHVDAPGQQVGASQFPQGYQFPSMEQLAAMLPSVVQHFGFKYVIGIGVGAGAYVLAKFALIFPDLVEGLVLVNIDPNGKGWIDWAATKLSGLTSTLPDTVLSHLFSQEELVNNTELVQSYRQQIGNVVNQANLQLFWNMYNSRRDLDINRPGTVPNAKTLRCPVMLVVGDNAPAEDGVVECNSKLDPTTTTFLKMADSGGLPQVTQPGKLTEAFKYFLQGMGYMPSASMTRLARSRTASLTSASSVDGSRPQACTHSESSEGLGQVNHTMEVSC

SEQ ID NO: 827693 - protein, 425 aa, Homo sapiens
LAARTCTRASAAPKPRSPPARLSRPHLRGLLLHDVTMAGLQELRFPEEKPLLRGQDATELESSDAFLLAADTDWKRSQERRLPRVSSTVSPLQEHDIETPYGLLHVVIRGSPKGNRPAILTYHDVGLNHKLCFNTFFNFEDMQEITKHFVVCHVDAPGQQVGASQFPQGYQFPSMEQLAAMLPSVVQHFGFKYVIGIGVGAGAYVLAKFALIFPDLVEGLVLVNIDPNGKGWIDWAATKLSGLTSTLPDTVLSHLFSQEELVNNTELVQSYRQQIGNVVNQANLQLFWNMYNSRRDLDINRPGTVPNAKTLRCPVMLVVGDNAPAEDGVVECNSKLDPTTTTFLKMADSGGLPQVTQPGKLTEAFKYFLQGMGYMPSASMTRLARSRTASLTSASSVDGSRPQACTHSESSEGLGQVNHTMEVSC

SEQ ID NO: 827694 - protein, 369 aa, Homo sapiens
MPECWDGVGEGNAGAVKLAGLGDPRWSPGHLLSPGHQEHDIETPYGLLHVVIRGSPKGNRPAILTYHDVGLNHKLCFNTFFNFEDMQEITKHFVVCHVDAPGQQVGASQFPQGYQFPSMEQLAAMLPSVVQHFGFKYVIGIGVGAGAYVLAKFALIFPDLVEGLVLVNIDPNGKGWIDWAATKLSGLTSTLPDTVLSHLFSQEELVNNTELVQSYRQQIGNVVNQANLQLFWNMYNSRRDLDINRPGTVPNAKTLRCPVMLVVGDNAPAEDGVVECNSKLDPTTTTFLKMADSGGLPQVTQPGKLTEAFKYFLQGMGYMPSASMTRLARSRTASLTSASSVDGSRPQACTHSESSEGLGQVNHTMEVSC

SEQ ID NO: 827695 - protein, 352 aa, Homo sapiens; identical to SEQ ID NO: 827687

SEQ ID NO: 827696 - protein, 339 aa, Homo sapiens; identical to SEQ ID NO: 827684

SEQ ID NO: 827697 - protein, 339 aa, Homo sapiens; identical to SEQ ID NO: 827684

SEQ ID NO: 827698 - protein, 339 aa, Homo sapiens; identical to SEQ ID NO: 827684

SEQ ID NO: 827699 - protein, 339 aa, Homo sapiens; identical to SEQ ID NO: 827684

SEQ ID NO: 827700 - protein, 83 aa, Homo sapiens
SWYPPYRSGELAYAVEEWPGFWQGPDRHSLTWSHSEVQCSHDRTGTVKEPCVFTHLPKCSQGLAPIEHSSTVLVTCPKRSGRV

SEQ ID NO: 827701 - protein, 207 aa, Homo sapiens
MTSRKKVLLKVIILGDSGVGKTSLMNQYVNKKFSNQYKATIGADFLTKEVMVDDRLVTMQIWDTAGQERFQSLGVAFYRGADCCVLVFDVTAPNTFKTLDSWRDEFLIQASPRDPENFPFVVLGNKIDLENRQVATKRAQAWCYSKNNIPYFETSAKEAINVEQAFQTIARNALKQETEVELYNEFPEPIKLDKNDRAKASAESCSC

SEQ ID NO: 827702 - protein, 207 aa, Homo sapiens; identical to SEQ ID NO: 827701

SEQ ID NO: 827703 - protein, 207 aa, Homo sapiens; identical to SEQ ID NO: 827701

SEQ ID NO: 827704 - protein, 207 aa, Homo sapiens; identical to SEQ ID NO: 827701

SEQ ID NO: 827705 - protein, 207 aa, Homo sapiens; identical to SEQ ID NO: 827701

SEQ ID NO: 827706 - protein, 132 aa, Homo sapiens
GSTRNVSAVRVEHRVLHKPRTHVGLQHNSPLLFQTKHTLISHIQLPKENPIKHSYTPHISHTHTHTHTHTHRSDVIKLQPLPVMAPWGLPAHPHEPASMAAGQASGGSHSDMELALEAYSFCSLERERTVYS

SEQ ID NO: 827707 - protein, 207 aa, Homo sapiens; identical to SEQ ID NO: 827701

SEQ ID NO: 827708 - protein, 207 aa, Homo sapiens; identical to SEQ ID NO: 827701

SEQ ID NO: 827709 - protein, 207 aa, Homo sapiens; identical to SEQ ID NO: 827701

SEQ ID NO: 827710 - protein, 207 aa, Homo sapiens; identical to SEQ ID NO: 827701

SEQ ID NO: 827711 - protein, 207 aa, Homo sapiens; identical to SEQ ID NO: 827701

SEQ ID NO: 827712 - protein, 207 aa, Homo sapiens; identical to SEQ ID NO: 827701

SEQ ID NO: 827713 - protein, 207 aa, Homo sapiens; identical to SEQ ID NO: 827701

SEQ ID NO: 827714 - protein, 207 aa, Homo sapiens; identical to SEQ ID NO: 827701

SEQ ID NO: 827715 - protein, 207 aa, Homo sapiens; identical to SEQ ID NO: 827701

SEQ ID NO: 827716 - protein, 207 aa, Homo sapiens; identical to SEQ ID NO: 827701

SEQ ID NO: 827717 - protein, 207 aa, Homo sapiens; identical to SEQ ID NO: 827701

SEQ ID NO: 827718 - protein, 207 aa, Homo sapiens; identical to SEQ ID NO: 827701

SEQ ID NO: 827719 - protein, 207 aa, Homo sapiens; identical to SEQ ID NO: 827701

SEQ ID NO: 827720 - protein, 207 aa, Homo sapiens; identical to SEQ ID NO: 827701

SEQ ID NO: 827721 - protein, 207 aa, Homo sapiens; identical to SEQ ID NO: 827701

SEQ ID NO: 827722 - protein, 207 aa, Homo sapiens; identical to SEQ ID NO: 827701

SEQ ID NO: 827723 - protein, 207 aa, Homo sapiens; identical to SEQ ID NO: 827701

SEQ ID NO: 827724 - protein, 207 aa, Homo sapiens; identical to SEQ ID NO: 827701

SEQ ID NO: 827725 - protein, 207 aa, Homo sapiens; identical to SEQ ID NO: 827701

SEQ ID NO: 827726 - protein, 207 aa, Homo sapiens; identical to SEQ ID NO: 827701

SEQ ID NO: 827727 - protein, 188 aa, Homo sapiens
MTRTTPAEYVNKKFSNQYKATIGADFLTKEVMVDDRLVTMQIWDTAGQERFQSLGVAFYRGADCCVLVFDVTAPNTFKTLDSWRDEFLIQASPRDPENFPFVVLGNKIDLENRQVATKRAQAWCYSKNNIPYFETSAKEAINVEQAFQTIARNALKQETEVELYNEFPEPIKLDKNDRAKASAESCSC

SEQ ID NO: 827728 - protein, 207 aa, Homo sapiens; identical to SEQ ID NO: 827701

SEQ ID NO: 827729 - protein, 229 aa, Homo sapiens
  misc_feature (151)..(151): Xaa can be any naturally occurring amino acid
MTSRKKVLLKVIILGDSGVGKTSLMNQYVNKKFSNQYKATIGADFLTKEVMVDDRLVTMQIWDTAGQERFQSLGVAFYRGADCCVLVFDVTAPNTFKTLDSWRDEFLIQASPRDPENFPFVVLAEKNPEKKKKKGGGAKKKFLTSKTDKWXQSGHRPGATAKTNIHLKKVPAVFFGGAKEAINVEQAFQTIARNALKQETEVELYNEFPEPIKLDKNDRAKASAESCSC

SEQ ID NO: 827730 - protein, 160 aa, Homo sapiens
MTSRKKVLLKVIILGDSGVGKTSLMNQYVNKKFSNQYKATIGADFLTKEVMVDDRLVTMQIWDTAGQERFQSLGVAFYRGADCCVLVATKRAQAWCYSKNNIPYFETSAKEAINVEQAFQTIARNALKQETEVELYNEFPEPIKLDKNDRAKASAESCSC

SEQ ID NO: 827731 - protein, 109 aa, Homo sapiens
RGGGKKTISAGARLGDPENFPFVVLGNKIDLENRQVATKRAQAWCYSKNNIPYFETSAKEAINVEQAFQTIARNALKQETEVELYNEFPEPIKLDKNDRAKASAESCSC

SEQ ID NO: 827732 - protein, 134 aa, Homo sapiens
MTSRKKVLLKVIILGDSGVGKTSLMNQYVNKKFSNQYKATIGADFLTKEVMVDDRLVTMQVATKRAQAWCYSKNNIPYFETSAKEAINVEQAFQTIARNALKQETEVELYNEFPEPIKLDKNDRAKASAESCSC

SEQ ID NO: 827733 - protein, 207 aa, Homo sapiens; identical to SEQ ID NO: 827701

SEQ ID NO: 827734 - protein, 190 aa, Homo sapiens
HEAESNGQHREPRRPSTWSRRSRRLHGMHLSRKRRWSCTTNFLNLSNWTRMTGPRPRQKAAVAEGAVRVEHRVLHKPRTHVGLQHNSPLLFQTKHTLISHIQLPKENPIKHSYTPHISHTHTHTHTHTHRSDVIKLQPLPVMAPWGLPAHPHEPASMAAGQASGGSHSDMELALEAYSFCSLERERTVYS

SEQ ID NO: 827735 - protein, 140 aa, Homo sapiens
MTGPRPRQKAAVAEGAVRVEHRVLHKPRTHVGLQHNSPLLFQTKHTLISHIQLPKENPIKHSYTPHISHTHTHTHTHTHRSDVIKLQPLPVMAPWGLPAHPHEPASMAAGQASGGSHSDMELALEAYSFCSLERERTVYS

SEQ ID NO: 827736 - protein, 176 aa, Homo sapiens
ELGTRKARDMFTRMHLSRKRRWSCTTNFLNLSNWTRMTGPRPRQKAAVAEGAVRVEHRVLHKPRTHVGLQHNSPLLFQTKHTLISHIQLPKENPIKHSYTPHISHTHTHTHTHTHRSDVIKLQPLPVMAPWGLPAHPHEPASMAAGQASGGSHSDMELALEAYSFCSLERERTVYS

SEQ ID NO: 827737 - protein, 140 aa, Homo sapiens; identical to SEQ ID NO: 827735

SEQ ID NO: 827738 - protein, 199 aa, Homo sapiens
MTSRKKVLLKVIILGDSGVGKTSLMNQYVNKKFSNQYKATIGADFLTKEVMVDDRLVTMQIWDTAGQERFQSLGVAFYRGADCCVLVFDVTAPNTFKTLDSWRDEFLIQASPRDPENFPFVVLGNKIDLENRQVATKRAQAWCYSKNNIPYFETSAKEAINVEQAFQTIARNALKQKRRWSCTGHILILFVSIPCITFS

SEQ ID NO: 827739 - protein, 187 aa, Homo sapiens
MTSRKKVLLKVIILGDSGVGKTSLMNQYVNKKFSNQYKATIGADFLTKEVMVDDRLVTMQIWDTAGQERFQSLGVAFYRGADCCVLVFDVTAPNTFKTLDSWRDEFLIQASPRDPENFPFVVLGNKIDLENRQVATKRAQAWCYSKNNIPYFETSAKEAINVEQAFQTIARNALKQVGLPQLTSPLW

SEQ ID NO: 827740 - protein, 81 aa, Homo sapiens
RTSARGGGGGGSGSGPGVLAIKPEAAAAAELAAWRARESSLEPELGPSRFCPPFSLLLGGSPRDAPGPEPPAQRPRLKDDL

SEQ ID NO: 827741 - protein, 81 aa, Homo sapiens; identical to SEQ ID NO: 827740

SEQ ID NO: 827742 - protein, 155 aa, Homo sapiens
MTSRKKVLLKVIILGDSGVGKTSLMNQYVNKKFSNQYKATIGADFLTKEVMVDDRLVTMQIWDTAGQERFQSLGVAFYRGADCCVLVFDVTAPNTFKTLDSWRDEFLIQASPRDPENFPFVVLGNKIDLENRQVATKRAQAWCYSKGPKRGTELE

SEQ ID NO: 827743 - protein, 81 aa, Homo sapiens; identical to SEQ ID NO: 827740

SEQ ID NO: 827744 - protein, 344 aa, Homo sapiens
MGPKDSAKCLHRGPQPSHWAAGDGPTQERCGPRSLGSPVLGLDTCRAWDHVDGQILGQLRPLTEEEEEEGAGATLSRGPAFPGMGSEELRLASFYDWPLTAEVPPELLAAAGFFHTGHQDKVRCFFCYGGLQSWKRGDDPWTEHAKWFPSCQFLLRSKGRDFVHSVQETHSQLLGSWDPWEEPEDAAPVAPSVPASGYPELPTPRREVQSESAQEPEEPGMWRRSCGGCRRRGRARCAWTAPCPSSLCRAATWSVLSVPPACSCAPSAEPPSAAACAPSCPRPGAMAGQVGCRVGSLPLSACSGLCSGPAEDGRAGVHPALTSPDSPTTAQGGEGGPCLAWGMA

SEQ ID NO: 827745 - protein, 298 aa, Homo sapiens
MGPKDSAKCLHRGPQPSHWAAGDGPTQERCGPRSLGSPVLGLDTCRAWDHVDGQILGQLRPLTEEEEEEGAGATLSRGPAFPGMGSEELRLASFYDWPLTAEVPPELLAAAGFFHTGHQDKVRCFFCYGGLQSWKRGDDPWTEHAKWFPSCQFLLRSKGRDFVHSVQETHSQLLGSWDPWEEPEDAAPVAPSVPASGYPELPTPRREVQSESAQEPGGVSPAEAQRAWWVLEPPGARDVEAQLRRLQEERTCKVCLDRAVSIVFVPCGHLVCAECAPGLQLCPICRAPVRSRVRTFLS

SEQ ID NO: 827746 - protein, 256 aa, Homo sapiens
PLPWDYPEAPWRRLHSSPPRPCPRALQGGGRRGPNPDPRGSKGLKQTVGALNPNLHLWGICSCQFLLRSKGRDFVHSVQETHSQLLGSWDPWEEPEDAAPVAPSVPASGYPELPTPRREVQSESAQEPEEPGMWRRSCGGCRRRGRARCAWTAPCPSSLCRAATWSVLSVPPACSCAPSAEPPSAAACAPSCPRPGAMAGQVGCRVGSLPLSACSGLCSGPAEDGRAGVHPALTSPDSPTTAQGGEGGPCLAWGMA

SEQ ID NO: 827747 - protein, 155 aa, Homo sapiens
MSSAPAPGLEDREAFSVAGAGLASWNYFNQRSENPSSAMSNTTVVPSTAGPGPSGGPGGGGGGGGGGGGTEVIQVTNVSPSASSEQMRTLFGFLGKIDELRLFPPDDSPLPVSSRVCFVKFHDPDSAVVAQHLTNTVFVDRALIVVPYAEGLCFV

SEQ ID NO: 827748 - protein, 117 aa, Homo sapiens [sequence omitted]

SEQ ID NO: 827749 - protein, 522 aa, Homo sapiens
MSSAPAPGLEDREAFSVAGAGLASWNYFNQRSENPSSAMSNTTVVPSTAGPGPSGGPGGGGGGGGGGGGTEVIQVTNVSPSASSEQMRTLFGFLGKIDELRLFPPDDSPLPVSSRVCFVKFHDPDSAVVAQHLTNTVFVDRALIVVPYAEGVIPDEAKALSLLAPANAVAGLLPGGGLLPTPNPLTQIGAVPLAALGAPTLDPALAALGLPGANLNSQSLAADQLLKLMSTVDPKLNHVAAGLVSPSLKSDTSSKEIEEAMKRVREAQSLISAAIEPDKKEEKRRHSRSRSRSRRRRTPSSSRHRRSRSRSRRRSHSKSRSRRRSKSPRRRRSHSRERGRRSRSTSKTRDKKKEDKEKKRSKTPPKSYSTARRSRSASRERRRRRSRSGTRSPKKPRSPKRKLSRSPSPRRHKKEKKKDKDKERSRDERERSTSKKKKSKDKEKDRERKSESDKDVKQVTRDYDEEEQGYDSEKEKKEEKKPIETGSPKTKECSVEKGTGDSLRESKVNGDDHHEEDMDMSD

SEQ ID NO: 827750 - protein, 522 aa, Homo sapiens; identical to SEQ ID NO: 827749

SEQ ID NO: 827751 - protein, 484 aa, Homo sapiens
MSNTTVVPSTAGPGPSGGPGGGGGGGGGGGGTEVIQVTNVSPSASSEQMRTLFGFLGKIDELRLFPPDDSPLPVSSRVCFVKFHDPDSAVVAQHLTNTVFVDRALIVVPYAEGVIPDEAKALSLLAPANAVAGLLPGGGLLPTPNPLTQIGAVPLAALGAPTLDPALAALGLPGANLNSQSLAADQLLKLMSTVDPKLNHVAAGLVSPSLKSDTSSKEIEEAMKRVREAQSLISAAIEPDKKEEKRRHSRSRSRSRRRRTPSSSRHRRSRSRSRRRSHSKSRSRRRSKSPRRRRSHSRERGRRSRSTSKTRDKKKEDKEKKRSKTPPKSYSTARRSRSASRERRRRRSRSGTRSPKKPRSPKRKLSRSPSPRRHKKEKKKDKDKERSRDERERSTSKKKKSKDKEKDRERKSESDKDVKQVTRDYDEEEQGYDSEKEKKEEKKPIETGSPKTKECSVEKGTGDSLRESKVNGDDHHEEDMDMSD

SEQ ID NO: 827752 - protein, 172 aa, Homo sapiens
MSNTTVVPSTAGPGPSGGPGGGGGGGGGGGGTEVIQVTNVSPSASSEQMRTLFGFLGKIDELRLFPPDDSPLPVSSRVCFVKFHDPDSAVVAQHLTNTVFVDRALIVVPYAEGSFPWFSLNYIPGPAENTTQQFSSAAYPVSLKCPVHIVCFMMRCSFLICITEILLVFANM

SEQ ID NO: 827753 - protein, 172 aa, Homo sapiens; identical to SEQ ID NO: 827752

SEQ ID NO: 827754 - protein, 172 aa, Homo sapiens; identical to SEQ ID NO: 827752

SEQ ID NO: 827755 - protein, 495 aa, Homo sapiens
MSNTTVVPSTAGPGPSGGPGGGGGGGGGGGGTEVIQVTNVSPSASSEQMRTLFGFLGKIDELRLFPPEKLESSKNLLLCDSPLPVSSRVCFVKFHDPDSAVVAQHLTNTVFVDRALIVVPYAEGVIPDEAKALSLLAPANAVAGLLPGGGLLPTPNPLTQIGAVPLAALGAPTLDPALAALGLPGANLNSQSLAADQLLKLMSTVDPKLNHVAAGLVSPSLKSDTSSKEIEEAMKRVREAQSLISAAIEPDKKEEKRRHSRSRSRSRRRRTPSSSRHRRSRSRSRRRSHSKSRSRRRSKSPRRRRSHSRERGRRSRSTSKTRDKKKEDKEKKRSKTPPKSYSTARRSRSASRERRRRRSRSGTRSPKKPRSPKRKLSRSPSPRRHKKEKKKDKDKERSRDERERSTSKKKKSKDKEKDRERKSESDKDVKQVTRDYDEEEQGYDSEKEKKEEKKPIETGSPKTKECSVEKGTGDSLRESKVNGDDHHEEDMDMSD

SEQ ID NO: 827756 - protein, 294 aa, Homo sapiens
MSTVDPKLNHVAAGLVSPSLKSDTSSKEIEEAMKRVREAQSLISAAIEPDKKEEKRRHSRSRSRSRRRRTPSSSRHRRSRSRSRRRSHSKSRSRRRSKSPRRRRSHSRERGRRSRSTSKTRDKKKEDKEKKRSKTPPKSYSTARRSRSASRERRRRRSRSGTRSPKKPRSPKRKLSRSPSPRRHKKEKKKDKDKERSRDERERSTSKKKKSKDKEKDRERKSESDKDVKQVTRDYDEEEQGYDSEKEKKEEKKPIETGSPKTKECSVEKGTGDSLRESKVNGDDHHEEDMDMSD

SEQ ID NO: 827757 - protein, 294 aa, Homo sapiens; identical to SEQ ID NO: 827756

SEQ ID NO: 827758 - protein, 491 aa, Homo sapiens
MSNTTVVPSTAGPGPSGGPGGGGGGGGGGGGTEVIQVTNVSPSASSEQMRTLFGFLGKIDELRLFPPDDSPLPVSSRVCFVKFHDPDSAVVAQHLTNTVFVDRALIVVPYAEGVIPDEAKALSLLAPANAVAGLLPGGGLLPTPNPLTQIGAVPLAALGAPTLDPALAALGLPGANLNSQSLAADQLLKLMSTVDPKLNHVAAGLVSPSLKSDTSSKEIEEAMKRVREAQSLISAAIEPDKKEEKRRHSRSRSRSRRRRTPSSSRHRRSRSRSRRRSHSKSRSRRRSKSPRRRRSHSRERGRRSRSTSKTRDKKKEDKEKKRSKTPPKSYSTARRSRSASSLHICDSRERRRRRSRSGTRSPKKPRSPKRKLSRSPSPRRHKKEKKKDKDKERSRDERERSTSKKKKSKDKEKDRERKSESDKDVKQVTRDYDEEEQGYDSEKEKKEEKKPIETGSPKTKECSVEKGTGDSLRESKVNGDDHHEEDMDMSD

SEQ ID NO: 827759 - protein, 495 aa, Homo sapiens
MSNTTVVPSTAGPGPSGGPGGGGGGGGGGGGTEVIQVTNVSPSASSEQMRTLFGFLGKIDELRLFPPDDSPLPVSSRVCFVKFHDPDSAVVAQHLTNTVFVDRALIVVPYAEGVIPDEAKALSLLAPANAVAGLLPGGGLLPTPNPLTQIGAVPLAALGAPTLDPALAALGLPGANLNSQSLAADQLLKLMSTVDPKLNHVAAGLVSPSLKSDTSSKEIEEAMKRVREAQSLISAAIEPDKKEEKRRHSRSRSRSRRRRTPSSSRHRRSRSRSRRRSHSKSRSRRRSKSPRRRRSHSRERGRRSRSTSKTRDKKKEDKEKKRSKTPPKSYSTARRSRSASRVYLKEHGIQERERRRRRSRSGTRSPKKPRSPKRKLSRSPSPRRHKKEKKKDKDKERSRDERERSTSKKKKSKDKEKDRERKSESDKDVKQVTRDYDEEEQGYDSEKEKKEEKKPIETGSPKTKECSVEKGTGDSLRESKVNGDDHHEEDMDMSD

SEQ ID NO: 827760 - protein, 338 aa, Homo sapiens
MSNTTVVPSTAGPGPSGGPGGGGGGGGGGGGTEVIQVTNVSPSASSEQMRTLFGFLGKIDELRLFPPDDSPLPVSSRVCFVKFHDPDSAVVAQHLTNTVFVDRALIVVPYAEGVIPDEAKALSLLAPANAVAGLLPGGGLLPTPNPLTQIGAVPLAALGAPTLDPALAALGLPGANLNSQSLAADQLLKLMSTVDPKLNHVAAGLVSPSLKSDTSSKEIEEAMKRVREAQSLISAAIEPDKKEEKRRHSRSRSRSRRRRTPSSSRHRRSRSRSRRRSHSKSRSRRRSKSPRRRRSHSRERGRRSRSTSKTRDKKKEDKEKKRSKRETTTKKQEWHKIS

SEQ ID NO: 827761 - protein, 337 aa, Homo sapiens
TWSDALSMEEGAHYVYDLSLGALGLPGANLNSQSLAADQLLKLMSTVDPKLNHVAAGLVSPSLKSDTSSKEIEEAMKRVREAQSLISAAIEPDKKEEKRRHSRSRSRSRRRRTPSSSRHRRSRSRSRRRSHSKSRSRRRSKSPRRRRSHSRERGRRSRSTSKTRDKKKEDKEKKRSKTPPKSYSTARRSRSASRERRRRRSRSGTRSPKKPRSPKRKLSRSPSPRRHKKEKKKDKDKERSRDERERSTSKKKKSKDKEKDRERKSESDKDVKQVTRDYDEEEQGYDSEKEKKEEKKPIETGSPKTKECSVEKGTGDSLRESKVNGDDHHEEDMDMSD

SEQ ID NO: 827762 - protein, 465 aa, Homo sapiens
MSNTTVVPSTAGPGPSGGPGGGGGGGGGGGGTEVIQVTNVSPSASSEQMRTLFGFLGKIDELRLFPPDDSPLPVSSRVCFVKFHDPDSAVVAQHLTNTVFVDRALIVVPYAEGVIPDEAKALSLLAPANAVAGLLPGGGLLPTPNPLTQIGAVPLAALGAPTLDPALAALGLPGANLNSQSLAADQLLKLMSTVDPKLNHVAAGLVSPSLKSDTSSKEIEEAMKRVREAQSLISAAIEPDKKEEKRRHSRSRSRSRRRRTPSSSRHRRSRSRSRRRSHSKSRSRRRSKSPRRRRSHSRERGRRSRSTSKTRDKKKEDKEKKRSKTPPKSYSTARRSRSASRERRRRRSRSGTRSPKKPRSPKRKLSRSPSPRRHKKEKKKDKDKERSRDERERSTSKKKKSKDKEKDRERKSESDKDVKQVTRDYDEEEQGYDSEKEKKEEKKPIETGSPKTKECSVVIMKKTWI

SEQ ID NO: 827763 - protein, 422 aa, Homo sapiens
MSNTTVVPSTAGPGPSGGPGGGGGGGGGGGGTEVIQVTNVSPSASSEQMRTLFGFLGKIDELRLFPPDDSPLPVSSRVCFVKFHDPDSAVVAQHLTNTVFVDRALIVVPYAEGVIPDEAKALSLLAPANAVAGLLPGGGLLPTPNPLTQIGAVPLAALGAPTLDPALAALGLPGANLNSQSLAADQLLKLMSTVDPKLNHVAAGLVSPSLKSDTSSKEIEEAMKRVREAQSLISAAIEPDKKEEKRRHSRSRSRSRRRRTPSSSRHRRSRSRSRRRSHSKSRSRRRSKSPRRRRSHSRERGRRSRSTSKTRDKKKEDKEKKRSKTPPKSYSTARRSRSASRERRRRRSRSGTRSPKKPRSPKRKLSRSPSPRRHKKEKKKDKDKERSRDERERSTSKKKKSKDKEKDRERKSESDKDVKRFP

SEQ ID NO: 827764 - protein, 273 aa, Homo sapiens
MSNTTVVPSTAGPGPSGGPGGGGGGGGGGGGTEVIQVTNVSPSASSEQMRTLFGFLRSRSRSRRRSHSKSRSRRRSKSPRRRRSHSRERGRRSRSTSKTRDKKKEDKEKKRSKTPPKSYSTARRSRSASRERRRRRSRSGTRSPKKPRSPKRKLSRSPSPRRHKKEKKKDKDKERSRDERERSTSKKKKSKDKEKDRERKSESDKDVKQVTRDYDEEEQGYDSEKEKKEEKKPIETGSPKTKECSVEKGTGDSLRESKVNGDDHHEEDMDMSD

SEQ ID NO: 827765 - protein, 484 aa, Homo sapiens; identical to SEQ ID NO: 827751

SEQ ID NO: 827766 - protein, 484 aa, Homo sapiens; identical to SEQ ID NO: 827751

SEQ ID NO: 827767 - protein, 217 aa, Homo sapiens
LKGKCNEDLLNLKRGNLDTPPQAQDQVQSGLFLDVVVRQGASIFQLFPSKDQPLLIRRDAFLILDLCLDILDGVTGLHLEGDGLTSQGLHEDLHPTSETEHQVQGGLFLGSCRIRHEERSRDERERSTSKKKKSKDKEKDRERKSESDKDVKQVTRDYDEEEQGYDSEKEKKEEKKPIETGSPKTKECSVEKGTGDSLRESKVNGDDHHEEDMDMSD

SEQ ID NO: 827768 - protein, 67 aa, Homo sapiens
DAWVDPRVREEEQGYDSEKEKKEEKKPIETGSPKTKECSVEKGTGDSLRESKVNGDDHHEEDMDMSD

SEQ ID NO: 827769 - protein, 484 aa, Homo sapiens; identical to SEQ ID NO: 827751

SEQ ID NO: 827770 - protein, 484 aa, Homo sapiens; identical to SEQ ID NO: 827751

SEQ ID NO: 827771 - protein, 539 aa, Homo sapiens
MSNTTVVPSTAGPGPSGGPGGGGGGGGGGGGTEVIQVTNVSPSASSEQMRTLFGFLGKIDELRLFPPDDSPLPVSSRVCFVKFHDPDSAVVAQHLTNTVFVDRALIVVPYAEGVIPDEAKALSLLAPANAVAGLLPGGGLLPTPNPLTQIGAVPLAALGAPTLDPALAALGLPGANLNSQSLAADQLLKLMSTVDPKLNHVAAGLVSPSLKSDTSSKEIEEAMKRVREAQSLISAAIEPDKKEEKRRHSRSRSRSRRRRTPSSSRHRRSRSRSRRRSHSKSRSRRRSKSPRRRRSHSRERGRRSRSTSKTRDKKKEDKEKKRSKTPPKSYSTARRSRSASRERRRRRSRSGTRSPKKPRSPKRKLSRSPSPRRHKKEKKKDKDKERSRDERERSTSKKKKSKDKEKDRERKKKKEAFQDQDHVLGGGGSLIFKKQGGQEADRRRGAPSKSRSRGGSKAQGERSHSEKSRGPGAIQQSPTAGAHARTCYRTTQQKHGRPPRNVTHTVGGPDRRGTANTRAVGLHKAGAVDTRGGWYRTHT

SEQ ID NO: 827772 - protein, 123 aa, Homo sapiens
VSWLEARWGGRLFSRGLELARSHPLPRGVRRGGETAAAAAASAAVAEAVASDTLLSPAIRFLFPLLLTVCCVFDVLKQEREPEQRHEQHYRRPQHCRSGPQRRARWRRWWWRRRRRHRGNPGD

SEQ ID NO: 827773 - protein, 484 aa, Homo sapiens; identical to SEQ ID NO: 827751

SEQ ID NO: 827774 - protein, 337 aa, Homo sapiens
NAIQDTVYQETAIITESYTQGDRITLEQIELAELFQQDQLLKLMNTVAPKLNHVAAGLVSPSLKSDTSSKEIEEAMKRVREAQSLISAAIEPDKKEEKRRHSRSRSRSRRRRTPSSSRHRRSRSRSRRRSHSKSRSRRRSKSPRRRRSHSRERGRRSRSTSKTRDKKKEDKEKKRSKTPPKSYSTARRSRSASRERRRRRSRSGTRSPKKPRSPKRKLSRSPSPRRHKKEKKKDKDKERSRDERERSTSKKKKSKDKEKDRERKSESDKDVKQVTRDYDEEEQGYDSEKEKKEEKKPIETGSPKTKECSVEKGTGDSLRESKVNGDDHHEEDMDMSD

SEQ ID NO: 827775 - protein, 484 aa, Homo sapiens; identical to SEQ ID NO: 827751

SEQ ID NO: 827776 - protein, 115 aa, Homo sapiens
MCRAHQKQETKRKKTKKRNVLKHHQKVTAQPDVLEVQAERDDDEEAGVAQDLLKSLGLLKENCPAHHPLGDIKRRRRKIKTKKEVGMKENDQQARRRRVKIRKRTGKENQRVIKM

SEQ ID NO: 827777 - protein, 121 aa, Homo sapiens
ESLEHRRRRLAVNQITPLQSSLGNRADSVSSTSKKKKSKDKEKDRERKSESDKDVKQVTRDYDEEEQGYDSEKEKKEEKKPIETGSPKTKECSVEKGTGDSLRESKVNGDDHHEEDMDMSD

SEQ ID NO: 827778 - protein, 198 aa, Homo sapiens
LKGKCNEDLLNLKRGNLDTPPQAQDQVQSGLFLDVVVRQGASIFQLFPSKDQPLLIRRDAFLILDLCLDILDGVTGLHLEGDGLTSQGLHEDLHPTSETEHQVQGGLFLGSCRIRHEERSRDERERSTSKKKKSKDKEKDRERKSESDKDVKQVTRDYDEEEQGYDSEKEKKEEKKPIETGSPKTKECSVVIMKKTWI

SEQ ID NO: 827779 - protein, 482 aa, Homo sapiens
MSNTTVVPSTAGPGPSGGPGGGGGGGGGGGGTEVIQVTNVSPSASSEQMRTLFGFLGKIDELRLFPPDDSPLPVSSRVCFVKFHDPDSAVVAQHLTNTVFVDRALIVVPYAEGVIPDEAKALSLLAPANAVAGLLPGGGLLPTPNPLTQIGAVPLAALGAPTLDPALAALGLPGANLNSQSLAADQLLKLMSTVDPKLNHVAAGLVSPSLKSDTSSKEIEEAMKRVREAQSLISAAIEPDKKEEKRRHSRSRSRSRRRRTPSSSRHRRSRSRSRRRSHSKSRSRRRSKSPRRRRSHSRERGRRSRSTSKTRDKKKEDKEKKRSKTPPKSYSTARRSRSASRERRRRRSRSGTRSPKKPRSPKRKLSRSPSPRRHKKEKKKDKDKERSRDERERSTSKKKKSKDKEKDRERKSESDKDVKQVTRDYDEEEQGYDSEKEKKEEKKPIETGSPKTKECSVEKGTGDSLRESKVNGDDWSPWYPLR

SEQ ID NO: 827780 - protein, 562 aa, Homo sapiens
MSNTTVVPSTAGPGPSGGPGGGGGGGGGGGGTEVIQVTNVSPSASSEQMRTLFGFLGKIDELRLFPPDDSPLPVSSRVCFVKFHDPDSAVVAQHLTNTVFVDRALIVVPYAEGVIPDEAKALSLLAPANAVAGLLPGGGLLPTPNPLTQIGAVPLAALGAPTLDPALAALGLPGANLNSQSLAADQLLKLMSTVDPKLNHVAAGLVSPSLKSDTSSKEIEEAMKRVREAQSLISAAIEPDKKEEKRRHSRSRSRSRRRRTPSSSRHRRSRSRSRRRSHSKSRSRRRSKSPRRRRSHSRERGRRSRSTSKTRDKKKEDKEKKRSKTPPKSYSTARRSRSASRERRRRRSRSGTRSPKKPRSPKRKLSRSPSPRRHKKEKKKDKDKERSRDERERNATTRTNDVHTTNGHTRTREQTQSDDVDKTTVQHHGYPGTYWLTDGHTGVIEQGGRNRRQQHNNTTEGGGADPIKDTPPVKRGPHTGIYAPIPQQIYHHGSTTRGGHALNNDENVSNKNNKEHNGTTRRTRTAITQEARQDAEHWGRHTPGHPTTREHLIGDTTDNPIT

SEQ ID NO: 827781 - protein, 467 aa, Homo sapiens
MEPGTNSFRVEFPDFSSTILQKLNQQRQQGQLCDVSIVVQGHIFRAHKAVLAASSPYFCDQVLLKNSRRIVLPDVMNPRVFENILLSSYTGRLVMPAPEIVSYLTAASFLQMWHVVDKCTEVLEGNPTVLCQKLNHGSDHQSPSSSSYNGLVESFELGSGGHTDFPKAQELRDGENEEESTKDELSSQLTEHEYLPSNSSTEHDRLSTEMASQDGEEGASDSAEFHYTRPMYSKPSIMAHKRWIHVKPERLEQACEGMDVHATYDEHQVTESINTVQTEHTVQPSGVEEDFHIGEKKVEAEFDEQADESNYDEQVDFYGSSMEEFSGERSDGNLIGHRQEAALAAGYSENIEMVTGIKEEASHLGFSATDKLYPCQCGKSFTHKSQRDRHMSMHLGLRPYGCGVCGKKFKMKHHLVGHMKIHTGIKPYECNICAKRFMWRDSFHRHVTSCTKSYEAAKAEQNTTEAN

SEQ ID NO: 827782 - protein, 467 aa, Homo sapiens; identical to SEQ ID NO: 827781

SEQ ID NO: 827783 - protein, 467 aa, Homo sapiens; identical to SEQ ID NO: 827781

SEQ ID NO: 827784 - protein, 467 aa, Homo sapiens; identical to SEQ ID NO: 827781

SEQ ID NO: 827785 - protein, 467 aa, Homo sapiens; identical to SEQ ID NO: 827781

SEQ ID NO: 827786 - protein, 267 aa, Homo sapiens [sequence omitted]

SEQ ID NO: 827787 - protein, 146 aa, Homo sapiens
MGSACIKVTKYFLFLFNLIFFILGAVILGFGVWILADKSSFISVLQTSSSSLRMGAYVFIGVGAVTMLMGFLGCIGAVNEVRCLLGLYFAFLLLILIAQVTAGALFYFNMGKLKQEMGGIVTELIRDYNSSREDSLQDAWDYVQAQ

SEQ ID NO: 827788 - protein, 267 aa, Homo sapiens [sequence omitted]

SEQ ID NO: 827789 - protein, 267 aa, Homo sapiens [sequence omitted]

SEQ ID NO: 827790 - protein, 267 aa, Homo sapiens [sequence omitted]

SEQ ID NO: 827791 - protein, 239 aa, Homo sapiens
MGSACIKVTKYFLFLFNLIFFILGAVILGFGVWILADKSSFISVLQTSSSSLRMGAYVFIGVGAVTMLMGFLGCIGAVNEVRCLLGLYFAFLLLILIAQVTAGALFYFNMGKLKQEMGGIVTELIRDYNSSREDSLQDAWDYVQAQVKCCGWVSFYNWTDNAELMNRPEVTYPCSCEVKGEEDNSLSVRKGFCEAPGNRTQSGNHPEDWPVYQELLGMVLSICLCRHVHSEDYSKVPKY

SEQ ID NO: 827792 - protein, 331 aa, Homo sapiens [sequence omitted]

SEQ ID NO: 827793 - protein, 318 aa, Homo sapiens
EPDPLRLQVGNSVGLFQSPPCCCVDDTWAQAEVGPVTSCTGFVEGSSRTGGMGSACIKVTKYFLFLFNLIFFILGAVILGFGVWILADKSSFISVLQTSSSSLRMGAYVFIGVGAVTMLMGFLGCIGAVNEVRCLLGLYFAFLLLILIAQVTAGALFYFNMGKLKQEMGGIVTELIRDYNSSREDSLQDAWDYVQAQVKCCGWVSFYNWTDNAELMNRPEVTYPCSCEVKGEEDNSLSVRKGFCEAPGNRTQSGNHPEDWPVYQEGCMEKVQAWLQENLGIILGVGVGVAIVELLGMVLSICLCRHVHSEDYSKVPKY

SEQ ID NO: 827794 - protein, 214 aa, Homo sapiens [sequence omitted]

SEQ ID NO: 827795 - protein, 236 aa, Homo sapiens
MSELETACGKPMRHKTSSSSLRMGAYVFIGVGAVTMLMGFLGCIGAVNEVRCLLGLYFAFLLLILIAQVTAGALFYFNMGKLKQEMGGIVTELIRDYNSSREDSLQDAWDYVQAQVKCCGWVSFYNWTDNAELMNRPEVTYPCSCEVKGEEDNSLSVRKGFCEAPGNRTQSGNHPEDWPVYQEGCMEKVQAWLQENLGIILGVGVGVAIVELLGMVLSICLCRHVHSEDYSKVPKY

SEQ ID NO: 827796 - protein, 292 aa, Homo sapiens
TYWIADEGLLTSCTGFVEGSSRTGGMGSACIKVTKYFLFLFNLIFFILGAVILGFGVWILADKSSFISVLQTSSSSLRMGAYVFIGVGAVTMLMGFLGCIGAVNEVRCLLGLYFAFLLLILIAQVTAGALFYFNMGKLKQEMGGIVTELIRDYNSSREDSLQDAWDYVQAQVKCCGWVSFYNWTDNAELMNRPEVTYPCSCEVKGEEDNSLSVRKGFCEAPGNRTQSGNHPEDWPVYQEGCMEKVQAWLQENLGIILGVGVGVAIVELLGMVLSICLCRHVHSEDYSKVPKY

SEQ ID NO: 827797 - protein, 222 aa, Homo sapiens
SRVQPDRGAGRNIGWRASLGARRLGAPGRGPSADFVPALCPQYFAFLLLILIAQVTAGALFYFNMGKLKQEMGGIVTELIRDYNSSREDSLQDAWDYVQAQVKCCGWVSFYNWTDNAELMNRPEVTYPCSCEVKGEEDNSLSVRKGFCEAPGNRTQSGNHPEDWPVYQEGCMEKVQAWLQENLGIILGVGVGVAIVELLGMVLSICLCRHVHSEDYSKVPKY

SEQ ID NO: 827798 - protein, 146 aa, Homo sapiens [sequence omitted]

SEQ ID NO: 827799 - protein, 73 aa, Homo sapiens
LPLLPASQGGCEAQVEDPLNPHVNLDGEAGASEAGTPSLPLTLRLSPQLLGMVLSICLCRHVHSEDYSKVPKY

SEQ ID NO: 827800 - protein, 103 aa, Homo sapiens
AYPLPALSPGCSVVPLLTAHQGSLSNSEKNAPHSVPGAGGLDFYLPSRVCILYRGNCMKNWGGGGRARWLTPVIPALWEAEAGGSRGQEIETILANMVKPRLY

SEQ ID NO: 827801 - protein, 427 aa, Homo sapiens
MAPAAWLRSAAARALLPPMLLLLLQPPPLLARALPPDVHHLHAERRGPQPWHAALPSSPAPAPATQEAPRPASSLRPPRCGVPDPSDGLSARNRQKRFVLSGGRWEKTDLTYRILRFPWQLVQEQVRQTMAEALKVWSDVTPLTFTEVHEGRADIMIDFARYWHGDDLPFDGPGGILAHAFFPKTHREGDVHFDYDETWTIGDDQGTDLLQVAAHEFGHVLGLQHTTAAKALMSAFYTFRYPLSLSPDDCRGVQHLYGQPWPTVTSRTPALGPQAGIDTNEIAPLEPDAPPDACEASFDAVSTIRGELFFFKAGFVWRLRGGQLQPGYPALASRHWQGLPSPVDAAFEDAQGHIWFFQGAQYWVYDGEKPVLGPAPLTELGLVRFPVHAALVWGPEKNKIYFFRGRDYWRFHPSTRRVDSHRAPQGH

SEQ ID NO: 827802 - protein, 400 aa, Homo sapiens
MGVSGPLVLVLSTEFRHLYLPKYEQTTYTCAHVARETSALKLRPRVHLACVLSVHTPTKHPGATPGASAIGGCPFPEAQAPPSPSRILRFPWQLVQEQVRQTMAEALKVWSDVTPLTFTEVHEGRADIMIDFARYWHGDDLPFDGPGGILAHAFFPKTHREGDVHFDYDETWTIGDDQGTDLLQVAAHEFGHVLGLQHTTAAKALMSAFYTFRYPLSLSPDDCRGVQHLYGQPWPTVTSRTPALGPQAGIDTNEIAPLEPDAPPDACEASFDAVSTIRGELFFFKAGFVWRLRGGQLQPGYPALASRHWQGLPSPVDAAFEDAQGHIWFFQGAQYWVYDGEKPVLGPAPLTELGLVRFPVHAALVWGPEKNKIYFFRGRDYWRFHPSTRRVDSHRAPQGH

SEQ ID NO: 827803 - protein, 458 aa, Homo sapiens
MAPAAWLRSAAARALLPPMLLLLLQPPPLLARALPPDVHHLHAERRGPQPWHAALPSSPAPAPATQEAPRPASSLRPPRCGVPDPSDGLSARNRQKRFVLSGGRWEKTDLTYRILRFPWQLVQEQVRQTMAEALKVWSDVTPLTFTEVHEGRADIMIDFARYWHGDDLPFDGPGGILAHAFFPKTHREGDVHFDYDETWTIGDDQGTDLLQVAAHEFGHVLGLQHTTAAKALMSAFYTFRYPLSLSPDDCRGVQHLYGQPWPTVTSRTPALGPQAGIDTNEIAPLEVRPCLPVPPTPLLATVTAAYALSMCPSLPPQPDAPPDACEASFDAVSTIRGELFFFKAGFVWRLRGGQLQPGYPALASRHWQGLPSPVDAAFEDAQGHIWFFQGAQYWVYDGEKPVLGPAPLTELGLVRFPVHAALVWGPEKNKIYFFRGRDYWRFHPSTRRVDSHRAPQGH

SEQ ID NO: 827804 - protein, 382 aa, Homo sapiens
MAPAAWLRSAAARALLPPMLLLLLQPPPLLARALPPDVHHLHAERRGPQPWHAALPSSPAPAPATQEAPRPASSLRPPRCGVPDPSDGLSARNRQKRFVLSGGRWEKTDLTYRILRFPWQLVQEQVRQTMAEALKVWSDVTPLTFTEVHEGRADIMIDFARYWHGDDLPFDGPGGILAHAFFPKTHREGDVHFDYDETWTIGDDQGTDLLQVAAHEFGHVLGLQHTTAAKALMSAFYTFRYPLSLSPDDCRGVQHLYGQPWPTVTSRTPALGPQAGIDTNEIAPLEPDAPPDACEASFDAVSTIRGELFFFKAGFVWRLRGGQLQPGYPALASRHWQGLPSPVDAAFEDAQGHIWFFQELGFPSSTGRDESLEHCRCQGLHK

SEQ ID NO: 827805 - protein, 370 aa, Homo sapiens
MAPAAWLRSAAARALLPPMLLLLLQPPPLLARALPPDVHHLHAERRGPQPWHAALPSSPAPAPATQEAPRPASSLRPPRCGVPDPSDGLSARNRQKRFVLSGGRWEKTDLTYRILRFPWQLVQEQVRQTMAEALKVWSDVTPLTFTEVHEGRADIMIDFARYWHGDDLPFDGPGGILAHAFFPKTHREGDVHFDYDETWTIGDDQGTDLLQVAAHEFGHVLGLQHTTAAKALMSAFYTFRYPLSLSPDDCRGVQHLYGQPWPTVTSRTPALGPQAGIDTNEIAPLEPDAPPDACEASFDAVSTIRGELFFFKAGFVWRLRGGQLQPGYPALASRHWQGLPSPVDAAFEDAQGHIWFFQGTTGVSTPAPGV

SEQ ID NO: 827806 - protein, 139 aa, Homo sapiens
MAIFVAVGTRHGTEPMSPQGDGVGYNHHDNCREGHAGRGHLPATVSDWAGRLWHDLRGRAVLGPLCRSWANLGCPVSIPVPQGSTMAGLGELECPCCIPVVRFLPGAGTEARVLGPHGLQPWLSNWAVGQGHFPEVRSW

SEQ ID NO: 827807 - protein, 382 aa, Homo sapiens; identical to SEQ ID NO: 827804

SEQ ID NO: 827808 - protein, 219 aa, Homo sapiens
MGVSGPLVLVLSTEFRHLYLPKYEQTTYTCAHVARETSALKLRPRVHLACVLSVHTPTKHPGATPGASAIGGCPFPEAQAPPSPSRILRFPWQLVQEQVRQTMAEALKVWSDVTPLTFTEVHEGRADIMIDFARYWHGDDLPFDGPGGILAHAFFPKTHREGDVHFDYDETWTIGDDQEGGWTHEGGWTHEGGWTHEGGWTRRGMDTTKGDGHTKGDGH

SEQ ID NO: 827809 - protein, 207 aa, Homo sapiens
MGQNPQPSETALCQDVHHLHAERRGPQPWHAALPSSPAPAPATQEAPRPASSLRPPRCGVPDPSDGLSARNRQKRFVLSGGRWEKTDLTYRILRFPWQLVQEQVRQTMAEALKVWSDVTPLTFTEVHEGRADIMIDFARYWHGDDLPFDGPGGILAHAFFPKTHREGDVHFDYDETWTIGDDQVTDLLQVAAIIALWAHTHTPALSF

SEQ ID NO: 827810 - protein, 414 aa, Homo sapiens
MRATAWIVALQGHPGWNRSPGEVDVHHLHAERRGPQPWHAALPSSPAPAPATQEAPRPASSLRPPRCGVPDPSDGLSARNRQKRFVLSGGRWEKTDLTYRILRFPWQLVQEQVRQTMAEALKVWSDVTPLTFTEVHEGRADIMIDFARYWHGDDLPFDGPGGILAHAFFPKTHREGDVHFDYDETWTIGDDQGTDLLQVAAHEFGHVLGLQHTTAAKALMSAFYTFRYPLSLSPDDCRGVQHLYGQPWPTVTSRTPALGPQAGIDTNEIAPLEPDAPPDACEASFDAVSTIRGELFFFKAGFVWRLRGGQLQPGYPALASRHWQGLPSPVDAAFEDAQGHIWFFQGAQYWVYDGEKPVLGPAPLTELGLVRFPVHAALVWGPEKNKIYFFRGRDYWRFHPSTRRVDSHRAPQGH

SEQ ID NO: 827811 - protein, 431 aa, Homo sapiens
MGVSGPLVLVLSTEFRHLYLPKYEQTTYTCAHVARETSALKLRPRVHLACVLSVHTPTKHPGATPGASAIGGCPFPEAQAPPSPSRILRFPWQLVQEQVRQTMAEALKVWSDVTPLTFTEVHEGRADIMIDFARYWHGDDLPFDGPGGILAHAFFPKTHREGDVHFDYDETWTIGDDQGTDLLQVAAHEFGHVLGLQHTTAAKALMSAFYTFRYPLSLSPDDCRGVQHLYGQPWPTVTSRTPALGPQAGIDTNEIAPLEVRPCLPGPPTPLLATVTAAYALSMCPSLPPQPDAPPDACEASFDAVSTIRGELFFFKAGFVWRLRGGQLQPGYPALASRHWQGLPSPVDAAFEDAQGHIWFFQGAQYWVYDGEKPVLGPAPLTELGLVRFPVHAALVWGPEKNKIYFFRGRDYWRFHPSTRRVDSHRAPQGH

SEQ ID NO: 827812 - protein, 139 aa, Homo sapiens; identical to SEQ ID NO: 827806

SEQ ID NO: 827813 - protein, 139 aa, Homo sapiens; identical to SEQ ID NO: 827806

SEQ ID NO: 827814 - protein, 229 aa, Homo sapiens
MAPAAWLRSAAARALLPPMLLLLLQPPPLLARALPPDVHHLHAERRGPQPWHAALPSSPAPAPATQEAPRPASSLRPPRCGVPDPSDGLSARNRQKRFVLSGGRWEKTDLTYRILRFPWQLVQEQVRQTMAEALKVWSDVTPLTFTEVHEGRADIMIDFARYWHGDDLPFDGPGGILAHAFFPKTHREGDVHFDYDETWTIGDDQVTDLLQVAAIIALWAHTHTPALSF

SEQ ID NO: 827815 - protein, 382 aa, Homo sapiens
MTEFWLISAPGEKTCQQTWEKLHAATSKNNNLAVTSKFNIPDLKVGTLDVLVGLSDELAKLDAFVEGVVKKVAQYMADVLEDSKDKVQENLLANGVDLVTYITRFQWDMAKYPIKQSLKNISEIIAKGVTQIDNDLKSRASAYNNLKGNLQNLERKNAGSLLTRSLAEIVKKDDFVLDSEYLVTLLVVVPKLNHNDWIKQYETLAEMVVPRSSNVLSEDQDSYLCNVTLFRKAVDDFRHKARENKFIVRDFQYNEEEMKADKEEMNRLSTDKKKQFGPLVRWLKVNFSEAFIAWIHVKALRVFVESVLRYGLPVNFQAMLLQPNKKTLKKLREVLHELYKHLDSSAAAIIDAPMDIPGLNLSQQEYYPYVYYKIDCNLLEFK

SEQ ID NO: 827816 - protein, 191 aa, Homo sapiens
MTEFWLISAPGEKTCQQTWEKLHAATSKNNNLAVTSKFNIPDLKVGTLDVLVGLSDELAKLDAFVEGVVKKVAQYMADVLEDSKDKVQENLLANGVDLVTYITRFQWDMAKYPIKQSLKNISEIIAKGVTQIDNDLKSRASAYNNLKGNLQNLERKNAGSLLTRSLAEIVKKDDFVLDSEYLVTLLVVVPK

SEQ ID NO: 827817 - protein, 50 aa, Homo sapiens
MSSGRCLGGTRVGAGAETVALELELAGWLCLVSRRQFTVLGLGSVSKEEK

SEQ ID NO: 827818 - protein, 382 aa, Homo sapiens; identical to SEQ ID NO: 827815

SEQ ID NO: 827819 - protein, 382 aa, Homo sapiens; identical to SEQ ID NO: 827815

SEQ ID NO: 827820 - protein, 364 aa, Homo sapiens
MTEFWLISAPGENLAVTSKFNIPDLKVGTLDVLVGLSDELAKLDAFVEGVVKKVAQYMADVLEDSKDKVQENLLANGVDLVTYITRFQWDMAKYPIKQSLKNISEIIAKGVTQIDNDLKSRASAYNNLKGNLQNLERKNAGSLLTRSLAEIVKKDDFVLDSEYLVTLLVVVPKLNHNDWIKQYETLAEMVVPRSSNVLSEDQDSYLCNVTLFRKAVDDFRHKARENKFIVRDFQYNEEEMKADKEEMNRLSTDKKKQFGPLVRWLKVNFSEAFIAWIHVKALRVFVESVLRYGLPVNFQAMLLQPNKKTLKKLREVLHELYKHLDSSAAAIIDAPMDIPGLNLSQQEYYPYVYYKIDCNLLEFK

SEQ ID NO: 827821 - protein, 355 aa, Homo sapiens [sequence omitted]

SEQ ID NO: 827822 - protein, 382 aa, Homo sapiens; identical to SEQ ID NO: 827815

SEQ ID NO: 827823 - protein, 382 aa, Homo sapiens; identical to SEQ ID NO: 827815

SEQ ID NO: 827824 - protein, 382 aa, Homo sapiens; identical to SEQ ID NO: 827815

SEQ ID NO: 827825 - protein, 364 aa, Homo sapiens
MTEFWLISAPGEKTCQQTWEKLHAATSKNNNLAVTSKFNIPDLKVGTLDVLVGLSDELAKLDAFVEGVVKKVAQYMADVLEDSKDKVQENLLANGVDLVTYITRFQWDMAKYPIKQSLKSRASAYNNLKGNLQNLERKNAGSLLTRSLAEIVKKDDFVLDSEYLVTLLVVVPKLNHNDWIKQYETLAEMVVPRSSNVLSEDQDSYLCNVTLFRKAVDDFRHKARENKFIVRDFQYNEEEMKADKEEMNRLSTDKKKQFGPLVRWLKVNFSEAFIAWIHVKALRVFVESVLRYGLPVNFQAMLLQPNKKTLKKLREVLHELYKHLDSSAAAIIDAPMDIPGLNLSQQEYYPYVYYKIDCNLLEFK

SEQ ID NO: 827826 - protein, 296 aa, Homo sapiens
MESMAVATDGGERPGVPAGSGLSASQRRAELRRRKLLMNSEQRINRIMGFHRPGSGAEEESQTKSKQQDSDKLNSLSVPSVSKRVVLGDSVSTGTTDQQGGVAEVKGTQLGDKLDSFIKPPECSSDVNLELRQRNRGDLTADSVQRGSRHGLEQYLSRFEEAMKLRKQLISEKPSQEDGNTTEEFDSFRIFRLVGCALLALGVRAFVCKYLSIFAPFLTLQLAYMGLYKYFPKSEKKIKTTVLTAALLLSGIPAEVINRSMDTYSKMGEVFTDLCVYFFTFIFCHELLDYWGSEVP

SEQ ID NO: 827827 - protein, 296 aa, Homo sapiens; identical to SEQ ID NO: 827826

SEQ ID NO: 827828 - protein, 235 aa, Homo sapiens
MESMAVATDGGERPGVPAGSGLSASQRRAELRRRKLLMNSEQRINRIMGFHRPGSGAEEESQTKSKQQDSDKLNSLSVPSVSKRVVLGDSVSTGTTDQQGGVAEVKGTQLGDKLDSFIKPPECSSDVNLELRQRNRGDLTADSVQRGSRHGLEQYLSRFEEAMKLRKQLISEKPSQEDGNTTEEFDSFRIFRLVGCALLALGVRAFVCKYLSIFAPFLTLQLAYMGLYKYFPKVN

SEQ ID NO: 827829 - protein, 235 aa, Homo sapiens; identical to SEQ ID NO: 827828

SEQ ID NO: 827830 - protein, 68 aa, Homo sapiens
RHGLEQYLSRFEEAMKLRKQLISEKPSQEDGNTTEEFDSFRIFRLVGCALLALGVRAFVCKYLVRKDL

SEQ ID NO: 827831 - protein, 924 aa, Homo sapiens
IVSREAKLQFAYLENFKTKMRSTVSVREGQGVVLLCGPPPHSGELSYAWIFNEYPSFVEEDSQEICQELVITPMETGHLYISKVEPSDVGNYTCVVTSMVTNARVLGSPTPLVLRSDGVMGEYEPKIEVQFPETLPAAKGSTVKLECFALGKAPYLRLILEEGWAAISSKIKLRKFSGVLEIPNFQQEDAGSYECIAENSRGKNVARGRLTYYAKPHWVQLIKDVEIAVEDSLYWECRASGKPKPSYRWLKNGAALVLEERTQIENGALTISNLSVTDSGMFQCIAKTNMALLFQCCKVVASAPDFSKNPMKKLVQVQVGSLVSLDCKPRASPRALSSWKKGDVSVQEHERISLLNDGGLKIANVTKADAGTYTCMAENQFGKANGTTHLVVTEPTRITLAPSNMDVSVGESVILPCQVQHDPLLDIIFTWYFNGALADFKKDGSHFEKVGGSSSGDLMIRNIQLKHSGKYVCMVQTGVDSVSSAADLIVRGSPGPPENVKVDEITDTTAQLSWKEGKDNHSPVISYSIQARTPFSVGWQTVTTVPEVIDGKTHTATVVELNPWVEYEFRVVASNKIGGGEPSLPSEKVRTEEAVPEVPPSEVNGGGGSRSELVITWDPVPEELQNGEGFGYVVAFRPLGVTTWIQTVVTSPDTPRYVFRNESIVPYSPYEVKVGVYNNKGEGPFSPVTTVFSAEEEPTVAPSQVSANSLSSSEIEVSWNTIPWKLSNGHLLGYEVRYWNGGGKEESSSKMKVAGNETSARLRGLKSNLAYYTAVRAYNSAGAGPFSATVNVTTKKTPPSQPPGNVVWNATDTKVLLNWEQVKAMENESEVTGYKVFYRTSSQNNVQVLNTNKTSAELVLPIKEDYIIEVKATTDGGDGTSSEQIRIPRITSMDARGSTSAISNVHPMSSYMPIVLFLIVYVLW

SEQ ID NO: 827832 - protein, 101 aa, Homo sapiens
RSRALRARRDVSSLPARGPARPGPRPEPQRAEDVSPARLWRSSSHSRAEPERSAAQPRALSGPLARVPRSCPSGVPRPLAGATAAAARGPSPAGRPRPQRR

SEQ ID NO: 827833 - protein, 111 aa, Homo sapiens
QRETETQGWRGGGTRETEGGRDRDKAPERGAEAGETEPRTRVWGGRRSRRNNKGDRHLRQGETETSIGCRPSRRGTMEGLRKARLSRDVVIEDDRIDDVLKNMTDKAPPGV

SEQ ID NO: 827834 - protein, 101 aa, Homo sapiens; identical to SEQ ID NO: 827832

SEQ ID NO: 827835 - protein, 101 aa, Homo sapiens; identical to SEQ ID NO: 827832

SEQ ID NO: 827836 - protein, 30 aa, Homo sapiens
MAASAGPAVPPGCISRPSSCLPASKLFRLS

SEQ ID NO: 827837 - protein, 933 aa, Homo sapiens
MNIDGVAISSKTEPPSSEPISFIPVKDLEDAAPVTTWLNPLGIYDQSTTHWLQGQGPPEQESKQPDAQPDSESAALKAKVEEFNRRVRENPRDTQLWMAFVAFQDEVMKSPGLYAIEEGEQEKRKRSLKLILEKKLAILERAIESNQSSVDLKLAKLKLCTEFWEPSTLVKEWQKLIFLHPNNTALWQKYLLFCQSQFSTFSISKIHSLYGKCLSTLSAVKDGSILSHPALPGTEEAMFALFLQQCHFLRQAGHSEKAISLFQAMVDFTFFKPDSVKDLPTKGQVEFFEPFWDSGEPRAGEKGARGWKAWMHQQERGGWVVINPDEDDDEPEEDDQEIKDKTLPRWQIWLAAERSRDQRHWRPWRPDKTKKQTEEDCEDPERQVLFDDIGQSLIRLSSHDLQFQLVEAFLQFLGVPSGFTPPASCLYLAMDENSIFDNGLYDEKPLTFFNPLFSGASCVGRMDRLGYPRWTRGQNREGEEFIRNVFHLVMPLFSGKEKSQLCFSWLQYEIAKVIWCLHTKNKKRLKSQGKNCKKLAKNLLKEPENCNNFCLWKQYAHLEWLLGNTEDARKVFDTALGMAGSRELKDSDLCELSLLYAELEVELSPEVRRAATARAVHILTKLTESSPYGPYTGQVLAVHILKARKAYEHALQDCLGDSCVSNPAPTDSCSRLISLAKCFMLFQYLTIGIDAAVQIYEQVFAKLNSSVFPEGSGEGDSASSQSWTSVLEAITLMHTSLLRFHMKVSVYPLAPLREALSQALKLYPGNQVLWRSYVQIQNKSHSASKTRRFFDTITRSAKPLEPWLFAIEAEKLRKRLVETVQRLDGREIHATIPETGLMHRIQALFENAMRSDSGSQCPLLWRMYLNFLVSLGNKERSKGVFYKALQNCPWAKVLYLDAVEYFPDEMQEILDLMTEKELRVRLPLEELELLLED

SEQ ID NO: 827838 - protein, 933 aa, Homo sapiens; identical to SEQ ID NO: 827837

SEQ ID NO: 827839 - protein, 597 aa, Homo sapiens
MALFPAFAGLSEAPDGGSSRKELDWLSNPSFCVGSITSLSQQTEAAPAHVSEGLPLTRSHLKSESSDESDTNKKLKQTSRKKKKEKKKKRKHQHHKKTKRKHGPSSSSRSETDTDSEKDKPSRGVGGSKKESEEPNQGNNAAADTGHRFVWLEDIQAVTGETFRTDKKPDPANWEYKSLYRGDIARYKRKGDSCLGINPKKQCISWEGTSTEKKHSRKQVERYFTKKSVGLMNIDGVAISSKTEPPSSEPISFIPVKDLEDAAPVTTWLNPLGIYDQSTTHWLQGQGPPEQESKQPDAQPDSESAALKAKVEEFNRRVRENPRDTQLWMAFVAFQDEVMKSPGLYAIEEGEQEKRKRSLKLILEKKLAILERAIESNQSSVDLKLAKLKLCTEFWEPSTLVKEWQKLIFLHPNNTALWQKYLLFCQSQFSTFSISKIHSLYGKCLSTLSAVKDGSILSHPALPGTEEAMFALFLQQCHFLRQAGHSEKAISLFQAMVDFTFFKPDSVKDLPTKGQVEFFEPFWDSGEPRAGEKGARGWKAWMHQQERGGWVVINPDEDDDEPEEDDQEIKDKTAAGGLESSGKTGCACEAKLPTLRS

SEQ ID NO: 827840 - protein, 604 aa, Homo sapiens
MALFPAFAGLSEAPDGGSSRKELDWLSNPSFCVGSITSLSQQTEAAPAHVSEGLPLTRSHLKSESSDESDTNKKLKQTSRKKKKEKKKKRKHQHHKKTKRKHGPSSSSRSETDTDSEKDKPSRGVGGSKKESEEPNQGNNAAADTGHRFVWLEDIQAVTGETFRTDKKPDPANWEYKSLYRGDIARYKRKGDSCLGINPKKQCISWEGTSTEKKHSRKQVERYFTKKSVGLMNIDGVAISSKTEPPSSEPISFIPVKDLEDAAPVTTWLNPLGIYDQSTTHWLQGQGPPEQESKQPDAQPDSESAALKAKVEEFNRRVRENPRDTQLWMAFVAFQDEVMKSPGLYAIEEGEQEKRKRSLKLILEKKLAILERAIESNQSSVDLKLAKLKLCTEFWEPSTLVKEWQKLIFLHPNNTALWQKYLLFCQSQFSTFSISKIHSLYGKCLSTLSAVKDGSILSHPALPGTEEAMFALFLQQCHFLRQAGHSEKAISLFQAMVDFTFFKPDSVKDLPTKGQVEFFEPFWDSGEPRAGEKGARGWKAWMHQQERGGWVVINPDEDDDEPEEDDQEIKDKTLPRWQIWLAAERSRDQRHWRPWRPDKTKNYQ

SEQ ID NO: 827841 - protein, 164 aa, Homo sapiens
MALFPAFAGLSEAPDGGSSRKELDWLSNPSFCVGSITSLSQQTEAAPAHVSEGLPLTRSHLKSESSDESDTNKKLKQTSRKKKKEKKKKRKHQHHKKTKRKHGPSSSSRSETDTDSEKDKPSRGVGGSKKESEEPNQGNNAAADTGHRFVWLEDIQAVTGETFR

SEQ ID NO: 827842 - protein, 1164 aa, Homo sapiens
MALFPAFAGLSEAPDGGSSRKELDWLSNPSFCVGSITSLSQQTEAAPAHVSEGLPLTRSHLKSESSDESDTNKKLKQTSRKKKKEKKKKRKHQHHKKTKRKHGPSSSSRSETDTDSEKDKPSRGVGGSKKESEEPNQGNNAAADTGHRFVWLEDIQAVTGETFRTDKKPDPANWEYKSLYRGDIARYKRKGDSCLGINPKKQCISWEGTSTEKKHSRKQVERYFTKKSVGLMNIDGVAISSKTEPPSSEPISFIPVKDLEDAAPVTTWLNPLGIYDQSTTHWLQGQGPPEQESKQPDAQPDSESAALKAKVEEFNRRVRENPRDTQLWMAFVAFQDEVMKSPGLYAIEEGEQEKRKRSLKLILEKKLAILERAIESNQSSVDLKLAKLKLCTEFWEPSTLVKEWQKLIFLHPNNTALWQKYLLFCQSQFSTFSISKIHSLYGKCLSTLSAVKDGSILSHPALPGTEEAMFALFLQQCHFLRQAGHSEKAISLFQAMVDFTFFKPDSVKDLPTKGQVEFFEPFWDSGEPRAGEKGARGWKAWMHQQERGGWVVINPDEDDDEPEEDDQEIKDKTLPRWQIWLAAERSRDQRHWRPWRPDKTKKQTEEDCEDPERQVLFDDIGQSLIRLSSHDLQFQLVEAFLQFLGVPSGFTPPASCLYLAMDENSIFDNGLYDEKPLTFFNPLFSGASCVGRMDRLGYPRWTRGQNREGEEFIRNVFHLVMPLFSGKEKSQLCFSWLQYEIAKVIWCLHTKNKKRLKSQGKNCKKLAKNLLKEPENCNNFCLWKQYAHLEWLLGNTEDARKVFDTALGMAGSRELKDSDLCELSLLYAELEVELSPEVRRAATARAVHILTKLTESSPYGPYTGQVLAVHILKARKAYEHALQDCLGDSCVSNPAPTDSCSRLISLAKCFMLFQYLTIGIDAAVQIYEQVFAKLNSSVFPEGSGEGDSASSQSWTSVLEAITLMHTSLLRFHMKVSVYPLAPLREALSQALKLYPGNQVLWRSYVQIQNKSHSASKTRRFFDTITRSAKPLEPWLFAIEAEKLRKRLVETVQRLDGREIHATIPETGLMHRIQALFENAMRSDSGSQCPLLWRMYLNFLVSLGNKERSKGVFYKALQNCPWAKVLYLDAVEYFPDEMQEILDLMTEKELRVRLPLEELELLLED

SEQ ID NO: 827843 - protein, 1157 aa, Homo sapiens
MALFPAFAGLSEAPDGGSSRKELDWLSNPSFCVGSITSLSQQTEAAPAHVSEGLPLTRSHLKSESSDESDTNKKLKQTSRKKKKEKKKKRKHQHHKKTKRKHGPSSSSRSETDTDSEKDKPSRGVGGSKKESEEPNQGNNAAADTGHRFVWLEDIQAVTGETFRTDKKPDPANWEYKSLYRGDIARYKRKGDSCLGINPKKQCISWEGTSTEKKHSRKQVERYFTKKSVGLMNIDGVAISSKTEPPSSEPISFIPVKDLEDAAPVTTWLNPLGIYDQSTTHWLQGQGPPEQESKQPDAQPDSESAALKAKVEEFNRRVRENPRDTQLWMAFVAFQDEVMKSPGLYAIEEGEQEKRKRSLKLILEKKLAILERAIESNQSSVDLKLAKLKLCTEFWEPSTLVKEWQKLIFLHPNNTALWQKYLLFCQSQFSTFSISKIHSLYGKCLSTLSAVKDGSILSHPALPGTEEAMFALFLQQCHFLRQAGHSEKAISLFQAMVDFTFFKPDSVKDLPTKGQVEFFEPFWDSGEPRAGEKGARGWKAWMHQQERGGWVVINPDEDDDEPEEDDQEIKDKTLPRWQIWLAAERSRDQRHWRPWRPDKTKKQTEEDCEDPERQVLFDDIGQSLIRLSSHDLQFQLVEAFLQFLGVPSGFTPPASCLYLAMDENSIFDNGLYDEKPLTFFNPLFSGASCVGRMDRLGYPRWTRGQNREGEEFIRNVFHLVMPLFSGKEKSQLCFSWLQYEIAKVIWCLHTKNKKRLKSQGKNCKKLAKNLLKEPENCNNFCLWKQYAHLEWLLGNTEDARKVFDTALGMAGSRELKDSDLCELSLLYAELEVELSPEVRRAATARAVHILTKLTESSPYGPYTGQVLAVHILKARKAYEHALQDCLGDSCVSNPAPTDSCSRLISLAKCFMLFQYLTIGIDAAVQIYEQVFAKLNSSVFPEGSGEGDSASSQSWTSVLEAITLMHTSLLRFHMKVSVYPLAPLREALSQALKLYPGNQVLWRSYVQIQNKSHSASKTRRFFDTITRSAKPLEPWLFAIEAEKLRKRLVETVQRLDGREIHATIPETGLMHRIQALFENAMRSDSGSQCPLLWRMYLNFLVSLGNKERSKGVFYKALQNCPWAKVLYLDAVEYFPDEMQEILDLMTEKELRVRLLLED

SEQ ID NO: 827844 - protein, 219 aa, Homo sapiens
MALFPAFAGLSEAPDGGSSRKELDWLSNPSFCVGSITSLSQQTEAAPAHVSEGLPLTRSHLKSESSDESDTNKKLKQTSRKKKKEKKKKRKHQHHKKTKRKHGPSSSSRSETDTDSEKDKPSRGVGGSKKESEEPNQGNNAAADTGHRFVWLEDIQAVTGETFRTDKKPDPANWEYKSLYRGDIARSHLKSESSDESDTNKKLKQTSRKKKKENKKKRK

SEQ ID NO: 827845 - protein, 455 aa, Homo sapiens
HTAIGGCSDPGLPQGVPQQCLAAWAGTLSLKQRSHFFWAHEAAVPCSAEHGGAMPLQLLLLLILLGPGNSLQLWDTWADEAEKALGPLLARDRRQATEYEYLDYDFLPETEPPEMLRNSTDTTPLTGPGTPESTTVEPAARRSTGLDAGGAVTELTTELANMGNLSTDSAAMEIQTTQPAATEAQTTPLAATEAQTTRLTATEAQTTPLAATEAQTTPPAATEAQTTQPTGLEAQTTAPAAMEAQTTAPAAMEAQTTPPAAMEAQTTQTTAMEAQTTAPEATEAQTTQPTATEAQTTPLAAMEALSTEPSATEALSMEPTTKRGLFIPFSVSSVTHKGIPMAASNLSVNYPVGAPDHISVKQCLLAILILALVATIFFVCTVVLAVRLSRKGHMYPVRNYSPTEMVCISSLLPDGGEGPSATANGGLSKAKSPGLTPEPREDREGDDLTLHSFLP

SEQ ID NO: 827846 - protein, 78 aa, Homo sapiens
LILALVATIFFVCTVVLAVRLSRKGHMYPVRNYSPTEMVCISSLLPDGGEGPSATANGGLSKAKKPWQQLAAVGHLGR

SEQ ID NO: 827847 - protein, 455 aa, Homo sapiens; identical to SEQ ID NO: 827845

SEQ ID NO: 827848 - protein, 465 aa, Homo sapiens
HTAIGGCSDPGLPQGVPQQCLAAWAGTLSLKQRSHFFWAHEAAVPCSAEHGGAMPLQLLLLLILLGPGNSLQLWDTWADEAEKALGPLLARDRRQATEYEYLDYDFLPETEPPEMLRNSTDTTPLTGPGTPESTTVEPAARRSTGLDAGGAVTELTTELANMGNLSTDSAAMEIQTTQPAATEAQTTQPVPTEAQTTPLAATEAQTTRLTATEAQTTPLAATEAQTTPPAATEAQTTQPTGLEAQTTAPAAMEAQTTAPAAMEAQTTPPAAMEAQTTQTTAMEAQTTAPEATEAQTTQPTATEAQTTPLAAMEALSTEPSATEALSMEPTTKRGLFIPFSVSSVTHKGIPMAASNLSVNYPVGAPDHISVKQCLLAILILALVATIFFVCTVVLAVRLSRKGHMYPVRNYSPTEMVCISSLLPDGGEGPSATANGGLSKAKSPGLTPEPREDREGDDLTLHSFLP

SEQ ID NO: 827849 - protein, 280 aa, Homo sapiens
REVGAGAGSAVPGPRDPHLAPSVRTSLSAHSADPPAARRQQRQHPGPHRVSAAGADRAVGSGQPPGPRGASCPRGGRCPAERPRSPRTRLQAPVAASRRPTCFCPSGSSGSWPCPSLWPAPRWVTCPRRPGAGRWGEGKRSLGSPPGSARPGVFLSLSLPGSATGSPVQRALGWSPSFSRAGGWRGTRAASECALVGVWSEPTCIPTHVLAARGVVAASRGHLDARPWREVSYAVVSAPGSAAARGGCCVLRARSPGLGFVVVGVVSPSLLPPRTSFVRS

SEQ ID NO: 827850 - protein, 1367 aa, Homo sapiens
MKSGSGGGSPTSLWGLLFLSAALSLWPTSGEICGPGIDIRNDYQQLKRLENCTVIEGYLHILLISKAEDYRSYRFPKLTVITEYLLLFRVAGLESLGDLFPNLTVIRGWKLFYNYALVIFEMTNLKDIGLYNLRNITRGAIRIEKNADLCYLSTVDWSLILDAVSNNYIVGNKPPKECGDLCPGTMEEKPMCEKTTINNEYNYRCWTTNRCQKMCPSTCGKRACTENNECCHPECLGSCSAPDNDTACVACRHYYYAGVCVPACPPNTYRFEGWRCVDRDFCANILSAESSDSEGFVIHDGECMQECPSGFIRNGSQSMYCIPCEGPCPKVCEEEKKTKTIDSVTSAQMLQGCTIFKGNLLINIRRGNNIASELENFMGLIEVVTGYVKIRHSHALVSLSFLKNLRLILGEEQLEGNYSFYVLDNQNLQQLWDWDHRNLTIKAGKMYFAFNPKLCVSEIYRMEEVTGTKGRQSKGDINTRNNGERASCESDVLHFTSTTTSKNRIIITWHRYRPPDYRDLISFTVYYKEAPFKNVTEYDGQDACGSNSWNMVDVDLPPNKDVEPGILLHGLKPWTQYAVYVKAVTLTMVENDHIRGAKSEILYIRTNASVPSIPLDVLSASNSSSQLIVKWNPPSLPNGNLSYYIVRWQRQPQDGYLYRHNYCSKDKIPIRKYADGTIDIEEVTENPKTEVCGGEKGPCCACPKTEAEKQAEKEEAEYRKVFENFLHNSIFVPRPERKRRDVMQVANTTMSSRSRNTTAADTYNITDPEELETEYPFFESRVDNKERTVISNLRPFTLYRIDIHSCNHEAEKLGCSASNFVFARTMPAEGADDIPGPVTWEPRPENSIFLKWPEPENPNGLILMYEIKYGSQVEDQRECVSRQEYRKYGGAKLNRLNPGNYTARIQATSLSGNGSWTDPVFFYVQAKTGYENFIHLIIALPVAVLLIVGGLVIMLYVFHRKRNNSRLGNGVLYASVNPEYFSAADVYVPDEWEVAREKITMSRELGQGSFGMVYEGVAKGVVKDEPETRVAIKTVNEAASMRERIEFLNEASVMKEFNCHHVVRLLGVVSQGQPTLVIMELMTRGDLKSYLRSLRPEMENNPVLAPPSLSKMIQMAGEIADGMAYLNANKFVHRDLAARNCMVAEDFTVKIGDFGMTRDIYETDYYRKGGKGLLPVRWMSPESLKDGVFTTYSDVWSFGVVLWEIATLAEQPYQGLSNEQVLRFVMEGGLLDKPDNCPDMLFELMRMCWQYNPKMRPSFLEIISSIKEEMEPGFREVSFYYSEENKLPEPEELDLEPENMESVPLDPSASSSSLPLPDRHSGHKAENGPGPGVLVLRASFDERQPYAHMNGGRKNERALPLPQSSTC

SEQ ID NO: 827851 - protein, 1344 aa, Homo sapiens
MKSGSGGGSPTSLWGLLFLSAALSLWPTSGEICGPGIDIRNDYQQLKRLENCTVIEGYLHILLISKAEDYRSYRFPKLTVITEYLLLFRVAGLESLGDLFPNLTVIRGWKLFYNYALVIFEMTNLKDIGLYNLRNITRGAIRIEKNADLCYLSTVDWSLILDAVSNNYIVGNKPPKECGDLCPGTMEEKPMCEKTTINNEYNYRCWTTNRCQKMCPSTCGKRACTENNECCHPECLGSCSAPDNDTACVACRHYYYAGVCVPACPPNTYRFEGWRCVDRDFCANILSAESSDSEGFVIHDGECMQECPSGFIRNGSQSMYCIPCEGPCPKVCEEEKKTKTIDSVTSAQMLQGCTIFKGNLLINIRRGNNIASELENFMGLIEVVTGYVKIRHSHALVSLSFLKNLRLILGEEQLEGNYSFYVLDNQNLQQLWDWDHRNLTIKAGKMYFAFNPKLCVSEIYRMEEVTGTKGRQSKGDINTRNNGERASCESDVLHFTSTTTSKNRIIITWHRYRPPDYRDLISFTVYYKEAPFKNVTEYDGQDACGSNSWNMVDVDLPPNKDVEPGILLHGLKPWTQYAVYVKAVTLTMVENDHIRGAKSEILYIRTNASVPSIPLDVLSASNSSSQLIVKWNPPSLPNGNLSYYIVRWQRQPQDGYLYRHNYCSKDKIPIRKYADGTIDIEEVTENPKTEVCGGEKGPCCACPKTEAEKQAEKEEAEYRKVFENFLHNSIFVPRPERKRRDVMQVANTTMSSRSRNTTAADTYNITDPEELETEYPFFESRVDNKERTVISNLRPFTLYRIDIHSCNHEAEKLGCSASNFVFARTMPAEGADDIPGPVTWEPRPENSIFLKWPEPENPNGLILMYEIKYGSQVEDQRECVSRQEYRKYGGAKLNRLNPGNYTARIQATSLSGNGSWTDPVFFYVQAKTGYENFIHLIIALPVAVLLIVGGLVIMLYVFHRKRNNSRLGNGVLYASVNPEYFSAADVYVPDEWEVAREKITMSRELGQGSFGMVYEGVAKGVVKDEPETRVAIKTVNEAASMRERIEFLNEASVMKEFNCHHVVRLLGVVSQGQPTLVIMELMTRGDLKSYLRSLRPEMENNPVLAPPSLSKMIQMAGEIADGMAYLNANKFVHRDLAARNCMVAEDFTVKIGDFGMTRDIYETDYYRKGGKGLLPVRWMSPESLKDGVFTTYSDVWSFGVVLWEIATLAEQPYQGLSNEQVLRFVMEGGLLDKPDNCPDMLFELMRMCWQYNPKMRPSFLEIISSIKEELDLEPENMESVPLDPSASSSSLPLPDRHSGHKAENGPGPGVLVLRASFDERQPYAHMNGGRKNERALPLPQSSTC

SEQ ID NO: 827852 - protein, 764 aa, Homo sapiens
LLTSGDLPASASQSAGIIALSHHIWPRPAIFLIKGTESYYFSLQACITAFIPTLVLAFLFREDKIPIRKYADGTIDIEEVTENPKTEVCGGEKGPCCACPKTEAEKQAEKEEAEYRKVFENFLHNSIFVPRPERKRRDVMQVANTTMSSRSRNTTAADTYNITDPEELETEYPFFESRVDNKERTVISNLRPFTLYRIDIHSCNHEAEKLGCSASNFVFARTMPAEGADDIPGPVTWEPRPENSIFLKWPEPENPNGLILMYEIKYGSQVEDQRECVSRQEYRKYGGAKLNRLNPGNYTARIQATSLSGNGSWTDPVFFYVQAKTGYENFIHLIIALPVAVLLIVGGLVIMLYVFHRKRNNSRLGNGVLYASVNPEYFSAADVYVPDEWEVAREKITMSRELGQGSFGMVYEGVAKGVVKDEPETRVAIKTVNEAASMRERIEFLNEASVMKEFNCHHVVRLLGVVSQGQPTLVIMELMTRGDLKSYLRSLRPEMENNPVLAPPSLSKMIQMAGEIADGMAYLNANKFVHRDLAARNCMVAEDFTVKIGDFGMTRDIYETDYYRKGGKGLLPVRWMSPESLKDGVFTTYSDVWSFGVVLWEIATLAEQPYQGLSNEQVLRFVMEGGLLDKPDNCPDMLFELMRMCWQYNPKMRPSFLEIISSIKEEMEPGFREVSFYYSEENKLPEPEELDLEPENMESVPLDPSASSSSLPLPDRHSGHKAENGPGPGVLVLRASFDERQPYAHMNGGRKNERALPLPQSSTC

SEQ ID NO: 827853 - protein, 403 aa, Homo sapiens
MTVNYRNSNASVNPEYFSAAEVYVPDEWEVAREKITMSRELGQGSFGMVYEGVAKGVVKDEPETRVAIKTVNEAASMRERIEFLNEASVMKEFNCHHVVRLLGVVSQGQPTLVIMELMTRGDLKSYLRSLRPEMENNPVLAPPSLSKMIQMAGEIADGMAYLNANKFVHRDLAARNCMVAEDFTVKIGDFGMTRDIYETDYYRKGGKGLLPVRWMSPESLKDGVFTTYSDVWSFGVVLWEIATLAEQPYQGLSNEQVLRFVMEGGLLDKPDNCPDMLFELMRMCWQYNPKMRPSFLEIISSIKEEMEPGFREVSFYYSEENKLPEPEELDLEPENMESVPLDPSASSSSLPLPDRHSGHKAENGPGPGVLVLRASFDERQPYAHMNGGRKNERALPLPQSSTC

SEQ ID NO: 827854 - protein, 150 aa, Homo sapiens
MKSGSGGGSPTSLWGLLFLSAALSLWPTSGESEYVPAARGHCGNFSSEGLRPVCETRVATVAAVGPPGSGAAGWGAGRLCREGGCSGPGTRARSSGAPRPWPWFCCGRRRRRPLFCRPALPLYVVNKQCRSTFAVFCNLIAFVLVVSGGG

SEQ ID NO: 827855 - protein, 1367 aa, Homo sapiens; identical to SEQ ID NO: 827850

SEQ ID NO: 827856 - protein, 1367 aa, Homo sapiens; identical to SEQ ID NO: 827850

SEQ ID NO: 827857 - protein, 570 aa, Homo sapiens
VWMGGLFSGQPSVGLPPWEPKSNFVTCLNCTEGADDIPGPVTWEPRPENSIFLKWPEPENPNGLILMYEIKYGSQVEDQRECVSRQEYRKYGGAKLNRLNPGNYTARIQATSLSGNGSWTDPVFFYVQAKTGYENFIHLIIALPVAVLLIVGGLVIMLYVFHRKRNNSRLGNGVLYASVNPEYFSAADVYVPDEWEVAREKITMSRELGQGSFGMVYEGVAKGVVKDEPETRVAIKTVNEAASMRERIEFLNEASVMKEFNCHHVVRLLGVVSQGQPTLVIMELMTRGDLKSYLRSLRPEMENNPVLAPPSLSKMIQMAGEIADGMAYLNANKFVHRDLAARNCMVAEDFTVKIGDFGMTRDIYETDYYRKGGKGLLPVRWMSPESLKDGVFTTYSDVWSFGVVLWEIATLAEQPYQGLSNEQVLRFVMEGGLLDKPDNCPDMLFELMRMCWQYNPKMRPSFLEIISSIKEEMEPGFREVSFYYSEENKLPEPEELDLEPENMESVPLDPSASSSSLPLPDRHSGHKAENGPGPGVLVLRASFDERQPYAHMNGGRKNERALPLPQSSTC

SEQ ID NO: 827858 - protein, 290 aa, Homo sapiens
GPPVNKRQGMPRWAASRQLKGPLSVPLGLLHHWLLSLTLSPLVSVCLSLSPSVCLCLPLSLSLFLSPVSVSFYLPLSLSILYVSCFCLYLPLSLSLQASLSLSPESLKDGVFTTYSDVWSFGVVLWEIATLAEQPYQGLSNEQVLRFVMEGGLLDKPDNCPDMLFELMRMCWQYNPKMRPSFLEIISSIKEEMEPGFREVSFYYSEENKLPEPEELDLEPENMESVPLDPSASSSSLPLPDRHSGHKAENGPGPGVLVLRASFDERQPYAHMNGGRKNERALPLPQSSTC

SEQ ID NO: 827859 - protein, 1255 aa, Homo sapiens
MLDPSSSEEESDEGLEEESRDVLVAAGSSQRAPPAPTREGRRDAPGRAGGGGAARSVSPSPSVLSEGRDEPQRQLDDEQERRIRLQLYVFVVRCIAYPFNAKQPTDMARRQQKLNKQQLQLLKERFQAFLNGETQIVADEAFCNAVRSYYEVFLKSDRVARMVQSGGCSANDFREVFKKNIEKRVRSLPEIDGLSKETVLSSWIAKYDAIYRGEEDLCKQPNRMALSAVSELILSKEQLYEMFQQILGIKKLEHQLLYNACQLDNADEQAAQIRRELDGRLQLADKMAKERKFPKFIAKDMENMYIEELRSSVNLLMANLESLPVSKGGPEFKLQKLKRSQNSAFLDIGDENEIQLSKSDVVLSFTLEIVIMEVQGLKSVAPNRIVYCTMEVEGEKLQTDQAEASRPQWGTQGDFTTTHPRPVVKVKLFTESTGVLALEDKELGRVILYPTSNSSKSAELHRMVVPKNSQDSDLKIKLAVRMDKPAHMKHSGYLYALGQKVWKRWKKRYFVLVQVSQYTFAMCSYREKKSEPQELMQLEGYTVDYTDPHPGLQGGCMFFNAVKEGDTVIFASDDEQDRILWVQAMYRATGQSYKPVPAIQTQKLNPKGGTLHADAQLYADRFQKHGMDEFISANPCKLDHAFLFRILQRQTLDHRLNDSYSCLGWFSPGQVFVLDEYCARYGVRGCHRHLCYLAELMEHSENGAVIDPTLLHYSFAFCASHVHGNRPDGIGTVSVEEKERFEEIKERLSSLLENQISHFRYCFPFGRPEGALKATLSLLERVLMKDIATPIPAEEVKKVVRKCLEKAALINYTRLTEYAKIEETMNQASPARKLEEILHLAELCIEVLQQNEEHHAEAFAWWPDLLAEHAEKFWALFTVDMDTALEAQPQDSWDSFPLFQLLNNFLRNDTLLCNGKFHKHLQEIFVPLVVRYVDLMESSIAQSIHRGFEQETWQPVNNGSATSEDLFWKLDALQMFVFDLHWPEQEFAHHLEQRLKLMASDMLEACVKRTRTAFELKLQKASKTTDLRIPASVCTMFNVLVDAKKQSTKLCALDGGQEFGSQWQQYHSKIDDLIDNSVKEIISLLVSKFVSVLEGVLSKLSRYDEGTFFSSILSFTVKAAAKYVDVPKPGMDLADTYIMFVRQNQDILREKVNEEMYIEKLFDQWYSSSMKVICVWLTDRLDLQLHIYQLKTLIKIVKKTYRDFRLQGVLEGTLNSKTYDTVHRRLTVEEATASVSEGGGLQGITMKDSDEEEEG

SEQ ID NO: 827860 - protein, 1255 aa, Homo sapiens; identical to SEQ ID NO: 827859

SEQ ID NO: 827861 - protein, 499 aa, Homo sapiens
DEPSRAKRSWATVHARRVLAAPPLLRALSAPDTSTACREQAGGRCGGLAHLVEEQLWGFFFFHCRIQAFQRETVEMHNLQTLPPKPPKPTTVANNGMNNNMSLQDAEWYWGDISREEVNEKLRDTADGTFLVRDASTKMHGDYTLTLRKGGNNKLIKIFHRDGKYGFSDPLTFSSVVELINHYRNESLAQYNPKLDVKLLYPVSKYQQDQVVKEDNIEAVGKKLHEYNTQFQEKSREYDRLYEEYTRTSQEIQMKRTAIEAFNETIKIFEEQCQTQERYSKEYIEKFKREGNEKEIQRIMHNYDKLKSRISEIIDSRRRLEEDLKKQAAEYREIDKRMNSIKPDLIQLRKTRDQYLMWLTQKGVRQKKLNEWLGNENTEDQYSLVEDDEDLPHHDEKTWNVGSSNRNKAENLLRGKRDGTFLVRESSKQGCYACSVVVDGEVKHCVINKTATGYGFAEPYNLYSSLKELVLHYQHTSLVQHNDSLNVTLAYPVYAQQRR

SEQ ID NO: 827862 - protein, 724 aa, Homo sapiens
MSAEGYQYRALYDYKKEREEDIDLHLGDILTVNKGSLVALGFSDGQEARPEEIGWLNGYNETTGERGDFPGTYVEYIGRKKISPPTPKPRPPRPLPVAPGSSKTEADVEQQALTLPDLAEQFAPPDIAPPLLIKLVEAIEKKGLECSTLYRTQSSSNLAELRQLLDCDTPSVDLEMIDVHVLADAFKRYLLDLPNPVIPAAVYSEMISLAPEVQSSEEYIQLLKKLIRSPSIPHQYWLTLQYLLKHFFKLSQTSSKNLLNARVLSEIFSPMLFRFSAASSDNTENLIKVIEILISTEWNERQPAPALPPKPPKPTTVANNGMNNNMSLQDAEWYWGDISREEVNEKLRDTADGTFLVRDASTKMHGDYTLTLRKGGNNKLIKIFHRDGKYGFSDPLTFSSVVELINHYRNESLAQYNPKLDVKLLYPVSKYQQDQVVKEDNIEAVGKKLHEYNTQFQEKSREYDRLYEEYTRTSQEIQMKRTAIEAFNETIKIFEEQCQTQERYSKEYIEKFKREGNEKEIQRIMHNYDKLKSRISEIIDSRRRLEEDLKKQAAEYREIDKRMNSIKPDLIQLRKTRDQYLMWLTQKGVRQKKLNEWLGNENTEDQYSLVEDDEDLPHHDEKTWNVGSSNRNKAENLLRGKRDGTFLVRESSKQGCYACSVVVDGEVKHCVINKTATGYGFAEPYNLYSSLKELVLHYQHTSLVQHNDSLNVTLAYPVYAQQRR

SEQ ID NO: 827863 - protein, 724 aa, Homo sapiens; identical to SEQ ID NO: 827862

SEQ ID NO: 827864 - protein, 454 aa, Homo sapiens
MYNTVWNMEDLDLEYAKTDINCGTDLMFYIEMDPPALPPKPPKPTTVANNGMNNNMSLQDAEWYWGDISREEVNEKLRDTADGTFLVRDASTKMHGDYTLTLRKGGNNKLIKIFHRDGKYGFSDPLTFSSVVELINHYRNESLAQYNPKLDVKLLYPVSKYQQDQVVKEDNIEAVGKKLHEYNTQFQEKSREYDRLYEEYTRTSQEIQMKRTAIEAFNETIKIFEEQCQTQERYSKEYIEKFKREGNEKEIQRIMHNYDKLKSRISEIIDSRRRLEEDLKKQAAEYREIDKRMNSIKPDLIQLRKTRDQYLMWLTQKGVRQKKLNEWLGNENTEDQYSLVEDDEDLPHHDEKTWNVGSSNRNKAENLLRGKRDGTFLVRESSKQGCYACSVVVDGEVKHCVINKTATGYGFAEPYNLYSSLKELVLHYQHTSLVQHNDSLNVTLAYPVYAQQRR

SEQ ID NO: 827865 - protein, 610 aa, Homo sapiens
QLERSWRKQRQRRGRQASCRRRQARIGHGLECSTLYRTQSSSNLAELRQLLDCDTPSVDLEMIDVHVLADAFKRYLLDLPNPVIPAAVYSEMISLAPEVQSSEEYIQLLKKLIRSPSIPHQYWLTLQYLLKHFFKLSQTSSKNLLNARVLSEIFSPMLFRFSAASSDNTENLIKVIEILISTEWNERQPAPALPPKPPKPTTVANNGMNNNMSLQDAEWYWGDISREEVNEKLRDTADGTFLVRDASTKMHGDYTLTLRKGGNNKLIKIFHRDGKYGFSDPLTFSSVVELINHYRNESLAQYNPKLDVKLLYPVSKYQQDQVVKEDNIEAVGKKLHEYNTQFQEKSREYDRLYEEYTRTSQEIQMKRTAIEAFNETIKIFEEQCQTQERYSKEYIEKFKREGNEKEIQRIMHNYDKLKSRISEIIDSRRRLEEDLKKQAAEYREIDKRMNSIKPDLIQLRKTRDQYLMWLTQKGVRQKKLNEWLGNENTEDQYSLVEDDEDLPHHDEKTWNVGSSNRNKAENLLRGKRDGTFLVRESSKQGCYACSVVVDGEVKHCVINKTATGYGFAEPYNLYSSLKELVLHYQHTSLVQHNDSLNVTLAYPVYAQQRR

SEQ ID NO: 827866 - protein, 705 aa, Homo sapiens
MSAEGYQYRALYDYKKEREEDIDLHLGDILTVNKGSLVALGFSDGQEARPEEIGWLNGYNETTGERGDFPGTYVEYIGRKKISPPTPKPRPPRPLPVAPGSSKTEADVEQQALTLPDLAEQFAPPDIAPPLLIKLVEAIEKKGLECSTLYRTQSSSNLAELRQLLDCDTPSVDLEMIDVHVLADAFKRYLLDLPNPVIPAAVYSEMISLAPEVQSSEEYIQLLKKLIRSPSIPHQYWLTLQYLLKHFFKLSQTSSKNLLNARVLSEIFSPMLFRFSAASSDNTENLIKVIEILISTEWNERQPAPALPPKPPKPTTVANNGMNNNMSLQDAEWYWGDISREEVNEKLRDTADGTFLVRDASTKMHGDYTLTLRKGGNNKLIKIFHRDGKYGFSDPLTFSSVVELINHYRNESLAQYNPKLDVKLLYPVSKYQQDQVVKEDNIEAVGKKLHEYNTQFQEKSREYDRLYEEYTRTSQEIQMKRTAIEAFNETIKIFEEQCQTQERYSKEYIEKFKREGNEKEIQRIMHNYDKLKSRISEIIDSRRRLEEDLKKQAAEYREIDKRMNSIKPDLIQLRKTRDQYLMWLTQKGVRQKKLNEWLGNENTEDQYSLVEDDEDLPHHDEKTWNVGSSNRNKAEQFFFLLSRVDGEVKHCVINKTATGYGFAEPYNLYSSLKELVLHYQHTSLVQHNDSLNVTLAYPVYAQQRR

SEQ ID NO: 827867 - protein, 724 aa, Homo sapiens; identical to SEQ ID NO: 827862

SEQ ID NO: 827868 - protein, 724 aa, Homo sapiens; identical to SEQ ID NO: 827862

SEQ ID NO: 827869 - protein, 724 aa, Homo sapiens; identical to SEQ ID NO: 827862

SEQ ID NO: 827870 - protein, 724 aa, Homo sapiens; identical to SEQ ID NO: 827862

SEQ ID NO: 827871 - protein, 707 aa, Homo sapiens
MSAEGYQYRALYDYKKEREEDIDLHLGDILTVNKGSLVALGFSDGQEARPEEIGWLNGYNETTGERGDFPGTYVEYIGRKKISPPTPKPRPPRPLPVAPGSSKTEADVEQQALTLPDLAEQFAPPDIAPPLLIKLVEAIEKKGLECSTLYRTQSSSNLAELRQLLDCDTPSVDLEMIDVHVLADAFKRYLLDLPNPVIPAAVYSEMISLAPEVQSSEEYIQLLKKLIRSPSIPHQYWLTLQYLLKHFFKLSQTSSKNLLNARVLSEIFSPMLFRFSAASSDNTENLIKVIEILISTEWNERQPAPALPPKPPKPTTVANNGMNNNMSLQDAEWYWGDISREEVNEKLRDTADGTFLVRDASTKMHGDYTLTLRKAREIAKLGSVVELINHYRNESLAQYNPKLDVKLLYPVSKYQQDQVVKEDNIEAVGKKLHEYNTQFQEKSREYDRLYEEYTRTSQEIQMKRTAIEAFNETIKIFEEQCQTQERYSKEYIEKFKREGNEKEIQRIMHNYDKLKSRISEIIDSRRRLEEDLKKQAAEYREIDKRMNSIKPDLIQLRKTRDQYLMWLTQKGVRQKKLNEWLGNENTEDQYSLVEDDEDLPHHDEKTWNVGSSNRNKAENLLRGKRDGTFLVRESSKQGCYACSVVVDGEVKHCVINKTATGYGFAEPYNLYSSLKELVLHYQHTSLVQHNDSLNVTLAYPVYAQQRR

SEQ ID NO: 827872 - protein, 499 aa, Homo sapiens; identical to SEQ ID NO: 827861

SEQ ID NO: 827873 - protein, 605 aa, Homo sapiens
MSAEGYQYRALYDYKKEREEDIDLHLGDILTVNKGSLVALGFSDGQEARPEEIGWLNGYNETTGERGDFPGTYVEYIGRKKISPPTPKPRPPRPLPVAPGSSKTEADVEQQALTLPDLAEQFAPPDIAPPLLIKLVEAIEKKGLECSTLYRTQSSSNLAELRQLLDCDTPSVDLEMIDVHVLADAFKRYLLDLPNPVIPAAVYSEMISLAPEVQSSEEYIQLLKKLIRSPSIPHQYWLTLQYLLKHFFKLSQTSSKNLLNARVLSEIFSPMLFRFSAASSDNTENLIKVIEILISTEWNERQPAPALPPKPPKPTTVANNGMNNNMSLQDAEWYWGDISREEVNEKLRDTADGTFLVRDASTKMHGDYTLTLRKGGNNKLIKIFHRDGKYGFSDPLTFSSVVELINHYRNESLAQYNPKLDVKLLYPVSKYQQDQVVKEDNIEAVGKKLHEYNTQFQEKSREYDRLYEEYTRTSQEIQMKRTAIEAFNETIKIFEEQCQTQERYSKEYIEKFKREGNEKEIQRIMHNYDKLKSRISEIIDSRRRLEEDLKKQAAEYREIDKRMNSIKPDLIQLRKTRDQYLMWLTQKGVRQKKLNEWLGNENTEE

SEQ ID NO: 827874 - protein, 684 aa, Homo sapiens
  misc_feature (667)..(667): Xaa can be any naturally occurring amino acid
MSAEGYQYRALYDYKKEREEDIDLHLGDILTVNKGSLVALGFSDGQEARPEEIGWLNGYNETTGERGDFPGTYVEYIGRKKISPPTPKPRPPRPLPVAPGSSKTEADVEQQALTLPDLAEQFAPPDIAPPLLIKLVEAIEKKGLECSTLYRTQSSSNLAELRQLLDCDTPSVDLEMIDVHVLADAFKRYLLDLPNPVIPAAVYSEMISLAPEVQSSEEYIQLLKKLIRSPSIPHQYWLTLQYLLKHFFKLSQTSSKNLLNARVLSEIFSPMLFRFSAASSDNTENLIKVIEILISTEWNERQPAPALPPKPPKPTTVANNGMNNNMSLQDAEWYWGDISREEVNEKLRDTADGTFLVRDASTKMHGDYTLTLRKGGNNKLIKIFHRDGKYGFSDPLTFSSVVELINHYRNESLAQYNPKLDVKLLYPVSKYQQDQVVKEDNIEAVGKKLHEYNTQFQEKSREYDRLYEEYTRTSQEIQMKRTAIEAFNETIKIFEEQCQTQERYSKEYIEKFKREGNEKEIQRIMHNYDKLKSRISEIIDSRRRLEEDLKKQAAEYREIDKRMNSIKPDLIQLRKTRDQYLMWLTQKGVRQKKLNEWLGNENTEDQYSLVEDDEDLPHHDEKTWNVGSSNRNKAENLLRGKRDGTFLVRESSKQGCYACSVVVDGEXKHCVINELVLHYPPLPW

SEQ ID NO: 827875 - protein, 372 aa, Homo sapiens
MSRLLGGTLERVCKAVLLLCLLHFLVAVILYFDVYAQHLAFFSRFSARGPAHALHPAASSSSSSSNCSRPNATASSSGLPEVPSALPGPTAPTLPPCPDSPPGLVGRLLIEFTSPMPLERVQRENPGVLMGGRYTPPDCTPAQTVAVIIPFRHREHHLRYWLHYLHPILRRQRLRYGVYVINQHGEDTFNRAKLLNVGFLEALKEDAAYDCFIFSDVDLVPMDDRNLYRCGDQPRHFAIAMDKFGFRLPYAGYFGGVSGLSKAQFLRINGFPNEYWGWGGEDDDIFNRISLTGMKISRPDIRIGRYRMIKHDRDKHNEPNPQRFTKIQNTKLTMKRDGIGSVRYQVLEVSRQPLFTNITVDIGRPPSWPPRG

SEQ ID NO: 827876 - protein, 397 aa, Homo sapiens
RTPAPEGGPAAGCPGPLGGPVAACGMSRLLGGTLERVCKAVLLLCLLHFLVAVILYFDVYAQHLAFFSRFSARGPAHALHPAASSSSSSSNCSRPNATASSSGLPEVPSALPGPTAPTLPPCPDSPPGLVGRLLIEFTSPMPLERVQRENPGVLMGGRYTPPDCTPAQTVAVIIPFRHREHHLRYWLHYLHPILRRQRLRYGVYVINQHGEDTFNRAKLLNVGFLEALKEDAAYDCFIFSDVDLVPMDDRNLYRCGDQPRHFAIAMDKFGFRLPYAGYFGGVSGLSKAQFLRINGFPNEYWGWGGEDDDIFNRISLTGMKISRPDIRIGRYRMIKHDRDKHNEPNPQRFTKIQNTKLTMKRDGIGSVRYQVLEVSRQPLFTNITVDIGRPPSWPPRG

SEQ ID NO: 827877 - protein, 321 aa, Homo sapiens
RARARGPGLPLRGAVAREGGGGAVVRGSAGPWVALPGPTAPTLPPCPDSPPGLVGRLLIEFTSPMPLERVQRENPGVLMGGRYTPPDCTPAQTVAVIIPFRHREHHLRYWLHYLHPILRRQRLRYGVYVINQHGEDTFNRAKLLNVGFLEALKEDAAYDCFIFSDVDLVPMDDRNLYRCGDQPRHFAIAMDKFGFRLPYAGYFGGVSGLSKAQFLRINGFPNEYWGWGGEDDDIFNRISLTGMKISRPDIRIGRYRMIKHDRDKHNEPNPQRFTKIQNTKLTMKRDGIGSVRYQVLEVSRQPLFTNITVDIGRPPSWPPRG

SEQ ID NO: 827878 - protein, 372 aa, Homo sapiens; identical to SEQ ID NO: 827875

SEQ ID NO: 827879 - protein, 323 aa, Homo sapiens
MSRLLGGTLERVCKAVLLLCLLHFLVAVILYFDVYAQHLAFFSRFSARGPAHALHPAASSSSSSSNCSRPNATASSSGLPEVPSALPGPTAPTLPPCPDSPPGLVGRLLIEFTSPMPLERVQRENPGVLMGGRYTPPDCTPAQTVAVIIPFRHREHHLRYWLHYLHPILRRQRLRYGVYVINQHGEDTFNRAKLLNVGFLEALKEDAAYDCFIFSDVDLVPMDDRNLYRCGDQPRHFAIAMDKFGFRLPYAGYFGGVSGLSKAQFLRINGFPNEYWGWGGEDDDIFNRISLTGMKISRPDIRIGRYRMIKHDRDKHNEPNPQR

SEQ ID NO: 827880 - protein, 129 aa, Homo sapiens
MSRLLGGTLERVCKAVLLLCLLHFLVAVILYFDVYAQHLAFFSRFSARGPAHALHPAASSSSSSSNCSRPNATASSSGLPEVPSALPGPTAPTLPPCPDSPPGLVGRLLIEFTSPMPLERVAWKGGRYV

SEQ ID NO: 827881 - protein, 372 aa, Homo sapiens; identical to SEQ ID NO: 827875

SEQ ID NO: 827882 - protein, 243 aa, Homo sapiens [sequence omitted]

SEQ ID NO: 827883 - protein, 372 aa, Homo sapiens; identical to SEQ ID NO: 827875

SEQ ID NO: 827884 - protein, 323 aa, Homo sapiens
MSRLLGGTLERVCKAVLLLCLLHFLVAVILYFDVYAQHLAFFSRFSARGPAHALHPAASSSSSSSNCSRPNATASSSGLPEVPSALPGPTAPTLPPCPDSPPGLVGRLLIEFTSPMPLERVQRENPGVLMGGRYTPPDCTPAQTVAVIIPFRHREHHLRYWLHYLHPILRRQRLRYGVYVINQHGEDTFNRAKLLNVGFLEALKEDAAYDCFIFSDVDLVPMDDRNLYRCGDQPRHFAIAMDKFGFRSYAGYLQVGQLRSQFEIRSHETGLGGRSETLTDPEGELQAELKATIKHGITPEDSKRDKGCRAFVAPTKAPPKRNN

SEQ ID NO: 827885 - protein, 127 aa, Homo sapiens
RARARGPGLPLRGAVAREGGGGAVVRGSAGPWVCPAARPRPAPRGGSAPWPAAAAAAAAAGGDPGAAVAADRAAGGGGAGPWGTEPSAAAGAGSPAQVGAASPAEPRAPGQQPDARAHWAGQWPPAG

SEQ ID NO: 827886 - protein, 646 aa, Homo sapiens
TGDCCQGSGEFRMTEEACRTRSQKRALERDPTEDDVESKKIKMERGLLASDLNTDGDMRVTPEPGAGPTQGLLRATEATAMAMGRGEGLVGDGPVDMRTSHSDMKSERRPPSPDVIVLSDNEQPSSPRVNGLTTVALKETSTEALMKSSPEERERMIKQLKEELRLEEAKLVLLKKLRQSQIQKEATAQKPTGSVGSTVTTPPPLVRGTQNIPAGKPSLQTSSARMPGSVIPPPLVRGGQQASSKLGPQASSQVVMPPLVRGAQQIHSIRQHSSTGPPPLLLAPRASVPSVQIQGQRIIQQGLIRVANVPNTSLLVNIPQPTPASLKGTTATSAQANSTPTSVASVVTSAESPASRQAAAKLALRKQLEKTLLEIPPPKPPAPEMNFLPSAANNEFIYLVGLEEVVQNLLETQAGRMSAATVLSREPYMCAQCKTDFTCRWREEKSGAIMCENCMTTNQKKALKVEHTSRLKAAFVKALQQEQEIEQRLLQQGTAPAQAKAEPTAAPHPVLKQVIKPRRKLAFRSGEARDWSNGAVLQASSQLSRGSATTPRGVLHTFSPSPKLQNSASATALVSRTGRHSERTVSAGKGSATSNWKKTPLSTGGTLAFVSPSLAVHKSSSAVDRQREYLLDMIPPRSIPQSATWK

SEQ ID NO: 827887 - protein, 634 aa, Homo sapiens
MTEEACRTRSQKRALERDPTEDDVESKKIKMERGLLASDLNTDGDMRVTPEPGAGPTQGLLRATEATAMAMGRGEGLVGDGPVDMRTSHSDMKSERRPPSPDVIVLSDNEQPSSPRVNGLTTVALKETSTEALMKSSPEERERMIKQLKEELRLEEAKLVLLKKLRQSQIQKEATAQKPTGSVGSTVTTPPPLVRGTQNIPAGKPSLQTSSARMPGSVIPPPLVRGGQQASSKLGPQASSQVVMPPLVRGAQQIHSIRQHSSTGPPPLLLAPRASVPSVQIQGQRIIQQGLIRVANVPNTSLLVNIPQPTPASLKGTTATSAQANSTPTSVASVVTSAESPASRQAAAKLALRKQLEKTLLEIPPPKPPAPEMNFLPSAANNEFIYLVGLEEVVQNLLETQAGRMSAATVLSREPYMCAQCKTDFTCRWREEKSGAIMCENCMTTNQKKALKVEHTSRLKAAFVKALQQEQEIEQRLLQQGTAPAQAKAEPTAAPHPVLKQVIKPRRKLAFRSGEARDWSNGAVLQASSQLSRGSATTPRGVLHTFSPSPKLQNSASATALVSRTGRHSERTVSAGKGSATSNWKKTPLSTGGTLAFVSPSLAVHKSSSAVDRQREYLLDMIPPRSIPQSATWK

SEQ ID NO: 827888 - protein, 634 aa, Homo sapiens; identical to SEQ ID NO: 827887

SEQ ID NO: 827889 - protein, 564 aa, Homo sapiens
LNLEDKTTGSVAHGLPTADSDMKSERRPPSPDVIVLSDNEQPSSPRVNGLTTVALKETSTEALMKSSPEERERMIKQLKEELRLEEAKLVLLKKLRQSQIQKEATAQKPTGSVGSTVTTPPPLVRGTQNIPAGKPSLQTSSARMPGSVIPPPLVRGGQQASSKLGPQASSQVVMPPLVRGAQQIHSIRQHSSTGPPPLLLAPRASVPSVQIQGQRIIQQGLIRVANVPNTSLLVNIPQPTPASLKGTTATSAQANSTPTSVASVVTSAESPASRQAAAKLALRKQLEKTLLEIPPPKPPAPEMNFLPSAANNEFIYLVGLEEVVQNLLETQAGRMSAATVLSREPYMCAQCKTDFTCRWREEKSGAIMCENCMTTNQKKALKVEHTSRLKAAFVKALQQEQEIEQRLLQQGTAPAQAKAEPTAAPHPVLKQVIKPRRKLAFRSGEARDWSNGAVLQASSQLSRGSATTPRGVLHTFSPSPKLQNSASATALVSRTGRHSERTVSAGKGSATSNWKKTPLSTGGTLAFVSPSLAVHKSSSAVDRQREYLLDMIPPRSIPQSATWK

SEQ ID NO: 827890 - protein, 262 aa, Homo sapiens [sequence omitted]

SEQ ID NO: 827891 - protein, 634 aa, Homo sapiens; identical to SEQ ID NO: 827887

SEQ ID NO: 827892 - protein, 386 aa, Homo sapiens
MTEEACRTRSQKRALERDPTEDDVESKKIKMERGLLASDLNTDGDMRVTPEPGAGPTQGLLRATEATAMAMGRGEGLVGDGPVDMRTSHSDMKSERRPPSPDVIVLSDNEQPSSPRVNGLTTVALKETSTEALMKSSPEERERMIKQLKEELRLEEAKLVLLKKLRQSQIQKEATAQKPTGSVGSTVTTPPPLVRGTQNIPAGKPSLQTSSARMPGSVIPPPLVRGGQQASSKLGPQASSQVVMPPLVRGAQQIHSIRQHSSTGPPPLLLAPRASVPSVQIQGQRIIQQGLIRVANVPNTSLLVNIPQPTPASLKGTTATSAQANSTPTSVASVVTSAESPASRQAAAKLALRKQLEKTLLEIPPPNTGHAAEARPQFLAAKFHQG

SEQ ID NO: 827893 - protein, 409 aa, Homo sapiens
MTEEACRTRSQKRALERDPTEDDVESKKIKMERGLLASDLNTDGDMRVTPEPGAGPTQGLLRATEATAMAMGRGEGLVGDGPVDMRTSHSDMKSERRPPSPDVIVLSDNEQPSSPRVNGLTTVALKETSTEALMKSSPEERERMIKQLKEELRLEEAKLVLLKKLRQSQIQKEATAQKPTGSVGSTVTTPPPLVRGTQNIPAGKPSLQTSSARMPGSVIPPPLVRGGQQASSKLGPQASSQVVMPPLVRGAQQIHSIRQHSSTGPPPLLLAPRASVPSVQIQGQRIIQQGLIRVANVPNTSLLVNIPQPTPASLKGTTATSAQANSTPTSVASVVTSAESPASRQAAAKLALRKQLEKTLLEIPPPKPPAPEMNFLPSAANNEFIYLVGLEEVVQNLLETQDVRISVWV

SEQ ID NO: 827894 - protein, 634 aa, Homo sapiens; identical to SEQ ID NO: 827887

SEQ ID NO: 827895 - protein, 101 aa, Homo sapiens
GDGPVLWGSPSVTLGRPADRTDFAFNPRLCEVIKPRRKLAFRSGEARDWSNGAVLQVRTALGAGSLAPPPQPVTTSVADCHAASSVCLSLFLFHFSPQISH

SEQ ID NO: 827896 - protein, 120 aa, Homo sapiens
MYFHKSSKTACFKKSVGGSGPCKSGSWYRWQTSSARMPGSVIPPPLVRGGQQASSKLGPQASSQVVMPPLVRGAQVSRAVHMGETWQPQQSSTVKVGSFPVLGGKVQCAFRSRSIVDLGL

SEQ ID NO: 827897 - protein, 634 aa, Homo sapiens; identical to SEQ ID NO: 827887

SEQ ID NO: 827898 - protein, 646 aa, Homo sapiens; identical to SEQ ID NO: 827886

SEQ ID NO: 827899 - protein, 609 aa, Homo sapiens
MTEEACRTRSQKRALERDPTEDDVESKKIKMERGLLASDLNTDGDMRVTPEPGAGPTQGLLRATEATAMAMGRGEGLVGDGPVDMRTSHSDMKSERRPPSPDVIVLSDNEQPSSPRVNGLTTVALKETSTEALMKSSPEERERMIKQLKEELRLEEAKLVLLKKLRQSQIQKEATAQKPTGSVGSTVTTPPPLVRGTQNIPAGKPSLQTSSARMPGSVIPPPLVRGGQQASSKLGPQASSQVVMPPLVRGAQQIHSIRQHSSTGPPPLLLAPRASVPSVQIQGQRIIQQGLIRVANVPNTSLLVNIPQPTPASLKGTTATSAQANSTPTSVASVVTSAESPASRQAAAKLALRKQLEKTLLEIPPPKPPAPEMNFLPSAANNEFIYLVGLEEVVQNLLETQAGRMSAATVLSREPYMCAQCKTDFTCRWREEKSGAIMCENCMTTNQKKALKVEHTSRLKAAFVKALQQEQEIEQRLLQQGTAPAQAKAEPTAAPHPVLKQASSQLSRGSATTPRGVLHTFSPSPKLQNSASATALVSRTGRHSERTVSAGKGSATSNWKKTPLSTGGTLAFVSPSLAVHKSSSAVDRQREYLLDMIPPRSIPQSATWK

SEQ ID NO: 827900 - protein, 634 aa, Homo sapiens; identical to SEQ ID NO: 827887

SEQ ID NO: 827901 - protein, 121 aa, Homo sapiens
MLQRQDLNSWLQSFIRARGLVPPHRQTRIIAGGPFPWAFFLSLFAFSLPDTSRKVDLGGWFCSWPPCSAPAGTRAAHPGHCDAHGQGQRPGLLNRAGCFIFLLFPVLGSQSLTAFPWRSIS

SEQ ID NO: 827902 - protein, 481 aa, Homo sapiens
MTEEACRTRSQKRALERDPTEDDVESKKIKMERGLLASDLNTDGDMRVTPEPGAGPTQGLLRATEATAMAMGRGEGLVGDGPVDMRTSHSDMKSERRPPSPDVIVLSDNEQPSSPRVNGLTTVALKETSTEALMKSSPEERERMIKQLKEELRLEEAKLVLLKKLRQSQIQKEATAQKPTGSVGSTVTTPPPLVRGTQNIPAGKPSLQTSSARMPGSVIPPPLVRGGQQASSKLGPQASSQVVMPPLVRGAQQIHSIRQHSSTGPPPLLLAPRASVPSVQIQGQRIIQQGLIRVANVPNTSLLVNIPQPTPASLKGTTATSAQANSTPTSVASVVTSAESPASRQAAAKLALRKQLEKTLLEIPPPKPPAPEMNFLPSAANNEFIYLVGLEEVVQNLLETQAGRMSAATVLSREPYMCAQCKTDFTCRWREEKSGAIMCENCMTTNQKKGVPCPRTYVCLHEFWAPLVPIELQPWFSYPCS

SEQ ID NO: 827903 - protein, 196 aa, Homo sapiens
MTEEACRTRSQKRALERDPTEDDVESKKIKMERGLLASDLNTDGDMRVTPEPGAGPTQGLLRATEATAMAMGRGEGLVGDGPVDMRTSHSDMKSERRPPSPDVIVLSDNEQPSSPRVNGLTTVALKETSTEALMKSSPEERERMIKQLKEELRLEEAKLVLLKKLRQSQIQKEATAQKPTGSVGTVDRDPLDHPPT

SEQ ID NO: 827904 - protein, 160 aa, Homo sapiens
MVPSAGQLALFALGIVLAACQALENSTSPLSADPPVAAAVVSHFNDCPDSHTQFCFHGTCRFLVQEDKPACVCHSGYVGARCEHADLLAVVAASQKKQAITALVVVSIVALAVLIITCVLIHCCQVRKHCEWCRALICRHEKPSALLKGRTACCHSETVV

SEQ ID NO: 827905 - protein, 163 aa, Homo sapiens
MVPSAGQLALFALGIVLAACQALENSTSPLSADPPVAAAVVSHFNDCPDSHTQFCFHGTCRFLVQEDKPACVCHSGYVGARCEHADLLAVVAASQKKQAITALVVVSIVALAVLIITCVLIHCCQVRKHCEWCRALICRHEKPSALLKGRTACCHSETGCRLY

SEQ ID NO: 827906 - protein, 162 aa, Homo sapiens
MVPSAGQLALFALGIVLAACQALENSTSPLSADPPVAAAVVSHFNDCPDSHTQFCFHGTCRFLVQEDKPACVCHSGYVGARCEHADLLAVVAASQKKQAITALVVVSIVALAVLIITCVLIHCCQVRKHCEWCRALICRHEKPSALLKGRTACCHSETATLG

SEQ ID NO: 827907 - protein, 123 aa, Homo sapiens
AACQALENSTSPLSGECSCRGCVDRVWEGSGPAAVWLLKSSLPGLLPTEHTPVPESSLPPPQGRGGAHWKVLTAGPRGGCSWPPQGPPLRVSLQLFRQFLWASVPKQGLQDPRAWGQLFSPLS

SEQ ID NO: 827908 - protein, 160 aa, Homo sapiens; identical to SEQ ID NO: 827904

SEQ ID NO: 827909 - protein, 160 aa, Homo sapiens; identical to SEQ ID NO: 827904

SEQ ID NO: 827910 - protein, 160 aa, Homo sapiens; identical to SEQ ID NO: 827904

SEQ ID NO: 827911 - protein, 152 aa, Homo sapiens
NKETEDCEGERSKPRRRWKGWRTHLNMWNPNAGQPGPNPYPPNIGCPGGSNPAHPPPINPPFPPGPCPPPPGAPHGNPAFPPGGPPHPVPQPGYPGCQPLGPYPPPYPPPAPGIPPVNPLAPGMVGPAVIVDKKMQKKMKKAHKKMHKHQKH

SEQ ID NO: 827912 - protein, 304 aa, Homo sapiens
MKRAHPEYSSSDSELDETIEVEKESADENGNLSSALGSMSPTTSSQILARKRRRGIIEKRRRDRINNSLSELRRLVPSAFEKQGSAKLEKAEILQMTVDHLKMLHTAGGKGYFDAHALAMDYRSLGFRECLAEVARYLSIIEGLDASDPLRVRLVSHLNNYASQREAASGAHAGLGHIPWGTVFGHHPHIAHPLLLPQNGHGNAGTTASPTEPHHQGRLGSAHPEAPALRAPPSGSLGPVLPVVTSASKLSPPLLSSVASLSAFPFSFGSFHLLSPNALSPSAPTQAANLGKPYRPWGTEIGAF

SEQ ID NO: 827913 - protein, 72 aa, Homo sapiens
CNQVSSTGGGMGMVTVVLLMSPMMLSASFSAWCMCSISSCCCACSANSSISVFWFPHEYILASGSEMMNSGV

SEQ ID NO: 827914 - protein, 581 aa, Homo sapiens
METRGSRLTGGQGRVYNFLERPTGWKCFVYHFAVFLIVLVCLIFSVLSTIEQYAALATGTLFWMEIVLVVFFGTEYVVRLWSAGCRSKYVGLWGRLRFARKPISIIDLIVVVASMVVLCVGSKGQVFATSAIRGIRFLQILRMLHVDRQGGTWRLLGSVVFIHRQELITTLYIGFLGLIFSSYFVYLAEKDAVNESGRVEFGSYADALWWGVVTVTTIGYGDKVPQTWVGKTIASCFSVFAISFFALPAGILGSGFALKVQQKQRQKHFNRQIPAAASLIQTAWRCYAAENPDSSTWKIYIRKAPRSHTLLSPSPKPKKSVVVKKKKFKLDKDNGVTPGEKMLTVPHITCDPPEERRLDHFSVDGYDSSVRKSPTLLEVSMPHFMRTNSFAEDLDLEGETLLTPITHISQLREHHRATIKVIRRMQYFVAKKKFQQARKPYDVRDVIEQYSQGHLNLMVRIKELQRRLDQSIGKPSLFISVSEKSKDRGSNTIGARLNRVEDKVTQLDQRLALITDMLHQLLSLHGGSTPGSGGPPREGGAHITQPCGSGGSVDPELFLPSNTLPTYEQLTVPRRGPDEGS

SEQ ID NO: 827915 - protein, 712 aa, Homo sapiens
AAGLAAVAARTAPGRSPSLQLPVPPLGPAPRQALLVMAAASSPPRAERKRWGWGRLPGARRGSAGLAKKCPFSLELAEGGPAGGALYAPIAPGAPGPAPPASPAAPAAPPVASDLGPRPPVSLDPRVSIYSTRRPVLARTHVQGRVYNFLERPTGWKCFVYHFAVFLIVLVCLIFSVLSTIEQYAALATGTLFWMEIVLVVFFGTEYVVRLWSAGCRSKYVGLWGRLRFARKPISIIDLIVVVASMVVLCVGSKGQVFATSAIRGIRFLQILRMLHVDRQGGTWRLLGSVVFIHRQELITTLYIGFLGLIFSSYFVYLAEKDAVNESGRVEFGSYADALWWGVVTVTTIGYGDKVPQTWVGKTIASCFSVFAISFFALPAGILGSGFALKVQQKQRQKHFNRQIPAAASLIQTAWRCYAAENPDSSTWKIYIRKAPRSHTLLSPSPKPKKSVVVKKKKFKLDKDNGVTPGEKMLTVPHITCDPPEERRLDHFSVDGYDSSVRKSPTLLEVSMPHFMRTNSFAEDLDLEGETLLTPITHISQLREHHRATIKVIRRMQYFVAKKKFQQARKPYDVRDVIEQYSQGHLNLMVRIKELQRRLDQSIGKPSLFISVSEKSKDRGSNTIGARLNRVEDKVTQLDQRLALITDMLHQLLSLHGGSTPGSGGPPREGGAHITQPCGSGGSVDPELFLPSNTLPTYEQLTVPRRGPDEGS

SEQ ID NO: 827916 - protein, 153 aa, Homo sapiens [sequence omitted]

SEQ ID NO: 827917 - protein, 165 aa, Homo sapiens
AAGLAAVAARTAPGRSPSLQLPVPPLGPAPRQALLVMAAASSPPRAERKRWGWGRLPGARRGSAGLAKKCPFSLELAEGGPAGGALYAPIAPGAPGPAPPASPAAPAAPPVASDLGPRPPVSLDPRVSIYSTRRPVLARTHVQGRVYNFLERPTGWKCFVYHFAV

SEQ ID NO: 827918 - protein, 549 aa, Homo sapiens
MDFLIVLVCLIFSVLSTIEQYAALATGTLFWMEIVLVVFFGTEYVVRLWSAGCRSKYVGLWGRLRFARKPISIIDLIVVVASMVVLCVGSKGQVFATSAIRGIRFLQILRMLHVDRQGGTWRLLGSVVFIHRQELITTLYIGFLGLIFSSYFVYLAEKDAVNESGRVEFGSYADALWWGVVTVTTIGYGDKVPQTWVGKTIASCFSVFAISFFALPAGILGSGFALKVQQKQRQKHFNRQIPAAASLIQTAWRCYAAENPDSSTWKIYIRKAPRSHTLLSPSPKPKKSVVVKKKKFKLDKDNGVTPGEKMLTVPHITCDPPEERRLDHFSVDGYDSSVRKSPTLLEVSMPHFMRTNSFAEDLDLEGETLLTPITHISQLREHHRATIKVIRRMQYFVAKKKFQQARKPYDVRDVIEQYSQGHLNLMVRIKELQRRLDQSIGKPSLFISVSEKSKDRGSNTIGARLNRVEDKVTQLDQRLALITDMLHQLLSLHGGSTPGSGGPPREGGAHITQPCGSGGSVDPELFLPSNTLPTYEQLTVPRRGPDEGS

SEQ ID NO: 827919 - protein, 549 aa, Homo sapiens; identical to SEQ ID NO: 827918

SEQ ID NO: 827920 - protein, 743 aa, Homo sapiens
AAGLAAVAARTAPGRSPSLQLPVPPLGPAPRQALLVMAAASSPPRAERKRWGWGRLPGARRGSAGLAKKCPFSLELAEGGPAGGALYAPIAPGAPGPAPPASPAAPAAPPVASDLGPRPPVSLDPRVSIYSTRRPVLARTHVQGRVYNFLERPTGWKCFVYHFAVIQEIKHTVTRVQSSVKRSSGYTPRGFSFDPGFLIVLVCLIFSVLSTIEQYAALATGTLFWMEIVLVVFFGTEYVVRLWSAGCRSKYVGLWGRLRFARKPISIIDLIVVVASMVVLCVGSKGQVFATSAIRGIRFLQILRMLHVDRQGGTWRLLGSVVFIHRQELITTLYIGFLGLIFSSYFVYLAEKDAVNESGRVEFGSYADALWWGVVTVTTIGYGDKVPQTWVGKTIASCFSVFAISFFALPAGILGSGFALKVQQKQRQKHFNRQIPAAASLIQTAWRCYAAENPDSSTWKIYIRKAPRSHTLLSPSPKPKKSVVVKKKKFKLDKDNGVTPGEKMLTVPHITCDPPEERRLDHFSVDGYDSSVRKSPTLLEVSMPHFMRTNSFAEDLDLEGETLLTPITHISQLREHHRATIKVIRRMQYFVAKKKFQQARKPYDVRDVIEQYSQGHLNLMVRIKELQRRLDQSIGKPSLFISVSEKSKDRGSNTIGARLNRVEDKVTQLDQRLALITDMLHQLLSLHGGSTPGSGGPPREGGAHITQPCGSGGSVDPELFLPSNTLPTYEQLTVPRRGPDEGS

SEQ ID NO: 827921 - protein, 680 aa, Homo sapiens
AAGLAAVAARTAPGRSPSLQLPVPPLGPAPRQALLVMAAASSPPRAERKRWGWGRLPGARRGSAGLAKKCPFSLELAEGGPAGGALYAPIAPGAPGPAPPASPAAPAAPPVASDLGPRPPVSLDPRVSIYSTRRPVLARTHVQGRVYNFLERPTGWKCFVYHFAVFLIVLVCLIFSVLSTIEQYAALATGTLFWMEIVLVVFFGTEYVVRLWSAGCRSKYVGLWGRLRFARKPISIIDLIVVVASMVVLCVGSKGQVFATSAIRGIRFLQILRMLHVDRQGGTWRLLGSVVFIHRQELITTLYIGFLGLIFSSYFVYLAEKDAVNESGRVEFGSYADALWWGVVTVTTIGYGDKVPQTWVGKTIASCFSVFAISFFALPATAWRCYAAENPDSSTWKIYIRKAPRSHTLLSPSPKPKKSVVVKKKKFKLDKDNGVTPGEKMLTVPHITCDPPEERRLDHFSVDGYDSSVRKSPTLLEVSMPHFMRTNSFAEDLDLEGETLLTPITHISQLREHHRATIKVIRRMQYFVAKKKFQQARKPYDVRDVIEQYSQGHLNLMVRIKELQRRLDQSIGKPSLFISVSEKSKDRGSNTIGARLNRVEDKVTQLDQRLALITDMLHQLLSLHGGSTPGSGGPPREGGAHITQPCGSGGSVDPELFLPSNTLPTYEQLTVPRRGPDEGS

SEQ ID NO: 827922 - protein, 549 aa, Homo sapiens; identical to SEQ ID NO: 827918

SEQ ID NO: 827923 - protein, 471 aa, Homo sapiens
TLEDLWSLYRGLQGAECLPRRHQGIRFLQILRMLHVDRQGGTWRLLGSVVFIHRQELITTLYIGFLGLIFSSYFVYLAEKDAVNESGRVEFGSYADALWWGVVTVTTIGYGDKVPQTWVGKTIASCFSVFAISFFALPAGILGSGFALKVQQKQRQKHFNRQIPAAASLIQTAWRCYAAENPDSSTWKIYIRKAPRSHTLLSPSPKPKKSVVVKKKKFKLDKDNGVTPGEKMLTVPHITCDPPEERRLDHFSVDGYDSSVRKSPTLLEVSMPHFMRTNSFAEDLDLEGETLLTPITHISQLREHHRATIKVIRRMQYFVAKKKFQQARKPYDVRDVIEQYSQGHLNLMVRIKELQRRLDQSIGKPSLFISVSEKSKDRGSNTIGARLNRVEDKVTQLDQRLALITDMLHQLLSLHGGSTPGSGGPPREGGAHITQPCGSGGSVDPELFLPSNTLPTYEQLTVPRRGPDEGS

SEQ ID NO: 827924 - protein, 545 aa, Homo sapiens
AAGLAAVAARTAPGRSPSLQLPVPPLGPAPRQALLVMAAASSPPRAERKRWGWGRLPGARRGSAGLAKKCPFSLELAEGGPAGGALYAPIAPGAPGPAPPASPAAPAAPPVASDLGPRPPVSLDPRVSIYSTRRPVLARTHVQGRVYNFLERPTGWKCFVYHFAVFLIVLVCLIFSVLSTIEQYAALATGTLFWMEIVLVVFFGTEYVVRLWSAGCRSKYVGLWGRLRFARKPISIIDLIVVVASMVVLCVGSKGQVFATSAIRGIRFLQILRMLHVDRQGGTWRLLGSVVFIHRQELITTLYIGFLGLIFSSYFVYLAEKDAVNESGRVEFGSYADALWWGVVTVTTIGYGDKVPQTWVGKTIASCFSVFAISFFALPAGILGSGFALKVQQKQRQKHFNRQIPAAASLIQTAWRCYAAENPDSSTWKIYIRKAPRSHTLLSPSPKPKKSVVVKKKKFKLDKDNGVTPGEKMLTVPHITCDPPEERRLDHFSVDGYDSSVRKSPTLLEVSMPHFMRTNSFAEDLDLEGETLLTPITHISHLRKC

SEQ ID NO: 827925 - protein, 179 aa, Homo sapiens
QQQPRLIVWAGVTGAVEWLCPQPGVRPVSPWEWNGMGLHSWQCGQLRQPPRALRGQRWRAWSRMEPRSPAAAMPGHRTTPEKSKDRGSNTIGARLNRVEDKVTQLDQRLALITDMLHQLLSLHGGSTPGSGGPPREGGAHITQPCGSGGSVDPELFLPSNTLPTYEQLTVPRRGPDEGS

SEQ ID NO: 827926 - protein, 458 aa, Homo sapiens
AAGLAAVAARTAPGRSPSLQLPVPPLGPAPRQALLVMAAASSPPRAERKRWGWGRLPGARRGSAGLAKKCPFSLELAEGGPAGGALYAPIAPGAPGPAPPASPAAPAAPPVASDLGPRPPVSLDPRVSIYSTRRPVLARTHVQGRVYNFLERPTGWKCFVYHFAVFLIVLVCLIFSVLSTIEQYAALATGTLFWMEIVLVVFFGTEYVVRLWSAGCRSKYVGLWGRLRFARKPISIIDLIVVVASMVVLCVGSKGQVFATSAIRGIRFLQILRMLHVDRQGGTWRLLGSVVFIHRQELITTLYIGFLGLIFSSYFVYLAEKDAVNESGRVEFGSYADALWWGVVTVTTIGYGDKVPQTWVGKTIASCFSVFAISFFALPAGILGSGFALKVQQKQRQKHFNRQIPAAASLIQTAWRCYAAENPDSSTWKIYIRKAPRSHTLLSPSPKPKKSVVVSSPP

SEQ ID NO: 827927 - protein, 584 aa, Homo sapiens
MNSPGGRGKKKGSGGASNPVPPRPPPPCLAPAPPAAGPAPPPESPHKRNLYYFSYPLFVGFALLRLVAFHLGLLFVWLCQRFSRALMAAKRSSGAAPAPASASAPAPVPGGEAERVRVFHKQAFEYISIALRIDEDEKAGQKEQAVEWYKKGIEELEKGIAVIVTGQGEQCERARRLQAKMMTNLVMAKDRLQLLESGAVPKRKDPLTHTSNSLPRSKTVMKTGSAGLSGHHRAPSYSGLSMVSGVKQGSGPAPTTHKGTPKTNRTNKPSTPTTATRKKKDLKNFRNVDSNLANLIMNEIVDNGTAVKFDDIAGQDLAKQALQEIVILPSLRPELFTGLRAPARGLLLFGPPGNGKTMLAKAVAAESNATFFNISAASLTSKYVGEGEKLVRALFAVARELQPSIIFIDEVDSLLCERREGEHDASRRLKTEFLIEFDGVQSAGDDRVLVMGATNRPQELDEAVLRRFIKRVYVSLPNEETRLLLLKNLLCKQGSPLTQKELAQLARMTDGYSGSDLTALAKDAALGPIRELKPEQVKNMSASEMRNIRLSDFTESLKKIKRSVSPQTLEAYIRWNKDFGDTTV

SEQ ID NO: 827928 - protein, 616 aa, Homo sapiens
MNSPGGRGKKKGSGGASNPVPPRPPPPCLAPAPPAAGPAPPPESPHKRNLYYFSYPLFVGFALLRLVAFHLGLLFVWLCQRFSRALMAAKRSSGAAPAPASASAPAPVPGGEAERVRVFHKQAFEYISIALRIDEDEKAGQKEQAVEWYKKGIEELEKGIAVIVTGQGEQCERARRLQAKMMTNLVMAKDRLQLLEKMQPVLPFSKSQTDVYNDSTNLACRNGHLQSESGAVPKRKDPLTHTSNSLPRSKTVMKTGSAGLSGHHRAPSYSGLSMVSGVKQGSGPAPTTHKGTPKTNRTNKPSTPTTATRKKKDLKNFRNVDSNLANLIMNEIVDNGTAVKFDDIAGQDLAKQALQEIVILPSLRPELFTGLRAPARGLLLFGPPGNGKTMLAKAVAAESNATFFNISAASLTSKYVGEGEKLVRALFAVARELQPSIIFIDEVDSLLCERREGEHDASRRLKTEFLIEFDGVQSAGDDRVLVMGATNRPQELDEAVLRRFIKRVYVSLPNEETRLLLLKNLLCKQGSPLTQKELAQLARMTDGYSGSDLTALAKDAALGPIRELKPEQVKNMSASEMRNIRLSDFTESLKKIKRSVSPQTLEAYIRWNKDFGDTTV

SEQ ID NO: 827929 - protein, 616 aa, Homo sapiens; identical to SEQ ID NO: 827928

SEQ ID NO: 827930 - protein, 616 aa, Homo sapiens; identical to SEQ ID NO: 827928

SEQ ID NO: 827931 - protein, 616 aa, Homo sapiens; identical to SEQ ID NO: 827928

SEQ ID NO: 827932 - protein, 279 aa, Homo sapiens
MVKPHLDAATAWAGLRLGTSHRLVRATRRMAETLRRVLTRGGAAWSGEENMPAAGPPLLLLGTPGSGKTALLFAAALEAAGEGQGPVLFLTRRPLQSMPRGTGTTLDPMRLQKIRFQYPPSTRELFRLLCSAHEAPGPAPSLLLLDGLEEYLAEDPEPQEAAYLIALLLDTAAHFSHRLGPGRDCGLMVALQTQEEAGSGDVLHLALLQRYFPAQCWLQPDAPGPGEHGLRACLEPGGLGPRTEWWVTFRSDGEMMIAPWPTQAGDPSSGKGSSSGGQP

SEQ ID NO: 827933 - protein, 168 aa, Homo sapiens
MKIRFQYPPSTRELFRLLCSAHEAPGPAPSLLLLDGLEEYLAEDPEPQEAAYLIALLLDTAAHFSHRLGPGRDCGLMVALQTQEEAGSGDVLHLALLQRYFPAQCWLQPDAPGPGEHGLRACLEPGGLGPRTEWWVTFRSDGEMMIAPWPTQAGDPSSGKGSSSGGQP

SEQ ID NO: 827934 - protein, 215 aa, Homo sapiens
MVKPHLDAATAWAGLRLGTSHRLVRATRRMAETLRRVLTRGGAAWSGEENMPAAGPPLLLLGTPGSGKTALLFAAALEAAGEGQGPVLFLTRRPLQSMPRGTGTTLDPMRLQKIRFQYPPSTRELFRLLCSAHEAPGPAPSLLLLDGLEEYLAEDPEPPSRPRRKQVVGTSCTWHCSSGIFLPSAGCSQMHQVQESTASEPAWSQAGWAPEQSGG

SEQ ID NO: 827935 - protein, 2941 aa, Homo sapiens
GAGGGAAAAVDPAAGRELGEMRSPATGVPLPTPPPPLLLLLLLLLPPPLLGDQVGPCRSLGSRGRGSSGACAPMGWLCPSSASNLWLYTSRCRDAGTELTGHLVPHHDGLRVWCPESEAHIPLPPAPEGCPWSCRLLGIGGHLSPQGKLTLPEEHPCLKAPRLRCQSCKLAQAPGLRAGERSPEESLGGRRKRNVNTAPQFQPPSYQATVPENQPAGTPVASLRAIDPDEGEAGRLEYTMDALFDSRSNQFFSLDPVTGAVTTAEELDRETKSTHVFRVTAQDHGMPRRSALATLTILVTDTNDHDPVFEQQEYKESLRENLEVGYEVLTVRATDGDAPPNANILYRLLEGSGGSPSEVFEIDPRSGVIRTRGPVDREEVESYQLTVEASDQGRDPGPRSTTAAVFLSVEDDNDNAPQFSEKRYVVQVREDVTPGAPVLRVTASDRDKGSNAVVHYSIMSGNARGQFYLDAQTGALDVVSPLDYETTKEYTLRVRAQDGGRPPLSNVSGLVTVQVLDINDNAPIFVSTPFQATVLESVPLGYLVLHVQAIDADAGDNARLEYRLAGVGHDFPFTINNGTGWISVAAELDREEVDFYSFGVEARDHGTPALTASASVSVTVLDVNDNNPTFTQPEYTVRLNEDAAVGTSVVTVSAVDRDAHSVITYQITSGNTRNRFSITSQSGGGLVSLALPLDYKLERQYVLAVTASDGTRQDTAQIVVNVTDANTHRPVFQSSHYTVNVNEDRPAGTTVVLISATDEDTGENARITYFMEDSIPQFRIDADTGAVTTQAELDYEDQVSYTLAITARDNGIPQKSDTTYLEILVNDVNDNAPQFLRDSYQGSVYEDVPPFTSVLQISATDRDSGLNGRVFYTFQGGDDGDGDFIVESTSGIVRTLRRLDRENVAQYVLRAYAVDKGMPPARTPMEVTVTVLDVNDNPPVFEQDEFDVFVEENSPIGLAVARVTATDPDEGTNAQIMYQIVEGNIPEVFQLDIFSGELTALVDLDYEDRPEYVLVIQATSAPLVSRATVHVRLLDRNDNPPVLGNFEILFNNYVTNRSSSFPGGAIGRVPAHDPDISDSLTYSFERGNELSLVLLNASTGELKLSRALDNNRPLEAIMSVLVSDGVHSVTAQCALRVTIITDEMLTHSITLRLEDMSPERFLSPLLGLFIQAVAATLATPPDHVVVFNVQRDTDAPGGHILNVSLSVGQPPGPGGGPPFLPSEDLQERLYLNRSLLTAISAQRVLPFDDNICLREPCENYMRCVSVLRFDSSAPFIASSSVLFRPIHPVGGLRCRCPPGFTGDYCETEVDLCYSRPCGPHGRCRSREGGYTCLCRDGYTGEHCEVSARSGRCTPGVCKNGGTCVNLLVGGFKCDCPSGDFEKPYCQVTTRSFPAHSFITFRGLRQRFHFTLALSFATKERDGLLLYNGRFNEKHDFVALEVIQEQVQLTFSAGESTTTVSPFVPGGVSDGQWHTVQLKYYNKPLLGQTGLPQGPSEQKVAVVTVDGCDTGVALRFGSVLGNYSCAAQGTQGGSKKSLDLTGPLLLGGVPDLPESFPVRMRQFVGCMRNLQVDSRHIDMADFIANNGTVPGCPAKKNVCDSNTCHNGGTCVNQWDAFSCECPLGFGGKSCAQEMANPQHFLGSSLVAWHGLSLPISQPWYLSLMFRTRQADGVLLQAITRGRSTITLQLREGHVMLSVEGTGLQASSLRLEPGRANDGDWHHAQLALGASGGPGHAILSFDYGQQRAEGNLGPRLHGLHLSNITVGGIPGPAGGVARGFRGCLQGVRVSDTPEGVNSLDPSHGESINVEQGCSLPDPCDSNPCPANSYCSNDWDSYSCSCDPGYYGDNCTNVCDLNPCEHQSVCTRKPSAPHGYTCECPPNYLGPYCETRIDQPCPRGWWGHPTCGPCNCDVSKGFDPDCNKTSGECHCKENHYRPPGSPTCLLCDCYPTGSLSRVCDPEDGQCPCKPGVIGRQCDRCDNPFAEVTTNGCEVNYDSCPRAIEAGIWWPRTRFGLPAAAPCPKGSFGTAVRHCDEHRGWLPPNLFNCTSITFSELKGFAERLQRNESGLDSGRSQQLALLLRNATQHTAGYFGSDVKVAYQLATRLLAHESTQRGFGLSATQDVHFTENLLRVGSALLDTANKRHWELIQQTEGGTAWLLQHYEAYASALAQNMRHTYLSPFTIVTPNIVISVVRLDKGNFAGAKLPRYEALRGEQPPDLETTVILPESVFRETPPVVRPAGPGEAQEPEELARRQRRHPELSQGEAVASVIIYRTLAGLLPHNYDPDKRSLRVPKRPIINTPVVSISVHDDEELLPRALDKPVTVQFRLLETEERTKPICVFWNHSILVSGTGGWSARGCEVVFRNESHVSCQCNHMTSFAVLMDVSRRENGEILPLKTLTYVALGVTLAALLLTFFFLTLLRILRSNQHGIRRNLTAALGLAQLVFLLGINQADLPFACTVIAILLHFLYLCTFSWALLEALHLYRALTEVRDVNTGPMRFYYMLGWGVPAFITGLAVGLDPEGYGNPDFCWLSIYDTLIWSFAGPVAFAVSMSVFLYILAARASCAAQRQGFEKKGPVSGLQPSFAVLLLLSATWLLALLSVNSDTLLFHYLFATCNCIQGPFIFLSYVVLSKEVRKALKLACSRKPSPDPALTTKSTLTSSYNCPSPYADGRLYQPYGDSAGSLHSTSRSGKSQPSYIPFLLREESALNPGQGPPGLGDPGSLFLEGQDQQHDPDTDSDSDLSLEDDQSGSYASTHSSDSEEEEEEEEEEAAFPGEQGWDSLLGPGAERLPLHSTPKDGGPGPGKAPWPGDFGTTAKESSGNGAPEERLRENGDALSREGSLGPLPGSSAQPHKGILKKKCLPTISEKSSLLRLPLEQCTGSSRGSSASEGSRGGPPPRPPPRQSLQEQLNGVMPIAMSIKAGTVDEDSSGSDSDETSI

SEQ ID NO: 827936 - protein, 1140 aa, Homo sapiens
  misc_feature (2)..(2): Xaa can be any naturally occurring amino acid
CXAACGRLEDPRIPAFAIWEAEAGLLKPRSSRPTWATWRNPVSTKNTKSRQMWWYVPMVPATQEAEVGGLLEPRGLRLQRAVIMPLHSKSAKCRNWRQFLHFADLAHCDVSKGFDPDCNKTSGECHCKENHYRPPGSPTCLLCDCYPTGSLSRVCDPEDGQCPCKPGVIGRQCDRCDNPFAEVTTNGCEVNYDSCPRAIEAGIWWPRTRFGLPAAAPCPKGSFGTAVRHCDEHRGWLPPNLFNCTSITFSELKGFAERLQRNESGLDSGRSQQLALLLRNATQHTAGYFGSDVKVAYQLATRLLAHESTQRGFGLSATQDVHFTENLLRVGSALLDTANKRHWELIQQTEGGTAWLLQHYEAYASALAQNMRHTYLSPFTIVTPNIVISVVRLDKGNFAGAKLPRYEALRGEQPPDLETTVILPESVFRETPPVVRPAGPGEAQEPEELARRQRRHPELSQGEAVASVIIYRTLAGLLPHNYDPDKRSLRVPKRPIINTPVVSISVHDDEELLPRALDKPVTVQFRLLETEERTKPICVFWNHSILVSGTGGWSARGCEVVFRNESHVSCQCNHMTSFAVLMDVSRRENGEILPLKTLTYVALGVTLAALLLTFFFLTLLRILRSNQHGIRRNLTAALGLAQLVFLLGINQADLPFACTVIAILLHFLYLCTFSWALLEALHLYRALTEVRDVNTGPMRFYYMLGWGVPAFITGLAVGLDPEGYGNPDFCWLSIYDTLIWSFAGPVAFAVSMSVFLYILAARASCAAQRQGFEKKGPVSGLQPSFAVLLLLSATWLLALLSVNSDTLLFHYLFATCNCIQGPFIFLSYVVLSKEVRKALKLACSRKPSPDPALTTKSTLTSSYNCPSPYADGRLYQPYGDSAGSLHSTSRSGKSQPSYIPFLLREESALNPGQGPPGLGDPGSLFLEGQDQQHDPDTDSDSDLSLEDDQSGSYASTHSSDSEEEEEEEEEEAAFPGEQGWDSLLGPGAERLPLHSTPKDGGPGPGKAPWPGDFGTTAKESSGNGAPEERLRENGDALSREGSLGPLPGSSAQPHKGILKKKCLPTISEKSSLLRLPLEQCTGSSRGSSASEGSRGGPPPRPPPRQSLQEQLNGVMPIAMSIKAGTVDEDSSGSDSDETSI

SEQ ID NO: 827937 - protein, 1135 aa, Homo sapiens
  misc_feature (7)..(7): Xaa can be any naturally occurring amino acid
  misc_feature (10)..(10): Xaa can be any naturally occurring amino acid
AFCCPAXDSXRSPPIPALCRFGNVSVLLWYMEFLKWVPKHATPLSLKPLKVMRHHSCDYVVICQLYDFKMVRLPHELDLITSLQIGKVQELAPIPALCRFGNCDVSKGFDPDCNKTSGECHCKENHYRPPGSPTCLLCDCYPTGSLSRVCDPEDGQCPCKPGVIGRQCDRCDNPFAEVTTNGCEVNYDSCPRAIEAGIWWPRTRFGLPAAAPCPKGSFGTAVRHCDEHRGWLPPNLFNCTSITFSELKGFAERLQRNESGLDSGRSQQLALLLRNATQHTAGYFGSDVKVAYQLATRLLAHESTQRGFGLSATQDVHFTENLLRVGSALLDTANKRHWELIQQTEGGTAWLLQHYEAYASALAQNMRHTYLSPFTIVTPNIVISVVRLDKGNFAGAKLPRYEALRGEQPPDLETTVILPESVFRETPPVVRPAGPGEAQEPEELARRQRRHPELSQGEAVASVIIYRTLAGLLPHNYDPDKRSLRVPKRPIINTPVVSISVHDDEELLPRALDKPVTVQFRLLETEERTKPICVFWNHSILVSGTGGWSARGCEVVFRNESHVSCQCNHMTSFAVLMDVSRRENGEILPLKTLTYVALGVTLAALLLTFFFLTLLRILRSNQHGIRRNLTAALGLAQLVFLLGINQADLPFACTVIAILLHFLYLCTFSWALLEALHLYRALTEVRDVNTGPMRFYYMLGWGVPAFITGLAVGLDPEGYGNPDFCWLSIYDTLIWSFAGPVAFAVSMSVFLYILAARASCAAQRQGFEKKGPVSGLQPSFAVLLLLSATWLLALLSVNSDTLLFHYLFATCNCIQGPFIFLSYVVLSKEVRKALKLACSRKPSPDPALTTKSTLTSSYNCPSPYADGRLYQPYGDSAGSLHSTSRSGKSQPSYIPFLLREESALNPGQGPPGLGDPGSLFLEGQDQQHDPDTDSDSDLSLEDDQSGSYASTHSSDSEEEEEEEEEEAAFPGEQGWDSLLGPGAERLPLHSTPKDGGPGPGKAPWPGDFGTTAKESSGNGAPEERLRENGDALSREGSLGPLPGSSAQPHKGILKKKCLPTISEKSSLLRLPLEQCTGSSRGSSASEGSRGGPPPRPPPRQSLQEQLNGVMPIAMSIKAGTVDEDSSGSDSDETSI

SEQ ID NO: 827938 - protein, 2474 aa, Homo sapiens
GAGGGAAAAVDPAAGRELGEMRSPATGVPLPTPPPPLLLLLLLLLPPPLLGDQVGPCRSLGSRGRGSSGACAPMGWLCPSSASNLWLYTSRCRDAGTELTGHLVPHHDGLRVWCPESEAHIPLPPAPEGCPWSCRLLGIGGHLSPQGKLTLPEEHPCLKAPRLRCQSCKLAQAPGLRAGERSPEESLGGRRKRNVNTAPQFQPPSYQATVPENQPAGTPVASLRAIDPDEGEAGRLEYTMDALFDSRSNQFFSLDPVTGAVTTAEELDRETKSTHVFRVTAQDHGMPRRSALATLTILVTDTNDHDPVFEQQEYKESLRENLEVGYEVLTVRATDGDAPPNANILYRLLEGSGGSPSEVFEIDPRSGVIRTRGPVDREEVESYQLTVEASDQGRDPGPRSTTAAVFLSVEDDNDNAPQFSEKRYVVQVREDVTPGAPVLRVTASDRDKGSNAVVHYSIMSGNARGQFYLDAQTGALDVVSPLDYETTKEYTLRVRAQDGGRPPLSNVSGLVTVQVLDINDNAPIFVSTPFQATVLESVPLGYLVLHVQAIDADAGDNARLEYRLAGVGHDFPFTINNGTGWISVAAELDREEVDFYSFGVEARDHGTPALTASASVSVTVLDVNDNNPTFTQPEYTVRLNEDAAVGTSVVTVSAVDRDAHSVITYQITSGNTRNRFSITSQSGGGLVSLALPLDYKLERQYVLAVTASDGTRQDTAQIVVNVTDANTHRPVFQSSHYTVNVNEDRPAGTTVVLISATDEDTGENARITYFMEDSIPQFRIDADTGAVTTQAELDYEDQVSYTLAITARDNGIPQKSDTTYLEILVNDVNDNAPQFLRDSYQGSVYEDVPPFTSVLQISATDRDSGLNGRVFYTFQGGDDGDGDFIVESTSGIVRTLRRLDRENVAQYVLRAYAVDKGMPPARTPMEVTVTVLDVNDNPPVFEQDEFDVFVEENSPIGLAVARVTATDPDEGTNAQIMYQIVEGNIPEVFQLDIFSGELTALVDLDYEDRPEYVLVIQATSAPLVSRATVHVRLLDRNDNPPVLGNFEILFNNYVTNRSSSFPGGAIGRVPAHDPDISDSLTYSFERGNELSLVLLNASTGELKLSRALDNNRPLEAIMSVLVSDGVHSVTAQCALRVTIITDEMLTHSITLRLEDMSPERFLSPLLGLFIQAVAATLATPPDHVVVFNVQRDTDAPGGHILNVSLSVGQPPGPGGGPPFLPSEDLQERLYLNRSLLTAISAQRVLPFDDNICLREPCENYMRCVSVLRFDSSAPFIASSSVLFRPIHPVGGLRCRCPPGFTGDYCETEVDLCYSRPCGPHGRCRSREGGYTCLCRDGYTGEHCEVSARSGRCTPGVCKNGGTCVNLLVGGFKCDCPSGDFEKPYCQVTTRSFPAHSFITFRGLRQRFHFTLALSFATKERDGLLLYNGRFNEKHDFVALEVIQEQVQLTFSAGESTTTVSPFVPGGVSDGQWHTVQLKYYNKPLLGQTGLPQGPSEQKVAVVTVDGCDTGVALRFGSVLGNYSCAAQGTQGGSKKSLDLTGPLLLGGVPDLPESFPVRMRQFVGCMRNLQVDSRHIDMADFIANNGTVPGCPAKKNVCDSNTCHNGGTCVNQWDAFSCECPLGFGGKSCAQEMANPQHFLGSSLVAWHGLSLPISQPWYLSLMFRTRQADGVLLQAITRGRSTITLQLREGHVMLSVEGTGLQASSLRLEPGRANDGDWHHAQLALGASGGPGHAILSFDYGQQRAEGNLGPRLHGLHLSNITVGGIPGPAGGVARGFRGCLQGVRVSDTPEGVNSLDPSHGESINVEQGCSLPDPCDSNPCPANSYCSNDWDSYSCSCDPGYYGDNCTNVCDLNPCEHQSVCTRKPSAPHGYTCECPPNYLGPYCETRIDQPCPRGWWGHPTCGPCNCDVSKGFDPDCNKTSGECHCKENHYRPPGSPTCLLCDCYPTGSLSRVCDPEDGQCPCKPGVIGRQCDRCDNPFAEVTTNGCEVNYDSCPRAIEAGIWWPRTRFGLPAAAPCPKGSFGTAVRHCDEHRGWLPPNLFNCTSITFSELKGFAERLQRNESGLDSGRSQQLALLLRNATQHTAGYFGSDVKVAYQLATRLLAHESTQRGFGLSATQDVHFTENLLRVGSALLDTANKRHWELIQQTEGGTAWLLQHYEAYASALAQNMRHTYLSPFTIVTPNIVISVVRLDKGNFAGAKLPRYEALRGEQPPDLETTVILPESVFRETPPVVRPAGPGEAQEPEELARRQRRHPELSQGEAVASVIIYRTLAGLLPHNYDPDKRSLRVPKRPIINTPVVSISVHDDEELLPRALDKPVTVQFRLLETEERTKPICVFWNHSILVSGTGGWSARGCEVVFRNESHVSCQCNHMTSFAVLMDVSRRENGEILPLKTLTYVALGVTLAALLLTFFFLTLLRILRSNQHGIRRNLEVVFRNESHVSCQCNHMTSFAVLLPLSSPLSNSCKGLKI

SEQ ID NO: 827939 - protein, 111 aa, Homo sapiens
EWGTPSCRAPLVSSLIPHILLWPHLTAPPRPTGILKKKCLPTISEKSSLLRLPLEQCTGSSRGSSASEGSRGGPPPRPPPRQSLQEQLNGVMPIAMSIKAGTVDEDSSGSE

SEQ ID NO: 827940 - protein, 2943 aa, Homo sapiens
GAGGGAAAAVDPAAGRELGEMRSPATGVPLPTPPPPLLLLLLLLLPPPLLGDQVGPCRSLGSRGRGSSGACAPMGWLCPSSASNLWLYTSRCRDAGTELTGHLVPHHDGLRVWCPESEAHIPLPPAPEGCPWSCRLLGIGGHLSPQGKLTLPEEHPCLKAPRLRCQSCKLAQAPGLRAGERSPEESLGGRRKRNVNTAPQFQPPSYQATVPENQPAGTPVASLRAIDPDEGEAGRLEYTMDALFDSRSNQFFSLDPVTGAVTTAEELDRETKSTHVFRVTAQDHGMPRRSALATLTILVTDTNDHDPVFEQQEYKESLRENLEVGYEVLTVRATDGDAPPNANILYRLLEGSGGSPSEVFEIDPRSGVIRTRGPVDREEVESYQLTVEASDQGRDPGPRSTTAAVFLSVEDDNDNAPQFSEKRYVVQVREDVTPGAPVLRVTASDRDKGSNAVVHYSIMSGNARGQFYLDAQTGALDVVSPLDYETTKEYTLRVRAQDGGRPPLSNVSGLVTVQVLDINDNAPIFVSTPFQATVLESVPLGYLVLHVQAIDADAGDNARLEYRLAGVGHDFPFTINNGTGWISVAAELDREEVDFYSFGVEARDHGTPALTASASVSVTVLDVNDNNPTFTQPEYTVRLNEDAAVGTSVVTVSAVDRDAHSVITYQITSGNTRNRFSITSQSGGGLVSLALPLDYKLERQYVLAVTASDGTRQDTAQIVVNVTDANTHRPVFQSSHYTVNVNEDRPAGTTVVLISATDEDTGENARITYFMEDSIPQFRIDADTGAVTTQAELDYEDQVSYTLAITARDNGIPQKSDTTYLEILVNDVNDNAPQFLRDSYQGSVYEDVPPFTSVLQISATDRDSGLNGRVFYTFQGGDDGDGDFIVESTSGIVRTLRRLDRENVAQYVLRAYAVDKGMPPARTPMEVTVTVLDVNDNPPVFEQDEFDVFVEENSPIGLAVARVTATDPDEGTNAQIMYQIVEGNIPEVFQLDIFSGELTALVDLDYEDRPEYVLVIQATSAPLVSRATVHVRLLDRNDNPPVLGNFEILFNNYVTNRSSSFPGGAIGRVPAHDPDISDSLTYSFERGNELSLVLLNASTGELKLSRALDNNRPLEAIMSVLVSDGVHSVTAQCALRVTIITDEMLTHSITLRLEDMSPERFLSPLLGLFIQAVAATLATPPDHVVVFNVQRDTDAPGGHILNVSLSVGQPPGPGGGPPFLPSEDLQERLYLNRSLLTAISAQRVLPFDDNICLREPCENYMRCVSVLRFDSSAPFIASSSVLFRPIHPVGGLRCRCPPGFTGDYCETEVDLCYSRPCGPHGRCRSREGGYTCLCRDGYTGEHCEVSARSGRCTPGVCKNGGTCVNLLVGGFKCDCPSGDFEKPYCQVTTRSFPAHSFITFRGLRQRFHFTLALSFATKERDGLLLYNGRFNEKHDFVALEVIQEQVQLTFSAGESTTTVSPFVPGGVSDGQWHTVQLKYYNKPLLGQTGLPQGPSEQKVAVVTVDGCDTGVALRFGSVLGNYSCAAQGTQGGSKKSLDLTGPLLLGGVPDLPESFPVRMRQFVGCMRNLQVDSRHIDMADFIANNGTVPGCPAKKNVCDSNTCHNGGTCVNQWDAFSCECPLGFGGKSCAQEMANPQHFLGSSLVAWHGLSLPISQPWYLSLMFRTRQADGVLLQAITRGRSTITLQLREGHVMLSVEGTGLQASSLRLEPGRANDGDWHHAQLALGASGGPGHAILSFDYGQQRAEGNLGPRLHGLHLSNITVGGIPGPAGGVARGFRGCLQGVRVSDTPEGVNSLDPSHGESINVEQGCSLPDPCDSNPCPANSYCSNDWDSYSCSCDPGYYGDNCTNVCDLNPCEHQSVCTRKPSAPHGYTCECPPNYLGPYCETRIDQPCPRGWWGHPTCGPCNCDVSKGFDPDCNKTSGECHCKENHYRPPGSPTCLLCDCYPTGSLSRVCDPEDGQCPCKPGVIGRQCDRCDNPFAEVTTNGCEVNYDSCPRAIEAGIWWPRTRFGLPAAAPCPKGSFGTAVRHCDEHRGWLPPNLFNCTSITFSELKGFAERLQRNESGLDSGRSQQLALLLRNATQHTAGYFGSDVKVAYQLATRLLAHESTQRGFGLSATQDVHFTENLLRVGSALLDTANKRHWELIQQTEGGTAWLLQHYEAYASALAQNMRHTYLSPFTIVTPNIVISVVRLDKGNFAGAKLPRYEALRGEQPPDLETTVILPESVFRETPPVVRPAGPGEAQEPEELARRQRRHPELSQGEAVASVIIYRTLAGLLPHNYDPDKRSLRVPKRPIINTPVVSISVHDDEELLPRALDKPVTVQFRLLETEERTKPICVFWNHSILVSGTGGWSARGCEVVFRNESHVSCQCNHMTSFAVLMDVSRRENGEILPLKTLTYVALGVTLAALLLTFFFLTLLRILRSNQHGIRRNLTAALGLAQLVFLLGINQADLPFACTVIAILLHFLYLCTFSWALLEALHLYRALTEVRDVNTGPMRFYYMLGWGVPAFITGLAVGLDPEGYGNPDFCWLSIYDTLIWSFAGPVAFAVSMSVFLYILAARASCAAQRQGFEKKGPVSGLQPSFAVLLLLSATWLLALLSVNSDTLLFHYLFATCNCIQGPFIFLSYVVLSKEVRKALKLACSRKPSPDPALTTKSTLTSSYNCPSPYADGRLYQPYGDSAGSLHSTSRSGKSQPSYIPFLLREESALNPGQGPPGLGDPGSLFLEGQDQQHDPDTDSDSDLSLEDDQSGSYASTHSSDSEEEEEEEEEEAAFPGEQGWDSLLGPGAERLPLHSTPKDGGPGPGKAPWPGDFGTTAKESSGNGAPEERLRENGDALSREGSLGPLPGSSAQPHKGILKKKCLPTISEKSSLLRLPLEQCTGSSRGSSASEGSRGGPPPRPPPRQSLQEQLNGVMPIAMSIKAGTVDEDSSGSEFLFFNFLH

SEQ ID NO: 827941 - protein, 2033 aa, Homo sapiens
LGASPCPLHMPPARTPMEVTVTVLDVNDNPPVFEQDEFDVFVEENSPIGLAVARVTATDPDEGTNAQIMYQIVEGNIPEVFQLDIFSGELTALVDLDYEDRPEYVLVIQATSAPLVSRATVHVRLLDRNDNPPVLGNFEILFNNYVTNRSSSFPGGAIGRVPAHDPDISDSLTYSFERGNELSLVLLNASTGELKLSRALDNNRPLEAIMSVLVSDGVHSVTAQCALRVTIITDEMLTHSITLRLEDMSPERFLSPLLGLFIQAVAATLATPPDHVVVFNVQRDTDAPGGHILNVSLSVGQPPGPGGGPPFLPSEDLQERLYLNRSLLTAISAQRVLPFDDNICLREPCENYMRCVSVLRFDSSAPFIASSSVLFRPIHPVGGLRCRCPPGFTGDYCETEVDLCYSRPCGPHGRCRSREGGYTCLCRDGYTGEHCEVSARSGRCTPGVCKNGGTCVNLLVGGFKCDCPSGDFEKPYCQVTTRSFPAHSFITFRGLRQRFHFTLALSFATKERDGLLLYNGRFNEKHDFVALEVIQEQVQLTFSAGESTTTVSPFVPGGVSDGQWHTVQLKYYNKPLLGQTGLPQGPSEQKVAVVTVDGCDTGVALRFGSVLGNYSCAAQGTQGGSKKSLDLTGPLLLGGVPDLPESFPVRMRQFVGCMRNLQVDSRHIDMADFIANNGTVPGCPAKKNVCDSNTCHNGGTCVNQWDAFSCECPLGFGGKSCAQEMANPQHFLGSSLVAWHGLSLPISQPWYLSLMFRTRQADGVLLQAITRGRSTITLQLREGHVMLSVEGTGLQASSLRLEPGRANDGDWHHAQLALGASGGPGHAILSFDYGQQRAEGNLGPRLHGLHLSNITVGGIPGPAGGVARGFRGCLQGVRVSDTPEGVNSLDPSHGESINVEQGCSLPDPCDSNPCPANSYCSNDWDSYSCSCDPGYYGDNCTNVCDLNPCEHQSVCTRKPSAPHGYTCECPPNYLGPYCETRIDQPCPRGWWGHPTCGPCNCDVSKGFDPDCNKTSGECHCKENHYRPPGSPTCLLCDCYPTGSLSRVCDPEDGQCPCKPGVIGRQCDRCDNPFAEVTTNGCEVNYDSCPRAIEAGIWWPRTRFGLPAAAPCPKGSFGTAVRHCDEHRGWLPPNLFNCTSITFSELKGFAERLQRNESGLDSGRSQQLALLLRNATQHTAGYFGSDVKVAYQLATRLLAHESTQRGFGLSATQDVHFTENLLRVGSALLDTANKRHWELIQQTEGGTAWLLQHYEAYASALAQNMRHTYLSPFTIVTPNIVISVVRLDKGNFAGAKLPRYEALRGEQPPDLETTVILPESVFRETPPVVRPAGPGEAQEPEELARRQRRHPELSQGEAVASVIIYRTLAGLLPHNYDPDKRSLRVPKRPIINTPVVSISVHDDEELLPRALDKPVTVQFRLLETEERTKPICVFWNHSILVSGTGGWSARGCEVVFRNESHVSCQCNHMTSFAVLMDVSRRENGEILPLKTLTYVALGVTLAALLLTFFFLTLLRILRSNQHGIRRNLTAALGLAQLVFLLGINQADLPFACTVIAILLHFLYLCTFSWALLEALHLYRALTEVRDVNTGPMRFYYMLGWGVPAFITGLAVGLDPEGYGNPDFCWLSIYDTLIWSFAGPVAFAVSMSVFLYILAARASCAAQRQGFEKKGPVSGLQPSFAVLLLLSATWLLALLSVNSDTLLFHYLFATCNCIQGPFIFLSYVVLSKEVRKALKLACSRKPSPDPALTTKSTLTSSYNCPSPYADGRLYQPYGDSAGSLHSTSRSGKSQPSYIPFLLREESALNPGQGPPGLGDPGSLFLEGQDQQHDPDTDSDSDLSLEDDQSGSYASTHSSDSEEEEEEEEEEAAFPGEQGWDSLLGPGAERLPLHSTPKDGGPGPGKAPWPGDFGTTAKESSGNGAPEERLRENGDALSREGSLGPLPGSSAQPHKGILKKKCLPTISEKSSLLRLPLEQCTGSSRGSSASEGSRGGPPPRPPPRQSLQEQLNGVMPIAMSIKAGTVDEDSSGSDSDETSI

SEQ ID NO: 827942 - protein, 2487 aa, Homo sapiens
GAGGGAAAAVDPAAGRELGEMRSPATGVPLPTPPPPLLLLLLLLLPPPLLGDQVGPCRSLGSRGRGSSGACAPMGWLCPSSASNLWLYTSRCRDAGTELTGHLVPHHDGLRVWCPESEAHIPLPPAPEGCPWSCRLLGIGGHLSPQGKLTLPEEHPCLKAPRLRCQSCKLAQAPGLRAGERSPEESLGGRRKRNVNTAPQFQPPSYQATVPENQPAGTPVASLRAIDPDEGEAGRLEYTMDALFDSRSNQFFSLDPVTGAVTTAEELDRETKSTHVFRVTAQDHGMPRRSALATLTILVTDTNDHDPVFEQQEYKESLRENLEVGYEVLTVRATDGDAPPNANILYRLLEGSGGSPSEVFEIDPRSGVIRTRGPVDREEVESYQLTVEASDQGRDPGPRSTTAAVFLSVEDDNDNAPQFSEKRYVVQVREDVTPGAPVLRVTASDRDKGSNAVVHYSIMSGNARGQFYLDAQTGALDVVSPLDYETTKEYTLRVRAQDGGRPPLSNVSGLVTVQVLDINDNAPIFVSTPFQATVLESVPLGYLVLHVQAIDADAGDNARLEYRLAGVGHDFPFTINNGTGWISVAAELDREEVDFYSFGVEARDHGTPALTASASVSVTVLDVNDNNPTFTQPEYTVRLNEDAAVGTSVVTVSAVDRDAHSVITYQITSGNTRNRFSITSQSGGGLVSLALPLDYKLERQYVLAVTASDGTRQDTAQIVVNVTDANTHRPVFQSSHYTVNVNEDRPAGTTVVLISATDEDTGENARITYFMEDSIPQFRIDADTGAVTTQAELDYEDQVSYTLAITARDNGIPQKSDTTYLEILVNDVNDNAPQFLRDSYQGSVYEDVPPFTSVLQISATDRDSGLNGRVFYTFQGGDDGDGDFIVESTSGIVRTLRRLDRENVAQYVLRAYAVDKGMPPARTPMEVTVTVLDVNDNPPVFEQDEFDVFVEENSPIGLAVARVTATDPDEGTNAQIMYQIVEGNIPEVFQLDIFSGELTALVDLDYEDRPEYVLVIQATSAPLVSRATVHVRLLDRNDNPPVLGNFEILFNNYVTNRSSSFPGGAIGRVPAHDPDISDSLTYSFERGNELSLVLLNASTGELKLSRALDNNRPLEAIMSVLVSDGVHSVTAQCALRVTIITDEMLTHSITLRLEDMSPERFLSPLLGLFIQAVAATLATPPDHVVVFNVQRDTDAPGGHILNVSLSVGQPPGPGGGPPFLPSEDLQERLYLNRSLLTAISAQRVLPFDDNICLREPCENYMRCVSVLRFDSSAPFIASSSVLFRPIHPVGGLRCRCPPGFTGDYCETEVDLCYSRPCGPHGRCRSREGGYTCLCRDGYTGEHCEVSARSGRCTPGVCKNGGTCVNLLVGGFKCDCPSGDFEKPYCQVTTRSFPAHSFITFRGLRQRFHFTLALSFATKERDGLLLYNGRFNEKHDFVALEVIQEQVQLTFSAGESTTTVSPFVPGGVSDGQWHTVQLKYYNKPLLGQTGLPQGPSEQKVAVVTVDGCDTGVALRFGSVLGNYSCAAQGTQGGSKKSLDLTGPLLLGGVPDLPESFPVRMRQFVGCMRNLQVDSRHIDMADFIANNGTVPGCPAKKNVCDSNTCHNGGTCVNQWDAFSCECPLGFGGKSCAQEMANPQHFLGSSLVAWHGLSLPISQPWYLSLMFRTRQADGVLLQAITRGRSTITLQLREGHVMLSVEGTGLQASSLRLEPGRANDGDWHHAQLALGASGGPGHAILSFDYGQQRAEGNLGPRLHGLHLSNITVGGIPGPAGGVARGFRGCLQGVRVSDTPEGVNSLDPSHGESINVEQGCSLPDPCDSNPCPANSYCSNDWDSYSCSCDPGYYGDNCTNVCDLNPCEHQSVCTRKPSAPHGYTCECPPNYLGPYCETRIDQPCPRGWWGHPTCGPCNCDVSKGFDPDCNKTSGECHCKENHYRPPGSPTCLLCDCYPTGSLSRVCDPEDGQCPCKPGVIGRQCDRCDNPFAEVTTNGCEVNYDSCPRAIEAGIWWPRTRFGLPAAAPCPKGSFGTAVRHCDEHRGWLPPNLFNCTSITFSELKGFAERLQRNESGLDSGRSQQLALLLRNATQHTAGYFGSDVKVAYQLATRLLAHESTQRGFGLSATQDVHFTENLLRVGSALLDTANKRHWELIQQTEGGTAWLLQHYEAYASALAQNMRHTYLSPFTIVTPNIVISVVRLDKGNFAGAKLPRYEALRGEQPPDLETTVILPESVFRETPPVVRPAGPGEAQEPEELARRQRRHPELSQGEAVASVIIYRTLAGLLPHNYDPDKRSLRVPKRPIINTPVVSISVHDDEELLPRALDKPVTVQFRLLETEERTKPICVFWNHSILVSGTGGWSARGCEVVFRNESHVSCQCNHMTSFAVLMDVSRRENGEILPLKTLTYVALGVTLAALLLTFFFLTLLRILRSNQHGIRRNLTAALGLAQLVFLLGINQADLPVRCSYCPETVPTFSGRLPSPHWQPLLLHHEL

SEQ ID NO: 827943 - protein, 126 aa, Homo sapiens
MNSNKVPSAAPGPGFPLLWLPRDPPAPASGPGFPGSSSQHPGPPPCLTRSRACALGGPRSLTCPGLGPQFACTVIAILLHFLYLCTFSWALLEALHLYRALTEVRDVNTGPMRFYYMLGWGVPAFI

SEQ ID NO: 827944 - protein, 212 aa, Homo sapiens
MSGVSEPLSRVKLGTLRRPEGPAEPMVVVPVDVEKEDVRILKVCFYSNSFNPGKNFKLVKCTVQTEIREIITSILLSGRIGPNIRLAECYGLRLKHMKSDEIHWLHPQMTVGEVQDKYECLHVEAEWRYDLQIRYLPEDFMESLKEDRTTLLYFYQQLRNDYMQRYASKVSEGMALQLGCLELRRFFKDMPHNALDKKSNFELLEKEVGLGL

SEQ ID NO: 827945 - protein, 83 aa, Homo sapiens
ARSSRLLRSGRVPGRGSTEGSPRRRSRASVLLETYFRLQMGKGASTLTNPREPQARGWEKPEMPTSCFRSSGWVLKHRCFCIE

SEQ ID NO: 827946 - protein, 82 aa, Homo sapiens
MADLIDGYCRLQGEHQGSLIIHPRKDGEKRNSLPQIPMLNLEARRSHLSESCSIGELPAASSTISWLIFIFIEAGLSIYLAT

SEQ ID NO: 827947 - protein, 116 aa, Homo sapiens
VSCLDSAFDQFEVLPRIEAVAIEADLEDTHVLLFHIYWYPHPCPADLSTDPLRKPTSWLQSCSSRFLRVCVPALLRSPALWSIHLPLTHCTRHIFNWTLANQLATEMSEATLPLTA

SEQ ID NO: 827948 - protein, 96 aa, Homo sapiens
ASLMLDLSPHQLRNDYMQRYASKVSEGMALQLGCLELRRFFKDMPHNALDKKSNFELLEKEVGLDLFFPKQMQENLKPKQFRKMIQQDDQDSRMIR

SEQ ID NO: 827949 - protein, 61 aa, Homo sapiens
GVWTSLLPEPLVVLHHLLLLFVQDLPSRPKYRPPPQTNLLAPKLQFQVKIEPEDGNFRSTS

SEQ ID NO: 827950 - protein, 1009 aa, Homo sapiens
MSGVSEPLSRVKLGTLRRPEGPAEPMVVVPVDVEKEDVRILKVCFYSNSFNPGKNFKLVKCTVQTEIREIITSILLSGRIGPNIRLAECYGLRLKHMKSDEIHWLHPQMTVGEVQDKYECLHVEAEWRYDLQIRYLPEDFMESLKEDRTTLLYFYQQLRNDYMQRYASKVSEGMALQLGCLELRRFFKDMPHNALDKKSNFELLEKEVGLDLFFPKQMQENLKPKQFRKMIQQTFQQYASLREEECVMKFFNTLAGFANIDQETYRCELIQGWNITVDLVIGPKGIRQLTSQDAKPTCLAEFKQIRSIRCLPLEEGQAVLQLGIEGAPQALSIKTSSLAEAENMADLIDGYCRLQGEHQGSLIIHPRKDGEKRNSLPQIPMLNLEARRSHLSESCSIESDIYAEIPDETLRRPGGPQYGIAREDVVLNRILGEGFFGEVYEGVYTNHKGEKINVAVKTCKKDCTLDNKEKFMSEAVIMKNLDHPHIVKLIGIIEEEPTWIIMELYPYGELGHYLERNKNSLKVLTLVLYSLQICKAMAYLESINCVHRDIAVRNILVASPECVKLGDFGLSRYIEDEDYYKASVTRLPIKWMSPESINFRRFTTASDVWMFAVCMWEILSFGKQPFFWLENKDVIGVLEKGDRLPKPDLCPPVLYTLMTRCWDYDPSDRPRFTELVCSLSDVYQMEKDIAMEQERNARYRTPKILEPTAFQEPPPKPSRPKYRPPPQTNLLAPKLQFQVPEGLCASSPTLTSPMEYPSPVNSLHTPPLHRHNVFKRHSMREEDFIQPSSREEAQQLWEAEKVKMRQILDKQQKQMVEDYQWLRQEEKSLDPMVYMNDKSPLTPEKEVGYLEFTGPPQKPPRLGAQSIQPTANLDRTDDLVYLNVMELVRAVLELKNELCQLPPEGYVVVVKNVGLTLRKLIGSVDDLLPSLPSSSRTEIEGTQKLLNKDLAELINKMRLAQQNAVTSLSEECKRQMLTASHTLAVDAKNLLDAVDQAKVLANLAHPPAE

SEQ ID NO: 827951 - protein, 1009 aa, Homo sapiens; identical to SEQ ID NO: 827950

SEQ ID NO: 827952 - protein, 1009 aa, Homo sapiens; identical to SEQ ID NO: 827950

SEQ ID NO: 827953 - protein, 1009 aa, Homo sapiens; identical to SEQ ID NO: 827950

SEQ ID NO: 827954 - protein, 1009 aa, Homo sapiens; identical to SEQ ID NO: 827950

SEQ ID NO: 827955 - protein, 538 aa, Homo sapiens
MSEAVIMKNLDHPHIVKLIGIIEEEPTWIIMELYPYGELGHYLERNKNSLKVLTLVLYSLQICKAMAYLESINCVHRDIAVRNILVASPECVKLGDFGLSRYIEDEDYYKASVTRLPIKWMSPESINFRRFTTASDVWMFAVCMWEILSFGKQPFFWLENKDVIGVLEKGDRLPKPDLCPPVLYTLMTRCWDYDPSDRPRFTELVCSLSDVYQMEKDIAMEQERNARYRTPKILEPTAFQEPPPKPSRPKYRPPPQTNLLAPKLQFQVPEGLCASSPTLTSPMEYPSPVNSLHTPPLHRHNVFKRHSMREEDFIQPSSREEAQQLWEAEKVKMRQILDKQQKQMVEDYQWLRQEEKSLDPMVYMNDKSPLTPEKEVGYLEFTGPPQKPPRLGAQSIQPTANLDRTDDLVYLNVMELVRAVLELKNELCQLPPEGYVVVVKNVGLTLRKLIGSVDDLLPSLPSSSRTEIEGTQKLLNKDLAELINKMRLAQQNAVTSLSEECKRQMLTASHTLAVDAKNLLDAVDQAKVLANLAHPPAE

SEQ ID NO: 827956 - protein, 292 aa, Homo sapiens
LELQLWSQEVGLRRGSVLKVQVPEGLCASSPTLTSPMEYPSPVNSLHTPPLHRHNVFKRHSMREEDFIQPSSREEAQQLWEAEKVKMRQILDKQQKQMVEDYQWLRQEEKSLDPMVYMNDKSPLTPEKEVGYLEFTGPPQKPPRLGAQSIQPTANLDRTDDLVYLNVMELVRAVLELKNELCQLPPEGYVVVVKNVGLTLRKLIGSVDDLLPSLPSSSRTEIEGTQKLLNKDLAELINKMRLAQQNAVTSLSEECKRQMLTASHTLAVDAKNLLDAVDQAKVLANLAHPPAE

SEQ ID NO: 827957 - protein, 256 aa, Homo sapiens [sequence omitted]

SEQ ID NO: 827958 - protein, 125 aa, Homo sapiens
MELVRAVLELKNELCQLPPEGYVVVVKNVGLTLRKLIGSVDDLLPSLPSSSRTEIEGTQKLLNKDLAELINKMRLAQQNAVTSLSEECKRQMLTASHTLAVDAKNLLDAVDQAKVLANLAHPPAE

SEQ ID NO: 827959 - protein, 170 aa, Homo sapiens
MIRPIDAEKKSVIEIKGPKKPEVGAQSIQPTANLDRTDDLVYLNVMELVRAVLELKNELCQLPPEGYVVVVKNVGLTLRKLIGSVDDLLPSLPSSSRTEIEGTQKLLNKDLAELINKMRLAQQNAVTSLSEECKRQMLTASHTLAVDAKNLLDAVDQAKVLANLAHPPAE

SEQ ID NO: 827960 - protein, 91 aa, Homo sapiens
GWVRGLGVDPAFLPSSSRTEIEGTQKLLNKDLAELINKMRLAQQNAVTSLSEECKRQMLTASHTLAVDAKNLLDAVDQAKVLANLAHPPAE

SEQ ID NO: 827961 - protein, 892 aa, Homo sapiens
MSGVSEPLSRVKLGTLRRPEGPAEPMVVVPVDVEKEDVRILKVCFYSNSFNPGKNFKLVKCTVQTEIREIITSILLSGRIGPNIRLAECYGLRLKHMKSDEIHWLHPQMTVGEVQDKYECLHVEAEWRYDLQIRYLPEDFMESLKEDRTTLLYFYQQLRNDYMQRYASKVSEGMALQLGCLELRRFFKDMPHNALDKKSNFELLEKEVGLDLFFPKQMQENLKPKQFRKMIQQTFQQYASLREEECVMKFFNTLAGFANIDQETYRCELIQGWNITVDLVIGPKGIRQLTSQDAKPTCLAEFKQIRSIRCLPLEEGQAVLQLGIEGAPQALSIKTSSLAEAENMADLIDGYCRLQGEHQGSLIIHPRKDGEKRNSLPQIPMLNLEARRSHLSESCSIESDIYAEIPDETLRRPGGPQYGIAREDVVLNRILGEGFFGEVYEGVYTNHKGEKINVAVKTCKKDCTLDNKEKFMSEAVIMKNLDHPHIVKLIGIIEEEPTWIIMELYPYGELGHYLERNKNSLKVLTLVLYSLQICKAMAYLESINCVHRDIAVRNILVASPECVKLGDFGLSRYIEDEDYYKASVTRLPIKWMSPESINFRRFTTASDVWMFAVCMWEILSFGKQPFFWLENKDVIGVLEKGDRLPKPDLCPPVLYTLMTRCWDYDPSDRPRFTELVCSLSDVYQMEKDIAMEQERNARYRTPKILEPTAFQEPPPKPSRPKYRPPPQTNLLAPKLQFQVPEGLCASSPTLTSPMEYPSPVNSLHTPPLHRHNVFKRHSMREEDFIQPSSREEAQQLWEAEKVKMRQILDKQQKQMVEDYQWLRQEEKSLDPMVYMNDKSPLTPEKEVGYRECSRPSSGGFLLAPCAEPPSLPTAQGREQRSLSAFPAASAMI

SEQ ID NO: 827962 - protein, 548 aa, Homo sapiens
MSGVSEPLSRVKLGTLRRPEGPAEPMVVVPVDVEKEDVRILKVCFYSNSFNPGKNFKLVKCTVQTEIREIITSILLSGRIGPNIRLAECYGLRLKHMKSDEIHWLHPQMTVGEVQDKYECLHVEAEWRYDLQIRYLPEDFMESLKEDRTTLLYFYQQLRNDYMQRYASKVSEGMALQLGCLELRRFFKDMPHNALDKKSNFELLEKEVGLDLFFPKQMQENLKPKQFRKMIQQTFQQYASLREEECVMKFFNTLAGFANIDQETYRCELIQGWNITVDLVIGPKGIRQLTSQDAKPTCLAEFKQIRSIRCLPLEEGQAVLQLGIEGAPQALSIKTSSLAEAENMADLIDGYCRLQGEHQGSLIIHPRKDGEKRNSLPQIPMLNLEARRSHLSESCSIESDIYAEIPDETLRRPGGPQYGIAREDVVLNRILGEGFFGEVYEGVYTNHKGEKINVAVKTCKKDCTLDNKEKFMSEAVIMKNLDHPHIVKLIGIIEEEPTWIIMELYPYGELGHYLERNKNSLKVLTLVLYSLQICKAMAYLESINCVHR

SEQ ID NO: 827963 - protein, 448 aa, Homo sapiens
MSGVSEPLSRVKLGTLRRPEGPAEPMVVVPVDVEKEDVRILKVCFYSNSFNPGKNFKLVKCTVQTEIREIITSILLSGRIGPNIRLAECYGLRLKHMKSDEIHWLHPQMTVGEVQDKYECLHVEAEWRYDLQIRYLPEDFMESLKEDRTTLLYFYQQLRNDYMQRYASKVSEGMALQLGCLELRRFFKDMPHNALDKKSNFELLEKEVGLDLFFPKQMQENLKPKQFRKMIQQTFQQYASLREEECVMKFFNTLAGFANIDQETYRCELIQGWNITVDLVIGPKGIRQLTSQDAKPTCLAEFKQIRSIRCLPLEEGQAVLQLGIEGAPQALSIKTSSLAEAENMADLIDGYCRLQGEHQGSLIIHPRKDGEKRNSLPQIPMLNLEARRSHLSESCSIESDIYAEIPDETLRRPGGPQYGIAREDVAPPNQGKKEECWTGGPWSQMARG

SEQ ID NO: 827964 - protein, 212 aa, Homo sapiens; identical to SEQ ID NO: 827944

SEQ ID NO: 827965 - protein, 105 aa, Homo sapiens
MSGVSEPLSRVKLGTLRRPEGPAEPMVVVPVDVEKEDVRILKVCFYSNSFNPGKNFKLVKCTVQTEIRAKCHLLIANAEGLKPLRLLAKSCSILTGCVAWDLMIN

SEQ ID NO: 827966 - protein, 116 aa, Homo sapiens
QLWEAEKVKMRQILDKQQKQMVEDYQWLRQEEKSLVSTPGRMSVPCTHLCPLPPPQVAGARVPCILGAFSSRILSPSLLFLPLQDPMVYMNDKSPLVSCQERPPPPCQGLGRPRPP

SEQ ID NO: 827967 - protein, 132 aa, Homo sapiens
  misc_feature (121)..(121): Xaa can be any naturally occurring amino acid
  misc_feature (123)..(123): Xaa can be any naturally occurring amino acid
MSALWLLLGLLALMDLSESSNWGCYGNIQSLDTPGASCGIGRRHGLNYCGVRASERLAEIDMPYLLKYQPMMQTIGQKYCMDPAVIAGVLSRKSPGDKILVNMGDRTSMVQDPGSQAGGEXHXSNQKKKVFP

SEQ ID NO: 827968 - protein, 194 aa, Homo sapiens
MSALWLLLGLLALMDLSESSNWGCYGNIQSLDTPGASCGIGRRHGLNYCGVRASERLAEIDMPYLLKYQPMMQTIGQKYCMDPAVIAGVLSRKSPGDKILVNMGDRTSMVQDPGSQAPTSWISESQVSQTTEVLTTRIKEIQRRFPTWTPDQYLRGGLCAYSGGAGYVRSSQDLSCDFCNDVLARAKYLKRHGF

SEQ ID NO: 827969 - protein, 194 aa, Homo sapiens; identical to SEQ ID NO: 827968

SEQ ID NO: 827970 - protein, 192 aa, Homo sapiens
RPALRYPERLKKLHNLKTEGYRKQQQRQQQQQQQQKKVKTPIKKQEAKKKAKSDPGIQSTSHKHPVTTVHDRLYGYRTLPGQNSDMKQQQQMEKGTTSKQDSTERPKMNYYDHADFHHSVKSPELYETEPTNKDISAPVDAVPEAQAARQKKISFNFSEIMASTGWNSELKLLRILQDTDDEDEEDQSSGAE

SEQ ID NO: 827971 - protein, 349 aa, Homo sapiens
MSSLSGKVQTVLGLVEPSKLGRTLTHEHLAMTFDCCYCPPPPCQEAISKEPIVMKNLYWIQKNAYSHKENLQLNQETEAIKEELLYFKANGGGALVENTTTGISRDTQTLKRLAEETGVHIISGAGFYVDATHSSETRAMSVEQLTDVLMNEILHGADGTSIKCGIIGEIGCSWPLTESERKVLQATAHAQAQLGCPVIIHPGRSSRAPFQIIRILQEAGADISKTVMSHLDRTILDKKELLEFAQLGCYLEYDLFGTELLHYQLGPDIDMPDDNKRIRRVRLLVEEGCEDRILVAHDIHTKTRLMKYGGHGYSHILTNVVPKMLLRGITENVLDKILIENPKQWLTFK

SEQ ID NO: 827972 - protein, 349 aa, Homo sapiens; identical to SEQ ID NO: 827971

SEQ ID NO: 827973 - protein, 349 aa, Homo sapiens; identical to SEQ ID NO: 827971

SEQ ID NO: 827974 - protein, 397 aa, Homo sapiens
RGRSGRAQGRLKRPGKLACRKFPGRRQRVVPEKKEILFLEHLLVVPSEMSSLSGKVQTVLGLVEPSKLGRTLTHEHLAMTFDCCYCPPPPCQEAISKEPIVMKNLYWIQKNAYSHKENLQLNQETEAIKEELLYFKANGGGALVENTTTGISRDTQTLKRLAEETGVHIISGAGFYVDATHSSETRAMSVEQLTDVLMNEILHGADGTSIKCGIIGEIGCSWPLTESERKVLQATAHAQAQLGCPVIIHPGRSSRAPFQIIRILQEAGADISKTVMSHLDRTILDKKELLEFAQLGCYLEYDLFGTELLHYQLGPDIDMPDDNKRIRRVRLLVEEGCEDRILVAHDIHTKTRLMKYGGHGYSHILTNVVPKMLLRGITENVLDKILIENPKQWLTFK

SEQ ID NO: 827975 - protein, 331 aa, Homo sapiens
MSSLSGKVQTVLGLVEPSKLGRTLTHEHLAMTFDCCYCPPPPCQEAISKEPIVMKNLYWIQKNAYSHKVKANGGGALVENTTTGISRDTQTLKRLAEETGVHIISGAGFYVDATHSSETRAMSVEQLTDVLMNEILHGADGTSIKCGIIGEIGCSWPLTESERKVLQATAHAQAQLGCPVIIHPGRSSRAPFQIIRILQEAGADISKTVMSHLDRTILDKKELLEFAQLGCYLEYDLFGTELLHYQLGPDIDMPDDNKRIRRVRLLVEEGCEDRILVAHDIHTKTRLMKYGGHGYSHILTNVVPKMLLRGITENVLDKILIENPKQWLTFK

SEQ ID NO: 827976 - protein, 200 aa, Homo sapiens
MNEILHGADGTSIKCGIIGEIGCSWPLTESERKVLQATAHAQAQLGCPVIIHPGRSSRAPFQIIRILQEAGADISKTVMSHLDRTILDKKELLEFAQLGCYLEYDLFGTELLHYQLGPDIDMPDDNKRIRRVRLLVEEGCEDRILVAHDIHTKTRLMKYGGHGYSHILTNVVPKMLLRGITENVLDKILIENPKQWLTFK

SEQ ID NO: 827977 - protein, 144 aa, Homo sapiens
MAEEEILPKQGSVYNTRENEGTIPGESKRDALESWPQHGLMHTGTYGPPIGISELLHYQLGPDIDMPDDNKRIRRVRLLVEEGCEDRILVAHDIHTKTRLMKYGGHGYSHILTNVVPKMLLRGITENVLDKILIENPKQWLTFK

SEQ ID NO: 827978 - protein, 233 aa, Homo sapiens
MSSLSGKVQTVLGLVEPSKLGRTLTHEHLAMTFDCCYCPPPPCQEAISKEPIVMKNLYWIQKNAYSHKENLQLNQETEAIKEELLYFKANGGGALVENTTTGISRDTQTLKRLAEETGVHIISGAGFYVDATHSSETRAMSVEQLTDVLMNEILHGADGTSIKCGIIGEIGCSWPLTESERKVLQATAHAQAQLGCPVIIHPGRSSRAPFQIIRILQEAGADISKTVMSHLDR

SEQ ID NO: 827979 - protein, 152 aa, Homo sapiens
MSSLSGKVQTVLGLVEPSKLGRTLTHEHLAMTFDCCYCPPPPCQEAISKEPIVMKNLYWIQKNAYSHKENLQLNQETEAIKEELLYFKANGGGALVENTTTGISRDTQTLKRLAEETGVHIISGAGFYVDATHSSETRAMSVEQNSIPSGPA

SEQ ID NO: 827980 - protein, 140 aa, Homo sapiens
EVPREKAARCTRGKASWSQSRSRNCGPSRKSGARRRRPRGQGSLQSSTRGSCRKEGFSSRCAWALPPLLKCLRDVAKSASPVWRQLPVARQQCPGASSGSCAKPPLISFFFFFFLDSGSGSASQARVHLARSQLTAASTS

SEQ ID NO: 827981 - protein, 349 aa, Homo sapiens; identical to SEQ ID NO: 827971

SEQ ID NO: 827982 - protein, 349 aa, Homo sapiens; identical to SEQ ID NO: 827971

SEQ ID NO: 827983 - protein, 349 aa, Homo sapiens; identical to SEQ ID NO: 827971

SEQ ID NO: 827984 - protein, 349 aa, Homo sapiens; identical to SEQ ID NO: 827971

SEQ ID NO: 827985 - protein, 331 aa, Homo sapiens
MSSLSGKVQTVLGLVEPSKLGRTLTHEHLAMTFDCCYCPPPPCQEAISKEPIVMKNLYWIQKNAYSHKENLQLNQETEAIKEELLYFKANGGGALVEETGVHIISGAGFYVDATHSSETRAMSVEQLTDVLMNEILHGADGTSIKCGIIGEIGCSWPLTESERKVLQATAHAQAQLGCPVIIHPGRSSRAPFQIIRILQEAGADISKTVMSHLDRTILDKKELLEFAQLGCYLEYDLFGTELLHYQLGPDIDMPDDNKRIRRVRLLVEEGCEDRILVAHDIHTKTRLMKYGGHGYSHILTNVVPKMLLRGITENVLDKILIENPKQWLTFK

SEQ ID NO: 827986 - protein, 200 aa, Homo sapiens; identical to SEQ ID NO: 827976

SEQ ID NO: 827987 - protein, 443 aa, Homo sapiens
MAASPHTLSSRLLTGCVGGSVWYLERRTIQDSPHKFLHLLRNVNKQWITFQHFSFLKRMYVTQLNRSHNQQVRPKPEPVASPFLEKTSSGQAKAEIYEMRPLSPPSLSLSRKPNEKELIELEPDSVIEDSIDVGKETKEEKRWKEMKLQVYDLPGILARLSKIKLTALVVSTTAAGFALAPGPFDWPCFLLTSVGTGLASCAANSINQFFEVPFDSNMNRTKNRPLVRGQISPLLAVSFATCCAVPGVAILTLGVNPLTGALGLFNIFLYTCCYTPLKRISIANTWVGAVVGAIPPVMGWTAATGSLDAGAFLLGGILYSWQFPHFNALSWGLREDYSRGGYCMMSVTHPGLCRRVALRHCLALLVLSAAAPVLDITTWTFPIMALPINAYISYLGFRFYVDADRRSSRRLFFCSLWHLPLLLLLMLTCKRPSGGGDAGPPPS

SEQ ID NO: 827988 - protein, 171 aa, Homo sapiens
MAASPHTLSSRLLTGCVGGSVWYLERRTIQDSPHKFLHLLRNVNKQWITFQHFSFLKRMYVTQLNRSHNQQVRPKPEPVASPFLEKTSSGQAKAEIYEMRPLSPPSLSLSRKPNEKELIELEPDSVIEDSIDVGKETKEEKRWKEMKLQVYDLPGILARLSKIKLTGTLFF

SEQ ID NO: 827989 - protein, 443 aa, Homo sapiens; identical to SEQ ID NO: 827987

SEQ ID NO: 827990 - protein, 345 aa, Homo sapiens [sequence omitted]

SEQ ID NO: 827991 - protein, 85 aa, Homo sapiens
MEQASCWEKEEQEILSTRANSRQSPAKVQSKNKYLHSPESRPVTGERGQLLELSKESSEEEEEEEDEGGQGGYTETGILLRVEQP

SEQ ID NO: 827992 - protein, 2073 aa, Homo sapiens
MVKLANPLYTEWILEAIQKIKKQKQRPSEERICHAVSTSHGLDKKTVSEQLELSVQDGSVLKVTNKGLASYKDPDNPGRFSSVKPGTFPKSAKGSRGSCNDLRNVDWNKLLRRAIEGLEEPNGSSLKNIEKYLRSQSDLTSTTNNPAFQQRLRLGAKRAVNNGRLLKDGPQYRVNYGSLDGKGAPQYPSAFPSSLPPVSLLPHEKDQPRADPIPICSFCLGTKESNREKKPEELLSCADCGSSGHPSCLKFCPELTTNVKALRWQCIECKTCSACRVQGRNADNMLFCDSCDRGFHMECCDPPLSRMPKGMWICQVCRPKKKGRKLLHEKAAQIKRRYAKPIGRPKNKLKQRLLSVTSDEGSMNAFTGRGSPGRGQKTKVCTTPSSGHAASGKDSSSRLAVTDPTRPGATTKITTTSTYISASTLKVNKKTKGLIDGLTKFFTPSPDGRRSRGEIIDFSKHYRPRKKVSQKQSCTSHVLATGTTQKLKPPPSSLPPPTPISGQSPSSQKSSTATSSPSPQSSSSQCSVPSLSSLTTNSQLKALFDGLSHTIPLRDSLAKRDTPSYAPPKRMRRKTELSSTAKSKAHFFGKRDIRSRFISHSSSSSWGMARGSIFKAIAHFKRTTFLKKHRMLGRLKYKVTPQMGTPSPGKGSLTDGRIKPDQDDDTEIKINIKQESADVNVIGNKDVVTEEDLDVFKQAQELSWEKIECESGVEDCGRYPSVIEFGKYEIQTWYSSPYPQEYARLPKLYLCEFCLKYMKSKNILLRHSKKCGWFHPPANEIYRRKDLSVFEVDGNMSKIYCQNLCLLAKLFLDHKTLYYDVEPFLFYVLTKNDEKGCHLVGYLSKEKLCQQKYNVSCIMIMPQHQRQGFGRFLIDFSYLLSRREGQAGSPEKPLSDLGRLSYLAYWKSVILEYLYHHHERHISIKAISRATGMCPHDIATTLQHLHMIDKRDGRFVIIRREKLILSHMEKLKTCSRANELDPDSLRWTPILISNAAVSEEEREAEKEAERLMEQASCWEKEEQEILSTRANSRQSPAKVQSKNKYLHSPESRPVTGERGQLLELSKESSEEEEEEEDEEEEEEEEEEEEDEEEEEEEEEEEEEENIQSSPPRLTKPQSVAIKRKRPFVLKKKRGRKRRRINSSVTTETISETTEVLNEPFDNSDEERPMPQLEPTCEIEVEEDGRKPVLRKAFQHQPGKKRQTEEEEGKDNHCFKNADPCRNNMNDDSSNLKEGSKDNPEPLKCKQVWPKGTKRGLSKWRQNKERKTGFKLNLYTPPETPMEPDEQVTVEEQKETSEGKTSPSPIRIEEEVKETGEALLPQEENRREETCAPVSPNTSPGEKPEDDLIKPEEEEEEEEEEEEEEEEEEGEEEEGGGNVEKDPDGAKSQEKEEPEISTEKEDSARLDDHEEEEEEDEEPSHNEDHDADDEDDSHMESAEVEKEELPRESFKEVLENQETFLDLNVQPGHSNPEVLMDCGVDLTASCNSEPKELAGDPEAVPESDEEPPPGEQAQKQDQKNSKEVDTEFKEGNPATMEIDSETVQAVQSLTQESSEQDDTFQDCAETQEACRSLQNYTRADQSPQIATTLDDCQQSDHSSPVSSVHSHPGQSVRSVNSPSVPALENSYAQISPDQSAISVPSLQNMETSPMMDVPSVSDHSQQVVDSGFSDLGSIESTTENYENPSSYDSTMGGSICGNGSSQNSCSYSNLTSSSLTQSSCAVTQQMSNISGSCSMLQQTSISSPPTCSVKSPQGCVVERPPSSSQQLAQCSMAANFTPPMQLAEIPETSNANIGLYERMGQSDFGAGHYPQPSATFSLAKLQQLTNTLIDHSLPYSHSAAVTSYANSASLSTPLSNTGLVQLSQSPHSVPGGPQAQATMTPPPNLTPPPMNLPPPLLQRNMAASNIGISHSQRLQTQIASKGHISMRTKSASLSPAAATHQSQIYGRSQTVAMQGPARTLTMQRGMNMSVNLMPAPAYNVNSVNMNMNTLNAMNGYSMSQPMMNSGYHSNHGYMNQTPQYPMQMQMGMMGTQPYAQQPMQTPPHGNMMYTAPGHHGYMNTGMSKQSLNGSYMRR

SEQ ID NO: 827993 - protein, 1781 aa, Homo sapiens
MVKLANPLYTEWILEAIQKIKKQKQRPSEERICHAVSTSHGLDKKTVSEQLELSVQDGSVLKVTNKGLASYKDPDNPGRFSSVKPGTFPKSAKGSRGSCNDLRNVDWNKLLRRAIEGLEEPNGSSLKNIEKYLRSQSDLTSTTNNPAFQQRLRLGAKRAVNNGRLLKDGPQYRVNYGSLDGKGAPQYPSAFPSSLPPVSLLPHEKDQPRADPIPICSFCLGTKESNREKKPEELLSCADCGSSGHPSCLKFCPELTTNVKALRWQCIECKTCSACRVQGRNADNMLFCDSCDRGFHMECCDPPLSRMPKGMWICQVCRPKKKGRKLLHEKAAQIKRRYAKPIGRPKNKLKQRLLSVTSDEGSMNAFTGRGSPDTEIKINIKQESADVNVIGNKDVVTEEDLDVFKQAQELSWEKIECESGVEDCGRYPSVIEFGKYEIQTWYSSPYPQEYARLPKLYLCEFCLKYMKSKNILLRHSKKCGWFHPPANEIYRRKDLSVFEVDGNMSKIYCQNLCLLAKLFLDHKTLYYDVEPFLFYVLTKNDEKGCHLVGYLSKEKLCQQKYNVSCIMIMPQHQRQGFGRFLIDFSYLLSRREGQAGSPEKPLSDLGRLSYLAYWKSVILEYLYHHHERHISIKAISRATGMCPHDIATTLQHLHMIDKRDGRFVIIRREKLILSHMEKLKTCSRANELDPDSLRWTPILISNAAVSEEEREAEKEAERLMEQASCWEKEEQEILSTRANSRQSPAKVQSKNKYLHSPESRPVTGERGQLLELSKESSEEEEEEEDEEEEEEEEEEEEDEEEEEEEEEEEEEENIQSSPPRLTKPQSVAIKRKRPFVLKKKRGRKRRRINSSVTTETISETTEVLNEPFDNSDEERPMPQLEPTCEIEVEEDGRKPVLRKAFQHQPGKKRQTEEEEGKDNHCFKNADPCRNNMNDDSSNLKEGSKDNPEPLKCKQVWPKGTKRGLSKWRQNKERKTGFKLNLYTPPETPMEPDEQVTVEEQKETSEGKTSPSPIRIEEEVKETGEALLPQEENRREETCAPVSPNTSPGEKPEDDLIKPEEEEEEEEEEEEEEEEEEGEEEEGGGNVEKDPDGAKSQEKEEPEISTEKEDSARLDDHEEEEEEDEEPSHNEDHDADDEDDSHMESAEVEKEELPRESFKEVLENQETFLDLNVQPGHSNPEVLMDCGVDLTASCNSEPKELAGDPEAVPESDEEPPPGEQAQKQDQKNSKEVDTEFKEGNPATMEIDSETVQAVQSLTQESSEQDDTFQDCAETQEACRSLQNYTRADQSPQIATTLDDCQQSDHSSPVSSVHSHPGQSVRSVNSPSVPALENSYAQISPDQSAISVPSLQNMETSPMMDVPSVSDHSQQVVDSGFSDLGSIESTTENYENPSSYDSTMGGSICGNGSSQNSCSYSNLTSSSLTQSSCAVTQQMSNISGSCSMLQQTSISSPPTCSVKSPQGCVVERPPSSSQQLAQCSMAANFTPPMQLAEIPETSNANIGLYERMGQSDFGAGHYPQPSATFSLAKLQQLTNTLIDHSLPYSHSAAVTSYANSASLSTPLSNTGLVQLSQSPHSVPGGPQAQATMTPPPNLTPPPMNLPPPLLQRNMAASNIGISHSQRLQTQIASKGHISMRTKSASLSPAAATHQSQIYGRSQTVAMQGPARTLTMQRGMNMSVNLMPAPAYNVNSVNMNMNTLNAMNGYSMSQPMMNSGYHSNHGYMNQTPQYPMQMQMGMMGTQPYAQQPMQTPPHGNMMYTAPGHHGYMNTGMSKQSLNGSYMRR

SEQ ID NO: 827994 - protein, 1890 aa, Homo sapiens
MVKLANPLYTEWILEAIQKIKKQKQRPSEERICHAVSTSHGLDKKTVSEQLELSVQDGSVLKVTNKGLASYKDPDNPGRFSSVKPGTFPKSAKGSRGSCNDLRNVDWNKLLRRAIEGLEEPNGSSLKNIEKYLRSQSDLTSTTNNPAFQQRLRLGAKRAVNNGRLLKDGPQYRVNYGSLDGKGAPQYPSAFPSSLPPVSLLPHEKDQPRADPIPICSFCLGTKESNREKKPEELLSCADCGSSGHPSCLKFCPELTTNVKALRWQCIECKTCSACRVQGRNADNMLFCDSCDRGFHMECCDPPLSRMPKGMWICQVCRPKKKGRKLLHEKAAQIKRRYAKPIGRPKNKLKQRLLSVTSDEGSMNAFTGRGSPGRGQKTKVCTTPSSGHAASGKDSSSRLAVTDPTRPGATTKITTTSTYISASTLKVNKKTKGLIDGLTKFFTPSPDGRRSRGEIIDFSKHYRPRKKVSQKQSCTSHVLATDTEIKINIKQESADVNVIGNKDVVTEEDLDVFKQAQELSWEKIECESGVEDCGRYPSVIEFGKYEIQTWYSSPYPQEYARLPKLYLCEFCLKYMKSKNILLRHSKKCGWFHPPANEIYRRKDLSVFEVDGNMSKIYCQNLCLLAKLFLDHKTLYYDVEPFLFYVLTKNDEKGCHLVGYLSKEKLCQQKYNVSCIMIMPQHQRQGFGRFLIDFSYLLSRREGQAGSPEKPLSDLGRLSYLAYWKSVILEYLYHHHERHISIKAISRATGMCPHDIATTLQHLHMIDKRDGRFVIIRREKLILSHMEKLKTCSRANELDPDSLRWTPILISNAAVSEEEREAEKEAERLMEQASCWEKEEQEILSTRANSRQSPAKVQSKNKYLHSPESRPVTGERGQLLELSKESSEEEEEEEDEEEEEEEEEEEEDEEEEEEEEEEEEEENIQSSPPRLTKPQSVAIKRKRPFVLKKKRGRKRRRINSSVTTETISETTEVLNEPFDNSDEERPMPQLEPTCEIEVEEDGRKPVLRKAFQHQPGKKRQTEEEEGKDNHCFKNADPCRNNMNDDSSNLKEGSKDNPEPLKCKQVWPKGTKRGLSKWRQNKERKTGFKLNLYTPPETPMEPDEQVTVEEQKETSEGKTSPSPIRIEEEVKETGEALLPQEENRREETCAPVSPNTSPGEKPEDDLIKPEEEEEEEEEEEEEEEEEEGEEEEGGGNVEKDPDGAKSQEKEEPEISTEKEDSARLDDHEEEEEEDEEPSHNEDHDADDEDDSHMESAEVEKEELPRESFKEVLENQETFLDLNVQPGHSNPEVLMDCGVDLTASCNSEPKELAGDPEAVPESDEEPPPGEQAQKQDQKNSKEVDTEFKEGNPATMEIDSETVQAVQSLTQESSEQDDTFQDCAETQEACRSLQNYTRADQSPQIATTLDDCQQSDHSSPVSSVHSHPGQSVRSVNSPSVPALENSYAQISPDQSAISVPSLQNMETSPMMDVPSVSDHSQQVVDSGFSDLGSIESTTENYENPSSYDSTMGGSICGNGSSQNSCSYSNLTSSSLTQSSCAVTQQMSNISGSCSMLQQTSISSPPTCSVKSPQGCVVERPPSSSQQLAQCSMAANFTPPMQLAEIPETSNANIGLYERMGQSDFGAGHYPQPSATFSLAKLQQLTNTLIDHSLPYSHSAAVTSYANSASLSTPLSNTGLVQLSQSPHSVPGGPQAQATMTPPPNLTPPPMNLPPPLLQRNMAASNIGISHSQRLQTQIASKGHISMRTKSASLSPAAATHQSQIYGRSQTVAMQGPARTLTMQRGMNMSVNLMPAPAYNVNSVNMNMNTLNAMNGYSMSQPMMNSGYHSNHGYMNQTPQYPMQMQMGMMGTQPYAQQPMQTPPHGNMMYTAPGHHGYMNTGMSKQSLNGSYMRR

SEQ ID NO: 827995 - protein, 1781 aa, Homo sapiens; identical to SEQ ID NO: 827993

SEQ ID NO: 827996 - protein, 1440 aa, Homo sapiens
  misc_feature (1)..(1): Xaa can be any naturally occurring amino acid
XTITLRGIINPTPSPGKGSLTDGRIKPDQDDDTEIKINIKQESADVNVIGNKDVVTEEDLDVFKQAQELSWEKIECESGVEDCGRYPSVIEFGKYEIQTWYSSPYPQEYARLPKLYLCEFCLKYMKSKNILLRHSKKCGWFHPPANEIYRRKDLSVFEVDGNMSKIYCQNLCLLAKLFLDHKTLYYDVEPFLFYVLTKNDEKGCHLVGYLSKEKLCQQKYNVSCIMIMPQHQRQGFGRFLIDFSYLLSRREGQAGSPEKPLSDLGRLSYLAYWKSVILEYLYHHHERHISIKAISRATGMCPHDIATTLQHLHMIDKRDGRFVIIRREKLILSHMEKLKTCSRANELDPDSLRWTPILISNAAVSEEEREAEKEAERLMEQASCWEKEEQEILSTRANSRQSPAKVQSKNKYLHSPESRPVTGERGQLLELSKESSEEEEEEEDEEEEEEEEEEEEDEEEEEEEEEEEEEENIQSSPPRLTKPQSVAIKRKRPFVLKKKRGRKRRRINSSVTTETISETTEVLNEPFDNSDEERPMPQLEPTCEIEVEEDGRKPVLRKAFQHQPGKKRQTEEEEGKDNHCFKNADPCRNNMNDDSSNLKEGSKDNPEPLKCKQVWPKGTKRGLSKWRQNKERKTGFKLNLYTPPETPMEPDEQVTVEEQKETSEGKTSPSPIRIEEEVKETGEALLPQEENRREETCAPVSPNTSPGEKPEDDLIKPEEEEEEEEEEEEEEEEEEGEEEEGGGNVEKDPDGAKSQEKEEPEISTEKEDSARLDDHEEEEEEDEEPSHNEDHDADDEDDSHMESAEVEKEELPRESFKEVLENQETFLDLNVQPGHSNPEVLMDCGVDLTASCNSEPKELAGDPEAVPESDEEPPPGEQAQKQDQKNSKEVDTEFKEGNPATMEIDSETVQAVQSLTQESSEQDDTFQDCAETQEACRSLQNYTRADQSPQIATTLDDCQQSDHSSPVSSVHSHPGQSVRSVNSPSVPALENSYAQISPDQSAISVPSLQNMETSPMMDVPSVSDHSQQVVDSGFSDLGSIESTTENYENPSSYDSTMGGSICGNGSSQNSCSYSNLTSSSLTQSSCAVTQQMSNISGSCSMLQQTSISSPPTCSVKSPQGCVVERPPSSSQQLAQCSMAANFTPPMQLAEIPETSNANIGLYERMGQSDFGAGHYPQPSATFSLAKLQQLTNTLIDHSLPYSHSAAVTSYANSASLSTPLSNTGLVQLSQSPHSVPGGPQAQATMTPPPNLTPPPMNLPPPLLQRNMAASNIGISHSQRLQTQIASKGHISMRTKSASLSPAAATHQSQIYGRSQTVAMQGPARTLTMQRGMNMSVNLMPAPAYNVNSVNMNMNTLNAMNGYSMSQPMMNSGYHSNHGYMNQTPQYPMQMQMGMMGTQPYAQQPMQTPPHGNMMYTAPGHHGYMNTGMSKQSLNGSYMRR

SEQ ID NO: 827997 - protein, 1064 aa, Homo sapiens
MRSKASSCWEKEEQEILSTRANSRQSPAKVQSKNKYLHSPESRPVTGERGQLLELSKESSEEEEEEEDEEEEEEEEEEEEDEEEEEEEEEEEEEENIQSSPPRLTKPQSVAIKRKRPFVLKKKRGRKRRRINSSVTTETISETTEVLNEPFDNSDEERPMPQLEPTCEIEVEEDGRKPVLRKAFQHQPGKKRQTEEEEGKDNHCFKNADPCRNNMNDDSSNLKEGSKDNPEPLKCKQVWPKGTKRGLSKWRQNKERKTGFKLNLYTPPETPMEPDEQVTVEEQKETSEGKTSPSPIRIEEEVKETGEALLPQEENRREETCAPVSPNTSPGEKPEDDLIKPEEEEEEEEEEEEEEEEEEGEEEEGGGNVEKDPDGAKSQEKEEPEISTEKEDSARLDDHEEEEEEDEEPSHNEDHDADDEDDSHMESAEVEKEELPRESFKEVLENQETFLDLNVQPGHSNPEVLMDCGVDLTASCNSEPKELAGDPEAVPESDEEPPPGEQAQKQDQKNSKEVDTEFKEGNPATMEIDSETVQAVQSLTQESSEQDDTFQDCAETQEACRSLQNYTRADQSPQIATTLDDCQQSDHSSPVSSVHSHPGQSVRSVNSPSVPALENSYAQISPDQSAISVPSLQNMETSPMMDVPSVSDHSQQVVDSGFSDLGSIESTTENYENPSSYDSTMGGSICGNGSSQNSCSYSNLTSSSLTQSSCAVTQQMSNISGSCSMLQQTSISSPPTCSVKSPQGCVVERPPSSSQQLAQCSMAANFTPPMQLAEIPETSNANIGLYERMGQSDFGAGHYPQPSATFSLAKLQQLTNTLIDHSLPYSHSAAVTSYANSASLSTPLSNTGLVQLSQSPHSVPGGPQAQATMTPPPNLTPPPMNLPPPLLQRNMAASNIGISHSQRLQTQIASKGHISMRTKSASLSPAAATHQSQIYGRSQTVAMQGPARTLTMQRGMNMSVNLMPAPAYNVNSVNMNMNTLNAMNGYSMSQPMMNSGYHSNHGYMNQTPQYPMQMQMGMMGTQPYAQQPMQTPPHGNMMYTAPGHHGYMNTGMSKQSLNGSYMRR

SEQ ID NO: 827998 - protein, 2038 aa, Homo sapiens
MVKLANPLYTEWILEAIQKIKKQKQRPSEERICHAVSTSHGLDKKTVSEQLELSVQDGSVLKVTNKGLASYKDPDNPGRFSSVKPGTFPKSAKGSRGSCNDLRNVDWNKLLRRAIEGLEEPNGSSLKNIEKYLRSQSDLTSTTNNPAFQQRLRLGAKRAVNNGRLLKDGPQYRVNYGSLDGKGAPQYPSAFPSSLPPVSLLPHEKDQPRADPIPICSFCLGTKESNREKKPEELLSCADCGSSGHPSCLKFCPELTTNVKALRWQCIECKTCSACRVQGRNADNMLFCDSCDRGFHMECCDPPLSRMPKGMWICQVCRPKKKGRKLLHEKAAQIKRRYAKPIGRPKNKLKQRLLSVTSDEGSMNAFTGRGSPGRGQKTKVCTTPSSGHAASGKDSSSRLAVTDPTRPGATTKITTTSTYISASTLKVNKKTKGLIDGLTKFFTPSPDGRRSRGEIIDFSKHYRPRKKVSQKQSCTSHVLATGTTQKLKPPPSSLPPPTPISGQSPSSQKSSTATSSPSPQSSSSQCSVPSLSSLTTNSQLKALFDGLSHTIPLRDSLAKRDTPSYAPPKRMRRKTELSSTAKSKAHFFGKRDIRSRFISHSSSSSWGMARGSIFKAIAHFKRTTFLKKHRMLGRLKYKVTPQMGTPSPGKGSLTDGRIKPDQDDDTEIKINIKQESADVNVIGNKDVVTEEDLDVFKQAQELSWEKIECESGVEDCGRYPSVIEFGKYEIQTWYSSPYPQEYARLPKLYLCEFCLKYMKSKNILLRHSKKCGWFHPPANEIYRRKDLSVFEVDGNMSKIYCQNLCLLAKLFLDHKTLYYDVEPFLFYVLTKNDEKGCHLVGYLSKEKLCQQKYNVSCIMIMPQHQRQGFGRFLIDFSYLLSRREGQAGSPEKPLSDLGRLSYLAYWKSVILEYLYHHHERHISIKAISRATGMCPHDIATTLQHLHMIDKRDGRFVIIRREKLILSHMEKLKTCSRANELDPDSLRWTPILISNAAVSEEEREAEKEAERLMEQASCWEKEEQEILSTRANSRQSPAKVQSKNKYLHSPESRPVTGERGQLLELSKESSEEEEEEEDEEEEEEEEEEEEDEEEEEEEEEEEEEENIQSSPPRLTKPQSVAIKRKRPFVLKKKRGRKRRRINSSVTTETISETTEVLNEPFDNSDEERPMPQLEPTCEIEVEEDGRKPVLRKAFQHQPGKKRQTEEEEGKDNHCFKNADPCRNNMNDDSSNLKEGSKDNPEPLKCKQVWPKGTKRGLSKWRQNKERKTGFKLNLYTPPETPMEPDEQVTVEEQKETSEGKTSPSPIRIEEEVKETGEALLPQEENRREETCAPVSPNTSPGEKPEDDLIKPEEEEEEEEEEEEEEEEEEGEEEEGGGNVEKDPDGAKSQEKEEPEISTEKEDSARLDDHEEEEEEDEEPSHNEDHDADDEDDSHMESAEVEKEELPRESFKEVLENQETFLDLNVQPGHSNPEVLMDCGVDLTASCNSEPKELAGDPEAVPESDEEPPPGEQAQKQDQKNSKEVDTEFKEGNPATMEIDSETVQAVQSLTQESSEQDDTFQDCAETQEACRSLQNYTRADQSPQIATTLDDCQQSDHSSPVSSVHSHPGQSVRSVNSPSVPALENSYAQISPDQSAISVPSLQNMETSPMMDVPSVSDHSQQVVDSGFSDLGSIESTTENYENPSSYDSTMGGSICGNGSSQNSCSYSNLTSSSLTQSSCAVTQQMSNISGSCSMLQQTSISSPPTCSVKSPQGCVVERPPSSSQQLAQCSMAANFTPPMQLAEIPETSNANIGLYERMGQSDFGAGHYPQPSATFSLAKLQQLTNTLIDHSLPYSHSAAVTSYANSASLSTPLSNTGLVQLSQSPHSVPGGPQAQATMTPPPNLTPPPMNLPPPLLQRNMAASNIGISHSQRLQTQIASKGHISMRTKSASLSPAAATHQSQIYGRSQTVAMQGPARTLTMQRGMNMSVNLMPAPAYNVNSVNMNMNRHLCHQPLPPISHKSMGAPRPYHAGSRTDFNDAERHEHECEPMPSQPPVGP

SEQ ID NO: 827999 - protein, 1031 aa, Homo sapiens
  misc_feature (1017)..(1017): Xaa can be any naturally occurring amino acid
MVKLANPLYTEWILEAIQKIKKQKQRPSEERICHAVSTSHGLDKKTVSEQLELSVQDGSVLKVTNKGLASYKDPDNPGRFSSVKPGTFPKSAKGSRGSCNDLRNVDWNKLLRRAIEGLEEPNGSSLKNIEKYLRSQSDLTSTTNNPAFQQRLRLGAKRAVNNGRLLKDGPQYRVNYGSLDGKGAPQYPSAFPSSLPPVSLLPHEKDQPRADPIPICSFCLGTKESNREKKPEELLSCADCGSSGHPSCLKFCPELTTNVKALRWQCIECKTCSACRVQGRNADNMLFCDSCDRGFHMECCDPPLSRMPKGMWICQVCRPKKKGRKLLHEKAAQIKRRYAKPIGRPKNKLKQRLLSVTSDEGSMNAFTGRGSPGRGQKTKVCTTPSSGHAASGKDSSSRLAVTDPTRPGATTKITTTSTYISASTLKVNKKTKGLIDGLTKFFTPSPDGRRSRGEIIDFSKHYRPRKKVSQKQSCTSHVLATGTTQKLKPPPSSLPPPTPISGQSPSSQKSSTATSSPSPQSSSSQCSVPSLSSLTTNSQLKALFDGLSHTIPLRDSLAKRDTPSYAPPKRMRRKTELSSTAKSKAHFFGKRDIRSRFISHSSSSSWGMARGSIFKAIAHFKRTTFLKKHRMLGRLKYKVTPQMGTPSPGKGSLTDGRIKPDQDDDTEIKINIKQESADVNVIGNKDVVTEEDLDVFKQAQELSWEKIECESGVEDCGRYPSVIEFGKYEIQTWYSSPYPQEYARLPKLYLCEFCLKYMKSKNILLRHSKKCGWFHPPANEIYRRKDLSVFEVDGNMSKIYCQNLCLLAKLFLDHKTLYYDVEPFLFYVLTKNDEKGCHLVGYLSKEKLCQQKYNVSCIMIMPQHQRQGFGRFLIDFSYLLSRREGQAGSPEKPLSDLGRLSYLAYWKSVILEYLYHHHERHISIKAISRATGMCPHDIATTLQHLHMIDKRDGRFVIIRREKLILSHMEKLKTCSRANELDPDSLRWTPILISNAAVSEEEREAEKEAERLMEQASXYEKEKPSIRVILGK

SEQ ID NO: 828000 - protein, 202 aa, Homo sapiens
PSEERICHAVSTSHGLDKKTVSEQLELSVQDGSVLKVTNKGLASYKDPDNPGRFSSVKPGTFPKSAKGSRGSCNDLRNVDWNKLLRRAIEGLEEPNGSSLKNIEKYLRSQSDLTSTTNNPAFQQRLRLGAKRAVNNGRLLKDGPQYRVNYGSLDGKGAPQYPSAFPSSLPPVSLLPHEKDQVSEGVMFVHSHYCPFVFYGFT

SEQ ID NO: 828001 - protein, 1276 aa, Homo sapiens
MVKLANPLYTEWILEAIQKIKKQKQRPSEERICHAVSTSHGLDKKTVSEQLELSVQDGSVLKVTNKGLASYKDPDNPGRFSSVKPGTFPKSAKGSRGSCNDLRNVDWNKLLRRAIEGLEEPNGSSLKNIEKYLRSQSDLTSTTNNPAFQQRLRLGAKRAVNNGRLLKDGPQYRVNYGSLDGKGAPQYPSAFPSSLPPVSLLPHEKDQPRADPIPICSFCLGTKESNREKKPEELLSCADCGSSGHPSCLKFCPELTTNVKALRWQCIECKTCSACRVQGRNADNMLFCDSCDRGFHMECCDPPLSRMPKGMWICQVCRPKKKGRKLLHEKAAQIKRRYAKPIGRPKNKLKQRLLSVTSDEGSMNAFTGRGSPGRGQKTKVCTTPSSGHAASGKDSSSRLAVTDPTRPGATTKITTTSTYISASTLKVNKKTKGLIDGLTKFFTPSPDGRRSRGEIIDFSKHYRPRKKVSQKQSCTSHVLATGTTQKLKPPPSSLPPPTPISGQSPSSQKSSTATSSPSPQSSSSQCSVPSLSSLTTNSQLKALFDGLSHTIPLRDSLAKRDTPSYAPPKRMRRKTELSSTAKSKAHFFGKRDIRSRFISHSSSSSWGMARGSIFKAIAHFKRTTFLKKHRMLGRLKYKVTPQMGTPSPGKGSLTDGRIKPDQDDDTEIKINIKQESADVNVIGNKDVVTEEDLDVFKQAQELSWEKIECESGVEDCGRYPSVIEFGKYEIQTWYSSPYPQEYARLPKLYLCEFCLKYMKSKNILLRHSKKCGWFHPPANEIYRRKDLSVFEVDGNMSKIYCQNLCLLAKLFLDHKTLYYDVEPFLFYVLTKNDEKGCHLVGYLSKEKLCQQKYNVSCIMIMPQHQRQGFGRFLIDFSYLLSRREGQAGSPEKPLSDLGRLSYLAYWKSVILEYLYHHHERHISIKAISRATGMCPHDIATTLQHLHMIDKRDGRFVIIRREKLILSHMEKLKTCSRANELDPDSLRWTPILISNAAVSEEEREAEKEAERLMEQASCWEKEEQEILSTRANSRQSPAKVQSKNKYLHSPESRPVTGERGQLLELSKESSEEEEEEEDEEEEEEEEEEEEDEEEEEEEEEEEEEENIQSSPPRLTKPQSVAIKRKRPFVLKKKRGRKRRRINSSVTTETISETTEVLNEPFDNSDEERPMPQLEPTCEIEVEEDGRKPVLRKAFQHQPGKKRQTEEEEGKDNHCFKNADPCRNFGSLFDLENDLPDELIPNGGELGLLNSGNLVPDAASKHKQLSELLRGGSGSSIN

SEQ ID NO: 828002 - protein, 182 aa, Homo sapiens
MGIPALPPGIPPPQFPGFPPPVPPGTPMIPVPMSIMAPAPTVLVPTVSMVGKHLGARKDHPGLKAKENDENCGPTTTVFVGNISEKASDMLIRQLLAKCGLVLSWKRVQGASGKLQAFGFCEYKEPESTLRALRLLHDLQIGEKKLLVKVDAKTKAQLDEWKAKKKASNGNADGRPVQSSIR

SEQ ID NO: 828003 - protein, 832 aa, Homo sapiens [sequence omitted]

SEQ ID NO: 828004 - protein, 832 aa, Homo sapiens [sequence omitted]

SEQ ID NO: 828005 - protein, 953 aa, Homo sapiens
QCTPGKRKTSISSPRSAAVFAACASRRLGTQSPWRATGRNLEPVERTRNLDPRRSRRQYRFLSGGRSLTLSFRLECSGATSAHCNICLPGSSNSPASPSRVAGIQTAAVRMSFPPHLNRPPMGIPALPPGIPPPQFPGFPPPVPPGTPMIPVPMSIMAPAPTVLVPTVSMVGKHLGARKDHPGLKAKENDENCGPTTTVFVGNISEKASDMLIRQLLAKCGLVLSWKRVQGASGKLQAFGFCEYKEPESTLRALRLLHDLQIGEKKLLVKVDAKTKAQLDEWKAKKKASNGNARPETVTNDDEEALDEETKRRDQMIKGAIEVLIREYSSELNAPSQESDSHPRKKKKEKKEDIFRRFPVAPLIPYPLITKEDINAIEMEEDKRDLISREISKFRDTHKKLEEEKGKKEKERQEIEKERRERERERERERERREREREREREREREKEKERERERERDRDRDRTKERDRDRDRERDRDRDRERSSDRNKDRSRSREKSRDREREREREREREREREREREREREREREREREREREKDKKRDREEDEEDAYERRKLERKLREKEAAYQERLKNWEIRERKKTREYEKEAEREEERRREMAKEAKRLKEFLEDYDDDRDDPKYYRGSALQKRLRDREKEMEADERDRKREKEELEEIRQRLLAEGHPDPDAELQRMEQEAERRRQPQIKQEPESEEEEEEKQEKEEKREEPMEEEEEPEQKPCLKPTLRPISSAPSVSSASGNATPNTPGDESPCGIIIPHENSPDQQQPEEHRPKIGLSLKLGASNSPGQPNSVKRKKLPVDSVFNKFEDEDSDDVPRKRKLVPLDYGEDDKNATKGTVNTEEKRKHIKSLIEKIPTAKPELFAYPLDWSIVDSILMERRIRPWINKKIIEYIGEEEATLVDFVCSKVMAHSSPQSILDDVAMVLDEEAEVFIVKMWRLLIYETEAKKIGLVK

SEQ ID NO: 828006 - protein, 697 aa, Homo sapiens
MGIPALPPGIPPPQFPGFPPPVPPGTPMIPVPMSIMAPAPTVLVPTVSMVGKHLGARKDHPGLKAKENDENCGPTTTVFVGNISEKASDMLIRQLLAKCGLVLSWKRVQGASGKLQAFGFCEYKEPESTLRALRLLHDLQIGEKKLLVKVDAKTKAQLDEWKAKKKASNGNARPETVTNDDEEALDEETKRRDQMIKGAIEVLIREYSSELNAPSQESDSHPRKKKKEKKEDIFRRFPVAPLIPYPLITKEDINAIEMEEDKRDLISREISKFRDTHKKLEEEKGKKEKERQEIEKERRERERERERERERREREREREREREREKEKERERERERDRDRDRTKERDRDRDRERDRDRDRERSSDRNKDRSRSREKSRDREREREREREREREREREREREREREREREREREREKDKKRDREEDEEDAYERRKLERKLREKEAAYQERLKNWEIRERKKTREYEKEAEREEERRREMAKEAKRLKEFLEDYDDDRDDPKYYRGSALQKRLRDREKEMEADERDRKREKEELEEIRQRLLAEGHPDPDAELQRMEQEAERRRQPQIKQEPESEEEEEEKQEKEEKREEPMEEEEEPEQKPCLKPTLRPISSAPSVSSASGNATPNTPGDESPCGIIIPHENSPDQQQPEEHRPKIGLSLKLVLLVLLYLQLPRVLRRSEKFNFLALVLPIVLVSLIL

SEQ ID NO: 828007 - protein, 820 aa, Homo sapiens
WGENQIPVRGHLAHWSIHELNFNSPFNHLISPLCFFIQGFFIVISDSFWPCIPIEAFFFAFPTTTVFVGNISEKASDMLIRQLLAKCGLVLSWKRVQGASGKLQAFGFCEYKEPESTLRALRLLHDLQIGEKKLLVKVDAKTKAQLDEWKAKKKASNGNARPETVTNDDEEALDEETKRRDQMIKGAIEVLIREYSSELNAPSQESDSHPRKKKKEKKEDIFRRFPVAPLIPYPLITKEDINAIEMEEDKRDLISREISKFRDTHKKLEEEKGKKEKERQEIEKERRERERERERERERREREREREREREREKEKERERERERDRDRDRTKERDRDRDRERDRDRDRERSSDRNKDRSRSREKSRDREREREREREREREREREREREREREREREREREREKDKKRDREEDEEDAYERRKLERKLREKEAAYQERLKNWEIRERKKTREYEKEAEREEERRREMAKEAKRLKEFLEDYDDDRDDPKYYRGSALQKRLRDREKEMEADERDRKREKEELEEIRQRLLAEGHPDPDAELQRMEQEAERRRQPQIKQEPESEEEEEEKQEKEEKREEPMEEEEEPEQKPCLKPTLRPISSAPSVSSASGNATPNTPGDESPCGIIIPHENSPDQQQPEEHRPKIGLSLKLGASNSPGQPNSVKRKKLPVDSVFNKFEDEDSDDVPRKRKLVPLDYGEDDKNATKGTVNTEEKRKHIKSLIEKIPTAKPELFAYPLDWSIVDSILMERRIRPWINKKIIEYIGEEEATLVDFVCSKVMAHSSPQSILDDVAMVLDEEAEVFIVKMWRLLIYETEAKKIGLVK

SEQ ID NO: 828008 - protein, 832 aa, Homo sapiens [sequence omitted]

SEQ ID NO: 828009 - protein, 577 aa, Homo sapiens
GHIGVLRLSLSSRIIKLRDSQYEKLEEEKGKKEKERQEIEKERRERERERERERERREREREREREREREKEKERERERERDRDRDRTKERDRDRDRERDRDRDRERSSDRNKDRSRSREKSRDREREREREREREREREREREREREREREREREREREKDKKRDREEDEEDAYERRKLERKLREKEAAYQERLKNWEIRERKKTREYEKEAEREEERRREMAKEAKRLKEFLEDYDDDRDDPKYYRGSALQKRLRDREKEMEADERDRKREKEELEEIRQRLLAEGHPDPDAELQRMEQEAERRRQPQIKQEPESEEEEEEKQEKEEKREEPMEEEEEPEQKPCLKPTLRPISSAPSVSSASGNATPNTPGDESPCGIIIPHENSPDQQQPEEHRPKIGLSLKLGASNSPGQPNSVKRKKLPVDSVFNKFEDEDSDDVPRKRKLVPLDYGEDDKNATKGTVNTEEKRKHIKSLIEKIPTAKPELFAYPLDWSIVDSILMERRIRPWINKKIIEYIGEEEATLVDFVCSKVMAHSSPQSILDDVAMVLDEEAEVFIVKMWRLLIYETEAKKIGLVK

SEQ ID NO: 828010 - protein, 564 aa, Homo sapiens
RRLLHGLHVRKRHLHRPMKMPFSQEIEKERRERERERERERERREREREREREREREKEKERERERERDRDRDRTKERDRDRDRERDRDRDRERSSDRNKDRSRSREKSRDREREREREREREREREREREREREREREREREREREKDKKRDREEDEEDAYERRKLERKLREKEAAYQERLKNWEIRERKKTREYEKEAEREEERRREMAKEAKRLKEFLEDYDDDRDDPKYYRGSALQKRLRDREKEMEADERDRKREKEELEEIRQRLLAEGHPDPDAELQRMEQEAERRRQPQIKQEPESEEEEEEKQEKEEKREEPMEEEEEPEQKPCLKPTLRPISSAPSVSSASGNATPNTPGDESPCGIIIPHENSPDQQQPEEHRPKIGLSLKLGASNSPGQPNSVKRKKLPVDSVFNKFEDEDSDDVPRKRKLVPLDYGEDDKNATKGTVNTEEKRKHIKSLIEKIPTAKPELFAYPLDWSIVDSILMERRIRPWINKKIIEYIGEEEATLVDFVCSKVMAHSSPQSILDDVAMVLDEEAEVFIVKMWRLLIYETEAKKIGLVK

SEQ ID NO: 828011 - protein, 339 aa, Homo sapiens [sequence omitted]

SEQ ID NO: 828012 - protein, 667 aa, Homo sapiens
MGIPALPPGIPPPQFPGFPPPVPPGTPMIPVPMSIMAPAPTVLVPTVSMVGKHLGARKDHPGLKAKENDENCGPTTTVFVGNISEKASDMLIRQLLAKCGLVLSWKRVQGASGKLQAFGFCEYKEPESTLRALRLLHDLQIGEKKLLVKVDAKTKAQLDEWKAKKKASNGNARPETVTNDDEEALDEETKRRDQMIKGAIEVLIREYSSELNAPSQESDSHPRKKKKEKKEDIFRRFPVAPLIPYPLITKEDINAIEMEEDKRDLISREISKFRDTHKKLEEEKGKKEKERQEIEKERRERERERERERERREREREREREREREKEKERERERERDRDRDRTKERDRDRDRERDRDRDRERSSDRNKDRSRSREKSRDREREREREREREREREREREREREREREREREREREKDKKRDREEDEEDAYERRKLERKLREKEAAYQERLKNWEIRERKKTREYEKEAEREEERRREMAKEAKRLKEFLEDYDDDRDDPKYYRGSALQKRLRDREKEMEADERDRKREKEELEEIRQRLLAEGHPDPDAELQRMEQEAERRRQPQIKQEPESEEEEEDAYERRKLERKLREKEAAYQERLKTWEIRERKKTREYEKEAEREEDRRREMAKEAKRLKEFLEDHNKYRVDASTLNLLCKYKPNCHGLLS

SEQ ID NO: 828013 - protein, 609 aa, Homo sapiens
MGIPALPPGIPPPQFPGFPPPVPPGTPMIPVPMSIMAPAPTVLVPTVSMVGKHLGARKDHPGLKAKENDENCGPTTTVFVGNISEKASDMLIRQLLAKCGLVLSWKRVQGASGKLQAFGFCEYKEPESTLRALRLLHDLQIGEKKLLVKVDAKTKAQLDEWKAKKKASNGNARPETVTNDDEEALDEETKRRDQMIKGAIEVLIREYSSELNAPSQESDSHPRKKKKEKKEDIFRRFPVAPLIPYPLITKEDINAIEMEEDKRDLISREISKFRDTHKKLEEEKGKKEKERQEIEKERRERERERERERERREREREREREREREKEKERERERERDRDRDRTKERDRDRDRERDRDRDRERSSDRNKDRSRSREKSRDREREREREREREREREREREREREREREREREREREKDKKRDREEDEEDAYERRKLERKLREKEAAYQERLKNWEIRERKKTREYEKEAEREEERRREMAKEAKRLKEFLEDYDDDRDDPKYYSREGLQKRLRDRERENESENENGSERESERGNGSEKEKKTKNGTEKKMKKMHTNEENLKENSERKKLLIKSALRLGKSENERKPGNMRKKLKEKKTEEEKWPKKLND

SEQ ID NO: 828014 - protein, 482 aa, Homo sapiens
MGIPALPPGIPPPQFPGFPPPVPPGTPMIPVPMSIMAPAPTVLVPTVSMVGKHLGARKDHPGLKAKENDENCGPTTTVFVGNISEKASDMLIRQLLAKCGLVLSWKRVQGASGKLQAFGFCEYKEPESTLRALRLLHDLQIGEKKLLVKVDAKTKAQLDEWKAKKKASNGNARPETVTNDDEEALDEETKRRDQMIKGAIEVLIREYSSELNAPSQESDSHPRKKKKEKKEDIFRRFPVAPLIPYPLITKEDINAIEMEEDKRDLISREISKFRDTHKKLEEEKGKKEKERQEIEKERRERERERERERERREREREREREREREKEKERERERERDRDRDRTKERDRDRDRERDRDRDRERSSDRNKDRSRSREKSRDREREREREREREREREREREREREREREREREREREKDKKRDREEDEEDAYERRKLERKLREKEAAYQERLKNWEIRERKKTREYEKEAEREEERRREMAKGS

SEQ ID NO: 828015 - protein, 465 aa, Homo sapiens
MGIPALPPGIPPPQFPGFPPPVPPGTPMIPVPMSIMAPAPTVLVPTVSMVGKHLGARKDHPGLKAKENDENCGPTTTVFVGNISEKASDMLIRQLLAKCGLVLSWKRVQGASGKLQAFGFCEYKEPESTLRALRLLHDLQIGEKKLLVKVDAKTKAQLDEWKAKKKASNGNARPETVTNDDEEALDEETKRRDQMIKGAIEVLIREYSSELNAPSQESDSHPRKKKKEKKEDIFRRFPVAPLIPYPLITKEDINAIEMEEDKRDLISREISKFRDTHKKLEEEKGKKEKERQEIEKERRERERERERERERREREREREREREREKEKERERERERDRDRDRTKERDRDRDRERDRDRDRERSSDRNKDRSRSREKSRDREREREREREREREREREREREREREREREREREREKDKKRDREEDEEDAYERRKLERKLREKEAAYQERLKNWEIREHIKKIIIK

SEQ ID NO: 828016 - protein, 348 aa, Homo sapiens
MGIPALPPGIPPPQFPGFPPPVPPGTPMIPVPMSIMAPAPTVLVPTVSMVGKHLGARKDHPGLKAKENDENCGPTTTVFVGNISEKASDMLIRQLLAKCGLVLSWKRVQGASGKLQAFGFCEYKEPESTLRALRLLHDLQIGEKKLLVKVDAKTKAQLDEWKAKKKASNGNARPETVTNDDEEALDEETKRRDQMIKGAIEVLIREYSSELNAPSQESDSHPRKKKKEKKEDIFRRFPVAPLIPYPLITKEDINAIEMEEDKRDLISREISKFRDTHKKLEEEKGKKEKERQEIEKERRERERERERERERREREREREREREREKEKEREQFGSLQKTRTHGPNNYS

SEQ ID NO: 828017 - protein, 283 aa, Homo sapiens
MGIPALPPGIPPPQFPGFPPPVPPGTPMIPVPMSIMAPAPTVLVPTVSMVGKHLGARKDHPGLKAKENDENCGPTTTVFVGNISEKASDMLIRQLLAKCGLVLSWKRVQGASGKLQAFGFCEYKEPESTLRALRLLHDLQIGEKKLLVKVDAKTKAQLDEWKAKKKASNGNARPETVTNDDEEALDEETKRRDQMIKGAIEVLIREYSSELNAPSQESDSHPRKKKKEKKEDIFRRFPVAPLIPYPLITKEDINAIEMEEDKRDLISREISKFRDTHKRSYGD

SEQ ID NO: 828018 - protein, 167 aa, Homo sapiens
MGIPALPPGIPPPQFPGFPPPVPPGTPMIPVPMSIMAPAPTVLVPTVSMVGKHLGARKDHPGLKAKENDENCGPTTTVFVGNISEKASDMLIRQLLAKCGLVLSWKRVQGASGKLQAFGFCEYKEPESTLRALRLLHDLQIGEKKLLVKVDAKTKAQNAVSTAAVGN

SEQ ID NO: 828019 - protein, 832 aa, Homo sapiens [sequence omitted]

SEQ ID NO: 828020 - protein, 832 aa, Homo sapiens [sequence omitted]

SEQ ID NO: 828021 - protein, 699 aa, Homo sapiens
MGIPALPPGIPPPQFPGFPPPVPPGTPMIPVPMSIMAPAPTVLVPTVSMVGKHLGARKDHPGLKAKENDENCGPTTTVFVGNISEKASDMLIRQLLAKCGLVLSWKRVQGASGKLQAFGFCEYKEPESTLRALRLLHDLQIGEKKLLVKVDAKTKAQLDEWKAKKKASNGNARPETVTNDDEEALDEETKRRDQMIKGAIEVLIREYSSELNAPSQESDSHPRKKKKEKKEDIFRRFPVAPLIPYPLITKEDINAIEMEEDKRDLISREISKFRDTHKKLEEEKGKKEKERQEIEKERRERERERERERERREREREREREREREKEKERERERERDRDRDRTKERDRDRDRERDRDRDRERSSDRNKDRSRSREKSRDREREREREREREREREREREREREREREREREREREKDKKRDREEDEEDAYERRKLERKLREKEAAYQERLKNWEIRERKKTREYEKEAEREEERRREMAKEAKRLKEFLEDYDDDRDDPKYYRGSALQKRLRDREKEMEADERDRKREKEELEEIRQRLLAEGHPDPDAELQRMEQEAERRRQPQIKQEPESEEEEEEKQEKEEKREEPMEEEEEPEQKPCLKPTLRPISSAPSVSSASGNATPNTPGDESPCGIIIPHENSPDQQQPEEHRPKIGLSLKLVLLVLLYLQLPRVLRRSEKFNFLALVSSELFFTVGIFL

SEQ ID NO: 828022 - protein, 591 aa, Homo sapiens
MYQWFGVFVPSTGLCAGKNLNTGATELTLKVLLLVSRKLEEEKGKKEKERQEIEKERRERERERERERERREREREREREREREKEKERERERERDRDRDRTKERDRDRDRERDRDRDRERSSDRNKDRSRSREKSRDREREREREREREREREREREREREREREREREREREKDKKRDREEDEEDAYERRKLERKLREKEAAYQERLKNWEIRERKKTREYEKEAEREEERRREMAKEAKRLKEFLEDYDDDRDDPKYYRGSALQKRLRDREKEMEADERDRKREKEELEEIRQRLLAEGHPDPDAELQRMEQEAERRRQPQIKQEPESEEEEEEKQEKEEKREEPMEEEEEPEQKPCLKPTLRPISSAPSVSSASGNATPNTPGDESPCGIIIPHENSPDQQQPEEHRPKIGLSLKLGASNSPGQPNSVKRKKLPVDSVFNKFEDEDSDDVPRKRKLVPLDYGEDDKNATKGTVNTEEKRKHIKSLIEKIPTAKPELFAYPLDWSIVDSILMERRIRPWINKKIIEYIGEEEATLVDFVCSKVMAHSSPQSILDDVAMVLDEEAEVFIVKMWRLLIYETEAKKIGLVK

SEQ ID NO: 828023 - protein, 638 aa, Homo sapiens
MIKGAIEVLIREYSSELNAPSQESDSHPRKKKKEKKEDIFRRFPVAPLIPYPLITKEDINAIEMEEDKRDLISREISKFRDTHKKLEEEKGKKEKERQEIEKERRERERERERERERREREREREREREREKEKERERERERDRDRDRTKERDRDRDRERDRDRDRERSSDRNKDRSRSREKSRDREREREREREREREREREREREREREREREREREREKDKKRDREEDEEDAYERRKLERKLREKEAAYQERLKNWEIRERKKTREYEKEAEREEERRREMAKEAKRLKEFLEDYDDDRDDPKYYRGSALQKRLRDREKEMEADERDRKREKEELEEIRQRLLAEGHPDPDAELQRMEQEAERRRQPQIKQEPESEEEEEEKQEKEEKREEPMEEEEEPEQKPCLKPTLRPISSAPSVSSASGNATPNTPGDESPCGIIIPHENSPDQQQPEEHRPKIGLSLKLGASNSPGQPNSVKRKKLPVDSVFNKFEDEDSDDVPRKRKLVPLDYGEDDKNATKGTVNTEEKRKHIKSLIEKIPTAKPELFAYPLDWSIVDSILMERRIRPWINKKIIEYIGEEEATLVDFVCSKVMAHSSPQSILDDVAMVLDEEAEVFIVKMWRLLIYETEAKKIGLVK

SEQ ID NO: 828024 - protein, 596 aa, Homo sapiens
REREREKDKKRDREEDEEDAYERRKLERKLREKEAAYQERLKKLEEEKGKKEKERQEIEKERRERERERERERERREREREREREREREKEKERERERERDRDRDRTKERDRDRDRERDRDRDRERSSDRNKDRSRSREKSRDREREREREREREREREREREREREREREREREREREKDKKRDREEDEEDAYERRKLERKLREKEAAYQERLKNWEIRERKKTREYEKEAEREEERRREMAKEAKRLKEFLEDYDDDRDDPKYYRGSALQKRLRDREKEMEADERDRKREKEELEEIRQRLLAEGHPDPDAELQRMEQEAERRRQPQIKQEPESEEEEEEKQEKEEKREEPMEEEEEPEQKPCLKPTLRPISSAPSVSSASGNATPNTPGDESPCGIIIPHENSPDQQQPEEHRPKIGLSLKLGASNSPGQPNSVKRKKLPVDSVFNKFEDEDSDDVPRKRKLVPLDYGEDDKNATKGTVNTEEKRKHIKSLIEKIPTAKPELFAYPLDWSIVDSILMERRIRPWINKKIIEYIGEEEATLVDFVCSKVMAHSSPQSILDDVAMVLDEEAEVFIVKMWRLLIYETEAKKIGLVK

SEQ ID NO: 828025 - protein, 505 aa, Homo sapiens
MNNFNENTSHKLLPPPLITKEDINAIEMEEDKRDLISREISKFRDTHKKLEEEKGKKEKERQEIEKERREREREREREREREREREREKDKKRDREEDEEDAYERRKLERKLREKEAAYQERLKNWEIRERKKTREYEKEAEREEERRREMAKEAKRLKEFLEDYDDDRDDPKYYRGSALQKRLRDREKEMEADERDRKREKEELEEIRQRLLAEGHPDPDAELQRMEQEAERRRQPQIKQEPESEEEEEEKQEKEEKREEPMEEEEEPEQKPCLKPTLRPISSAPSVSSASGNATPNTPGDESPCGIIIPHENSPDQQQPEEHRPKIGLSLKLGASNSPGQPNSVKRKKLPVDSVFNKFEDEDSDDVPRKRKLVPLDYGEDDKNATKGTVNTEEKRKHIKSLIEKIPTAKPELFAYPLDWSIVDSILMERRIRPWINKKIIEYIGEEEATLVDFVCSKVMAHSSPQSILDDVAMVLDEEAEVFIVKMWRLLIYETEAKKIGLVK

SEQ ID NO: 828026 - protein, 386 aa, Homo sapiens
MSGSEKSVYTKKGRVIFITCMLILYIVLISSKAKEAKRLKEFLEDYDDDRDDPKYYRGSALQKRLRDREKEMEADERDRKREKEELEEIRQRLLAEGHPDPDAELQRMEQEAERRRQPQIKQEPESEEEEEEKQEKEEKREEPMEEEEEPEQKPCLKPTLRPISSAPSVSSASGNATPNTPGDESPCGIIIPHENSPDQQQPEEHRPKIGLSLKLGASNSPGQPNSVKRKKLPVDSVFNKFEDEDSDDVPRKRKLVPLDYGEDDKNATKGTVNTEEKRKHIKSLIEKIPTAKPELFAYPLDWSIVDSILMERRIRPWINKKIIEYIGEEEATLVDFVCSKVMAHSSPQSILDDVAMVLDEEAEVFIVKMWRLLIYETEAKKIGLVK

SEQ ID NO: 828027 - protein, 501 aa, Homo sapiens
MGIPALPPGIPPPQFPGFPPPVPPGTPMIPVPMSIMAPAPTVLVPTVSMVGKHLGARKDHPGLKAKENDENCGPTTTVFVGNISEKASDMLIRQLLAKCGLVLSWKRVQGASGKLQAFGFCEYKEPESTLRALRLLHDLQIGEKKLLVKVDAKTKAQLDEWKAKKKASNGNARPETVTNDDEEALDEETKRRDQMIKGAIEVLIREYSSELNAPSQESDSHPRKKKKEKKEDIFRRFPVAPLIPYPLITKEDINAIEMEEDKRDLISREISKFRDTHKKLEEEKGKKEKERQEIEKERRERERERERERERREREREREREREREKEKERERERERDRDRDRTKERDRDRDRERDRDRDRERSSDRNKDRSRSREKSRDREREREREREREREREREREREREREREREREREREKDKKRDREEDEEDAYERRKLERKLREKEAAYQERLKNWEIRERKKTREYEKEAEREEERRREMAKEAKRLKEFLEDYDDDRHIPLL

SEQ ID NO: 828028 - protein, 175 aa, Homo sapiens
MVGYGASNSPGQPNSVKRKKLPVDSVFNKFEDEDSDDVPRKRKLVPLDYGEDDKNATKGTVNTEEKRKHIKSLIEKIPTAKPELFAYPLDWSIVDSILMERRIRPWINKKIIEYIGEEEATLVDFVCSKVMAHSSPQSILDDVAMVLDEEAEVFIVKMWRLLIYETEAKKIGLVK

SEQ ID NO: 828029 - protein, 419 aa, Homo sapiens
MGIPALPPGIPPPQFPGFPPPVPPGTPMIPVPMSIMAPAPTVLVPTVSMVGKHLGARKDHPGLKAKENDENCGPTTTVFVGNISEKASDMLIRQLLAKCGLVLSWKRVQGASGKLQAFGFCEYKEPESTLRALRLLHDLQIGEKKLLVKVDAKTKAQLDEWKAKKKASNGNARPETVTNDDEEALDEETKRRDQMIKGAIEVLIREYSSELNAPSQESDSHPRKKKKEKKEDIFRRFPVAPLIPYPLITKEDINAIEMEEDKRDLISREISKFRDTHKKLEEEKGKKEKERQEIEKERRERERERERERERREREREREREREREKEKERERERERDRDRDRTKERDRDRDRERDRDRDRERRTFSADFQWPQLIPYPLITKEDINAIEMEEDKRDLISREISKFRDTHKKLEEEKGKK

SEQ ID NO: 828030 - protein, 283 aa, Homo sapiens; identical to SEQ ID NO: 828017

SEQ ID NO: 828031 - protein, 289 aa, Homo sapiens [sequence omitted]

SEQ ID NO: 828032 - protein, 145 aa, Homo sapiens
SARRARGRPPSARRAARLYLRPVRVGAWALSLPGERRAEISNQWSALVTWIPEGREGSTVSSAADCCSKNVFSTSFESPSHGNPSTPTRDPTPAVSRISSTCTSRDPNDSCTNEHYGSCSNCLSTHCVYGWKAFGRKKGSSRLKG

SEQ ID NO: 828033 - protein, 403 aa, Homo sapiens [sequence omitted]

SEQ ID NO: 828034 - protein, 403 aa, Homo sapiens [sequence omitted]

SEQ ID NO: 828035 - protein, 403 aa, Homo sapiens [sequence omitted]

SEQ ID NO: 828036 - protein, 403 aa, Homo sapiens [sequence omitted]

SEQ ID NO: 828037 - protein, 387 aa, Homo sapiens
MTAIIKEIVSRNKRRYQEDGFDLDLTYIYPNIIAMGFPAERLEGVYRNNIDDVVRFLDSKHKNHYKIYNLCAERHYDTAKFNCRVAQYPFEDHNPPQLELIKPFCEDLDQWLSEDDNHVAAIHCKAGKGRTGVMICAYLLHRGKFLKAQEALDFYGEVRTRDKKLLKNHLDYRPVALLFHKMMFETIPMFSGGTCNPQFVVCQLKVKIYSSNSGPTRREDKFMYFEFPQPLPVCGDIKVEFFHKQNKMLKKDKMFHFWVNTFFIPGPEETSEKVENGSLCDQEIDSICSIERADNDKEYLVLTLTKNDLDKANKDKANRYFSPNFKVKLYFTKTVEEPSNPEASSSTSVTPDVSDNEPDHYRYSDTTDSDPENEPFDEDQHTQITKV

SEQ ID NO: 828038 - protein, 172 aa, Homo sapiens
MTAIIKEIVSRNKRRYQEDGFDLDLTYIYPNIIAMGFPAERLEGVYRNNIDDVVRFLDSKHKNHYKIYNLCAERHYDTAKFNCRVAQYPFEDHNPPQLELIKPFCEDLDQWLSEDDNHVAAIHCKAGKGRTGVMICAYLLHRGKFLKAQEALDFYGEVRTRDKKILSLWSAS

SEQ ID NO: 828039 - protein, 403 aa, Homo sapiens [sequence omitted]

SEQ ID NO: 828040 - protein, 403 aa, Homo sapiens [sequence omitted]

SEQ ID NO: 828041 - protein, 403 aa, Homo sapiens [sequence omitted]

SEQ ID NO: 828042 - protein, 369 aa, Homo sapiens
MGFPAERLEGVYRNNIDDVVRFLDSKHKNHYKIYNLCAERHYDTAKFNCRVAQYPFEDHNPPQLELIKPFCEDLDQWLSEDDNHVAAIHCKAGKGRTGVMICAYLLHRGKFLKAQEALDFYGEVRTRDKKGVTIPSQRRYVYYYSYLLKNHLDYRPVALLFHKMMFETIPMFSGGTCNPQFVVCQLKVKIYSSNSGPTRREDKFMYFEFPQPLPVCGDIKVEFFHKQNKMLKKDKMFHFWVNTFFIPGPEETSEKVENGSLCDQEIDSICSIERADNDKEYLVLTLTKNDLDKANKDKANRYFSPNFKVKLYFTKTVEEPSNPEASSSTSVTPDVSDNEPDHYRYSDTTDSDPENEPFDEDQHTQITKV

SEQ ID NO: 828043 - protein, 344 aa, Homo sapiens
MTAIIKEIVSRNKRRYQEDGFDLDLTYIYPNIIAMGFPAERLEGVYRNNIDDVVRFLDSKHKNHYKIYNLCAERHYDTAKFNCRVAQYPFEDHNPPQLELIKPFCEDLDQWLSEDDNHVAAIHCKAGKGRTGVMICAYLLHRGKFLKAQEALDFYGEVRTRDKKGVTIPSQRRYVYYYSYLLKNHLDYRPVALLFHKMMFETIPMFSGGTCNPQFVVCQLKVKIYSSNSGPTRREDKFMYFEFPQPLPVCGDIKVEFFHKQNKMLKKDKMFHFWVNTFFIPGPEETSEKVENGSLCDQEIDSICSIERADNDKEYLVLTLTKNDLDKANKDKANRYFSPNFKVS

SEQ ID NO: 828044 - protein, 196 aa, Homo sapiens
MTAIIKEIVSRNKRRYQEDGFDLDLTYIYPNIIAMGFPAERLEGVYRNNIDDVVRFLDSKHKNHYKIYNLCAERHYDTAKFNCRVAQYPFEDHNPPQLELIKPFCEDLDQWLSEDDNHVAAIHCKAGKGRTGVMICAYLLHRGKFLKAQEALDFYGEVRTRDKKGKLFFDVFPFLFLDLRIYWKTDFGFLFFLQFY

SEQ ID NO: 828045 - protein, 105 aa, Homo sapiens
MTAIIKEIVSRNKRRYQEDGFDLDLTYIYPNIIAMGFPAERLEGVYRNNIDDVVRKECFDFLFQILMFIFMLCFHLEKISKPQKKILCDVTIIVVLYNHFLAYRT

SEQ ID NO: 828046 - protein, 403 aa, Homo sapiens [sequence omitted]

SEQ ID NO: 828047 - protein, 403 aa, Homo sapiens [sequence omitted]

SEQ ID NO: 828048 - protein, 403 aa, Homo sapiens [sequence omitted]

SEQ ID NO: 828049 - protein, 371 aa, Homo sapiens
MLLLKSVMIAFRKISKLLFQSKKFLDSKHKNHYKIYNLCAERHYDTAKFNCRVAQYPFEDHNPPQLELIKPFCEDLDQWLSEDDNHVAAIHCKAGKGRTGVMICAYLLHRGKFLKAQEALDFYGEVRTRDKKGVTIPSQRRYVYYYSYLLKNHLDYRPVALLFHKMMFETIPMFSGGTCNPQFVVCQLKVKIYSSNSGPTRREDKFMYFEFPQPLPVCGDIKVEFFHKQNKMLKKDKMFHFWVNTFFIPGPEETSEKVENGSLCDQEIDSICSIERADNDKEYLVLTLTKNDLDKANKDKANRYFSPNFKVKLYFTKTVEEPSNPEASSSTSVTPDVSDNEPDHYRYSDTTDSDPENEPFDEDQHTQITKV

SEQ ID NO: 828050 - protein, 403 aa, Homo sapiens [sequence omitted]

SEQ ID NO: 828051 - protein, 347 aa, Homo sapiens
MTAIIKEIVSRNKRRYQEDGFDLDLTYIYPNIIAMGFPAERLEGVYRNNIDDVVRFLDSKHKNHYKIYNLCAERHYDTAKFNCRVAQYPFEDHNPPQLELIKPFCEDLDQWLSEDDNHVAAIHCKAGKGRTGVMICAYLLHRGKFLKAQEALDFYGEVRTRDKKGVTIPSQRRYVYYYSYLLKNHLDYRPVALLFHKMMFETIPMFSGGTCNPQFVVCQLKVKIYSSNSGPTRREDKFMYFEFPQPLPVCGDIKVEFFHKQNKMLKKGQGLTMLPRLVSNSWAQAVLTLWHPKELELQDKCFTFWEIHSSYPDQRKLRKVEMEVMCQNPCLADKAAIMQGFYSYLQK

SEQ ID NO: 828052 - protein, 282 aa, Homo sapiens
SGRIYKREPGLFLVVPPGLLAGEGVCQLLRHSSPGRCLLKSRARGSVIMSRYGRYGGETKVYVGNLGTGAGKGELERAFSYYGPLRTVWIARNPPGFAFVEFEDPRDAEDAVRGLDGKVICGSRVRVELSTGMPRRSRFDRPPARRPFDPNDRCYECGEKGHYAYDCHRYSRRRRSRSRSRSHSRSRGRRYSRSRSRSRGRRSRSASPRRSRSISLRRSRSASLRRSRSGSIKGSRYFQIPVEVKIKIQVYFTTKKQPIKVQISISKKKSFPIRKSSQKCKS

SEQ ID NO: 828053 - protein, 282 aa, Homo sapiens; identical to SEQ ID NO: 828052

SEQ ID NO: 828054 - protein, 304 aa, Homo sapiens
SGRIYKREPGLFLVVPPGLLAGEGVCQLLRHSSPGRCLLKSRARGSVIMSRYGRYGGETKVYVGNLGTGAGKGELERAFSYYGPLRTVWIEKGHYAYDCHRYSRRRRSRSRSRSHSRSRGRRYSRSRSRSRGRRSRSASPRRSRSISLRRSRSASLRRSRSGSIKGSRYFQQPVEVKIKIQLLRPRSSRSSPDSFKSVQESRCFRALGALPYGLVISQPRQGMKDCYKECEEEWGPREAGGVLTHLWFLVRWNRYYPIHRKPLSTRRLRKRKILRLARTTGVGVCWEKVLGRSGSIGRGVSDPL

SEQ ID NO: 828055 - protein, 282 aa, Homo sapiens; identical to SEQ ID NO: 828052

SEQ ID NO: 828056 - protein, 282 aa, Homo sapiens; identical to SEQ ID NO: 828052

SEQ ID NO: 828057 - protein, 271 aa, Homo sapiens
SGRIYKREPGLFLVVPPGLLAGEGVCQLLRHSSPGRCLLKSRARGSVIMSRYGRYGGETKVYVGNLGTGAGKGELERAFSYYGPLRTVWIARNPPGFAFVEFEDPRDAEDAVRGLDGKVICGSRVRVELSTGMPRRSRFDRPPARRPFDPNDRCYECGEKGHYAYDCHRYSRRRRSRSRSRSHSRSRGRRYSRSRSRSRGRRSRSASPRRSRSISLRRSRSASLRRSRSGSIKGSRYFQIPVEVKIKIQVYFTTKKQPIKVQISISKKKVS

SEQ ID NO: 828058 - protein, 210 aa, Homo sapiens
SGRIYKREPGLFLVVPPGLLAGEGVCQLLRHSSPGRCLLKSRARGSVIMSRYGRYGGETKVYVGNLGTGAGKGELERAFSYYGPLRTVWIARNPPGFAFVEFEDPRDAEDAVRGLDGKVICGSRVRVELSTGMPRRSRFDRPPARRPFDPNDRCYECGEKGHYAYDCHRYSRRRRSRGIYFNKGMVGILVNQVILLLARQKLVFFYKLEC

SEQ ID NO: 828059 - protein, 270 aa, Homo sapiens
SGRIYKREPGLFLVVPPGLLAGEGVCQLLRHSSPGRCLLKSRARGSVIMSRYGRYGGETKVYVGNLGTGAGKGELERAFSYYGPLRTVWIARNPPGFAFVEFEDPRDAEDAVRGLDGKVICGSRVRVELSTGMPRRSRFDRPPARRPFDPNDRCYECGEKGHYAYDCHRYSRRRRSRSRSRSHSRSRGRRYSRSRSRSRGRRSRSASPRRSRSISLRRSRSASLRRSRSGSIKGSRYFQIPVEVKIKIQVYFTTKKQSFPIRKSSQKCKS

SEQ ID NO: 828060 - protein, 185 aa, Homo sapiens
SGRIYKREPGLFLVVPPGLLAGEGVCQLLRHSSPGRCLLKSRARGSVIMSRYGRYGGETKVYVGNLGTGAGKGELERAFSYYGPLRTVWIARNPPGFAFVEFEDPRDAEDAVRGLDGKVICGSRVRVELSTGMPRRSRFDRPPARRPFDPNDRCYECGEKGHYAYDCHRYSRRRRSRFLRLSQSP

SEQ ID NO: 828061 - protein, 210 aa, Homo sapiens; identical to SEQ ID NO: 828058

SEQ ID NO: 828062 - protein, 170 aa, Homo sapiens
SGRIYKREPGLFLVVPPGLLAGEGVCQLLRHSSPGRCLLKSRARGSVIMSRYGRYGGETKVYVGNLGTGAGKGELERAFSYYGPLRTVWIARNPPGFAFVEFEDPRDAEDAVRGLDGKVICGSRVRVELSTGMPRRSRFDRPPARRPFDPNDRCYECGEVFILIKEWLVF

SEQ ID NO: 828063 - protein, 210 aa, Homo sapiens; identical to SEQ ID NO: 828058

SEQ ID NO: 828064 - protein, 117 aa, Homo sapiens
MGQRGSTCKLARSRSRSHSRSRGRRYSRSRSRSRGRRSRSASPRRSRSISLRRSRSASLRRSRSGSIKGSRYFQIPVEVKIKIQVYFTTKKQPIKVQISISKKKSFPIRKSSQKCKS

SEQ ID NO: 828065 - protein, 116 aa, Homo sapiens
LLLLNSRPRRRSRSRSHSRSRGRRYSRSRSRSRGRRSRSASPRRSRSISLRRSRSASLRRSRSGSIKGSRYFQIPVEVKIKIQVYFTTKKQPIKVQISISKKKSFPIRKSSQKCKS

SEQ ID NO: 828066 - protein, 271 aa, Homo sapiens; identical to SEQ ID NO: 828057

SEQ ID NO: 828067 - protein, 270 aa, Homo sapiens; identical to SEQ ID NO: 828059

SEQ ID NO: 828068 - protein, 113 aa, Homo sapiens [sequence omitted]

SEQ ID NO: 828069 - protein, 210 aa, Homo sapiens; identical to SEQ ID NO: 828058

SEQ ID NO: 828070 - protein, 287 aa, Homo sapiens
SGRIYKREPGLFLVVPPGLLAGEGVCQLLRHSSPGRCLLKSRARGSVIMSRYGRYGGETKVYVGNLGTGAGKGELERAFSYYGPLRTVWIARNPPGFAFVEFEDPRDAEDAVRGLDGKVICGSRVRVELSTGMPRRSRFDRPPARRPFDPNDRCYECGEKGHYAYDCHRYSRRRRSRSRSRSHSRSRGRRYSRSRSRSRGRRSRSASPRRSRSISLRRSRSASLRRSRSGSIKGSRYFQIPVEVKIKIQVYFTTKKQRSTVPDSPSPKRSRSPSGSPRRSASPERMD

SEQ ID NO: 828071 - protein, 210 aa, Homo sapiens; identical to SEQ ID NO: 828058

SEQ ID NO: 828072 - protein, 145 aa, Homo sapiens
SGRIYKREPGLFLVVPPGLLAGEGVCQLLRHSSPGRCLLKSRARGSVIMSRYGRYGGETKVYVGNLGTGAGKGELERAFSYYGPLRTVWIARNPPGFAFVEFEDPRDAEDAVRGLDGKYLSLTQQEQGRKVKVSISSTIKIYLSS

SEQ ID NO: 828073 - protein, 538 aa, Homo sapiens
ISQEAVQSEMGSSRAPWMGRVGGHGMMALLLAGLLLPGTLAKSIGTFSDPCKDPTRITSPNDPCLTGKGDSSGFSSYSGSSSSGSSISSARSSGGGSSGSSSGSSIAQGGSAGSFKPGTGYSQVSYSSGSGSSLQGASGSSQLGSSSSHSGSSGSHSGSSSSHSSSSSSFQFSSSSFQVGNGSALPTNDNSYRGILNPSQPGQSSSSSQTSGVSSSGQSVSSNQRPCSSDIPDSPCSGGPIVSHSGPYIPSSHSVSGGQRPVVVVVDQHGSGAPGVVQGPPCSNGGLPGKPCPPITSVDKSYGGYEVVGGSSDSYLVPGMTYSKGKIYPVGYFTKENPVKGSPGVPSFAAGPPISEGKYFSSNPIIPSQSAASSAIAFQPVGTGGVQLCGGGSTGSKGPCSPSSSRVPSSSSISSSSGSPYHPCGSASQSPCSPPGTGSFSSSSSSQSSGKIILQPCGSKSSSSGHPCMSVSSLTLTGGPDGSPHPDPSAGAKPCGSSSAGKIPCRSIRDILAQVKPLGPQLADPEVFLPQGELLDSP

SEQ ID NO: 828074 - protein, 108 aa, Homo sapiens
MPLGFRSQFHPTLHYRAHHALLDHRPQHTHCLSRPLSQPLPVAISLSAQMIPWVRETLGHPQRLEQAPCCPWILDRWLSKLWGLGADFLPSWSPGSPLRVWVVLFLRL

SEQ ID NO: 828075 - protein, 156 aa, Homo sapiens
KFSTPTTPSAATFQCFGFWASYHISSSLTPPTSSRTSTFSFECSSNCTTVSLTSYTSYHFGTGTPAPAFWNRATLSITCHRSSSPAPRTKQYSNTYCFRVLSSSWLCGPATWGSRTSAGISSAWTDSNSQSTGATNISKQLPWVRVALKWTPKTFF

SEQ ID NO: 828076 - protein, 156 aa, Homo sapiens; identical to SEQ ID NO: 828075

SEQ ID NO: 828077 - protein, 156 aa, Homo sapiens; identical to SEQ ID NO: 828075

SEQ ID NO: 828078 - protein, 156 aa, Homo sapiens; identical to SEQ ID NO: 828075

SEQ ID NO: 828079 - protein, 102 aa, Homo sapiens
MSSPPEGKLETKAGHPPAVKAGGMRIVQKHPHTGDTKEEKDKDDQEWESPSPPKPTVFISGVIARGDKDFPPAAAQVAHQKPHASMDKHPSPRTQHIQQPRK

SEQ ID NO: 828080 - protein, 102 aa, Homo sapiens; identical to SEQ ID NO: 828079

SEQ ID NO: 828081 - protein, 102 aa, Homo sapiens; identical to SEQ ID NO: 828079

SEQ ID NO: 828082 - protein, 108 aa, Homo sapiens
MSSPPEGKLETKAGHPPAVKAGGMRIVQKHPHTGDTKEEKDKDDQEWESPSPPKPTVFISGVIARGDKDFPPAAAQVAHQKPHASMDKHPSPRTQHIQQPRKSQHAKE

SEQ ID NO: 828083 - protein, 102 aa, Homo sapiens; identical to SEQ ID NO: 828079

SEQ ID NO: 828084 - protein, 102 aa, Homo sapiens; identical to SEQ ID NO: 828079

SEQ ID NO: 828085 - protein, 102 aa, Homo sapiens; identical to SEQ ID NO: 828079

SEQ ID NO: 828086 - protein, 102 aa, Homo sapiens; identical to SEQ ID NO: 828079

SEQ ID NO: 828087 - protein, 102 aa, Homo sapiens; identical to SEQ ID NO: 828079

SEQ ID NO: 828088 - protein, 33 aa, Homo sapiens
MFSKNPIRLNINICSLFYDSDNSWAMWGPVLCI

SEQ ID NO: 828089 - protein, 102 aa, Homo sapiens; identical to SEQ ID NO: 828079

SEQ ID NO: 828090 - protein, 102 aa, Homo sapiens; identical to SEQ ID NO: 828079

SEQ ID NO: 828091 - protein, 156 aa, Homo sapiens
LVEAGVYSARLTTVFISGVIARGDKDFPPAAAQVAHQKPHASMDKHPAPWPRLCCTWYFPDRENQQFRPNPTLLGNLRQNQVLCPLPYISIFKTRNSSSPNLVYGESGWMSFEDHCAPRGAISRICQDPRKILALVLFQQSPDVLVYGLKNKKAHI

SEQ ID NO: 828092 - protein, 102 aa, Homo sapiens; identical to SEQ ID NO: 828079

SEQ ID NO: 828093 - protein, 102 aa, Homo sapiens; identical to SEQ ID NO: 828079

SEQ ID NO: 828094 - protein, 102 aa, Homo sapiens; identical to SEQ ID NO: 828079

SEQ ID NO: 828095 - protein, 102 aa, Homo sapiens; identical to SEQ ID NO: 828079

SEQ ID NO: 828096 - protein, 102 aa, Homo sapiens; identical to SEQ ID NO: 828079

SEQ ID NO: 828097 - protein, 102 aa, Homo sapiens; identical to SEQ ID NO: 828079

SEQ ID NO: 828098 - protein, 167 aa, Homo sapiens
SHTYPMLPAGTLVGAGLGLPHPQTPCFLQGHWWVLAWGFLTHKHHASCRDTGGCWPGGSSPTNTMLPAGTLMGAGLDVPHIQPPCFLQGRWWALAWGFLTYKPHASCRGAGGPWPGASSHTNPMLPTGTLVDAGLRLPHTQLLSFRRDAGGHWPGASSPTNPMLPID

SEQ ID NO: 828099 - protein, 549 aa, Homo sapiens
MAAQLLTDEALESVTFRDVTVDFTQEEWQQLEPAQKDLYRDVMLENYRNLVSLDWETRPEMKELDPKNDISEDKLSVVGEATGGPTRNGARGPGSEGVWEPGSWPERPRGDAGAEWEPLGIPQGNKLLGGSVPACHELKAFANQGCVLVPPRLDDPTEKGACPPVRRGKNFSSTSDLSKPPMPCEEKKTYDCSECGKAFSRSSSLIKHQRIHTGEKPFECDTCGKHFIERSSLTIHQRVHTGEKPYACGDCGKAFSQRMNLTVHQRTHTGEKPYVCDVCGKAFRKTSSLTQHERIHTGEKPYACGDCGKAFSQNMHLIVHQRTHTGEKPYVCPECGRAFSQNMHLTEHQRTHTGEKPYACKECGKAFNKSSSLTLHQRNHTGEKPYVCGECGKAFSQSSYLIQHQRFHIGVKPFECSECGKAFSKNSSLTQHQRIHTGEKPYECYICKKHFTGRSSLIVHQIVHTGEKPYVCGECGKAFSQSAYLIEHQRIHTGEKPYRCGQCGKSFIKNSSLTVHQRIHTGEKPYRCGECGKTFSRNTNLTRHLRIHT

SEQ ID NO: 828100 - protein, 489 aa, Homo sapiens
MKELDPKNDISEDKLSVVGEATGGPTRNGARGPGSEGVWEPGSWPERPRGDAGAEWEPLGIPQGNKLLGGSVPACHELKAFANQGCVLVPPRLDDPTEKGACPPVRRGKNFSSTSDLSKPPMPCEEKKTYDCSECGKAFSRSSSLIKHQRIHTGEKPFECDTCGKHFIERSSLTIHQRVHTGEKPYACGDCGKAFSQRMNLTVHQRTHTGEKPYVCDVCGKAFRKTSSLTQHERIHTGEKPYACGDCGKAFSQNMHLIVHQRTHTGEKPYVCPECGRAFSQNMHLTEHQRTHTGEKPYACKECGKAFNKSSSLTLHQRNHTGEKPYVCGECGKAFSQSSYLIQHQRFHIGVKPFECSECGKAFSKNSSLTQHQRIHTGEKPYECYICKKHFTGRSSLIVHQIVHTGEKPYVCGECGKAFSQSAYLIEHQRIHTGEKPYRCGQCGKSFIKNSSLTVHQRIHTGEKPYRCGECGKTFSRNTNLTRHLRIHT

SEQ ID NO: 828101 - protein, 125 aa, Homo sapiens
SHSNANPSRLLTTPSWTLTPVISLNPPPLQYKVNILTRLAAELNKFMLEKVTEDTSSVLRSPMPGVVVAVSVKPGDAVAEGQEICVIEAMKMQNSMTAGKTGTVKSVHCQAGDTVGEGDLLVELE

SEQ ID NO: 828102 - protein, 728 aa, Homo sapiens
MAGFWVGTAPLVAAGRRGRWPPQQLMLSAALRTLKHVLYYSRQCLMVSRNLGSVGYDPNEKTFDKILVANRGEIACRVIRTCKKMGIKTVAIHSDVDASSVHVKMADEAVCVGPAPTSKSYLNMDAIMEAIKKTRAQAVHPGYGFLSENKEFARCLAAEDVVFIGPDTHAIQAMGDKIESKLLAKKAEVNTIPGFDGVVKDAEEAVRIAREIGYPVMIKASAGGGGKGMRIAWDDEETRDGFRLSSQEAASSFGDDRLLIEKFIDNPRHIEIQVLGDKHGNALWLNERECSIQRRNQKVVEEAPSIFLDAETRRAMGEQAVALARAVKYSSAGTVEFLVDSKKNFYFLEMNTRLQVEHPVTECITGLDLVQEMIRVAKGYPLRHKQADIRINGWAVECRVYAEDPYKSFGLPSIGRLSQYQEPLHLPGVRVDSGIQPGSDISIYYDPMISKLITYGSDRTEALKRMADALDNYVIRGVTHNIALLREVIINSRFVKGDISTKFLSDVYPDGFKGHMLTKSEKNQLLAIASSLFVAFQLRAQHFQENSRMPVIKPDIANWELSVKLHDKVHTVVASNNGSVFSVEVDGSKLNVTSTWNLASPLLSVSVDGTQRTVQCLSREAGGNMSIQFLGTVYKVNILTRLAAELNKFMLEKVTEDTSSVLRSPMPGVVVAVSVKPGDAVAEGQEICVIEAMKMQNSMTAGKTGTVKSVHCQAGDTVGEGDLLVELE

SEQ ID NO: 828103 - protein, 728 aa, Homo sapiens; identical to SEQ ID NO: 828102

SEQ ID NO: 828104 - protein, 702 aa, Homo sapiens
MAGFWVGTAPLVAAGRRGRWPPQQLMLSAALRTLKTFDKILVANRGEIACRVIRTCKKMGIKTVAIHSDVDASSVHVKMADEAVCVGPAPTSKSYLNMDAIMEAIKKTRAQAVHPGYGFLSENKEFARCLAAEDVVFIGPDTHAIQAMGDKIESKLLAKKAEVNTIPGFDGVVKDAEEAVRIAREIGYPVMIKASAGGGGKGMRIAWDDEETRDGFRLSSQEAASSFGDDRLLIEKFIDNPRHIEIQVLGDKHGNALWLNERECSIQRRNQKVVEEAPSIFLDAETRRAMGEQAVALARAVKYSSAGTVEFLVDSKKNFYFLEMNTRLQVEHPVTECITGLDLVQEMIRVAKGYPLRHKQADIRINGWAVECRVYAEDPYKSFGLPSIGRLSQYQEPLHLPGVRVDSGIQPGSDISIYYDPMISKLITYGSDRTEALKRMADALDNYVIRGVTHNIALLREVIINSRFVKGDISTKFLSDVYPDGFKGHMLTKSEKNQLLAIASSLFVAFQLRAQHFQENSRMPVIKPDIANWELSVKLHDKVHTVVASNNGSVFSVEVDGSKLNVTSTWNLASPLLSVSVDGTQRTVQCLSREAGGNMSIQFLGTVYKVNILTRLAAELNKFMLEKVTEDTSSVLRSPMPGVVVAVSVKPGDAVAEGQEICVIEAMKMQNSMTAGKTGTVKSVHCQAGDTVGEGDLLVELE

SEQ ID NO: 828105 - protein, 710 aa, Homo sapiens
MAGFWVGTAPLVAAGRRGRWPPQQLMLSAALRTLKHVLYYSRQCLMVSRNLGSVGYDPNEKTFDKILVANRGEIACRVIRTCKKMGIKTVAIHSDVDASSVHVKMADEAVCVGPAPTSKSYLNMDAIMEAIKKTRAQAVHPGYGFLSADTHAIQAMGDKIESKLLAKKAEVNTIPGFDGVVKDAEEAVRIAREIGYPVMIKASAGGGGKGMRIAWDDEETRDGFRLSSQEAASSFGDDRLLIEKFIDNPRHIEIQVLGDKHGNALWLNERECSIQRRNQKVVEEAPSIFLDAETRRAMGEQAVALARAVKYSSAGTVEFLVDSKKNFYFLEMNTRLQVEHPVTECITGLDLVQEMIRVAKGYPLRHKQADIRINGWAVECRVYAEDPYKSFGLPSIGRLSQYQEPLHLPGVRVDSGIQPGSDISIYYDPMISKLITYGSDRTEALKRMADALDNYVIRGVTHNIALLREVIINSRFVKGDISTKFLSDVYPDGFKGHMLTKSEKNQLLAIASSLFVAFQLRAQHFQENSRMPVIKPDIANWELSVKLHDKVHTVVASNNGSVFSVEVDGSKLNVTSTWNLASPLLSVSVDGTQRTVQCLSREAGGNMSIQFLGTVYKVNILTRLAAELNKFMLEKVTEDTSSVLRSPMPGVVVAVSVKPGDAVAEGQEICVIEAMKMQNSMTAGKTGTVKSVHCQAGDTVGEGDLLVELE

SEQ ID NO: 828106 - protein, 543 aa, Homo sapiens
MPHGINVESHFLLLQDAEEAVRIAREIGYPVMIKASAGGGGKGMRIAWDDEETRDGFRLSSQEAASSFGDDRLLIEKFIDNPRHIEIQVLGDKHGNALWLNERECSIQRRNQKVVEEAPSIFLDAETRRAMGEQAVALARAVKYSSAGTVEFLVDSKKNFYFLEMNTRLQVEHPVTECITGLDLVQEMIRVAKGYPLRHKQADIRINGWAVECRVYAEDPYKSFGLPSIGRLSQYQEPLHLPGVRVDSGIQPGSDISIYYDPMISKLITYGSDRTEALKRMADALDNYVIRGVTHNIALLREVIINSRFVKGDISTKFLSDVYPDGFKGHMLTKSEKNQLLAIASSLFVAFQLRAQHFQENSRMPVIKPDIANWELSVKLHDKVHTVVASNNGSVFSVEVDGSKLNVTSTWNLASPLLSVSVDGTQRTVQCLSREAGGNMSIQFLGTVYKVNILTRLAAELNKFMLEKVTEDTSSVLRSPMPGVVVAVSVKPGDAVAEGQEICVIEAMKMQNSMTAGKTGTVKSVHCQAGDTVGEGDLLVELE

SEQ ID NO: 828107 - protein, 324 aa, Homo sapiens
MGAGGLFSVRCAVAVTVLVSLNFEVRVDSGIQPGSDISIYYDPMISKLITYGSDRTEALKRMADALDNYVIRGVTHNIALLREVIINSRFVKGDISTKFLSDVYPDGFKGHMLTKSEKNQLLAIASSLFVAFQLRAQHFQENSRMPVIKPDIANWELSVKLHDKVHTVVASNNGSVFSVEVDGSKLNVTSTWNLASPLLSVSVDGTQRTVQCLSREAGGNMSIQFLGTVYKVNILTRLAAELNKFMLEKVTEDTSSVLRSPMPGVVVAVSVKPGDAVAEGQEICVIEAMKMQNSMTAGKTGTVKSVHCQAGDTVGEGDLLVELE

SEQ ID NO: 828108 - protein, 301 aa, Homo sapiens
NISLCPEICFQKIESQVYFVRVDSGIQPGSDISIYYDPMISKLITYGSDRTEALKRMADALDNYVIRGVTHNIALLREVIINSRFVRHMLTKSEKNQLLAIASSLFVAFQLRAQHFQENSRMPVIKPDIANWELSVKLHDKVHTVVASNNGSVFSVEVDGSKLNVTSTWNLASPLLSVSVDGTQRTVQCLSREAGGNMSIQFLGTVYKVNILTRLAAELNKFMLEKVTEDTSSVLRSPMPGVVVAVSVKPGDAVAEGQEICVIEAMKMQNSMTAGKTGTVKSVHCQAGDTVGEGDLLVELE

SEQ ID NO: 828109 - protein, 128 aa, Homo sapiens
WVIPVLQPSEITLLSCLSREAGGNMSIQFLGTVYKVNILTRLAAELNKFMLEKVTEDTSSVLRSPMPGVVVAVSVKPGDAVAEGQEICVIEAMKMQNSMTAGKTGTVKSVHCQAGDTVGEGDLLVELE

SEQ ID NO: 828110 - protein, 744 aa, Homo sapiens
MAGFWVGTAPLVAAGRRGRWPPQQLMLSAALRTLKHVLYYSRQCLMVSRNLGSVGYDPNEKTFDKILVANRGEIACRVIRTCKKMGIKTVAIHSDVDASSVHVKMADEAVCVGPAPTSKSYLNMDAIMEAIKKTRAQAVHPGYGFLSENKEFARCLAAEDVVFIGPDTHAIQAMGDKIESKLLAKKAEVNTIPGFDGVVKDAEEAVRIAREIGYPVMIKASAGGGGKGMRIAWDDEETRDGFRLSSQEAASSFGDDRLLIEKFIDNPRHIEIQVLGDKHGNALWLNERECSIQRRNQKVVEEAPSIFLDAETRRAMGEQAVALARAVKYSSAGTVEFLVDSKKNFYFLEMNTRLQVEHPVTECITGLDLVQEMIRVAKGYPLRHKQADIRINGWAVECRVYAEDPYKSFGLPSIGRLSQYQEPLHLPGVRVDSGIQPGSDISIYYDPMISKLITYGSDRTEALKRMADALDNYVIRGVTHNIALLREVIINSRFVKGDISTKFLSDVYPDGFKGHMLTKSEKNQLLAIASSLFVAFQLRAQHFQENSRMPVIKPDIANWELSVKLHDKVHTVVASNNGSVFSVEVDGSKLNVTSTWNLASPLLSVSVDGTQRTVQCLSREAGGNMSIQFLGTVYKVNILTRLAAELNKFMLEKVTEDTSSVLRSPMPGVVVAVSVKPGDAATSSLSVEICLFWTFQVAEGQEICVIEAMKMQNSMTAGKTGTVKSVHCQAGDTVGEGDLLVELE

SEQ ID NO: 828111 - protein, 681 aa, Homo sapiens
MAGFWVGTAPLVAAGRRGRWPPQQLMLSAALRTLKHVLYYSRQCLMVSRNLGSVGYDPNEKTFDKILVANRGEIACRVIRTCKKMGIKTVAIHSDVDASSVHVKMADEAVCVGPAPTSKSYLNMDAIMEAIKKTRAQAVHPGYGFLSENKEFARCLAAEDVVFIGPDTHAIQAMGDKIESKLLAKKAEVNTIPGFDGVVKDAEEAVRIAREIGYPVMIKASAGGGGKGMRIAWDDEETRDGFRLSSQEAASSFGDDRLLIEKFIDNPRHIEIQVLGDKHGNALWLNERECSIQRRNQKVVEEAPSIFLDAETRRAMGEQAVALARAVKYSSAGTVEFLVDSKKNFYFLEMNTRLQVEHPVTECITGLDLVQEMIRVAKGYPLRHKQADIRINGWAVECRVYAEDPYKSFGLPSIGRLSQYQEPLHLPGVRVDSGIQPGSDISIYYDPMISKLITYGSDRTEALKRMADALDNYVIRGVTHNIALLREVIINSRFVKGDISTKFLSDVYPDGFKGHMLTKSEKNQLLAIASSLFVAFQLRAQHFQENSRMPVIKPDIANWELSVKLHDKVHTVVASNNGSVFSVEVDGSKLNVTSTWNLASPLLSVSVDGTQRTVQCLSREAGGNMSIQFLGTVVAEGQEICVIEAMKMQNSMTAGKTGTVKSVHCQAGDTVGEGDLLVELE

SEQ ID NO: 828112 - protein, 728 aa, Homo sapiens; identical to SEQ ID NO: 828102

SEQ ID NO: 828113 - protein, 728 aa, Homo sapiens; identical to SEQ ID NO: 828102

SEQ ID NO: 828114 - protein, 728 aa, Homo sapiens; identical to SEQ ID NO: 828102

SEQ ID NO: 828115 - protein, 728 aa, Homo sapiens; identical to SEQ ID NO: 828102

SEQ ID NO: 828116 - protein, 728 aa, Homo sapiens; identical to SEQ ID NO: 828102

SEQ ID NO: 828117 - protein, 728 aa, Homo sapiens; identical to SEQ ID NO: 828102

SEQ ID NO: 828118 - protein, 728 aa, Homo sapiens; identical to SEQ ID NO: 828102

SEQ ID NO: 828119 - protein, 728 aa, Homo sapiens; identical to SEQ ID NO: 828102

SEQ ID NO: 828120 - protein, 728 aa, Homo sapiens; identical to SEQ ID NO: 828102

SEQ ID NO: 828121 - protein, 776 aa, Homo sapiens
MAGFWVGTAPLVAAGRRGRWPPQQLMLSAALRTLKHVLYYSRQCLMVSRNLGSVGYDPNEKTFDKILVANRGEIACRVIRTCKKMGIKTVAIHSDVDASSVHVKMADEAVCVGPAPTSKSYLNMDAIMEAIKKTRAQAVHPGYGFLSENKEFARCLAAEDVVFIGPDTHAIQAMGDKIESKLLAKKAEVNTIPGFDGVVKDAEEAVRIAREIGYPVMIKASAGGGGKGMRIAWDDEETRDGFRLSSQEAASSFGDDRLLIEKFIDNPRHIEIQVLGDKHGNALWLNERECSIQRRNQKVVEEAPSIFLDAETRRAMGEQAVALARAVKYSSAGTVEFLVDSKKNFYFLEMNTRLQVEHPVTECITGLDLVQEMIRVAKGYPLRHKQADIRINGWAVECRVYAEDPYKSFGLPSIGRLSQYQEPLHLPGVRVDSGIQPGSDISIYYDPMISKLITYGSDRTEALKRMADALDNYVIRGVTHNIALLREVIINSRFVKGDISTKFLSDVYPDGFKGHMLTKSEKNQLLAIASSLFVAFQLRAQHFQENSRMPVIKPDIANWELSVKLHDKVHTVVASNNGSVFSVEVDGSKLNVTSTWNLASPLLSVSVDGTQRTVQCLSREAGGNMSIQFLGTVYKVNILTRLAAELNKFMLEKVTEDTSSVLRSPMPGVVVAVSHKTAHSLTPPSHNNLPTEPPQPPRPTTQSLLPTTPFFIHRNYNTSIIFHSPPPTPHNTPPTPPPTPLHSTPTQHPKITSPPAHHPPHPRTHHTPYNHPTTSH

SEQ ID NO: 828122 - protein, 640 aa, Homo sapiens
MAGFWVGTAPLVAAGRRGRWPPQQLMLSAALRTLKHVLYYSRQCLMVSRNLGSVGYDPNEKTFDKILVANRGEIACRVIRTCKKMGIKTVAIHSDVDASSVHVKMADEAVCVGPAPTSKSYLNMDAIMEAIKKTRAQAVHPGYGFLSENKEFARCLAAEDVVFIGPDTHAIQAMGDKIESKLLAKKAEVNTIPGFDGVVKDAEEAVRIAREIGYPVMIKASAGGGGKGMRIAWDDEETRDGFRLSSQEAASSFGDDRLLIEKFIDNPRHIEIQVLGDKHGNALWLNERECSIQRRNQKVVEEAPSIFLDAETRRAMGEQAVALARAVKYSSAGTVEFLVDSKKNFYFLEMNTRLQVEHPVTECITGLDLVQEMIRVAKGYPLRHKQADIRINGWAVECRVYAEDPYKSFGLPSIGRLSQYQEPLHLPGVRVDSGIQPGSDISIYYDPMISKLITYGSDRTEALKRMADALDNYVIRGVTHNIALLREVIINSRFVKGDISTKFLSDVYPDGFKGHMLTKSEKNQLLAIASSLFVAFQLRAQHFQENSRMPVIKPDIANWELSVKLHDKVHTVVASNNGSVFSVEVDGSKLNVTSTWNLASPLLSVSVDGTQRTVQCLSREAGGNMSIQFLGTVPWRKLLD

SEQ ID NO: 828123 - protein, 640 aa, Homo sapiens; identical to SEQ ID NO: 828122

SEQ ID NO: 828124 - protein, 642 aa, Homo sapiens
MAGFWVGTAPLVAAGRRGRWPPQQLMLSAALRTLKHVLYYSRQCLMVSRNLGSVGYDPNEKTFDKILVANRGEIACRVIRTCKKMGIKTVAIHSDVDASSVHVKMADEAVCVGPAPTSKSYLNMDAIMEAIKKTRAQAVHPGYGFLSENKEFARCLAAEDVVFIGPDTHAIQAMGDKIESKLLAKKAEVNTIPGFDGVVKDAEEAVRIAREIGYPVMIKASAGGGGKGMRIAWDDEETRDGFRLSSQEAASSFGDDRLLIEKFIDNPRHIEIQVLGDKHGNALWLNERECSIQRRNQKVVEEAPSIFLDAETRRAMGEQAVALARAVKYSSAGTVEFLVDSKKNFYFLEMNTRLQVEHPVTECITGLDLVQEMIRVAKGYPLRHKQADIRINGWAVECRVYAEDPYKSFGLPSIGRLSQYQEPLHLPGVRVDSGIQPGSDISIYYDPMISKLSMDNYVIRGVTHNIALLREVIINSRFVKGDISTKFLSDVYPDGFKGHMLTKSEKNQLLAIASSLFVAFQLRAQHFQENSRMPVIKPDIANWELSVKLHDKVHTVVASNNGSVFSVEVDGSKLNVTSTWNLASPLLSVSVDGTQRTVQCLSREAGGNMSIQFLGTVYKVNILTRLAAEMLYSGGCRLLSPG

SEQ ID NO: 828125 - protein, 644 aa, Homo sapiens
MAGFWVGTAPLVAAGRRGRWPPQQLMLSAALRTLKHVLYYSRQCLMVSRNLGSVGYDPNEKTFDKILVANRGEIACRVIRTCKKMGIKTVAIHSDVDASSVHVKMADEAVCVGPAPTSKSYLNMDAIMEAIKKTRAQAVHPGYGFLSENKEFARCLAAEDVVFIGPDTHAIQAMGDKIESKLLAKKAEVNTIPGFDGVVKDAEEAVRIAREIGYPVMIKASAGGGGKGMRIAWDDEETRDGFRLSSQEAASSFGDDRLLIEKFIDNPRHIEIQVLGDKHGNALWLNERECSIQRRNQKVVEEAPSIFLDAETRRAMGEQAVALARAVKYSSAGTVEFLVDSKKNFYFLEMNTRLQVEHPVTECITGLDLVQEMIRVAKGYPLRHKQADIRINGWAVECRVYAEDPYKSFGLPSIGRLSQYQEPLHLPGVRVDSGIQPGSDISIYYDPMISKLSMDNYVIRGVTHNIALLREVIINSRFVKGDISTKFLSDVYPDGFKGHMLTKSEKNQLLAIASSLFVAFQLRAQHFQENSRMPVIKPDIANWELSVKLHDKVHTVVASNNGSVFSVEVDGSKLNVTSTWNLASPLLSVSVDGTQRTVQCLPREEVEHEHLVSWTVSKVNILTRLGEDFTKLFLEWAAFFLETR

SEQ ID NO: 828126 - protein, 519 aa, Homo sapiens
MAGFWVGTAPLVAAGRRGRWPPQQLMLSAALRTLKHVLYYSRQCLMVSRNLGSVGYDPNEKTFDKILVANRGEIACRVIRTCKKMGIKTVAIHSDVDASSVHVKMADEAVCVGPAPTSKSYLNMDAIMEAIKKTRAQAVHPGYGFLSENKEFARCLAAEDVVFIGPDTHAIQAMGDKIESKLLAKKAEVNTIPGFDGVVKDAEEAVRIAREIGYPVMIKASAGGGGKGMRIAWDDEETRDGFRLSSQEAASSFGDDRLLIEKFIDNPRHIEIQVLGDKHGNALWLNERECSIQRRNQKVVEEAPSIFLDAETRRAMGEQAVALARAVKYSSAGTVEFLVDSKKNFYFLEMNTRLQVEHPVTECITGLDLVQEMIRVAKGYPLRHKQADIRINGWAVECRVYAEDPYKSFGLPSIGRLSQYQEPLHLPGVRVDSGIQPGSDISIYYDPMISKLITYGSDRTEALKRMADALDNYVIRGVTHNIALLREVIINSRFVKGDISTKFLSDVYPDGFKAHANQE

SEQ ID NO: 828127 - protein, 577 aa, Homo sapiens
  misc_feature (556)..(556): Xaa can be any naturally occurring amino acid
MAGFWVGTAPLVAAGRRGRWPPQQLMLSAALRTLKHVLYYSRQCLMVSRNLGSVGYDPNEKTFDKILVANRGEIACRVIRTCKKMGIKTVAIHSDVDASSVHVKMADEAVCVGPAPTSKSYLNMDAIMEAIKKTRAQAVHPGYGFLSENKEFARCLAAEDVVFIGPDTHAIQAMGDKIESKLLAKKAEVNTIPGFDGVVKDAEEAVRIAREIGYPVMIKASAGGGGKGMRIAWDDEETRDGFRLSSQEAASSFGDDRLLIEKFIDNPRHIEIQVLGDKHGNALWLNERECSIQRRNQKVVEEAPSIFLDAETRRAMGEQAVALARAVKYSSAGTVEFLVDSKKNFYFLEMNTRLQVEHPVTECITGLDLVQEMIRVAKGYPLRHKQADIRINGWAVECRVYAEDPYKSFGLPSIGRLSQYQEPLHLPGVRVDSGIQPGSDISIYYDPMISKLITYGSDRTEALKRMADALDNYVIRGVTHNIALLREVIINSRFVKGDISTKFLSDVYPDGFKGHMLTKSEKNQLLAIASSLFVAFQLRAQHFQENSRMLLLTRHXSTGALSIVEGDGSKLVPAVAW

SEQ ID NO: 828128 - protein, 202 aa, Homo sapiens
MAGFWVGTAPLVAAGRRGRWPPQQLMLSAALRTLKHVLYYSRQCLMVSRNLGSVGYDPNEKTFDKILVANRGEIACRVIRTCKKMGIKTVAIHSDVDASSVHVKMADEAVCVGPAPTSKSYLNMDAIMEAIKKTRAQAVHPGYGFLSADTHAIQAMGDKIESKLLAKKAEVNTIPGFDGVVKDAEEAVRIARVGYPVMIGLS

SEQ ID NO: 828129 - protein, 86 aa, Homo sapiens
SVTFSSINLFDSAASLVKIFTLYTVTKKLNAHVSTCFSRKTLDSVLRSPMPGVVVAVSVKPGDAVRAVCVSLQDMLVSNFPFQSDG

SEQ ID NO: 828130 - protein, 2409 aa, Homo sapiens
MFINIKSILWMCSTLIVTHALHKVKVGKSPPVRGSLSGKVSLPCHFSTMPTLPPSYNTSEFLRIKWSKIEVDKNGKDLKETTVLVAQNGNIKIGQDYKGRVSVPTHPEAVGDASLTVVKLLASDAGLYRCDVMYGIEDTQDTVSLTVDGVVFHYRAATSRYTLNFEAAQKACLDVGAVIATPEQLFAAYEDGFEQCDAGWLADQTVRYPIRAPRVGCYGDKMGKAGVRTYGFRSPQETYDVYCYVDHLDGDVFHLTVPSKFTFEEAAKECENQDARLATVGELQAAWRNGFDQCDYGWLSDASVRHPVTVARAQCGGGLLGVRTLYRFENQTGFPPPDSRFDAYCFKRRMSDLSVIGHPIDSESKEDEPCSEETDPVHDLMAEILPEFPDIIEIDLYHSEENEEEEEECANATDVTTTPSVQYINGKHLVTTVPKDPEAAEARRGQFESVAPSQNFSDSSESDTHPFVIAKTELSTAVQPNESTETTESLEVTWKPETYPETSEHFSGGEPDVFPTVPFHEEFESGTAKKGAESVTERDTEVGHQAHEHTEPVSLFPEESSGEIAIDQESQKIAFARATEVTFGEEVEKSTSVTYTPTIVPSSASAYVSEEEAVTLIGNPWPDDLLSTKESWVEATPRQVVELSGSSSIPITEGSGEAEEDEDTMFTMVTDLSQRNTTDTLITLDTSRIITESFFEVPATTIYPVSEQPSAKVVPTKFVSETDTSEWISSTTVEEKKRKEEEGTTGTASTFEVYSSTQRSDQLILPFELESPNVATSSDSGTRKSFMSLTTPTQSEREMTDSTPVFTETNTLENLGAQTTEHSSIHQPGVQEGLTTLPRSPASVFMEQGSGEAAADPETTTVSSFSLNVEYAIQAEKEVAGTLSPHVETTFSTEPTGLVLSTVMDRVVAENITQTSREIVISERLGEPNYGAEIRGFSTGFPLEEDFSGDFREYSTVSHPIAKEETVMMEGSGDAAFRDTQTSPSTVPTSVHISHISDSEGPSSTMVSTSAFPWEEFTSSAEGSGEQLVTVSSSVVPVLPSAVQKFSGTASSIIDEGLGEVGTVNEIDRRSTILPTAEVEGTKAPVEKEEVKVSGTVSTNFPQTIEPAKLWSRQEVNPVRQEIESETTSEEQIQEEKSFESPQNSPATEQTIFDSQTFTETELKTTDYSVLTTKKTYSDDKEMKEEDTSLVNMSTPDPDANGLESYTTLPEATEKSHFFLATALVTESIPAEHVVTDSPIKKEESTKHFPKGMRPTIQESDTELLFSGLGSGEEVLPTLPTESVNFTEVEQINNTLYPHTSQVESTSSDKIEDFNRMENVAKEVGPLVSQTDIFEGSGSVTSTTLIEILSDTGAEGPTVAPLPFSTDIGHPQNQTVRWAEEIQTSRPQTITEQDSNKNSSTAEINETTTSSTDFLARAYGFEMAKEFVTSAPKPSDLYYEPSGEGSGEVDIVDSFHTSATTQATRQESSTTFVSDGSLEKHPEVPSAKAVTADGFPTVSVMLPLHSEQNKSSPDPTSTLSNTVSYERSTDGSFQDRFREFEDSTLKPNRKKPTENIIIDLDKEDKDLILTITESTILEILPELTSDKNTIIDIDHTKPVYEDILGMQTDIDTEVPSEPHDSNDESNDDSTQVQEIYEAAVNLSLTEETFEGSADVLASYTQATHDESMTYEDRSQLDHMGFHFTTGIPAPSTETELDVLLPTATSLPIPRKSATVIPEIEGIKAEAKALDDMFESSTLSDGQAIADQSEIIPTLGQFERTQEEYEDKKHAGPSFQPEFSSGAEEALVDHTPYLSIATTHLMDQSVTEVPDVMEGSNPPYYTDTTLAVSTFAKLSSQTPSSPLTIYSGSEASGHTEIPQPSALPGIDVGSSVMSPQDSFKEIHVNIEATFKPSSEEYLHITEPPSLSPDTKLEPSEDDGKPELLEEMEASPTELIAVEGTEILQDFQNKTDGQVSGEAIKMFPTIKTPEAGTVITTADEIELEGATQWPHSTSASATYGVEAGVVPWLSPQTSERPTLSSSPEINPETQAALIRGQDSTIAASEQQVAARILDSNDQATVNPVEFNTEVATPPFSLLETSNETDFLIGINEESVEGTAIYLPGPDRCKMNPCLNGGTCYPTETSYVCTCVPGYSGDQCELDFDECHSNPCRNGATCVDGFNTFRCLCLPSYVGALCEQDTETCDYGWHKFQGQCYKYFAHRRTWDAAERECRLQGAHLTSILSHEEQMFVNRVGHDYQWIGLNDKMFEHDFRWTDGSTLQYENWRPNQPDSFFSAGEDCVVIIWHENGQWNDVPCNYHLTYTCKKGTVACGQPPVVENAKTFGKMKPRYEINSLIRYHCKDGFIQRHLPTIRCLGNGRWAIPKITCMNPSAYQRTYSMKYFKNSSSAKDNSINTSKHDHRWSRRWQESRR

SEQ ID NO: 828131 - protein, 3396 aa, Homo sapiens
MFINIKSILWMCSTLIVTHALHKVKVGKSPPVRGSLSGKVSLPCHFSTMPTLPPSYNTSEFLRIKWSKIEVDKNGKDLKETTVLVAQNGNIKIGQDYKGRVSVPTHPEAVGDASLTVVKLLASDAGLYRCDVMYGIEDTQDTVSLTVDGVVFHYRAATSRYTLNFEAAQKACLDVGAVIATPEQLFAAYEDGFEQCDAGWLADQTVRYPIRAPRVGCYGDKMGKAGVRTYGFRSPQETYDVYCYVDHLDGDVFHLTVPSKFTFEEAAKECENQDARLATVGELQAAWRNGFDQCDYGWLSDASVRHPVTVARAQCGGGLLGVRTLYRFENQTGFPPPDSRFDAYCFKPKEATTIDLSILAETASPSLSKEPQMVSDRTTPIIPLVDELPVIPTEFPPVGNIVSFEQKATVQPQAITDSLATKLPTPTGSTKKPWDMDDYSPSASGPLGKLDISEIKEEVLQSTTGVSHYATDSWDGVVEDKQTQESVTQIEQIEVGPLVTSMEILKHIPSKEFPVTETPLVTARMILESKTEKKMVSTVSELVTTGHYGFTLGEEDDEDRTLTVGSDESTLIFDQIPEVITVSKTSEDTIHTHLEDLESVSASTTVSPLIMPDNNGSSMDDWEERQTSGRITEEFLGKYLSTTPFPSQHRTEIELFPYSGDKILVEGISTVIYPSLQTEMTHRRERTETLIPEMRTDTYTDEIQEEITKSPFMGKTEEEVFSGMKLSTSLSEPIHVTESSVEMTKSFDFPTLITKLSAEPTEVRDMEEDFTATPGTTKYDENITTVLLAHGTLSVEAATVSKWSWDEDNTTSKPLESTEPSASSKLPPALLTTVGMNGKDKDIPSFTEDGADEFTLIPDSTQKQLEEVTDEDIAAHGKFTIRFQPTTSTGIAEKSTLRDSTTEEKVPPITSTEGQVYATMEGSALGEVEDVDLSKPVSTVPQFAHTSEVEGLAFVSYSSTQEPTTYVDSSHTIPLSVIPKTDWGVLVPSVPSEDEVLGEPSQDILVIDQTRLEATISPETMRTTKITEGTTQEEFPWKEQTAEKPVPALSSTAWTPKEAVTPLDEQEGDGSAYTVSEDELLTGSERVPVLETTPVGKIDHSVSYPPGAVTEHKVKTDEVVTLTPRIGPKVSLSPGPEQKYETEGSSTTGFTSSLSPFSTHITQLMEETTTEKTSLEDIDLGSGLFEKPKATELIEFSTIKVTVPSDITTAFSSVDRLHTTSAFKPSSAITKKPPLIDREPGEETTSDMVIIGESTSHVPPTTLEDIVAKETETDIDREYFTTSSPPATQPTRPPTVEDKEAFGPQALSTPQPPASTKFHPDINVYIIEVRENKTGRMSDLSVIGHPIDSESKEDEPCSEETDPVHDLMAEILPEFPDIIEIDLYHSEENEEEEEECANATDVTTTPSVQYINGKHLVTTVPKDPEAAEARRGQFESVAPSQNFSDSSESDTHPFVIAKTELSTAVQPNESTETTESLEVTWKPETYPETSEHFSGGEPDVFPTVPFHEEFESGTAKKGAESVTERDTEVGHQAHEHTEPVSLFPEESSGEIAIDQESQKIAFARATEVTFGEEVEKSTSVTYTPTIVPSSASAYVSEEEAVTLIGNPWPDDLLSTKESWVEATPRQVVELSGSSSIPITEGSGEAEEDEDTMFTMVTDLSQRNTTDTLITLDTSRIITESFFEVPATTIYPVSEQPSAKVVPTKFVSETDTSEWISSTTVEEKKRKEEEGTTGTASTFEVYSSTQRSDQLILPFELESPNVATSSDSGTRKSFMSLTTPTQSEREMTDSTPVFTETNTLENLGAQTTEHSSIHQPGVQEGLTTLPRSPASVFMEQGSGEAAADPETTTVSSFSLNVEYAIQAEKEVAGTLSPHVETTFSTEPTGLVLSTVMDRVVAENITQTSREIVISERLGEPNYGAEIRGFSTGFPLEEDFSGDFREYSTVSHPIAKEETVMMEGSGDAAFRDTQTSPSTVPTSVHISHISDSEGPSSTMVSTSAFPWEEFTSSAEGSGEQLVTVSSSVVPVLPSAVQKFSGTASSIIDEGLGEVGTVNEIDRRSTILPTAEVEGTKAPVEKEEVKVSGTVSTNFPQTIEPAKLWSRQEVNPVRQEIESETTSEEQIQEEKSFESPQNSPATEQTIFDSQTFTETELKTTDYSVLTTKKTYSDDKEMKEEDTSLVNMSTPDPDANGLESYTTLPEATEKSHFFLATALVTESIPAEHVVTDSPIKKEESTKHFPKGMRPTIQESDTELLFSGLGSGEEVLPTLPTESVNFTEVEQINNTLYPHTSQVESTSSDKIEDFNRMENVAKEVGPLVSQTDIFEGSGSVTSTTLIEILSDTGAEGPTVAPLPFSTDIGHPQNQTVRWAEEIQTSRPQTITEQDSNKNSSTAEINETTTSSTDFLARAYGFEMAKEFVTSAPKPSDLYYEPSGEGSGEVDIVDSFHTSATTQATRQESSTTFVSDGSLEKHPEVPSAKAVTADGFPTVSVMLPLHSEQNKSSPDPTSTLSNTVSYERSTDGSFQDRFREFEDSTLKPNRKKPTENIIIDLDKEDKDLILTITESTILEILPELTSDKNTIIDIDHTKPVYEDILGMQTDIDTEVPSEPHDSNDESNDDSTQVQEIYEAAVNLSLTEETFEGSADVLASYTQATHDESMTYEDRSQLDHMGFHFTTGIPAPSTETELDVLLPTATSLPIPRKSATVIPEIEGIKAEAKALDDMFESSTLSDGQAIADQSEIIPTLGQFERTQEEYEDKKHAGPSFQPEFSSGAEEALVDHTPYLSIATTHLMDQSVTEVPDVMEGSNPPYYTDTTLAVSTFAKLSSQTPSSPLTIYSGSEASGHTEIPQPSALPGIDVGSSVMSPQDSFKEIHVNIEATFKPSSEEYLHITEPPSLSPDTKLEPSEDDGKPELLEEMEASPTELIAVEGTEILQDFQNKTDGQVSGEAIKMFPTIKTPEAGTVITTADEIELEGATQWPHSTSASATYGVEAGVVPWLSPQTSERPTLSSSPEINPETQAALIRGQDSTIAASEQQVAARILDSNDQATVNPVEFNTEVATPPFSLLETSNETDFLIGINEESVEGTAIYLPGPDRCKMNPCLNGGTCYPTETSYVCTCVPGYSGDQCELDFDECHSNPCRNGATCVDGFNTFRCLCLPSYVGALCEQDTETCDYGWHKFQGQCYKYFAHRRTWDAAERECRLQGAHLTSILSHEEQMFVNRVGHDYQWIGLNDKMFEHDFRWTDGSTLQYENWRPNQPDSFFSAGEDCVVIIWHENGQWNDVPCNYHLTYTCKKGTVACGQPPVVENAKTFGKMKPRYEINSLIRYHCKDGFIQRHLPTIRCLGNGRWAIPKITCMNPSAYQRTYSMKYFKNSSSAKDNSINTSKHDHRWSRRWQESRR

SEQ ID NO: 828132 - protein, 2409 aa, Homo sapiens; identical to SEQ ID NO: 828130

SEQ ID NO: 828133 - protein, 2409 aa, Homo sapiens; identical to SEQ ID NO: 828130

SEQ ID NO: 828134 - protein, 2409 aa, Homo sapiens; identical to SEQ ID NO: 828130

SEQ ID NO: 828135 - protein, 2409 aa, Homo sapiens; identical to SEQ ID NO: 828130

SEQ ID NO: 828136 - protein, 2171 aa, Homo sapiens
SPFSTGVDHLDGDVFHLTVPSKFTFEEAAKECENQDARLATVGELQAAWRNGFDQCDYGWLSDASVRHPVTVARAQCGGGLLGVRTLYRFENQTGFPPPDSRFDAYCFKRRMSDLSVIGHPIDSESKEDEPCSEETDPVHDLMAEILPEFPDIIEIDLYHSEENEEEEEECANATDVTTTPSVQYINGKHLVTTVPKDPEAAEARRGQFESVAPSQNFSDSSESDTHPFVIAKTELSTAVQPNESTETTESLEVTWKPETYPETSEHFSGGEPDVFPTVPFHEEFESGTAKKGAESVTERDTEVGHQAHEHTEPVSLFPEESSGEIAIDQESQKIAFARATEVTFGEEVEKSTSVTYTPTIVPSSASAYVSEEEAVTLIGNPWPDDLLSTKESWVEATPRQVVELSGSSSIPITEGSGEAEEDEDTMFTMVTDLSQRNTTDTLITLDTSRIITESFFEVPATTIYPVSEQPSAKVVPTKFVSETDTSEWISSTTVEEKKRKEEEGTTGTASTFEVYSSTQRSDQLILPFELESPNVATSSDSGTRKSFMSLTTPTQSEREMTDSTPVFTETNTLENLGAQTTEHSSIHQPGVQEGLTTLPRSPASVFMEQGSGEAAADPETTTVSSFSLNVEYAIQAEKEVAGTLSPHVETTFSTEPTGLVLSTVMDRVVAENITQTSREIVISERLGEPNYGAEIRGFSTGFPLEEDFSGDFREYSTVSHPIAKEETVMMEGSGDAAFRDTQTSPSTVPTSVHISHISDSEGPSSTMVSTSAFPWEEFTSSAEGSGEQLVTVSSSVVPVLPSAVQKFSGTASSIIDEGLGEVGTVNEIDRRSTILPTAEVEGTKAPVEKEEVKVSGTVSTNFPQTIEPAKLWSRQEVNPVRQEIESETTSEEQIQEEKSFESPQNSPATEQTIFDSQTFTETELKTTDYSVLTTKKTYSDDKEMKEEDTSLVNMSTPDPDANGLESYTTLPEATEKSHFFLATALVTESIPAEHVVTDSPIKKEESTKHFPKGMRPTIQESDTELLFSGLGSGEEVLPTLPTESVNFTEVEQINNTLYPHTSQVESTSSDKIEDFNRMENVAKEVGPLVSQTDIFEGSGSVTSTTLIEILSDTGAEGPTVAPLPFSTDIGHPQNQTVRWAEEIQTSRPQTITEQDSNKNSSTAEINETTTSSTDFLARAYGFEMAKEFVTSAPKPSDLYYEPSGEGSGEVDIVDSFHTSATTQATRQESSTTFVSDGSLEKHPEVPSAKAVTADGFPTVSVMLPLHSEQNKSSPDPTSTLSNTVSYERSTDGSFQDRFREFEDSTLKPNRKKPTENIIIDLDKEDKDLILTITESTILEILPELTSDKNTIIDIDHTKPVYEDILGMQTDIDTEVPSEPHDSNDESNDDSTQVQEIYEAAVNLSLTEETFEGSADVLASYTQATHDESMTYEDRSQLDHMGFHFTTGIPAPSTETELDVLLPTATSLPIPRKSATVIPEIEGIKAEAKALDDMFESSTLSDGQAIADQSEIIPTLGQFERTQEEYEDKKHAGPSFQPEFSSGAEEALVDHTPYLSIATTHLMDQSVTEVPDVMEGSNPPYYTDTTLAVSTFAKLSSQTPSSPLTIYSGSEASGHTEIPQPSALPGIDVGSSVMSPQDSFKEIHVNIEATFKPSSEEYLHITEPPSLSPDTKLEPSEDDGKPELLEEMEASPTELIAVEGTEILQDFQNKTDGQVSGEAIKMFPTIKTPEAGTVITTADEIELEGATQWPHSTSASATYGVEAGVVPWLSPQTSERPTLSSSPEINPETQAALIRGQDSTIAASEQQVAARILDSNDQATVNPVEFNTEVATPPFSLLETSNETDFLIGINEESVEGTAIYLPGPDRCKMNPCLNGGTCYPTETSYVCTCVPGYSGDQCELDFDECHSNPCRNGATCVDGFNTFRCLCLPSYVGALCEQDTETCDYGWHKFQGQCYKYFAHRRTWDAAERECRLQGAHLTSILSHEEQMFVNRVGHDYQWIGLNDKMFEHDFRWTDGSTLQYENWRPNQPDSFFSAGEDCVVIIWHENGQWNDVPCNYHLTYTCKKGTVACGQPPVVENAKTFGKMKPRYEINSLIRYHCKDGFIQRHLPTIRCLGNGRWAIPKITCMNPSAYQRTYSMKYFKNSSSAKDNSINTSKHDHRWSRRWQESRR

SEQ ID NO: 828137 - protein, 1642 aa, Homo sapiens
MFINIKSILWMCSTLIVTHALHKVKVGKSPPVRGSLSGKVSLPCHFSTMPTLPPSYNTSEFLRIKWSKIEVDKNGKDLKETTVLVAQNGNIKIGQDYKGRVSVPTHPEAVGDASLTVVKLLASDAGLYRCDVMYGIEDTQDTVSLTVDGVVFHYRAATSRYTLNFEAAQKACLDVGAVIATPEQLFAAYEDGFEQCDAGWLADQTVRYPIRAPRVGCYGDKMGKAGVRTYGFRSPQETYDVYCYVDHLDGDVFHLTVPSKFTFEEAAKECENQDARLATVGELQAAWRNGFDQCDYGWLSDASVRHPVTVARAQCGGGLLGVRTLYRFENQTGFPPPDSRFDAYCFKPKEATTIDLSILAETASPSLSKEPQMVSDRTTPIIPLVDELPVIPTEFPPVGNIVSFEQKATVQPQAITDSLATKLPTPTGSTKKPWDMDDYSPSASGPLGKLDISEIKEEVLQSTTGVSHYATDSWDGVVEDKQTQESVTQIEQIEVGPLVTSMEILKHIPSKEFPVTETPLVTARMILESKTEKKMVSTVSELVTTGHYGFTLGEEDDEDRTLTVGSDESTLIFDQIPEVITVSKTSEDTIHTHLEDLESVSASTTVSPLIMPDNNGSSMDDWEERQTSGRITEEFLGKYLSTTPFPSQHRTEIELFPYSGDKILVEGISTVIYPSLQTEMTHRRERTETLIPEMRTDTYTDEIQEEITKSPFMGKTEEEVFSGMKLSTSLSEPIHVTESSVEMTKSFDFPTLITKLSAEPTEVRDMEEDFTATPGTTKYDENITTVLLAHGTLSVEAATVSKWSWDEDNTTSKPLESTEPSASSKLPPALLTTVGMNGKDKDIPSFTEDGADEFTLIPDSTQKQLEEVTDEDIAAHGKFTIRFQPTTSTGIAEKSTLRDSTTEEKVPPITSTEGQVYATMEGSALGEVEDVDLSKPVSTVPQFAHTSEVEGLAFVSYSSTQEPTTYVDSSHTIPLSVIPKTDWGVLVPSVPSEDEVLGEPSQDILVIDQTRLEATISPETMRTTKITEGTTQEEFPWKEQTAEKPVPALSSTAWTPKEAVTPLDEQEGDGSAYTVSEDELLTGSERVPVLETTPVGKIDHSVSYPPGAVTEHKVKTDEVVTLTPRIGPKVSLSPGPEQKYETEGSSTTGFTSSLSPFSTHITQLMEETTTEKTSLEDIDLGSGLFEKPKATELIEFSTIKVTVPSDITTAFSSVDRLHTTSAFKPSSAITKKPPLIDREPGEETTSDMVIIGESTSHVPPTTLEDIVAKETETDIDREYFTTSSPPATQPTRPPTVEDKEAFGPQALSTPQPPASTKFHPDINVYIIEVRENKTGPDRCKMNPCLNGGTCYPTETSYVCTCVPGYSGDQCELDFDECHSNPCRNGATCVDGFNTFRCLCLPSYVGALCEQDTETCDYGWHKFQGQCYKYFAHRRTWDAAERECRLQGAHLTSILSHEEQMFVNRVGHDYQWIGLNDKMFEHDFRWTDGSTLQYENWRPNQPDSFFSAGEDCVVIIWHENGQWNDVPCNYHLTYTCKKGTVACGQPPVVENAKTFGKMKPRYEINSLIRYHCKDGFIQRHLPTIRCLGNGRWAIPKITCMNPSAYQRTYSMKYFKNSSSAKDNSINTSKHDHRWSRRWQESRR

SEQ ID NO: 828138 - protein, 3370 aa, Homo sapiens
MFINIKSILWMCSTLIVTHALHKVKVGKSPPVRGSLSGKVSLPCHFSTMPTLPPSYNTSEFLRIKWSKIEVDKNGKDLKETTVLVAQNGNIKIGQDYKGRVSVPTHPEAVGDASLTVVKLLASDAGLYRCDVMYGIEDTQDTVSLTVDGVVFHYRAATSRYTLNFEAAQKACLDVGAVIATPEQLFAAYEDGFEQCDAGWLADQTVRYPIRAPRVGCYGDKMGKAGVRTYGFRSPQETYDVYCYVDHLDGDVFHLTVPSKFTFEEAAKECENQDARLATVGELQAAWRNGFDQCDYGWLSDASVRHPVTVARAQCGGGLLGVRTLYRFENQTGFPPPDSRFDAYCFKPKEATTIDLSILAETASPSLSKEPQMVSDRTTPIIPLVDELPVIPTEFPPVGNIVSFEQKATVQPQAITDSLATKLPTPTGSTKKPWDMDDYSPSASGPLGKLDISEIKEEVLQSTTGVSHYATDSWDGVVEDKQTQESVTQIEQIEVGPLVTSMEILKHIPSKEFPVTETPLVTARMILESKTEKKMVSTVSELVTTGHYGFTLGEEDDEDRTLTVGSDESTLIFDQIPEVITVSKTSEDTIHTHLEDLESVSASTTVSPLIMPDNNGSSMDDWEERQTSGRITEEFLGKYLSTTPFPSQHRTEIELFPYSGDKILVEGISTVIYPSLQTEMTHRRERTETLIPEMRTDTYTDEIQEEITKSPFMGKTEEEVFSGMKLSTSLSEPIHVTESSVEMTKSFDFPTLITKLSAEPTEVRDMEEDFTATPGTTKYDENITTVLLAHGTLSVEAATVSKWSWDEDNTTSKPLESTEPSASSKLPPALLTTVGMNGKDKDIPSFTEDGADEFTLIPDSTQKQLEEVTDEDIAAHGKFTIRFQPTTSTGIAEKSTLRDSTTEEKVPPITSTEGQVYATMEGSALGEVEDVDLSKPVSTVPQFAHTSEVEGLAFVSYSSTQEPTTYVDSSHTIPLSVIPKTDWGVLVPSVPSEDEVLGEPSQDILVIDQTRLEATISPETMRTTKITEGTTQEEFPWKEQTAEKPVPALSSTAWTPKEAVTPLDEQEGDGSAYTVSEDELLTGSERVPVLETTPVGKIDHSVSYPPGAVTEHKVKTDEVVTLTPRIGPKVSLSPGPEQKYETEGSSTTGFTSSLSPFSTHITQLMEETTTEKTSLEDIDLGSGLFEKPKATELIEFSTIKVTVPSDITTAFSSVDRLHTTSAFKPSSAITKKPPLIDREPGEETTSDMVIIGESTSHVPPTTLEDIVAKETETDIDREYFTTSSPPATQPTRPPTVEDKEAFGPQALSTPQPPASTKFHPDINVYIIEVRENKTGRMSDLSVIGHPIDSESKEDEPCSEETDPVHDLMAEILPEFPDIIEIDLYHSEENEEEEEECANATDVTTTPSVQYINGKHLVTTVPKDPEAAEARRGQFESVAPSQNFSDSSESDTHPFVIAKTELSTAVQPNESTETTESLEVTWKPETYPETSEHFSGGEPDVFPTVPFHEEFESGTAKKGAESVTERDTEVGHQAHEHTEPVSLFPEESSGEIAIDQESQKIAFARATEVTFGEEVEKSTSVTYTPTIVPSSASAYVSEEEAVTLIGNPWPDDLLSTKESWVEATPRQVVELSGSSSIPITEGSGEAEEDEDTMFTMVTDLSQRNTTDTLITLDTSRIITESFFEVPATTIYPVSEQPSAKVVPTKFVSETDTSEWISSTTVEEKKRKEEEGTTGTASTFEVYSSTQRSDQLILPFELESPNVATSSDSGTRKSFMSLTTPTQSEREMTDSTPVFTETNTLENLGAQTTEHSSIHQPGVQEGLTTLPRSPASVFMEQGSGEAAADPETTTVSSFSLNVEYAIQAEKEVAGTLSPHVETTFSTEPTGLVLSTVMDRVVAENITQTSREIVISERLGEPNYGAEIRGFSTGFPLEEDFSGDFREYSTVSHPIAKEETVMMEGSGDAAFRDTQTSPSTVPTSVHISHISDSEGPSSTMVSTSAFPWEEFTSSAEGSGEQLVTVSSSVVPVLPSAVQKFSGTASSIIDEGLGEVGTVNEIDRRSTILPTAEVEGTKAPVEKEEVKVSGTVSTNFPQTIEPAKLWSRQEVNPVRQEIESETTSEEQIQEEKSFESPQNSPATEQTIFDSQTFTETELKTTDYSVLTTKKTYSDDKEMKEEDTSLVNMSTPDPDANGLESYTTLPEATEKSHFFLATALVTESIPAEHVVTDSPIKKEESTKHFPKGMRPTIQESDTELLFSGLGSGEEVLPTLPTESVNFTEVEQINNTLYPHTSQVESTSSDKIEDFNRMENVAKEVGPLVSQTDIFEGSGSVTSTTLIEILSDTGAEGPTVAPLPFSTDIGHPQNQTVRWAEEIQTSRPQTITEQDSNKNSSTAEINETTTSSTDFLARAYGFEMAKEFVTSAPKPSDLYYEPSGEGSGEVDIVDSFHTSATTQATRQESSTTFVSDGSLEKHPEVPSAKAVTADGFPTVSVMLPLHSEQNKSSPDPTSTLSNTVSYERSTDGSFQDRFREFEDSTLKPNRKKPTENIIIDLDKEDKDLILTITESTILEILPELTSDKNTIIDIDHTKPVYEDILGMQTDIDTEVPSEPHDSNDESNDDSTQVQEIYEAAVNLSLTEETFEGSADVLASYTQATHDESMTYEDRSQLDHMGFHFTTGIPAPSTETELDVLLPTATSLPIPRKSATVIPEIEGIKAEAKALDDMFESSTLSDGQAIADQSEIIPTLGQFERTQEEYEDKKHAGPSFQPEFSSGAEEALVDHTPYLSIATTHLMDQSVTEVPDVMEGSNPPYYTDTTLAVSTFAKLSSQTPSSPLTIYSGSEASGHTEIPQPSALPGIDVGSSVMSPQDSFKEIHVNIEATFKPSSEEYLHITEPPSLSPDTKLEPSEDDGKPELLEEMEASPTELIAVEGTEILQDFQNKTDGQVSGEAIKMFPTIKTPEAGTVITTADEIELEGATQWPHSTSASATYGVEAGVVPWLSPQTSERPTLSSSPEINPETQAALIRGQDSTIAASEQQVAARILDSNDQATVNPVEFNTEVATPPFSLLETSNETDFLIGINEESVEGTAIYLPGPDRCKMNPCLNGGTCYPTETSYVCTCVPGYSGDQCELDFDECHSNPCRNGATCVDGFNTFRCLCLPSYVGALCEQDTETCDYGWHKFQGQCYKYFAHRRTWDAAERECRLQGAHLTSILSHEEQMFVNRVGHDYQWIGLNDKMFEHDFRWTDGSTLQYENWRPNQPDSFFSAGEDCVVIIWHENGQWNDVPCNYHLTYTCKKGTVACGQPPVVENAKTFGKMKPRYEINSLIRYHCKDGFIQRHLPTIRCLGNGRWAIPKITCMNRKWSFRKNGLPCYNNY

SEQ ID NO: 828139 - protein, 3379 aa, Homo sapiens
MFINIKSILWMCSTLIVTHALHKVKVGKSPPVRGSLSGKVSLPCHFSTMPTLPPSYNTSEFLRIKWSKIEVDKNGKDLKETTVLVAQNGNIKIGQDYKGRVSVPTHPEAVGDASLTVVKLLASDAGLYRCDVMYGIEDTQDTVSLTVDGVVFHYRAATSRYTLNFEAAQKACLDVGAVIATPEQLFAAYEDGFEQCDAGWLADQTVRYPIRAPRVGCYGDKMGKAGVRTYGFRSPQETYDVYCYVDHLDGDVFHLTVPSKFTFEEAAKECENQDARLATVGELQAAWRNGFDQCDYGWLSDASVRHPVTVARAQCGGGLLGVRTLYRFENQTGFPPPDSRFDAYCFKPKEATTIDLSILAETASPSLSKEPQMVSDRTTPIIPLVDELPVIPTEFPPVGNIVSFEQKATVQPQAITDSLATKLPTPTGSTKKPWDMDDYSPSASGPLGKLDISEIKEEVLQSTTGVSHYATDSWDGVVEDKQTQESVTQIEQIEVGPLVTSMEILKHIPSKEFPVTETPLVTARMILESKTEKKMVSTVSELVTTGHYGFTLGEEDDEDRTLTVGSDESTLIFDQIPEVITVSKTSEDTIHTHLEDLESVSASTTVSPLIMPDNNGSSMDDWEERQTSGRITEEFLGKYLSTTPFPSQHRTEIELFPYSGDKILVEGISTVIYPSLQTEMTHRRERTETLIPEMRTDTYTDEIQEEITKSPFMGKTEEEVFSGMKLSTSLSEPIHVTESSVEMTKSFDFPTLITKLSAEPTEVRDMEEDFTATPGTTKYDENITTVLLAHGTLSVEAATVSKWSWDEDNTTSKPLESTEPSASSKLPPALLTTVGMNGKDKDIPSFTEDGADEFTLIPDSTQKQLEEVTDEDIAAHGKFTIRFQPTTSTGIAEKSTLRDSTTEEKVPPITSTEGQVYATMEGSALGEVEDVDLSKPVSTVPQFAHTSEVEGLAFVSYSSTQEPTTYVDSSHTIPLSVIPKTDWGVLVPSVPSEDEVLGEPSQDILVIDQTRLEATISPETMRTTKITEGTTQEEFPWKEQTAEKPVPALSSTAWTPKEAVTPLDEQEGDGSAYTVSEDELLTGSERVPVLETTPVGKIDHSVSYPPGAVTEHKVKTDEVVTLTPRIGPKVSLSPGPEQKYETEGSSTTGFTSSLSPFSTHITQLMEETTTEKTSLEDIDLGSGLFEKPKATELIEFSTIKVTVPSDITTAFSSVDRLHTTSAFKPSSAITKKPPLIDREPGEETTSDMVIIGESTSHVPPTTLEDIVAKETETDIDREYFTTSSPPATQPTRPPTVEDKEAFGPQALSTPQPPASTKFHPDINVYIIEVRENKTGRMSDLSVIGHPIDSESKEDEPCSEETDPVHDLMAEILPEFPDIIEIDLYHSEENEEEEEECANATDVTTTPSVQYINGKHLVTTVPKDPEAAEARRGQFESVAPSQNFSDSSESDTHPFVIAKTELSTAVQPNESTETTESLEVTWKPETYPETSEHFSGGEPDVFPTVPFHEEFESGTAKKGAESVTERDTEVGHQAHEHTEPVSLFPEESSGEIAIDQESQKIAFARATEVTFGEEVEKSTSVTYTPTIVPSSASAYVSEEEAVTLIGNPWPDDLLSTKESWVEATPRQVVELSGSSSIPITEGSGEAEEDEDTMFTMVTDLSQRNTTDTLITLDTSRIITESFFEVPATTIYPVSEQPSAKVVPTKFVSETDTSEWISSTTVEEKKRKEEEGTTGTASTFEVYSSTQRSDQLILPFELESPNVATSSDSGTRKSFMSLTTPTQSEREMTDSTPVFTETNTLENLGAQTTEHSSIHQPGVQEGLTTLPRSPASVFMEQGSGEAAADPETTTVSSFSLNVEYAIQAEKEVAGTLSPHVETTFSTEPTGLVLSTVMDRVVAENITQTSREIVISERLGEPNYGAEIRGFSTGFPLEEDFSGDFREYSTVSHPIAKEETVMMEGSGDAAFRDTQTSPSTVPTSVHISHISDSEGPSSTMVSTSAFPWEEFTSSAEGSGEQLVTVSSSVVPVLPSAVQKFSGTASSIIDEGLGEVGTVNEIDRRSTILPTAEVEGTKAPVEKEEVKVSGTVSTNFPQTIEPAKLWSRQEVNPVRQEIESETTSEEQIQEEKSFESPQNSPATEQTIFDSQTFTETELKTTDYSVLTTKKTYSDDKEMKEEDTSLVNMSTPDPDANGLESYTTLPEATEKSHFFLATALVTESIPAEHVVTDSPIKKEESTKHFPKGMRPTIQESDTELLFSGLGSGEEVLPTLPTESVNFTEVEQINNTLYPHTSQVESTSSDKIEDFNRMENVAKEVGPLVSQTDIFEGSGSVTSTTLIEILSDTGAEGPTVAPLPFSTDIGHPQNQTVRWAEEIQTSRPQTITEQDSNKNSSTAEINETTTSSTDFLARAYGFEMAKEFVTSAPKPSDLYYEPSGEGSGEVDIVDSFHTSATTQATRQESSTTFVSDGSLEKHPEVPSAKAVTADGFPTVSVMLPLHSEQNKSSPDPTSTLSNTVSYERSTDGSFQDRFREFEDSTLKPNRKKPTENIIIDLDKEDKDLILTITESTILEILPELTSDKNTIIDIDHTKPVYEDILGMQTDIDTEVPSEPHDSNDESNDDSTQVQEIYEAAVNLSLTEETFEGSADVLASYTQATHDESMTYEDRSQLDHMGFHFTTGIPAPSTETELDVLLPTATSLPIPRKSATVIPEIEGIKAEAKALDDMFESSTLSDGQAIADQSEIIPTLGQFERTQEEYEDKKHAGPSFQPEFSSGAEEALVDHTPYLSIATTHLMDQSVTEVPDVMEGSNPPYYTDTTLAVSTFAKLSSQTPSSPLTIYSGSEASGHTEIPQPSALPGIDVGSSVMSPQDSFKEIHVNIEATFKPSSEEYLHITEPPSLSPDTKLEPSEDDGKPELLEEMEASPTELIAVEGTEILQDFQNKTDGQVSGEAIKMFPTIKTPEAGTVITTADEIELEGATQWPHSTSASATYGVEAGVVPWLSPQTSERPTLSSSPEINPETQAALIRGQDSTIAASEQQVAARILDSNDQATVNPVEFNTEVATPPFSLLETSNETDFLIGINEESVEGTAIYLPGPDRCKMNPCLNGGTCYPTETSYVCTCVPGYSGDQCELDFDECHSNPCRNGATCVDGFNTFRCLCLPSYVGALCEQDTETCDYGWHKFQGQCYKYFAHLTSILSHEEQMFVNRVGHDYQWIGLNDKMFEHDFRWTDGSTLQYENWRPNQPDSFFSAGEDCVVIIWHENGQWNDVPCNYHLTYTCKKGTVACGQPPVVENAKTFGKMKPRYEINSLIRYHCKDGFIQRHLPTIRCLGNGRWAIPKITCMNPSAYQRTYSMKYFKNSSSAKDNSINTSKHDHRWSRRWQESRR

SEQ ID NO: 828140 - protein, 655 aa, Homo sapiens
MFINIKSILWMCSTLIVTHALHKVKVGKSPPVRGSLSGKVSLPCHFSTMPTLPPSYNTSEFLRIKWSKIEVDKNGKDLKETTVLVAQNGNIKIGQDYKGRVSVPTHPEAVGDASLTVVKLLASDAGLYRCDVMYGIEDTQDTVSLTVDGVVFHYRAATSRYTLNFEAAQKACLDVGAVIATPEQLFAAYEDGFEQCDAGWLADQTVRYPIRAPRVGCYGDKMGKAGVRTYGFRSPQETYDVYCYVDHLDGDVFHLTVPSKFTFEEAAKECENQDARLATVGELQAAWRNGFDQCDYGWLSDASVRHPVTVARAQCGGGLLGVRTLYRFENQTGFPPPDSRFDAYCFKRPDRCKMNPCLNGGTCYPTETSYVCTCVPGYSGDQCELDFDECHSNPCRNGATCVDGFNTFRCLCLPSYVGALCEQDTETCDYGWHKFQGQCYKYFAHRRTWDAAERECRLQGAHLTSILSHEEQMFVNRVGHDYQWIGLNDKMFEHDFRWTDGSTLQYENWRPNQPDSFFSAGEDCVVIIWHENGQWNDVPCNYHLTYTCKKGTVACGQPPVVENAKTFGKMKPRYEINSLIRYHCKDGFIQRHLPTIRCLGNGRWAIPKITCMNPSAYQRTYSMKYFKNSSSAKDNSINTSKHDHRWSRRWQESRR

SEQ ID NO: 828141 - protein, 302 aa, Homo sapiens
MNPCLNGGTCYPTETSYVCTCVPGYSGDQCELDFDECHSNPCRNGATCVDGFNTFRCLCLPSYVGALCEQDTETCDYGWHKFQGQCYKYFAHRRTWDAAERECRLQGAHLTSILSHEEQMFVNRVGHDYQWIGLNDKMFEHDFRWTDGSTLQYENWRPNQPDSFFSAGEDCVVIIWHENGQWNDVPCNYHLTYTCKKGTVACGQPPVVENAKTFGKMKPRYEINSLIRYHCKDGFIQRHLPTIRCLGNGRWAIPKITCMNPSAYQRTYSMKYFKNSSSAKDNSINTSKHDHRWSRRWQESRR

SEQ ID NO: 828142 - protein, 2920 aa, Homo sapiens
MFINIKSILWMCSTLIVTHALHKVKVGKSPPVRGSLSGKVSLPCHFSTMPTLPPSYNTSEFLRIKWSKIEVDKNGKDLKETTVLVAQNGNIKIGQDYKGRVSVPTHPEAVGDASLTVVKLLASDAGLYRCDVMYGIEDTQDTVSLTVDGVVFHYRAATSRYTLNFEAAQKACLDVGAVIATPEQLFAAYEDGFEQCDAGWLADQTVRYPIRAPRVGCYGDKMGKAGVRTYGFRSPQETYDVYCYVDHLDGDVFHLTVPSKFTFEEAAKECENQDARLATVGELQAAWRNGFDQCDYGWLSDASVRHPVTVARAQCGGGLLGVRTLYRFENQTGFPPPDSRFDAYCFKPKEATTIDLSILAETASPSLSKEPQMVSDRTTPIIPLVDELPVIPTEFPPVGNIVSFEQKATVQPQAITDSLATKLPTPTGSTKKPWDMDDYSPSASGPLGKLDISEIKEEVLQSTTGVSHYATDSWDGVVEDKQTQESVTQIEQIEVGPLVTSMEILKHIPSKEFPVTETPLVTARMILESKTEKKMVSTVSELVTTGHYGFTLGEEDDEDRTLTVGSDESTLIFDQIPEVITVSKTSEDTIHTHLEDLESVSASTTVSPLIMPDNNGSSMDDWEERQTSGRITEEFLGKYLSTTPFPSQHRTEIELFPYSGDKILVEGISTVIYPSLQTEMTHRRERTETLIPEMRTDTYTDEIQEEITKSPFMGKTEEEVFSGMKLSTSLSEPIHVTESSVEMTKSFDFPTLITKLSAEPTEVRDMEEDFTATPGTTKYDENITTVLLAHGTLSVEAATVSKWSWDEDNTTSKPLESTEPSASSKLPPALLTTVGMNGKDKDIPSFTEDGADEFTLIPDSTQKQLEEVTDEDIAAHGKFTIRFQPTTSTGIAEKSTLRDSTTEEKVPPITSTEGQVYATMEGSALGEVEDVDLSKPVSTVPQFAHTSEVEGLAFVSYSSTQEPTTYVDSSHTIPLSVIPKTDWGVLVPSVPSEDEVLGEPSQDILVIDQTRLEATISPETMRTTKITEGTTQEEFPWKEQTAEKPVPALSSTAWTPKEAVTPLDEQEGDGSAYTVSEDELLTGSERVPVLETTPVGKIDHSVSYPPGAVTEHKVKTDEVVTLTPRIGPKVSLSPGPEQKYETEGSSTTGFTSSLSPFSTHITQLMEETTTEKTSLEDIDLGSGLFEKPKATELIEFSTIKVTVPSDITTAFSSVDRLHTTSAFKPSSAITKKPPLIDREPGEETTSDMVIIGESTSHVPPTTLEDIVAKETETDIDREYFTTSSPPATQPTRPPTVEDKEAFGPQALSTPQPPASTKFHPDINVYIIEVRENKTGRMSDLSVIGHPIDSESKEDEPCSEETDPVHDLMAEILPEFPDIIEIDLYHSEENEEEEEECANATDVTTTPSVQYINGKHLVTTVPKDPEAAEARRGQFESVAPSQNFSDSSESDTHPFVIAKTELSTAVQPNESTETTESLEVTWKPETYPETSEHFSGGEPDVFPTVPFHEEFESGTAKKGAESVTERDTEVGHQAHEHTEPVSLFPEESSGEIAIDQESQKIAFARATEVTFGEEVEKSTSVTYTPTIVPSSASAYVSEEEAVTLIGNPWPDDLLSTKESWVEATPRQVVELSGSSSIPITEGSGEAEEDEDTMFTMVTDLSQRNTTDTLITLDTSRIITESFFEVPATTIYPVSEQPSAKVVPTKFVSETDTSEWISSTTVEEKKRKEEEGTTGTASTFEVYSSTQRSDQLILPFELESPNVATSSDSGTRKSFMSLTTPTQSEREMTDSTPVFTETNTLENLGAQTTEHSSIHQPGVQEGLTTLPRSPASVFMEQGSGEAAADPETTTVSSFSLNVEYAIQAEKEVAGTLSPHVETTFSTEPTGLVLSTVMDRVVAENITQTSREIVISERLGEPNYGAEIRGFSTGFPLEEDFSGDFREYSTVSHPIAKEETVMMEGSGDAAFRDTQTSPSTVPTSVHISHISDSEGPSSTMVSTSAFPWEEFTSSAEGSGEQLVTVSSSVVPVLPSAVQKFSGTASSIIDEGLGEVGTVNEIDRRSTILPTAEVEGTKAPVEKEEVKVSGTVSTNFPQTIEPAKLWSRQEVNPVRQEIESETTSEEQIQEEKSFESPQNSPATEQTIFDSQTFTETELKTTDYSVLTTKKTYSDDKEMKEEDTSLVNMSTPDPDANGLESYTTLPEATEKSHFFLATALVTESIPAEHVVTDSPIKKEESTKHFPKGMRPTIQESDTELLFSGLGSGEEVLPTLPTESVNFTEVEQINNTLYPHTSQVESTSSDKIEDFNRMENVAKEVGPLVSQTDIFEGSGSVTSTTLIEILSDTGAEGPTVAPLPFSTDIGHPQNQTVRWAEEIQTSRPQTITEQDSNKNSSTAEINETTTSSTDFLARAYGFEMAKEFVTSAPKPSDLYYEPSGEGSGEVDIVDSFHTSATTQATRQESSTTFVSDGSLEKHPEVPSAKAVTADGFPTVSVMLPLHSEQNKSSPDPTSTLSNTVSYERSTDGSFQDRFREFEDSTLKPNRKKPTENIIIDLDKEDKDLILTITESTILEILPELTSDKNTIIDIDHTKPVYEDILGMQTDIDTEVPSEPHDSNDESNDDSTQVQEIYEAAVNLSLTEETFEGSADVLASYTQATHDESMTYEDRSQLDHMGFHFTTGIPAPSTETELDVLLPTATSLPIPRKSATVIPEIEGIKAEAKALDDMFESSTLSDGQAIADQSEIIPTLGQFERTQEEYEDKKHAGPSFQPEFSSGAEEALVDHTPYLSIATTHLMDQSVTEVPDVMEGSNPPYYTDTTLAVSTFAKLSSQTPSSPLTIYSGSEASGHTEIPQPSALPGIDVGSSVMSPQDSFKEIHVNIEATFKPSSEEYLHITEPPSLSPDTKLELFFAAFLFLHLQERPEWRTFL

SEQ ID NO: 828143 - protein, 3396 aa, Homo sapiens; identical to SEQ ID NO: 828131

SEQ ID NO: 828144 - protein, 3378 aa, Homo sapiens
MFINIKSILWMCSTLIVTHALHKVKVGKSPPVRGSLSGKVSLPCHFSTMPTLPPSYNTSEFLRIKWSKIEVDKNGKDLKETTVLVAQNGNIKIGQDYKGRVSVPTHPEAVGDASLTVVKLLASDAGLYRCDVMYGIEDTQDTVSLTVDGVVFHYRAATSRYTLNFEAAQKACLDVGAVIATPEQLFAAYEDGFEQCDAGWLADQTVRYPIRAPRVGCYGDKMGKAGVRTYGFRSPQETYDVYCYVDHLDGDVFHLTVPSKFTFEEAAKECENQDARLATVGELQAAWRNGFDQCDYGWLSDASVRHPVTVARAQCGGGLLGVRTLYRFENQTGFPPPDSRFDAYCFKPKEATTIDLSILAETASPSLSKEPQMVSDRTTPIIPLVDELPVIPTEFPPVGNIVSFEQKATVQPQAITDSLATKLPTPTGSTKKPWDMDDYSPSASGPLGKLDISEIKEEVLQSTTGVSHYATDSWDGVVEDKQTQESVTQIEQIEVGPLVTSMEILKHIPSKEFPVTETPLVTARMILESKTEKKMVSTVSELVTTGHYGFTLGEEDDEDRTLTVGSDESTLIFDQIPEVITVSKTSEDTIHTHLEDLESVSASTTVSPLIMPDNNGSSMDDWEERQTSGRITEEFLGKYLSTTPFPSQHRTEIELFPYSGDKILVEGISTVIYPSLQTEMTHRRERTETLIPEMRTDTYTDEIQEEITKSPFMGKTEEEVFSGMKLSTSLSEPIHVTESSVEMTKSFDFPTLITKLSAEPTEVRDMEEDFTATPGTTKYDENITTVLLAHGTLSVEAATVSKWSWDEDNTTSKPLESTEPSASSKLPPALLTTVGMNGKDKDIPSFTEDGADEFTLIPDSTQKQLEEVTDEDIAAHGKFTIRFQPTTSTGIAEKSTLRDSTTEEKVPPITSTEGQVYATMEGSALGEVEDVDLSKPVSTVPQFAHTSEVEGLAFVSYSSTQEPTTYVDSSHTIPLSVIPKTDWGVLVPSVPSEDEVLGEPSQDILVIDQTRLEATISPETMRTTKITEGTTQEEFPWKEQTAEKPVPALSSTAWTPKEAVTPLDEQEGDGSAYTVSEDELLTGSERVPVLETTPVGKIDHSVSYPPGAVTEHKVKTDEVVTLTPRIGPKVSLSPGPEQKYETEGSSTTGFTSSLSPFSTHITQLMEETTTEKTSLEDIDLGSGLFEKPKATELIEFSTIKVTVPSDITTAFSSVDRLHTTSAFKPSSAITKKPPLIDREPGEETTSDMVIIGESTSHVPPTTLEDIVAKETETDIDREYFTTSSPPATQPTRPPTVEDKEAFGPQALSTPQPPASTKFHPDINVYIIEVRENKTGRMSDLSVIGHPIDSESKEDEPCSEETDPVHDLMAEILPEFPDIIEIDLYHSEENEEEEEECANATDVTTTPSVQYINGKHLVTTVPKDPEAAEARRGQFESVAPSQNFSDSSESDTHPFVIAKTELSTAVQPNESTETTESLEVTWKPETYPETSEHFSGGEPDVFPTVPFHEEFESGTAKKGAESVTERDTEVGHQAHEHTEPVSLFPEESSGEIAIDQESQKIAFARATEVTFGEEVEKSTSVTYTPTIVPSSASAYVSEEEAVTLIGNPWPDDLLSTKESWVEATPRQVVELSGSSSIPITEGSGEAEEDEDTMFTMVTDLSQRNTTDTLITLDTSRIITESFFEVPATTIYPVSEQPSAKVVPTKFVSETDTSEWISSTTVEEKKRKEEEGTTGTASTFEVYSSTQRSDQLILPFELESPNVATSSDSGTRKSFMSLTTPTQSEREMTDSTPVFTETNTLENLGAQTTEHSSIHQPGVQEGLTTLPRSPASVFMEQGSGEAAADPETTTVSSFSLNVEYAIQAEKEVAGTLSPHVETTFSTEPTGLVLSTVMDRVVAENITQTSREIVISERLGEPNYGAEIRGFSTGFPLEEDFSGDFREYSTVSHPIAKEETVMMEGSGDAAFRDTQTSPSTVPTSVHISHISDSEGPSSTMVSTSAFPWEEFTSSAEGSGEQLVTVSSSVVPVLPSAVQKFSGTASSIIDEGLGEVGTVNEIDRRSTILPTAEVEGTKAPVEKEEVKVSGTVSTNFPQTIEPAKLWSRQEVNPVRQEIESETTSEEQIQEEKSFESPQNSPATEQTIFDSQTFTETELKTTDYSVLTTKKTYSDDKEMKEEDTSLVNMSTPDPDANGLESYTTLPEATEKSHFFLATALVTESIPAEHVVTDSPIKKEESTKHFPKGMRPTIQESDTELLFSGLGSGEEVLPTLPTESVNFTEVEQINNTLYPHTSQVESTSSDKIEDFNRMENVAKEVGPLVSQTDIFEGSGSVTSTTLIEILSDTGAEGPTVAPLPFSTDIGHPQNQTVRWAEEIQTSRPQTITEQDSNKNSSTAEINETTTSSTDFLARAYGFEMAKEFVTSAPKPSDLYYEPSGEGSGEVDIVDSFHTSATTQATRQESSTTFVSDGSLEKHPEVPSAKAVTADGFPTVSVMLPLHSEQNKSSPDPTSTLSNTVSYERSTDGSFQDRFREFEDSTLKPNRKKPTENIIIDLDKEDKDLILTITESTILEILPELTSDKNTIIDIDHTKPVYEDILGMQTDIDTEVPSEPHDSNDESNDDSTQVQEIYEAAVNLSLTEETFEGSADVLASYTQATHDESMTYEDRSQLDHMGFHFTTGIPAPSTETELDVLLPTATSLPIPRKSATVIPEIEGIKAEAKALDDMFESSTLSDGQAIADQSEIIPTLGQFERTQEEYEDKKHAGPSFQPEFSSGAEEALVDHTPYLSIATTHLMDQSVTEVPDVMEGSNPPYYTDTTLAVSTFAKLSSQTPSSPLTIYSGSEASGHTEIPQPSALPGIDVGSSVMSPQDSFKEIHVNIEATFKPSSEEYLHITEPPSLSPDTKLEPSEDDGKPELLEEMEASPTELIAVEGTEILQDFQNKTDGQVSGEAIKMFPTIKTPEAGTVITTADEIELEGATQWPHSTSASATYGVEAGVVPWLSPQTSERPTLSSSPEINPETQAALIRGQDSTIAASEQQVAARILDSNDQATVNPVEFNTEVATPPFSLLETSNETDFLIGINEESVEGTAIYLPGPDRCKMNPCLNGGTCYPTETSYVCTCVPGYSGDQCELDFDECHSNPCRNGATCVDGFNTFRCLCLPSYVGALCEQDTETCDYGWHKFQGQCYKYFAHRRTWDAAERECRLQGAHLTSILSHEEQMFVNRVGHDYQWIGLNDKMFEHDFRWTDGSTLQYENWRPNQPDSFFSAGEDCVVIIWHENGQWNDVPCNYHLTYTCKKGTVACGQPPVVENAKTFGKMKPRYEINSLIRYHCKDGFIQRHLPTIRCLGNGRWAIPKITCMNPSAYQRTYSMKYFKNSVAALRVPS

SEQ ID NO: 828145 - protein, 2688 aa, Homo sapiens
MFINIKSILWMCSTLIVTHALHKVKVGKSPPVRGSLSGKVSLPCHFSTMPTLPPSYNTSEFLRIKWSKIEVDKNGKDLKETTVLVAQNGNIKIGQDYKGRVSVPTHPEAVGDASLTVVKLLASDAGLYRCDVMYGIEDTQDTVSLTVDGVVFHYRAATSRYTLNFEAAQKACLDVGAVIATPEQLFAAYEDGFEQCDAGWLADQTVRYPIRAPRVGCYGDKMGKAGVRTYGFRSPQETYDVYCYVDHLDGDVFHLTVPSKFTFEEAAKECENQDARLATVGELQAAWRNGFDQCDYGWLSDASVRHPVTVARAQCGGGLLGVRTLYRFENQTGFPPPDSRFDAYCFKPKEATTIDLSILAETASPSLSKEPQMVSDRTTPIIPLVDELPVIPTEFPPVGNIVSFEQKATVQPQAITDSLATKLPTPTGSTKKPWDMDDYSPSASGPLGKLDISEIKEEVLQSTTGVSHYATDSWDGVVEDKQTQESVTQIEQIEVGPLVTSMEILKHIPSKEFPVTETPLVTARMILESKTEKKMVSTVSELVTTGHYGFTLGEEDDEDRTLTVGSDESTLIFDQIPEVITVSKTSEDTIHTHLEDLESVSASTTVSPLIMPDNNGSSMDDWEERQTSGRITEEFLGKYLSTTPFPSQHRTEIELFPYSGDKILVEGISTVIYPSLQTEMTHRRERTETLIPEMRTDTYTDEIQEEITKSPFMGKTEEEVFSGMKLSTSLSEPIHVTESSVEMTKSFDFPTLITKLSAEPTEVRDMEEDFTATPGTTKYDENITTVLLAHGTLSVEAATVSKWSWDEDNTTSKPLESTEPSASSKLPPALLTTVGMNGKDKDIPSFTEDGADEFTLIPDSTQKQLEEVTDEDIAAHGKFTIRFQPTTSTGIAEKSTLRDSTTEEKVPPITSTEGQVYATMEGSALGEVEDVDLSKPVSTVPQFAHTSEVEGLAFVSYSSTQEPTTYVDSSHTIPLSVIPKTDWGVLVPSVPSEDEVLGEPSQDILVIDQTRLEATISPETMRTTKITEGTTQEEFPWKEQTAEKPVPALSSTAWTPKEAVTPLDEQEGDGSAYTVSEDELLTGSERVPVLETTPVGKIDHSVSYPPGAVTEHKVKTDEVVTLTPRIGPKVSLSPGPEQKYETEGSSTTGFTSSLSPFSTHITQLMEETTTEKTSLEDIDLGSGLFEKPKATELIEFSTIKVTVPSDITTAFSSVDRLHTTSAFKPSSAITKKPPLIDREPGEETTSDMVIIGESTSHVPPTTLEDIVAKETETDIDREYFTTSSPPATQPTRPPTVEDKEAFGPQALSTPQPPASTKFHPDINVYIIEVRENKTGRMSDLSVIGHPIDSESKEDEPCSEETDPVHDLMAEILPEFPDIIEIDLYHSEENEEEEEECANATDVTTTPSVQYINGKHLVTTVPKDPEAAEARRGQFESVAPSQNFSDSSESDTHPFVIAKTELSTAVQPNESTETTESLEVTWKPETYPETSEHFSGGEPDVFPTVPFHEEFESGTAKKGAESVTERDTEVGHQAHEHTEPVSLFPEESSGEIAIDQESQKIAFARATEVTFGEEVEKSTSVTYTPTIVPSSASAYVSEEEAVTLIGNPWPDDLLSTKESWVEATPRQVVELSGSSSIPITEGSGEAEEDEDTMFTMVTDLSQRNTTDTLITLDTSRIITESFFEVPATTIYPVSEQPSAKVVPTKFVSETDTSEWISSTTVEEKKRKEEEGTTGTASTFEVYSSTQRSDQLILPFELESPNVATSSDSGTRKSFMSLTTPTQSEREMTDSTPVFTETNTLENLGAQTTEHSSIHQPGVQEGLTTLPRSPASVFMEQGSGEAAADPETTTVSSFSLNVEYAIQAEKEVAGTLSPHVETTFSTEPTGLVLSTVMDRVVAENITQTSREIVISERLGEPNYGAEIRGFSTGFPLEEDFSGDFREYSTVSHPIAKEETVMMEGSGDAAFRDTQTSPSTVPTSVHISHISDSEGPSSTMVSTSAFPWEEFTSSAEGSGEQLVTVSSSVVPVLPSAVQKFSGTASSIIDEGLGEVGTVNEIDRRSTILPTAEVEGTKAPVEKEEVKVSGTVSTNFPQTIEPAKLWSRQEVNPVRQEIESETTSEEQIQEEKSFESPQNSPATEQTIFDSQTFTETELKTTDYSVLTTKKTYSDDKEMKEEDTSLVNMSTPDPDANGLESYTTLPEATEKSHFFLATALVTESIPAEHVVTDSPIKKEESTKHFPKGMRPTIQESDTELLFSGLGSGEEVLPTLPTESVNFTEVEQINNTLYPHTSQVESTSSDKIEDFNRMENVAKEVGPLVSQTDIFEGSGSVTSTTLIEILSDTGAEGPTVAPLPFSTDIGHPQNQTVRWAEEIQTSRPQTITEQDSNKNSSTAEINETTTSSTDFLARAYGFEMAKEFVTSAPKPSDLYYEPSGEGSGEVDIVDSFHTSATTQATRQESSTTFVSDGSLEKHPEVPSAKAVTADGFPTVSVMLPLHSEQNKSSPDPTSTLSNTVSYERSTDGSFQDRFREFEDSTLKPNRKKPTENIIIDLDKEDKDLILTITESTILEILPELTSDKNTIIDIDHTKPVYEDILGMQTDIDTEVPSEPHDSNDESNDDSTQVQEIYEAAVNLSLTEETFEGSADVLASYTQATHDESMTYEDRSQLDHMGFHFTTGIPAPSTEQLPSNQLI

SEQ ID NO: 828146 - protein, 2524 aa, Homo sapiens
MFINIKSILWMCSTLIVTHALHKVKVGKSPPVRGSLSGKVSLPCHFSTMPTLPPSYNTSEFLRIKWSKIEVDKNGKDLKETTVLVAQNGNIKIGQDYKGRVSVPTHPEAVGDASLTVVKLLASDAGLYRCDVMYGIEDTQDTVSLTVDGVVFHYRAATSRYTLNFEAAQKACLDVGAVIATPEQLFAAYEDGFEQCDAGWLADQTVRYPIRAPRVGCYGDKMGKAGVRTYGFRSPQETYDVYCYVDHLDGDVFHLTVPSKFTFEEAAKECENQDARLATVGELQAAWRNGFDQCDYGWLSDASVRHPVTVARAQCGGGLLGVRTLYRFENQTGFPPPDSRFDAYCFKPKEATTIDLSILAETASPSLSKEPQMVSDRTTPIIPLVDELPVIPTEFPPVGNIVSFEQKATVQPQAITDSLATKLPTPTGSTKKPWDMDDYSPSASGPLGKLDISEIKEEVLQSTTGVSHYATDSWDGVVEDKQTQESVTQIEQIEVGPLVTSMEILKHIPSKEFPVTETPLVTARMILESKTEKKMVSTVSELVTTGHYGFTLGEEDDEDRTLTVGSDESTLIFDQIPEVITVSKTSEDTIHTHLEDLESVSASTTVSPLIMPDNNGSSMDDWEERQTSGRITEEFLGKYLSTTPFPSQHRTEIELFPYSGDKILVEGISTVIYPSLQTEMTHRRERTETLIPEMRTDTYTDEIQEEITKSPFMGKTEEEVFSGMKLSTSLSEPIHVTESSVEMTKSFDFPTLITKLSAEPTEVRDMEEDFTATPGTTKYDENITTVLLAHGTLSVEAATVSKWSWDEDNTTSKPLESTEPSASSKLPPALLTTVGMNGKDKDIPSFTEDGADEFTLIPDSTQKQLEEVTDEDIAAHGKFTIRFQPTTSTGIAEKSTLRDSTTEEKVPPITSTEGQVYATMEGSALGEVEDVDLSKPVSTVPQFAHTSEVEGLAFVSYSSTQEPTTYVDSSHTIPLSVIPKTDWGVLVPSVPSEDEVLGEPSQDILVIDQTRLEATISPETMRTTKITEGTTQEEFPWKEQTAEKPVPALSSTAWTPKEAVTPLDEQEGDGSAYTVSEDELLTGSERVPVLETTPVGKIDHSVSYPPGAVTEHKVKTDEVVTLTPRIGPKVSLSPGPEQKYETEGSSTTGFTSSLSPFSTHITQLMEETTTEKTSLEDIDLGSGLFEKPKATELIEFSTIKVTVPSDITTAFSSVDRLHTTSAFKPSSAITKKPPLIDREPGEETTSDMVIIGESTSHVPPTTLEDIVAKETETDIDREYFTTSSPPATQPTRPPTVEDKEAFGPQALSTPQPPASTKFHPDINVYIIEVRENKTGRMSDLSVIGHPIDSESKEDEPCSEETDPVHDLMAEILPEFPDIIEIDLYHSEENEEEEEECANATDVTTTPSVQYINGKHLVTTVPKDPEAAEARRGQFESVAPSQNFSDSSESDTHPFVIAKTELSTAVQPNESTETTESLEVTWKPETYPETSEHFSGGEPDVFPTVPFHEEFESGTAKKGAESVTERDTEVGHQAHEHTEPVSLFPEESSGEIAIDQESQKIAFARATEVTFGEEVEKSTSVTYTPTIVPSSASAYVSEEEAVTLIGNPWPDDLLSTKESWVEATPRQVVELSGSSSIPITEGSGEAEEDEDTMFTMVTDLSQRNTTDTLITLDTSRIITESFFEVPATTIYPVSEQPSAKVVPTKFVSETDTSEWISSTTVEEKKRKEEEGTTGTASTFEVYSSTQRSDQLILPFELESPNVATSSDSGTRKSFMSLTTPTQSEREMTDSTPVFTETNTLENLGAQTTEHSSIHQPGVQEGLTTLPRSPASVFMEQGSGEAAADPETTTVSSFSLNVEYAIQAEKEVAGTLSPHVETTFSTEPTGLVLSTVMDRVVAENITQTSREIVISERLGEPNYGAEIRGFSTGFPLEEDFSGDFREYSTVSHPIAKEETVMMEGSGDAAFRDTQTSPSTVPTSVHISHISDSEGPSSTMVSTSAFPWEEFTSSAEGSGEQLVTVSSSVVPVLPSAVQKFSGTASSIIDEGLGEVGTVNEIDRRSTILPTAEVEGTKAPVEKEEVKVSGTVSTNFPQTIEPAKLWSRQEVNPVRQEIESETTSEEQIQEEKSFESPQNSPATEQTIFDSQTFTETELKTTDYSVLTTKKTYSDDKEMKEEDTSLVNMSTPDPDANGLESYTTLPEATEKSHFFLATALVTESIPAEHVVTDSPIKKEESTKHFPKGMRPTIQESDTELLFSGLGSGEEVLPTLPTESVNFTEVEQINNTLYPHTSQVESTSSDKIEDFNRMENVAKEVGPLVSQTDIFEGSGSVTSTTLIEILSDTGAEGPTVAPLPFSTDIGHPQNQTVRWAEEIQTSRPQTITEQDSNKNSSTAEINETTTSSTDFLARAYGFEMAKEFVTSAPKPSDLYYEPSGEGSGEVDIVDSFHTSATTQATRQESSTTFVSDGSLEKHPEVPSAKAVTADGFPTVSVMLPLHSEQNKSSPDPTSTLSNTVSYEREGCREEGWYE

SEQ ID NO: 828147 - protein, 1784 aa, Homo sapiens
MFINIKSILWMCSTLIVTHALHKVKVGKSPPVRGSLSGKVSLPCHFSTMPTLPPSYNTSEFLRIKWSKIEVDKNGKDLKETTVLVAQNGNIKIGQDYKGRVSVPTHPEAVGDASLTVVKLLASDAGLYRCDVMYGIEDTQDTVSLTVDGVVFHYRAATSRYTLNFEAAQKACLDVGAVIATPEQLFAAYEDGFEQCDAGWLADQTVRYPIRAPRVGCYGDKMGKAGVRTYGFRSPQETYDVYCYVDHLDGDVFHLTVPSKFTFEEAAKECENQDARLATVGELQAAWRNGFDQCDYGWLSDASVRHPVTVARAQCGGGLLGVRTLYRFENQTGFPPPDSRFDAYCFKPKEATTIDLSILAETASPSLSKEPQMVSDRTTPIIPLVDELPVIPTEFPPVGNIVSFEQKATVQPQAITDSLATKLPTPTGSTKKPWDMDDYSPSASGPLGKLDISEIKEEVLQSTTGVSHYATDSWDGVVEDKQTQESVTQIEQIEVGPLVTSMEILKHIPSKEFPVTETPLVTARMILESKTEKKMVSTVSELVTTGHYGFTLGEEDDEDRTLTVGSDESTLIFDQIPEVITVSKTSEDTIHTHLEDLESVSASTTVSPLIMPDNNGSSMDDWEERQTSGRITEEFLGKYLSTTPFPSQHRTEIELFPYSGDKILVEGISTVIYPSLQTEMTHRRERTETLIPEMRTDTYTDEIQEEITKSPFMGKTEEEVFSGMKLSTSLSEPIHVTESSVEMTKSFDFPTLITKLSAEPTEVRDMEEDFTATPGTTKYDENITTVLLAHGTLSVEAATVSKWSWDEDNTTSKPLESTEPSASSKLPPALLTTVGMNGKDKDIPSFTEDGADEFTLIPDSTQKQLEEVTDEDIAAHGKFTIRFQPTTSTGIAEKSTLRDSTTEEKVPPITSTEGQVYATMEGSALGEVEDVDLSKPVSTVPQFAHTSEVEGLAFVSYSSTQEPTTYVDSSHTIPLSVIPKTDWGVLVPSVPSEDEVLGEPSQDILVIDQTRLEATISPETMRTTKITEGTTQEEFPWKEQTAEKPVPALSSTAWTPKEAVTPLDEQEGDGSAYTVSEDELLTGSERVPVLETTPVGKIDHSVSYPPGAVTEHKVKTDEVVTLTPRIGPKVSLSPGPEQKYETEGSSTTGFTSSLSPFSTHITQLMEETTTEKTSLEDIDLGSGLFEKPKATELIEFSTIKVTVPSDITTAFSSVDRLHTTSAFKPSSAITKKPPLIDREPGEETTSDMVIIGESTSHVPPTTLEDIVAKETETDIDREYFTTSSPPATQPTRPPTVEDKEAFGPQALSTPQPPASTKFHPDINVYIIEVRENKTGRMSDLSVIGHPIDSESKEDEPCSEETDPVHDLMAEILPEFPDIIEIDLYHSEENEEEEEECANATDVTTTPSVQYINGKHLVTTVPKDPEAAEARRGQFESVAPSQNFSDSSESDTHPFVIAKTELSTAVQPNESTETTESLEVTWKPETYPETSEHFSGGEPDVFPTVPFHEEFESGTAKKGAESVTERDTEVGHQAHEHTEPVSLFPEESSGEIAIDQESQKIAFARATEVTFGEEVEKSTSVTYTPTIVPSSASAYVSEEEAVTLIGNPWPDDLLSTKESWVEATPRQVVELSGSSSIPITEGSGEAEEDEDTMFTMVTDLSQRNTTDTLITLDTSRIITESFFEVPATTIYPVSEQPSAKVVPTKFVSETDTSEWISSTTVEEKKRKEEEGTTGTASTFEVYSSTQRSDQLILPFELESPGMPARSRYARRSRYAKKVTGMPEVT

SEQ ID NO: 828148 - protein, 214 aa, Homo sapiens
ASVAGGRKMAAAVLGQLGALWIHNLRSRGKLALGVLPQSYIHTSASLDISRKWEKKNKIVYPPQLPGEPRRPAEIYHCRRQIKYSKDKMWYLAKLIRGMSIDQALAQLEFNDKKGAKIIKEVLLEAQDMAVRDHNVEFRSNLYIAESTSGRGQCLKRIRYHGRGRFGIMEKVYCHYFVKLVEGPPPPPEPPKTAVAHAKEYIQQLRSRTIVHTL

SEQ ID NO: 828149 - protein, 126 aa, Homo sapiens
MWYLAKLIRGMSIDQALAQLEFNDKKGAKIIKEVLLEAQDMAVRDHNVEFRSNLYIAESTSGRGQCLKRIRYHGRGRFGIMEKVYCHYFVKLVEGPPPPPEPPKTAVAHAKEYIQQLRSRTIVHTL

SEQ ID NO: 828150 - protein, 86 aa, Homo sapiens
RFRTFDPPEEGYLPLEPESTSGRGQCLKRIRYHGRGRFGIMEKVYCHYFVKLVEGPPPPPEPPKTAVAHAKEYIQQLRSRTIVHTL

SEQ ID NO: 828151 - protein, 84 aa, Homo sapiens
APFVRPEEERLSLAPESTSGRGQCLKRIRYHGRGRFGIMEKVYCHYFVKLVEGPPPPPEPPKTAVAHAKEYIQQLRSRTIVHTL

SEQ ID NO: 828152 - protein, 84 aa, Homo sapiens
PSRSTPRERKPFTEPESTSGRGQCLKRIRYHGRGRFGIMEKVYCHYFVKLVEGPPPPPEPPKTAVAHAKEYIQQLRSRTIVHTL

SEQ ID NO: 828153 - protein, 176 aa, Homo sapiens
  misc_feature (6)..(6): Xaa can be any naturally occurring amino acid
MAGGSXRAFYFGGSTGTVGGVMDTKPEEPPQAGLGEIYHCRRQIKYSKDKMWYLAKLIRGMSIDQALAQLEFNDKKGAKIIKEVLLEAQDMAVRDHNVEFRSNLYIAESTSGRGQCLKRIRYHGRGRFGIMEKVYCHYFVKLVEGPPPPPEPPKTAVAHAKEYIQQLRSRTIVHTL

SEQ ID NO: 828154 - protein, 214 aa, Homo sapiens; identical to SEQ ID NO: 828148

SEQ ID NO: 828155 - protein, 214 aa, Homo sapiens; identical to SEQ ID NO: 828148

SEQ ID NO: 828156 - protein, 214 aa, Homo sapiens; identical to SEQ ID NO: 828148

SEQ ID NO: 828157 - protein, 88 aa, Homo sapiens
DIEIYNKTRASPDPPHSIAESTSGRGQCLKRIRYHGRGRFGIMEKVYCHYFVKLVEGPPPPPEPPKTAVAHAKEYIQQLRSRTIVHTL

SEQ ID NO: 828158 - protein, 203 aa, Homo sapiens
ASVAGGRKMAAAVLGQLGALWIHNLRSRGKLALGVLPQSYIHTSASLDISRKWEKKNKIVYPPQLPGEPRRPAEIYHCRRQIKYSKDKMWYLAKLIRGMSIDQALAQLEFNDKKGAKIIKEVLLEAQDMAVRDHNVEFRSNLYIAESTSGRGQCLKRIRYHGRGRFGIMEKVYCHYFVKLVEGPPPPPEPPKTAVAHAKEYIS

SEQ ID NO: 828159 - protein, 214 aa, Homo sapiens; identical to SEQ ID NO: 828148

SEQ ID NO: 828160 - protein, 86 aa, Homo sapiens
LVTPLTAYASSLTRITPESTSGRGQCLKRIRYHGRGRFGIMEKVYCHYFVKLVEGPPPPPEPPKTAVAHAKEYIQQLRSRTIVHTL

SEQ ID NO: 828161 - protein, 88 aa, Homo sapiens
  misc_feature (17)..(17): Xaa can be any naturally occurring amino acid
LFPSCPREKESSLDPLXLTESTSGRGQCLKRIRYHGRGRFGIMEKVYCHYFVKLVEGPPPPPEPPKTAVAHAKEYIQQLRSRTIVHTL

SEQ ID NO: 828162 - protein, 79 aa, Homo sapiens
  misc_feature (1)..(1): Xaa can be any naturally occurring amino acid
XPPYTESYDAESTSGRGQCLKRIRYHGRGRFGIMEKVYCHYFVKLVEGPPPPPEPPKTAVAHAKEYIQQLRSRTIVHTL

SEQ ID NO: 828163 - protein, 178 aa, Homo sapiens
MPKGPFPVNWFIHQGLVHPVWDLMAVNFIFPLGQGIYEIYHCRRQIKYSKDKMWYLAKLIRGMSIDQALAQLEFNDKKGAKIIKEVLLEAQDMAVRDHNVEFRSNLYIAESTSGRGQCLKRIRYHGRGRFGIMEKVYCHYFVKLVEGPPPPPEPPKTAVAHAKEYIQQLRSRTIVHTL

SEQ ID NO: 828164 - protein, 354 aa, Homo sapiens
VPEVKKEETLLDLDFDPFKPEVTPAGSAGVTHSPMSQTLPWDLWTTSTDLVQPASGGSFNGFTQPQDTSLFTMQTDQSMICNLAESEQAPPTEPKAEEPLAAVTPAVGLDLGMDTRAEEPVEEAVIIPGADADAAVGTLVSAAEGAPGEEAEAEKATVPAGEGVSLEEAKIGTETTEGAESAQPEAEELEATVPQEKVIPSVVIEPASNHEEEGENEITIGAEPKETTEDAAPPGPTSETPELATEQKPIQDPQPTPSAPAMGAADQLASAREASQELPPGFLYKVETLHDFEAANSDELTLQRGDVVLVVPSDSEADQDAGWLVGVKESDWLQYRDLATYKGLFPENFTRRLD

SEQ ID NO: 828165 - protein, 260 aa, Homo sapiens
SPFKTLSPIPYPSSQFPPKPHAYQTAWLFKDPEINSTKGLGLRRNRRRLCGTAEGPDLSLAVGKYGSGSPSFGLGAKAGCAGQGGSVFQALPASPRFFFPQEKVIPSVVIEPASNHEEEGENEITIGAEPKETTEDAAPPGPTSETPELATEQKPIQDPQPTPSAPAMGAADQLASAREASQELPPGFLYKVETLHDFEAANSDELTLQRGDVVLVVPSDSEADQDAGWLVGVKESDWLQYRDLATYKGLFPENFTRRLD

SEQ ID NO: 828166 - protein, 207 aa, Homo sapiens
VPEVKKEETLLDLDFDPFKPEVTPAGSAGVTHSPMSQTLPWDLWTTSTDLVQPASGGSFNGFTQPQDTSLFTMQTDQSMICNLAESEQAPPTEPKAEEPLAAVTPAVGLDLGMDTRAEEPVEEAVIIPGADADAAVGTLVSAAEGAPGEEAEAEKATVPAGEGVSLEEAKIGTETTEGAESAQPEAEELSRTLSPRLLHQPWGLLTS

SEQ ID NO: 828167 - protein, 902 aa, Homo sapiens
MAPTKPSFQQDPSRRERLQALRKEKSRDAARSRRGKENFEFYELAKLLPLPAAITSQLDKASIIRLTISYLKMRDFANQGDPPWNLRMEGPPPNTSVKDGAQRRRSPSALAIEVFEAHLGSHILQSLDGFVFALNQEGKFLYISETVSIYLGLSQVELTGSSVFDYVHPGDHVEMAEQLGMKLPPGRGLLSQGTAEDGASSASSSSQSETPEPVESTSPSLLTTDNTLERSFFIRMKSTLTKRGVHIKSSGYKVIHITGRLRLRVSLSHGRTVPSQIMGLVVVAHALPPPTINEVRIDCHMFVTRVNMDLNIIYCENRISDYMDLTPVDIVGKRCYHFIHAEDVEGIRHSHLDLLNKGQCVTKYYRWMQKNGGYIWIQSSATIAINAKNANEKNIIWVNYLLSNPEYKDTPMDIAQLPHLPEKTSESSETSDSESDSKDTSGITEDNENSKSDEKGNQSENSEDPEPDRKKSGNACDNDMNCNDDGHSSSNPDSRDSDDSFEHSDFENPKAGEDGFGALGAMQIKVERYVESESDLRLQNCESLTSDSAKDSDSAGEAGAQASSKHQKRKKRRKRQKGGSASRRRLSSASSPGGLDAGLVEPPRLLSSPNSASVLKIKTEISEPINFDNDSSIWNYPPNREISRNESPYSMTKPPSSEHFPSPQGGGGGGGGGGGLHVAIPDSVLTPPGADGAAARKTQFGASATAALAPVASDPLSPPLSASPRDKHPGNGGGGGGGGGGAGGGGPSASNSLLYTGDLEALQRLQAGNVVLPLVHRVTGTLAATSTAAQRVYTTGTIRYAPAEVTLAMQSNLLPNAHAVNFVDVNSPGFGLDPKTPMEMLYHHVHRLNMSGPFGGAVSAASLTQMPAGNVFTTAEGLFSTLPFPVYSNGIHAAQTLERKED

SEQ ID NO: 828168 - protein, 148 aa, Homo sapiens
VNKRWIASNSRMKSSGLRVRAITGKCPSQFRTTAQFMLQTNVVGPSFHLCSRVRCMQETFYMEKACMSPNVQFITAALCHLHTLDSFLPTSLMCLSTDTVFTSPVTSTSKQMFCGKVTKHLCHFLKLIKFSLGRSLVPLALKDIIAEK

SEQ ID NO: 828169 - protein, 949 aa, Homo sapiens
AAAGVPAGAGMGRAGAAANGTPQNVQGITSYQQRITAQHPLPNQSECRKIYRYDGIYCESTYQNLQALRKEKSRDAARSRRGKENFEFYELAKLLPLPAAITSQLDKASIIRLTISYLKMRDFANQGDPPWNLRMEGPPPNTSVKVCAQRRRSPSALAIEVFEAHLGSHILQSLDGFVFALNQEGKFLYISETVSIYLGLSQVELTGSSVFDYVHPGDHVEMAEQLGMKLPPGRGLLSQGTAEDGASSASSSSQSETPEPVESTSPSLLTTDNTLERSFFIRMKSTLTKRGVHIKSSGYKVIHITGRLRLRVSLSHGRTVPSQIMGLVVVAHALPPPTINEVRIDCHMFVTRVNMDLNIIYCENRISDYMDLTPVDIVGKRCYHFIHAEDVEGIRHSHLDLLNKGQCVTKYYRWMQKNGGYIWIQSSATIAINAKNANEKNIIWVNYLLSNPEYKDTPMDIAQLPHLPEKTSESSETSDSESDSKDTSGITEDNENSKSDEKGNQSENSEDPEPDRKKSGNACDNDMNCNDDGHSSSNPDSRDSDDSFEHSDFENPKAGEDGFGALGAMQIKVERYVESESDLRLQNCESLTSDSAKDSDSAGEAGAQASSKHQKRKKRRKRQKGGSASRRRLSSASSPGGLDAGLVEPPRLLSSPNSASVLKIKTEISEPINFDNDSSIWNYPPNREISRNESPYSMTKPPSSEHFPSPQGGGGGGGGGGGLHVAIPDSVLTPPGADGAAARKTQFGASATAALAPVASDPLSPPLSASPRDKHPGNGGGGGGGGGGAGGGGPSASNSLLYTGDLEALQRLQAGNVVLPLVHRVTGTLAATSTAAQRVYTTGTIRYAPAEVTLAMQSNLLPNAHAVNFVDVNSPGFGLDPKTPMEMLYHHVHRLNMSGPFGGAVSAASLTQMPAGNVFTTAEGLFSTLPFPVYSNGIHAAQTLERKED

SEQ ID NO: 828170 - protein, 919 aa, Homo sapiens
AAAGVPAGAGMGRAGAAANGTPQNVQGITSYQQRLQALRKEKSRDAARSRRGKENFEFYELAKLLPLPAAITSQLDKASIIRLTISYLKMRDFANQGDPPWNLRMEGPPPNTSVKDGAQRRRSPSALAIEVFEAHLGSHILQSLDGFVFALNQEGKFLYISETVSIYLGLSQVELTGSSVFDYVHPGDHVEMAEQLGMKLPPGRGLLSQGTAEDGASSASSSSQSETPEPVESTSPSLLTTDNTLERSFFIRMKSTLTKRGVHIKSSGYKVIHITGRLRLRVSLSHGRTVPSQIMGLVVVAHALPPPTINEVRIDCHMFVTRVNMDLNIIYCENRISDYMDLTPVDIVGKRCYHFIHAEDVEGIRHSHLDLLNKGQCVTKYYRWMQKNGGYIWIQSSATIAINAKNANEKNIIWVNYLLSNPEYKDTPMDIAQLPHLPEKTSESSETSDSESDSKDTSGITEDNENSKSDEKGNQSENSEDPEPDRKKSGNACDNDMNCNDDGHSSSNPDSRDSDDSFEHSDFENPKAGEDGFGALGAMQIKVERYVESESDLRLQNCESLTSDSAKDSDSAGEAGAQASSKHQKRKKRRKRQKGGSASRRRLSSASSPGGLDAGLVEPPRLLSSPNSASVLKIKTEISEPINFDNDSSIWNYPPNREISRNESPYSMTKPPSSEHFPSPQGGGGGGGGGGGLHVAIPDSVLTPPGADGAAARKTQFGASATAALAPVASDPLSPPLSASPRDKHPGNGGGGGGGGGGAGGGGPSASNSLLYTGDLEALQRLQAGNVVLPLVHRVTGTLAATSTAAQRVYTTGTIRYAPAEVTLAMQSNLLPNAHAVNFVDVNSPGFGLDPKTPMEMLYHHVHRLNMSGPFGGAVSAASLTQMPAGNVFTTAEGLFSTLPFPVYSNGIHAAQTLERKED

SEQ ID NO: 828171 - protein, 667 aa, Homo sapiens
MKSTLTKRGVHIKSSGYKVIHITGRLRLRVSLSHGRTVPSQIMGLVVVAHALPPPTINEVRIDCHMFVTRVNMDLNIIYCENRISDYMDLTPVDIVGKRCYHFIHAEDVEGIRHSHLDLLNKGQCVTKYYRWMQKNGGYIWIQSSATIAINAKNANEKNIIWVNYLLSNPEYKDTPMDIAQLPHLPEKTSESSETSDSESDSKDTSGITEDNENSKSDEKGNQSENSEDPEPDRKKSGNACDNDMNCNDDGHSSSNPDSRDSDDSFEHSDFENPKAGEDGFGALGAMQIKVERYVESESDLRLQNCESLTSDSAKDSDSAGEAGAQASSKHQKRKKRRKRQKGGSASRRRLSSASSPGGLDAGLVEPPRLLSSPNSASVLKIKTEISEPINFDNDSSIWNYPPNREISRNESPYSMTKPPSSEHFPSPQGGGGGGGGGGGLHVAIPDSVLTPPGADGAAARKTQFGASATAALAPVASDPLSPPLSASPRDKHPGNGGGGGGGGGGAGGGGPSASNSLLYTGDLEALQRLQAGNVVLPLVHRVTGTLAATSTAAQRVYTTGTIRYAPAEVTLAMQSNLLPNAHAVNFVDVNSPGFGLDPKTPMEMLYHHVHRLNMSGPFGGAVSAASLTQMPAGNVFTTAEGLFSTLPFPVYSNGIHAAQTLERKED

SEQ ID NO: 828172 - protein, 273 aa, Homo sapiens
AAAGVPAGAGMGRAGAAANGTPQNVQGITSYQQRITAQHPLPNQSECRKIYRYDGIYCESTYQNLQALRKEKSRDAARSRRGKENFEFYELAKLLPLPAAITSQLDKASIIRLTISYLKMRDFANQGDPPWNLRMEGPPPNTSVKVCAQRRRSPSALAIEVFEAHLGSHILQSLDGFVFALNQEGKFLYISETVSIYLGLSQVELTGSSVFDYVHPGDHVEMAEQLGMKLPPGRGLLSQGTAEDGASSASSSSQSETPEPVVCFPPASDQFLL

SEQ ID NO: 828173 - protein, 231 aa, Homo sapiens
AAAGVPAGAGMGRAGAAANGTPQNVQGITSYQQRITAQHPLPNQSECRKIYRYDGIYCESTYQNLQALRKEKSRDAARSRRGKENFEFYELAKLLPLPAAITSQLDKASIIRLTISYLKMRDFANQGDPPWNLRMEGPPPNTSVKVCAQRRRSPSALAIEVFEAHLGSHILQSLDGFVFALNQEGKFLYISETVSIYLGLSQAQTLCSPLQSHRRPSRCSVAKLQSIYVTF

SEQ ID NO: 828174 - protein, 401 aa, Homo sapiens
AAAGVPAGAGMGRAGAAANGTPQNVQGITSYQQRITAQHPLPNQSECRKIYRYDGIYCESTYQNLQALRKEKSRDAARSRRGKENFEFYELAKLLPLPAAITSQLDKASIIRLTISYLKMRDFANQGDPPWNLRMEGPPPNTSVKVCAQRRRSPSALAIEVFEAHLGSHILQSLDGFVFALNQEGKFLYISETVSIYLGLSQVELTGSSVFDYVHPGDHVEMAEQLGMKLPPGRGLLSQGTAEDGASSASSSSQSETPEPVESTSPSLLTTDNTLERSFFIRMKSTLTKRGVHIKSSGYKVIHITGRLRLRVSLSHGRTVPSQIMGLVVVAHALPPPTINEVRIDCHMFVTRVNMDLNIIYCENRISDYMDLTPVDIVGKRCYHFIHAEDVEGIRHSHLDS

SEQ ID NO: 828175 - protein, 214 aa, Homo sapiens
AAAGVPAGAGMGRAGAAANGTPQNVQGITSYQQRITAQHPLPNQSECRKIYRYDGIYCESTYQNLQALRKEKSRDAARSRRGKENFEFYELAKLLPLPAAITSQLDKASIIRLTISYLKMRDFANQGDPPWNLRMEGPPPNTSVKVCAQRRRSPSALAIEVFEAHLGSHILQSLDGFVFALNQEGKFLYISETVSIYLGLSQVSKTILDSWQRL

SEQ ID NO: 828176 - protein, 94 aa, Homo sapiens
RGRSSPAEARGGWGGTMADVFPGNDSTASQDVANRFARKGALRQKNVHEVKDHKFIARFFKQPTFCSHCTDFIWGFGKQGFQCQVAEQTVAACL

SEQ ID NO: 828177 - protein, 97 aa, Homo sapiens
RGRSSPAEARGGWGGTMADVFPGNDSTASQDVANRFARKGALRQKNVHEVKDHKFIARFFKQPTFCSHCTDFIWGFGKQGFQCQGKLPLLVLFSSTT

SEQ ID NO: 828178 - protein, 688 aa, Homo sapiens
RGRSSPAEARGGWGGTMADVFPGNDSTASQDVANRFARKGALRQKNVHEVKDHKFIARFFKQPTFCSHCTDFIWGFGKQGFQCQVCCFVVHKRCHEFVTFSCPGADKGPDTDDPRSKHKFKIHTYGSPTFCDHCGSLLYGLIHQGMKCDTCDMNVHKQCVINVPSLCGMDHTEKRGRIYLKAEVADEKLHVTVRDAKNLIPMDPNGLSDPYVKLKLIPDPKNESKQKTKTIRSTLNPQWNESFTFKLKPSDKDRRLSVEIWDWDRTTRNDFMGSLSFGVSELMKMPASGWYKLLNQEEGEYYNVPIPEGDEEGNMELRQKFEKAKLGPAGNKVISPSEDRKQPSNNLDRVKLTDFNFLMVLGKGSFGKVMLADRKGTEELYAIKILKKDVVIQDDDVECTMVEKRVLALLDKPPFLTQLHSCFQTVDRLYFVMEYVNGGDLMYHIQQVGKFKEPQAVFYAAEISIGLFFLHKRGIIYRDLKLDNVMLDSEGHIKIADFGMCKEHMMDGVTTRTFCGTPDYIAPEIIAYQPYGKSVDWWAYGVLLYEMLAGQPPFDGEDEDELFQSIMEHNVSYPKSLSKEAVSICKGLMTKHPAKRLGCGPEGERDVREHAFFRRIDWEKLENREIQPPFKPKVCGKGAENFDKFFTRGQPVLTPPDQLVIANIDQSDFEGFSYVNPQFVHPILQSAV

SEQ ID NO: 828179 - protein, 654 aa, Homo sapiens
RGRSSPAEARGGWGGTMADVFPGNDSTASQDVANRFARKGALRQKNVHEVKDHKFIARFFKQPTFCSHCTDFIWGFGKQGFQCQVCCFVVHKRCHEFVTFSCPGADKGPDTDDPRSKHKFKIHTYGSPTFCDHCGSLLYGLIHQGMKCDTCDMNVHKQCVINVPSLCGMDHTEKRGRIYLKAEVADEKLHVTVRDAKNLIPMDPNGLSDPYVKLKLIPDPKNESKQKTKTIRSTLNPQWNESFTFKLKPSDKDRRLSVEIWDWDRTTRNDFMGSLSFGVSELMKMPASGWYKLLNQEEGEYYNVPIPEGDEEGNMELRQKFEKAKLGPAGNKVISPSEDRKQPSNNLDRVKLTDFNFLMVLGKGSFGKVMLADRKGTEELYAIKILKKDVVIQDDDVECTMVEKRVLALLDKPPFLTQLHSCFQTVDRLYFVMEYVNGGDLMYHIQQVGKFKEPQAVFYAAEISIGLFFLHKRGIIYRDLKLDNVMLDSEGHIKIADFGMCKEHMMDGVTTRTFCGTPDYIAPEIIAYQPYGKSVDWWAYGVLLYEMLAGQPPFDGEDEDELFQSIMEHNVSYPKSLSKEAVSICKGLMTKHPAKRLGCGPEGERDVREHAFFRRIDWEKLENREIQPPFKPKVPCEMGTMVPSLQWRKQSQRG

SEQ ID NO: 828180 - protein, 624 aa, Homo sapiens
MPPTAPTSSGGLGRQGFQCQVCCFVVHKRCHEFVTFSCPGADKGPDTDDPRSKHKFKIHTYGSPTFCDHCGSLLYGLIHQGMKCDTCDMNVHKQCVINVPSLCGMDHTEKRGRIYLKAEVADEKLHVTVRDAKNLIPMDPNGLSDPYVKLKLIPDPKNESKQKTKTIRSTLNPQWNESFTFKLKPSDKDRRLSVEIWDWDRTTRNDFMGSLSFGVSELMKMPASGWYKLLNQEEGEYYNVPIPEGDEEGNMELRQKFEKAKLGPAGNKVISPSEDRKQPSNNLDRVKLTDFNFLMVLGKGSFGKVMLADRKGTEELYAIKILKKDVVIQDDDVECTMVEKRVLALLDKPPFLTQLHSCFQTVDRLYFVMEYVNGGDLMYHIQQVGKFKEPQAVFYAAEISIGLFFLHKRGIIYRDLKLDNVMLDSEGHIKIADFGMCKEHMMDGVTTRTFCGTPDYIAPEIIAYQPYGKSVDWWAYGVLLYEMLAGQPPFDGEDEDELFQSIMEHNVSYPKSLSKEAVSICKGLMTKHPAKRLGCGPEGERDVREHAFFRRIDWEKLENREIQPPFKPKVCGKGAENFDKFFTRGQPVLTPPDQLVIANIDQSDFEGFSYVNPQFVHPILQSAV

SEQ ID NO: 828181 - protein, 319 aa, Homo sapiens
MLADRKGTEELYAIKILKKDVVIQDDDVECTMVEKRVLALLDKPPFLTQLHSCFQTVDRLYFVMEYVNGGDLMYHIQQVGKFKEPQAVFYAAEISIGLFFLHKRGIIYRDLKLDNVMLDSEGHIKIADFGMCKEHMMDGVTTRTFCGTPDYIAPEIIAYQPYGKSVDWWAYGVLLYEMLAGQPPFDGEDEDELFQSIMEHNVSYPKSLSKEAVSICKGLMTKHPAKRLGCGPEGERDVREHAFFRRIDWEKLENREIQPPFKPKVCGKGAENFDKFFTRGQPVLTPPDQLVIANIDQSDFEGFSYVNPQFVHPILQSAV

SEQ ID NO: 828182 - protein, 341 aa, Homo sapiens
RGRSSPAEARGGWGGTMADVFPGNDSTASQDVANRFARKGALRQKNVHEVKDHKFIARFFKQPTFCSHCTDFIWGFGKQGFQCQVCCFVVHKRCHEFVTFSCPGADKGPDTDDPRSKHKFKIHTYGSPTFCDHCGSLLYGLIHQGMKCDTCDMNVHKQCVINVPSLCGMDHTEKRGRIYLKAEVADEKLHVTVRDAKNLIPMDPNGLSDPYVKLKLIPDPKNESKQKTKTIRSTLNPQWNESFTFKLKPSDKDRRLSVEIWDWDRTTRNDFMGSLSFGVSELMKMPASGWYKLLNQEEGEYYNVPIPEGDEEGNIGNFQGRKISEGGGDLTKKWPPGKPTL

SEQ ID NO: 828183 - protein, 296 aa, Homo sapiens
RGRSSPAEARGGWGGTMADVFPGNDSTASQDVANRFARKGALRQKNVHEVKDHKFIARFFKQPTFCSHCTDFIWGFGKQGFQCQVCCFVVHKRCHEFVTFSCPGADKGPDTDDPRSKHKFKIHTYGSPTFCDHCGSLLYGLIHQGMKCDTCDMNVHKQCVINVPSLCGMDHTEKRGRIYLKAEVADEKLHVTVRDAKNLIPMDPNGLSDPYVKLKLIPDPKNESKQKTKTIRSTLNPQWNESFTFKLKPSDKDRRLSVEIWDWDRTTRNDFMGSLSFGVSELMKMPASGWYGSRLG

SEQ ID NO: 828184 - protein, 160 aa, Homo sapiens
ITLMFSFPAASPHATPSTLHFPTSPIIQQPGPYFSHPAIRYHPQETLKEFVQLVCPDAGQQAGQVGFLNPNGSSQGKVHNPFLPTPMLPPPPPPPMARPVPLPVPDTKPPTTSTEGGAASPTSPTYSTPSTSPANRFVSVGPRDPSFVNIPQQTQSWYLG

SEQ ID NO: 828185 - protein, 509 aa, Homo sapiens
MYSPLCLTQDEFHPFIEALLPHVRAFAYTWFNLQARKRKYFKKHEKRMSKEEERAVKDELLSEKPEVKQKWASRLLAKLRKDIRPEYREDFVLTVTGKKPPCCVLSNPDQKGKMRRIDCLRQADKVWRLDLVMVILFKGIPLESTDGERLVKSPQCSNPGLCVQPHHIGVSVKELDLYLAYFVHAADSSQSESPSQPSDADIKDQPENGHLGFQDSFVTSGVFSVTELVRVSQTPIAAGTGPNFSLSDLESSSYYSMSPGAMRRSLPSTSSTSSTKRLKSVEDEMDSPGEEPFYTGQGRSPGSGSQSSGWHEVEPGMPSPTTLKKSEKSGFSSPSPSQTSSLGTAFTQHHRPVITGPRASPHATPSTLHFPTSPIIQQPGPYFSHPAIRYHPQETLKEFVQLVCPDAGQQAGQVGFLNPNGSSQGKVHNPFLPTPMLPPPPPPPMARPVPLPVPDTKPPTTSTEGGAASPTSPTYSTPSTSPANRFVSVGPRDPSFVNIPQQTQSWYLG

SEQ ID NO: 828186 - protein, 509 aa, Homo sapiens; identical to SEQ ID NO: 828185

SEQ ID NO: 828187 - protein, 501 aa, Homo sapiens
MYSPLCLTQDEFHPFIEALLPHVRAFAYTWFNLQARKRKYFKKHEKRMSKEEERAVKDELLSEKPEVKQKWASRLLAKLRKDIRPEYREDFVLTVTGKKPPCCVLSNPDQKGKMRRIDCLRQADKVWRLDLVMVILFKGIPLESTDGERLVKSPQCSNPGLCVQPHHIGVSVKELDLYLAYFVHAADSSQSESPSQPSDADIKDQPENGHLGFQDSFVTSGVFSVTELVRVSQTPIAAGTGPNFSLSDLESSSYYSMSPGAMRRSLPSTSSTSSTKRLKSVEDEMDSPGEEPFYTGQGRSPGSGSQSSGWHEVEPGMPSPTTLKKSEKSGFSSPSPSQTSSLGTAFTQHHRPVITGPRASPHATPSTLHFPTSPIIQQPGPYFSHPAIRYHPQETLKEFVQLVCPDAGQQAGQVGFLNPNGSSQGKVHNPFLPTPMLPPPPPPPMARPVPLPVPDTKPPTTSTEGGAASPTSPRCHMTGRVLWETLISLRWCGPEQSWYLG

SEQ ID NO: 828188 - protein, 555 aa, Homo sapiens
MYSPLCLTQDEFHPFIEALLPHVRAFAYTWFNLQARKRKYFKKHEKRMSKEEERAVKDELLSEKPEVKQKWASRLLAKLRKDIRPEYREDFVLTVTGKKPPCCVLSNPDQKGKMRRIDCLRQADKVWRLDLVMVILFKGIPLESTDGERLVKSPQCSNPGLCVQPHHIGVSVKELDLYLAYFVHAAGKCDGENSSHFLVCVSFLMASALCRILPELPKLQATYMKPVWFQRLREVPPSFRRKSIALSEFSLSSALLIQVNLKVPASQVTLTLRTSQKIVTELVRVSQTPIAAGTGPNFSLSDLESSSYYSMSPGAMRRSLPSTSSTSSTKRLKSVEDEMDSPGEEPFYTGQGRSPGSGSQSSGWHEVEPGMPSPTTLKKSEKSGFSSPSPSQTSSLGTAFTQHHRPVITGPRASPHATPSTLHFPTSPIIQQPGPYFSHPAIRYHPQETLKEFVQLVCPDAGQQAGQVGFLNPNGSSQGKVHNPFLPTPMLPPPPPPPMARPVPLPVPDTKPPTTSTEGGAASPTSPRCHMTGRVLWETLISLRWCGPEQSWYLG

SEQ ID NO: 828189 - protein, 512 aa, Homo sapiens
GHLIQDNSPRSPAGFSCHHEDEFHPFIEALLPHVRAFAYTWFNLQARKRKYFKKHEKRMSKEEERAVKDELLSEKPEVKQKWASRLLAKLRKDIRPEYREDFVLTVTGKKPPCCVLSNPDQKGKMRRIDCLRQADKVWRLDLVMVILFKGIPLESTDGERLVKSPQCSNPGLCVQPHHIGVSVKELDLYLAYFVHAADSSQSESPSQPSDADIKDQPENGHLGFQDSFVTSGVFSVTELVRVSQTPIAAGTGPNFSLSDLESSSYYSMSPGAMRRSLPSTSSTSSTKRLKSVEDEMDSPGEEPFYTGQGRSPGSGSQSSGWHEVEPGMPSPTTLKKSEKSGFSSPSPSQTSSLGTAFTQHHRPVITGPRASPHATPSTLHFPTSPIIQQPGPYFSHPAIRYHPQETLKEFVQLVCPDAGQQAGQVGFLNPNGSSQGKVHNPFLPTPMLPPPPPPPMARPVPLPVPDTKPPTTSTEGGAASPTSPRCHMTGRVLWETLISLRWCGPEQSWYLG

SEQ ID NO: 828190 - protein, 439 aa, Homo sapiens
MVILFKGIPLESTDGERLVKSPQCSNPGLCVQPHHIGVSVKELDLYLAYFVHAAGKCDGENSSHFLVCVSFLMASALCRILPELPKLQATYMKPVWFQKIERGATFIQVKKHSFERILTKFSSFDSSQSESPSQPSDADIKDQPENGHLGFQDSFVTSGVFSVTELVRVSQTPIAAGTGPNFSLSDLESSSYYSMSPGAMRRSLPSTSSTSSTKRLKSVEDEMDSPGEEPFYTGQGRSPGSGSQSSGWHEVEPGMPSPTTLKKSEKSGFSSPSPSQTSSLGTAFTQHHRPVITGPRASPHATPSTLHFPTSPIIQQPGPYFSHPAIRYHPQETLKEFVQLVCPDAGQQAGQVGFLNPNGSSQGKVHNPFLPTPMLPPPPPPPMARPVPLPVPDTKPPTTSTEGGAASPTSPRCHMTGRVLWETLISLRWCGPEQSWYLG

SEQ ID NO: 828191 - protein, 501 aa, Homo sapiens; identical to SEQ ID NO: 828187

SEQ ID NO: 828192 - protein, 216 aa, Homo sapiens
MYSPLCLTQDEFHPFIEALLPHVRAFAYTWFNLQARKRKYFKKHEKRMSKEEERAVKDELLSEKPEVKQKWASRLLAKLRKDIRPEYREDFVLTVTGKKPPCCVLSNPDQKGKMRRIDCLRQADKVWRLDLVMVILFKGIPLESTDGERLVKSPQCSNPGLCVQPHHIGVSVKELDLYLAYFVHAADSSQSESPSQPSDADIKDQPENDGKFSLGL

SEQ ID NO: 828193 - protein, 191 aa, Homo sapiens
MYSPLCLTQDEFHPFIEALLPHVRAFAYTWFNLQARKRKYFKKHEKRMSKEEERAVKDELLSEKPEVKQKWASRLLAKLRKDIRPEYREDFVLTVTGKKPPCCVLSNPDQKGKMRRIDCLRQADKVWRLDLVMVILFKGIPLESTDGERLVKSPQCSNPGLCVQPHHIGVSVKELDLYLAYFVHAAGGVGR

SEQ ID NO: 828194 - protein, 748 aa, Homo sapiens
MSQWNQVQQLEIKFLEQVDQFYDDNFPMEIRHLLAQWIENQDWEAASNNETMATILLQNLLIQLDEQLGRVSKEKNLLLIHNLKRIRKVLQGKFHGNPMHVAVVISNCLREERRILAAANMPVQGPLEKSLQSSSVSERQRNVEHKVAAIKNSVQMTEQDTKYLEDLQDEFDYRYKTIQTMDQSDKNSAMVNQEVLTLQEMLNSLDFKRKEALSKMTQIIHETDLLMNTMLIEELQDWKRRQQIACIGGPLHNGLDQLQNCFTLLAESLFQLRRQLEKLEEQSTKMTYEGDPIPMQRTHMLERVTFLIYNLFKNSFVVERQPCMPTHPQRPLVLKTLIQFTVKLRLLIKLPELNYQVKVKASIDKNVSTLSNRRFVLCGTNVKAMSIEESSNGSLSVEFRHLQPKEMKSSAGGKGNEGCHMVTEELHSITFETQICLYGLTIDLETSSLPVVMISNVSQLPNAWASIIWYNVSTNDSQNLVFFNNPPPATLSQLLEVMSWQFSSYVGRGLNSDQLHMLAEKLTVQSSYSDGHLTWAKFCKEHLPGKSFTFWTWLEAILDLIKKHILPLWIDGYVMGFVSKEKERLLLKDKMPGTFLLRFSESHLGGITFTWVDHSESGEVRFHSVEPYNKGRLSALPFADILRDYKVIMAENIPENPLKYLYPDIPKDKAFGKHYSSQPCEVSRPTERGDKGYVPSVFIPISTIRSDSTEPHSPSDLLPMSPSVYAVLRENLSPTTIETAMKSPYSAE

SEQ ID NO: 828195 - protein, 748 aa, Homo sapiens; identical to SEQ ID NO: 828194

SEQ ID NO: 828196 - protein, 498 aa, Homo sapiens
MSQWNQVQQLEIKFLEQVDQFYDDNFPMEIRHLLAQWIENQDWEAASNNETMATILLQNLLIQLDEQLGRVSKEKNLLLIHNLKRIRKVLQGKFHGNPMHVAVVISNCLREERRILCFTLSNRRFVLCGTNVKAMSIEESSNGSLSVEFRHLQPKEMKSSAGGKGNEGCHMVTEELHSITFETQICLYGLTIDLETSSLPVVMISNVSQLPNAWASIIWYNVSTNDSQNLVFFNNPPPATLSQLLEVMSWQFSSYVGRGLNSDQLHMLAEKLTVQSSYSDGHLTWAKFCKEHLPGKSFTFWTWLEAILDLIKKHILPLWIDGYVMGFVSKEKERLLLKDKMPGTFLLRFSESHLGGITFTWVDHSESGEVRFHSVEPYNKGRLSALPFADILRDYKVIMAENIPENPLKYLYPDIPKDKAFGKHYSSQPCEVSRPTERGDKGYVPSVFIPISTIRSDSTEPHSPSDLLPMSPSVYAVLRENLSPTTIETAMKSPYSAE

SEQ ID NO: 828197 - protein, 721 aa, Homo sapiens
MEIRHLLAQWIENQDWEAASNNETMATILLQNLLIQLDEQLGRVSKEKNLLLIHNLKRIRKVLQGKFHGNPMHVAVVISNCLREERRILAAANMPVQGPLEKSLQSSSVSERQRNVEHKVAAIKNSVQMTEQDTKYLEDLQDEFDYRYKTIQTMDQSDKNSAMVNQEVLTLQEMLNSLDFKRKEALSKMTQIIHETDLLMNTMLIEELQDWKRRQQIACIGGPLHNGLDQLQNCFTLLAESLFQLRRQLEKLEEQSTKMTYEGDPIPMQRTHMLERVTFLIYNLFKNSFVVERQPCMPTHPQRPLVLKTLIQFTVKLRLLIKLPELNYQVKVKASIDKNVSTLSNRRFVLCGTNVKAMSIEESSNGSLSVEFRHLQPKEMKSSAGGKGNEGCHMVTEELHSITFETQICLYGLTIDLETSSLPVVMISNVSQLPNAWASIIWYNVSTNDSQNLVFFNNPPPATLSQLLEVMSWQFSSYVGRGLNSDQLHMLAEKLTVQSSYSDGHLTWAKFCKEHLPGKSFTFWTWLEAILDLIKKHILPLWIDGYVMGFVSKEKERLLLKDKMPGTFLLRFSESHLGGITFTWVDHSESGEVRFHSVEPYNKGRLSALPFADILRDYKVIMAENIPENPLKYLYPDIPKDKAFGKHYSSQPCEVSRPTERGDKGYVPSVFIPISTIRSDSTEPHSPSDLLPMSPSVYAVLRENLSPTTIETAMKSPYSAE

SEQ ID NO: 828198 - protein, 328 aa, Homo sapiens [sequence omitted]

SEQ ID NO: 828199 - protein, 704 aa, Homo sapiens
MSQWNQVQQLEIKFLEQVDQFYDDNFPMEIRHLLAQWIENQDWEAASNNETMATILLQNLLIQLDEQLGRVSKEKNLLLIHNLKRIRKVLQGKFHGNPMHVAVVISNCLREERRILAAANMPVQGPLEKSLQSSSVSERQRNVEHKVAAIKNSVQMTEQDTKYLEDLQDEFDYRYKTIQTMDQSDKNSAMVNQEVLTLQEMLNSLDFKRKEALSKMTQIIHETDLLMNTMLIEELQDWKRRQQIACIGGPLHNGLDQLQNCFTLLAESLFQLRRQLEKLEEQSTKMTYEGDPIPMQRTHMLERVTFLIYNLFKNSFVVERQPCMPTHPQRPLVLKTLIQFTVKLRLLIKLPELNYQVKVKASIDKNVSTLSNRRFVLCGTNVKAMSIEESSNGSLSVEFRHLQPKEMKSSAGGKGNEGCHMVTEELHSITFETQICLYGLTIDLETSSLPVVMISNVSQLPNAWASIIWYNVSTNDSQNLVFFNNPPPATLSQLLEVMSWQFSSYVGRGLNSDQLHMLAEKLTVQSSYSDGHLTWAKFCKEHLPGKSFTFWTWLEAILDLIKKHILPLWIDGYVMGFVSKEKERLLLKDKMPGTFLLRFSESHLGGITFTWVDHSESGEVRFHSVEPYNKGRLSALPFADILRDYKVIMAENIPENPLKYLYPDIPKDKAFGKHYSSQPCEVSRPTERGDKGYVPSVFIPISTM

SEQ ID NO: 828200 - protein, 136 aa, Homo sapiens
MSQWNQVQQLEIKFLEQVDQFYDDNFPMEIRHLLAQWIENQDWEAASNNETMATILLQNLLIQLDEQLGRVSKEKNLLLIHNLKRIRKVLQGKFHGNPMHVAVVISNCLREERRILAAANMPVQVIFSDLVILLSP

SEQ ID NO: 828201 - protein, 161 aa, Homo sapiens
SGGFLTVRRPNPPLRRGGTLQAARHTERTPVDDQRRGRRSLEGKVKETVHNAFGDHLKEQLSATPPDFSCALELLKEIKEILLSLLLPRQNRLRIEMEEALDMDLLKQEAEHGALKVLYLSKYVLNMMALLCAPVRDEAVQKLENITDPVWILRMTIVKEI

SEQ ID NO: 828202 - protein, 223 aa, Homo sapiens
LVVRGTQGSYIGQDCREIPEHLGRDCGHFAKRLDLSFNLLRSLEGLSAFRSLEELILDNNQLGDDLVLPGLPRLHTLTLNKNRITDLENLLDHLAEVTPALEYLSLLGNVACPNELVSLEKDEEDYKRYRCFVLYKLPNLKFLDAQKVTRQEREEALVRGVFMKVVKPKASSEDVASSPERHYTPLPSASRELTSHQGVLGKCRYVYYGKNSEGNRFIRDDQL

SEQ ID NO: 828203 - protein, 218 aa, Homo sapiens
LICPMDGCSFLPVGLRCLRAAQRDFFGLGILTLFLKSLEGLSAFRSLEELILDNNQLGDDLVLPGLPRLHTLTLNKNRITDLENLLDHLAEVTPALEYLSLLGNVACPNELVSLEKDEEDYKRYRCFVLYKLPNLKFLDAQKVTRQEREEALVRGVFMKVVKPKASSEDVASSPERHYTPLPSASRELTSHQGVLGKCRYVYYGKNSEGNRFIRDDQL

SEQ ID NO: 828204 - protein, 211 aa, Homo sapiens
TLLARVSCHAISSRNRKLNWELVGSQEEKSLEGLSAFRSLEELILDNNQLGDDLVLPGLPRLHTLTLNKNRITDLENLLDHLAEVTPALEYLSLLGNVACPNELVSLEKDEEDYKRYRCFVLYKLPNLKFLDAQKVTRQEREEALVRGVFMKVVKPKASSEDVASSPERHYTPLPSASRELTSHQGVLGKCRYVYYGKNSEGNRFIRDDQL

SEQ ID NO: 828205 - protein, 244 aa, Homo sapiens
MCFSFILFPLPPKPWSTCCCSHASCQQWHLLSVAIKNLNVNIFALKEWKSICHSAAIILQIKSLEGLSAFRSLEELILDNNQLGDDLVLPGLPRLHTLTLNKNRITDLENLLDHLAEVTPALEYLSLLGNVACPNELVSLEKDEEDYKRYRCFVLYKLPNLKFLDAQKVTRQEREEALVRGVFMKVVKPKASSEDVASSPERHYTPLPSASRELTSHQGVLGKCRYVYYGKNSEGNRFIRDDQL

SEQ ID NO: 828206 - protein, 85 aa, Homo sapiens
QTWKCWHVDRPCTKNPAEDSESLRCFLLIFFAKHLLSLILEVRGGKRQVSWGSVATFTMGKTQRATGLSEMTSSEANFCIPSPIS

SEQ ID NO: 828207 - protein, 307 aa, Homo sapiens
LICPMDGCSFLPVGLRCLRAAQRDFFGLGILTLLLKNRRDFSGCRLRCIYPNTSTLAGDPARNGSRLVVYAVHARPTQDSRWFLCARVAAKSALRGRSGHAAPPGQSGSRCLAVPGRPHLCQLLRNTRLVHGFARGEKMTSKFPNRGSRNFLDEGSLLRLCLENPHELLQLAREIRWRSGRRTKGGAGEQGGHWVTQPGPGETLEKGALLSLFQCNSSARDGITEFPGCADAPMCLRDPTGRRRSLKLRKLAEVRRGVQNWGVLSWAVPIAGDPPFVSLAGLLRADRRQGRVNRAPPGGGGPAHPGC

SEQ ID NO: 828208 - protein, 153 aa, Homo sapiens
ARYEAGWLLNKNRITDLENLLDHLAEVTPALEYLSLLGNVACPNELVSLEKDEEDYKRYRCFVLYKLPNLKFLDAQKVTRQEREEALVRGVFMKVVKPKASSEDVASSPERHYTPLPSASRELTSHQGVLGKCRYVYYGKNSEGNRFIRDDQL

SEQ ID NO: 828209 - protein, 226 aa, Homo sapiens
MCFSFILFPLPPKPWSTCCCSHASCQQWHLLSVAIKNLNVNIFALKEWKSICHSAAIILQIKSLEGLSAFRSLEELILDNNQLGDDLVLPGLPRLHTLTLNKNRITDLENLLDHLAEVTPALEYLSLLGNVACPNELVSLANLKFLDAQKVTRQEREEALVRGVFMKVVKPKASSEDVASSPERHYTPLPSASRELTSHQGVLGKCRYVYYGKNSEGNRFIRDDQL

SEQ ID NO: 828210 - protein, 219 aa, Homo sapiens
LLLLNSPPSIKNLNVNIFALKEWKSICHSAAIILQIKSLEGLSAFRSLEELILDNNQLGDDLVLPGLPRLHTLTLNKNRITDLENLLDHLAEVTPALEYLSLLGNVACPNELVSLEKDEEDYKRYRCFVLYKLPNLKFLDAQKVTRQEREEALVRGVFMKVVKPKASSEDVASSPERHYTPLPSASRELTSHQGVLGKCRYVYYGKNSEGNRFIRDDQL

SEQ ID NO: 828211 - protein, 219 aa, Homo sapiens; identical to SEQ ID NO: 828210

SEQ ID NO: 828212 - protein, 219 aa, Homo sapiens; identical to SEQ ID NO: 828210

SEQ ID NO: 828213 - protein, 216 aa, Homo sapiens
LVVRGTQVSYIGQDCREIPEHLGRDCGHFAKRLDLSFNLLRSLEGLSAFRSLEELILDNNQLGDDLVLPGLPRLHTLTLNKNRITDLENLLDHLAEVTPALEYLSLLGNVACPNELVSLEKDEEDYKRYRCFVLYKLPNLKFLDAQKVTRQEREEALVRGVFMKVVKPKASSEDVASSPERHYTPLPSASRELTSHQDLNIPVLRIHSKLAVLCHC

SEQ ID NO: 828214 - protein, 250 aa, Homo sapiens
LVVRGTQVSYIGQDCREIPEHLGRDCGHFAKRLDLSFNLLRSLEGLSAFRSLEELILDNNQLGDDLVLPGLPRLHTLTLNKNRITDLENLLDHLAEVTPALEYLSLLGNVACPNELVSLEKDEEDYKRYRCFVLYKLPNLKFLDAQKVTRQEREEALVRGVFMKVVKPKASSEDVASSPERHYTPLPSASRELTSHQDEVSFLSPRLECSGAFSAHCNLRLPGSSDSPVSASQVAGNTGMCHHAQLILYF

SEQ ID NO: 828215 - protein, 264 aa, Homo sapiens
LVVRGTQGSYIGQDCREIPEHLGRDCGHFAKRLDLSFNLLRSLEGLSAFRSLEELILDNNQLGDDLVLPGLPRLHTLTLNKNRITDLENLLDHLAEVTPALEYLSLLGNVACPNELVSLEKDEEDYKRYRCFVLYKLPNLKFLDAQKVTRQEREEALVRGVFMKVVKPKASSEDVASSPERHYTPLPSASRELTSHQDEVSFLSPRLECSGAFSAHCNLRLPGSSDSPVSASQVAGNTGVLGKCRYVYYGKNSEGNRFIRDDQL

SEQ ID NO: 828216 - protein, 368 aa, Homo sapiens
MSLFGTTSGFGTSGTSMFGSATTDNHNPMKDIEVTSSPDDSIGCLSFSPPTLPGNFLIAGSWANDVRCWEVQDSGQTIPKAQQMHTGPVLDVCWSDDGSKVFTASCDKTAKMWDLSSNQAIQIAQHDAPVKTIHWIKAPNYSCVMTGSWDKTLKFWDTRSSNPMMVLQLPERCYCADVIYPMAVVATAERGLIVYQLENQPSEFRRIESPLKHQHRCVAIFKDKQNKPTGFALGSIEGRVAIHYINPPNPAKDNFTFKCHRSNGTNTSAPQDIYAVNGIAFHPVHGTLATVGSDGRFSFWDKDARTKLKTSEQLDQPISACCFNHNGNIFAYASSYDWSKGHEFYNPQKKNYIFLRNAAEELKPRNKK

SEQ ID NO: 828217 - protein, 250 aa, Homo sapiens
MSLFGTTSGFGTSGTSMFGSATTDNHNPMKDIEVTSSPDDSIGCLSFSPPTLPGNFLIAGSWANDVRCWEVQDSGQTIPKAQQMHTGPVLDVCWSDDGSKVFTASCDKTAKMWDLSSNQAIQIAQHDAPVKTIHWIKAPNYSCVMTGSWDKTLKFWDTRSSNPMMVLQLPERCYCADVIYPMAVVATAERGLIVYQLENQPSEFRRIESPLKHQHRCVAIFKDKQNKPTGFALGSIEGRVAIHYINPPNP

SEQ ID NO: 828218 - protein, 434 aa, Homo sapiens
MCCRLAGKGAFFFDDFRATQEVAPGRTRVVSAVVRAVSTAGLRRLRAPGISVRAPGPRPSRQSRFKMSLFGTTSGFGTSGTSMFGSATTDNHNPMKDIEVTSSPDDSIGCLSFSPPTLPGNFLIAGSWANDVRCWEVQDSGQTIPKAQQMHTGPVLDVCWSDDGSKVFTASCDKTAKMWDLSSNQAIQIAQHDAPVKTIHWIKAPNYSCVMTGSWDKTLKFWDTRSSNPMMVLQLPERCYCADVIYPMAVVATAERGLIVYQLENQPSEFRRIESPLKHQHRCVAIFKDKQNKPTGFALGSIEGRVAIHYINPPNPAKDNFTFKCHRSNGTNTSAPQDIYAVNGIAFHPVHGTLATVGSDGRFSFWDKDARTKLKTSEQLDQPISACCFNHNGNIFAYASSYDWSKGHEFYNPQKKNYIFLRNAAEELKPRNKK

SEQ ID NO: 828219 - protein, 368 aa, Homo sapiens; identical to SEQ ID NO: 828216

SEQ ID NO: 828220 - protein, 285 aa, Homo sapiens [sequence omitted]

SEQ ID NO: 828221 - protein, 291 aa, Homo sapiens
MSLFGTTSGFGTSGTSMFGSATTDNHNPMKDIEVTSSPDDSIGCLSFSPPTLPGNFLIAGSWANDVRCWEVQDSGQTIPKAQQMHTGPVLDVCWSDDGSKVFTASCDKTAKMWDLSSNQAIQIAQHDAPVKTIHWIKAPNYSCVMTGSWDKTLKFWDTRSSNPMMVLQLPERCYCADVIYPMAVVATAERGLIVYQLENQPSEFRRIESPLKHQHRCVAIFKDKQNKPTGFALGSIEGRVAIHYINPPNPAKDNFTFKCHRSNGTNTSAPQDIYAGHGFQPLEKTMSLFSS

SEQ ID NO: 828222 - protein, 175 aa, Homo sapiens
LSAKYEAGCYSAEGISTEYHQHRCVAIFKDKQNKPTGFALGSIEGRVAIHYINPPNPAKDNFTFKCHRSNGTNTSAPQDIYAVNGIAFHPVHGTLATVGSDGRFSFWDKDARTKLKTSEQLDQPISACCFNHNGNIFAYASSYDWSKGHEFYNPQKKNYIFLRNAAEELKPRNKK

SEQ ID NO: 828223 - protein, 119 aa, Homo sapiens
MCCRLAGKGAFFFDDFRATQEVAPGRTRVVSAVVRAVSTAGLRRLRAPGISVRAPGPRPSRQSRFANSSDPSAPGRRFPPGRDPQVQNEPVWNNLRFWNQWDQHVWQCNYRQSQSHEGY

SEQ ID NO: 828224 - protein, 368 aa, Homo sapiens; identical to SEQ ID NO: 828216

SEQ ID NO: 828225 - protein, 368 aa, Homo sapiens; identical to SEQ ID NO: 828216

SEQ ID NO: 828226 - protein, 383 aa, Homo sapiens
LLTKLRYWALEARFKMSLFGTTSGFGTSGTSMFGSATTDNHNPMKDIEVTSSPDDSIGCLSFSPPTLPGNFLIAGSWANDVRCWEVQDSGQTIPKAQQMHTGPVLDVCWSDDGSKVFTASCDKTAKMWDLSSNQAIQIAQHDAPVKTIHWIKAPNYSCVMTGSWDKTLKFWDTRSSNPMMVLQLPERCYCADVIYPMAVVATAERGLIVYQLENQPSEFRRIESPLKHQHRCVAIFKDKQNKPTGFALGSIEGRVAIHYINPPNPAKDNFTFKCHRSNGTNTSAPQDIYAVNGIAFHPVHGTLATVGSDGRFSFWDKDARTKLKTSEQLDQPISACCFNHNGNIFAYASSYDWSKGHEFYNPQKKNYIFLRNAAEELKPRNKK

SEQ ID NO: 828227 - protein, 363 aa, Homo sapiens
MSLFGTTSGFGTSGTSMFGSATTDNHNPMKDIEVTSSPDDSIGCLSFSPPTLPGNFLIAGSWANDVRCWEVQDSGQTIPKAQQMHTGPVLDVCWSDDGSKVFTASCDKTAKMWDLSSNQAIQIAQHDAPVKTIHWIKAPNYSCVMTGSWDKTLKFWDTRSSNPMMVLQLPERCYCADVIYPMAVVATAERGLIVYQLENQPSEFRRIESPLKHQHRCVAIFKDKQNKPTGFALGSIEGRVAIHYINPPNPAKDNFTFKCHRSNGTNTSAPQDIYAVNGIAFHPVHGTLATVGSDGRFSFWDKDARTKLKTSEQLDQPISACCFNQDMDFNPWRKRCHCSAAESPGVRGDLPSLHSTACCRVFL

SEQ ID NO: 828228 - protein, 344 aa, Homo sapiens
MCCRLAGKGAFFFDDFRATQEVAPGRTRVVSAVVRAVSTAGLRRLRAPGISVRAPGPRPSRQSRFKMSLFGTTSGFGTSGTSMFGSATTDNHNPMKDIEVTSSPDDSIGCLSFSPPTLPGNFLIAGSWANDVRCWEVQDSGQTIPKAQQMHTGPVLDVCWSDDGSKVFTASCDKTAKMWDLSSNQAIQIAQHDAPVKTIHWIKAPNYSCVMTGSWDKTLKFWDTRSSNPMMVLQLPERCYCADVIYPMAVVATAERGLIVYQLENQPSEFRRIESPLKHQHRCVAIFKDKQNKPTGFALGSIEGRVAIHYINPPNPAKDNFTFKCHRSNGTNTSAPQDIYAVRF

SEQ ID NO: 828229 - protein, 537 aa, Homo sapiens
AGAVWSAAEGACGPRQPNKGAGAPPQGPATHLPGPRSGLSSTATMTANGTAEAVQIQFGLINCGNKYLTAEAFGFKVNASASSLKKKQIWTLEQPPDEAGSAAVCLRSHLGRYLAADKDGNVTCEREVPGPDCRFLIVAHDDGRWSLQSEAHRRYFGGTEDRLSCFAQTVSPAEKWSVHIAMHPQVNIYSVTRKRYAHLSARPADEIAVDRDVPWGVDSLITLAFQDQRYSVQTADHRFLRHDGRLVARPEPATGYTLEFRSGKVAFRDCEGRYLAPSGPSGTLKAGKATKVGKDELFALEQSCAQVVLQAANERNVSTRQGMDLSANQDEETDQETFQLEIDRDTKKCAFRTHTGKYWTLTATGGVQSTASSKNASCYFDIEWRDRRITLRASNGKFVTSKKNGQLAASVETAGDSELFLMKLINRPIIVFRGEHGFIGCRKVTGTLDANRSSYDVFQLEFNDGAYNIKDSTGKYWTVGSDSAVTSSGDTPVDFFFEFCDYNKVAIKVGGRYLKGDHAGVLKASAETVDPASLWEY

SEQ ID NO: 828230 - protein, 537 aa, Homo sapiens; identical to SEQ ID NO: 828229

SEQ ID NO: 828231 - protein, 111 aa, Homo sapiens
MSGPGVPDTHARPSEVAQPRTPWPPGLSAGSEGPPWTGPEPNAEDSTGKYWTVGSDSAVTSSGDTPVDFFFEFCDYNKVAIKVGGRYLKGDHAGVLKASAETVDPASLWEY

SEQ ID NO: 828232 - protein, 263 aa, Homo sapiens
MTANGTAEAVQIQFGLINCGNKYLTAEAFGFKVNASASSLKKKQIWTLEQPPDEAGSAAVCLRSHLGRYLAADKDGNVTCEREVPGPDCRFLIVAHDDGRWSLQSEAHRRYFGGTEDRLSCFAQTVSPAEKWSVHIAMHPQVNIYSVTRKRYAHLSARPADEIAVDRDVPWGVDSLITLAFQDQRYSVQTADHRFLRHDGRLVARPEPATGYTLEFRSGKVAFRDCEGVLGVGPGPPGGGPGEALLVAVPFVGAGLPRCVTRR

SEQ ID NO: 828233 - protein, 493 aa, Homo sapiens
MTANGTAEAVQIQFGLINCGNKYLTAEAFGFKVNASASSLKKKQIWTLEQPPDEAGSAAVCLRSHLGRYLAADKDGNVTCEREVPGPDCRFLIVAHDDGRWSLQSEAHRRYFGGTEDRLSCFAQTVSPAEKWSVHIAMHPQVNIYSVTRKRYAHLSARPADEIAVDRDVPWGVDSLITLAFQDQRYSVQTADHRFLRHDGRLVARPEPATGYTLEFRSGKVAFRDCEGRYLAPSGPSGTLKAGKATKVGKDELFALEQSCAQVVLQAANERNVSTRQGMDLSANQDEETDQETFQLEIDRDTKKCAFRTHTGKYWTLTATGGVQSTASSKNASCYFDIEWRDRRITLRASNGKFVTSKKNGQLAASVETAGDSELFLMKLINRPIIVFRGEHGFIGCRKVTGTLDANRSSYDVFQLEFNDGAYNIKDSTGKYWTVGSDSAVTSSGDTPVDFFFEFCDYNKVAIKVGGRYLKGDHAGVLKASAETVDPASLWEY

SEQ ID NO: 828234 - protein, 537 aa, Homo sapiens; identical to SEQ ID NO: 828229

SEQ ID NO: 828235 - protein, 537 aa, Homo sapiens; identical to SEQ ID NO: 828229

SEQ ID NO: 828236 - protein, 531 aa, Homo sapiens
AWGGALSNALRPGVTGAAAATATRGAGTTRSGLSSTATMTANGTAEAVQIQFGLINCGNKYLTAEAFGFKVNASASSLKKKQIWTLEQPPDEAGSAAVCLRSHLGRYLAADKDGNVTCEREVPGPDCRFLIVAHDDGRWSLQSEAHRRYFGGTEDRLSCFAQTVSPAEKWSVHIAMHPQVNIYSVTRKRYAHLSARPADEIAVDRDVPWGVDSLITLAFQDQRYSVQTADHRFLRHDGRLVARPEPATGYTLEFRSGKVAFRDCEGRYLAPSGPSGTLKAGKATKVGKDELFALEQSCAQVVLQAANERNVSTRQGMDLSANQDEETDQETFQLEIDRDTKKCAFRTHTGKYWTLTATGGVQSTASSKNASCYFDIEWRDRRITLRASNGKFVTSKKNGQLAASVETAGDSELFLMKLINRPIIVFRGEHGFIGCRKVTGTLDANRSSYDVFQLEFNDGAYNIKDSTGKYWTVGSDSAVTSSGDTPVDFFFEFCDYNKVAIKVGGRYLKGDHAGVLKASAETVDPASLWEY

SEQ ID NO: 828237 - protein, 537 aa, Homo sapiens; identical to SEQ ID NO: 828229

SEQ ID NO: 828238 - protein, 537 aa, Homo sapiens; identical to SEQ ID NO: 828229

SEQ ID NO: 828239 - protein, 537 aa, Homo sapiens; identical to SEQ ID NO: 828229

SEQ ID NO: 828240 - protein, 537 aa, Homo sapiens; identical to SEQ ID NO: 828229

SEQ ID NO: 828241 - protein, 473 aa, Homo sapiens
AGAVWSAAEGACGPRQPNKGAGAPPQGPATHLPGPRSGLSSTATMTANGTAEAVQIQFGLINCGNKYLTAEAFGFKVNASASSLKKKQIWTLEQPPDEAGSAAVCLRSHLGRYLAADKDGNVTCEREVPGPDCRFLIVAHDDGRWSLQSEAHRRYFGGTEDRLSCFAQTVSPAEKWSVHIAMHPQVNIYSVTRKRYAHLSARPADEIAVDRDVPWGVDSLITLAFQDQRYSVQTADHRFLRHDGRLVARPEPATGYTLEFRSGKVAFRDCEGRYLAPSGPSGTLKAGKATKVGKDELFALEQSCAQVVLQAANERNVSTRQGMDLSANQDEETDQETFQLEIDRDTKKCAFRTHTGKYWTLTATGGVQSTASSKNASCYFDIEWRDRRITLRASNGKFVTSKKNGQLAASVETAGDSELFLMKLINRPIIVFRGEHGFIGCRKVTGTLDANRSSYDVFLLSLSFHPSLTGSRK

SEQ ID NO: 828242 - protein, 537 aa, Homo sapiens; identical to SEQ ID NO: 828229

SEQ ID NO: 828243 - protein, 537 aa, Homo sapiens; identical to SEQ ID NO: 828229

SEQ ID NO: 828244 - protein, 537 aa, Homo sapiens; identical to SEQ ID NO: 828229

SEQ ID NO: 828245 - protein, 537 aa, Homo sapiens; identical to SEQ ID NO: 828229

SEQ ID NO: 828246 - protein, 419 aa, Homo sapiens
SVPTKARYEAGWLIGRGLIVAHDDGRWSLQSEAHRRYFGGTEDRLSCFAQTVSPAEKWSVHIAMHPQVNIYSVTRKRYAHLSARPADEIAVDRDVPWGVDSLITLAFQDQRYSVQTADHRFLRHDGRLVARPEPATGYTLEFRSGKVAFRDCEGRYLAPSGPSGTLKAGKATKVGKDELFALEQSCAQVVLQAANERNVSTRQGMDLSANQDEETDQETFQLEIDRDTKKCAFRTHTGKYWTLTATGGVQSTASSKNASCYFDIEWRDRRITLRASNGKFVTSKKNGQLAASVETAGDSELFLMKLINRPIIVFRGEHGFIGCRKVTGTLDANRSSYDVFQLEFNDGAYNIKDSTGKYWTVGSDSAVTSSGDTPVDFFFEFCDYNKVAIKVGGRYLKGDHAGVLKASAETVDPASLWEY

SEQ ID NO: 828247 - protein, 556 aa, Homo sapiens
AGAVWSAAEGACGPRQPNKGAGAPPQGPATHLPGPRSGLSSTATMTANGTAEAVQIQFGLINCGNKYLTAEAFGFKVNASASSLKKKQIWTLEQPPDEAGSAAVCLRSHLGRYLAADKDGNVTCELLSVALVPDLPSFAPILVVPATGPGTVVCIVVLRCDGPDVLTPVLASFCAVHLMDRLSCFAQTVSPAEKWSVHIAMHPQVNIYSVTRKRYAHLSARPADEIAVDRDVPWGVDSLITLAFQDQRYSVQTADHRFLRHDGRLVARPEPATGYTLEFRSGKVAFRDCEGRYLAPSGPSGTLKAGKATKVGKDELFALEQSCAQVVLQAANERNVSTRQGMDLSANQDEETDQETFQLEIDRDTKKCAFRTHTGKYWTLTATGGVQSTASSKNASCYFDIEWRDRRITLRASNGKFVTSKKNGQLAASVETAGDSELFLMKLINRPIIVFRGEHGFIGCRKVTGTLDANRSSYDVFQLEFNDGAYNIKDSTGKYWTVGSDSAVTSSGDTPVDFFFEFCDYNKVAIKVGGRYLKGDHAGVLKASAETVDPASLWEY

SEQ ID NO: 828248 - protein, 478 aa, Homo sapiens
AGAVWSAAEGACGPRQPNKGAGAPPQGPATHLPGPRSGLSSTATMTANGTAEAVQIQFGLINCGNKYLTAEAFGFKVNASASSLKKKQIWTLEQPPDEAGSAAVCLRSHLGRYLAADKDGNVTCEREVPGPDCRFLIVAHDDGRWSLQSEAHRRYFGGTEDRLSCFAQTVSPAEKWSVHIAMHPQVNIYSVTRKRYAHLSARPADEIAVDRDVPWGVDSLITLAFQDQRYSVQTADHRFLRHDGRLVARPEPATGYTLEFRSGKVAFRDCEGRYLAPSGPSGTLKAGKATKVGKDELFALEQSCAQVVLQAANERNVSTRQGMDLSANQDEETDQETFQLEIDRDTKKCAFRTHTGKYWTLTATGGVQSTASSKNASCYFDIEWRDRRITLRASNGKFVTSKKNGQLAASVETAGDSELFLMKLINRPIIVFRGEHGFIGCRKVTGTLDANRSSYDVFQLEFNDGAYNIKAPPPGALG

SEQ ID NO: 828249 - protein, 457 aa, Homo sapiens
AGAVWSAAEGACGPRQPNKGAGAPPQGPATHLPGPRSGLSSTATMTANGTAEAVQIQFGLINCGNKYLTAEAFGFKVNASASSLKKKQIWTLEQPPDEAGSAAVCLRSHLGRYLAADKDGNVTCEREVPGPDCRFLIVAHDDGRWSLQSEAHRRYFGGTEDRLSCFAQTVSPAEKWSVHIAMHPQVNIYSVTRKRYAHLSARPADEIAVDRDVPWGVDSLITLAFQDQRYSVQTADHRFLRHDGRLVARPEPATGYTLEFRSGKVAFRDCEGRYLAPSGPSGTLKAGKATKVGKDELFALEQSCAQVVLQAANERNVSTRQGMDLSANQDEETDQETFQLEIDRDTKKCAFRTHTGKYWTLTATGGVQSTASSKNASCYFDIEWRDRRITLRASNGKFVTSKKNGQLAASVETAGGLKKLLPLQVERLPFKTRAPNSIRCYQPGEASGSIGAARKGS

SEQ ID NO: 828250 - protein, 381 aa, Homo sapiens
AGAVWSAAEGACGPRQPNKGAGAPPQGPATHLPGPRSGLSSTATMTANGTAEAVQIQFGLINCGNKYLTAEAFGFKVNASASSLKKKQIWTLEQPPDEAGSAAVCLRSHLGRYLAADKDGNVTCEREVPGPDCRFLIVAHDDGRWSLQSEAHRRYFGGTEDRLSCFAQTVSPAEKWSVHIAMHPQVNIYSVTRKRYAHLSARPADEIAVDRDVPWGVDSLITLAFQDQRYSVQTADHRFLRHDGRLVARPEPATGYTLEFRSGKVAFRDCEGRYLAPSGPSGTLKAGKATKVGKDELFALEQSCAQVVLQAANERNVSTRQGMDLSANQDEETDQETFQLEIDRDTKKCAFRTHTGKYWTLTATARGGNHAQKAPHCIWGR

SEQ ID NO: 828251 - protein, 98 aa, Homo sapiens
SVPTKARYEAGWLIGRGVFQLEFNDGAYNIKDSTGKYWTVGSDSAVTSSGDTPVDFFFEFCDYNKVAIKVGGRYLKGDHAGVLKASAETVDPASLWEY

SEQ ID NO: 828252 - protein, 162 aa, Homo sapiens
WLELLTSSDPPTSASQSAGITGVSHCGRAEHVLGPLFMCPSWTGGRAGHRDPGSFRSRDWRVGRHPWEHPCPPSAAQGRGGEPGFGPPLDKVPSPDSTGKYWTVGSDSAVTSSGDTPVDFFFEFCDYNKVAIKVGGRYLKGDHAGVLKASAETVDPASLWEY

SEQ ID NO: 828253 - protein, 432 aa, Homo sapiens
MAAPMEVAVCTDSAAPMWSCIVWELHSGANLLTYRGGQAGPRGLALLNGEYLLAAQLGKNYISAWELQRKDQLQQKIMCPGPVTCLTASPNGLYVLAGVAESIHLWEVSTGNLLVILSRHYQDVSCLQFTGDSSHFISGGKDCLVLVWSLCSVLQADPSRIPAPRHVWSHHTLPITDLHCGFGGPLARVATSSLDQTVKLWEVSSGELLLSVLFDVSIMAVTMDLAEHHMFCGGSEGSIFQVDLFTWPGQRERSFHPEQDAGKVFKGHRNQVTCLSVSTDGSVLLSGSHDETVRLWDVQSKQCIRTVALKGPVTNAAILLAPVSMLSSDFRPSLPLPHFNKHLLGAEHGDEPRHGGLTLRLGLHQQGSEPSYLDRTEQLQAVLCSTMEKSVLGGQDQLRVRVTELEDEVRNLRKINRDLFDFSTRFITRPAK

SEQ ID NO: 828254 - protein, 409 aa, Homo sapiens [sequence omitted]

SEQ ID NO: 828255 - protein, 441 aa, Homo sapiens
TSARYEAGFDIGRGEVAVCTDSAAPMWSCIVWELHSGANLLTYRGGQAGPRGLALLNGEYLLAAQLGKNYISAWELQRKDQLQQKIMCPGPVTCLTASPNGLYVLAGVAESIHLWEVSTGNLLVILSRHYQDVSCLQFTGDSSHFISGGKDCLVLVWSLCSVLQADPSRIPAPRHVWSHHTLPITDLHCGFGGPLARVATSSLDQTVKLWEVSSGELLLSVLFDVSIMAVTMDLAEHHMFCGGSEGSIFQVDLFTWPGQRERSFHPEQDAGKVFKGHRNQVTCLSVSTDGSVLLSGSHDETVRLWDVQSKQCIRTVALKGPVTNAAILLAPVSMLSSDFRPSLPLPHFNKHLLGAEHGDEPRHGGLTLRLGLHQQGSEPSYLDRTEQLQAVLCSTMEKSVLGGQDQLRVRVTELEDEVRNLRKINRDLFDFSTRFITRPAK

SEQ ID NO: 828256 - protein, 441 aa, Homo sapiens
KQAVRRIRSSHASLEVAVCTDSAAPMWSCIVWELHSGANLLTYRGGQAGPRGLALLNGEYLLAAQLGKNYISAWELQRKDQLQQKIMCPGPVTCLTASPNGLYVLAGVAESIHLWEVSTGNLLVILSRHYQDVSCLQFTGDSSHFISGGKDCLVLVWSLCSVLQADPSRIPAPRHVWSHHTLPITDLHCGFGGPLARVATSSLDQTVKLWEVSSGELLLSVLFDVSIMAVTMDLAEHHMFCGGSEGSIFQVDLFTWPGQRERSFHPEQDAGKVFKGHRNQVTCLSVSTDGSVLLSGSHDETVRLWDVQSKQCIRTVALKGPVTNAAILLAPVSMLSSDFRPSLPLPHFNKHLLGAEHGDEPRHGGLTLRLGLHQQGSEPSYLDRTEQLQAVLCSTMEKSVLGGQDQLRVRVTELEDEVRNLRKINRDLFDFSTRFITRPAK

SEQ ID NO: 828257 - protein, 355 aa, Homo sapiens [sequence omitted]

SEQ ID NO: 828258 - protein, 594 aa, Homo sapiens
MAAPMEVAVCTDSAAPMWSCIVWELHSGANLLTYRGGQAGPRGLALLNGEYLLAAQLGKNYISAWELQRKDQLQQKIMCPGPVTCLTASPNGLYVLAGVAESIHLWEVSTGNLLVILSRHYQDVSCLQFTGDSSHFISGGKDCLVLVWSLCSVLQADPSRIPAPRHVWSHHTLPITDLHCGFGGPLARVATSSLDQTVKVRRPHPTTVHERSPAAAGPQPGMQESPPPAPCCQDSRRLLIPWCSEPKDVQGGLPAWKFLLIHRFWPGSLAKPGESEVITMLECDRWSWEGEPGVISRRPSSISAQAMSPGPQDPHGDGFHPKSQALGPEDSRRLTSLVPLFPWGPRVPPAGPSPTPFAHPQLWEVSSGELLLSVLFDVSIMAVTMDLAEHHMFCGGSEGSIFQVDLFTWPGQRERSFHPEQDAGKVFKGHRNQVTCLSVSTDGSVLLSGSHDETVRLWDVQSKQCIRTVALKGPVTNAAILLAPVSMLSSDFRPSLPLPHFNKHLLGAEHGDEPRHGGLTLRLGLHQQGSEPSYLDRTEQLQAVLCSTMEKSVLGGQDQLRVRVTELEDEVRNLRKINRDLFDFSTRFITRPAK

SEQ ID NO: 828259 - protein, 403 aa, Homo sapiens
KQAVRRIRSSHASLEVAVCTDSAAPMWSCIVWELHSGANLLTYRGGQAGEPPAGPWAACSNGEVLCAGRLSWLRDSENVPADCCVHGLYVCDASITVESRNLSSVYRVLPSVHRGQRTSSQGARTAGALEPLQRAAADPSDSGQAVGSPAPPDLPGLGAPAGGTPPEQRELWEVSSGELLLSVLFDVSIMAVTMDLAEHHMFCGGSEGSIFQVDLFTWPGQRERSFHPEQDAGKVFKGHRNQVTCLSVSTDGSVLLSGSHDETVRLWDVQSKQCIRTVALKGPVTNAAILLAPVSMLSSDFRPSLPLPHFNKHLLGAEHGDEPRHGGLTLRLGLHQQGSEPSYLDRTEQLQAVLCSTMEKSVLGGQDQLRVRVTELEDEVRNLRKINRDLFDFSTRFITRPAK

SEQ ID NO: 828260 - protein, 436 aa, Homo sapiens
MTHVRGGGGRQDGGAHGGGRVYGLGGPDVELHRVGTSLGRQPAHLPRRPGGTPRPGAAQWRVSAGGAAGQELHQRLGAPAEGPAPAEDHVPRACHLSDCITQWSLRPGRSCRKHPPVGGLHREPSGHPESTLPGRLLPSVHRGQQPLHLRGQGLPGAGLEPLQRAAGRPLQDSGAQARLVSPHAPHHGPALRLWGPPGPGGHLLTGPDGEVRAPSSRSTSSPGLSAAVCGLHPALGLRARACGSHTSRPSQPGQRERSFHPEQDAGKVFKGHRNQVTCLSVSTDGSVLLSGSHDETVRLWDVQSKQCIRTVALKGPVTNAAILLAPVSMLSSDFRPSLPLPHFNKHLLGAEHGDEPRHGGLTLRLGLHQQGSEPSYLDRTEQLQAVLCSTMEKSVLGGQDQLRVRVTELEDEVRNLRKINRDLFDFSTRFITRPAK

SEQ ID NO: 828261 - protein, 109 aa, Homo sapiens
  misc_feature (5)..(5): Xaa can be any naturally occurring amino acid
  misc_feature (8)..(9): Xaa can be any naturally occurring amino acid
  misc_feature (11)..(11): Xaa can be any naturally occurring amino acid
  misc_feature (15)..(17): Xaa can be any naturally occurring amino acid
  misc_feature (24)..(24): Xaa can be any naturally occurring amino acid
  misc_feature (26)..(27): Xaa can be any naturally occurring amino acid
  misc_feature (30)..(30): Xaa can be any naturally occurring amino acid
  misc_feature (33)..(38): Xaa can be any naturally occurring amino acid
  misc_feature (40)..(41): Xaa can be any naturally occurring amino acid
  misc_feature (43)..(43): Xaa can be any naturally occurring amino acid
  misc_feature (45)..(45): Xaa can be any naturally occurring amino acid
  misc_feature (47)..(50): Xaa can be any naturally occurring amino acid
  misc_feature (54)..(55): Xaa can be any naturally occurring amino acid
  misc_feature (59)..(59): Xaa can be any naturally occurring amino acid
  misc_feature (61)..(62): Xaa can be any naturally occurring amino acid
ILCSXFIXXFXFPHXXXHLLCSVXGXXPRXGFXXXXXXFXXQXSXPXXXXRTLXXHAFXFXXIYEVSVLGGQDQLRVRVTELEDEVRNLRKINRDLFDFSTRFITRPAK

SEQ ID NO: 828262 - protein, 152 aa, Homo sapiens
MAAPMEVAVCTDSAAPMWSCIVWELHSGANLLTYRGGQAGPRGLALLNGEYLLAAQLGKNYISAWELQRKDQLQQKIMCPGPVTCLTASPNGLYVLAGVAESIHLWEVSTGNLLVILSRHYQDVSCLQFTGDSSHFISGGKDCLVLVWSLCR

SEQ ID NO: 828263 - protein, 179 aa, Homo sapiens [sequence omitted]

SEQ ID NO: 828264 - protein, 298 aa, Homo sapiens
THIWLMCLMAWVVLPTTKLGSEESCKLRRLRFTYGTQTRVSLALPGQYELVHTLVAHQGNWETIPEEDLEVQENNEDAAHVLAELEVTMHHALLQEVDVVVAPCQGLRPTVDVLGDLVNDFLPVITYALHKDELSERDEQELQEIRKYFSFPVFFFKVPKLGSEIIDSSTRRMESERSPLYRQLIDLGYLSSSHWNCGAPGQDTKAQSMLVEQSEKLRHLSTFSHQVLQTRLVDAAKALNLVHCHCLDIFINQAFDMQRDLQITPKRLEYTRKKENELYESYDEYCRKQEEMKDMIVE

SEQ ID NO: 828265 - protein, 80 aa, Homo sapiens
  misc_feature (6)..(6): Xaa can be any naturally occurring amino acid
LVRSPXCRNSARAFSYGGGMNRACLMLKWVRREWPETLVFQTLLEVSSSTTVPKRVSFLTSSVLLTSSPIEVISEVHQDI

SEQ ID NO: 828266 - protein, 196 aa, Homo sapiens
PWGSEPVSGPGPGGGGMIRELCRGFGRYRRYLGRLRQNLRETQKFFRDIKCSHNHTCLSSLTGGGGAERGPAGDVAETGLQAGQLSCISFPPKEEKYLQQIVDCLPCILILGQDCNVKCQLLNLLLGVQVLPTTKLGSEESCKLRRLRFTYGTQTRVSLALPGQYELVHTLVAHQGNWETIPEAGESLEPGRQRSW

SEQ ID NO: 828267 - protein, 443 aa, Homo sapiens
LRESFVGTLERCLQSLEKSQDVSVHITSNYLKQILNAAYHVEVTFHSGSSVTRMLWEQIKQIIQRITWVSPPAITLEWKRKVAQEAIESLSASKLAKSICSQFRTRLNSSHEAFAASLRQLEAGHSGRLEKTEDLWLRVRKDHAPRLARLSLESRSLQDVLLHRKPKLGQELGRGQYGVVYLCDNWGGHFPCALKSVVPPDEKHWNDLALEFHYMRSLPKHERLVDLHGSVIDYNYGGGSSIAVLLIMERLHRDLYTGLKAGLTLETRLQIALDVVEGIRFLHSQGLVHRDIKLKNVLLDKQNRAKITDLGFCKPEAMMSGSIVGTPIHMAPELFTGKYDNSVDVYAFGILFWYICSGSVKLPEAFERCASKDHLWNNVRRGARPERLPVFDEECWQLMEACWDGDPLKRPLLGIVQPMLQGIMNRLCKSNSEQPNRGLDDST

SEQ ID NO: 828268 - protein, 181 aa, Homo sapiens
PQSDRLTGIALDVVEGIRFLHSQGLVHRDIKLKNVLLDKQNRAKITDLGFCKPEAMMSGSIVGTPIHMAPELFTGKYDNSVDVYAFGILFWYICSGSVKLPEAFERCASKDHLWNNVRRGARPERLPVFDEECWQLMEACWDGDPLKRPLLGIVQPMLQGIMNRLCKSNSEQPNRGLDDST

SEQ ID NO: 828269 - protein, 398 aa, Homo sapiens
LRESFVGTLERCLQSLEKSQDVSVHITSNYLKQILNAAYHVEVTFHSGSSVTRMLWEQIKQIIQRITWVSPPAITLEWKRKVAQEAIESLSASKLAKSICSQFRTRLNSSHEAFAASLRQLEAGHSGRLEKTEDLWLRVRKDHAPRLARLSLESRSLQDVLLHRKPKLGQELGRGQYGVVYLCDNWGGHFPCALKSVVPPDEKHWNDLALEFHYMRSLPKHERLVDLHGSVIDYNYGGGSSIAVLLIMERLHRDLYTGLKAGLTLETRLQIALDVVEGIRFLHSQGLVHRDIKLKNVLLDKQNRAKITDLGFCKPEAMMSGSIVGTPIHMAPELFTGARPERLPVFDEECWQLMEACWDGDPLKRPLLGIVQPMLQGIMNRLCKSNSEQPNRGLDDST

SEQ ID NO: 828270 - protein, 74 aa, Homo sapiens
FDGVLPPQVQVSQTDLYLNGETLCLPVASAPVREDLPHCTGIICDLQEQEVEGSSCLCLHPEHRRASTVFWLHK

SEQ ID NO: 828271 - protein, 415 aa, Homo sapiens
PWGSEPVSGPGPGGGGMIRELCRGFGRYRRYLGRLRQNLRETQKFFRDIKCSHNHTCLSSLTGGGGAERGPAGDVAETGLQAGQLSCISFPPKEEKYLQQIVDCLPCILILGQDCNVKCQLLNLLLGVQVLPTTKLGSEESCKLRRLRFTYGTQTRVSLALPGQYELVHTLVAHQGNWETIPEEDLEVQENNEDAAHVLAELEVTMHHALLQEVDVVVAPCQGLRPTVDVLGDLVNDFLPVITYALHKDELSERDEQELQEIRKYFSFPVFFFKVPKLGSEIIDSSTRRMESERSPLYRQLIDLGYLSSSHWNCGAPGQDTKAQSMLVEQSEKLRHLSTFSHQVLQTRLVDAAKALNLVHCHCLDIFINQAFDMQRDLQITPKRLEYTRKKENELYESYDEYCRKQEEMKDMIVE

SEQ ID NO: 828272 - protein, 398 aa, Homo sapiens; identical to SEQ ID NO: 828269

SEQ ID NO: 828273 - protein, 276 aa, Homo sapiens
LRESFVGTLERCLQSLEKSQDVSVHITSNYLKQILNAAYHVEVTFHSGSSVTRMLWEQIKQIIQRITWVSPPAITLEWKRKVAQEAIESLSASKLAKSICSQFRTRLNSSHEAFAASLRQLEAGHSGRLEKTEDLWLRVRKDHAPRLARLSLESRSLQDVLLHRKPKLGQELGRGQYGVVYLCDNWGGHFPCALKSVVPPDEKHWNDLALEFHYMRSLPKHERLVDLHGSVIDYNYGGGSSIAVLLIMERLHRDLYTGLKAGLTLEVDAAANLVVV

SEQ ID NO: 828274 - protein, 577 aa, Homo sapiens
  misc_feature (10)..(10): Xaa can be any naturally occurring amino acid
  misc_feature (12)..(12): Xaa can be any naturally occurring amino acid
  misc_feature (34)..(34): Xaa can be any naturally occurring amino acid
  misc_feature (39)..(39): Xaa can be any naturally occurring amino acid
AAAAAAARRXRXRPRPRGASRPHPGGVAAAVAAXSAARXAPEFRSLPPAGVRGPAGPARAGHAFGAAQPGRPGAAPRARAPRGPRPRPPLSPGGPAAAEAMFPVFPCTLLAPPFPVLGLDSRGVGGLMNSFPPPQGHAQNPLQVGAELQSRFFASQGCAQSPFQAAPAPPPTPQAPAAEPLQVDLLPVLAAAQESAAAAAAAAAAAAAVAAAPPAPAAASTVDTAALKQPPAPPPPPPPVSAPAAEAAPPASAATIAAAAATAVVAPTSTVAVAPVASALEKKTKSKGPYICALCAKEFKNGYNLRRHEAIHTGAKAGRVPSGAMKMPTMVPLSLLSVPQLSGAGGGGGEAGAGGGAAAVAAGGVVTTTASGKRIRKNHACEMCGKAFRDVYHLNRHKLSHSDEKPYQCPVCQQRFKRKDRMSYHVRSHDGAVHKPYNCSHCGKSFSRPDHLNSHVRQVHSTERPFKCEKCEAAFATKDRLRAHTVRHEEKVPCHVCGKMLSSAYISDHMKVHSQGPHHVCELCNKGTGEVCPMAAAAAAAAAAAAAAVAAPPTAVGSLSGAEGVPVSSQPLPSQPW

SEQ ID NO: 828275 - protein, 593 aa, Homo sapiens
  misc_feature (10)..(10): Xaa can be any naturally occurring amino acid
  misc_feature (12)..(12): Xaa can be any naturally occurring amino acid
  misc_feature (34)..(34): Xaa can be any naturally occurring amino acid
  misc_feature (39)..(39): Xaa can be any naturally occurring amino acid
AAAAAAARRXRXRPRPRGASRPHPGGVAAAVAAXSAARXAPEFRSLPPAGVRGPAGPARAGHAFGAAQPGRPGAAPRARAPRGPRPRPPLSPGGPAAAEAMFPVFPCTLLAPPFPVLGLDSRGVGGLMNSFPPPQGHAQNPLQVGAELQSRFFASQGCAQSPFQAAPAPPPTPQAPAAEPLQVDLLPVLAAAQESAAAAAAAAAAAAAVAAAPPAPAAASTVDTAALKQPPAPPPPPPPVSAPAAEAAPPASAATIAAAAATAVVAPTSTVAVAPVASALEKKTKSKGPYICALCAKEFKNGYNLRRHEAIHTGAKAGRVPSGAMKMPTMVPLSLLSVPQLSGAGGGGGEAGAGGGAAAVAAGGVVTTTASGKRIRKNHACEMCGKAFRDVYHLNRHKLSHSDEKPYQCPVCQQRFKRKDRMSYHVRSHDGAVHKPYNCSHCGKSFSRPDHLNSHVRQVHSTERPFKCEKCEAAFATKDRLRAHTVRHEEKVPCHVCGKMLSSAYISDHMKVHSQGPHHVCELCNKGFTTAAYLRIHAVKDHGLQAPRADRILCKLCSVHCKTPAQLAGHMQTHLGGAGPPVPGDAPQPQPTC

SEQ ID NO: 828276 - protein, 581 aa, Homo sapiens
IPGVPALRGPKRPPFLPPPAGVAGAGRRGPCDLGAAQPGRRRPAPAGAWGPAAAEAMFPVFPCTLLAPPFPVLGLDSRGVGGLMNSFPPPQGHAQNPLQVGAELQSRFFASQGCAQSPFQAAPAPPPTPQAPAAEPLQVDLLPVLAAAQESAAAAAAAAAAAAAVAAAPPAPAAASTVDTAALKQPPAPPPPPPPVSAPAAEAAPPASAATIAAAAATAVVAPTSTVAVAPVASALEKKTKSKGPYICALCAKEFKNGYNLRRHEAIHTGAKAGRVPSGAMKMPTMVPLSLLSVPQLSGAGGGGGEAGAGGGAAAVAAGGVVTTTASGKRIRKNHACEMCGKAFRDVYHLNRHKLSHSDEKPYQCPVCQQRFKRKDRMSYHVRSHDGAVHKPYNCSHCGKSFSRPDHLNSHVRQVHSTERPFKCEKCEAAFATKDRLRAHTVRHEEKVPCHVCGKMLSSAYISDHMKVHSQGPHHVCELCNKGTCRGLPGGGGSGSSGSSSSPSHSCGLPLGGGGGACELSATSLPTLVSSKLVAGERGEWSRVPWYKLLSPLFSHQLLFPYQPRSLQKERRKKCFLRGIR

SEQ ID NO: 828277 - protein, 514 aa, Homo sapiens
  misc_feature (10)..(10): Xaa can be any naturally occurring amino acid
  misc_feature (12)..(12): Xaa can be any naturally occurring amino acid
  misc_feature (34)..(34): Xaa can be any naturally occurring amino acid
  misc_feature (39)..(39): Xaa can be any naturally occurring amino acid
AAAAAAARRXRXRPRPRGASRPHPGGVAAAVAAXSAARXAPEFRSLPPAGVRGPAGPARAGHAFGAAQPGRPGAAPRARAPRGPRPRPPLSPGGPAAAEAMFPVFPCTLLAPPFPVLGLDSRGVGGLMNSFPPPQGHAQNPLQVGAELQSRFFASQGCAQSPFQAAPAPPPTPQAPAAEPLQVDLLPVLAAAQESAAAAAAAAAAAAAVAAAPPAPAAASTVDTAALKQPPAPPPPPPPVSAPAAEAAPPASAATIAAAAATAVVAPTSTVAVAPVASALEKKTKSKGPYICALCAKEFKNGYNLRRHEAIHTGAKAGRVPSGAMKMPTMVPLSLLSVPQLSGAGGGGGEAGAGGGAAAVAAGGVVTTTASGKRIRKNHACEMCGKAFRDVYHLNRHKLSHSDEKPYQCPVCQQRFKRKDRMSYHVRSHDGAVHKPYNCSHCGKSFSRCARGLGRPLGRGEGGTRRRWPGRGWRGGRRLLRLGKGSHSQGGGRKPLPVTREQGVVLCRGGGPWG

SEQ ID NO: 828278 - protein, 514 aa, Homo sapiens; identical to SEQ ID NO: 828277
  misc_feature (10)..(10): Xaa can be any naturally occurring amino acid
  misc_feature (12)..(12): Xaa can be any naturally occurring amino acid
  misc_feature (34)..(34): Xaa can be any naturally occurring amino acid
  misc_feature (39)..(39): Xaa can be any naturally occurring amino acid

SEQ ID NO: 828279 - protein, 185 aa, Homo sapiens
  misc_feature (10)..(10): Xaa can be any naturally occurring amino acid
  misc_feature (12)..(12): Xaa can be any naturally occurring amino acid
  misc_feature (34)..(34): Xaa can be any naturally occurring amino acid
  misc_feature (39)..(39): Xaa can be any naturally occurring amino acid
AAAAAAARRXRXRPRPRGASRPHPGGVAAAVAAXSAARXAPDFRLPPAGRGARAGGAGPGRANAFGAAQPGRPGAAPRARAPRGPRPRPPLSPGGPAAAEAMFPVFPCTLLAPPFPVLGLDSRGVGGLMNSFPPPQGHAQNPLQVGAELQSRFFASQGCAQSPFQAGSPQQSRQTSALNRTALQM

SEQ ID NO: 828280 - protein, 553 aa, Homo sapiens
  misc_feature (35)..(35): Xaa can be any naturally occurring amino acid
PPPPPPPPGATAPGPGPAGPPAPTQGASPPPSPRXPRPARRPNSGSLPPAGVRGPAGPARAGHAFGAAQPGRPGAAPRARAPRGPRPRPPLSPGGPAAAEAMFPVFPCTLLAPPFPVLGLDSRGVGGLMNSFPPPQGHAQNPLQVGAELQSRFFASQGCAQSPFQAAPAPPPTPQAPAAEPLQVDLLPVLAAAQESAAAAAAAAAAAAAVAAAPPAPAAASTVDTAALKQPPAPPPPPPPVSAPAAEAAPPASAATIAAAAATAVVAPTSTVAVAPVASALEKKTKSKGPYICALCAKEFKNGYNLRRHEAIHTGAKAGRVPSGAMKMPTMVPLSLLSVPQLSGAGGGGGEAGAGGGAAAVAAGGVVTTTASGKRIRKNHACEMCGKAFRDVYHLNRHKLSHSDEKPYQCPVCQQRFKRKDRMSYHVRSHDGAVHKPYNCSHCGKSFSRPDHLNSHVRQVHSTERPFKCEKCEAAFATKDRLRAHTVRHEEKVPCHVCGKMLSSAYISDHMKVHSQGPHHVCELCNKGTCRGLPGGPGAEGGRLARRLATDTG

SEQ ID NO: 828281 - protein, 577 aa, Homo sapiens; identical to SEQ ID NO: 828274
  misc_feature (10)..(10): Xaa can be any naturally occurring amino acid
  misc_feature (12)..(12): Xaa can be any naturally occurring amino acid
  misc_feature (34)..(34): Xaa can be any naturally occurring amino acid
  misc_feature (39)..(39): Xaa can be any naturally occurring amino acid

SEQ ID NO: 828282 - protein, 577 aa, Homo sapiens; identical to SEQ ID NO: 828274
  misc_feature (10)..(10): Xaa can be any naturally occurring amino acid
  misc_feature (12)..(12): Xaa can be any naturally occurring amino acid
  misc_feature (34)..(34): Xaa can be any naturally occurring amino acid
  misc_feature (39)..(39): Xaa can be any naturally occurring amino acid

SEQ ID NO: 828283 - protein, 577 aa, Homo sapiens; identical to SEQ ID NO: 828274
  misc_feature (10)..(10): Xaa can be any naturally occurring amino acid
  misc_feature (12)..(12): Xaa can be any naturally occurring amino acid
  misc_feature (34)..(34): Xaa can be any naturally occurring amino acid
  misc_feature (39)..(39): Xaa can be any naturally occurring amino acid

SEQ ID NO: 828284 - protein, 577 aa, Homo sapiens; identical to SEQ ID NO: 828274
  misc_feature (10)..(10): Xaa can be any naturally occurring amino acid
  misc_feature (12)..(12): Xaa can be any naturally occurring amino acid
  misc_feature (34)..(34): Xaa can be any naturally occurring amino acid
  misc_feature (39)..(39): Xaa can be any naturally occurring amino acid

SEQ ID NO: 828285 - protein, 235 aa, Homo sapiens
  misc_feature (10)..(10): Xaa can be any naturally occurring amino acid
  misc_feature (12)..(12): Xaa can be any naturally occurring amino acid
  misc_feature (34)..(34): Xaa can be any naturally occurring amino acid
  misc_feature (39)..(39): Xaa can be any naturally occurring amino acid
AAAAAAARRXRXRPRPRGASRPHPGGVAAAVAAXSAARXAPEFRLPPAGRGARAGGAGPGRANAFGAAQPGRPGAAPRARAPRGPRPRPPLSPGGPAAAEAMFPVFPCTLLAPPFPVLGLDSRGVGGLMNSFPPPQGHAQNPLQVGAELQSRFFASQGCAQSPFQAAPAPPPTPQAPAAEPLQVDLLPVLAAAQESAAAAAAAAAAVAAPPTAVGSLSGAEGVPVSSQPLPSQPW

SEQ ID NO: 828286 - protein, 228 aa, Homo sapiens
  misc_feature (10)..(10): Xaa can be any naturally occurring amino acid
  misc_feature (12)..(12): Xaa can be any naturally occurring amino acid
  misc_feature (34)..(34): Xaa can be any naturally occurring amino acid
  misc_feature (39)..(39): Xaa can be any naturally occurring amino acid
AAAAAAARRXRXRPRPRGASRPHPGGVAAAVAAXSAARXAPDFRLPPAGRGARAGGAGPGRANAFGAAQPGRPGAAPRARAPRGPRPRPPLSPGGPAAAEAMFPVFPCTLLAPPFPVLGLDSRGVGGLMNSFPPPQGHAQNPLQVGAELQSRFCGLPLGGGGGACELSATSLPTLVSSKLVAGERGEWSRVPWYKLLSPLFSHQLLFPYQPRSLQKERRKKCFLRGIR

SEQ ID NO: 828287 - protein, 593 aa, Homo sapiens; identical to SEQ ID NO: 828275
  misc_feature (10)..(10): Xaa can be any naturally occurring amino acid
  misc_feature (12)..(12): Xaa can be any naturally occurring amino acid
  misc_feature (34)..(34): Xaa can be any naturally occurring amino acid
  misc_feature (39)..(39): Xaa can be any naturally occurring amino acid

SEQ ID NO: 828288 - protein, 111 aa, Homo sapiens
GRVGCARGLWAHTVRHEEKVPCHVCGKMLSSAYISDHMKVHSQGPHHVCELCNKGFTTAAYLRIHAVKDHGLQAPRADRILCKLCSVHCKTPAQLAGPQPRRGILLEIDQQ

SEQ ID NO: 828289 - protein, 514 aa, Homo sapiens; identical to SEQ ID NO: 828277
  misc_feature (10)..(10): Xaa can be any naturally occurring amino acid
  misc_feature (12)..(12): Xaa can be any naturally occurring amino acid
  misc_feature (34)..(34): Xaa can be any naturally occurring amino acid
  misc_feature (39)..(39): Xaa can be any naturally occurring amino acid

SEQ ID NO: 828290 - protein, 596 aa, Homo sapiens
  misc_feature (10)..(10): Xaa can be any naturally occurring amino acid
  misc_feature (12)..(12): Xaa can be any naturally occurring amino acid
  misc_feature (34)..(34): Xaa can be any naturally occurring amino acid
  misc_feature (39)..(39): Xaa can be any naturally occurring amino acid
AAAAAAARRXRXRPRPRGASRPHPGGVAAAVAAXSAARXAPEFRSLPPAGVRGPAGPARAGHAFGAAQPGRPGAAPRARAPRGPRPRPPLSPGGPAAAEAMFPVFPCTLLAPPFPVLGLDSRGVGGLMNSFPPPQGHAQNPLQVGAELQSRFFASQGCAQSPFQAAPAPPPTPQAPAAEPLQVDLLPVLAAAQESAAAAAAAAAAAAAVAAAPPAPAAASTVDTAALKQPPAPPPPPPPVSAPAAEAAPPASAATIAAAAATAVVAPTSTVAVAPVASALEKKTKSKGPYICALCAKEFKNGYNLRRHEAIHTGAKAGRVPSGAMKMPTMVPLSLLSVPQLSGAGGGGGEAGAGGGAAAVAAGGVVTTTASGKRIRKNHACEMCGKAFRDVYHLNRHKLSHSDEKPYQCPVCQQRFKRKDRMSYHVRSHDGAVHKPYNCSHCGKSFSRCARGLGRPLGRGEGGTRRRPDHLNSHVRQVHSTERPFKCEKCEAAFATKDRLRAHTVRHEEKVPCHVCGKMLSSAYISDHMKVHSQGPHHVCELCNKGTGEVCPMAAAAAAAAAAAAAAVAAPPTAVGSLSGAEGVPVSSQPLPSQPW

SEQ ID NO: 828291 - protein, 623 aa, Homo sapiens
  misc_feature (10)..(10): Xaa can be any naturally occurring amino acid
  misc_feature (12)..(12): Xaa can be any naturally occurring amino acid
  misc_feature (34)..(34): Xaa can be any naturally occurring amino acid
  misc_feature (39)..(39): Xaa can be any naturally occurring amino acid
AAAAAAARRXRXRPRPRGASRPHPGGVAAAVAAXSAARXAPEFRSLPPAGVRGPAGPARAGHAFGAAQPGRPGAAPRARAPRGPRPRPPLSPGGPAAAEAMFPVFPCTLLAPPFPVLGLDSRGVGGLMNSFPPPQGHAQNPLQVGAELQSRFFASQGCAQSPFQAAPAPPPTPQAPAAEPLQVDLLPVLAAAQESAAAAAAAAAAAAAVAAAPPAPAAASTVDTAALKQPPAPPPPPPPVSAPAAEAAPPASAATIAAAAATAVVAPTSTVAVAPVASALEKKTKSKGPYICALCAKEFKNGYNLRRHEAIHTGAKAGRVPSGAMKMPTMVPLSLLSVPQLSGAGGGGGEAGAGGGAAAVAAGGVVTTTASGKRIRKNHACEMCGKAFRDVYHLNRHKLSHSDEKPYQCPVCQQRFKRKDRMSYHVRSHDGAVHKPYNCSHCGKSFSRPDHLNSHVRQVHSTERPFKCEASSCHSHFLQIKDPQGSDSFNLLLPPPQPTNFNSPVTPPTPLPPPQKCEAAFATKDRLRAHTVRHEEKVPCHVCGKMLSSAYISDHMKVHSQGPHHVCELCNKGTGEVCPMAAAAAAAAAAAAAAVAAPPTAVGSLSGAEGVPVSSQPLPSQPW

SEQ ID NO: 828292 - protein, 553 aa, Homo sapiens; identical to SEQ ID NO: 828280
  misc_feature (35)..(35): Xaa can be any naturally occurring amino acid

SEQ ID NO: 828293 - protein, 577 aa, Homo sapiens; identical to SEQ ID NO: 828274
  misc_feature (10)..(10): Xaa can be any naturally occurring amino acid
  misc_feature (12)..(12): Xaa can be any naturally occurring amino acid
  misc_feature (34)..(34): Xaa can be any naturally occurring amino acid
  misc_feature (39)..(39): Xaa can be any naturally occurring amino acid

SEQ ID NO: 828294 - protein, 514 aa, Homo sapiens; identical to SEQ ID NO: 828277
  misc_feature (10)..(10): Xaa can be any naturally occurring amino acid
  misc_feature (12)..(12): Xaa can be any naturally occurring amino acid
  misc_feature (34)..(34): Xaa can be any naturally occurring amino acid
  misc_feature (39)..(39): Xaa can be any naturally occurring amino acid

SEQ ID NO: 828295 - protein, 577 aa, Homo sapiens; identical to SEQ ID NO: 828274
  misc_feature (10)..(10): Xaa can be any naturally occurring amino acid
  misc_feature (12)..(12): Xaa can be any naturally occurring amino acid
  misc_feature (34)..(34): Xaa can be any naturally occurring amino acid
  misc_feature (39)..(39): Xaa can be any naturally occurring amino acid

SEQ ID NO: 828296 - protein, 577 aa, Homo sapiens; identical to SEQ ID NO: 828274
  misc_feature (10)..(10): Xaa can be any naturally occurring amino acid
  misc_feature (12)..(12): Xaa can be any naturally occurring amino acid
  misc_feature (34)..(34): Xaa can be any naturally occurring amino acid
  misc_feature (39)..(39): Xaa can be any naturally occurring amino acid

SEQ ID NO: 828297 - protein, 583 aa, Homo sapiens
  misc_feature (10)..(10): Xaa can be any naturally occurring amino acid
  misc_feature (12)..(12): Xaa can be any naturally occurring amino acid
  misc_feature (34)..(34): Xaa can be any naturally occurring amino acid
  misc_feature (39)..(39): Xaa can be any naturally occurring amino acid
AAAAAAARRXRXRPRPRGASRPHPGGVAAAVAAXSAARXAPEFRSLPPAGVRGPAGPARAGHAFGAAQPGRPGAAPRARAPRGPRPRPPLSPGGPAAAEAMFPVFPCTLLAPPFPVLGLDSRGVGGLMNSFPPPQGHAQNPLQVGAELQSRFFASQGCAQSPFQAAPAPPPTPQAPAAEPLQVDLLPVLAAAQESAAAAAAAAAAAAAVAAAPPAPAAASTVDTAALKQPPAPPPPPPPVSAPAAEAAPPASAATIAAAAATAVVAPTSTVAVAPVASALEKKTKSKGPYICALCAKEFKNGYNLRRHEAIHTGAKAGRVPSGAMKMPTMVPLSLLSVPQLSGAGGGGGEAGAGGGAAAVAAGGVVTTTASGKRIRKNHACEMCGKAFRDVYHLNRHKLSHSDEKPYQCPVCQQRFKRKDRMSYHVRSHDGAVHKPYNCSHCGKSFSRPDHLNSHVRQVHSTERPFKCEKCEAAFATKDRLRAHTVRHEEKVPCHVCGKMLSSAYISDHMKVHSQGPHHVCELCNKGTGEVCPMAAAAAAAAAAAAAAVAAPPTAVGSLSGAEGVPVSSQPLPPEGKEEEMFS

SEQ ID NO: 828298 - protein, 577 aa, Homo sapiens; identical to SEQ ID NO: 828274
  misc_feature (10)..(10): Xaa can be any naturally occurring amino acid
  misc_feature (12)..(12): Xaa can be any naturally occurring amino acid
  misc_feature (34)..(34): Xaa can be any naturally occurring amino acid
  misc_feature (39)..(39): Xaa can be any naturally occurring amino acid

SEQ ID NO: 828299 - protein, 429 aa, Homo sapiens
GKKKRRKNFEAMFKGILQSGLDNFVINHMLKNNVAGQTSIQTLVPNTDQKSTSVKKDNHKKKTVKMLEYLGKDVLHGVFNYLAKHDVLTLKEEEKKKYYDAKIEDKALILVDSLRKNRVAHQMFTQTLLNMDQKITSVKPLLQIEAGPPESAESTNILKLCPREEFLRLCKKNHDEIYPIKKREDRRRLALIICNTKFDHLPARNGAHYDIVGMKRLLQGLGYTVVDEKNLTARDMESVLRAFAARPEHKSSDSTFLVLMSHGILEGICGTAHKKKKPDVLLYDTIFQIFNNRNCLSLKDKPKVIIVQACRGEKHGELWVRDSPASLAVISSQSSENLEADSVCKIHEEKDFIAFCSSTPHNVSWRDRTRGSIFITELITCFQKYSCCCHLMEIFRKVQKSFEVPQAKAQMPTIERATLTRDFYLFPGN

SEQ ID NO: 828300 - protein, 99 aa, Homo sapiens
FQCCTKRQRLLAMAEDNHKKKTVKMLEYLGKDVLHGVFNYLAKHDVLTLKEEEKKKYYDAKIEDKALILVDSLRKNRVAHQMFTQTLLNMDQKITSVKQ

SEQ ID NO: 828301 - protein, 388 aa, Homo sapiens
FQCCTKRQRLLAMAEDNHKKKTVKMLEYLGKDVLHGVFNYLAKHDVLTLKEEEKKKYYDAKIEDKALILVDSLRKNRVAHQMFTQTLLNMDQKITSVKPLLQIEAGPPESAESTNILKLCPREEFLRLCKKNHDEIYPIKKREDRRRLALIICNTKFDHLPARNGAHYDIVGMKRLLQGLGYTVVDEKNLTARDMESVLRAFAARPEHKSSDSTFLVLMSHGILEGICGTAHKKKKPDVLLYDTIFQIFNNRNCLSLKDKPKVIIVQACRGEKHGELWVRDSPASLAVISSQSSENLEADSVCKIHEEKDFIAFCSSTPHNVSWRDRTRGSIFITELITCFQKYSCCCHLMEIFRKVQKSFEVPQAKAQMPTIERATLTRDFYLFPGN

SEQ ID NO: 828302 - protein, 235 aa, Homo sapiens
VGAPGRWRRRRRGSSVTGARPVKTLLAGATSLPAARNGNGVKGDPSTWPRGSAMELKQSLSTHLEAEKPLRRYGAVEETAWKTERLGRNQLDIISMAETTMMPEEIELEMAKIQRLREVLVRRESELRFMMDDIQLCKDIMDLKQELQNLVAIPEKEKTKLQKQREDELIQKIHKLVQKRDFLVDDAEVERLREQEEDKEMADFLRIKLKPLDKVTKSPASLESLEKPEAYVSEY

SEQ ID NO: 828303 - protein, 120 aa, Homo sapiens
RLRLKTKQNKANEVNYFGKHIFWFPKGVLTNTHLRHRLKSVLKVYDGRRARLCPGTMSGSVPWCSLGVLMVVFPVSCTDQLDIISMAETTMMPEEIELEMAKIQRLREVLVRRESELRFM

SEQ ID NO: 828304 - protein, 257 aa, Homo sapiens
VGAPGRWRRRRRGSSVTGARPVKTLLAGATSLPAARNGNGVKGDPSTWPRGSAMELKQSLSTHLEAEKPLRRYGAVEETAWKTERLGRNQLDIISMAETTMMPEEIELEMAKIQRLREVLVRRESELRFMMDDIQLCKDIMDLKQELQNLVAIPEKEKTKLQKQREDELIQKIHKLVQKRDFLVDDAEVERLREQEEDKEMADFLRIKLKPLDKVTKSPASSRAEKKAEPPPSKPTVAKTGLALIKDCCGATQCNIM

SEQ ID NO: 828305 - protein, 204 aa, Homo sapiens
VGAPGRWRRRRRGSSVTGARPVKTLLAGATSLPAARNGNGVKGDPSTWPRGSAMELKQSLSTHLEAEKPLRRYGAVEETAWKTERLGRNQLDIISMAETTMMPEEIELEMAKIQRLREVLVRRESELRFMMDDIQLCKDIMDLKQELQNLVAIPEKEKTKLQKQREDELIQKIHKLVQKRDFLVDDAEVERLRLPGREESRAPT

SEQ ID NO: 828306 - protein, 187 aa, Homo sapiens
MWGDLTETGCMGRRSAKKDQLDIISMAETTMMPEEIELEMAKIQRLREVLVRRESELRFMMDDIQLCKDIMDLKQELQNLVAIPEKEKTKLQKQREDELIQKIHKLVQKRDFLVDDAEVERLREQEEDKEMADFLRIKLKPLDKVTKSPASSRAEKKAEPPPSKPTVAKTGLALIKDCCGATQCNIM

SEQ ID NO: 828307 - protein, 127 aa, Homo sapiens
MDDIQLCKDIMDLKQELQNLVAIPEKEKTKLQKQREDELIQKIHKLVQKRDFLVDDAEVERLREQEEDKEMADFLRIKLKPLDKVTKSPASSRAEKKAEPPPSKPTVAKTGLALIKDCCGATQCNIM

SEQ ID NO: 828308 - protein, 141 aa, Homo sapiens
VGAPGRWRRRRRGSSVTGARPVKTLLAGATSLPAARNGNGVKGDPSTWPRGSAMELKQSLSTHLEAEKPLRRYGAVEETAWKTERLGRNQLDIISMAETTMMPEEIELEMAKIQRLREVLVRRESELRFMLCNLAQISYLL

SEQ ID NO: 828309 - protein, 253 aa, Homo sapiens
RLRLKTKQNKANEVNYFGKHIFWFPKGVLTNTHLRHRLKSVLKVYDGRRARLCPGTMSGSVPWCSLGVLMVVFPVSCTDQLDIISMAETTMMPEEIELEMAKIQRLREVLVRRESELRFMMDDIQLCKDIMDLKQELQNLVAIPEKEKTKLQKQREDELIQKIHKLVQKRDFLVDDAEVERLREQEEDKEMADFLRIKLKPLDKVTKSPAICLRCVPGGGLDWHGSSVQKSQQGTGSSDVKARAVENGTQSRC

SEQ ID NO: 828310 - protein, 118 aa, Homo sapiens
AWTGMDPVCRRASREPEALMSRPEQLRMGPRVDADLGTPPFRGHHRDASRMPLCQPDTRTFVKNSNRQERQRVTRLCPVIGWHMLTSCQTTSTRVIHVHLQQPARYSLCDFSVCVCVS

SEQ ID NO: 828311 - protein, 244 aa, Homo sapiens
VGAPGRWRRRRRGSSVTGARPVKTLLAGATSLPAARNGNGVKGDPSTWPRGSAMELKQSLSTHLEAEKPLRRYGAVEETAWKTERLGRNQLDIISMAETTMMPEEIELEMAKIQRLREVLVRRESELRFMMDDIQLCKDIMDLKQELQNLVAIPEKEKTKLQKQREDELIQKIHKLVQKRDFLVDDAEVERLREQEEDKEMADFLRIKLKPLDKVTKSPANEEVAVNPLPFSSGGCKRLQAEAE

SEQ ID NO: 828312 - protein, 141 aa, Homo sapiens; identical to SEQ ID NO: 828308

SEQ ID NO: 828313 - protein, 257 aa, Homo sapiens; identical to SEQ ID NO: 828304

SEQ ID NO: 828314 - protein, 127 aa, Homo sapiens; identical to SEQ ID NO: 828307

SEQ ID NO: 828315 - protein, 247 aa, Homo sapiens
RLRLKTKQNKANEVNYFGKHIFWFPKGVLTNTHLRHRLKSVLKVYDGRRARLCPGTMSGSVPWCSLGVLMVVFPVSCTDQLDIISMAETTMMPEEIELEMAKIQRLREVLVRRESELRFMMDDIQLCKDIMDLKQELQNLVAIPEKEKTKLQKQREDELIQKIHKLVQKRDFLVDDAEVERLREQEEDKEMADFLRIKLKPLDKVTKSPASSRAEKKAEPPPSKPTVAKTGLALIKDCCGATQCNIM

SEQ ID NO: 828316 - protein, 218 aa, Homo sapiens [sequence omitted]

SEQ ID NO: 828317 - protein, 223 aa, Homo sapiens
VGAPGRWRRRRRGSSVTGARPVKTLLAGATSLPAARNGNGVKGDPSTWPRGSAMELKQSLSTHLEAEKPLRRYGAVEETAWKTERLGRNQLDIISMAETTMMPEEIELEMAKIQRLREVLVRRESELRFMMDDIQLCKDIMDLKQELQNLVAIPEKEKTKLQKQREDELIQKIHKLVQKRDFLVDDAEVERLREQEEDKEMADFLRIKLKPLDKVTKSPATPI

SEQ ID NO: 828318 - protein, 2627 aa, Homo sapiens
MEKLHGHVSAHPDILSLENRCLAMLPDLQPLEKLHQHVSTHSDILSLKNQCLATLPDLKTMEKPHGYVSAHPDILSLENQCLATLSDLKTMEKPHGHVSAHPDILSLENRCLATLPSLKSTVSASPLFQSLQISHMTQADLYRVNNSNCLLSEPPSWRAQHFSKGLDLSTCPIALKSISATETAQEATLGRWFDSEEKKGAETQMPSYSLSLGEEEEVEDLAVKLTSGDSESHPEPTDHVLQEKKMALLSLLCSTLVSEVNMNNTSDPTLAAIFEICRELALLEPEFILKASLYARQQLNVRNVANNILAIAAFLPACRPHLRRYFCAIVQLPSDWIQVAELYQSLAEGDKNKLVPLPACLRTAMTDKFAQFDEYQLAKYNPRKHRAKRHPRRPPRSPGMEPPFSHRCFPRYIGFLREEQRKFEKAGDTVSEKKNPPRFTLKKLVQRLHIHKPAQHVQALLGYRYPSNLQLFSRSRLPGPWDSSRAGKRMKLSRPETWERELSLRGNKASVWEELIENGKLPFMAMLRNLCNLLRVGISSRHHELILQRLQHGKSVIHSRQFPFRFLNAHDAIDALEAQLRNQALPFPSNITLMRRILTRNEKNRPRRRFLCHLSRQQLRMAMRIPVLYEQLKREKLRVHKARQWKYDGEMLNRYRQALETAVNLSVKHSLPLLPGRTVLVYLTDANADRLCPKSNPQGPPLNYALLLIGMMITRAEQVDVVLCGGDTLKTAVLKAEEGILKTAIKLQAQVQEFDENDGWSLNTFGKYLLSLAGQRVPVDRVILLGQSMDDGMINVAKQLYWQRVNSKCLFVGILLRRVQYLSTDLNPNDVTLSGCTDAILKFIAEHGASHLLEHVGQMDKIFKIPPPPGKTGVQSLRPLEEDTPSPLAPVSQQGWRSIRLFISSTFRDMHGERDLLLRSVLPALQARAAPHRISLHGIDLRWGVTEEETRRNRQLEVCLGEVENAQLFVGILGSRYGYIPPSYNLPDHPHFHWAQQYPSGRSVTEMEVMQFLNRNQRLQPSAQALIYFRDSSFLSSVPDAWKSDFVSESEEAACRISELKSYLSRQKGITCRRYPCEWGGVAAGRPYVGGLEEFGQLVLQDVWNMIQKLYLQPGALLEQPVSIPDDDLVQATFQQLQKPPSPARPRLLQDTVQQLMLPHGRLSLVTGQSGQGKTAFLASLVSALQAPDGAKVAPLVFFHFSGARPDQGLALTLLRRLCTYLRGQLKEPGALPSTYRSLVWELQQRLLPKSAESLHPGQTQVLIIDGADRLVDQNGQLISDWIPKKLPRCVHLVLSVSSDAGLGETLEQSQGAHVLALGPLEASARARLVREELALYGKRLEESPFNNQMRLLLVKRESGRPLYLRLVTDHLRLFTLYEQVSERLRTLPATVPLLLQHILSTLEKEHGPDVLPQALTALEVTRSGLTVDQLHGVLSVWRTLPKGTKSWEEAVAAGNSGDPYPMGPFACLVQSLRSLLGEGPLERPGARLCLPDGPLRTAAKRCYGKRPGLEDTAHILIAAQLWKTCDADASGTFRSCPPEALGDLPYHLLQSGNRGLLSKFLTNLHVVAAHLELGLVSRLLEAHALYASSVPKEEQKLPEADVAVFRTFLRQQASILSQYPRLLPQQAANQPLDSPLCHQASLLSRRWHLQHTLRWLNKPRTMKNQQSSSLSLAVSSSPTAVAFSTNGQRAAVGTANGTVYLLDLRTWQEEKSVVSGCDGISACLFLSDDTLFLTAFDGLLELWDLQHGCRVLQTKAHQYQITGCCLSPDCRLLATVCLGGCLKLWDTVRGQLAFQHTYPKSLNCVAFHPEGQVIATGSWAGSISFFQVDGLKVTKDLGAPGASIRTLAFNVPGGVVAVGRLDSMVELWAWREGARLAAFPAHHGFVAAALFLHAGCQLLTAGEDGKVQVWSGSLGRPRGHLGSLSLSPALSVALSPDGDRVAVGYRADGIRIYKISSGSQGAQGQALDVAVSALAWLSPKVLVSGAEDGSLQGWALKECSLQSLWLLSRFQKPVLGLATSQELLASASEDFTVQLWPRQLLTRPHKAEDFPCGTELRGHEGPVSCCSFSTDGGSLATGGRDRSLLCWDVRTPKTPVLIHSFPACHRDWVTGCAWTKDNLLISCSSDGSVGLWDPESGQRLGQFLGHQSAVSAVAAVEEHVVSVSRDGTLKVWDHQGVELTSIPAHSGPISHCAAAMEPRAAGQPGSELLVVTVGLDGATRLWHPLLVCQTHTLLGHSGPVRAAAVSETSGLMLTASEDGSVRLWQVPKEADDTCIPRSSAAVTAVAWAPDGSMAVSGNQAGELILWQEAKAVATAQAPGHIGALIWSSAHTFFVLSADEKISEWQVKLRKGSAPGNLSLHLNRILQEDLGVLTSLDWAPDGHFLILAKADLKLLCMKPGDAPSEIWSSYTENPMILSTHKEYGIFVLQPKDPGVLSFLRQKESGEFEERLNFDINLENPSRTLISITQAKPESESSFLCASSDGILWNLAKCSPEGEWTTGNMWQKKANTPETQTPGTDPSTCRESDASMDSDASMDSEPTPHLKTRQRRKIHSGSVTALHVLPELLVTASKDRDVKLWERPSMQLLGLFRCEGSVSCLEPWLGANSTLQLAVGDVQGNVYFLNWE

SEQ ID NO: 828319 - protein, 94 aa, Homo sapiens
AALLDPTLSPESCQMRLLLVKRESGRPLYLRLVTDHLRLFTLYEQVSERLRTLPPPPPSLSLNCLLRPQGNQCNPNPGPQPPNHDPQALTTPCD

SEQ ID NO: 828320 - protein, 2116 aa, Homo sapiens
MKLSRPETWERELSLRGNKASVWEELIENGKLPFMAMLRNLCNLLRVGISSRHHELILQRLQHGKSVIHSRQFPFRFLNAHDAIDALEAQLRNQALPFPSNITLMRRILTRNEKNRPRRRFLCHLSRQQLRMAMRIPVLYEQLKREKLRVHKARQWKYDGEMLNRYRQALETAVNLSVKHSLPLLPGRTVLVYLTDANADRLCPKSNPQGPPLNYALLLIGMMITRAEQVDVVLCGGDTLKTAVLKAEEGILKTAIKLQAQVQEFDENDGWSLNTFGKYLLSLAGQRVPVDRVILLGQSMDDGMINVAKQLYWQRVNSKCLFVGILLRRVQYLSTDLNPNDVTLSGCTDAILKFIAEHGASHLLEHVGQMDKIFKIPPPPGKTGVQSLRPLEEDTPSPLAPVSQQGWRSIRLFISSTFRDMHGERDLLLRSVLPALQARAAPHRISLHGIDLRWGVTEEETRRNRQLEVCLGEVENAQLFVGILGSRYGYIPPSYNLPDHPHFHWAQQYPSGRSVTEMEVMQFLNRNQRLQPSAQALIYFRDSSFLSSVPDAWKSDFVSESEEAACRISELKSYLSRQKGITCRRYPCEWGGVAAGRPYVGGLEEFGQLVLQDVWNMIQKLYLQPGALLEQPVSIPDDDLVQATFQQLQKPPSPARPRLLQDTVQQLMLPHGRLSLVTGQSGQGKTAFLASLVSALQAPDGAKVAPLVFFHFSGARPDQGLALTLLRRLCTYLRGQLKEPGALPSTYRSLVWELQQRLLPKSAESLHPGQTQVLIIDGADRLVDQNGQLISDWIPKKLPRCVHLVLSVSSDAGLGETLEQSQGAHVLALGPLEASARARLVREELALYGKRLEESPFNNQMRLLLVKRESGRPLYLRLVTDHLRLFTLYEQVSERLRTLPATVPLLLQHILSTLEKEHGPDVLPQALTALEVTRSGLTVDQLHGVLSVWRTLPKGTKSWEEAVAAGNSGDPYPMGPFACLVQSLRSLLGEGPLERPGARLCLPDGPLRTAAKRCYGKRPGLEDTAHILIAAQLWKTCDADASGTFRSCPPEALGDLPYHLLQSGNRGLLSKFLTNLHVVAAHLELGLVSRLLEAHALYASSVPKEEQKLPEADVAVFRTFLRQQASILSQYPRLLPQQAANQPLDSPLCHQASLLSRRWHLQHTLRWLNKPRTMKNQQSSSLSLAVSSSPTAVAFSTNGQRAAVGTANGTVYLLDLRTWQEEKSVVSGCDGISACLFLSDDTLFLTAFDGLLELWDLQHGCRVLQTKAHQYQITGCCLSPDCRLLATVCLGGCLKLWDTVRGQLAFQHTYPKSLNCVAFHPEGQVIATGSWAGSISFFQVDGLKVTKDLGAPGASIRTLAFNVPGGVVAVGRLDSMVELWAWREGARLAAFPAHHGFVAAALFLHAGCQLLTAGEDGKVQVWSGSLGRPRGHLGSLSLSPALSVALSPDGDRVAVGYRADGIRIYKISSGSQGAQGQALDVAVSALAWLSPKSLWLLSRFQKPVLGLATSQELLASASEDFTVQLWPRQLLTRPHKAEDFPCGTELRGHEGPVSCCSFSTDGGSLATGGRDRSLLCWDVRTPKTPVLIHSFPACHRDWVTGCAWTKDNLLISCSSDGSVGLWDPESGQRLGQFLGHQSAVSAVAAVEEHVVSVSRDGTLKVWDHQGVELTSIPAHSGPISHCAAAMEPRAAGQPGSELLVVTVGLDGATRLWHPLLVCQTHTLLGHSGPVRAAAVSETSGLMLTASEDGSVRLWQVPKEADDTCIPRSSAAVTAVAWAPDGSMAVSGNQAGELILWQEAKAVATAQAPGHIGALIWSSAHTFFVLSADEKISEWQVKLRKGSAPGNLSLHLNRILQEDLGVLTSLDWAPDGHFLILAKADLKLLCMKPGDAPSEIWSSYTENPMILSTHKEYGIFVLQPKDPGVLSFLRQKESGEFEERLNFDINLENPSRTLISITQAKPESESSFLCASSDGILWNLAKCSPEGEWTTGNMWQKKANTPETQTPGTDPSTCRESDASMDSDASMDSEPTPHLKTRQRRKIHSGSVTALHVLPELLVTASKDRDVKLWERPSMQLLGLFRCEGSVSCLEPWLGANSTLQLAVGDVQGNVYFLNWE

SEQ ID NO: 828321 - protein, 2108 aa, Homo sapiens
MKLSRPETWERELSLRGNKASVWEELIENGKLPFMAMLRNLCNLLRVGISSRHHELILQRLQHGKSVIHSRQFPFRFLNAHDAIDALEAQLRNQALPFPSNITLMRRILTRNEKNRPRRRFLCHLSRQQLRMAMRIPVLYEQLKREKLRVHKARQWKYDGEMLNRYRQALETAVNLSVKHSLPLLPGRTVLVYLTDANADRLCPKSNPQGPPLNYALLLIGMMITRAEQVDVVLCGGDTLKTAVLKAEEGILKTAIKLQAQVQEFDENDGWSLNTFGKYLLSLAGQRVPVDRVILLGQSMDDGMINVAKQLYWQRVNSKCLFVGILLRRVQYLSTDLNPNDVTLSGCTDAILKFIAEHGASHLLEHVGQMDKIFKIPPPPGKTGVQSLRPLEEDTPSPLAPVSQQGWRSIRLFISSTFRDMHGERDLLLRSVLPALQARAAPHRISLHGIDLRWGVTEEETRRNRQLEVCLGEVENAQLFVGILGSRYGYIPPSYNLPDHPHFHWAQQYPSGRSVTEMEVMQFLNRNQRLQPSAQALIYFRDSSFLSSVPDAWKSDFVSESEEAACRISELKSYLSRQKGITCRRYPCEWGGVAAGRPYVGGLEEFGQLVLQDVWNMIQKLYLQPGALLEQPVSIPDDDLVQATFQQLQKPPSPARPRLLQDTVQQLMLPHGRLSLVTGQSGQGKTAFLASLVSALQAPDGAKVAPLVFFHFSGARPDQGLALTLLRRLCTYLRGQLKEPGALPSTYRSLVWELQQRLLPKSAESLHPGQTQVLIIDGADRLVDQNGQLISDWIPKKLPRCVHLVLSVSSDAGLGETLEQSQGAHVLALGPLEASARARLVREELALYGKRLEESPFNNQMRLLLVKRESGRPLYLRLVTDHLRLFTLYEQVSERLRTLPATVPLLLQHILSTLEKEHGPDVLPQALTALEVTRSGLTVDQLHGVLSVWRTLPKGTKSWEEAVAAGNSGDPYPMGPFACLVQSLRSLLGEGPLERPGARLCLPDGPLRTAAKRCYGKRPGLEDTAHILIAAQLWKTCDADASGTFRSCPPEALGDLPYHLLQSGNRGLLSKFLTNLHVVAAHLELGLVSRLLEAHALYASSVPKEEQKLPEADVAVFRTFLRQQASILSQYPRLLPQQAANQPLDSPLCHQASLLSRRWHLQHTLRWLNKPRTMKNQQSSSLSLAVSSSPTAVAFSTNGQRAAVGTANGTVYLLDLRTWQEEKSVVSGCDGISACLFLSDDTLFLTAFDGLLELWDLQHGCRVLQTKAHQYQITGCCLSPDCRLLATVCLGGCLKLWDTVRGQLAFQHTYPKSLNCVAFHPEGQVIATGSWAGSISFFQVDGLKVTKDLGAPGASIRTLAFNVPGGVVAVGRLDSMVELWAWREGARLAAFPAHHGFVAAALFLHAGCQLLTAGEDGKDGDRVAVGYRADGIRIYKISSGSQGAQGQALDVAVSALAWLSPKVLVSGAEDGSLQGWALKECSLQSLWLLSRFQKPVLGLATSQELLASASEDFTVQLWPRQLLTRPHKAEDFPCGTELRGHEGPVSCCSFSTDGGSLATGGRDRSLLCWDVRTPKTPVLIHSFPACHRDWVTGCAWTKDNLLISCSSDGSVGLWDPESGQRLGQFLGHQSAVSAVAAVEEHVVSVSRDGTLKVWDHQGVELTSIPAHSGPISHCAAAMEPRAAGQPGSELLVVTVGLDGATRLWHPLLVCQTHTLLGHSGPVRAAAVSETSGLMLTASEDGSVRLWQVPKEADDTCIPRSSAAVTAVAWAPDGSMAVSGNQAGELILWQEAKAVATAQAPGHIGALIWSSAHTFFVLSADEKISEWQVKLRKGSAPGNLSLHLNRILQEDLGVLTSLDWAPDGHFLILAKADLKLLCMKPGDAPSEIWSSYTENPMILSTHKEYGIFVLQPKDPGVLSFLRQKESGEFEERLNFDINLENPSRTLISITQAKPESESSFLCASSDGILWNLAKCSPEGEWTTGNMWQKKANTPETQTPGTDPSTCRESDASMDSDASMDSEPTPHLKTRQRRKIHSGSVTALHVLPELLVTASKDRDVKLWERPSMQLLGLFRCEGSVSCLEPWLGANSTLQLAVGDVQGNVYFLNWE

SEQ ID NO: 828322 - protein, 231 aa, Homo sapiens
MKPGDAPSEIWSSYTENPMILSTHKEYGIFVLQPKDPGVLSFLRQKESGEFEERLNFDINLENPSRTLISITQAKPESESSFLCASSDGILWNLAKCSPEGEWTTGNMWQKKANTPETQTPGTDPSTCRESDASMDSDASMDSEPTPHLKTRQRRKIHSGSVTALHVLPELLVTASKDRDVKLWERPSMQLLGLFRCEGSVSCLEPWLGANSTLQLAVGDVQGNVYFLNWE

SEQ ID NO: 828323 - protein, 1848 aa, Homo sapiens
MKLSRPETWERELSLRGNKASVWEELIENGKLPFMAMLRNLCNLLRVGISSRHHELILQRLQHGKSVIHSRQFPFRFLNAHDAIDALEAQLRNQALPFPSNITLMRRILTRNEKNRPRRRFLCHLSRQQLRMAMRIPVLYEQLKREKLRVHKARQWKYDGEMLNRYRQALETAVNLSVKHSLPLLPGRTVLVYLTDANADRLCPKSNPQGPPLNYALLLIGMMITRAEQVDVVLCGGDTLKTAVLKAEEGILKTAIKLQAQVQEFDENDGWSLNTFGKYLLSLAGQRVPVDRVILLGQSMDDGMINVAKQLYWQRVNSKCLFVGILLRRVQYLSTDLNPNDVTLSGCTDAILKFIAEHGASHLLEHVGQMDKIFKIPPPPGKTGVQSLRPLEEDTPSPLAPVSQQGWRSIRLFISSTFRDMHGERDLLLRSVLPALQARAAPHRISLHGIDLRWGVTEEETRRNRQLEVCLGEVENAQLFVGILGSRYGYIPPSYNLPDHPHFHWAQQYPSGRSVTEMEVMQFLNRNQRLQPSAQALIYFRDSSFLSSVPDAWKSDFVSESEEAACRISELKSYLSRQKGITCRRYPCEWGGVAAGRPYVGGLEEFGQLVLQDVWNMIQKLYLQPGALLEQPVSIPDDDLVQATFQQLQKPPSPARPRLLQDTVQQLMLPHGRLSLVTGQSGQGKTAFLASLVSALQAPDGAKVAPLVFFHFSGARPDQGLALTLLRRLCTYLRGQLKEPGALPSTYRSLVWELQQRLLPKSAESLHPGQTQVLIIDGADRLVDQNGQLISDWIPKKLPRCVHLVLSVSSDAGLGETLEQSQGAHVLALGPLEASARARLVREELALYGKRLEESPFNNQMRLLLVKRESGRPLYLRLVTDHLRLFTLYEQVSERLRTLPATVPLLLQHILSTLEKEHGPDVLPQALTALEVTRSGLTVDQLHGVLSVWRTLPKGTKSWEEAVAAGNSGDPYPMGPFACLVQSLRSLLGEGPLERPGARLCLPDGPLRTAAKRCYGKRPGLEDTAHILIAAQLWKTCDADASGTFRSCPPEALGDLPYHLLQSGNRGLLSKFLTNLHVVAAHLELGLVSRLLEAHALYASSVPKEEQKLPEADVAVFRTFLRQQASILSQYPRLLPQQAANQPLDSPLCHQASLLSRRWHLQHTLRWLNKPRTMKNQQSSSLSLAVSSSPTAVAFSTNGQRAAVGTANGTVYLLDLRTWQEEKSVVSGCDGISACLFLSDDTLFLTAFDGLLELWDLQHGCRVLQTKAHQYQITGCCLSPDCRLLATVCLGGCLKLWDTVRGQLAFQHTYPKSLNCVAFHPEGQVIATGSWAGSISFFQVDGLKVTKDLGAPGASIRTLAFNVPGGVVAVGRLDSMVELWAWREGARLAAFPAHHGFVAAALFLHAGCQLLTAGEDGKVQVWSGSLGRPRGHLGSLSLSPALSVALSPDGDRVAVGYRADGIRIYKISSGSQGAQGQALDVAVSALAWLSPKSLWLLSRFQKPVLGLATSQELLASASEDFTVQLWPRQLLTRPHKAEDFPCGTELRGHEGPVSCCSFSTDGGSLATGGRDRSLLCWDVRTPKTPVLIHSFPACHRDWVTGCAWTKDNLLISCSSDGSVGLWDPESGQRLGQFLGHQSAVSAVAAVEEHVVSVSRDGTLKVWDHQGVELTSIPAHSGPISHCAAAMEPRAAGQPGSELLVVTVGLDGATRLWHPLLVCQTHTLLGHSGPVRAAAVSETSGLMLTASEDGSVRLWQVPKEADDTCIPRSSAAVTAVAWAPDGSMAVSGNQAGELILWQEAKAVATAQAPGHIGALIWSSAHTFFVLSADEKISEWQVKLRKGSAPGNLR

SEQ ID NO: 828324 - protein, 710 aa, Homo sapiens
MKLSRPETWERELSLRGNKASVWEELIENGKLPFMAMLRNLCNLLRVGISSRHHELILQRLQHGKSVIHSRQFPFRFLNAHDAIDALEAQLRNQALPFPSNITLMRRILTRNEKNRPRRRFLCHLSRQQLRMAMRIPVLYEQLKREKLRVHKARQWKYDGEMLNRYRQALETAVNLSVKHSLPLLPGRTVLVYLTDANADRLCPKSNPQGPPLNYALLLIGMMITRAEQVDVVLCGGDTLKTAVLKAEEGILKTAIKLQAQVQEFDENDGWSLNTFGKYLLSLAGQRVPVDRVILLGQSMDDGMINVAKQLYWQRVNSKCLFVGILLRRVQYLSTDLNPNDVTLSGCTDAILKFIAEHGASHLLEHVGQMDKIFKIPPPPGKTGVQSLRPLEEDTPSPLAPVSQQGWRSIRLFISSTFRDMHGERDLLLRSVLPALQARAAPHRISLHGIDLRWGVTEEETRRNRQLEVCLGEVENAQLFVGILGSRYGYIPPSYNLPDHPHFHWAQQYPSGRSVTEMEVMQFLNRNQRLQPSAQALIYFRDSSFLSSVPDAWKSDFVSESEEAACRISELKSYLSRQKGITCRRYPCEWGGVAAGRPYVGGLEEFGQLVLQDVWNMIQKLYLQPGALLEQPVSIPDDDLVQATFQQLQKPPSPARPRPANFIFLVEMGFHHVGHAGLELLTIGDPPTSASQSAGITDVSHCAWPTNHCS

SEQ ID NO: 828325 - protein, 55 aa, Homo sapiens
FHPEGQVIATGSWAGSISFFQVDGLKVTKVRRSSVALGGSTGGQEWRVADDRQQH

SEQ ID NO: 828326 - protein, 225 aa, Homo sapiens
MPGLLGFPKGTALRNPVPPPLPPPSQRVIRSRSQSMDAMGLSNKKPNTVSTSHSGSFAPNNPDLAKAAGILSALPLPRPRPLPGGPSALLCLLRPDSNSLCCPAAHMPILGSGFGLATTFHGRGVKCPGQDTAVLTACSLQPLPKLLGPPLLLALYALRCDFLQVSPGTASVSHSLLSIYLFAGDWAAVWAPTVKPWVSGSTYCVSGCGHPLCVRPWAAVWTCTL

SEQ ID NO: 828327 - protein, 1063 aa, Homo sapiens
RGAQRCGARTRARAGQEPAGPAEVPPGRGPGRAALRMAQLRPAVPPGRPRRGSLPAGASWQNTDLFEMIEKMQGSRMDEQRCSFPPPLKTEEDYIPYPSVHEVLGREGPFPLILLPQFGGYWIEGTNHEITSIPETEPLQSPTTKVKLECNPTARIYRKHFLGKEHFNYYSLDAALGHLVFSLKYDVIGDQEHLRLLLRTKCRTYHDVIPISCLTEFPNVVQMAKLVCEDVNVDRFYPVLYPKASRLIVTFDEHVISNNFKFGVIYQKLGQTSEEELFSTNEESPAFVEFLEFLGQKVKLQDFKGFRGGLDVTHGQTGTESVYCNFRNKEIMFHVSTKLPYTEGDAQQLQRKRHIGNDIVAVVFQDENTPFVPDMIASNFLHAYVVVQAEGGGPDGPLYKVSVTARDDVPFFGPPLPDPAVFRKGPEFQEFLLTKLINAEYACYKAEKFAKLEERTRAALLETLYEELHIHSQSMMGLGGDEDKMENGSGGGGFFESFKRVIRSRSQSMDAMGLSNKKPNTVSTSHSGSFAPNNPDLAKAAGISLLIPGKSASRFGRRGSAIGIGTVEEVVVRGAAGSGGCLHALFSARSQDGGHIGDVAPLPPGQAPGRAGWSGGSSDGTQHLLWGLVPVPEPVPLTRGFWPCLGPWDPGPVPARIRYPKALTPSRTSPNIAGLHGAPSLSSALTPPPRHEVTWGPTPSCLQRSWGRASGAWGIPAQCVGSWGSLPAAGPEPPPANLEVPGRGPSWHGVGLGLLHCPLTTALRLQIPQSPGGRGAVAILRTRPPPTLAPSGCCPNPGPVLTCSPAVCARESPLPSWGLFPFRKLGGCLWEWISSLVLSCSSTLLQGLGQQDPQRGCGGALGLPGKVALSWGLSPQSLIVPGKSPTRKKSGPFGSRRSSAIGIENIQEVQEKRESPPAGQKTPDSGHVSQEPKSENSSTQSSPEMPTTKNRAETAAQRAEALKDFSRSSSSASSFASVVEETEGVDGEDTGLESVSSSGTPHKRDSFIYSTWLEDSVSTTSGGSSPGPSRSPHPDAGKLGDPACPEIKIQLEASEQHMPQLGC

SEQ ID NO: 828328 - protein, 1783 aa, Homo sapiens
RGAQRCGARTRARAGQEPAGPAEVPPGRGPGRAALRMAQLRPAVPPGRPRRGSLPAGASWQNTDLFEMIEKMQGSRMDEQRCSFPPPLKTEEDYIPYPSVHEVLGREGPFPLILLPQFGGYWIEGTNHEITSIPETEPLQSPTTKVKLECNPTARIYRKHFLGKEHFNYYSLDAALGHLVFSLKYDVIGDQEHLRLLLRTKCRTYHDVIPISCLTEFPNVVQMAKLVCEDVNVDRFYPVLYPKASRLIVTFDEHVISNNFKFGVIYQKLGQTSEEELFSTNEESPAFVEFLEFLGQKVKLQDFKGFRGGLDVTHGQTGTESVYCNFRNKEIMFHVSTKLPYTEGDAQQLQRKRHIGNDIVAVVFQDENTPFVPDMIASNFLHAYVVVQAEGGGPDGPLYKVSVTARDDVPFFGPPLPDPAVFRKGPEFQEFLLTKLINAEYACYKAEKFAKLEERTRAALLETLYEELHIHSQSMMGLGGDEDKMENGSGGGGFFESFKRVIRSRSQSMDAMGLSNKKPNTVSTSHSGSFAPNNPDLAKAAGILSALPLPRPRPLPGGPSALLCLLRPDSNSLCCPAAHMPILGSGFGLATTFHGRGVKCPGQDTAVLTACSLQPLPKLLGPPLLLALYALRCDFLQVSPGTASVSHSLLSIYLFAGDWAAVWAPTVKPWVSGSTYCVSGCGQPTVCQALGCCVDMHSVSIYCGPGPEYLGAPTVCQVLGCCVGINSVSAYCVRSPGLLCENLTVCQKMDCYVSTSCVISPRCQGTPTVCQEVSCCVGTFSVSTSYCVSAAARASVVWLPIVCRESGFCVSISRGSTSCVITDCCPGSGILLLTLRSAGHMDEYGLMAVGLTAVHCLVATPGHCTHCCAPHPSIQPPIHPPTHPSIHPPIHPSSYPPTHPCTHLPIYPSTHPPTHPSTHPSTHPSTHECHPCTHPSQPSIHASIHPSIHPSMCIHPCISIHPSTHPPIHPSIHPSFIDCLLHAKPCAQCCEAMSRGRREFPDLCCPAVTKHTVMRGAGPTSPNPVLSTTPFLSTRVTQPPVGGREGPQGQDQASSTHHGSNRTHFCFVFAQLSLSLCFLLSFYSLSLFFCSLLPSLSPSCGLSALWLSVSPSFLHLSFFAPSPPSLLRSSHPRFFLSAFPWLPSLSLTLPGPVSVSLRPCLSGFPSVPIWCALAGSRVSLSPGNCLSISPPSPLSSVSPCASRLPFPGPISPIASCTVLFLFLSVFLLSLPLLLSVSPSHHLSCSLTLSLSLSLCPRPLLLCQSLLIPGKSASRFGRRGSAIGIGTVEEVVVRGAAGSGGCLHALFSARSQDGGHIGDVAPLPPGQAPGRAGWSGGSSDGTQHLLWGLVPVPEPVPLTRGFWPCLGPWDPGPVPARIRYPKALTPSRTSPNIAGLHGAPSLSSALTPPPRHEVTWGPTPSCLQRSWGRASGAWGIPAQCVGSWGSLPAAGPEPPPANLEVPGRGPSWHGVGLGLLHCPLTTALRLQIPQSPGGRGAVAILRTRPPPTLAPSGCCPNPGPVLTCSPAVCARESPLPSWGLFPFRKLGGCLWEWISSLVLSCSSTLLQGLGQQDPQRGCGGALGLPGKVALSWGLSPQSLIVPGKSPTRKKSGPFGSRRSSAIGIENIQEVQEKRESPPAGQKTPDSGHVSQEPKSENSSTQSSPEMPTTKNRAETAAQRAEALKDFSRSSSSASSFASVVEETEGVDGEDTGLESVSSSGTPHKRDSFIYSTWLEDSVSTTSGGSSPGPSRSPHPDAGKLGDPACPEIKIQLEASEQHMPQLGC

SEQ ID NO: 828329 - protein, 815 aa, Homo sapiens
RGAQRCGARTRARAGQEPAGPAEVPPGRGPGRAALRMAQLRPAVPPGRPRRGSLPAGASWQNTDLFEMIEKMQGSRMDEQRCSFPPPLKTEEDYIPYPSVHEVLGREGPFPLILLPQFGGYWIEGTNHEITSIPETEPLQSPTTKVKLECNPTARIYRKHFLGKEHFNYYSLDAALGHLVFSLKYDVIGDQEHLRLLLRTKCRTYHDVIPISCLTEFPNVVQMAKLVCEDVNVDRFYPVLYPKASRLIVTFDEHVISNNFKFGVIYQKLGQTSEEELFSTNEESPAFVEFLEFLGQKVKLQDFKGFRGGLDVTHGQTGTESVYCNFRNKEIMFHVSTKLPYTEGDAQQLQRKRHIGNDIVAVVFQDENTPFVPDMIASNFLHAYVVVQAEGGGPDGPLYKVSVTARDDVPFFGPPLPDPAVFRKGPEFQEFLLTKLINAEYACYKAEKFAKLEERTRAALLETLYEELHIHSQSMMGLGGDEDKMENGSGGGGFFESFKRVIRSRSQSMDAMGLSNKKPNTVSTSHSGSFAPNNPDLAKAAGISLLIPGKSASRFGRRGSAIGIGTVEEVVVRGAAGSGGCLHALFSARSQDGGHIGDVAPLPPGQAPGRAGWSGGSSDGTQHLLWGLSLIVPGKSPTRKKSGPFGSRRSSAIGIENIQEVQEKRESPPAGQKTPDSGHVSQEPKSENSSTQSSPEMPTTKNRAETAAQRAEALKDFSRSSSSASSFASVVEETEGVDGEDTGLESVSSSGTPHKRDSFIYSTWLEDSVSTTSGGSSPGPSRSPHPDAGKLGDPACPEIKIQLEASEQHMPQLGC

SEQ ID NO: 828330 - protein, 996 aa, Homo sapiens
MIEKMQGSRMDEQRCSFPPPLKTEEDYIPYPSVHEVLGREGPFPLILLPQFGGYWIEGTNHEITSIPETEPLQSPTTKVKLECNPTARIYRKHFLGKEHFNYYSLDAALGHLVFSLKYDVIGDQEHLRLLLRTKCRTYHDVIPISCLTEFPNVVQMAKLVCEDVNVDRFYPVLYPKASRLIVTFDEHVISNNFKFGVIYQKLGQTSEEELFSTNEESPAFVEFLEFLGQKVKLQDFKGFRGGLDVTHGQTGTESVYCNFRNKEIMFHVSTKLPYTEGDAQQLQRKRHIGNDIVAVVFQDENTPFVPDMIASNFLHAYVVVQAEGGGPDGPLYKVSVTARDDVPFFGPPLPDPAVFRKGPEFQEFLLTKLINAEYACYKAEKFAKLEERTRAALLETLYEELHIHSQSMMGLGGDEDKMENGSGGGGFFESFKRVIRSRSQSMDAMGLSNKKPNTVSTSHSGSFAPNNPDLAKAAGISLLIPGKSASRFGRRGSAIGIGTVEEVVVRGAAGSGGCLHALFSARSQDGGHIGDVAPLPPGQAPGRAGWSGGSSDGTQHLLWGLVPVPEPVPLTRGFWPCLGPWDPGPVPARIRYPKALTPSRTSPNIAGLHGAPSLSSALTPPPRHEVTWGPTPSCLQRSWGRASGAWGIPAQCVGSWGSLPAAGPEPPPANLEVPGRGPSWHGVGLGLLHCPLTTALRLQIPQSPGGRGAVAILRTRPPPTLAPSGCCPNPGPVLTCSPAVELGRAPCPPGDCFPFVNWEAVSGNGYLLSFFLAHQLCFRAWGSRIPRGDVGGALGLPGKVALSWGLSPQSLIVPGKSPTRKKSGPFGSRRSSAIGIENIQEVQEKRESPPAGQKTPDSGHVSQEPKSENSSTQSSPEMPTTKNRAETAAQRAEALKDFSRSSSSASSFASVVEETEGVDGEDTGLESVSSSGTPHKRDSFIYSTWLEDSVSTTSGGSSPGPSRSPHPDAGKLGDPACPEIKIQLEASEQHMPQLGC

SEQ ID NO: 828331 - protein, 1064 aa, Homo sapiens
RGAQRCGARTRARAGQEPAGPAEVPPGRGPGRAALRMAQLRPAVPPGRPRRGSLPAGASWQNTDLFEMIEKMQGSRMDEQRCSFPPPLKTEEDYIPYPSVHEVLGREGPFPLILLPQFGGYWIEGTNHEITSIPETEPLQSPTTKVKLECNPTARIYRKHFLGKEHFNYYSLDAALGHLVFSLKYDVIGDQEHLRLLLRTKCRTYHDVIPISCLTEFPNVVQMAKLVCEDVNVDRFYPVLYPKASRLIVTFDEHVISNNFKFGVIYQKLGQTSEEELFSTNEESPAFVEFLEFLGQKVKLQDFKGFRGGLDVTHGQTGTESVYCNFRNKEIMFHVSTKLPYTEGDAQQLQRKRHIGNDIVAVVFQDENTPFVPDMIASNFLHAYVVVQAEGGGPDGPLYKVSVTARDDVPFFGPPLPDPAVFRKGPEFQEFLLTKLINAEYACYKAEKFAKLEERTRAALLETLYEELHIHSQSMMGLGGDEDKMENGSGGGGFFESFKRVIRSRSQSMDAMGLSNKKPNTVSTSHSGSFAPNNPDLAKAAGISLLIPGKSASRFGRRGSAIGIGTVEEVVVRGAAGSGGCLHALFSARSQDGGHIGDVAPLPPGQAPGRAGWSGGSSDGTQHLLWGLVPVPEPVPLTRGFWPCLGPWDPGPVPARIRYPKALTPSRTSPNIAGLHGAPSLSSALTPPPRHEVTWGPTPSCLQRSWGRASGAWGIPAQCVGSWGSLPAAGPEPPPANLEVPGRGPSWHGVGLGLLHCPLTTALRLQIPQSPGGRGAVAILRTRPPPTLAPSGCCPNPGPVLTCSPAVCARESPLPSWGLFPFRKLGGCLWEWISSLVLSCSSTLLQGLGQQDPQRGCGGALGLPGKVALSWGLSPQSLIVPGKSPTRKKSGPFGSRRSSAIGIENIQEVQEKRESPPAGQKTPDSGHVSQEPKSENSSTQSSPEMPTTKNRAETAAQRAEALKDFSRSSSSASSFASVVEETEGVDGEDTGLESVSSSGTPHKRDSFIYSTWLEDSVSTTSGGSSPVRWLPPAPLPRPLSITPPRRRQVGGPCVSRDQDPAGSI

SEQ ID NO: 828332 - protein, 1109 aa, Homo sapiens
ISTAVERRKGERRGGVVHVDLLPLCCQEVNTSANRGHPPSDPHSEEADPSSNSDIATEQPYNFWVDKSFTSRRSVWRSDGQNQHFPQALDLSRVNLVPSYTPSLYPKNTDLFEMIEKMQGSRMDEQRCSFPPPLKTEEDYIPYPSVHEVLGREGPFPLILLPQFGGYWIEGTNHEITSIPETEPLQSPTTKVKLECNPTARIYRKHFLGKEHFNYYSLDAALGHLVFSLKYDVIGDQEHLRLLLRTKCRTYHDVIPISCLTEFPNVVQMAKLVCEDVNVDRFYPVLYPKASRLIVTFDEHVISNNFKFGVIYQKLGQTSEEELFSTNEESPAFVEFLEFLGQKVKLQDFKGFRGGLDVTHGQTGTESVYCNFRNKEIMFHVSTKLPYTEGDAQQLQRKRHIGNDIVAVVFQDENTPFVPDMIASNFLHAYVVVQAEGGGPDGPLYKVSVTARDDVPFFGPPLPDPAVFRKGPEFQEFLLTKLINAEYACYKAEKFAKLEERTRAALLETLYEELHIHSQSMMGLGGDEDKMENGSGGGGFFESFKRVIRSRSQSMDAMGLSNKKPNTVSTSHSGSFAPNNPDLAKAAGISLLIPGKSASRFGRRGSAIGIGTVEEVVVRGAAGSGGCLHALFSARSQDGGHIGDVAPLPPGQAPGRAGWSGGSSDGTQHLLWGLVPVPEPVPLTRGFWPCLGPWDPGPVPARIRYPKALTPSRTSPNIAGLHGAPSLSSALTPPPRHEVTWGPTPSCLQRSWGRASGAWGIPAQCVGSWGSLPAAGPEPPPANLEVPGRGPSWHGVGLGLLHCPLTTALRLQIPQSPGGRGAVAILRTRPPPTLAPSGCCPNPGPVLTCSPAVCARESPLPSWGLFPFRKLGGCLWEWISSLVLSCSSTLLQGLGQQDPQRGCGGALGLPGKVALSWGLSPQSLIVPGKSPTRKKSGPFGSRRSSAIGIENIQEVQEKRESPPAGQKTPDSGHVSQEPKSENSSTQSSPEMPTTKNRAETAAQRAEALKDFSRSSSSASSFASVVEETEGVDGEDTGLESVSSSGTPHKRDSFIYSTWLEDSVSTTSGGSSPGPSRSPHPDAGKLGDPACPEIKIQLEASEQHMPQLGC

SEQ ID NO: 828333 - protein, 914 aa, Homo sapiens
MLSLTHSPGPHLPLQEHFNYYSLDAALGHLVFSLKYDVIGDQEHLRLLLRTKCRTYHDVIPISCLTEFPNVVQMAKLVCEDVNVDRFYPVLYPKASRLIVTFDEHVISNNFKFGVIYQKLGQTSEEELFSTNEESPAFVEFLEFLGQKVKLQDFKGFRGGLDVTHGQTGTESVYCNFRNKEIMFHVSTKLPYTEGDAQQLQRKRHIGNDIVAVVFQDENTPFVPDMIASNFLHAYVVVQAEGGGPDGPLYKVSVTARDDVPFFGPPLPDPAVFRKGPEFQEFLLTKLINAEYACYKAEKFAKLEERTRAALLETLYEELHIHSQSMMGLGGDEDKMENGSGGGGFFESFKRVIRSRSQSMDAMGLSNKKPNTVSTSHSGSFAPNNPDLAKAAGISLLIPGKSASRFGRRGSAIGIGTVEEVVVRGAAGSGGCLHALFSARSQDGGHIGDVAPLPPGQAPGRAGWSGGSSDGTQHLLWGLVPVPEPVPLTRGFWPCLGPWDPGPVPARIRYPKALQPSRTSPNIAGLHGAPSLSSALTPPPRHEVTWGPTPSCLQRSWGRASGAWGIPAQCVGSWGSLPAAGPEPPPANLEVPGRGPSWHGVGLGLLHCPLTTALRLQIPQSPGGRGAVAILRTRPPPTLAPSGCCPNPGPVLTCSPAVCARESPLPSWGLFPFRKLGGCLWEWISSLVLSCSSTLLQGLGQQDPQRGCGGALGLPGKVALSWGLSPQSLIVPGKSPTRKKSGPFGSRRSSAIGIENIQEVQEKRESPPAGQKTPDSGHVSQEPKSENSSTQSSPEMPTTKNRAETAAQRAEALKDFSRSSSSASSFASVVEETEGVDGEDTGLESVSSSGTPHKRDSFIYSTWLEDSVSTTSGGSSPGPSRSPHPDAGKLGDPACPEIKIQLEASEQHMPQLGC

SEQ ID NO: 828334 - protein, 852 aa, Homo sapiens
AELQRRPRAPECRAQDAPGPGPWGLVPAAGRLGLGKKPCVRTPAHTHSLRRLIPLPTEATTSEEELFSTNEESPAFVEFLEFLGQKVKLQDFKGFRGGLDVTHGQTGTESVYCNFRNKEIMFHVSTKLPYTEGDAQQLQRKRHIGNDIVAVVFQDENTPFVPDMIASNFLHAYVVVQAEGGGPDGPLYKVSVTARDDVPFFGPPLPDPAVFRKGPEFQEFLLTKLINAEYACYKAEKFAKLEERTRAALLETLYEELHIHSQSMMGLGGDEDKMENGSGGGGFFESFKRVIRSRSQSMDAMGLSNKKPNTVSTSHSGSFAPNNPDLAKAAGISLLIPGKSASRFGRRGSAIGIGTVEEVVVRGAAGSGGCLHALFSARSQDGGHIGDVAPLPPGQAPGRAGWSGGSSDGTQHLLWGLVPVPEPVPLTRGFWPCLGPWDPGPVPARIRYPKALTPSRTSPNIAGLHGAPSLSSALTPPPRHEVTWGPTPSCLQRSWGRASGAWGIPAQCVGSWGSLPAAGPEPPPANLEVPGRGPSWHGVGLGLLHCPLTTALRLQIPQSPGGRGAVAILRTRPPPTLAPSGCCPNPGPVLTCSPAVELGRAPCPPGDCFPFVNWEAVSGNGYLLSFFLAHQLCFRAWGSRIPRGDVGGALGLPGKVALSWGLSPQSLIVPGKSPTRKKSGPFGSRRSSAIGIENIQEVQEKRESPPAGQKTPDSGHVSQEPKSENSSTQSSPEMPTTKNRAETAAQRAEALKDFSRSSSSASSFASVVEETEGVDGEDTGLESVSSSGTPHKRDSFIYSTWLEDSVSTTSGGSSPGPSRSPHPDAGKLGDPACPEIKIQLEASEQHMPQLGC

SEQ ID NO: 828335 - protein, 1367 aa, Homo sapiens
LLHTGSFQGPEFQEFLLTKLINAEYACYKAEKFAKLEERTRAALLETLYEELHIHSQSMMGLGGDEDKMENGSGGGGFFESFKRVIRSRSQSMDAMGLSNKKPNTVSTSHSGSFAPNNPDLAKAAGILSALPLPRPRPLPGGPSALLCLLRPDSNSLCCPAAHMPILGSGFGLATTFHGRGVKCPGQDTAVLTACSLQPLPKLLGPPLLLALYALRCDFLQVSPGTASVSHSLLSIYLFAGDWAAVWAPTVKPWVSGSTYCVSGCGQPTVCQALGCCVDMHSVSIYCGPGPEYLGAPTVCQVLGCCVGINSVSAYCVRSPGLLCENLTVCQKMDCYVSTSCVISPRCQGTPTVCQEVSCCVGTFSVSTSYCVSAAARASVVWLPIVCRESGFCVSISRGSTSCVITDCCPGSGILLLTLRSAGHMDEYGLMAVGLTAVHCLVATPGHCTHCCAPHPSIQPPIHPPTHPSIHPPIHPSSYPPTHPCTHLPIYPSTHPPTHPSTHPSTHPSTHECHPCTHPSQPSIHASIHPSIHPSMCIHPCISIHPSTHPPIHPSIHPSFIDCLLHAKPCAQCCEAMSRGRREFPDLCCPAVTKHTVMRGAGPTSPNPVLSTTPFLSTRVTQPPVGGREGPQGQDQASSTHHGSNRTHFCFVFAQLSLSLCFLLSFYSLSLFFCSLLPSLSPSCGLSALWLSVSPSFLHLSFFAPSPPSLLRSSHPRFFLSAFPWLPSLSLTLPGPVSVSLRPCLSGFPSVPIWCALAGSRVSLSPGNCLSISPPSPLSSVSPCASRLPFPGPISPIASCTVLFLFLSVFLLSLPLLLSVSPSHHLSCSLTLSLSLSLCPRPLLLCQSLLIPGKSASRFGRRGSAIGIGTVEEVVVRGAAGSGGCLHALFSARSQDGGHIGDVAPLPPGQAPGRAGWSGGSSDGTQHLLWGLVPVPEPVPLTRGFWPCLGPWDPGPVPARIRYPKALTPSRTSPNIAGLHGAPSLSSALTPPPRHEVTWGPTPSCLQRSWGRASGAWGIPAQCVGSWGSLPAAGPEPPPANLEVPGRGPSWHGVGLGLLHCPLTTALRLQIPQSPGGRGAVAILRTRPPPTLAPSGCCPNPGPVLTCSPAVCARESPLPSWGLFPFRKLGGCLWEWISSLVLSCSSTLLQGLGQQDPQRGCGGALGLPGKVALSWGLSPQSLIVPGKSPTRKKSGPFGSRRSSAIGIENIQEVQEKRESPPAGQKTPDSGHVSQEPKSENSSTQSSPEMPTTKNRAETAAQRAEALKDFSRSSSSASSFASVVEETEGVDGEDTGLESVSSSGTPHKRDSFIYSTWLEDSVSTTSGGSSPGPSRSPHPDAGKLGDPACPEIKIQLEASEQHMPQLGC

SEQ ID NO: 828336 - protein, 98 aa, Homo sapiens
GSSVIEVGSFASVVEETEGVDGEDTGLESVSSSGTPHKRDSFIYSTWLEDSVSTTSGGSSPGPSRSPHPDAGKLGDPACPEIKIQLEASEQHMPQLGC

SEQ ID NO: 828337 - protein, 843 aa, Homo sapiens
RGAQRCGARTRARAGQEPAGPAEVPPGRGPGRAALRMAQLRPAVPPGRPRRGSLPAGASWQNTDLFEMIEKMQGSRMDEQRCSFPPPLKTEEDYIPYPSVHEVLGREGPFPLILLPQFGGYWIEGTNHEITSIPETEPLQSPTTKVKLECNPTARIYRKHFLGKEHFNYYSLDAALGHLVFSLKYDVIGDQEHLRLLLRTKCRTYHDVIPISCLTEFPNVVQMAKLVCEDVNVDRFYPVLYPKASRLIVTFDEHVISNNFKFGVIYQKLGQTSEEELFSTNEESPAFVEFLEFLGQKVKLQDFKGFRGGLDVTHGQTGTESVYCNFRNKEIMFHVSTKLPYTEGDAQQLQRKRHIGNDIVAVVFQDENTPFVPDMIASNFLHAYVVVQAEGGGPDGPLYKVSVTARDDVPFFGPPLPDPAVFRKGPEFQEFLLTKLINAEYACYKAEKFAKLEERTRAALLETLYEELHIHSQSMMGLGGDEDKMENGSGGGGFFESFKRVIRSRSQSMDAMGLSNKKPNTVSTSHSGSFAPNNPDLAKAAGISLIVPGKSPTRKKSGPFGSRRSSAIGIENIQEVQEKRESPPAGQKTPDSGHVSQEPKSENSSTQSSPEMPTTKNRAETAAQRAEALKDFSRSSSSASSFASVVEETEGVDGEDTGLESVSSSGTPHKRDSFIYSTWLEDSVSTTSGGSSPDAGKLGDPACPEIKIQLEASEQHMPQLGCSRGNPSEGETGQGGTEAQGERCRGKAQGDTPSGLKTTPRRWDLPGHSPRNHGNTKGGIAGTRRNNGQSEQTDSHPPMIGAEPARKQAAKHRDPRKKNKKQHRQKGEKENRQKQREEENDKK

SEQ ID NO: 828338 - protein, 252 aa, Homo sapiens
RGAQRCGARTRARAGQEPAGPAEVPPGRGPGRAALRMAQLRPAVPPGRPRRGSLPAGASWQNTDLFEMIEKMQGSRMDEQRCSFPPPLKTEEDYIPYPSVHEVLGREGPFPLILLPQFGGYWIEGTNHEITSIPETEPLQSPTTKVKLECNPTARIYRKHFLGKEHFNYYSLDAALGHLVFSLKYDVIGDQEHLRLLLRTKCRTYHDVIPISCLTEFPNVVQMAKLVCEDVNVDRFYPVLYPKVWLDLGTAH

SEQ ID NO: 828339 - protein, 735 aa, Homo sapiens
QSCSGGRGHQSAEPRTPPAQALGVDKSFTSRRSVWRSDGQNQHFPQALDLSRVNLVPSYTPSLYPKNTDLFEMIEKMQGSRMDEQRCSFPPPLKTEEDYIPYPSVHEVLGREGPFPLILLPQFGGYWIEGTNHEITSIPETEPLQSPTTKVKLECNPTARIYRKHFLGKEHFNYYSLDAALGHLVFSLKYDVIGDQEHLRLLLRTKCRTYHDVIPISCLTEFPNVVQMAKLVCEDVNVDRFYPVLYPKASRLIVTFDEHVISNNFKFGVIYQKLGQTSEEELFSTNEESPAFVEFLEFLGQKVKLQDFKGFRGGLDVTHGQTGTESVYCNFRNKEIMFHVSTKLPYTEGDAQQLQRKRHIGNDIVAVVFQDENTPFVPDMIASNFLHAYVVVQAEGGGPDGPLYKVSVTARDDVPFFGPPLPDPAVFRKGPEFQEFLLTKLINAEYACYKAEKFAKLEERTRAALLETLYEELHIHSQSMMGLGGDEDKMENGSGGGGFFESFKRVIRSRSQSMDAMGLSNKKPNTVSTSHSGSFAPNNPDLAKAAGISLIVPGKSPTRKKSGPFGSRRSSAIGIENIQEVQEKRESPPAGQKTPDSGHVSQEPKSENSSTQSSPEMPTTKNRAETAAQRAEALKDFSRSSSSASSFASVVEETEGVDGEDTGLESVSSSGTPHKRDSFIYSTWLEDSVSTTSGGSSPGPSRSPHPDAGKLGDPACPEIKIQLEASEQHMPQLGC

SEQ ID NO: 828340 - protein, 149 aa, Homo sapiens
SRAAAAAAGTRVPSPGRPRPRPLGFGASCGAPGLGEETLCTHTCTHTQSPEVNTSANRGHPPSDPHSEEADPSSNSDIATEQPYNFWVDKSFTSRRSVWRSDGQNQHFPQALDLSRVNLVPSYTPSLYPKLFHLLEPASHLYNGDDICT

SEQ ID NO: 828341 - protein, 1104 aa, Homo sapiens
AELQRRPRAPECRAQDAPGPGPWVNTSANRGHPPSDPHSEEADPSSNSDIATEQPYNFWVDKSFTSRRSVWRSDGQNQHFPQALDLSRVNLVPSYTPSLYPKNTDLFEMIEKMQGSRMDEQRCSFPPPLKTEEDYIPYPSVHEVLGREGPFPLILLPQFGGYWIEGTNHEITSIPETEPLQSPTTKVKLECNPTARIYRKHFLGKEHFNYYSLDAALGHLVFSLKYDVIGDQEHLRLLLRTKCRTYHDVIPISCLTEFPNVVQMAKLVCEDVNVDRFYPVLYPKASRLIVTFDEHVISNNFKFGVIYQKLGQTSEEELFSTNEESPAFVEFLEFLGQKVKLQDFKGFRGGLDVTHGQTGTESVYCNFRNKEIMFHVSTKLPYTEGDAQQLQRKRHIGNDIVAVVFQDENTPFVPDMIASNFLHAYVVVQAEGGGPDGPLYKVSVTARDDVPFFGPPLPDPAVFRKGPEFQEFLLTKLINAEYACYKAEKFAKLEERTRAALLETLYEELHIHSQSMMGLGGDEDKMENGSGGGGFFESFKRVIRSRSQSMDAMGLSNKKPNTVSTSHSGSFAPNNPDLAKAAGISLLIPGKSASRFGRRGSAIGIGTVEEVVVRGAAGSGGCLHALFSARSQDGGHIGDVAPLPPGQAPGRAGWSGGSSDGTQHLLWGLVPVPEPVPLTRGFWPCLGPWDPGPVPARIRYPKALTPSRTSPNIAGLHGAPSLSSALTPPPRHEVTWGPTPSCLQRSWGRASGAWGIPAQCVGSWGSLPAAGPEPPPANLEVPGRGPSWHGVGLGLLHCPLTTALRLQIPQSPGGRGAVAILRTRPPPTLAPSGCCPNPGPVLTCSPAVELGRAPCPPGDCFPFVNWEAVSGNGYLLSFFLAHQLCFRAWGSRIPRGDVGGALGLPGKVALSWGLSPQSLIVPGKSPTRKKSGPFGSRRSSAIGIENIQEVQEKRESPPAGQKTPDSGHVSQEPKSENSSTQSSPEMPTTKNRAETAAQRAEALKDFSRSSSSASSFASVVEETEGVDGEDTGLESVSSSGTPHKRDSFIYSTWLEDSVSTTSGGSSPGPSRSPHPDAGKLGDPACPEIKIQLEASEQHMPQLGC

SEQ ID NO: 828342 - protein, 756 aa, Homo sapiens
RGAQRCGARTRARAGQEPAGPAEVPPGRGPGRAALRMAQLRPAVPPGRPRRGSLPAGASWQNTDLFEMIEKMQGSRMDEQRCSFPPPLKTEEDYIPYPSVHEVLGREGPFPLILLPQFGGYWIEGTNHEITSIPETEPLQSPTTKVKLECNPTARIYRKHFLGKEHFNYYSLDAALGHLVFSLKYDVIGDQEHLRLLLRTKCRTYHDVIPISCLTEFPNVVQMAKLVCEDVNVDRFYPVLYPKASRLIVTFDEHVISNNFKFGVIYQKLGQTSEEELFSTNEESPAFVEFLEFLGQKVKLQDFKGFRGGLDVTHGQTGTESVYCNFRNKEIMFHVSTKLPYTEGDAQQLQRKRHIGNDIVAVVFQDENTPFVPDMIASNFLHAYVVVQAEGGGPDGPLYKVSVTARDDVPFFGPPLPDPAVFRKGPEFQEFLLTKLINAEYACYKAEKFAKLEERTRAALLETLYEELHIHSQSMMGLGGDEDKMENGSGGGGFFESFKRVIRSRSQSMDAMGLSNKKPNTVSTSHSGSFAPNNPDLAKAAGISLLIPGKSASRFGRRGSAIGIGTVEESLIVPGKSPTRKKSGPFGSRRSSAIGIENIQEVQEKRESPPAGQKTPDSGHVSQEPKSENSSTQSSPEMPTTKNRAETAAQRAEALKDFSRSSSSASSFASVVEETEGVDGEDTGLESVSSSGTPHKRDSFIYSTWLEDSVSTTSGGSSPGPSRSPHPDAGKLGDPACPEIKIQLEASEQHMPQLGC

SEQ ID NO: 828343 - protein, 1065 aa, Homo sapiens
GGGGTMSGRKRSFTFGAYGGVDKSFTSRRSVWRSDGQNQHFPQALDLSRVNLVPSYTPSLYPKNTDLFEMIEKMQGSRMDEQRCSFPPPLKTEEDYIPYPSVHEVLGREGPFPLILLPQFGGYWIEGTNHEITSIPETEPLQSPTTKVKLECNPTARIYRKHFLGKEHFNYYSLDAALGHLVFSLKYDVIGDQEHLRLLLRTKCRTYHDVIPISCLTEFPNVVQMAKLVCEDVNVDRFYPVLYPKASRLIVTFDEHVISNNFKFGVIYQKLGQTSEEELFSTNEESPAFVEFLEFLGQKVKLQDFKGFRGGLDVTHGQTGTESVYCNFRNKEIMFHVSTKLPYTEGDAQQLQRKRHIGNDIVAVVFQDENTPFVPDMIASNFLHAYVVVQAEGGGPDGPLYKVSVTARDDVPFFGPPLPDPAVFRKGPEFQEFLLTKLINAEYACYKAEKFAKLEERTRAALLETLYEELHIHSQSMMGLGGDEDKMENGSGGGGFFESFKRVIRSRSQSMDAMGLSNKKPNTVSTSHSGSFAPNNPDLAKAAGISLLIPGKSASRFGRRGSAIGIGTVEEVVVRGAAGSGGCLHALFSARSQDGGHIGDVAPLPPGQAPGRAGWSGGSSDGTQHLLWGLVPVPEPVPLTRGFWPCLGPWDPGPVPARIRYPKALTPSRTSPNIAGLHGAPSLSSALTPPPRHEVTWGPTPSCLQRSWGRASGAWGIPAQCVGSWGSLPAAGPEPPPANLEVPGRGPSWHGVGLGLLHCPLTTALRLQIPQSPGGRGAVAILRTRPPPTLAPSGCCPNPGPVLTCSPAVELGRAPCPPGDCFPFVNWEAVSGNGYLLSFFLAHQLCFRAWGSRIPRGDVGGALGLPGKVALSWGLSPQSLIVPGKSPTRKKSGPFGSRRSSAIGIENIQEVQEKRESPPAGQKTPDSGHVSQEPKSENSSTQSSPEMPTTKNRAETAAQRAEALKDFSRSSSSASSFASVVEETEGVDGEDTGLESVSSSGTPHKRDSFIYSTWLEDSVSTTSGGSSPGPSRSPHPDAGKLGDPACPEIKIQLEASEQHMPQLGC

SEQ ID NO: 828344 - protein, 1055 aa, Homo sapiens
RGAQRCGARTRARAGQEPAGPAEVPPGRGPGRAALRMAQLRPAVPPGRPRRGSLPAGASWQNTDLFEMIEKMQGSRMDEQRCSFPPPLKTEEDYIPYPSVHEVLGREGPFPLILLPQFGGYWIEGTNHEITSIPETEPLQSPTTKVKLECNPTARIYRKHFLGKEHFNYYSLDAALGHLVFSLKYDVIGDQEHLRLLLRTKCRTYHDVIPISCLTEFPNVVQMAKLVCEDVNVDRFYPVLYPKASRLIVTFDEHVISNNFKFGVIYQKLGQTSEEELFSTNEESPAFVEFLEFLGQKVKLQDFKGFRGGLDVTHGQTGTESVYCNFRNKEIMFHVSTKLPYTEGDAQQLQRKRHIGNDIVAVVFQDENTPFVPDMIASNFLHAYVVVQAEGGGPDGPLYKVSVTARDDVPFFGPPLPDPAVFRKGPEFQEFLLTKLINAEYACYKAEKFAKLEERTRAALLETLYEELHIHSQSMMGLGGDEDKMENGSGGGGFFESFKRVIRSRSQSMDAMGLSNKKPNTVSTSHSGSFAPNNPDLAKAAGISLLIPGKSASRFGRRGSAIGIGTVEEVVVRGAAGSGGCLHALFSARSQDGGHIGDVAPLPPGQAPGRAGWSGGSSDGTQHLLWGLVPVPEPVPLTRGFWPCLGPWDPGPVPARIRYPKALTPSRTSPNIAGLHGAPSLSSALTPPPRHEVTWGPTPSCLQRSWGRASGAWGIPAQCVGSWGSLPAAGPEPPPANLEVPGRGPSWHGVGLGLLHCPLTTALRLQIPQSPGGRGAVAILRTRPPPTLAPSGCCPNPGPVLTCSPAVCARESPLPSWGLFPFRKLGGCLWEWISSLVLSCSSTLLQGLGQQDPQRGCGGALGLPGKVALSWGLSPQSLIVPGKSPTRKKSGPFGSRRSSAIGIENIQEVQEKRESPPAGQKTPDSGHVSQEPKSENSSTQSSPEMPTTKNRAETAAQRAEALKDFSRSSSSASSFASVVEETEGVDGEDTGLESVSSSGTPHKRDSFIYSTWLEDSVSTTSGGSSPDAGKLGDPACPEIKIQLEASEQHMPQLGC

SEQ ID NO: 828345 - protein, 1006 aa, Homo sapiens
RGAQRCGARTRARAGQEPAGPAEVPPGRGPGRAALRMAQLRPAVPPGRPRRGSLPAGASWQNTDLFEMIEKMQGSRMDEQRCSFPPPLKTEEDYIPYPSVHEVLGREGPFPLILLPQFGGYWIEGTNHEITSIPETEPLQSPTTKVKLECNPTARIYRKHFLGKEHFNYYSLDAALGHLVFSLKYDVIGDQEHLRLLLRTKCRTYHDVIPIFLPTSEEELFSTNEESPAFVEFLEFLGQKVKLQDFKGFRGGLDVTHGQTGTESVYCNFRNKEIMFHVSTKLPYTEGDAQQLQRKRHIGNDIVAVVFQDENTPFVPDMIASNFLHAYVVVQAEGGGPDGPLYKVSVTARDDVPFFGPPLPDPAVFRKGPEFQEFLLTKLINAEYACYKAEKFAKLEERTRAALLETLYEELHIHSQSMMGLGGDEDKMENGSGGGGFFESFKRVIRSRSQSMDAMGLSNKKPNTVSTSHSGSFAPNNPDLAKAAGISLLIPGKSASRFGRRGSAIGIGTVEEVVVRGAAGSGGCLHALFSARSQDGGHIGDVAPLPPGQAPGRAGWSGGSSDGTQHLLWGLVPVPEPVPLTRGFWPCLGPWDPGPVPARIRYPKALTPSRTSPNIAGLHGAPSLSSALTPPPRHEVTWGPTPSCLQRSWGRASGAWGIPAQCVGSWGSLPAAGPEPPPANLEVPGRGPSWHGVGLGLLHCPLTTALRLQIPQSPGGRGAVAILRTRPPPTLAPSGCCPNPGPVLTCSPAVCARESPLPSWGLFPFRKLGGCLWEWISSLVLSCSSTLLQGLGQQDPQRGCGGALGLPGKVALSWGLSPQSLIVPGKSPTRKKSGPFGSRRSSAIGIENIQEVQEKRESPPAGQKTPDSGHVSQEPKSENSSTQSSPEMPTTKNRAETAAQRAEALKDFSRSSSSASSFASVVEETEGVDGEDTGLESVSSSGTPHKRDSFIYSTWLEDSVSTTSGGSSPGPSRSPHPDAGKLGDPACPEIKIQLEASEQHMPQLGC

SEQ ID NO: 828346 - protein, 823 aa, Homo sapiens
MIPVCVGVWFWVGLVRGSCFSPVWFSCGSVLTSEEELFSTNEESPAFVEFLEFLGQKVKLQDFKGFRGGLDVTHGQTGTESVYCNFRNKEIMFHVSTKLPYTEGDAQQLQRKRHIGNDIVAVVFQDENTPFVPDMIASNFLHAYVVVQAEGGGPDGPLYKVSVTARDDVPFFGPPLPDPAVFRKGPEFQEFLLTKLINAEYACYKAEKFAKLEERTRAALLETLYEELHIHSQSMMGLGGDEDKMENGSGGGGFFESFKRVIRSRSQSMDAMGLSNKKPNTVSTSHSGSFAPNNPDLAKAAGISLLIPGKSASRFGRRGSAIGIGTVEEVVVRGAAGSGGCLHALFSARSQDGGHIGDVAPLPPGQAPGRAGWSGGSSDGTQHLLWGLVPVPEPVPLTRGFWPCLGPWDPGPVPARIRYPKALTPSRTSPNIAGLHGAPSLSSALTPPPRHEVTWGPTPSCLQRSWGRASGAWGIPAQCVGSWGSLPAAGPEPPPANLEVPGRGPSWHGVGLGLLHCPLTTALRLQIPQSPGGRGAVAILRTRPPPTLAPSGCCPNPGPVLTCSPAVELGRAPCPPGDCFPFVNWEAVSGNGYLLSFFLAHQLCFRAWGSRIPRGDVGGALGLPGKVALSWGLSPQSLIVPGKSPTRKKSGPFGSRRSSAIGIENIQEVQEKRESPPAGQKTPDSGHVSQEPKSENSSTQSSPEMPTTKNRAETAAQRAEALKDFSRSSSSASSFASVVEETEGVDGEDTGLESVSSSGTPHKRDSFIYSTWLEDSVSTTSGGSSPGPSRSPHPDAGKLGDPACPEIKIQLEASEQHMPQLGC

SEQ ID NO: 828347 - protein, 364 aa, Homo sapiens
KQAVTGRGFEGGLAQEGLGVDTGYWGTVCGRAETAAQRAEALKDFSRSSSSASSFASVVEETEGVDGEDTGLESVSSSGTPHKRDSFIYSTWLEDSVSTTSGGSSPGTRTRQLPHKAGLPWGRRGTGLGTSSHAPCSGCDVTAPDLEDSGQVIVQPRVAGWIGGLVSSGRVSEDNGEMARKKVKGGVGAHWCRPPTYAPVSLVPPRGQCEVAPSCPPPQAPLDHPTQTPASWGTLRVPRSRSSWKHLSSTCPSWAVSRATPSEGETEQMRPQKHKGKVPCQAQADETSALKTNTSPWAAPCLPTLPMAHPSGLSLQGRAVQTWDQGSCWHRPHPQPGGLGWGRDCSVEAGLGVWLAPSLGLHHP

SEQ ID NO: 828348 - protein, 555 aa, Homo sapiens
RGAQRCGARTRARAGQEPAGPAEVPPGRGPGRAALRMAQLRPAVPPGRPRRGSLPAGASWQNTDLFEMIEKMQGSRMDEQRCSFPPPLKTEEDYIPYPSVHEVLGREGPFPLILLPQFGGYWIEGTNHEITSIPETEPLQSPTTKVKLECNPTARIYRKHFLGKEHFNYYSLDAALGHLVFSLKYDVIGDQEHLRLLLRTKCRTYHDVIPISCLTEFPNVVQMAKLVCEDVNVDRFYPVLYPKASRLIVTFDEHVISNNFKFGVIYQKLGQTSEEELFSTNEESPAFVEFLEFLGQKVKLQDFKGFRGGLDVTHGQTGTESVYCNFRNKEIMFHVSTKLPYTEGDAQQLQRKRHIGNDIVAVVFQDENTPFVPDMIASNFLHAYVVVQAEGGGPDGPLYKVSVTARDDVPFFGPPLPDPAVFRKGPEFQEFLLTKLINAEYACYKAEKFAKLEERTRAALLETLYEELHIHSQSMMGLGGDEDKMENGSGGGGFFESFKAGHPEPQPVHGCHGAEQQEAQHRVHQPQRELRAQQPRPGQGGWNTAGSPCVSGHTF

SEQ ID NO: 828349 - protein, 60 aa, Homo sapiens
MTAVGAERLTSVRAWLSCCGACVCVFLFLCLCVFPLRVHVHVWGGECRVDIAVFVSKHMI

SEQ ID NO: 828350 - protein, 196 aa, Homo sapiens
MAAIRKKLVVVGDGACGKTCLLIVFSKDEFPEVYVPTVFENYVADIEVDGKQVELALWDTAGQEDYDRLRPLSYPDTDVILMCFSVDSPDSLENIPEKWVPEVKHFCPNVPIILVANKKDLRSDEHVRTELARMKQEPVRTDDGRAMAVRIQAYDYLECSAKTKEGVREVFETATRAALQKRYGSQNGCINCCKVL

SEQ ID NO: 828351 - protein, 196 aa, Homo sapiens; identical to SEQ ID NO: 828350

SEQ ID NO: 828352 - protein, 196 aa, Homo sapiens; identical to SEQ ID NO: 828350

SEQ ID NO: 828353 - protein, 196 aa, Homo sapiens; identical to SEQ ID NO: 828350

SEQ ID NO: 828354 - protein, 196 aa, Homo sapiens; identical to SEQ ID NO: 828350

SEQ ID NO: 828355 - protein, 196 aa, Homo sapiens; identical to SEQ ID NO: 828350

SEQ ID NO: 828356 - protein, 196 aa, Homo sapiens; identical to SEQ ID NO: 828350

SEQ ID NO: 828357 - protein, 196 aa, Homo sapiens; identical to SEQ ID NO: 828350

SEQ ID NO: 828358 - protein, 205 aa, Homo sapiens
MAAIRKKLVVVGDGACGKTCLLIVFSKDEFPEVYVPTVFENYVADIEVDGKQVELALWDTAGQEDYDRLRPLSYPDTDVILMCFSVDSPDSLENIPEKWVPEVKHFCPNVPIILVANKKDLRRSALPRPRKACARSSRRPRAPRCRSATAPRTAASTAARCYEGRARRACPCRHGSPSWTSPPRARRRGDPCPTRTPPACLASVC

SEQ ID NO: 828359 - protein, 208 aa, Homo sapiens
MAAIRKKLVVVGDGACGKTCLLIVFSKDEFPEVYVPTVFENYVADIEVDGKQVELALWDTAGQEDYDRLRPLSYPDTDVILMCFSVDSPDSLENIPEKWVPEVKQNPCARMTAAPWPCASKPTTTSSALPRPRKACARSSRRPRAPRCRSATAPRTAASTAARCYEGRARRACPCRHGSPSWTSPPRARRRGDPCPTRTPPACLASVC

SEQ ID NO: 828360 - protein, 223 aa, Homo sapiens
MAAIRKKLVVVGDGACGKTCLLIVFSKDEFPEVYVPTVFENYVADIEVDGKQVELALWDTAGQEDYDRLRPLSYPDTDVILMCFSVDSPDSLENIPGVLCQDQGRRARGLRDGHARRAAEALRLPERLHQLLQGAMRAAPVAPAPAGTAPPPGPVPREPGEGETRVPQGPHRPAWHLSADASGLRQDLAWAPGAPIPVSVCVQLCCTGLGSPLSAKGPLSMLF

SEQ ID NO: 828361 - protein, 134 aa, Homo sapiens
MAAIRKKLVVVGDGACGKTCLLIVFSKDEFPEVYVPTVFENYVADIEVDGKQVELALWDTAGQEDYDRLRPLSYPDTDVILMCFSVDSPDSLENIPEKWVPEVKHFCPNVPIILVANKKDLRRSSCVAQAWAPH

SEQ ID NO: 828362 - protein, 196 aa, Homo sapiens; identical to SEQ ID NO: 828350

SEQ ID NO: 828363 - protein, 196 aa, Homo sapiens; identical to SEQ ID NO: 828350

SEQ ID NO: 828364 - protein, 196 aa, Homo sapiens; identical to SEQ ID NO: 828350

SEQ ID NO: 828365 - protein, 196 aa, Homo sapiens; identical to SEQ ID NO: 828350

SEQ ID NO: 828366 - protein, 229 aa, Homo sapiens
MAAIRKKLVVVGDGACGKTCLLIVFSKDEFPEVYVPTVFENYVADIEVDGKQVELALWDTAGQEDYDRLRPLSYPDTDVILMCFSVDSPDSLENIPEKWVPEVKHFCPNVPIILVANKKDLRSDEHVRTELARMKQEPVRTDDGRAMAVRIQAYDYLECSAKTKEGVREVFETATRAALQKRYGSQNGCINDLGRTQLQHSLSCGPARCEPSTSYRREEGGCAVGLFLP

SEQ ID NO: 828367 - protein, 153 aa, Homo sapiens
MAAIRKKLVVVGDGACGKTCLLIVFSKDEFPEVYVPTVFENYVADIEVDGKQVELALWDTAGQEDYDRLRPLSYPDTDVILMCFSVDSPDSLENIPEKWVPEVKHFCPNVPIILVANKKDLRRPAANPPPATGGRREDALWGCFCHKRTLCLS

SEQ ID NO: 828368 - protein, 196 aa, Homo sapiens; identical to SEQ ID NO: 828350

SEQ ID NO: 828369 - protein, 196 aa, Homo sapiens; identical to SEQ ID NO: 828350

SEQ ID NO: 828370 - protein, 196 aa, Homo sapiens; identical to SEQ ID NO: 828350

SEQ ID NO: 828371 - protein, 115 aa, Homo sapiens
MCFSVDSPDSLENIPEKWVPEVKHFCPNVPIILVANKKDLRSDEHVRTELARMKQEPVRTDDGRAMAVRIQAYDYLECSAKTKEGVREVFETATRAALQKRYGSQNGCINCCKVL

SEQ ID NO: 828372 - protein, 127 aa, Homo sapiens
MRILMLFLLCFSCCDIPYSLDNISLYNEKWVPEVKHFCPNVPIILVANKKDLRSDEHVRTELARMKQEPVRTDDGRAMAVRIQAYDYLECSAKTKEGVREVFETATRAALQKRYGSQNGCINCCKVL

SEQ ID NO: 828373 - protein, 140 aa, Homo sapiens
RRADLPPQSGWSCCLVCSARPGETRERARPSPPPESAARARVTHKAADPRPGVSRATTATSGSLISLVCNIDPGYCGRGGLLGRMGGCYINIDIILFSELRWCYLRVVMGERSGPGWARLPPKHEQDLTIFPTPGEDICN

SEQ ID NO: 828374 - protein, 196 aa, Homo sapiens; identical to SEQ ID NO: 828350

SEQ ID NO: 828375 - protein, 150 aa, Homo sapiens
MAAIRKKLVVVGDGACGKTCLLIVFSKDEFPEVYVPTVFENYVADIEVDGKQVELALWDTAGQEDYDRLRPLSYPDTDVILMCFSVDSPDSLENIPEKWVPEVKHFCPNVPIILVANKKDLRSCGVVFAISELCACPRSENCSVQETDVI

SEQ ID NO: 828376 - protein, 196 aa, Homo sapiens; identical to SEQ ID NO: 828350

SEQ ID NO: 828377 - protein, 196 aa, Homo sapiens; identical to SEQ ID NO: 828350

SEQ ID NO: 828378 - protein, 115 aa, Homo sapiens; identical to SEQ ID NO: 828371

SEQ ID NO: 828379 - protein, 115 aa, Homo sapiens; identical to SEQ ID NO: 828371

SEQ ID NO: 828380 - protein, 703 aa, Homo sapiens
MEFVSGYRDEFLDFTALLFGWFRKFVAERGAVGTSLEGRCRQLEAQIRRLPQDPALWVLHVLPNHSVGISLGQGAEPGPGPGLGTAWLLGDNPPLHLRDLSPYISFVSLEDGEEGEEEEEEDEEEEKREDGGAGSTEKVEPEEDRELAPTSRESPQETNPPGESEEAAREAGGGKDGCREDRVENETRPQKRKGQRSEAAPLHVSCLLLVTDEHGTILGIDLLVDGAQGTASWGSGTKDLAPWAYALLCHSMACPMGSGDPRKPRQLTVGDARLHRELESLVPRLGVKLAKTPMRTWGPRPGFTFASLRARTCHVCHRHSFEAKLTPCPQCSAVLYCGEACLRADWQRCPDDVSHRFWCPRLAAFMERAGELATLPFTYTAEVTSETFNKEAFLASRGLTRGYWTQLSMLIPGPGFSRHPRGNTPSLSLLRGGDPYQLLQGDGTALMPPVPPHPPRGVFVPELNIQNKQSLKIHVVEAGKEFDLVMVFWELLVLLPHVALELQFVGDGLPPESDEQHFTLQRDSLEVSVRPGSGISARPSSGTKEKGGRRDLQIKVSARPYHLFQGPKPDLVIGFNSGFALKDTWLRSLPRLQSLRVPAFFTESSEYSCVMDGQTMAVATGGGTSPPQPNPFRSPFRLRAADNCMSWYCNAFIFHLVYKPAQGSGARPAPGPPPPSPTPSAPPAPTRRRRGEKKPGRGARRRK

SEQ ID NO: 828381 - protein, 742 aa, Homo sapiens
MEFVSGYRDEFLDFTALLFGWFRKFVAERGAVGTSLEGRCRQLEAQIRRLPQDPALWVLHVLPNHSVGISLGQGAEPGPGPGLGTAWLLGDNPPLHLRDLSPYISFVSLEDGEEGEEEEEEDEEEEKREDGGAGSTEKVEPEEDRELAPTSRESPQETNPPGESEEAAREAGGGKDGCREDRVENETRPQKRKGQRSEAAPLHVSCLLLVTDEHGTILGIDLLVDGAQGTASWGSGTKDLAPWAYALLCHSMACPMGSGDPRKPRQLTVGDARLHRELESLVPRLGVKLAKTPMRTWGPRPGFTFASLRARTCHVCHRHSFEAKLTPCPQCSAVLYCGEACLRADWQRCPDDVSHRFWCPRLAAFMERAGELATLPFTYTAEVTSETFNKEAFLASRGLTRGYWTQLSMLIPGPGFSRHPRGNTPSLSLLRGGDPYQLLQGDGTALMPPVPPHPPRGVFGSWQDYYTWRGLSLDSPIAVLLTYPLTVYYVITHLVPQSFPELNIQNKQSLKIHVVEAGKEFDLVMVFWELLVLLPHVALELQFVGDGLPPESDEQHFTLQRDSLEVSVRPGSGISARPSSGTKEKGGRRDLQIKVSARPYHLFQGPKPDLVIGFNSGFALKDTWLRSLPRLQSLRVPAFFTESSEYSCVMDGQTMAVATGGGTSPPQPNPFRSPFRLRAADNCMSWYCNAFIFHLVYKPAQGSGARPAPGPPPPSPTPSAPPAPTRRRRGEKKPGRGARRRK

SEQ ID NO: 828382 - protein, 316 aa, Homo sapiens
PSFILSGDPYQLLQGDGTALMPPVPPHPPRGVFGSWQDYYTWRGLSLDSPIAVLLTYPLTVYYVITHLVPQSFPELNIQNKQSLKIHVVEAGKEFDLVMVFWELLVLLPHVALELQFVGDGLPPESDEQHFTLQRDSLEVSVRPGSGISARPSSGTKEKGGRRDLQIKVSARPYHLFQGPKPDLVIGFNSGFALKDTWLRSLPRLQSLRVPAFFTESSEYSCVMDGQTMAVATGGGTSPPQPNPFRSPFRLRAADNCMSWYCNAFIFHLVYKPAQGSGARPAPGPPPPSPTPSAPPAPTRRRRGEKKPGRGARRRK

SEQ ID NO: 828383 - protein, 766 aa, Homo sapiens
VSIPLRVSIPLRVSIRFVCPSPFVMEFVSGYRDEFLDFTALLFGWFRKFVAERGAVGTSLEGRCRQLEAQIRRLPQDPALWVLHVLPNHSVGISLGQGAEPGPGPGLGTAWLLGDNPPLHLRDLSPYISFVSLEDGEEGEEEEEEDEEEEKREDGGAGSTEKVEPEEDRELAPTSRESPQETNPPGESEEAAREAGGGKDGCREDRVENETRPQKRKGQRSEAAPLHVSCLLLVTDEHGTILGIDLLVDGAQGTASWGSGTKDLAPWAYALLCHSMACPMGSGDPRKPRQLTVGDARLHRELESLVPRLGVKLAKTPMRTWGPRPGFTFASLRARTCHVCHRHSFEAKLTPCPQCSAVLYCGEACLRADWQRCPDDVSHRFWCPRLAAFMERAGELATLPFTYTAEVTSETFNKEAFLASRGLTRGYWTQLSMLIPGPGFSRHPRGNTPSLSLLRGGDPYQLLQGDGTALMPPVPPHPPRGVFGSWQDYYTWRGLSLDSPIAVLLTYPLTVYYVITHLVPQSFPELNIQNKQSLKIHVVEAGKEFDLVMVFWELLVLLPHVALELQFVGDGLPPESDEQHFTLQRDSLEVSVRPGSGISARPSSGTKEKGGRRDLQIKVSARPYHLFQGPKPDLVIGFNSGFALKDTWLRSLPRLQSLRVPAFFTESSEYSCVMDGQTMAVATGGGTSPPQPNPFRSPFRLRAADNCMSWYCNAFIFHLVYKPAQGSGARPAPGPPPPSPTPSAPPAPTRRRRGEKKPGRGARRRK

SEQ ID NO: 828384 - protein, 887 aa, Homo sapiens
MPILLFLIDTSASMNQRSHLGTTYLDTAKGAVETFMKLRARDPASRGDRYMLVTFEEPPYAIKAGWKENHATFMNELKNLQAEGLTTLGQSLRTAFDLLNLNRLVTGIDNYGQGRNPFFLEPAIIITITDGSKLTTTSGVQDELHLPLNSPLPGSELTKEPFRWDQRLFALVLRLPGTMSVESEQLTGVPLDDSAITPMCEVTGGRSYSVCSPRMLNQCLESLVQKVQSGVVINFEKAGPDPSPVEDGQPDISRPFGSQPWHSCHKLIYVRPNPKTGVPIGHWPVPESFWPDQNSPTLPPRTSHPVVKFSCTDCEPMVIDKLPFDKYELEPSPLTQFILERKSPQTCWQVYVSNSAKYSELGHPFGYLKASTALNCVNLFVMPYNYPVLLPLLDDLFKVHKAKPTLKWRQSFESYLKTMPPYYLGPLKKAVRMMGAPNLIADSMEYGLSYSVISYLKKLSQQAKIESDRVIGSVGKKVVQETGIKVRSRSHGLSMAYRKDFQQLLQGISEDVPHRLLDLNMKEYTGFQVALLNKDLKPQTFRNAYDIPRRNLLDHLTRMRSNLLKSTRRFLKGQDEDQVHSVPIAQMGNYQEYLKQVPSPLRELDPDQPRRLHTFGNPFKLDKKGMMIDEADEFVAGPQNKHKRPGEPNMQGIPKRRRCMSPLLRGRQQNPVVNNHIGGKGPPAPTTQAQPDLIKPLPLHKISETTNDSIIHDVVENHVADQLSSDITPNAMDTEFSASSPASLLERPTNHMEALGHDHLGTNDLTVGGFLENHEEPRDKEQCAEENIPASSLNKGKKLMHCRSHEEVNTELKAQIMKEIRKPGRKYERIFTLLKHVQGSLQTRLIFLQNVIKEASRFKKRMLIEQLENFLDEIHRRANQINHINSN

SEQ ID NO: 828385 - protein, 310 aa, Homo sapiens
RAGAASRVRPGPGLRPRAVCGERSVCGGRRGGVAAACAVLWGRRGRWAPLLRLVTSPLCFPVARPVPPPVPQLRARDPASRGDRYMLVTFEEPPYAIKAGWKENHATFMNELKNLQAEGLTTLGQSLRTAFDLLNLNRLVTGIDNYGQGRNPFFLEPAIIITITDGSKLTTTSGVQDELHLPLNSPLPGSELTKEPFRWDQRLFALVLRLPGTMSVESEQLTGVPLDDSAITPMCEVTGGVHIPGGLHRMLNRSGDPGGKSPHGGDKLWKNRANLPGENGRQYKGLETTGNGDTILTTSKGHKTGAQLEK

SEQ ID NO: 828386 - protein, 186 aa, Homo sapiens
RAGAASRVRPGPGLRPRAVCGERSVCGGRRGGVAAACAVLWGRRGRWAPLLRLVTSPLCFPVARPVPPPVPQLRARDPASRGDRYMLVTFEEPPYAIKAGWKENHATFMNELKNLQAEGLTTLGQSLRTAFDLLNLNRLVTGIDNYGQGRNPFFLEPAIIITITDGSKLTTTSGVQDEVLGTHRWN

SEQ ID NO: 828387 - protein, 887 aa, Homo sapiens; identical to SEQ ID NO: 828384

SEQ ID NO: 828388 - protein, 887 aa, Homo sapiens; identical to SEQ ID NO: 828384

SEQ ID NO: 828389 - protein, 887 aa, Homo sapiens; identical to SEQ ID NO: 828384

SEQ ID NO: 828390 - protein, 709 aa, Homo sapiens
MSVESEQLTGVPLDDSAITPMCEVTGGRSYSVCSPRMLNQCLESLVQKVQSGVVINFEKAGPDPSPVEDGQPDISRPFGSQPWHSCHKLIYVRPNPKTGVPIGHWPVPESFWPDQNSPTLPPRTSHPVVKFSCTDCEPMVIDKLPFDKYELEPSPLTQFILERKSPQTCWQVYVSNSAKYSELGHPFGYLKASTALNCVNLFVMPYNYPVLLPLLDDLFKVHKAKPTLKWRQSFESYLKTMPPYYLGPLKKAVRMMGAPNLIADSMEYGLSYSVISYLKKLSQQAKIESDRVIGSVGKKVVQETGIKVRSRSHGLSMAYRKDFQQLLQGISEDVPHRLLDLNMKEYTGFQVALLNKDLKPQTFRNAYDIPRRNLLDHLTRMRSNLLKSTRRFLKGQDEDQVHSVPIAQMGNYQEYLKQVPSPLRELDPDQPRRLHTFGNPFKLDKKGMMIDEADEFVAGPQNKHKRPGEPNMQGIPKRRRCMSPLLRGRQQNPVVNNHIGGKGPPAPTTQAQPDLIKPLPLHKISETTNDSIIHDVVENHVADQLSSDITPNAMDTEFSASSPASLLERPTNHMEALGHDHLGTNDLTVGGFLENHEEPRDKEQCAEENIPASSLNKGKKLMHCRSHEEVNTELKAQIMKEIRKPGRKYERIFTLLKHVQGSLQTRLIFLQNVIKEASRFKKRMLIEQLENFLDEIHRRANQINHINSN

SEQ ID NO: 828391 - protein, 874 aa, Homo sapiens
MNQRSHLGTTYLDTAKGAVETFMKLRARDPASRGDRYMLVTFEEPPYAIKAGWKENHATFMNELKNLQAEGLTTLGQSLRTAFDLLNLNRLVTGIDNYGQGRNPFFLEPAIIITITDGSKLTTTSGVQDELHLPLNSPLPGSELTKEPFRWDQRLFALVLRLPGTMSVESEQLTGVPLDDSAITPMCEVTGGRSYSVCSPRMLNQCLESLVQKVQSGVVINFEKAGPDPSPVEDGQPDISRPFGSQPWHSCHKLIYVRPNPKTGVPIGHWPVPESFWPDQNSPTLPPRTSHPVVKFSCTDCEPMVIDKLPFDKYELEPSPLTQFILERKSPQTCWQVYVSNSAKYSELGHPFGYLKASTALNCVNLFVMPYNYPVLLPLLDDLFKVHKAKPTLKWRQSFESYLKTMPPYYLGPLKKAVRMMGAPNLIADSMEYGLSYSVISYLKKLSQQAKIESDRVIGSVGKKVVQETGIKVRSRSHGLSMAYRKDFQQLLQGISEDVPHRLLDLNMKEYTGFQVALLNKDLKPQTFRNAYDIPRRNLLDHLTRMRSNLLKSTRRFLKGQDEDQVHSVPIAQMGNYQEYLKQVPSPLRELDPDQPRRLHTFGNPFKLDKKGMMIDEADEFVAGPQNKHKRPGEPNMQGIPKRRRCMSPLLRGRQQNPVVNNHIGGKGPPAPTTQAQPDLIKPLPLHKISETTNDSIIHDVVENHVADQLSSDITPNAMDTEFSASSPASLLERPTNHMEALGHDHLGTNDLTVGGFLENHEEPRDKEQCAEENIPASSLNKGKKLMHCRSHEEVNTELKAQIMKEIRKPGRKYERIFTLLKHVQGSLQTRLIFLQNVIKEASRFKKRMLIEQLENFLDEIHRRANQINHINSN

SEQ ID NO: 828392 - protein, 922 aa, Homo sapiens
RAGAASRVRPGPGLRPRAVCGERSVCGGRRGGVAAACAVLWGRRGRWAPLLRLVTSPLCFPVARPVPPPVPQLRARDPASRGDRYMLVTFEEPPYAIKAGWKENHATFMNELKNLQAEGLTTLGQSLRTAFDLLNLNRLVTGIDNYGQGRNPFFLEPAIIITITDGSKLTTTSGVQDELHLPLNSPLPGSELTKEPFRWDQRLFALVLRLPGTMSVESEQLTGVPLDDSAITPMCEVTGGRSYSVCSPRMLNQCLESLVQKVQSGVVINFEKAGPDPSPVEDGQPDISRPFGSQPWHSCHKLIYVRPNPKTGVPIGHWPVPESFWPDQNSPTLPPRTSHPVVKFSCTDCEPMVIDKLPFDKYELEPSPLTQFILERKSPQTCWQVYVSNSAKYSELGHPFGYLKASTALNCVNLFVMPYNYPVLLPLLDDLFKVHKAKPTLKWRQSFESYLKTMPPYYLGPLKKAVRMMGAPNLIADSMEYGLSYSVISYLKKLSQQAKIESDRVIGSVGKKVVQETGIKVRSRSHGLSMAYRKDFQQLLQGISEDVPHRLLDLNMKEYTGFQVALLNKDLKPQTFRNAYDIPRRNLLDHLTRMRSNLLKSTRRFLKGQDEDQVHSVPIAQMGNYQEYLKQVPSPLRELDPDQPRRLHTFGNPFKLDKKGMMIDEADEFVAGPQNKHKRPGEPNMQGIPKRRRCMSPLLRGRQQNPVVNNHIGGKGPPAPTTQAQPDLIKPLPLHKISETTNDSIIHDVVENHVADQLSSDITPNAMDTEFSASSPASLLERPTNHMEALGHDHLGTNDLTVGGFLENHEEPRDKEQCAEENIPASSLNKGKKLMHCRSHEEVNTELKAQIMKEIRKPGRKYERIFTLLKHVQGSLQTRLIFLQNVIKEASRFKKRMLIEQLENFLDEIHRRANQINHINSN

SEQ ID NO: 828393 - protein, 709 aa, Homo sapiens; identical to SEQ ID NO: 828390

SEQ ID NO: 828394 - protein, 571 aa, Homo sapiens
MVIDKLPFDKYELEPSPLTQFILERKSPQTCWQVYVSNSAKYSELGHPFGYLKASTALNCVNLFVMPYNYPVLLPLLDDLFKVHKAKPTLKWRQSFESYLKTMPPYYLGPLKKAVRMMGAPNLIADSMEYGLSYSVISYLKKLSQQAKIESDRVIGSVGKKVVQETGIKVRSRSHGLSMAYRKDFQQLLQGISEDVPHRLLDLNMKEYTGFQVALLNKDLKPQTFRNAYDIPRRNLLDHLTRMRSNLLKSTRRFLKGQDEDQVHSVPIAQMGNYQEYLKQVPSPLRELDPDQPRRLHTFGNPFKLDKKGMMIDEADEFVAGPQNKHKRPGEPNMQGIPKRRRCMSPLLRGRQQNPVVNNHIGGKGPPAPTTQAQPDLIKPLPLHKISETTNDSIIHDVVENHVADQLSSDITPNAMDTEFSASSPASLLERPTNHMEALGHDHLGTNDLTVGGFLENHEEPRDKEQCAEENIPASSLNKGKKLMHCRSHEEVNTELKAQIMKEIRKPGRKYERIFTLLKHVQGSLQTRLIFLQNVIKEASRFKKRMLIEQLENFLDEIHRRANQINHINSN

SEQ ID NO: 828395 - protein, 571 aa, Homo sapiens; identical to SEQ ID NO: 828394

SEQ ID NO: 828396 - protein, 571 aa, Homo sapiens; identical to SEQ ID NO: 828394

SEQ ID NO: 828397 - protein, 151 aa, Homo sapiens
MPILLFLIDTSASMNQRSHLGTTYLDTAKGAVETFMKLRARDPASRGDRYMLVTFEEPPYAIKAGWKENHATFMNELKNLQAEGLTTLGQSLRTAFDLLNLNRLVTGIDNYGQGRNPFFLEPAIIITITDGSKLTTTSGVQDEVLGTHRWN

SEQ ID NO: 828398 - protein, 151 aa, Homo sapiens; identical to SEQ ID NO: 828397

SEQ ID NO: 828399 - protein, 68 aa, Homo sapiens
MPILLFLIDTSASMNQRSHLGTTYLDTAKGAVETFMKVPTDRARAATPARRPAGGRVGEGGRGGGVGD

SEQ ID NO: 828400 - protein, 186 aa, Homo sapiens; identical to SEQ ID NO: 828386

SEQ ID NO: 828401 - protein, 1772 aa, Homo sapiens
MSVLISQSVINYVEEENIPALKALLEKCKDVDERNECGQTPLMIAAEQGNLEIVKELIKNGANCNLEDLDNWTALISASKEGHVHIVEELLKCGVNLEHRDMGGWTALMWACYKGRTDVVELLLSHGANPSVTGLQYSVYPIIWAAGRGHADIVHLLLQNGAKVNCSDKYGTTPLVWAARKGHLECVKHLLAMGADVDQEGANSMTALIVAVKGGYTQSVKEILKRNPNVNLTDKDGNTALMIASKEGHTEIVQDLLDAGTYVNIPDRSGDTVLIGAVRGGHVEIVRALLQKYADIDIRGQDNKTALYWAVEKGNATMVRDILQCNPDTEICTKDGETPLIKATKMRNIEVVELLLDKGAKVSAVDKKGDTPLHIAIRGRSRKLAELLLRNPKDGRLLYRPNKAGETPYNIDCSHQKSILTQIFGARHLSPTETDGDMLGYDLYSSALADILSEPTMQPPICVGLYAQWGSGKSFLLKKLEDEMKTFAGQQIEPLFQFSWLIVFLTLLLCGGLGLLFAFTVHPNLGIAVSLSFLALLYIFFIVIYFGGRREGESWNWAWVLSTRLARHIGYLELLLKLMFVNPPELPEQTTKALPVRFLFTDYNRLSSVGGETSLAEMIATLSDACEREFGFLATRLFRVFKTEDTQGKKKWKKTCCLPSFVIFLFIIGCIISGITLLAIFRVDPKHLTVNAVLISIASVVGLAFVLNCRTWWQVLDSLLNSQRKRLHNAASKLHKLKSEGFMKVLKCEVELMARMAKTIDSFTQNQTRLVVIIDGLDACEQDKVLQMLDTVRVLFSKGPFIAIFASDPHIIIKAINQNLNSVLRDSNINGHDYMRNIVHLPVFLNSRGLSNARKFLVTSATNGDVPCSDTTGIQEDADRRVSQNSLGEMTKLGSKTALNRRDTYRRRQMQRTITRQMSFDLTKLLVTEDWFSDISPQTMRRLLNIVSVTGRLLRANQISFNWDRLASWINLTEQWPYRTSWLILYLEETEGIPDQMTLKTIYERISKNIPTTKDVEPLLEIDGDIRNFEVFLSSRTPVLVARDVKVFLPCTVNLDPKLREIIADVRAAREQISIGGLAYPPLPLHEGPPRAPSGYSQPPSVCSSTSFNGPFAGGVVSPQPHSSYYSGMTGPQHPFYNRPFFAPYLYTPRYYPGGSQHLISRPSVKTSLPRDQNNGLEVIKEDAAEGLSSPTDSSRGSGPAPGPVVLLNSLNVDAVCEKLKQIEGLDQSMLPQYCTTIKKANINGRVLAQCNIDELKKEMNMNFGDWHLFRSTVLEMRNAESHVVPEDPRFLSESSSGPAPHGEPARRASHNELPHTELSSQTPYTLNFSFEELNTLGLDEGAPRHSNLSWQSQTRRTPSLSSLNSQDSSIEISKLTDKVQAEYRDAYREYIAQMSQLEGGPGSTTISGRSSPHSTYYMGQSSSGGSIHSNLEQEKGKDSEPKPDDGRKSFLMKRGDVIDYSSSGVSTNDASPLDPITEEDEKSDQSGSKLLPGKKSSERSSLFQTDLKLKGSGLRYQKLPSDEDESGTEESDNTPLLKDDKDRKAEGKVERVPKSPEHSAEPIRTFIKAKEYLSDALLDKKDSSDSGVRSSESSPNHSLHNEVADDSQLEKANLIELEDDSHSGKRGIPHSLSGLQDPIIARMSICSEDKKSPSECSLIASSPEENWPACQKAYNLNRTPSTVTLNNNSAPANRANQNFDEMEGIRETSQVILRPSSSPNPTTIQNENLKSMTHKRSQRSSYTRLSKDPPELHAAASSESTGFGEERESIL

SEQ ID NO: 828402 - protein, 1031 aa, Homo sapiens
MSVLISQSVINYVEEENIPALKALLEKCKDVDERNECGQTPLMIAAEQGNLEIVKELIKNGANCNLEDLDNWTALISASKEGHVHIVEELLKCGVNLEHRDMGGWTALMWACYKGRTDVVELLLSHGANPSVTGLQYSVYPIIWAAGRGHADIVHLLLQNGAKVNCSDKYGTTPLVWAARKGHLECVKHLLAMGADVDQEGANSMTALIVAVKGGYTQSVKEILKRNPNVNLTDKDGNTALMIASKEGHTEIVQDLLDAGTYVNIPDRSGDTVLIGAVRGGHVEIVRALLQKYADIDIRGQDNKTALYWAVEKGNATMVRDILQCNPDTEICTKDGETPLIKATKMRNIEVVELLLDKGAKVSAVDKKGDTPLHIAIRGRSRKLAELLLRNPKDGRLLYRPNKAGETPYNIDCSHQKSILTQIFGARHLSPTETDGDMLGYDLYSSALADILSEPTMQPPICVGLYAQWGSGKSFLLKKLEDEMKTFAGQQIEPLFQFSWLIVFLTLLLCGGLGLLFAFTVHPNLGIAVSLSFLALLYIFFIVIYFGGRREGESWNWAWVLSTRLARHIGYLELLLKLMFVNPPELPEQTTKALPVRFLFTDYNRLSSVGGETSLAEMIATLSDACEREFGFLATRLFRVFKTEDTQGKKKWKKTCCLPSFVIFLFIIGCIISGITLLAIFRVDPKHLTVNAVLISIASVVGLAFVLNCRTWWQVLDSLLNSQRKRLHNAASKLHKLKSEGFMKVLKCEVELMARMAKTIDSFTQNQTRLVVIIDGLDACEQDKVLQMLDTVRVLFSKGPFIAIFASDPHIIIKAINQNLNSVLRDSNINGHDYMRNIVHLPVFLNSRGLSNARKFLVTSATNGDVPCSDTTGIQEDADRRVSQNSLGEMTKLGSKTALNRRDTYRRRQMQRTITRQMSFDLTKLLVTEDWFSDISPQTMRRLLNIVSVTGRLLRANQISFNWDRLASWINLTEQWPYRTSWLILYLEETEGIPDQMTLKTIYERCCGADSCDRDRIGISKSVLVAMLMES

SEQ ID NO: 828403 - protein, 1753 aa, Homo sapiens
MSVLISQSVINYVEEENIPALKALLEKCKDVDERNECGQTPLMIAAEQGNLEIVKELIKNGANCNLEDLDNWTALISASKEGHVHIVEELLKCGVNLEHRDMGGWTALMWACYKGRTDVVELLLSHGANPSVTGLQYSVYPIIWAAGRGHADIVHLLLQNGAKVNCSDKYGTTPLVWAARKGHLECVKHLLAMGADVDQEGANSMTALIVAVKGGYTQSVKEILKRNPNVNLTDKDGNTALMIASKEGHTEIVQDLLDAGTYVNIPDRSGDTVLIGAVRGGHVEIVRALLQKYADIDIRGQDNKTALYWAVEKGNATMVRDILQCNPDTEICTKDGETPLIKATKMRNIEVVELLLDKGAKVSAVDKKGDTPLHIAIRGRSRKLAELLLRNPKDGRLLYRPNKAGETPYNIDCSHQKSILTQIFGARHLSPTETDGDMLGYDLYSSALADILSEPTMQPPICVGLYAQWGSGKSFLLKKLEDEMKTFAGQQIEPLFQFSWLIVFLTLLLCGGLGLLFAFTVHPNLGIAVSLSFLALLYIFFIVIYFGGRREGESWNWAWVLSTRLARHIGYLELLLKLMFVNPPELPEQTTKALPVRFLFTDYNRLSSVGGETSLAEMIATLSDACEREFGFLATRLFRVFKTEDTQGKKKWKKTCCLPSFVIFLFIIGCIISGITLLAIFRVDPKHLTVNAVLISIASVVGLAFVLNCRTWWQVLDSLLNSQRKRLHNAASKLHKLKSEGFMKVLKCEVELMARMAKTIDSFTQNQTRLVVIIDGLDACEQDKVLQMLDTVRVLFSKGPFIAIFASDPHIIIKAINQNLNSVLRDSNINGHDYMRNIVHLPVFLNSRGLSNARKFLVTSATNGDVPCSDTTGIQEDADRRVSQNSLGEMTKLGSKTALNRRDTYRRRQMQRTITRQMSFDLTKLLVTEDWFSDISPQTMRRLLNIVSVTGRLLRANQISFNWDRLASWINLTEQWPYRTSWLILYLEETEGIPDQMTLKTIYERISKNIPTTKDVEPLLEIDGDIRNFEVFLSSRTPVLVARDVKVFLPCTVNLDPKLREIIADVRAAREQISIGGLAYPPLPLHEGPPRAPSGYSQPPSVCSSTSFNGPFAGGVVSPQPHSSYYSGMTGPQHPFYNRPFFAPYLYTPRYYPGGSQHLISRPSVKTSLPRDQNNGLGSGPAPGPVVLLNSLNVDAVCEKLKQIEGLDQSMLPQYCTTIKKANINGRVLAQCNIDELKKEMNMNFGDWHLFRSTVLEMRNAESHVVPEDPRFLSESSSGPAPHGEPARRASHNELPHTELSSQTPYTLNFSFEELNTLGLDEGAPRHSNLSWQSQTRRTPSLSSLNSQDSSIEISKLTDKVQAEYRDAYREYIAQMSQLEGGPGSTTISGRSSPHSTYYMGQSSSGGSIHSNLEQEKGKDSEPKPDDGRKSFLMKRGDVIDYSSSGVSTNDASPLDPITEEDEKSDQSGSKLLPGKKSSERSSLFQTDLKLKGSGLRYQKLPSDEDESGTEESDNTPLLKDDKDRKAEGKVERVPKSPEHSAEPIRTFIKAKEYLSDALLDKKDSSDSGVRSSESSPNHSLHNEVADDSQLEKANLIELEDDSHSGKRGIPHSLSGLQDPIIARMSICSEDKKSPSECSLIASSPEENWPACQKAYNLNRTPSTVTLNNNSAPANRANQNFDEMEGIRETSQVILRPSSSPNPTTIQNENLKSMTHKRSQRSSYTRLSKDPPELHAAASSESTGFGEERESIL

SEQ ID NO: 828404 - protein, 1410 aa, Homo sapiens
MKIVTVCILYIKIRKFKFRTIILQKGDTPLHIAIRGRSRKLAELLLRNPKDGRLLYRPNKAGETPYNIDCSHQKSILTQIFGARHLSPTETDGDMLGYDLYSSALADILSEPTMQPPICVGLYAQWGSGKSFLLKKLEDEMKTFAGQQIEPLFQFSWLIVFLTLLLCGGLGLLFAFTVHPNLGIAVSLSFLALLYIFFIVIYFGGRREGESWNWAWVLSTRLARHIGYLELLLKLMFVNPPELPEQTTKALPVRFLFTDYNRLSSVGGETSLAEMIATLSDACEREFGFLATRLFRVFKTEDTQGKKKWKKTCCLPSFVIFLFIIGCIISGITLLAIFRVDPKHLTVNAVLISIASVVGLAFVLNCRTWWQVLDSLLNSQRKRLHNAASKLHKLKSEGFMKVLKCEVELMARMAKTIDSFTQNQTRLVVIIDGLDACEQDKVLQMLDTVRVLFSKGPFIAIFASDPHIIIKAINQNLNSVLRDSNINGHDYMRNIVHLPVFLNSRGLSNARKFLVTSATNGDVPCSDTTGIQEDADRRVSQNSLGEMTKLGSKTALNRRDTYRRRQMQRTITRQMSFDLTKLLVTEDWFSDISPQTMRRLLNIVSVTGRLLRANQISFNWDRLASWINLTEQWPYRTSWLILYLEETEGIPDQMTLKTIYERISKNIPTTKDVEPLLEIDGDIRNFEVFLSSRTPVLVARDVKVFLPCTVNLDPKLREIIADVRAAREQISIGGLAYPPLPLHEGPPRAPSGYSQPPSVCSSTSFNGPFAGGVVSPQPHSSYYSGMTGPQHPFYNRPFFAPYLYTPRYYPGGSQHLISRPSVKTSLPRDQNNGLGSGPAPGPVVLLNSLNVDAVCEKLKQIEGLDQSMLPQYCTTIKKANINGRVLAQCNIDELKKEMNMNFGDWHLFRSTVLEMRNAESHVVPEDPRFLSESSSGPAPHGEPARRASHNELPHTELSSQTPYTLNFSFEELNTLGLDEGAPRHSNLSWQSQTRRTPSLSSLNSQDSSIEISKLTDKVQAEYRDAYREYIAQMSQLEGGPGSTTISGRSSPHSTYYMGQSSSGGSIHSNLEQEKGKDSEPKPDDGRKSFLMKRGDVIDYSSSGVSTNDASPLDPITEEDEKSDQSGSKLLPGKKSSERSSLFQTDLKLKGSGLRYQKLPSDEDESGTEESDNTPLLKDDKDRKAEGKVERVPKSPEHSAEPIRTFIKAKEYLSDALLDKKDSSDSGVRSSESSPNHSLHNEVADDSQLEKANLIELEDDSHSGKRGIPHSLSGLQDPIIARMSICSEDKKSPSECSLIASSPEENWPACQKAYNLNRTPSTVTLNNNSAPANRANQNFDEMEGIRETSQVILRPSSSPNPTTIQNENLKSMTHKRSQRSSYTRLSKDPPELHAAASSESTGFGEERESIL

SEQ ID NO: 828405 - protein, 543 aa, Homo sapiens
MLPQYCTTIKKANINGRVLAQCNIDELKKEMNMNFGDWHLFRSTVLEMRNAESHVVPEDPRFLSESSSGPAPHGEPARRASHNELPHTELSSQTPYTLNFSFEELNTLGLDEGAPRHSNLSWQSQTRRTPSLSSLNSQDSSIEISKLTDKVQAEYRDAYREYIAQMSQLEGGPGSTTISGRSSPHSTYYMGQSSSGGSIHSNLEQEKGKDSEPKPDDGRKSFLMKRGDVIDYSSSGVSTNDASPLDPITEEDEKSDQSGSKLLPGKKSSERSSLFQTDLKLKGSGLRYQKLPSDEDESGTEESDNTPLLKDDKDRKAEGKVERVPKSPEHSAEPIRTFIKAKEYLSDALLDKKDSSDSGVRSSESSPNHSLHNEVADDSQLEKANLIELEDDSHSGKRGIPHSLSGLQDPIIARMSICSEDKKSPSECSLIASSPEENWPACQKAYNLNRTPSTVTLNNNSAPANRANQNFDEMEGIRETSQVILRPSSSPNPTTIQNENLKSMTHKRSQRSSYTRLSKDPPELHAAASSESTGFGEERESIL

SEQ ID NO: 828406 - protein, 1753 aa, Homo sapiens; identical to SEQ ID NO: 828403

SEQ ID NO: 828407 - protein, 1199 aa, Homo sapiens
MSVLISQSVINYVEEENIPALKALLEKCKDVDERNECGQTPLMIAAEQGNLEIVKELIKNGANCNLEDLDNWTALISASKEGHVHIVEELLKCGVNLEHRDMGGWTALMWACYKGRTDVVELLLSHGANPSVTGLQYSVYPIIWAAGRGHADIVHLLLQNGAKVNCSDKYGTTPLVWAARKGHLECVKHLLAMGADVDQEGANSMTALIVAVKGGYTQSVKEILKRNPNVNLTDKDGNTALMIASKEGHTEIVQDLLDAGTYVNIPDRSGDTVLIGAVRGGHVEIVRALLQKYADIDIRGQDNKTALYWAVEKGNATMVRDILQCNPDTEICTKDGETPLIKATKMRNIEVVELLLDKGAKVSAVDKKGDTPLHIAIRGRSRKLAELLLRNPKDGRLLYRPNKAGETPYNIDCSHQKSILTQIFGARHLSPTETDGDMLGYDLYSSALADILSEPTMQPPICVGLYAQWGSGKSFLLKKLEDEMKTFAGQQIEPLFQFSWLIVFLTLLLCGGLGLLFAFTVHPNLGIAVSLSFLALLYIFFIVIYFGGRREGESWNWAWVLSTRLARHIGYLELLLKLMFVNPPELPEQTTKALPVRFLFTDYNRLSSVGGETSLAEMIATLSDACEREFGFLATRLFRVFKTEDTQGKKKWKKTCCLPSFVIFLFIIGCIISGITLLAIFRVDPKHLTVNAVLISIASVVGLAFVLNCRTWWQVLDSLLNSQRKRLHNAASKLHKLKSEGFMKVLKCEVELMARMAKTIDSFTQNQTRLVVIIDGLDACEQDKVLQMLDTVRVLFSKGPFIAIFASDPHIIIKAINQNLNSVLRDSNINGHDYMRNIVHLPVFLNSRGLSNARKFLVTSATNGDVPCSDTTGIQEDADRRVSQNSLGEMTKLGSKTALNRRDTYRRRQMQRTITRQMSFDLTKLLVTEDWFSDISPQTMRRLLNIVSVTGRLLRANQISFNWDRLASWINLTEQWPYRTSWLILYLEETEGIPDQMTLKTIYERISKNIPTTKDVEPLLEIDGDIRNFEVFLSSRTPVLVARDVKVFLPCTVNLDPKLREIIADVRAAREQISIGGLAYPPLPLHEGPPRAPSGYSQPPSVCSSTSFNGPFAGGVVSPQPHSSYYSGMTGPQHPFYNRPFFAPYLYTPRYYPGGSQHLISRPSVKTSLPRDQNNGLEVIKEDAAEGLSSPTDSSRVME

SEQ ID NO: 828408 - protein, 1125 aa, Homo sapiens
MSVLISQSVINYVEEENIPALKALLEKCKDVDERNECGQTPLMIAAEQGNLEIVKELIKNGANCNLEDLDNWTALISASKEGHVHIVEELLKCGVNLEHRDMGGWTALMWACYKGRTDVVELLLSHGANPSVTGLQYSVYPIIWAAGRGHADIVHLLLQNGAKVNCSDKYGTTPLVWAARKGHLECVKHLLAMGADVDQEGANSMTALIVAVKGGYTQSVKEILKRNPNVNLTDKDGNTALMIASKEGHTEIVQDLLDAGTYVNIPDRSGDTVLIGAVRGGHVEIVRALLQKYADIDIRGQDNKTALYWAVEKGNATMVRDILQCNPDTEICTKDGETPLIKATKMRNIEVVELLLDKGAKVSAVDKKGDTPLHIAIRGRSRKLAELLLRNPKDGRLLYRPNKAGETPYNIDCSHQKSILTQIFGARHLSPTETDGDMLGYDLYSSALADILSEPTMQPPICVGLYAQWGSGKSFLLKKLEDEMKTFAGQQIEPLFQFSWLIVFLTLLLCGGLGLLFAFTVHPNLGIAVSLSFLALLYIFFIVIYFGGRREGESWNWAWVLSTRLARHIGYLELLLKLMFVNPPELPEQTTKALPVRFLFTDYNRLSSVGGETSLAEMIATLSDACEREFGFLATRLFRVFKTEDTQGKKKWKKTCCLPSFVIFLFIIGCIISGITLLAIFRVDPKHLTVNAVLISIASVVGLAFVLNCRTWWQVLDSLLNSQRKRLHNAASKLHKLKSEGFMKVLKCEVELMARMAKTIDSFTQNQTRLVVIIDGLDACEQDKVLQMLDTVRVLFSKGPFIAIFASDPHIIIKAINQNLNSVLRDSNINGHDYMRNIVHLPVFLNSRGLSNARKFLVTSATNGDVPCSDTTGIQEDADRRVSQNSLGEMTKLGSKTALNRRDTYRRRQMQRTITRQMSFDLTKLLVTEDWFSDISPQTMRRLLNIVSVTGRLLRANQISFNWDRLASWINLTEQWPYRTSWLILYLEETEGIPDQMTLKTIYERISKNIPTTKDVEPLLEIDGDIRNFEVFLSSRTPVLVARDVKVFLPCTVNLDPKLREIIADVRAAREQISIGGLAYPPLPLHEGPPRAPSGYSQPPSVCSSTSFNGPFAVKCEWTSDHLFF

SEQ ID NO: 828409 - protein, 1067 aa, Homo sapiens
MSVLISQSVINYVEEENIPALKALLEKCKDVDERNECGQTPLMIAAEQGNLEIVKELIKNGANCNLEDLDNWTALISASKEGHVHIVEELLKCGVNLEHRDMGGWTALMWACYKGRTDVVELLLSHGANPSVTGLQYSVYPIIWAAGRGHADIVHLLLQNGAKVNCSDKYGTTPLVWAARKGHLECVKHLLAMGADVDQEGANSMTALIVAVKGGYTQSVKEILKRNPNVNLTDKDGNTALMIASKEGHTEIVQDLLDAGTYVNIPDRSGDTVLIGAVRGGHVEIVRALLQKYADIDIRGQDNKTALYWAVEKGNATMVRDILQCNPDTEICTKDGETPLIKATKMRNIEVVELLLDKGAKVSAVDKKGDTPLHIAIRGRSRKLAELLLRNPKDGRLLYRPNKAGETPYNIDCSHQKSILTQIFGARHLSPTETDGDMLGYDLYSSALADILSEPTMQPPICVGLYAQWGSGKSFLLKKLEDEMKTFAGQQIEPLFQFSWLIVFLTLLLCGGLGLLFAFTVHPNLGIAVSLSFLALLYIFFIVIYFGGRREGESWNWAWVLSTRLARHIGYLELLLKLMFVNPPELPEQTTKALPVRFLFTDYNRLSSVGGETSLAEMIATLSDACEREFGFLATRLFRVFKTEDTQGKKKWKKTCCLPSFVIFLFIIGCIISGITLLAIFRVDPKHLTVNAVLISIASVVGLAFVLNCRTWWQVLDSLLNSQRKRLHNAASKLHKLKSEGFMKVLKCEVELMARMAKTIDSFTQNQTRLVVIIDGLDACEQDKVLQMLDTVRVLFSKGPFIAIFASDPHIIIKAINQNLNSVLRDSNINGHDYMRNIVHLPVFLNSRGLSNARKFLVTSATNGDVPCSDTTGIQEDADRRVSQNSLGEMTKLGSKTALNRRDTYRRRQMQRTITRQMSFDLTKLLVTEDWFSDISPQTMRRLLNIVSVTGRLLRANQISFNWDRLASWINLTEQWPYRTSWLILYLEETEGIPDQMTLKTIYERISKNIPTTKDVEPLLEIDGDIRNFEVFLSSRTPVLVARDVKVFLPCTVNLDPKLREIIAGGY

SEQ ID NO: 828410 - protein, 243 aa, Homo sapiens
MALLPVLFLVTVLLPSLPAEGKDPAFTALLTTQLQVQREIVNKHNELRKAVSPPASNMLKMEWSREVTTNAQRWANKCTLQHSDPEDRKTSTRCGENLYMSSDPTSWSSAIQSWYDEILDFVYGVGPKSPNAVVGHYTQLVWYSTYQVGCGIAYCPNQDSLKYYYVCQYCPAGNNMNRKNTPYQQGTPCAGCPDDCDKGLCTNSCQYQDLLSNCDSLKNTAGCEHELLKEKCKATCLCENKIY

SEQ ID NO: 828411 - protein, 243 aa, Homo sapiens; identical to SEQ ID NO: 828410

SEQ ID NO: 828412 - protein, 191 aa, Homo sapiens
MALLPVLFLVTVLLPSLPAEGKDPAFTALLTTQLQVQREIVNKHNELRKAVSPPASNMLKMEWSREVTTNAQRWANKCTLQHSDPEDRKTSTRCGENLYMSSDPTSWSSAIQSWYDEILDFVYGVGPKSPNAVVGHYTQLVWYSTYQVGCGIAYCPNQDSLKYYYVCQYCPAMKTYLNKREGINVWKCFLR

SEQ ID NO: 828413 - protein, 243 aa, Homo sapiens; identical to SEQ ID NO: 828410

SEQ ID NO: 828414 - protein, 243 aa, Homo sapiens; identical to SEQ ID NO: 828410

SEQ ID NO: 828415 - protein, 243 aa, Homo sapiens; identical to SEQ ID NO: 828410

SEQ ID NO: 828416 - protein, 243 aa, Homo sapiens; identical to SEQ ID NO: 828410

SEQ ID NO: 828417 - protein, 243 aa, Homo sapiens; identical to SEQ ID NO: 828410

SEQ ID NO: 828418 - protein, 208 aa, Homo sapiens
MALLPVLFLVTVLLPSLPAEGKDPAFTALLTTQLQVQREIVNKHNELRKAVSPPASNMLKMEWSREVTTNAQRWANKCTLQHSDPEDRKTSTRCGENLYMSSDPTSWSSAIQSWYDEILDFVYGVGPKSPNAVVGHYTQLVWYSTYQVGCGIAYCPNQDSLKYYYVCQYCPAGNNMNRKNTPYQQGTPCAGCPDDCDKGLCSSTYQQN

SEQ ID NO: 828419 - protein, 243 aa, Homo sapiens; identical to SEQ ID NO: 828410

SEQ ID NO: 828420 - protein, 132 aa, Homo sapiens
MALLPVLFLVTVLLPSLPAEGKDPAFTALLTTQLQVQREIVNKHNELRKAVSPPASNMLKMEWSREVTTNAQRWANKCTLQHSDPEDRKTSTRCGENLYMSSDPTSWSSAIQSWYDEILDFVYGVGPKSPNW

SEQ ID NO: 828421 - protein, 243 aa, Homo sapiens; identical to SEQ ID NO: 828410

SEQ ID NO: 828422 - protein, 48 aa, Homo sapiens
MYFLTVLEAQSKVKVLPALVSSGAFLLRSQMAVFWMPLLVIVQLYTCL

SEQ ID NO: 828423 - protein, 108 aa, Homo sapiens
MNKTHKDCSSPQYSIYNILNELPTRPIILSCSQISCLLLVSTWSADLMSYRPVTKPSQRCTSPAQSMTVNLTKDVGFYEDTQSIRITLSEISQAQKDTYFIISCICGI

SEQ ID NO: 828424 - protein, 367 aa, Homo sapiens
TNQRAGWSAGLPLWTHMRAVLAGEMDGRRVLGRFWSGWRRGLGVRPVPEDAGFGTEARHQRQPRGSCQRSGPLGDQPFAGLLPKNLSREELVDALRAAVVDRKGPLVTLNKPQGLPVTGKPGELTLFSVLPELSQSLGLREQELQVVRASGKESSGLVLLSSCPQTASRLQKYFTHARRAQRPTATYCAVTDGIPAASEGKIQAALKLEHIDGVNLTVPVKAPSRKDILEGVKKTLSHFRVVATGSGCALVQLQPLTVFSSQLQVHMVLQLCPVLGDHMYSARVGTVLGQRFLLPAENNKPQRQVLDEALLRRLHLTPSQAAQLPLHLHLHRLLLPGTRARDTPVELLAPLPPYFSRTLQCLGLRLQ

SEQ ID NO: 828425 - protein, 367 aa, Homo sapiens; identical to SEQ ID NO: 828424

SEQ ID NO: 828426 - protein, 319 aa, Homo sapiens
TNQRAGWSAGLPLWTHMRAVLAGEMDGRRVLGRFWSGWRRGLGVRPVPEDAGFGTEARHQRQPRGSCQRSGPLGDQPFAGLLPKNLSREELVDALRAAVVDRKGPLVTLNKPQGLPVTGKPGELTLFSVLPELSQSLGLREQELQVVRASGKESSGLVLLSSCPQTASRLQKYFTHARRAQRPTATYCAVTDGIPAASEGKIQAALKLEHIDGVNLTVPVKAPSRKDILEGVKKTLSHFRVVATGSGCALVQLQPLTVFSSQLQVHMVLQLCPVLGDHMYSARVGTVLGQRFLLPAENNKPQRQNSPPSVPDPLTHTGK

SEQ ID NO: 828427 - protein, 320 aa, Homo sapiens [sequence omitted]

SEQ ID NO: 828428 - protein, 266 aa, Homo sapiens
TNQRAGWSAGLPLWTHMRAVLAGEMDGRRVLGRFWSGWRRGLGVRPVPEDAGFGTEARHQRQPRGSCQRSGPLGDQPFAGLLPKNLSREELVDALRAAVVDRKGPLVTLNKPQGLPVTGKPGELTLFSVLPELSQSLGLREQELQVVRASGKESSGLVLLSSCPQTASRLQKYFTHARRAQRPTATYCAVTDGIPAASEGKIQAALKLEHIDGVNLTVPVKAPSRKDILEGVKKTLSHFRVVATGSGCALVQLQPLTGRSGTLASL

SEQ ID NO: 828429 - protein, 127 aa, Homo sapiens
MQKPGKTSPKANLRLDNVSWGSCKHCDLRNNRWHQRQPRGSCQRSGPLGDQPFAGLLPKNLSREELVDALRAAVVDRKGPLVTLNKPQGLPVTGKPGELTLFSVLPELSQSLGLREQELQVVRASGK

SEQ ID NO: 828430 - protein, 163 aa, Homo sapiens
TNQRAGWSAGLPLWTHMRAVLAGEMDGRRVLGRFWSGWRRGLGVRPVPEDAGFGTEARHQRQPRGSCQRSGPLGDQPFAGLLPKNLSREELVDALRAAVVDRKGPLVTLNKPQGLPVTGKPGELTLFSVLPELSQSLGLREQELQVVRASGKSWMKPSSDAST

SEQ ID NO: 828431 - protein, 82 aa, Homo sapiens
QSARWLERGSAPLDAHARCPGWGDGRPPCFGPVLEWLAAGPGCPPSARGRRLWHRSPVIKYPLSHAGRRLGQGEGTCGIWIR

SEQ ID NO: 828432 - protein, 256 aa, Homo sapiens
MGPVVPEFSRHQRQPRGSCQRSGPLGDQPFAGLLPKNLSREELVDALRAAVVDRKGPLVTLNKPQGLPVTGKPGELTLFSVLPELSQSLGLREQELQVVRASGKESSGLVLLSSCPQTASRLQKYFTHARRAQRPTATYCAVTDGIPAASEGKIQAALKLEHIDGVNLKFSEAIRRTLEVPETLSTSVVAKAGGLVKEHAGPSTRAMPKAPGGPVAGRRPGWPKSQRGTRKTPGGAKGRGGGATQGTAQGHRGLRT

SEQ ID NO: 828433 - protein, 152 aa, Homo sapiens
TNQRAGWSAGLPLWTHMRAVLAGEMDGRRVLGRFWSGWRRGLGVRPVPEDAGFGTEARHQRQPRGSCQRSGPLGDQPFAGLLPKNLSREELVDALRAAVVDRKGPLVTLNKPQGLPVTGKPGELTLFSVLPELSQSLGLREQELQVVRASGK

SEQ ID NO: 828434 - protein, 367 aa, Homo sapiens; identical to SEQ ID NO: 828424

SEQ ID NO: 828435 - protein, 266 aa, Homo sapiens; identical to SEQ ID NO: 828428

SEQ ID NO: 828436 - protein, 349 aa, Homo sapiens
TNQRAGWSAGLPLWTHMRAVLAGEMDGRRVLGRFWSGWRRGLGVRPVPEDAGFGTEARHQRQPRGSCQRSGPLGDQPFAGLLPKNLSREELVDALRAAVVDRKGPLVTLNKPQGLPVTVGLREQELQVVRASGKESSGLVLLSSCPQTASRLQKYFTHARRAQRPTATYCAVTDGIPAASEGKIQAALKLEHIDGVNLTVPVKAPSRKDILEGVKKTLSHFRVVATGSGCALVQLQPLTVFSSQLQVHMVLQLCPVLGDHMYSARVGTVLGQRFLLPAENNKPQRQVLDEALLRRLHLTPSQAAQLPLHLHLHRLLLPGTRARDTPVELLAPLPPYFSRTLQCLGLRLQ

SEQ ID NO: 828437 - protein, 152 aa, Homo sapiens; identical to SEQ ID NO: 828433

SEQ ID NO: 828438 - protein, 158 aa, Homo sapiens
TNQRAGWSAGLPLWTHMRAVLAGEMDGRRVLGRFWSGWRRGLGVRPVPEDAGFGTEARHQRQPRGSCQRSGPLGDQPFAGLLPKNLSREELVDALRAAVVDRKGPLVTLNKPQGLPVTGKPGELTLFSVLPELSQSLGLREQELQVVRASGKQSMTPP

SEQ ID NO: 828439 - protein, 162 aa, Homo sapiens
TNQRAGWSAGLPLWTHMRAVLAGEMDGRRVLGRFWSGWRRGLGVRPVPEDAGFGTEARHQRQPRGSCQRSGPLGDQPFAGLLPKNLSREELVDALRAAVVDRKGPLVTLNKPQGLPVTGKPGELTLFSVLPELSQSLGLREQELQVVRASGKWSYRLFCHPG

SEQ ID NO: 828440 - protein, 966 aa, Homo sapiens
WPPFIFGGGAPCLMWLWGPAAPGGRAASTGSEIPRVTPDDTPSSAKRKGWEKGGGAFGGNKMEGESSRFEIHTPVSDKKKKKCSIHKERPQKHSHEIFRDSSLVNEQSQITRRKKRKKDFQHLISSPLKKSRICDETANATSTLKKRKKRRYSALEVDEEAGVTVVLVDKENINNTPKHFRKDVDVVCVDMSIEQKLPRKPKTDKFQVLAKSHAHKSEALHSKVREKKNKKHQRKAASWESQRARDTLPQSESHQEESWLSVGPGGEITELPASAHKNKSKKKKKKSSNREYETLAMPEGSQAGREAGTDMQESQPTVGLDDETPQLLGPTHKKKSKKKKKKKSNHQEFEALAMPEGSQVGSEVGADMQESRPAVGLHGETAGIPAPAYKNKSKKKKKKSNHQEFEAVAMPESLESAYPEGSQVGSEVGTVEGSTALKGFKESNSTKKKSKKRKLTSVKRARVSGDDFSVPSKNSESTLFDSVEGDGAMMEEGVKSRPRQKKTQACLASKHVQEAPRLEPANEEHNVETAEDSEIRYLSADSGDADDSDADLGSAVKQLQEFIPNIKDRATSTIKRMYRDDLERFKEFKAQGVAIKFGKFSVKENKQLEKNVEDFLALTGIESADKLLYTDRYPEEKSVITNLKRRYSFRLHIGRNIARPWKLIYYRAKKMFDVNNYKGRYSEGDTEKLKMYHSLLGNDWKTIGEMVARSSLSVALKFSQISSQRNRGAWSKSETRKLIKAVEEVILKKMSPQELKEVDSKLQENPESCLSIVREKLYKGISWVEVEAKVQTRNWMQCKSKWTEILTKRMTNGRRIYYGMNALRAKVSLIERLYEINVEDTNEIDWEDLASAIGDVPPSYVQTKFSRLKAVYVPFWQKKTFPEIIDYLYETTLPLLKEKLEKMMEKKGTKIQTPAAPKQVFPFRDIFYYEDDSEGEDIEKESEGQAPCMAHACNSSTLGGQGRWII

SEQ ID NO: 828441 - protein, 681 aa, Homo sapiens
WPPFIFGGGAPCLMWLWGPAAPGGRAASTGSEIPRVTPDDTPSSAKRKGWEKGGGAFGGNKMEGESSRFEIHTPVSDKKKKKCSIHKERPQKHSHEIFRDSSLVNEQSQITRRKKRKKDFQHLISSPLKKSRICDETANATSTLKKRKKRRYSALEVDEEAGVTVVLVDKENINNTPKHFRKDVDVVCVDMSIEQKLPRKPKTDKFQVLAKSHAHKSEALHSKVREKKNKKHQRKAASWESQRARDTLPQSESHQEESWLSVGPGGEITELPASAHKNKSKKKKKKSSNREYETLAMPEGSQAGREAGTDMQESQPTVGLDDETPQLLGPTHKKKSKKKKKKKSNHQEFEALAMPEGSQVGSEVGADMQESRPAVGLHGETAGIPAPAYKNKSKKKKKKSNHQEFEAVAMPESLESAYPEGSQVGSEVGTVEGSTALKGFKESNSTKKKSKKRKLTSVKRARVSGDDFSVPSKNSESTLFDSVEGDGAMMEEGVKSRPRQKKTQACLASKHVQEAPRLEPANEEHNVETAEDSEIRYLSADSGDADDSDADLGSAVKQLQEFIPNIKDRATSTIKRMYRDDLERFKEFKAQGVAIKFGKFSVKENKQLEKNVEDFLALTGIESADKLLYTDRYPEEKSVITNLKRRYSFRLHIGRNIARPWKLIYYRAKKMFDVNNYKGRY

SEQ ID NO: 828442 - protein, 349 aa, Homo sapiens
  misc_feature (14)..(14): Xaa can be any naturally occurring amino acid
  misc_feature (18)..(18): Xaa can be any naturally occurring amino acid
  misc_feature (34)..(34): Xaa can be any naturally occurring amino acid
SGGFIAYATCLPHXVAKXLAPVITNLNRRYSFTXHIGRNIARPWKLIYYRAKKMFDVNNYKGRYSEGDTEKLKMYHSLLGNDWKTIGEMVARSSLSVALKFSQISSQRNRGAWSKSETRKLIKAVEEVILKKMSPQELKEVDSKLQENPESCLSIVREKLYKGISWVEVEAKVQTRNWMQCKSKWTEILTKRMTNGRRIYYGMNALRAKVSLIERLYEINVEDTNEIDWEDLASAIGDVPPSYVQTKFSRLKAVYVPFWQKKTFPEIIDYLYETTLPLLKEKLEKMMEKKGTKIQTPAAPKQVFPFRDIFYYEDDSEGEDIEKESEGQAPCMAHACNSSTLGGQGRWII

SEQ ID NO: 828443 - protein, 949 aa, Homo sapiens
WPPFIFGGGAPCLMWLWGPAAPGGRAASTGSEIPRVTPDDTPSSAKRKGWEKGGGAFGGNKMEGESSRFEIHTPVSDKKKKKCSIHKERPQKHSHEIFRDSSLVNEQSQITRRKKRKKDFQHLISSPLKKSRICDETANATSTLKKRKKRRYSALEVDEEAGVTVVLVDKENINNTPKHFRKDVDVVCVDMSIEQKLPRKPKTDKFQVLAKSHAHKSEALHSKVREKKNKKHQRKAASWESQRARDTLPQSESHQEESWLSVGPGGEITELPASAHKNKSKKKKKKSSNREYETLAMPEGSQAGREAGTDMQESQPTVGLDDETPQLLGPTHKKKSKKKKKKKSNHQEFEALAMPEGSQVGSEVGADMQESRPAVGLHGETAGIPAPAYKNKSKKKKKKSNHQEFEAVAMPESLESAYPEGSQVGSEVGTVEGSTALKGFKESNSTKKKSKKRKLTSVKRARVSGDDFSVPSKNSESTLFDSVEGDGAMMEEGVKSRPRQKKTQACLASKHVQEAPRLEPANEEHNVETAEDSEIRYLSADSGDADDSDADLGSAVKQLQEFIPNIKDRATSTIKRMYRDDLERFKEFKAQGVAIKFGKFSVKENKQLEKNVEDFLALTGIESADKLLYTDRYPEEKSVITNLKRRYSFRLHIGRNIARPWKLIYYRAKKMFDVNNYKGRYSEGDTEKLKMYHSLLGNDWKTIGEMVARSSLSVALKFSQISSQRNRGAWSKSETRKLIKAVEEVILKKMSPQELKEVDSKLQENPESCLSIVREKLYKGISWVEVEAKVQTRNWMQCKSKWTEILTKRMTNGRRIYYGMNALRAKVSLIERLYEINVEDTNEIDWEDLASAIGDVPPSYVQTKFSRLKAVYVPFWQKKTFPEIIDYLYETTLPLLKEKLEKMMEKKGTKIQTPAAPKQVFPFRDIFYYEDDSEGEDIEKESEGEFRKA

SEQ ID NO: 828444 - protein, 966 aa, Homo sapiens; identical to SEQ ID NO: 828440

SEQ ID NO: 828445 - protein, 458 aa, Homo sapiens
EKGGGAFGGLEPANEEHNVETAEDSEIRYLSADSGDADDSDADLGSAVKQLQEFIPNIKDRATSTIKRMYRDDLERFKEFKAQGVAIKFGKFSVKENKQLEKNVEDFLALTGIESADKLLYTDRYPEEKSVITNLKRRYSFRLHIGRNIARPWKLIYYRAKKMFDVNNYKGRYSEGDTEKLKMYHSLLGNDWKTIGEMVARSSLSVALKFSQISSQRNRGAWSKSETRKLIKAVEEVILKKMSPQELKEVDSKLQENPESCLSIVREKLYKGISWVEVEAKVQTRNWMQCKSKWTEILTKRMTNGRRIYYGMNALRAKVSLIERLYEINVEDTNEIDWEDLASAIGDVPPSYVQTKFSRLKAVYVPFWQKKTFPEIIDYLYETTLPLLKEKLEKMMEKKGTKIQTPAAPKQVFPFRDIFYYEDDSEGEDIEKESEGQAPCMAHACNSSTLGGQGRWII

SEQ ID NO: 828446 - protein, 444 aa, Homo sapiens
MREIVHLQAGQCGNQIGAKFWEVISDEHGIDPTGTYHGDSDLQLERINVYYNEATGGNYVPRAVLVDLEPGTMDSVRSGPFGQIFRPDNFVFGQSGAGNNWAKGHYTEGAELVDAVLDVVRKEAESCDCLQGFQLTHSLGGGTGSGMGTLLISKIREEFPDRIMNTFSVVPSPKVSDTVVEPYNATLSVHQLVENTDETYCIDNEALYDICFRTLKLTTPTYGDLNHLVSATMSGVTTCLRFPGQLNADLRKLAVNMVPFPRLHFFMPGFAPLTSRGSQQYRALTVPELTQQMFDAKNMMAACDPRHGRYLTVAAVFRGRMSMKEVDEQMLSVQSKNSSYFVEWIPNNVKTAVCDIPPRGLKMAATFIGNSTAIQELFKRISEQFTAMFRRKAFLHWYTGEGMDEMEFTEAESNMNDLVSEYQQYQDATAEEGEFEEEAEEEVA

SEQ ID NO: 828447 - protein, 471 aa, Homo sapiens
IAAPGGAGTVLRRLRRIFHPRRRRSSPRSCHRRRVHPQRHRHAGDRAPAGRPVRQPDRGQGTYHGDSDLQLERINVYYNEATGGNYVPRAVLVDLEPGTMDSVRSGPFGQIFRPDNFVFGQSGAGNNWAKGHYTEGAELVDAVLDVVRKEAESCDCLQGFQLTHSLGGGTGSGMGTLLISKIREEFPDRIMNTFSVVPSPKVSDTVVEPYNATLSVHQLVENTDETYCIDNEALYDICFRTLKLTTPTYGDLNHLVSATMSGVTTCLRFPGQLNADLRKLAVNMVPFPRLHFFMPGFAPLTSRGSQQYRALTVPELTQQMFDAKNMMAACDPRHGRYLTVAAVFRGRMSMKEVDEQMLSVQSKNSSYFVEWIPNNVKTAVCDIPPRGLKMAATFIGNSTAIQELFKRISEQFTAMFRRKAFLHWYTGEGMDEMEFTEAESNMNDLVSEYQQYQDATAEEGEFEEEAEEEVA

SEQ ID NO: 828448 - protein, 368 aa, Homo sapiens
CSCRDRSDLSAGQLRVCQSGAGNNWAKGHYTEGAELVDAVLDVVRKEAESCDCLQGFQLTHSLGGGTGSGMGTLLISKIREEFPDRIMNTFSVVPSPKVSDTVVEPYNATLSVHQLVENTDETYCIDNEALYDICFRTLKLTTPTYGDLNHLVSATMSGVTTCLRFPGQLNADLRKLAVNMVPFPRLHFFMPGFAPLTSRGSQQYRALTVPELTQQMFDAKNMMAACDPRHGRYLTVAAVFRGRMSMKEVDEQMLSVQSKNSSYFVEWIPNNVKTAVCDIPPRGLKMAATFIGNSTAIQELFKRISEQFTAMFRRKAFLHWYTGEGMDEMEFTEAESNMNDLVSEYQQYQDATAEEGEFEEEAEEEVA

SEQ ID NO: 828449 - protein, 444 aa, Homo sapiens; identical to SEQ ID NO: 828446

SEQ ID NO: 828450 - protein, 444 aa, Homo sapiens; identical to SEQ ID NO: 828446

SEQ ID NO: 828451 - protein, 444 aa, Homo sapiens; identical to SEQ ID NO: 828446

SEQ ID NO: 828452 - protein, 246 aa, Homo sapiens
DAEVIQRIPTHQRRLFDKLTTPTYGDLNHLVSATMSGVTTCLRFPGQLNADLRKLAVNMVPFPRLHFFMPGFAPLTSRGSQQYRALTVPELTQQMFDAKNMMAACDPRHGRYLTVAAVFRGRMSMKEVDEQMLSVQSKNSSYFVEWIPNNVKTAVCDIPPRGLKMAATFIGNSTAIQELFKRISEQFTAMFRRKAFLHWYTGEGMDEMEFTEAESNMNDLVSEYQQYQDATAEEGEFEEEAEEEVA

SEQ ID NO: 828453 - protein, 444 aa, Homo sapiens; identical to SEQ ID NO: 828446

SEQ ID NO: 828454 - protein, 444 aa, Homo sapiens; identical to SEQ ID NO: 828446

SEQ ID NO: 828455 - protein, 76 aa, Homo sapiens
RRLSASSSNSPSSAVTMVGARFTSGYFISDPGSPLSPNLSLTPLSSSNLDIPRRSPASPLLTLETAPLTLQTFLHP

SEQ ID NO: 828456 - protein, 255 aa, Homo sapiens
MREIVHLQAGQCGNQIGAKFWEVISDEHGIDPTGTYHGDSDLQLERINVYYNEATGGNYVPRAVLVDLEPGTMDSVRSGPFGQIFRPDNFVFGQSGAGNNWAKGHYTEGAELVDAVLDVVRKEAESCDCLQGFQLTHSLGGGTGSGMGTLLISKIREEFPDRIMNTFSVVPSPKVSDTVVEPYNATLSVHQLVENTDETYCIDNEALYDICFRTLKLTTPTYGDLNHLVSATMSGVTTCLRSIAWGDHLVCYCRL

SEQ ID NO: 828457 - protein, 227 aa, Homo sapiens
MREIVHLQAGQCGNQIGAKFWEVISDEHGIDPTGTYHGDSDLQLERINVYYNEATGGNYVPRAVLVDLEPGTMDSVRSGPFGQIFRPDNFVFGQSGAGNNWAKGHYTEGAELVDAVLDVVRKEAESCDCLQGFQLTHSLGGGTGSGMGTLLISKIREEFPDRIMNTFSVVPSPKVSDTVVEPYNATLSVHQLVENTDETYCIDNEALYDICFRTLWYTTHVELCKLV

SEQ ID NO: 828458 - protein, 230 aa, Homo sapiens
MREIVHLQAGQCGNQIGAKFWEVISDEHGIDPTGTYHGDSDLQLERINVYYNEATGGNYVPRAVLVDLEPGTMDSVRSGPFGQIFRPDNFVFGQSGAGNNWAKGHYTEGAELVDAVLDVVRKEAESCDCLQGFQLTHSLGGGTGSGMGTLLISKIREEFPDRIMNTFSVVPSPKVSDTVVEPYNATLSVHQLVENTDETYCIDNEALYDICFRTLSWAGWAVSGVSSLTF

SEQ ID NO: 828459 - protein, 117 aa, Homo sapiens
MREIVHLQAGQCGNQIGAKFWEVISDEHGIDPTGTYHGDSDLQLERINVYYNEATGGNYVPRAVLVDLEPGTMDSVRSGPFGQIFRPDNFVFGQSGAGNNWAKGHYTEGPHQFLTLY

SEQ ID NO: 828460 - protein, 444 aa, Homo sapiens; identical to SEQ ID NO: 828446

SEQ ID NO: 828461 - protein, 416 aa, Homo sapiens
MSRIGKSTETEIRSEVARINVYYNEATGGNYVPRAVLVDLEPGTMDSVRSGPFGQIFRPDNFVFGQSGAGNNWAKGHYTEGAELVDAVLDVVRKEAESCDCLQGFQLTHSLGGGTGSGMGTLLISKIREEFPDRIMNTFSVVPSPKVSDTVVEPYNATLSVHQLVENTDETYCIDNEALYDICFRTLKLTTPTYGDLNHLVSATMSGVTTCLRFPGQLNADLRKLAVNMVPFPRLHFFMPGFAPLTSRGSQQYRALTVPELTQQMFDAKNMMAACDPRHGRYLTVAAVFRGRMSMKEVDEQMLSVQSKNSSYFVEWIPNNVKTAVCDIPPRGLKMAATFIGNSTAIQELFKRISEQFTAMFRRKAFLHWYTGEGMDEMEFTEAESNMNDLVSEYQQYQDATAEEGEFEEEAEEEVA

SEQ ID NO: 828462 - protein, 444 aa, Homo sapiens; identical to SEQ ID NO: 828446

SEQ ID NO: 828463 - protein, 373 aa, Homo sapiens
MADSRGYTALPSGTKAEGVEPNSSKLQLNLFRLRPYVAAELVDAVLDVVRKEAESCDCLQGFQLTHSLGGGTGSGMGTLLISKIREEFPDRIMNTFSVVPSPKVSDTVVEPYNATLSVHQLVENTDETYCIDNEALYDICFRTLKLTTPTYGDLNHLVSATMSGVTTCLRFPGQLNADLRKLAVNMVPFPRLHFFMPGFAPLTSRGSQQYRALTVPELTQQMFDAKNMMAACDPRHGRYLTVAAVFRGRMSMKEVDEQMLSVQSKNSSYFVEWIPNNVKTAVCDIPPRGLKMAATFIGNSTAIQELFKRISEQFTAMFRRKAFLHWYTGEGMDEMEFTEAESNMNDLVSEYQQYQDATAEEGEFEEEAEEEVA

SEQ ID NO: 828464 - protein, 444 aa, Homo sapiens; identical to SEQ ID NO: 828446

SEQ ID NO: 828465 - protein, 222 aa, Homo sapiens
  misc_feature (17)..(17): Xaa can be any naturally occurring amino acid
HPRVLSCEWICPHPAPXQRFPGQLNADLRKLAVNMVPFPRLHFFMPGFAPLTSRGSQQYRALTVPELTQQMFDAKNMMAACDPRHGRYLTVAAVFRGRMSMKEVDEQMLSVQSKNSSYFVEWIPNNVKTAVCDIPPRGLKMAATFIGNSTAIQELFKRISEQFTAMFRRKAFLHWYTGEGMDEMEFTEAESNMNDLVSEYQQYQDATAEEGEFEEEAEEEVA

SEQ ID NO: 828466 - protein, 96 aa, Homo sapiens
IERLPGAQGPCSAVSAASSTLAAAAAPRARATAAASTLSATAMREIVHLQAGQCGNQIGAKFWEVISDEHGIDPTGTYHGDSDLQLERINPPISEP

SEQ ID NO: 828467 - protein, 112 aa, Homo sapiens
RRSLALLPRLQCSGTMSAHCKFRLLGSRHSPASASRVARTTGARHHSRLIFFEEPRFTPSHSGNRTFNFADLPSPLTSASPLTSAPHESHFTSRPISSGLCLTPPSELALHR

SEQ ID NO: 828468 - protein, 105 aa, Homo sapiens
MLFRGPASVFPVYSEESSQIEPLPVSCPSQASLSLHLCGFFYPEYTCHDSNFSFTLYESHFTSTPASPGLYWTPPSELQFTFDLASPFTPHPPQRQLLPLTPASL

SEQ ID NO: 828469 - protein, 96 aa, Homo sapiens; identical to SEQ ID NO: 828466

SEQ ID NO: 828470 - protein, 211 aa, Homo sapiens
  misc_feature (7)..(8): Xaa can be any naturally occurring amino acid
SRVRHAXXQQPIPTRVCKVSDLHEGHFYEFRARAANWAGVGELSAPSSLFECKEWTMPQPGPPYDVRASEVRATSLVLQWEPPLYMGAGPVTGYHVSFQEEGSEQWKPVTPGPISGTHLRVSDLQPGKSYVFQVQAMNSAGLGQPSMPTDPVLLEDKPGAHEIEVGVDEEGFIYLAFEAPEAPDSSEFQWSKDYKGPLDPQRVKIEDKVNK

SEQ ID NO: 828471 - protein, 600 aa, Homo sapiens
MTAAPASPQQIRDRLLQAIDPQSNIRNMVAVLEVISSLEKYPITKEALEETRLGKLINDVRKKTKNEELAKRAKKLLRSWQKLIEPAHQHEAALRGLAGATGSANGGAHNCRPEVGAAGPPRSIHDLKSRNDLQRLPGQRLDRLGSRKRRGDQRDLGHPGPPPKVSKASHDPLVPNSSPLPTNGISGSPESFASSLDGSGHAGPEGSRLERDENDKHSGKIPVNAVRPHTSSPGLGKPPGPCLQPKASVLQQLDRVDETPGPPHPKGPPRCSFSPRNSRHEGSFARQQSLYAPKGSVPSPSPRPQALDATQVPSPLPLAQPSTPPVRRLELLPSAESPVCWLEQPESHQRLAGPGCKAGLSPAEPLLSRAGFSPDSSKADSDAASSGGSDSKKKKRYRPRDYTVNLDGQVAEAGVKPVRLKERKLTFDPMTRQIKPLTQKEPVRADSPVHMEQQSRTELDKQEAKASLQSPFEQTNWKELSRNEIIQSYLSRQSSLLSSSGAQTPGAHHFMSEYLKQEESTRQGARQLHVLVPQSPPTDLPGLTREVTQDDLDRIQASQWPGVNGCQDTQGNWYDWTQCISLDPHGDDGRLNILPYVCLD

SEQ ID NO: 828472 - protein, 756 aa, Homo sapiens
SRGSLPVGGRGDCAPTRDGGNDCRLGEGALRRPEMPLNFRQIGGPAPKTERSRPNASGAEVEKPPRRRRFATSGFPSYGGRLLPEALCRLTFSRSGSRVAVQTPALPPHPFPHPLRGGGAAATPPDSDDPSARRITTWTSGSLALTKNSAAAQPATPVPQSRAGKALPEEGFSRRPPRPEIRNMVAVLEVISSLEKYPITKEALEETRLGKLINDVRKKTKNEELAKRAKKLLRSWQKLIEPAHQHEAALRGLAGATGSANGGAHNCRPEVGAAGPPRSIHDLKSRNDLQRLPGQRLDRLGSRKRRGDQRDLGHPGPPPKVSKASHDPLVPNSSPLPTNGISGSPESFASSLDGSGHAGPEGSRLERDENDKHSGKIPVNAVRPHTSSPGLGKPPGPCLQPKASVLQQLDRVDETPGPPHPKGPPRCSFSPRNSRHEGSFARQQSLYAPKGSVPSPSPRPQALDATQVPSPLPLAQPSTPPVRRLELLPSAESPVCWLEQPESHQRLAGPGCKAGLSPAEPLLSRAGFSPDSSKADSDAASSGGSDSKKKKRYRPRDYTVNLDGQVAEAGVKPVRLKERKLTFDPMTRQIKPLTQKEPVRADSPVHMEQQSRTELDKQEAKASLQSPFEQTNWKELSRNEIIQSYLSRQSSLLSSSGAQTPGAHHFMSEYLKQEESTRQGARQLHVLVPQSPPTDLPGLTREVTQDDLDRIQASQWPGVNGCQDTQGNWYDWTQCISLDPHGDDGRLNILPYVCLD

SEQ ID NO: 828473 - protein, 600 aa, Homo sapiens; identical to SEQ ID NO: 828471

SEQ ID NO: 828474 - protein, 386 aa, Homo sapiens
WKIISGSPPEQALSEASFQDPCVEMPPGDSDHGTSDLEKSFNLRPVLSPQQRVPVEARPRKCETHTESFKNSEILKPHRAKPYACNECGKAFSYCSSLSQHQKSHTGEKPYECSECGKAFSQSSSLIQHQRIHTGEKPYKCSECGRAFSQNANLTKHQRTHTGEKPYRCSECEKAFSDCSALVQHQRIHTGEKPYECSDCGKAFRHSANLTNHQRTHTGEKPYKCSECGKAFSYCAAFIQHQRIHTGEKPYRCAACGKAFSQSDPNHQRTHTGEKPYKCSECGKAFSQSTNLIIHQKTHTGEKPYKCNECGKFFSESSALIRHHIIHTGEKPYECNECGKAFNQSSSLSQHQRIHTGVKPYECSECGKAFRCSSAFVRHQRLHAGE

SEQ ID NO: 828475 - protein, 368 aa, Homo sapiens
WKIISGSPPEQALSEASFQDPCVEMPPGDSDHGTSDLEKSFNLRPVLSPQQRVPVEARPRKCETHTESFKNSEILKPHRAKPYACNECGKAFSYCSSLSQHQKSHTGEKPYECSECGKAFSQSSSLIQHQRIHTGEKPYKCSECGRAFSQNANLTKHQRTHTGEKPYRCSECEKAFSDCSALVQHQRIHTGEKPYECSDCGKAFRHSANLTNHQRTHTGEKPYKCSECGKAFSYCAAFIQHQRIHTGEKPYRCAACGKAFSQSDPNHQRTHTGEKPYKCSECGKAFSQSTNLIIHQKTHTGEKPYKCNECGKFFSESSALIRHHIIHTGDSQHQRIHTGVKPYECSECGKAFRCSSAFVRHQRLHAGE

SEQ ID NO: 828476 - protein, 66 aa, Homo sapiens
AEVGEEEEELEGEEEEGEQEEGQKEEEEGEEKEIEEESHELAGYTEMSRGRRAFQITCTGWQLWLW

SEQ ID NO: 828477 - protein, 204 aa, Homo sapiens
MASVSSATFSGHGARSLLQFLRLVGQLKRVPRTGWVYRNVQRPESVSDHMYRMAVMAMVIKDDRLNKDRCVRLALVHDMAECIVGDIAPADNIPKEEKHRREEEAMKQITQLLPEDLRKELYELWEEYETQSSAEAKFVKQLDQCEMILQASEYEDLEHKPGRLQDFYDSTAGKFNHPEIVQLVSELEAERSTNIAAAASEPHS

SEQ ID NO: 828478 - protein, 210 aa, Homo sapiens
CGRALPTVDGGSSRRDRLASWGGPESEPRAWRRERVPRTGWVYRNVQRPESVSDHMYRMAVMAMVIKDDRLNKDRCVRLALVHDMAECIVGDIAPADNIPKEEKHRREEEAMKQITQLLPEDLRKELYELWEEYETQSSAEAKFVKQLDQCEMILQASEYEDLEHKPGRLQDFYDSTAGKFNHPEIVQLVSELEAERSTNIAAAASEPHS

SEQ ID NO: 828479 - protein, 204 aa, Homo sapiens; identical to SEQ ID NO: 828477

SEQ ID NO: 828480 - protein, 185 aa, Homo sapiens
LTRPWQKQEAVVLCQWWRRKLRFAPRTQAEAGRMAVMAMVIKDDRLNKDRCVRLALVHDMAECIVGDIAPADNIPKEEKHRREEEAMKQITQLLPEDLRKELYELWEEYETQSSAEAKFVKQLDQCEMILQASEYEDLEHKPGRLQDFYDSTAGKFNHPEIVQLVSELEAERSTNIAAAASEPHS

SEQ ID NO: 828481 - protein, 204 aa, Homo sapiens; identical to SEQ ID NO: 828477

SEQ ID NO: 828482 - protein, 204 aa, Homo sapiens; identical to SEQ ID NO: 828477

SEQ ID NO: 828483 - protein, 218 aa, Homo sapiens
MASVSSATFSGHGARSLLQFLRLVGQLKRVPRTGWVYRNVQRPESVSDHMYRMAVMAMVIKDDRLNKDRCVRLALVHDMAECIVGDIAPADNIPKEEKHRREEEAMKQITQLLPEDLRKELYELWEEYETQSSAEAKFVKQLDQCEMILQASEYEDLEHKPGRLQDFYDSTADVSLFVFNCLNFSKKCDTTWALKEATEQEAVMKVPWMNTGGGSACL

SEQ ID NO: 828484 - protein, 212 aa, Homo sapiens
SGSGGGGGGVGRGGGRGGAGRGAEGRRRGGGERDRRRVPRTGWVYRNVQRPESVSDHMYRMAVMAMVIKDDRLNKDRCVRLALVHDMAECIVGDIAPADNIPKEEKHRREEEAMKQITQLLPEDLRKELYELWEEYETQSSAEAKFVKQLDQCEMILQASEYEDLEHKPGRLQDFYDSTAGKFNHPEIVQLVSELEAERSTNIAAAASEPHS

SEQ ID NO: 828485 - protein, 131 aa, Homo sapiens
SGSGGGGGGVGRGGGRGGAGRGAEGRRRGGGERDRRVRGGGRKTRGRGGGGGRGGASPRPAPPSRGRWPHGFGLLCDLLGPRGSVPTAVPAAGRAAQESPTNWLGIQKCPEAGERFRSHVPDGSYGYGDQR

SEQ ID NO: 828486 - protein, 66 aa, Homo sapiens; identical to SEQ ID NO: 828476

SEQ ID NO: 828487 - protein, 212 aa, Homo sapiens; identical to SEQ ID NO: 828484

SEQ ID NO: 828488 - protein, 204 aa, Homo sapiens; identical to SEQ ID NO: 828477

SEQ ID NO: 828489 - protein, 131 aa, Homo sapiens; identical to SEQ ID NO: 828485

SEQ ID NO: 828490 - protein, 131 aa, Homo sapiens; identical to SEQ ID NO: 828485

SEQ ID NO: 828491 - protein, 629 aa, Homo sapiens
AAAAEGAGSEASVGSVRLRSIMSQEGDYGRWTISSSDESEEEKPKPDKPSTSSLLCARQGAANEPRYTCSEAQKAAHKRKISPVKFSNTDSVLPPKRQKSGSQEDLGWCLSSSDDELQPEMPQKQAEKVVIKKEKDISAPNDGTAQRTENHGAPACHRLKEEEDEYETSGEGQDIWDMLDKGNPFQFYLTRVSGVKPKYNSGALHIKDILSPLFGTLVSSAQFNYCFDVDWLVKQYPPEFRKKPILLVHGDKREAKAHLHAQAKPYENISLCQAKLDIAFGTHHTKMMLLLYEEGLRVVIHTSNLIHADWHQKTQGIWLSPLYPRIADGTHKSGESPTHFKADLISYLMAYNAPSLKEWIDVIHKHDLSETNVYLIGSTPGRFQGSQKDNWGHFRLKKLLKDHASSMPNAESWPVVGQFSSVGSLGADESKWLCSEFKESMLTLGKESKTPGKSSVPLYLIYPSVENVRTSLEGYPAGGSLPYSIQTAEKQNWLHSYFHKWSAETSGRSNAMPHIKTYMRPSPDFSKIAWFLVTSANLSKAAWGALEKNGTQLMIRSYELGVLFLPSAFGLDSFKVKQKFFAGSQEPMATFPVPYDLPPELYGSKDRPWIWNIPYVKAPDTHGNMWVPS

SEQ ID NO: 828492 - protein, 298 aa, Homo sapiens
MSQEGDYGRWTISSSDESEEEKPKPDKPSTSSLLCARQGAANEPRYTCSEAQKAAHKRKISPVKFSNTDSVLPPKRQKSGSQEDLGWCLSSSDDELQPEMPQKQAEKVVIKKEKDISAPNDGTAQRTENHGAPACHRLKEEEDEYETSGEGQDIWDMLDKGNPFQFYLTRVSGVKPKYNSGALHIKDILSPLFGTLVSSAQFNYCFDVDWLVKQYPPEFRKKPILLVHGDKREAKAHLHAQAKPYENISLCQAKLDIAFGTHHTKMMLLLYEEGLRVVIHTSNLIHADWHQKTQGTHL

SEQ ID NO: 828493 - protein, 608 aa, Homo sapiens
MSQEGDYGRWTISSSDESEEEKPKPDKPSTSSLLCARQGAANEPRYTCSEAQKAAHKRKISPVKFSNTDSVLPPKRQKSGSQEDLGWCLSSSDDELQPEMPQKQAEKVVIKKEKDISAPNDGTAQRTENHGAPACHRLKEEEDEYETSGEGQDIWDMLDKGNPFQFYLTRVSGVKPKYNSGALHIKDILSPLFGTLVSSAQFNYCFDVDWLVKQYPPEFRKKPILLVHGDKREAKAHLHAQAKPYENISLCQAKLDIAFGTHHTKMMLLLYEEGLRVVIHTSNLIHADWHQKTQGIWLSPLYPRIADGTHKSGESPTHFKADLISYLMAYNAPSLKEWIDVIHKHDLSETNVYLIGSTPGRFQGSQKDNWGHFRLKKLLKDHASSMPNAESWPVVGQFSSVGSLGADESKWLCSEFKESMLTLGKESKTPGKSSVPLYLIYPSVENVRTSLEGYPAGGSLPYSIQTAEKQNWLHSYFHKWSAETSGRSNAMPHIKTYMRPSPDFSKIAWFLVTSANLSKAAWGALEKNGTQLMIRSYELGVLFLPSAFGLDSFKVKQKFFAGSQEPMATFPVPYDLPPELYGSKDRPWIWNIPYVKAPDTHGNMWVPS

SEQ ID NO: 828494 - protein, 324 aa, Homo sapiens
AAAAEGAGSEASVGSVRLRSIMSQEGDYGRWTISSSDESEEEKPKPDKPSTSSLLCARQGAANEPRYTCSEAQKAAHKRKISPVKFSNTDSVLPPKRQKSGSQEDLGWCLSSSDDELQPEMPQKQAEKVVIKKEKDISAPNDGTAQRTENHGAPACHRLKEEEDEYETSGEGQDIWDMLDKGNPFQFYLTRVSGVKPKYNSGALHIKDILSPLFGTLVSSAQFNYCFDVDWLVKQYPPEFRKKPILLVHGDKREAKAHLHAQAKPYENISLCQAKLDIAFGTHHTKMMLLLYEEGLRVVIHTSNLIHADWHQKTQGHFVHLCLC

SEQ ID NO: 828495 - protein, 509 aa, Homo sapiens
MPQKQAEKVVIKKEKDISAPNDGTAQRTENHGAPACHRLKEEEDEYETSGEGQDIWDMLDKGNPFQFYLTRVSGVKPKYNSGALHIKDILSPLFGTLVSSAQFNYCFDVDWLVKQYPPEFRKKPILLVHGDKREAKAHLHAQAKPYENISLCQAKLDIAFGTHHTKMMLLLYEEGLRVVIHTSNLIHADWHQKTQGIWLSPLYPRIADGTHKSGESPTHFKADLISYLMAYNAPSLKEWIDVIHKHDLSETNVYLIGSTPGRFQGSQKDNWGHFRLKKLLKDHASSMPNAESWPVVGQFSSVGSLGADESKWLCSEFKESMLTLGKESKTPGKSSVPLYLIYPSVENVRTSLEGYPAGGSLPYSIQTAEKQNWLHSYFHKWSAETSGRSNAMPHIKTYMRPSPDFSKIAWFLVTSANLSKAAWGALEKNGTQLMIRSYELGVLFLPSAFGLDSFKVKQKFFAGSQEPMATFPVPYDLPPELYGSKDRPWIWNIPYVKAPDTHGNMWVPS

SEQ ID NO: 828496 - protein, 200 aa, Homo sapiens
MSQEGDYGRWTISSSDESEEEKPKPDKPSTSSLLCARQGAANEPRYTCSEAQKAAHKRKISPVKFSNTDSVLPPKRQKSGSQEDLGWCLSSSDDELQPEMPQKQAEKVVIKKEKDISAPNDGTAQRTENHGAPACHRLKEEEDEYETSGEGQDIWDMLDKGNPFQFYLTRVSGVKPKYNSGALHIKGKRMLGVKELLNCP

SEQ ID NO: 828497 - protein, 118 aa, Homo sapiens
RGGRRRGGIRGKRWFCAPQVRVGRQWARTRCGLSRAAVGPGILLLAESRCAGCWGPAGLEADREEAARPGRWGRVASAPGPRFPPITAPQGARTGAAETCVLPGRGARGPCSGFYSQT

SEQ ID NO: 828498 - protein, 124 aa, Homo sapiens
RGGRRRGGIRGKRWFCAPQVRVGRQWARTRCGLSRAAVGPGILLLAESRCAGCWGPAGLEADREEAARPGRWGRVASAPGPRFPPITAPQGARTGAAETCVLPGRGARGPCSGFYFPPPKGKTP

SEQ ID NO: 828499 - protein, 608 aa, Homo sapiens; identical to SEQ ID NO: 828493

SEQ ID NO: 828500 - protein, 608 aa, Homo sapiens; identical to SEQ ID NO: 828493

SEQ ID NO: 828501 - protein, 608 aa, Homo sapiens; identical to SEQ ID NO: 828493

SEQ ID NO: 828502 - protein, 590 aa, Homo sapiens
AAAAEGAGSEASVGSVRLRSIMSQEGDYGRWTISSSDESEEEKPKPDKPSTSSLLCARQGAANEPRYTCSEAQKAAHKRKISPVKFSNTDSVLPPKRQKSGSQEDLGWCLSSSDDELQPEMPQKQAEKVVIKKEKDISAPNDGTAQRTENHGAPACHRLKEEEDEYETSGEGQDIWDMLDKGNPFQFYLTRVSGVKPKYNSGALHIKDILSPLFGTLVSSAQFNYCFDVDWLVKQYPPEFRKKPILLVHGDKREAKAHLHAQAKPYENISLCQAKLDIAFGTHHTKMMLLLYEEGLRVVIHTSNLIHADWHQKTQGIWLSPLYPRIADGTHKSGESPTHFKADLISYLMAYNAPSLKEWIDVIHKHDLSETNVYLIGSTPGRFQGSQKDNWGHFRLKKLLKDHASSMPNAESWPVVGQFSSVGSLGADESKWLCSEFKESMLTLGKESKTPGKSSVPLYLIYPSVENVRTSLEGYPAGGSLPYSIQTAEKQNWLHSYFHKWSAETSGRSNAMPHIKTYMRPSPDFSKIAWFLVTSANLSKAAWGALEKNGTQLMIRSYELGVLFLPSAFAPAKRIKDEVEASFSGNAWIS

SEQ ID NO: 828503 - protein, 200 aa, Homo sapiens; identical to SEQ ID NO: 828496

SEQ ID NO: 828504 - protein, 118 aa, Homo sapiens; identical to SEQ ID NO: 828497

SEQ ID NO: 828505 - protein, 246 aa, Homo sapiens
MGPQHLRLVQLFCLLGAISTLPRAGALLCYEATASRFRAVAFHNWKWLLMRNMVCKLQEGCEETLVFIETGTARGVVGFKGCSSSSSYPAQISYLVSPPGVSIASYSRVCRSYLCNNLTNLEPFVKLKASTPKSITSASCSCPTCVGEHMKDCLPNFVTTNSCPLAASTCYSSTLKFQAGFLNTTFLLMGCAREHNQLLADFHHIGSIKVTEVLNILEKSQIVGAASSRQDPAWGVVLGLLFAFRD

SEQ ID NO: 828506 - protein, 211 aa, Homo sapiens
MGPQHLRLVQLFCLLGAISTLPRMSCGAGCYKTQKGTARGVVGFKGCSSSSSYPAQISYLVSPPGVSIASYSRVCRSYLCNNLTNLEPFVKLKASTPKSITSASCSCPTCVGEHMKDCLPNFVTTNSCPLAASTCYSSTLKFQAGFLNTTFLLMGCAREHNQLLADFHHIGSIKVTEVLNILEKSQIVGAASSRQDPAWGVVLGLLFAFRD

SEQ ID NO: 828507 - protein, 117 aa, Homo sapiens
PVVLSGVVDPISRAAPQPLSLPVLGASGAAAYGADMAKSKNHTTHNQSRKWHRNGIKKPRSQRYESLKGVDPKFPEEHALCQEAQQKGPKEDAGQQMPRPMSARAEAIKALVKAQGG

SEQ ID NO: 828508 - protein, 86 aa, Homo sapiens
YTAGSEAGWRALREPRLMVQTWPSPRTTPHTTSPENGTEMVSRNPDHKDTNLLRGWTPSFLRNMRFAKKHNKKGLKKMQANKCQGP

SEQ ID NO: 828509 - protein, 86 aa, Homo sapiens; identical to SEQ ID NO: 828508

SEQ ID NO: 828510 - protein, 86 aa, Homo sapiens; identical to SEQ ID NO: 828508

SEQ ID NO: 828511 - protein, 111 aa, Homo sapiens
DHASRTRGSTHASGPTRPGASGAAAYGADMAKSKNHTTHNQSRKWHRNGIKKPRSQRYESLKGVDPKFPEEHALCQEAQQKGPKEDAGQQMPRPMSARAEAIKALVKAQGG

SEQ ID NO: 828512 - protein, 104 aa, Homo sapiens
RCHPRLTGGGGARAAERTGGADMAKSKNHTTHNQSRKWHRNGIKKPRSQRYESLKGVDPKFPEEHALCQEAQQKGPKEDAGQQMPRPMSARAEAIKALVKAQGG

SEQ ID NO: 828513 - protein, 92 aa, Homo sapiens
RRLLLLLNSRPFDCPSTIPKGVSRKLDRLAYIAHPKLGKRARARIAKGLRLCRPKAKAKAKAKDQTKAQAAAPASVPAQAPKRTQAPTKASE

SEQ ID NO: 828514 - protein, 96 aa, Homo sapiens
NSARASGAAAYGADMAKSKNHTTHNQSRKWHRNGIKKPRSQRYESLKGVDPKFPEEHALCQEAQQKGPKEDAGQQMPRPMSARAEAIKALVKAQGG

SEQ ID NO: 828515 - protein, 117 aa, Homo sapiens; identical to SEQ ID NO: 828507

SEQ ID NO: 828516 - protein, 66 aa, Homo sapiens
IRHALREPRLMVQTWPSPRTTPHTTSVSFLGPAYIPDPGKDWFRQTGTEMKGHVSIVGLRLIDFTQ

SEQ ID NO: 828517 - protein, 105 aa, Homo sapiens
KWQDEAGVNSDRGASGAAAYGADMAKSKNHTTHNQSRKWHRNGIKKPRSQRYESLKGVDPKFPEEHALCQEAQQKGPKEDAGQQMPRPMSARAEAIKALVKAQGG

SEQ ID NO: 828518 - protein, 104 aa, Homo sapiens
SLNIRVLSSGSGASGAAAYGADMAKSKNHTTHNQSRKWHRNGIKKPRSQRYESLKGVDPKFPEEHALCQEAQQKGPKEDAGQQMPRPMSARAEAIKALVKAQGG

SEQ ID NO: 828519 - protein, 110 aa, Homo sapiens
AYVAGLYRGRLFSLRVLGASGAAAYGADMAKSKNHTTHNQSRKWHRNGIKKPRSQRYESLKGVDPKFPEEHALCQEAQQKGPKEDAGQQMPRPMSARAEAIKALVKAQGG

SEQ ID NO: 828520 - protein, 117 aa, Homo sapiens; identical to SEQ ID NO: 828507

SEQ ID NO: 828521 - protein, 117 aa, Homo sapiens; identical to SEQ ID NO: 828507

SEQ ID NO: 828522 - protein, 117 aa, Homo sapiens; identical to SEQ ID NO: 828507

SEQ ID NO: 828523 - protein, 117 aa, Homo sapiens; identical to SEQ ID NO: 828507

SEQ ID NO: 828524 - protein, 117 aa, Homo sapiens; identical to SEQ ID NO: 828507

SEQ ID NO: 828525 - protein, 117 aa, Homo sapiens; identical to SEQ ID NO: 828507

SEQ ID NO: 828526 - protein, 95 aa, Homo sapiens
  misc_feature (10)..(10): Xaa can be any naturally occurring amino acid
FGTKAGEDIXGADMAKSKNHTTHNQSRKWHRNGIKKPRSQRYESLKGVDPKFPEEHALCQEAQQKGPKEDAGQQMPRPMSARAEAIKALVKAQGG

SEQ ID NO: 828527 - protein, 117 aa, Homo sapiens; identical to SEQ ID NO: 828507

SEQ ID NO: 828528 - protein, 72 aa, Homo sapiens
NSARASGAAAYGADMAKSKNHTTHNQSRKWHRNGIKKPRSQRYESLKGVDPKFPEEHALCQEAQHRGYQGPR

SEQ ID NO: 828529 - protein, 81 aa, Homo sapiens
IRHALREPRLMVQTWPSPRTTPHTTSPENGTEMVDPKFPEEHALCQEAQQKGPKEDAGQQMPRPMSARAEAIKALVKAQGG

SEQ ID NO: 828530 - protein, 72 aa, Homo sapiens
PVVLSGVVDPISRAAPQPLSLPVLGASGAAAYGADMAKSKNHTTHNQSRKWHRNGIKKPRSQRYESLKGPEV

SEQ ID NO: 828531 - protein, 117 aa, Homo sapiens; identical to SEQ ID NO: 828507

SEQ ID NO: 828532 - protein, 116 aa, Homo sapiens
RCHPRLTGGGGARAAERTGDRPCVCREQKLRGADMAKSKNHTTHNQSRKWHRNGIKKPRSQRYESLKGVDPKFPEEHALCQEAQQKGPKEDAGQQMPRPMSARAEAIKALVKAQGG

SEQ ID NO: 828533 - protein, 111 aa, Homo sapiens; identical to SEQ ID NO: 828511

SEQ ID NO: 828534 - protein, 104 aa, Homo sapiens; identical to SEQ ID NO: 828512

SEQ ID NO: 828535 - protein, 111 aa, Homo sapiens
RNFPQRKIIRVETSTTGPGASGAAAYGADMAKSKNHTTHNQSRKWHRNGIKKPRSQRYESLKGVDPKFPEEHALCQEAQQKGPKEDAGQQMPRPMSARAEAIKALVKAQGG

SEQ ID NO: 828536 - protein, 141 aa, Homo sapiens
AKGLSLCRPKAKAKAKAKDQTKAQAAAPASVPAQAPPGIQHSTQSSAVRPLPRQQASRYERSEYPTQNMTQSRKWHRNGIKKPRSQRYESLKGVDPKFPEEHALCQEAQQKGPKEDAGQQMPRPMSARAEAIKALVKAQGG

SEQ ID NO: 828537 - protein, 86 aa, Homo sapiens; identical to SEQ ID NO: 828508

SEQ ID NO: 828538 - protein, 117 aa, Homo sapiens; identical to SEQ ID NO: 828507

SEQ ID NO: 828539 - protein, 121 aa, Homo sapiens
MRTEGLVRPPTPAPGLPSAWGWGPPVLFVQINLRQDLLASVYEPVDIPKGVSRKLDRLAYIAHPKLGKRARARIAKGLRLCRPKAKAKAKAKDQTKAQAAAPASVPAQAPKRTQAPTKASE

SEQ ID NO: 828540 - protein, 117 aa, Homo sapiens; identical to SEQ ID NO: 828507

SEQ ID NO: 828541 - protein, 117 aa, Homo sapiens; identical to SEQ ID NO: 828507

SEQ ID NO: 828542 - protein, 121 aa, Homo sapiens; identical to SEQ ID NO: 828539

SEQ ID NO: 828543 - protein, 117 aa, Homo sapiens; identical to SEQ ID NO: 828507

SEQ ID NO: 828544 - protein, 141 aa, Homo sapiens; identical to SEQ ID NO: 828536

SEQ ID NO: 828545 - protein, 121 aa, Homo sapiens; identical to SEQ ID NO: 828539

SEQ ID NO: 828546 - protein, 72 aa, Homo sapiens
EFGTRFGSRGLWCRHGQVQEPHHTQPVPKMAQKWYTNLLRGWTPSFLRNMRFAKKHNKKGLKKMQANKCQGP

SEQ ID NO: 828547 - protein, 397 aa, Homo sapiens
MSVGRRRIKLLGILMMANVFIYFIMEVSKSSSQEKNGKGEVIIPKEKFWKISTPPEAYWNREQEKLNRQYNPILSMLTNQTGEAGRLSNISHLNYCEPDLRVTSVVTGFNNLPDRFKDFLLYLRCRNYSLLIDQPDKCAKKPFLLLAIKSLTPHFARRQAIRESWGQESNAGNQTVVRVFLLGQTPPEDNHPDLSDMLKFESEKHQDILMWNYRDTFFNLSLKEVLFLRWVSTSCPDTEFVFKGDDDVFVNTHHILNYLNSLSKTKAKDLFIGDVIHNAGPHRDKKLKYYIPEVVYSGLYPPYAGGGGFLYSGHLALRLYHITDQVHLYPIDDVYTGMCLQKLGLVPEKHKGFRTFDIEEKNKNNICSYVDLMLVHSRKPQEMIDIWSQLQSAHLKC

SEQ ID NO: 828548 - protein, 397 aa, Homo sapiens; identical to SEQ ID NO: 828547

SEQ ID NO: 828549 - protein, 397 aa, Homo sapiens; identical to SEQ ID NO: 828547

SEQ ID NO: 828550 - protein, 397 aa, Homo sapiens; identical to SEQ ID NO: 828547

SEQ ID NO: 828551 - protein, 393 aa, Homo sapiens
MVSRSLLGILMMANVFIYFIMEVSKSSSQEKNGKGEVIIPKEKFWKISTPPEAYWNREQEKLNRQYNPILSMLTNQTGEAGRLSNISHLNYCEPDLRVTSVVTGFNNLPDRFKDFLLYLRCRNYSLLIDQPDKCAKKPFLLLAIKSLTPHFARRQAIRESWGQESNAGNQTVVRVFLLGQTPPEDNHPDLSDMLKFESEKHQDILMWNYRDTFFNLSLKEVLFLRWVSTSCPDTEFVFKGDDDVFVNTHHILNYLNSLSKTKAKDLFIGDVIHNAGPHRDKKLKYYIPEVVYSGLYPPYAGGGGFLYSGHLALRLYHITDQVHLYPIDDVYTGMCLQKLGLVPEKHKGFRTFDIEEKNKNNICSYVDLMLVHSRKPQEMIDIWSQLQSAHLKC

SEQ ID NO: 828552 - protein, 397 aa, Homo sapiens; identical to SEQ ID NO: 828547

SEQ ID NO: 828553 - protein, 120 aa, Homo sapiens
MVQPFTTIPFPPPPQNGIPTEYGVPHTQDYAGQTGEHNLTLYGSTQAHGEQSSNSPSTQNGSLTTEGGAQTDGQQSQTQSSENSESKSTPKRLHVSNIPFRFRDPDLRQMFGGKSLKSFY

SEQ ID NO: 828554 - protein, 568 aa, Homo sapiens
MKALGNRKARSFWLPGLVTLVLGDLSPKGQLLKGVIQRHGASGYGFVLGLFLTPASTHVLDWITDSCPRIKMTDLMTASAFFVSRVIYLEGVDLLCRIHILSPFRILSRLVTGREAVPETRGDVKEARGLDAIITDSGEEDREEGDTNCPVHWPFLRVPPPQAKVWFVAVEDNFCCMYINILVRGAGNGMRAFTVLGNGGREDFAFAFALRENFELTKKTEVWGHDHKGAIPKRWQATYSVETRPNSKWFVSIAGENRRMSLRVFLFFFPRKSKDNGKGREGGSHRPFKRGRILSLRHLECISVQLVLAEASKGKLCAFQWFLLHFQGWCLTPLPPAPFSKKEVNGVLLFMKGSLVFSVNTENWGSCKHLDFTVSTSPSPFDFETPYGQLHQRQVARSSTACLFLTLVLTVLKKESQRSLAFREFVRGCWLIIPENLLMLNHSTCMIFFSFTIVHDLDFLYSWKLGSLKEASSDTFISMSLLEPRELPIGIFQNSSCHLVQFPLTQISHCDSPFVRLSGLTKPTITIILQQPQSELSQHFFFFEKEVDWGTTFSLRGASGNLDNRSHR

SEQ ID NO: 828555 - protein, 580 aa, Homo sapiens
MIKASVLQHFPNEGIRKKKSTVFLAPWSSHIGTEGDLSPKGQLLKGVIQRHGASGYGFVLGLFLTPASTHVLDWITDSCPRIKMTDLMTASAFFVSRVIYLEGVDLLCRIHILSPFRILSRLVTGREAVPETRGDVKEARGLDAIITDSGEEDREEGDTNCPVHWPFLRVPPPQAKVWFVAVEDNFCCMYINILVRGAGNGMRAFTVLGNGGREDFAFAFALRENFELTKKTEVWGHDHKGAIPKRWQATYSVETRPNSKWFVSIAGENRRMSLRVFLFFFPRKSKDNGKGREGGSHRPFKRGRILSLRHLECISVQLVLAEASKGKLCAFQWFLLHFQGWCLTPLPPAPFSKKEVNGVLLFMKGSLVFSVNTENWGSCKHLDFTVSTSPSPFDFETPYGQLHQRQVARSSTACLFLTLVLTVLKKESQRSLAFREFVRGCWLIIPENLLMLNHSTCMIFFSFTIVHDLDFLYSWKLGSLKEASSDTFISMSLLEPRELPIGIFQNSSCHLVQFPLTQISHCDSPFVRLSGLTKPTITIILQQPQSELSQHFFFFEKEVDWGTTFSLRGASGNLDNRSHR

SEQ ID NO: 828556 - protein, 541 aa, Homo sapiens
MGQLLKGVIQRHGASGYGFVLGLFLTPASTHVLDWITDSCPRIKMTDLMTASAFFVSRVIYLEGVDLLCRIHILSPFRILSRLVTGREAVPETRGDVKEARGLDAIITDSGEEDREEGDTNCPVHWPFLRVPPPQAKVWFVAVEDNFCCMYINILVRGAGNGMRAFTVLGNGGREDFAFAFALRENFELTKKTEVWGHDHKGAIPKRWQATYSVETRPNSKWFVSIAGENRRMSLRVFLFFFPRKSKDNGKGREGGSHRPFKRGRILSLRHLECISVQLVLAEASKGKLCAFQWFLLHFQGWCLTPLPPAPFSKKEVNGVLLFMKGSLVFSVNTENWGSCKHLDFTVSTSPSPFDFETPYGQLHQRQVARSSTACLFLTLVLTVLKKESQRSLAFREFVRGCWLIIPENLLMLNHSTCMIFFSFTIVHDLDFLYSWKLGSLKEASSDTFISMSLLEPRELPIGIFQNSSCHLVQFPLTQISHCDSPFVRLSGLTKPTITIILQQPQSELSQHFFFFEKEVDWGTTFSLRGASGNLDNRSHR

SEQ ID NO: 828557 - protein, 538 aa, Homo sapiens
MLKGVIQRHGASGYGFVLGLFLTPASTHVLDWITDSCPRIKMTDLMTASAFFVSRVIYLRGRDLLCRIHILSPFRILSRLVTGREAVPETRGDVKEARGLDAIITDSGEEDREEGDTNCPVHWPFLRVPPPQAKVWFVAVEDNFCCMYINILVRGAGNGMRAFTVLGNGGREDFAFAFALRENFELTKKTEVWGHDHKGAIPKRWQATYSVETRPNSKWFVSIAGENRRMSLRVFLFFFPRKSKDNGKGREGGSHRPFKRGRILSLRHLECISVQLVLAEASKGKLCAFQWFLLHFQGWCLTPLPPAPFSKKEVNGVLLFMKGSLVFSVNTENWGSCKHLDFTVSTSPSPFDFETPYGQLHQRQVARSSTACLFLTLVLTVLKKESQRSLAFREFVRGCWLIIPENLLMLNHSTCMIFFSFTIVHDLDFLYSWKLGSLKEASSDTFISMSLLEPRELPIGIFQNSSCHLVQFPLTQISHCDSPFVRLSGLTKPTITIILQQPQSELSQHFFFFEKEVDWGTTFSLRGASGNLDNRSHR

SEQ ID NO: 828558 - protein, 538 aa, Homo sapiens
MLKGVIQRHGASGYGFVLGLFLTPASTHVLDWITDSCPRIKMTDLMTASAFFVSRVIYLKGVDLLCRIHILSPFRILSRLVTGREAVPETRGDVKEARGLDAIITDSGEEDREEGDTNCPVHWPFLRVPPPQAKVWFVAVEDNFCCMYINILVRGAGNGMRAFTVLGNGGREDFAFAFALRENFELTKKTEVWGHDHKGAIPKRWQATYSVETRPNSKWFVSIAGENRRMSLRVFLFFFPRKSKDNGKGREGGSHRPFKRGRILSLRHLECISVQLVLAEASKGKLCAFQWFLLHFQGWCLTPLPPAPFSKKEVNGVLLFMKGSLVFSVNTENWGSCKHLDFTVSTSPSPFDFETPYGQLHQRQVARSSTACLFLTLVLTVLKKESQRSLAFREFVRGCWLIIPENLLMLNHSTCMILFHFTIVHDLDFLYSWKLGSLKEASSDTFISMSLLEPRELPIGIFQNSSCHLVQFPLTQISHCDSPFVRLSGLTKPTITIILQQPQSELSQHFFFFEKEVDWGTTFSLRGASGNLDNRSHR

SEQ ID NO: 828559 - protein, 492 aa, Homo sapiens
MTASAFFVSRVIYLEGVDLLCRIHILSPFRILSRLVTGREAVPETRGDVKEARGLDAIITDSGEEDREEGDTNCPVHWPFLRVPPPQAKVWFVAVEDNFCCMYINILVRGAGNGMRAFTVLGNGGREDFAFAFALRENFSCLKKQKFGVMITKGPFPKDGKPRIQWRLGQILKVLSIAGENRRMSLRVFLFFFLERGKDNGKGREGGSHRPFKRGRILSLRHLECISVQLVLAEASKGKLCAFQWFLLHFQGWCLTPLPPAPFSKKEVNGVLLFMKGSLVFSVNTENWGSCKHLDFTVSTSPSPFEFETPYGQLHQRQVARSSTACLFLTLVLTVLKKESQRSLAFREFVRGCWLIIPENLLMLNHSTCMIFFSFTIVHDLDFLYSWKLGSLKEASSDTFISMSLLEPRELPIGIFQNSSCHLVQFPLTQISHCDSPFVRLSGLTKPTITIILQQPQSELSQHFFFFEKEVDWGTTFSLRGASGNLDNRSHR

SEQ ID NO: 828560 - protein, 479 aa, Homo sapiens
MGVDLLCRIHILSPFRILSRLVTGREAVPETRGDVKEARGLDAIITDSGEEDREEGDTNCPVHWPFLRVPPPQAKVWFVAVEDNFCCMYINILVRGAGNGMRAFTVLGNGGREDFAFAFALRENFELTKKTEVWGHDHKGAIPKRWQATYSVETRPNSKWFVSIAGENRRMSLRVFLFFFPRKSKDNGKGREGGSHRPFKRGRILSLRHLECISVQLVLAEASKGKLCAFQWFLLHFQGWCLTPLPPAPFSKKEVNGVLLFMKGSLVFSVNTENWGSCKHLDFTVSTSPSPFDFETPYGQLHQRQVARSSTACLFLTLVLTVLKKESQRSLAFREFVRGCWLIIPENLLMLNHSTCMIFFSFTIVHDLDFLYSWKLGSLKEASSDTFISMSLLEPRELPIGIFQNSSCHLVQFPLTQISHCDSPFVRLSGLTKPTITIILQQPQSELSQHFFFFEKEVDWGTTFSLRGASGNLDNRSHR

SEQ ID NO: 828561 - protein, 525 aa, Homo sapiens
MGLFWVCFELLPPHMFLTDELTHVPELKWLTYDSISILCKQSDISEEGVDLLCRIHILSPFRILSRLVTGREAVPETRGDVKEARGLDAIITDSGEEDREEGDTNCPVHWPFLRVPPPQAKVWFVAVEDNFCCMYINILVRGAGNGMRAFTVLGNGGREDFAFAFALRENFSCLKKQKFGVMITKGPFPKDGKPRIQWRLGQILKVLSIAGENRRMSLRVFLFFFPEKEVRIMGKVEKAAPTDLLREAESVSLRHLECISVQLVLAEASKGKLCAFQWFLLHFQGWCLTPLPPAPFSKKEVNGVLLFMKGSLVFSVNTENWGSCKHLDFTVSTSPSPFDFETPYGQLHQRQVARSSTACLFLTLVLTVLKKESQRSLAFREFVRGCWLIIPENLLMLNHSTCMFFFSFTIVHDLDFLYSWKLGSLKEASSDTFISMSLLEPRELPIGIFQNSSCHLVQFPLTQISHCDSPFVRLSGLTKPTITIILQQPQSELSQHFFFFEKEVDWGTTFSLRGASGNLDNRSHR

SEQ ID NO: 828562 - protein, 568 aa, Homo sapiens; identical to SEQ ID NO: 828554

SEQ ID NO: 828563 - protein, 392 aa, Homo sapiens
MYINILVRGAGNGMRAFTVLGNGGREDFAFAFALRENFELTKKTEVWGHDHKGAIPKRWQATYSVETRPNSKWFVSIAGENRRMSLRVFLFFFLERGKDNGKGREGGSHRPFKRGRILSLRHLECISVQLVLAEASKGKLCAFQWFLLHFQGWCLTPLPPAPFSKKEVNGVLLFMKGSLVFSVNTENWGSCKHLDFTVSTSPSPFDFETPYGQLHQRQVARSSTACLFLTLVLTVLKKESQRSLAFREFVRGCWLIIPENLLMLNHSTCMIFFSFTIVHDLDFLYSWKLGSLKEASSDTFISMSLLEPRELPIGIFQNSSCHLVQFPLTQISHCDSPFVRLSGLTKPTITIILQQPQSELSQHFFFFEKEVDWGTTFSLRGASGNLDNRSHR

SEQ ID NO: 828564 - protein, 343 aa, Homo sapiens
MITKGPFPKDGKPRIQWRLGQILKVLSIAGENRRMSLRVFSSFFLERGKDNGKGREGGSHRPFKRGRILSLRHLECISVQLVLAEASKGKLCAFQWFLLHFQGWCLTPLPPAPFSKKEVNGVLLFMKGSLVFSVNTENWGSCKHLDFTVSTSPSPFDFETPYGQLHQRQVARSSTACLFLTLVLTVLKKESQRSLAFREFVRGCWLIIPENLLMLNHSTCMIFFSFTIVHDLDFLYSWKLGSLKEASSDTFISMSLLEPRELPIGIFQNSSCHLVQFPLTQISHCDSPFVRLSGLTKPTITIILQQPQSELSQHFFFFEKEVDWGTTFSLRGASGNLDNRSHR

SEQ ID NO: 828565 - protein, 188 aa, Homo sapiens
MNFETPYGQLHQRQVARSSTACLFLTLVLTVLKKESQRSLAFREFVRGCWLIIPENLLMLNHSTCMIFFSFTIVHDLDFLYSWKLGSLKEASSDTFISMSLLEPRELPIGIFQNSSCHLVQFPLTQISHCDSPFVRLSGLTKPTITIILQQPQSELSQHFFFFEKEVDWGTTFSLRGASGNLDNRSHR

SEQ ID NO: 828566 - protein, 473 aa, Homo sapiens
ATVGAEAQGEVACRGSPGSRRRGGRGRMAEGAQPQQPPQLGPGAAARGMKRESELELPVPGAGGDGADPGLSKRPRTEEAAADGGGGMQNEPLTPGYHGFPARDSQGNQEPTTTPDAMVQPFTTIPFPPPPQNGIPTEYGVPHTQDYAGQTGEHNLTLYGSTQAHGEQSSNSPSTQNGSLTTEGGAQTDGQQSQTQSSENSESKSTPKRLHVSNIPFRFRDPDLRQMFGQFGKILDVEIIFNERGSKGFGFVTFENSADADRAREKLHGTVVEGRKIEVNNATARVMTNKKMVTPYANGWKLSPVVGAVYGPELYAASSFQADVSLGNDAAVPLSGRGGINTYIPLIIPGFPYPTAATTAAAFRGAHLRGRGRTVYGAVRAVPPTAIPAYPGVVYQDGFYGADLYGGYAAYRYAQPATATAATAAAAAAAAYSDGYGRVYTADPYHALAPAASYGVGAVASLYRGGYSRFAPY

SEQ ID NO: 828567 - protein, 473 aa, Homo sapiens; identical to SEQ ID NO: 828566

SEQ ID NO: 828568 - protein, 221 aa, Homo sapiens
EYQQAYRFYLVHGTGLVNILGVPYNQKRGGRGRMAEGAQPQQPPQLGPGAAARGMKRESELELPVPGAGGDGADPGLSKRPRTEEAAADGGGGMQNEPLTPGYHGFPARDSQGNQEPTTTPDAMVQPFTTIPFPPPPQNGIPTEYGVPHTQDYAGQTGEHNLTLYGSTQAHGEQSSNSPSTQNGSLTTEGGAQTDGQQSQTQSSENSESKSTPKRLHCDSL

SEQ ID NO: 828569 - protein, 103 aa, Homo sapiens
MEKKKMVTQGNQEPTTTPDAMVQPFTTIPFPPPPQNGIPTDVTVSNSLPFSLRIILYSSFQTIQYSLGYSYYYQVAGIVKVGVVRSLAFIPYFFVLLSMCINY

SEQ ID NO: 828570 - protein, 568 aa, Homo sapiens; identical to SEQ ID NO: 828554

SEQ ID NO: 828571 - protein, 577 aa, Homo sapiens
MSYSISQMKALGNKKSTVFLAPWSSHIGTRVTFSPKGQLLKGVIQRHGASGYGFVLGLFLTPASTHVLDWITDSCPRIKMTDLMTASAFFVSRVIYLRGRDLLCRIHILSPFRILSRLVTGREAVPETRGDVKEARGLDAIITDSGEEDREYGDTNCPVHWPFLRVPPPQAKVWFVAVEDNFCCMYINILVRGAGNGMRAFTVLGNGGREDFAFAFALRENFELTKKTEVWGHDHKGAIPKRWQATYSVETRPNSKWFVSIAGENRRMSLRVFLFFFPEKEVRIMGKVEKAAPTDLLREAESVSLRHLECISVQLVLAEASKGKLCAFQWFLLHFQGWCLTPLPPAPFSKKEVNGVLLFMKGSLVFSVNTENWGSCKHLDFTVSTSPSPFELETPYGQLHQRQVARSSTACLFLTLVLTVLKKESQRSLAFREFVRGCWLIIPENLLMLNHSTCMIFFSFTIVHDLDFLYSWKLGSLKEASSDTFISMSLLEPRELPIGIFQNSSCHLVQFPLTQISHCDSPFVRLSGLTKPTITIILQQPQSELSQHFFFFEKEVDWGTTFSLRGASGNLDNRSHR

SEQ ID NO: 828572 - protein, 568 aa, Homo sapiens
MKALGNRKARSFWLPGLVTLVLGDLSPKGQLLKGVIQRHGASGYGFVLGLFLTPASTHVLDWITDSCPRIKMTDLMTASAFFVSRVIYLRGRDLLCRIHILSPFRILSRLVTGREAVPETRGDVKEARGLDAIITDSGEEDREYGDTNCPVHWPFLRVPPPQAKVWFVAVEDNFCCMYINILVRGAGNGMRAFTVLGNGGREDFAFAFALRENFELTKKTEVWGHDHKGAIPKRWQATYSVETRPNSKWFVSIAGENRRMSLRVFLFFFPRKSKDNGKGREGGSHRPFKRGRILSLRHLECISVQLVLAEASKGKLCAFQWFLLHFQGWCLTPLPPAPFSKKELNGVLLFMKGSLVFSVNTENWGSCKHLDFTVSTSPSPFDFETPYGQLHQRQVARSSTACLFLTLVLTVLKKESQRSLAFREFVRGCWLIIPENLLMLNHSTCMIFFSFTIVHDLDFLYSWKLGSLKEASSDTFISMSLLEPRELPIGIFQNSSCHLVQFPLTQISHCDSPFVRLSGLTKPTITIILQQPQSELSQHFFFFEKEVDWGTTFSLRGASGNLDNRSHR

SEQ ID NO: 828573 - protein, 515 aa, Homo sapiens
MPPHMFLTDELTHVPELKWLTYDSISILCKQSDISEEGVDLLCRIHILSPFRILSRLVTGREAVPETRGDVKEARGLDAIITDSGEEDREEGDTNCPVHWPFLRVPPPQAKVWFVAVEDNFCCMYINILVRGAGNGMRAFTVLGNGGREDFAFAFALRENFELTKKTEVWGHDHKGAIPKRWQATYSVETRPNSKWFVSIAGENRRMSLRVFLFFFPRKSKDNGKGREGGSHRPFKRGRILSLRHLECISVQLVLAEASKGKLCAFQWFLLHFQGWCLTPLPPAPFSKKEVNGVLLFMKGSLVFSVNTENWGSCKHLDFTVSTSPSPFDFETPYGQLHQRQVARSSTACLFLTLVLTVLKKESQRSLAFREFVRGCWLIIPENLLMLNHSTCMIFFSFTIVHDLDFLYSWKLGSLKEASSDTFISMSLLEPRELPIGIFQNSSCHLVQFPLTQISHCDSPFVRLSGLTKPTITIILQQPQSELSQHFFFFEKEVDWGTTFSLRGASGNLDNRSHR

SEQ ID NO: 828574 - protein, 463 aa, Homo sapiens
ATVGAEAQGEVACRGSPGSRRRGGRGRMAEGAQPQQPPQLGPGAAARGMKRESELELPVPGAGGDGADPGLSKRPRTEEAAADGGGGMQNEPLTPGYHGFPARDSQGNQEPTTTPDAMVQPFTTIPFPPPPQNGIPTEYGVPHTQDYAGQTGEHNLTLYGSTQAHGEQSSNSPSTQNGSLTTEGGAQTDGQQSQTQSSENSESKSTPKRLHVSNIPFRFRDPDLRQMFGQFGKILDVEIIFNERGSKGFGFVTFENSADADRAREKLHGTVVEGRKIEVNNATARVMTNKKMVTPYANGWKLSPVVGAVYGPELYAASSFQADVSLGNDAAVPLSGRGGINTYIPLIIPGFPYPTAATTAAAFRGAHLRGRGRTVYGAVRAVPPTAIPAYPGVDMQPTDMHSLLLQPQPPLLQPLQPLTVTVMAGCTQPTPTMPLPLPLAMELALWRVYTEVATADLPPTEVT

SEQ ID NO: 828575 - protein, 503 aa, Homo sapiens
MSLNENDLTYDSISILCKQSDISEEGVDLLCRIHILSPFRILSRLVTGREAVPETRGDVKEARGLDAIITDSGEEDREEGDTNCPVHWPFLRVPPPQAKVWFVAVEDNFCCMYINILVRGAGNGMRAFTVLGNGGREDFAFAFALRENFELTKKTEVWGHDHKGAIPKRWQATYSVETRPNSKWFVSIAGENRRMSLRVFLFFFPRKSKDNGKGREGGSHRPFKRGRILSLRHLECISVQLVLAEASKGKLCAFQWFLLHFQGWCLTPLPPAPFSKKEVNGVLLFMKGSLVFSVNTENWGSCKHLDFTVSTSPSPFDFETPYGQLHQRQVARSSTACLFLTLVLTVLKKESQRSLAFREFVRGCWLIIPENLLMLNHSTCMIFFSFTIVHDLDFLYSWKLGSLKEASSDTFISMSLLEPRELPIGIFQNSSCHLVQFPLTQISHCDSPFVRLSGLTKPTITIILQQPQSELSQHFFFFEKEVDWGTTFSLRGASGNLDNRSHR

SEQ ID NO: 828576 - protein, 489 aa, Homo sapiens
MLCKQSDISEEGVDLLCRIHILSPFRILSRLVTGREAVPETRGDVKEARGLDAIITDSGEEDREEGDTNCPVHWPFLRVPPPQAKVWFVAVEDNFCCMYINILVRGAGNGMRAFTVLGNGGREDFAFAFALRENFELTKKTEVWGHDHKGAIPKRWQATYSVETRPNSKWFVSIAGENRRMSLRVFLFFFPRKSKDNGKGREGGSHRPFKRGRILSLRHLECISVQLVLAEASKGKLCAFQWFLLHFQGWCLTPLPPAPFSKKEVNGVLLFMKGSLVFSVNTENWGSCKHLDFTVSTSPSPFDFETPYGQLHQRQVARSSTACLFLTLVLTVLKKESQRSLAFREFVRGCWLIIPENLLMLNHSTCMIFFSFTIVHDLDFLYSWKLGSLKEASSDTFISMSLLEPRELPIGIFQNSSCHLVQFPLTQISHCDSPFVRLSGLTKPTITIILQQPQSELSQHFFFFEKEVDWGTTFSLRGASGNLDNRSHR

SEQ ID NO: 828577 - protein, 379 aa, Homo sapiens
MRAFTVLGNGGREDFAFAFALRENFELTKKTEVWGHDHKGAIPKRWQATYSVETRPNSKWFVSIAGENRRMSLRVFLFFFPRKSKDNGKGREGGSHRPFKRGRILSLRHLECISVQLVLAEASKGKLCAFQWFLLHFQGWCLTPLPPAPFSKKEVNGVLLFMKGSLVFSVNTENWGSCKHLDFTVSTSPSPFDFETPYGQLHQRQVARSSTACLFLTLVLTVLKKESQRSLAFREFVRGCWLIIPENLLMLNHSTCMIFFSFTIVHDLDFLYSWKLGSLKEASSDTFISMSLLEPRELPIGIFQNSSCHLVQFPLTQISHCDSPFVRLSGLTKPTITIILQQPQSELSQHFFFFEKEVDWGTTFSLRGASGNLDNRSHR

SEQ ID NO: 828578 - protein, 568 aa, Homo sapiens; identical to SEQ ID NO: 828554

SEQ ID NO: 828579 - protein, 218 aa, Homo sapiens
MKGSLVFSVNTENWGSCKHLDFTVSTSPSPFDFETPYGQLHQRQVARSSTACLFLTLVLTVLKKESQRSLAFREFVRGCWLIIPENLLMLNHSTCMIFFSFTIVHDLDFLYSWKLGSLKEASSDTFISMSLLEPRELPIGIFQNSSCHLVQFPLTQISHCDSPFVRLSGLTKPTITIILQQPQSELSQHFFFFEKEVDWGTTFSLRGASGNLDNRSHR

SEQ ID NO: 828580 - protein, 473 aa, Homo sapiens; identical to SEQ ID NO: 828566

SEQ ID NO: 828581 - protein, 463 aa, Homo sapiens; identical to SEQ ID NO: 828574

SEQ ID NO: 828582 - protein, 118 aa, Homo sapiens
EYQQAYRFYLVHGTGLVNILGVPYNQKRGGRGRMAEGAQPQQPPQLGPGAAARGMKRESELELPVPGAGGDGADPGLSKRPRTEEAAADGGGGMQNEPLTPGYHGFPARDSQVGICCL

SEQ ID NO: 828583 - protein, 863 aa, Homo sapiens
GSAGLEPALGGCPLGASQLPSAPAMDCYTANWNPLGDSAFYRKYELYSMDWDLKEELRDCLVAAAPYGGPIALLRNPWRKEKAASVRPVLDIYSASGMPLASLLWKSGPVVSLGWSAEEELLCVQEDGAVLVYGLHGDFRRHFSMGNEVLQNRVLDARIFHTEFGSGVAILTGAHRFTLSANVGDLKLRRMPEVPGLQSAPSCWTVLCQDRVAHILLAVGPDLYLLDHAACSAVTPPGLAPGVSSFLQMAVSFTYRHLALFTDTGYIWMGTASLKEKLCEFNCNIRAPPKQMVWCSRPRSKERAVVVAWERRLMVVGDAPESIQFVLDEDSYLVPELDGVRIFSRSTHEFLHEVPAASEEIFKIASMAPGALLLEAQKEYEKESQKADEYLREIQELGQLTQAVQQCIEAAGHEHQPDMQKSLLRAASFGKCFLDRFPPDSFVHMCQDLRVLNAVRDYHIGIPLTYSQYKQLTIQVLLDRLVLRRLYPLAIQICEYLRLPEVQGVSRILAHWACYKVQQKDVSDEDVARAINQKLGDTPGVSYSDIAARAYGCGRTELAIKLLEYEPRSGEQVPLLLKMKRSKLALSKAIESGDTDLVFTVLLHLKNELNRGDFFMTLRNQPMALSLYRQFCKHQELETLKDLYNQDDNHQELGSFHIRASYAAEERIEGRVAALQTAADAFYKAKNEFAAKATEDQMRLLRLQRRLEDELGGQFLDLSLHDTVTTLILGGHNKRAEQLARDFRIPDKRLWWLKLTALADLEDWEELEKFSKSKKSPIGYLPFVEICMKQHNKYEAKKYASRVGPEQKVKALLLVGDVAQAADVAIEHRNEAELSLVLSHCTGATDGATADKIQRARAQAQKK

SEQ ID NO: 828584 - protein, 781 aa, Homo sapiens
GSAGLEPALGGCPLGASQLPSAPAMDCYTANWNPLGDSAFYRKYELYSMDWDLKEELRDCLVAAAPYGGPIALLRNPWRKEKAASVRPVLDIYSASGMPLASLLWKSGPVVSLGWSAEEELLCVQEDGAVLVYGLHGDFRRHFSMGNEVLQNRVLDARIFHTEFGSGVAILTGAHRFTLSANVGDLKLRRMPEVPGLQSAPSCWTVLCQDRVAHILLAVGPDLYLLDHAACSAVTPPGLAPGVSSFLQMAVSFTYRHLALFTDTGYIWMGTASLKEKLCEFNCNIRAPPKQMVWCSRPRSKERAVVVAWERRLMVVGDAPESIQFVLDEDSYLVPELDGVRIFSRSTHEFLHEVPAASEEIFKIASMAPGALLLEAQKEYEKESQKADEYLREIQELGQLTQAVQQCIEAAGHEHQPDMQKSLLRVGLDGRAGEGGAGRGWDGQQGSSLLSPSGSSQAASFGKCFLDRFPPDSFVHMCQDLRVLNAVRDYHIGIPLTYSQYKQLTIQVLLDRLVLRRLYPLAIQICEYLRLPEVQGVSRILAHWACYKVQQKDVSDEDVARAINQKLGDTPGVSYSDIAARAYGCGRTELAIKLLEYEPRSGEQVPLLLKMKRSKLALSKAIESGDTDLVFTVLLHLKNELNRGDFFMTLRNQPMALSLYRQFCKHQELETLKDLYNQDDNHQELGSFHIRASYAAEERIEGRVAALQTAADAFYKAKNEFAAKATEDQMRLLRLQRRLEDELGGQFLDLSLHDTVTTLILGGHNKRAEQLARDFRIPDKR

SEQ ID NO: 828585 - protein, 749 aa, Homo sapiens
GSAGLEPALGGCPLGASQLPSAPAMDCYTANWNPLGDSAFYRKYELYSMDWDLKEELRDCLVAAAPYGGPIALLRNPWRKEKAASVRPVLDIYSASGMPLASLLWKSGPVVSLGWSAEEELLCVQEDGAVLVYGLHGDFRRHFSMGNEVLQNRVLDARIFHTEFGSGVAILTGAHRFTLSANVGDLKLRRMPEVPGLQSAPSCWTVLCQDRVAHILLAVGPDLYLLDHAACSAVTPPGLAPGVSSFLQMAVSFTYRHLALFTDTGYIWMGTASLKEKLCEFNCNIRAPPKQMVWCSRPRSKERAVVVAWERRLMVVGDAPESIQFVLDEDSYLVPELDGVRIFSRSTHEFLHEVPAASEEIFKIASMAPGALLLEAQKEYEKESQKADEYLREIQELGQLTQAVQQCIEAAGHEHQPDMQKSLLRAASFGKCFLDRFPPDSFVHMCQDLRVLNAVRDYHIGIPLTYSQYKQLTIQVLLDRLVLRRLYPLAIQICEYLRLPEVQGVSRILAHWACYKVQQKDVSDEDVARAINQKLGDTPGVSYSDIAARAYGCGRTELAIKLLEYEPRSGEQVPLLLKMKRSKLALSKAIESGDTDLVFTVLLHLKNELNRGDFFMTLRNQPMALSLYRQFCKHQELETLKDLYNQDDNHQELGSFHIRASYAAEERIEGRVAALQTAADAFYKAKNEFAAKATEDQMRLLRLQRRLEDELGGQFLDLSLHDTVTTLILGGHNKRAEQLARDFRIPDKR

SEQ ID NO: 828586 - protein, 805 aa, Homo sapiens
GSAGLEPALGGCPLGASQLPSAPAMDCYTANWNPLGDSAFYRKYELYSMDWDLKEELRDCLVAAAPYGGPIALLRNPWRKEKAASVRPVLDIYSASGMPLASLLWKSGPVVSLGWSAEEELLCVQEDGAVLVYGLHGDFRRHFSMGNEVLQNRVLDARIFHTEFGSGVAILTGAHRFTLSANVGDLKLRRMPEVPGLQSAPSCWTVLCQDRVAHILLAVGPDLYLLDHAACSAVTPPGLAPGVSSFLQMAVSFTYRHLALFTDTGYIWMGTASLKEKLCEFNCNIRAPPKQMVWCSRPRSKERAVVVAWERRLMVVGDAPESIQFVLDEDSYLVPELDGVRIFSRSTHEFLHEVPAASEEIFKESQKADEYLREIQELGQLTQAVQQCIEAAGHEHQPDMQKSLLRVGLDGRAGEGGAGRGWDGQQGSSLLSPSGSSQAASFGKCFLDRFPPDSFVHMCQDLRVLNAVRDYHIGIPLTYSQYPCARQKGTLQPGVAGEGAGDALQVPGKRGLFSNWILNRGKYRYKQLTIQVLLDRLVLRRLYPLAIQICEYLRLPEVQGVSRILAHWACYKVQQKDVSDEDVARAINQKLGDTPGVSYSDIAARAYGCGRTELAIKLLEYEPRSGEQVPLLLKMKRSKLALSKAIESGDTDLVFTVLLHLKNELNRGDFFMTLRNQPMALSLYRQFCKHQELETLKDLYNQDDNHQELGSFHIRASYAAEERIEGRVAALQTAADAFYKAKNEFAAKATEDQMRLLRLQRRLEDELGGQFLDLSLHDTVTTLILGGHNKRAEQLARDFRIPDKR

SEQ ID NO: 828587 - protein, 809 aa, Homo sapiens
TAAAAELPPADSAGIAGMLQQGAWGQPHQGLRQCRAVGEQAFHAIHRLQVPALQGARDLGSIIRRKAWYKVRKELACEQCCGVRSQRGLQGLQLLQGLPHTPWWAARPWKAASVRPVLDIYSASGMPLASLLWKSGPVVSLGWSAEEELLCVQEDGAVLVYGLHGDFRRHFSMGNEVLQNRVLDARIFHTEFGSGVAILTGAHRFTLSANVGDLKLRRMPEVPGLQSAPSCWTVLCQDRVAHILLAVGPDLYLLDHAACSAVTPPGLAPGVSSFLQMAVSFTYRHLALFTDTGYIWMGTASLKEKLCEFNCNIRAPPKQMVWCSRPRSKERAVVVAWERRLMVVGDAPESIQFVLDEDSYLVPELDGVRIFSRSTHEFLHEVPAASEEIFKIASMAPGALLLEAQKEYEKESQKADEYLREIQELGQLTQAVQQCIEAAGHEHQPDMQKSLLRVGLDGRAGEGGAGRGWDGQQGSSLLSPSGSSQAASFGKCFLDRFPPDSFVHMCQDLRVLNAVRDYHIGIPLTYSQYKQLTIQVLLDRLVLRRLYPLAIQICEYLRLPEVQGVSRILAHWACYKVQQKDVSDEDVARAINQKLGDTPGVSYSDIAARAYGCGRTELAIKLLEYEPRSGEQVPLLLKMKRSKLALSKAIESGDTDLVFTVLLHLKNELNRGDFFMTLRNQPMALSLYRQFCKHQELETLKDLYNQDDNHQELGSFHIRASYAAEERIEGRVAALQTAADAFYKAKNEFAAKATEDQMRLLRLQRRLEDELGGQFLDLSLHDTVTTLILGGHNKRAEQLARDFRIPDKR

SEQ ID NO: 828588 - protein, 793 aa, Homo sapiens [sequence omitted]

SEQ ID NO: 828589 - protein, 781 aa, Homo sapiens; identical to SEQ ID NO: 828584

SEQ ID NO: 828590 - protein, 781 aa, Homo sapiens; identical to SEQ ID NO: 828584

SEQ ID NO: 828591 - protein, 781 aa, Homo sapiens; identical to SEQ ID NO: 828584

SEQ ID NO: 828592 - protein, 781 aa, Homo sapiens; identical to SEQ ID NO: 828584

SEQ ID NO: 828593 - protein, 781 aa, Homo sapiens; identical to SEQ ID NO: 828584

SEQ ID NO: 828594 - protein, 895 aa, Homo sapiens
GSAGLEPALGGCPLGASQLPSAPAMDCYTANWNPLGDSAFYRKYELYSMDWDLKEELRDCLVAAAPYGGPIALLRNPWRKEKAASVRPVLDIYSASGMPLASLLWKSGPVVSLGWSAEEELLCVQEDGAVLVYGLHGDFRRHFSMGNEVLQNRVLDARIFHTEFGSGVAILTGAHRFTLSANVGDLKLRRMPEVPGLQSAPSCWTVLCQDRVAHILLAVGPDLYLLDHAACSAVTPPGLAPGVSSFLQMAVSFTYRHLALFTDTGYIWMGTASLKEKLCEFNCNIRAPPKQMVWCSRPRSKERAVVVAWERRLMVVGDAPESIQFVLDEDSYLVPELDGVRIFSRSTHEFLHEVPAASEEIFKIASMAPGALLLEAQKEYEKESQKADEYLREIQELGQLTQAVQQCIEAAGHEHQPDMQKSLLRVGLDGRAGEGGAGRGWDGQQGSSLLSPSGSSQAASFGKCFLDRFPPDSFVHMCQDLRVLNAVRDYHIGIPLTYSQYKQLTIQVLLDRLVLRRLYPLAIQICEYLRLPEVQGVSRILAHWACYKVQQKDVSDEDVARAINQKLGDTPGVSYSDIAARAYGCGRTELAIKLLEYEPRSGEQVPLLLKMKRSKLALSKAIESGDTDLVFTVLLHLKNELNRGDFFMTLRNQPMALSLYRQFCKHQELETLKDLYNQDDNHQELGSFHIRASYAAEERIEGRVAALQTAADAFYKAKNEFAAKATEDQMRLLRLQRRLEDELGGQFLDLSLHDTVTTLILGGHNKRAEQLARDFRIPDKRLWWLKLTALADLEDWEELEKFSKSKKSPIGYLPFVEICMKQHNKYEAKKYASRVGPEQKVKALLLVGDVAQAADVAIEHRNEAELSLVLSHCTGATDGATADKIQRARAQAQKK

SEQ ID NO: 828595 - protein, 854 aa, Homo sapiens
GSAGLEPALGGCPLGASQLPSAPAMDCYTANWNPLGDSAFYRKYELYSMDWDLKEELRDCLVAAAPYGGPIALLRNPWRKEKAASVRPVLDIYSASGMPLASLLWKSGPVVSLGWSAEEELLCVQEDGAVLVYGLHGDFRRHFSMGNEVLQNRVLDARIFHTEFGSGVAILTGAHRFTLSANVGDLKLRRMPEVPGLQSAPSCWTVLCQDRVAHILLAVGPDLYLLDHAACSAVTPPGLAPGVSSFLQMAVSFTYRHLALFTDTGYIWMGTASLKEKLCEFNCNIRAPPKQMVWCSRPRSKERAVVVAWERRLMVVGDAPESIQFVLDEDSYLVPELDGVRIFSRSTHEFLHEVPAASEEIFKIASMAPGALLLEAQKEYEKESQKADEYLREIQELGQLTQAVQQCIEAAGHEHQPDMQKSLLRVGLDGRAGEGGAGRGWDGQQGSSLLSPSGSSQAASFGKCFLDRFPPDSFVHMCQDLRVLNAVRDYHIGIPLTYSQYKQLTIQVLLDRLVLRRLYPLAIQICEYLRLPEVQGVSRILAHWACYKVQQKDVSDEDVARAINQKLGDTPGVSYSDIAARAYGCGRTELAIKLLEYEPRSGEQVPLLLKMKRSKLALSKAIESGDTDLVFTVLLHLKNELNRGDFFMTLRNQPMALSLYRQFCKHQELETLKDLYNQDDNHQELGSFHIRASYAAEERIEGRVAALQTAADAFYKAKNEFAAKATEDQMRLLRLQRRLEDELGGQFLDLSLHDTVTTLILGGHNKRAEQLARDFRIPDKRLWWLKLTALADLEDWEELEKFSKSKKSPIGYLPFVEICMKQHNKYEAKKYASRVGPEQKRCGSGCRCGHRTPE

SEQ ID NO: 828596 - protein, 781 aa, Homo sapiens; identical to SEQ ID NO: 828584

SEQ ID NO: 828597 - protein, 646 aa, Homo sapiens
GSAGLEPALGGCPLGASQLPSAPAMDCYTANWNPLGDSAFYRKYELYSMDWDLKEELRDCLVAAAPYGGPIALLRNPWRKEKAASVRPVLDIYSASGMPLASLLWKSGPVVSLGWSAEEELLCVQEDGAVLVYGLHGDFRRHFSMGNEVLQNRVLDARIFHTEFGSGVAILTGAHRFTLSANVGDLKLRRMPEVPGLQSAPSCWTVLCQDRVAHILLAVGPDLYLLDHAACSAVTPPGLAPGVSSFLQMAVSFTYRHLALFTDTGYIWMGTASLKEKLCEFNCNIRAPPKQMVWCSRPRSKERAVVVAWERRLMVVGDAPESIQFVLDEDSYLVPELDGVRIFSRSTHEFLHEVPAASEEIFKIASMAPGALLLEAQKEYEKESQKADEYLREIQELGQLTQAVQQCIEAAGHEHQPDMQKSLLRVGLDGRAGEGGAGRGWDGQQGSSLLSPSGSSQAASFGKCFLDRFPPDSFVHMCQDLRVLNAVRDYHIGIPLTYSQYPCARQKGPYSQGWQGKGLEMRLQVPGKRGLFSNWILNRGKYRYKQLTIQVLLDRLVLRRLYPLAIQICEYLRLPEVQGVSRILAHWACYKVQQKDVSDEDVARAINQKLGDTPGVSYSDIAARAYGCGRTELAIKVWVPSPPQTL

SEQ ID NO: 828598 - protein, 72 aa, Homo sapiens
CGLVRGRVCALEQPQHHLLSCSNHSDVAQAADVAIEHRNEAELSLVLSHCTGATDGATADKIQRARAQAQKK

SEQ ID NO: 828599 - protein, 101 aa, Homo sapiens
SVRGRCARVGSGRGSGSRGRWEGSRATAQSPEPEALSHLFRVEACGRLQVDCASLRVRRGEGVPGNVPARVPTPRDCPGTLHASFWDQARALPELILREET

SEQ ID NO: 828600 - protein, 781 aa, Homo sapiens
GSAGLEPALGGCPLGASQLPSAPAMDCYTANWNPLGDSAFYRKYELYSMDWDLKEELRDCLVAAAPYGGPIALLRNPWRKEKAASVRPVLDIYSASGMPLASLLWKSGPVVSLGWSAEEELLCVQEDGAVLVYGLHGDFRRHFSMGNEVLQNRVLDARIFHTEFGSGVAILTGAHRFTLSANVGDLKLRRMPEVPGLQSAPSCWTVLCQDRVAHILLAVGPDLYLLDHAACSAVTPPGLAPGVSSFLQMAVSFTYRHLALFTDTGYIWMGTASLKEKLCEFNCNIRAPPKQMVWCSRPRSKERAVVVAWERRLMVVGDAPESIQFVLDEDSYLVPELDGVRIFSRSTHEFLHEVPAASEEIFKIASMAPGALLLEAQKEYEKESQKADEYLREIQELGQLTQAVQQCIEAAGHEHQPDMQKSLLRAASFGKCFLDRFPPDSFVHMCQDLRVLNAVRDYHIGIPLTYSQYKQLTIQVLLDRLVLRRLYPLAIQICEYLRLPEVQGVSRILAHWACYKVQQKDVSDEDVARAINQKLGDTPGVSYSDIAARAYGCGRTELAIKVLGAQPSTDTLMWLFRAPMPAPSLCAFLLTSQLLEYEPRSGEQVPLLLKMKRSKLALSKAIESGDTDLVFTVLLHLKNELNRGDFFMTLRNQPMALSLYRQFCKHQELETLKDLYNQDDNHQELGSFHIRASYAAEERIEGRVAALQTAADAFYKAKNEFAAKATEDQMRLLRLQRRLEDELGGQFLDLSLHDTVTTLILGGHNKRAEQLARDFRIPDKR

SEQ ID NO: 828601 - protein, 802 aa, Homo sapiens
MDSWFILVLLGSGLICVSANNATTVAPSVGITRLINSSTAEPVKEEAKTSNPTSSLTSLSVAPTFSPNITLGPTYLTTVNSSDSDNGTTRTASTNSIGITISPNGTWLPDNQFTDARTEPWEGNSSTAATTPETFPPSGNSDSKDRRDETPIIAVMVALSSLLVIVFIIIVLYMLRFKKYKQAGSHSNSFRLSNGRTEDVEPQSVPLLARSPSTNRKYPPLPVDKLEEEINRRMADDNKLFREEFNALPACPIQATCEAASKEENKEKNRYVNILPYDHSRVHLTPVEGVPDSDYINASFINGYQEKNKFIAAQGPKEETVNDFWRMIWEQNTATIVMVTNLKERKECKCAQYWPDQGCWTYGNIRVSVEDVTVLVDYTVRKFCIQQVGDMTNRKPQRLITQFHFTSWPDFGVPFTPIGMLKFLKKVKACNPQYAGAIVVHCSAGVGRTGTFVVIDAMLDMMHTERKVDVYGFVSRIRAQRCQMVQTDMQYVFIYQALLEHYLYGDTELEVTSLETHLQKIYNKIPGTSNNGLEEEFKKLTSIKIQNDKMRTGNLPANMKKNRVLQIIPYEFNRVIIPVKRGEENTDYVNASFIDGYRQKDSYIASQGPLLHTIEDFWRMIWEWKSCSIVMLTELEERGQEKCAQYWPSDGLVSYGDITVELKKEEECESYTVRDLLVTNTRENKSRQIRQFHFHGWPEVGIPSDGKGMISIIAAVQKQQQQSGNHPITVHCSAGAGRTGTFCALSTVLERVKAEGILDVFQTVKSLRLQRPHMVQTLEQYEFCYKVVQEYIDAFSDYANFK

SEQ ID NO: 828602 - protein, 802 aa, Homo sapiens; identical to SEQ ID NO: 828601

SEQ ID NO: 828603 - protein, 781 aa, Homo sapiens; identical to SEQ ID NO: 828584

SEQ ID NO: 828604 - protein, 781 aa, Homo sapiens; identical to SEQ ID NO: 828584

SEQ ID NO: 828605 - protein, 762 aa, Homo sapiens
VRFGIRERLSGSHVRLGEIVMPIEWGSLSVAPTFSPNITLGPTYLTTVNSSDSDNGTTRTASTNSIGITISPNGTWLPDNQFTDARTEPWEGNSSTAATTPETFPPSDETPIIAVMVALSSLLVIVFIIIVLYMLRFKKYKQAGSHSNSFRLSNGRTEDVEPQSVPLLARSPSTNRKYPPLPVDKLEEEINRRMADDNKLFREEFNALPACPIQATCEAASKEENKEKNRYVNILPYDHSRVHLTPVEGVPDSDYINASFINGYQEKNKFIAAQGPKEETVNDFWRMIWEQNTATIVMVTNLKERKECKCAQYWPDQGCWTYGNIRVSVEDVTVLVDYTVRKFCIQQVGDMTNRKPQRLITQFHFTSWPDFGVPFTPIGMLKFLKKVKACNPQYAGAIVVHCSAGVGRTGTFVVIDAMLDMMHTERKVDVYGFVSRIRAQRCQMVQTDMQYVFIYQALLEHYLYGDTELEVTSLETHLQKIYNKIPGTSNNGLEEEFKKLTSIKIQNDKMRTGNLPANMKKNRVLQIIPYEFNRVIIPVKRGEENTDYVNASFIDGYRQKDSYIASQGPLLHTIEDFWRMIWEWKSCSIVMLTELEERGQEKCAQYWPSDGLVSYGDITVELKKEEECESYTVRDLLVTNTRENKSRQIRQFHFHGWPEVGIPSDGKGMISIIAAVQKQQQQSGNHPITVHCSAGAGRTGTFCALSTVLERVKAEGILDVFQTVKSLRLQRPHMVQTLEQYEFCYKVVQEYIDAFSDYANFK

SEQ ID NO: 828606 - protein, 895 aa, Homo sapiens; identical to SEQ ID NO: 828594

SEQ ID NO: 828607 - protein, 895 aa, Homo sapiens; identical to SEQ ID NO: 828594

SEQ ID NO: 828608 - protein, 781 aa, Homo sapiens; identical to SEQ ID NO: 828584

SEQ ID NO: 828609 - protein, 314 aa, Homo sapiens
TAAAAELPPADSAGIAGMLQQGAWGQPHQGLRQCRAVGEQAFHAIHRLQVPALQGARDLGSIIRRKAWYKVRKELACEQCCGVRSQRGLQGLQLLQGLPHTPWWAARPWKAASVRPVLDIYSASGMPLASLLWKSGPVVSLGWSAEEELLCVQEDGAVLVYGLHGDFRRHFSMGNEVLQNRVLDARIFHTEFGSGVAILTGAHRFTLSANVGDLKLRRMPEVPGLQSAPSCWTVLCQDRVAHILLAVGPDLYLLDHAACSAVPLSVIAKAVNEKSCSSPTELTQGLSCTVVLASYKAQEEGRGQKTPWPKTLLL

SEQ ID NO: 828610 - protein, 108 aa, Homo sapiens
ACGYRGHTWSRHWYAAHIFVPATTPPAALLSGRRLFRGAHPVVRRLSKHRPALALPRCPKYTGNIGRQDGSNGSIAPVARGWARLEGVSGCPTGLICTSLWVLGKEDP

SEQ ID NO: 828611 - protein, 146 aa, Homo sapiens
PTASQLRPKGLRVGVFLHRGRVTACTHHTPKALHPATLRPHFIWAGPSWVAVSFIAPLSQILKSLSLKIKSRPGAVAHTCNPTLWEAKAGGSLEPRIRDQPGQHDKILSLQKITKIIWAWRHTPVVPATWEAEVEGSPEPMRWRLQ

SEQ ID NO: 828612 - protein, 793 aa, Homo sapiens
MDSWFILVLLGSGLICVSANNATTVAPSVGITRLINSSTAEPVKEEAKTSNPTSSLTSLSVAPTFSPNITLGPTYLTTVNSSDSDNGTTRTASTNSIGITISPNGTWLPDNQFTDARTEPWEGNSSTAATTPETFPPSDETPIIAVMVALSSLLVIVFIIIVLYMLRFKKYKQAGSHSNSFRLSNGRTEDVEPQSVPLLARSPSTNRKYPPLPVDKLEEEINRRMADDNKLFREEFNALPACPIQATCEAASKEENKEKNRYVNILPYDHSRVHLTPVEGVPDSDYINASFINGYQEKNKFIAAQGPKEETVNDFWRMIWEQNTATIVMVTNLKERKECKCAQYWPDQGCWTYGNIRVSVEDVTVLVDYTVRKFCIQQVGDMTNRKPQRLITQFHFTSWPDFGVPFTPIGMLKFLKKVKACNPQYAGAIVVHCSAGVGRTGTFVVIDAMLDMMHTERKVDVYGFVSRIRAQRCQMVQTDMQYVFIYQALLEHYLYGDTELEVTSLETHLQKIYNKIPGTSNNGLEEEFKKLTSIKIQNDKMRTGNLPANMKKNRVLQIIPYEFNRVIIPVKRGEENTDYVNASFIDGYRQKDSYIASQGPLLHTIEDFWRMIWEWKSCSIVMLTELEERGQEKCAQYWPSDGLVSYGDITVELKKEEECESYTVRDLLVTNTRENKSRQIRQFHFHGWPEVGIPSDGKGMISIIAAVQKQQQQSGNHPITVHCSAGAGRTGTFCALSTVLERVKAEGILDVFQTVKSLRLQRPHMVQTLEQYEFCYKVVQEYIDAFSDYANFK

SEQ ID NO: 828613 - protein, 1237 aa, Homo sapiens
IRGSGYHGTERQRHLLLFVFWWQKGKMANDSPAKSLVDIDLSSLRDPAGIFELVEVVGNGTYGQVYKGRHVKTGQLAAIKVMDVTEDEEEEIKLEINMLKKYSHHRNIATYYGAFIKKSPPGHDDQLWLVMEFCGAGSITDLVKNTKGNTLKEDWIAYISREILRGLAHLHIHHVIHRDIKGQNVLLTENAEVKLVDFGVSAQLDRTVGRRNTFIGTPYWMAPEVIACDENPDATYDYRSDLWSCGITAIEMAEGAPPLCDMHPMRALFLIPRNPPPRLKSKKWSKKFFSFIEGCLVKNYMQRPSTEQLLKHPFIRDQPNERQVRIQLKDHIDRTRKKRGEKDETEYEYSGSEEEEEEVPEQEGEPSSIVNVPGESTLRRDFLRLQQENKERSEALRRQQLLQEQQLREQEEYKRQLLAERQKRIEQQKEQRRRLEEQQRREREARRQQEREQRRREQEEKRRLEELERRRKEEEERRRAEEEKRRVEREQEYIRRQLEEEQRHLEVLQQQLLQEQAMLLHDHRRPHPQHSQQPPPPQQERSKPSFHAPEPKAHYEPADRAREVEDRFRKTNHSSPEAQSKQTGRVLEPPVPSRSESFSNGNSESVHPALQRPAEPQVPVRTTSRSPVLSRRDSPLQGSGQQNSQAGQRNSTSSIEPRLLWERVEKLVPRPGSGSSSGSSNSGSQPGSHPGSQSGSGERFRVRSSSKSEGSPSQRLENAVKKPEDKKEVFRPLKPAASDLTALAKELRAVEDVRPPHKVTDYSSSSEESGTTDEEDDDVEQEGADESTSGPEDTRAASSLNLSNGETESVKTMIVHDDVESEPAMTPSKEGTLIVRQTQSASSTLQKHKSSSSFTPFIDPRLLQISPSSGTTVTSVVGFSCDGMRPEAIRQDPTRKGSVVNVNPTNTRPQSDTPEIRKYKKRFNSEILCAALWGVNLLVGTESGLMLLDRSGQGKVYPLINRRRFQQMDVLEGLNVLVTISGKKDKLRVYYLSWLRNKILHNDPEVEKKQGWTTVGDLEGCVHYKVVKYERIKFLVIALKSSVEVYAWAPKPYHKFMAFKSFGELVHKPLLVDLTVEEGQRLKVIYGSCAGFHAVDVDSGSVYDIYLPTHIQCSIKPHAIIILPNTDGMELLVCYEDEGVYVNTYGRITKDVVLQWGEMPTSVAYIRSNQTMGWGEKAIEIRSVETGHLDGVFMHKRAQRLKFLCERNDKVFFASVRSGGSSQVYFMTLGRTSLLSW

SEQ ID NO: 828614 - protein, 1084 aa, Homo sapiens
MEFCGAGSITDLVKNTKGNTLKEDWIAYISREILRGLAHLHIHHVIHRDIKGQNVLLTENAEVKLVDFGVSAQLDRTVGRRNTFIGTPYWMAPEVIACDENPDATYDYRSDLWSCGITAIEMAEGAPPLCDMHPMRALFLIPRNPPPRLKSKKWSKKFFSFIEGCLVKNYMQRPSTEQLLKHPFIRDQPNERQVRIQLKDHIDRTRKKRGEKDETEYEYSGSEEEEEEVPEQEGEPSSIVNVPGESTLRRDFLRLQQENKERSEALRRQQLLQEQQLREQEEYKRQLLAERQKRIEQQKEQRRRLEEQQRREREARRQQEREQRRREQEEKRRLEELERRRKEEEERRRAEEEKRRVEREQEYIRRQLEEEQRHLEVLQQQLLQEQAMLLECRWREMEEHRQAERLQRQLQQEQAYLLSLQHDHRRPHPQHSQQPPPPQQERSKPSFHAPEPKAHYEPADRAREVPVRTTSRSPVLSRRDSPLQGSGQQNSQAGQRNSTSSIEPRLLWERVEKLVPRPGSGSSSGSSNSGSQPGSHPGSQSGSGERFRVRSSSKSEGSPSQRLENAVKKPEDKKEVFRPLKPAASDLTALAKELRAVEDVRPPHKVTDYSSSSEESGTTDEEDDDVEQEGADESTSGPEDTRAASSLNLSNGETESVKTMIVHDDVESEPAMTPSKEGTLIVRQTQSASSTLQKHKSSSSFTPFIDPRLLQISPSSGTTVTSVVGFSCDGMRPEAIRQDPTRKGSVVNVNPTNTRPQSDTPEIRKYKKRFNSEILCAALWGVNLLVGTESGLMLLDRSGQGKVYPLINRRRFQQMDVLEGLNVLVTISGKKDKLRVYYLSWLRNKILHNDPEVEKKQGWTTVGDLEGCVHYKVVKYERIKFLVIALKSSVEVYAWAPKPYHKFMAFKSFGELVHKPLLVDLTVEEGQRLKVIYGSCAGFHAVDVDSGSVYDIYLPTHIQCSIKPHAIIILPNTDGMELLVCYEDEGVYVNTYGRITKDVVLQWGEMPTSVAYIRSNQTMGWGEKAIEIRSVETGHLDGVFMHKRAQRLKFLCERNDKVFFASVRSGGSSQVYFMTLGRTSLLSW

SEQ ID NO: 828615 - protein, 1191 aa, Homo sapiens
IRGSGYHGTERQRHLLLFVFWWQKGKMANDSPAKSLVDIDLSSLRDPAGIFELVEVVGNGTYGQVYKGRHVKTGQLAAIKVMDVTEDEEEEIKLEINMLKKYSHHRNIATYYGAFIKKSPPGHDDQLWLVMEFCGAGSITDLVKNTKGNTLKEDWIAYISREILRGLAHLHIHHVIHRDIKGQNVLLTENAEVKLVDFGVSAQLDRTVGRRNTFIGTPYWMAPEVIACDENPDATYDYRSDLWSCGITAIEMAEGAPPLCDMHPMRALFLIPRNPPPRLKSKKWSKKFFSFIEGCLVKNYMQRPSTEQLLKHPFIRDQPNERQVRIQLKDHIDRTRKKRGEKDETEYEYSGSEEEEEEVPEQEGEPSSIVNVPGESTLRRDFLRLQQENKERSEALRRQQLLQEQQLREQEEYKRQLLAERQKRIEQQKEQRRRLEEQQRREREARRQQEREQRRREQEEKRRLEELERRRKEEEERRRAEEEKRRVEREQEYIRRQLEEEQRHLEVLQQQLLQEQAMLLHDHRRPHPQHSQQPPPPQQERSKPSFHAPEPKAHYEPADRAREVPVRTTSRSPVLSRRDSPLQGSGQQNSQAGQRNSTSSIEPRLLWERVEKLVPRPGSGSSSGSSNSGSQPGSHPGSQSGSGERFRVRSSSKSEGSPSQRLENAVKKPEDKKEVFRPLKPAASDLTALAKELRAVEDVRPPHKVTDYSSSSEESGTTDEEDDDVEQEGADESTSGPEDTRAASSLNLSNGETESVKTMIVHDDVESEPAMTPSKEGTLIVRQTQSASSTLQKHKSSSSFTPFIDPRLLQISPSSGTTVTSVVGFSCDGMRPEAIRQDPTRKGSVVNVNPTNTRPQSDTPEIRKYKKRFNSEILCAALWGVNLLVGTESGLMLLDRSGQGKVYPLINRRRFQQMDVLEGLNVLVTISGKKDKLRVYYLSWLRNKILHNDPEVEKKQGWTTVGDLEGCVHYKVVKYERIKFLVIALKSSVEVYAWAPKPYHKFMAFKSFGELVHKPLLVDLTVEEGQRLKVIYGSCAGFHAVDVDSGSVYDIYLPTHVRKNPHSMIQCSIKPHAIIILPNTDGMELLVCYEDEGVYVNTYGRITKDVVLQWGEMPTSVAYIRSNQTMGWGEKAIEIRSVETGHLDGVFMHKRAQRLKFLCERNDKVFFASVRSGGSSQVYFMTLGRTSLLSW

SEQ ID NO: 828616 - protein, 1138 aa, Homo sapiens
MEFCGAGSITDLVKNTKGNTLKEDWIAYISREILRGLAHLHIHHVIHRDIKGQNVLLTENAEVKLVDFGVSAQLDRTVGRRNTFIGTPYWMAPEVIACDENPDATYDYRSDLWSCGITAIEMAEGAPPLCDMHPMRALFLIPRNPPPRLKSKKWSKKFFSFIEGCLVKNYMQRPSTEQLLKHPFIRDQPNERQVRIQLKDHIDRTRKKRGEKDETEYEYSGSEEEEEEVPEQEGEPSSIVNVPGESTLRRDFLRLQQENKERSEALRRQQLLQEQQLREQEEYKRQLLAERQKRIEQQKEQRRRLEEQQRREREARRQQEREQRRREQEEKRRLEELERRRKEEEERRRAEEEKRRVEREQEYIRRQLEEEQRHLEVLQQQLLQEQAMLLECRWREMEEHRQAERLQRQLQQEQAYLLSLQHDHRRPHPQHSQQPPPPQQERSKPSFHAPEPKAHYEPADRAREVEDRFRKTNHSSPEAQSKQTGRVLEPPVPSRSESFSNGNSESVHPALQRPAEPQVPVRTTSRSPVLSRRDSPLQGSGQQNSQAGQRNSTSSIEPRLLWERVEKLVPRPGSGSSSGSSNSGSQPGSHPGSQSGSGERFRVRSSSKSEGSPSQRLENAVKKPEDKKEVFRPLKPAASDLTALAKELRAVEDVRPPHKVTDYSSSSEESGTTDEEDDDVEQEGADESTSGPEDTRAASSLNLSNGETESVKTMIVHDDVESEPAMTPSKEGTLIVRQTQSASSTLQKHKSSSSFTPFIDPRLLQISPSSGTTVTSVVGFSCDGMRPEAIRQDPTRKGSVVNVNPTNTRPQSDTPEIRKYKKRFNSEILCAALWGVNLLVGTESGLMLLDRSGQGKVYPLINRRRFQQMDVLEGLNVLVTISGKKDKLRVYYLSWLRNKILHNDPEVEKKQGWTTVGDLEGCVHYKVVKYERIKFLVIALKSSVEVYAWAPKPYHKFMAFKSFGELVHKPLLVDLTVEEGQRLKVIYGSCAGFHAVDVDSGSVYDIYLPTHIQCSIKPHAIIILPNTDGMELLVCYEDEGVYVNTYGRITKDVVLQWGEMPTSVAYIRSNQTMGWGEKAIEIRSVETGHLDGVFMHKRAQRLKFLCERNDKVFFASVRSGGSSQVYFMTLGRTSLLSW

SEQ ID NO: 828617 - protein, 1161 aa, Homo sapiens
MEFCGAGSITDLVKNTKGNTLKEDWIAYISREILRGLAHLHIHHVIHRDIKGQNVLLTENAEVKLVDFGVSAQLDRTVGRRNTFIGTPYWMAPEVIACDENPDATYDYRSDLWSCGITAIEMAEGAPPLCDMHPMRALFLIPRNPPPRLKSKKWSKKFFSFIEGCLVKNYMQRPSTEQLLKHPFIRDQPNERQVRIQLKDHIDRTRKKRGEKDETEYEYSGSEEEEEEVPEQEGEPSSIVNVPGESTLRRDFLRLQQENKERSEALRRQQLLQEQQLREQEEYKRQLLAERQKRIEQQKEQRRRLEEQQRREREARRQQEREQRRREQEEKRRLEELERRRKEEEERRRAEEEKRRVEREQEYIRRQLEEEQRHLEVLQQQLLQEQAMLLECRWREMEEHRQAERLQRQLQQEQAYLLSLQHDHRRPHPQHSQQPPPPQQERSKPSFHAPEPKAHYEPADRAREVQWSHLASLKNNVSPVSRSHSFSDPSPKFAHHHLRSQDPCPPSRSEVLSQSSDSKSEAPDPTQKAWSRSDSDEVPPRVPVRTTSRSPVLSRRDSPLQGSGQQNSQAGQRNSTSSIEPRLLWERVEKLVPRPGSGSSSGSSNSGSQPGSHPGSQSGSGERFRVRSSSKSEGSPSQRLENAVKKPEDKKEVFRPLKPAASDLTALAKELRAVEDVRPPHKVTDYSSSSEESGTTDEEDDDVEQEGADESTSGPEDTRAASSLNLSNGETESVKTMIVHDDVESEPAMTPSKEGTLIVRQTQSASSTLQKHKSSSSFTPFIDPRLLQISPSSGTTVTSVVGFSCDGMRPEAIRQDPTRKGSVVNVNPTNTRPQSDTPEIRKYKKRFNSEILCAALWGVNLLVGTESGLMLLDRSGQGKVYPLINRRRFQQMDVLEGLNVLVTISGKKDKLRVYYLSWLRNKILHNDPEVEKKQGWTTVGDLEGCVHYKVVKYERIKFLVIALKSSVEVYAWAPKPYHKFMAFKSFGELVHKPLLVDLTVEEGQRLKVIYGSCAGFHAVDVDSGSVYDIYLPTHIQCSIKPHAIIILPNTDGMELLVCYEDEGVYVNTYGRITKDVVLQWGEMPTSVAYIRSNQTMGWGEKAIEIRSVETGHLDGVFMHKRAQRLKFLCERNDKVFFASVRSGGSSQVYFMTLGRTSLLSW

SEQ ID NO: 828618 - protein, 981 aa, Homo sapiens
MEFCGAGSITDLVKNTKGNTLKEDWIAYISREILRGLAHLHIHHVIHRDIKGQNVLLTENAEVKLVDFGVSAQLDRTVGRRNTFIGTPYWMAPEVIACDENPDATYDYRSDLWSCGITAIEMAEGAPPLCDMHPMRALFLIPRNPPPRLKSKKWSKKFFSFIEGCLVKNYMQRPSTEQLLKHPFIRDQPNERQVRIQLKDHIDRTRKKRGEKDETEYEYSGSEEEEEEVPEQEGEPSSIVNVPGESTLRRDFLRLQQENKERSEALRRQQLLQEQQLREQEEYKRQLLAERQKRIEQQKEQRRRLEEQQRREREARRQQEREQRRREQEEKRRLEELERRRKEEEERRRAEEEKRRVEREQVPVRTTSRSPVLSRRDSPLQGSGQQNSQAGQRNSTSSIEPRLLWERVEKLVPRPGSGSSSGSSNSGSQPGSHPGSQSGSGERFRVRSSSKSEGSPSQRLENAVKKPEDKKEVFRPLKPAASDLTALAKELRAVEDVRPPHKVTDYSSSSEESGTTDEEDDDVEQEGADESTSGPEDTRAASSLNLSNGETESVKTMIVHDDVESEPAMTPSKEGTLIVRQTQSASSTLQKHKSSSSFTPFIDPRLLQISPSSGTTVTSVVGFSCDGMRPEAIRQDPTRKGSVVNVNPTNTRPQSDTPEIRKYKKRFNSEILCAALWGVNLLVGTESGLMLLDRSGQGKVYPLINRRRFQQMDVLEGLNVLVTISGKKDKLRVYYLSWLRNKILHNDPEVEKKQGWTTVGDLEGCVHYKVVKYERIKFLVIALKSSVEVYAWAPKPYHKFMAFKSFGELVHKPLLVDLTVEEGQRLKVIYGSCAGFHAVDVDSGSVYDIYLPTHIQCSIKPHAIIILPNTDGMELLVCYEDEGVYVNTYGRITKDVVLQWGEMPTSVAYIRSNQTMGWGEKAIEIRSVETGHLDGVFMHKRAQRLKFLCERNDKVFFASVRSGGSSQVYFMTLGRTSLLSW

SEQ ID NO: 828619 - protein, 1237 aa, Homo sapiens; identical to SEQ ID NO: 828613

SEQ ID NO: 828620 - protein, 1340 aa, Homo sapiens
MEFCGAGSITDLVKNTKGNTLKEDWIAYISREILRGLAHLHIHHVIHRDIKGQNVLLTENAEVKLVDFGVSAQLDRTVGRRNTFIGTPYWMAPEVIACDENPDATYDYRSDLWSCGITAIEMAEGAPPLCDMHPMRALFLIPRNPPPRLKSKKWSKKFFSFIEGCLVKNYMQRPSTEQLLKHPFIRDQPNERQVRIQLKDHIDRTRKKRGEKDETEYEYSGSEEEEEEVPEQEGEPSSIVNVPGESTLRRDFLRLQQENKERSEALRRQQLLQEQQLREQEEYKRQLLAERQKRIEQQKEQRRRLEEQQRREREARRQQEREQRRREQEEKRRLEELERRRKEEEERRRAEEEKRRVEREQEYIRRQLEEEQRHLEVLQQQLLQEQAMLLHDHRRPHPQHSQQPPPPQQERSKPSFHAPEPKAHYEPADRAREVPVRTTSRSPVLSRRDSPLQGSGQQNSQAGQRNSTSSIEPRLLWERVEKLVPRPGSGSSSGSSNSGSQPGSHPGSQSGSGERFRVRSSSKSEGSPSQRLENAVKKPEDKKEVFRPLKPAASGLCRISFTYFRLEGDLSIKNMWLRGLQSFLRGPLTELRNYKEGPKPQTYLFPSIGIVCFPCIKSQVSKTFFLLFQPYTWCTVSLTKLCRTKYSSYLMKFPSKETDALKKIQKKEKPFYLFLGINLYLFFVSSAFTILAFRLSFLVIVVTASHPSLLIPLMLPDHVIVHALWNFKPVRVFISCLNDFCTSPSPLLSPALPCTVHSSSTMASRTPRNCAVLKGEVDLTALAKELRAVEDVRPPHKVTDYSSSSEESGTTDEEDDDVEQEGADESTSGPEDTRAASSLNLSNGETESVKTMIVHDDVESEPAMTPSKEGTLIVRQSTVDQKRASHHESNGFAGRIHLLPDLLQQSHSSSTSSTSSSPSSSQPTPTMSPQTPQDKLTANETQSASSTLQKHKSSSSFTPFIDPRLLQISPSSGTTVTSVVGFSCDGMRPEAIRQDPTRKGSVVNVNPTNTRPQSDTPEIRKYKKRFNSEILCAALWGVNLLVGTESGLMLLDRSGQGKVYPLINRRRFQQMDVLEGLNVLVTISGKKDKLRVYYLSWLRNKILHNDPEVEKKQGWTTVGDLEGCVHYKVVKYERIKFLVIALKSSVEVYAWAPKPYHKFMAFKSFGELVHKPLLVDLTVEEGQRLKVIYGSCAGFHAVDVDSGSVYDIYLPTHIQCSIKPHAIIILPNTDGMELLVCYEDEGVYVNTYGRITKDVVLQWGEMPTSVAYIRSNQTMGWGEKAIEIRSVETGHLDGVFMHKRAQRLKFLCERNDKVFFASVRSGGSSQVYFMTLGRTSLLSW

SEQ ID NO: 828621 - protein, 489 aa, Homo sapiens [sequence omitted]

SEQ ID NO: 828622 - protein, 1237 aa, Homo sapiens; identical to SEQ ID NO: 828613

SEQ ID NO: 828623 - protein, 1237 aa, Homo sapiens; identical to SEQ ID NO: 828613

SEQ ID NO: 828624 - protein, 137 aa, Homo sapiens
MIPKCYRPTHIQCSIKPHAIIILPNTDGMELLVCYEDEGVYVNTYGRITKDVVLQWGEMPTSVAYIRSNQTMGWGEKAIEIRSVETGHLDGVFMHKRAQRLKFLCERNDKVFFASVRSGGSSQVYFMTLGRTSLLSW

SEQ ID NO: 828625 - protein, 567 aa, Homo sapiens
MEFCGAGSITDLVKNTKGNTLKEDWIAYISREILRGLAHLHIHHVIHRDIKGQNVLLTENAEVKLVDFGVSAQLDRTVGRRNTFIGTPYWMAPEVIACDENPDATYDYRSDLWSCGITAIEMAEGAPPLCDMHPMRALFLIPRNPPPRLKSKKWSKKFFSFIEGCLVKNYMQRPSTEQLLKHPFIRDQPNERQVRIQLKDHIDRTRKKRGEKDETEYEYSGSEEEEEEVPEQEGEPSSIVNVPGESTLRRDFLRLQQENKERSEALRRQQLLQEQQLREQEEYKRQLLAERQKRIEQQKEQRRRLEEQQRREREARRQQEREQRRREQEEKRRLEELERRRKEEEERRRAEEEKRRVEREQEYIRRQLEEEQRHLEVLQQQLLQEQAMLLHDHRRPHPQHSQQPPPPQQERSKPSFHAPEPKAHYEPADRAREVPVRTTSRSPVLSRRDSPLQGSGQQNSQAGQRNSTSSIEPRLLWERVEKLVPRPGSGSSSGSSNSGSQPGSHPGSQSGSGERFRVRSSSKSEGSPSQRLENAVKKPEDKKEVFRPLKPAASGLCRISFTYFRLE

SEQ ID NO: 828626 - protein, 567 aa, Homo sapiens; identical to SEQ ID NO: 828625

SEQ ID NO: 828627 - protein, 421 aa, Homo sapiens
MEFCGAGSITDLVKNTKGNTLKEDWIAYISREILRGLAHLHIHHVIHRDIKGQNVLLTENAEVKLVDFGVSAQLDRTVGRRNTFIGTPYWMAPEVIACDENPDATYDYRSDLWSCGITAIEMAEGAPPLCDMHPMRALFLIPRNPPPRLKSKKWSKKFFSFIEGCLVKNYMQRPSTEQLLKHPFIRDQPNERQVRIQLKDHIDRTRKKRGEKDETEYEYSGSEEEEEEVPEQEGEPSSIVNVPGESTLRRDFLRLQQENKERSEALRRQQLLQEQQLREQEEYKRQLLAERQKRIEQQKEQRRRLEEQQRREREARRQQEREQRVLLLLLRYEKCITQAITAFIWSNAPFYILLRISRTESLYTTFPRLLCQLASTVRFSKAGDWLASGRITPLFSCYCSVLGSSSSRSSEQLWKNAGNYT

SEQ ID NO: 828628 - protein, 291 aa, Homo sapiens
MEFCGAGSITDLVKNTKGNTLKEDWIAYISREILRGLAHLHIHHVIHRDIKGQNVLLTENAEVKLVDFGVSAQLDRTVGRRNTFIGTPYWMAPEVIACDENPDATYDYRSDLWSCGITAIEMAEGAPPLCDMHPMRALFLIPRNPPPRLKSKKWSKKFFSFIEGCLVKNYMQRPSTEQLLKHPFIRDQPNERQVRIQLKDHIDRTRKKRGEKDETEYEYSGSEEEEEEVPEQEGEPSSIVNVPGESTLRRDFLRLQQENKERSEALRRQPWTSSQPWTSSQPWTSSPRGLV

SEQ ID NO: 828629 - protein, 239 aa, Homo sapiens
MEFCGAGSITDLVKNTKGNTLKEDWIAYISREILRGLAHLHIHHVIHRDIKGQNVLLTENAEVKLVDFGVSAQLDRTVGRRNTFIGTPYWMAPEVIACDENPDATYDYRSDLWSCGITAIEMAEGAPPLCDMHPMRALFLIPRNPPPRLKSKKWSKKFFSFIEGCLVKNYMQRPSTEQLLKHPFIRDQPNERQVRIQLKDHIDRTRKKRGEKDETEYEYSRGGGFLGMRNSALIGCMSQ

SEQ ID NO: 828630 - protein, 137 aa, Homo sapiens
RIPWMLSPTHIQCSIKPHAIIILPNTDGMELLVCYEDEGVYVNTYGRITKDVVLQWGEMPTSVAYIRSNQTMGWGEKAIEIRSVETGHLDGVFMHKRAQRLKFLCERNDKVFFASVRSGGSSQVYFMTLGRTSLLSW

SEQ ID NO: 828631 - protein, 1215 aa, Homo sapiens
MEFCGAGSITDLVKNTKGNTLKEDWIAYISREILRGLAHLHIHHVIHRDIKGQNVLLTENAEVKLVDFGVSAQLDRTVGRRNTFIGTPYWMAPEVIACDENPDATYDYRSDLWSCGITAIEMAEGAPPLCDMHPMRALFLIPRNPPPRLKSKKWSKKFFSFIEGCLVKNYMQRPSTEQLLKHPFIRDQPNERQVRIQLKDHIDRTRKKRGEKDETEYEYSGSEEEEEEVPEQEGEPSSIVNVPGESTLRRDFLRLQQENKERSEALRRQQLLQEQQLREQEEYKRQLLAERQKRIEQQKEQRRRLEEQQRREREARRQQEREQRRREQEEKRRLEELERRRKEEEERRRAEEEKRRVEREQEYIRRQLEEEQRHLEVLQQQLLQEQAMLLECRWREMEEHRQAERLQRQLQQEQAYLLSLQHDHRRPHPQHSQQPPPPQQERSKPSFHAPEPKAHYEPADRAREVEDRFRKTNHSSPEAQSKQTGRVLEPPVPSRSESFSNGNSESVHPALQRPAEPQVQWSHLASLKNNVSPVSRSHSFSDPSPKFAHHHLRSQDPCPPSRSEVLSQSSDSKSEAPDPTQKAWSRSDSDEVPPRVPVRTTSRSPVLSRRDSPLQGSGQQNSQAGQRNSTSSIEPRLLWERVEKLVPRPGSGSSSGSSNSGSQPGSHPGSQSGSGERFRVRSSSKSEGSPSQRLENAVKKPEDKKEVFRPLKPAASDLTALAKELRAVEDVRPPHKVTDYSSSSEESGTTDEEDDDVEQEGADESTSGPEDTRAASSLNLSNGETESVKTMIVHDDVESEPAMTPSKEGTLIVRQTQSASSTLQKHKSSSSFTPFIDPRLLQISPSSGTTVTSVVGFSCDGMRPEAIRQDPTRKGSVVNVNPTNTRPQSDTPEIRKYKKRFNSEILCAALWGVNLLVGTESGLMLLDRSGQGKVYPLINRRRFQQMDVLEGLNVLVTISGKKDKLRVYYLSWLRNKILHNDPEVEKKQGWTTVGDLEGCVHYKVVKYERIKFLVIALKSSVEVYAWAPKPYHKFMAFKSFGELVHKPLLVDLTVEEGQRLKVIYGSCAGFHAVDVDSGSVYDIYLPTHIQCSIKPHAIIILPNTDGMELLVCYEDEGVYVNTYGRITKDVVLQWGEMPTSVAYIRSNQTMGWGEKAIEIRSVETGHLDGVFMHKRAQRLKFLCERNDKVFFASVRSGGSSQVYFMTLGRTSLLSW

SEQ ID NO: 828632 - protein, 932 aa, Homo sapiens
GCFIAFASTYWSGLPRTYCRLASTEQLLKHPFIRDQPNERQVRIQLKDHIDRTRKKRGEKDETEYEYSGSEEEEEEVPEQEGEPSSIVNVPGESTLRRDFLRLQQENKERSEALRRQQLLQEQQLREQEEYKRQLLAERQKRIEQQKEQRRRLEEQQRREREARRQQEREQRRREQEEKRRLEELERRRKEEEERRRAEEEKRRVEREQEYIRRQLEEEQRHLEVLQQQLLQEQAMLLECRWREMEEHRQAERLQRQLQQEQAYLLSLQHDHRRPHPQHSQQPPPPQQERSKPSFHAPEPKAHYEPADRAREVPVRTTSRSPVLSRRDSPLQGSGQQNSQAGQRNSTSSIEPRLLWERVEKLVPRPGSGSSSGSSNSGSQPGSHPGSQSGSGERFRVRSSSKSEGSPSQRLENAVKKPEDKKEVFRPLKPAASDLTALAKELRAVEDVRPPHKVTDYSSSSEESGTTDEEDDDVEQEGADESTSGPEDTRAASSLNLSNGETESVKTMIVHDDVESEPAMTPSKEGTLIVRQTQSASSTLQKHKSSSSFTPFIDPRLLQISPSSGTTVTSVVGFSCDGMRPEAIRQDPTRKGSVVNVNPTNTRPQSDTPEIRKYKKRFNSEILCAALWGVNLLVGTESGLMLLDRSGQGKVYPLINRRRFQQMDVLEGLNVLVTISGKKDKLRVYYLSWLRNKILHNDPEVEKKQGWTTVGDLEGCVHYKVVKYERIKFLVIALKSSVEVYAWAPKPYHKFMAFKSFGELVHKPLLVDLTVEEGQRLKVIYGSCAGFHAVDVDSGSVYDIYLPTHIQCSIKPHAIIILPNTDGMELLVCYEDEGVYVNTYGRITKDVVLQWGEMPTSVAYIRSNQTMGWGEKAIEIRSVETGHLDGVFMHKRAQRLKFLCERNDKVFFASVRSGGSSQVYFMTLGRTSLLSW

SEQ ID NO: 828633 - protein, 1237 aa, Homo sapiens; identical to SEQ ID NO: 828613

SEQ ID NO: 828634 - protein, 1117 aa, Homo sapiens
MEFCGAGSITDLVKNTKGNTLKEDWIAYISREILRGLAHLHIHHVIHRDIKGQNVLLTENAEVKLVDFGVSAQLDRTVGRRNTFIGTPYWMAPEVIACDENPDATYDYRSDLWSCGITAIEMAEGAPPLCDMHPMRALFLIPRNPPPRLKSKKWSKKFFSFIEGCLVKNYMQRPSTEQLLKHPFIRDQPNERQVRIQLKDHIDRTRKKRGEKDETEYEYSGSEEEEEEVPEQEGEPSSIVNVPGESTLRRDFLRLQQENKERSEALRRQQLLQEQQLREQEEYKRQLLAERQKRIEQQKEQRRRLEEQQRREREARRQQEREQRRREQEEKRRLEELERRRKEEEERRRAEEEKRRVEREQEYIRRQLEEEQRHLEVLQQQLLQEQAMLLHDHRRPHPQHSQQPPPPQQERSKPSFHAPEPKAHYEPADRAREVPVRTTSRSPVLSRRDSPLQGSGQQNSQAGQRNSTSSIEPRLLWERVEKLVPRPGSGSSSGSSNSGSQPGSHPGSQSGSGERFRVRSSSKSEGSPSQRLENAVKKPEDKKEVFRPLKPAASDLTALAKELRAVEDVRPPHKVTDYSSSSEESGTTDEEDDDVEQEGADESTSGPEDTRAASSLNLSNGETESVKTMIVHDDVESEPAMTPSKEGTLIVRQSTVDQKRASHHESNGFAGRIHLLPDLLQQSHSSSTSSTSSSPSSSQPTPTMSPQTPQDKLTANETQSASSTLQKHKSSSSFTPFIDPRLLQISPSSGTTVTSVVGFSCDGMRPEAIRQDPTRKGSVVNVNPTNTRPQSDTPEIRKYKKRFNSEILCAALWGVNLLVGTESGLMLLDRSGQGKVYPLINRRRFQQMDVLEGLNVLVTISGKKDKLRVYYLSWLRNKILHNDPEVEKKQGWTTVGDLEGCVHYKVVKYERIKFLVIALKSSVEVYAWAPKPYHKFMAFKSFGELVHKPLLVDLTVEEGQRLKVIYGSCAGFHAVDVDSGSVYDIYLPTHIQCSIKPHAIIILPNTDGMELLVCYEDEGVYVNTYGRITKDVVLQWGEMPTSVAYIRSNQTMGWGEKAIEIRSVETGHLDGVFMHKRAQRLKFLCERNDKVFFASVRSGGSSQVYFMTLGRTSLLSW

SEQ ID NO: 828635 - protein, 1237 aa, Homo sapiens; identical to SEQ ID NO: 828613

SEQ ID NO: 828636 - protein, 585 aa, Homo sapiens
FNFYTVKPYLYKKEVFRPLKPADLTALAKELRAVEDVRPPHKVTDYSSSSEESGTTDEEDDDVEQEGADESTSGPEDTRAASSLNLSNGETESVKTMIVHDDVESEPAMTPSKEGTLIVRQSTVDQKRASHHESNGFAGRIHLLPDLLQQSHSSSTSSTSSSPSSSQPTPTMSPQTPQDKLTANETQSASSTLQKHKSSSSFTPFIDPRLLQISPSSGTTVTSVVGFSCDGMRPEAIRQDPTRKGSVVNVNPTNTRPQSDTPEIRKYKKRFNSEILCAALWGVNLLVGTESGLMLLDRSGQGKVYPLINRRRFQQMDVLEGLNVLVTISGKKDKLRVYYLSWLRNKILHNDPEVEKKQGWTTVGDLEGCVHYKVVKYERIKFLVIALKSSVEVYAWAPKPYHKFMAFKSFGELVHKPLLVDLTVEEGQRLKVIYGSCAGFHAVDVDSGSVYDIYLPTHIQCSIKPHAIIILPNTDGMELLVCYEDEGVYVNTYGRITKDVVLQWGEMPTSVAYIRSNQTMGWGEKAIEIRSVETGHLDGVFMHKRAQRLKFLCERNDKVFFASVRSGGSSQVYFMTLGRTSLLSW

SEQ ID NO: 828637 - protein, 137 aa, Homo sapiens; identical to SEQ ID NO: 828630

SEQ ID NO: 828638 - protein, 567 aa, Homo sapiens; identical to SEQ ID NO: 828625

SEQ ID NO: 828639 - protein, 341 aa, Homo sapiens
MEFCGAGSITDLVKNTKGNTLKEDWIAYISREILRGLAHLHIHHVIHRDIKGQNVLLTENAEVKLVDFGVSAQLDRTVGRRNTFIGTPYWMAPEVIACDENPDATYDYRSDLWSCGITAIEMAEGAPPLCDMHPMRALFLIPRNPPPRLKSKKWSKKFFSFIEGCLVKNYMQRPSTEQLLKHPFIRDQPNERQVRIQLKDHIDRTRKKRGEKDETEYEYSGSEEEEEEVPEQEGEPSSIVNVPGESTLRRDFLRLQQENKERSEALRRQQLLQEQQLREQEEYKRQLLAERQKRIEQQKEQRRRLEEQQRREREARRQQEREQLKAKEESEESDEDMGFGL

SEQ ID NO: 828640 - protein, 292 aa, Homo sapiens
MEFCGAGSITDLVKNTKGNTLKEDWIAYISREILRGLAHLHIHHVIHRDIKGQNVLLTENAEVKLVDFGVSAQLDRTVGRRNTFIGTPYWMAPEVIACDENPDATYDYRSDLWSCGITAIEMAEGAPPLCDMHPMRALFLIPRNPPPRLKSKKWSKKFFSFIEGCLVKNYMQRPSTEQLLKHPFIRDQPNERQVRIQLKDHIDRTRKKRGEKDETEYEYSGSEEEEEEVPEQEGEPSAIMNVPVESTIPRRSQWSMAAGGLRTCPRDSEQCTTFMSDRARISGIISSCVLSE

SEQ ID NO: 828641 - protein, 197 aa, Homo sapiens
IRGSGYHGTERQRHLLLFVFWWQKGKMANDSPAKSLVDIDLSSLRDPAGIFELVEVVGNGTYGQVYKGRHVKTGQLAAIKVMDVTEDEEEEIKLEINMLKKYSHHRNIATYYGAFIKKSPPGHDDQLWLVMEFCGAGSITDLVKNTKGNTLKEDWIAYISREILRGLAHLHIHHVIHRDIKGQNVLLTENAEVKLGM

SEQ ID NO: 828642 - protein, 1327 aa, Homo sapiens
MEAPLQTGMVLGVMIGAGVAVVVTAVLILLVVRRLRVPKTPAPDGPRYRFRKRDKVLFYGRKIMRKVSQSTSSLVDTSVSATSRPRMRKKLKMLNIAKKILRIQKETPTLQRKEPPPAVLEADLTEGDLANSHLPSEVLYMLKNVRVLGHFEKPLFLELCRHMVFQRLGQGDYVFRPGQPDASIYVVQDGLLELCLPGPDGKECVVKEVVPGDSVNSLLSILDVITGHQHPQRTVSARAARDSTVLRLPVEAFSAVFTKYPESLVRVVQIIMVRLQRVTFLALHNYLGLTNELFSHEIQPLRLFPSPGLPTRTSPVRGSKRMVSTSATDEPRETPGRPPDPTGAPLPGPTGDPVKPTSLETPSAPLLSRCVSMPGDISGLQGGPRSDFDMAYERGRISVSLQEEASGGSLAAPARTPTQEPREQPAGACEYSYCEDESATGGCPFGPYQGRQTSSIFEAAKQELAKLMRIEDPSLLNSRVLLHHAKAGTIIARQGDQDVSLHFVLWGCLHVYQRMIDKAEDVCLFVAQPGELVGQLAVLTGEPLIFTLRAQRDCTFLRISKSDFYEIMRAQPSVVLSAAHTVAARMSPFVRQMDFAIDWTAVEAGRALYRQGDRSDCTYIVLNGRLRSVIQRGSGKKELVGEYGRGDLIGVVEALTRQPRATTVHAVRDTELAKLPEGTLGHIKRRYPQVVTRLIHLLSQKILGNLQQLQGPFPAGSGLGVPPHSELTNPASNLATVAILPVCAEVPMVAFTLELQHALQAIGPTLLLNSDIIRARLGASALDSIQEFRLSGWLAQQEDAHRIVLYQTDASLTPWTVRCLRQADCILIVGLGDQEPTLGQLEQMLENTAVRALKQLVLLHREEGAGPTRTVEWLNMRSWCSGHLHLRCPRRLFSRRSPAKLHELYEKVFSRRADRHSDFSRLARVLTGNTIALVLGGGGARGCSHIGVLKALEEAGVPVDLVGGTSIGSFIGALYAEERSASRTKQRAREWAKSMTSVLEPVLDLTYPVTSMFTGSAFNRSIHRVFQDKQIEDLWLPYFNVTTDITASAMRVHKDGSLWRYVRASMTLSGYLPPLCDPKDGHLLMDGGYINNLPADIARSMGAKTVIAIDVGSQDETDLSTYGDSLSGWWLLWKRLNPWADKVKVPDMAEIQSRLAYVSCVRQLEVVKSSSYCEYLRPPIDCFKTMDFGKFDQIYDVGYQYGKAVFGGWSRGNVIEKMLTDRRSTDLNESRRADVLAFPSSGFTDLAEIVSRIEPPTSYVSDGCADGEESDCLTEYEEDAGPDCSRDEGGSPEGASPSTASEMEEEKSILRQRRCLPQEPPGSATDA

SEQ ID NO: 828643 - protein, 1327 aa, Homo sapiens; identical to SEQ ID NO: 828642

SEQ ID NO: 828644 - protein, 705 aa, Homo sapiens
MGQYSPLSTHLRLSSFPTQAAPIMHAAPQVEALTRQPRATTVHAVRDTELAKLPEGTLGHIKRRYPQVVTRLIHLLSQKILGNLQQLQGPFPAGSGLGVPPHSELTNPASNLATVAILPVCAEVPMVAFTLELQHALQAIGPTLLLNSDIIRARLGASALDSIQEFRLSGWLAQQEDAHRIVLYQTDASLTPWTVRCLRQADCILIVGLGDQEPTLGQLEQMLENTAVRALKQLVLLHREEGAGPTRTVEWLNMRSWCSGHLHLRCPRRLFSRRSPAKLHELYEKVFSRRADRHSDFSRLARVLTGNTIALVLGGGGARGCSHIGVLKALEEAGVPVDLVGGTSIGSFIGALYAEERSASRTKQRAREWAKSMTSVLEPVLDLTYPVTSMFTGSAFNRSIHRVFQDKQIEDLWLPYFNVTTDITASAMRVHKDGSLWRYVRASMTLSGYLPPLCDPKDGHLLMDGGYINNLPADIARSMGAKTVIAIDVGSQDETDLSTYGDSLSGWWLLWKRLNPWADKVKVPDMAEIQSRLAYVSCVRQLEVVKSSSYCEYLRPPIDCFKTMDFGKFDQIYDVGYQYGKAVFGGWSRGNVIEKMLTDRRSTDLNESRRADVLAFPSSGFTDLAEIVSRIEPPTSYVSDGCADGEESDCLTEYEEDAGPDCSRDEGGSPEGASPSTASEMEEEKSILRQRRCLPQEPPGSATDA

SEQ ID NO: 828645 - protein, 1063 aa, Homo sapiens
GRVAPPGREQHWPILQMGTSSHGLATNSSGAKVAERDGFQDVLAPGEGSAGRICGAQPVPFVPQVLGVMIGAGVAVVVTAVLILLVVRRLRVPKTPAPDGPRYRFRKRDKVLFYGRKIMRKVSQSTSSLVDTSVSATSRPRMRKKLKMLNIAKKILRIQKETPTLQRKEPPPAVLEADLTEGDLANSHLPSEVLYMLKNVRVLGHFEKPLFLELCRHMVFQRLGQGDYVFRPGQPDASIYVVQDGLLELCLPGPDGKECVVKEVVPGDSVNSLLSILDVITGHQHPQRTVSARAARDSTVLRLPVEAFSAVFTKYPESLVRVVQIIMVRLQRVTFLALHNYLGLTNELFSHEIQPLRLFPSPGLPTRTSPVRGSKRMVSTSATDEPRETPGRPPDPTGAPLPGPTGDPVKPTSLETPSAPLLSRCVSMPGDISGLQGGPRSDFDMAYERGRISVSLQEEASGGSLAAPARTPTQEPREQPAGACEYSYCEDESATGGCPFGPYQGRQTSSIFEAAKQELAKLMRIEDPSLLNSRVLLHHAKAGTIIARQGDQDVSLHFVLWGCLHVYQRMIDKAEDVCLFVAQPGELVGQLAVLTGEPLIFTLRAQRDCTFLRISKSDFYEIMRAQPSVVLSAAHTVAARMSPFVRQMDFAIDWTAVEAGRALYRQGDRSDCTYIVLNGRLRSVIQRGSGKKELVGEYGRGDLIGVVEALTRQPRATTVHAVRDTELAKLPEGTLGHIKRRYPQVVTRLIHLLSQKILGNLQQLQGPFPAGSGLGVPPHSELTNPASNLATVAILPVCAEVPMVAFTLELQHALQAIGPTLLLNSDIIRARLGASALDSIQEFRLSGWLAQQEDAHRIVLYQTDASLTPWTVRCLRQADCILIVGLGDQEPTLGQLEQMLENTAVRALKQLVLLHREEGAGPTRTVEWLNMRSWCSGHLHLRCPRRLFSRRSPAKLARGPAQRLLPLGEGAHGEHHCPCARRGRGQGLLAHRSTKGIRGGGGPRGPGGRHVHWLFHRSVVRGGAQRQPHEAAGPGVGQEHDFGAGTCVGPHVPSHLHVHWVCL

SEQ ID NO: 828646 - protein, 1390 aa, Homo sapiens
GRVAPPGREQHWPILQMGTSSHGLATNSSGAKVAERDGFQDVLAPGEGSAGRICGAQPVPFVPQVLGVMIGAGVAVVVTAVLILLVVRRLRVPKTPAPDGPRYRFRKRDKVLFYGRKIMRKVSQSTSSLVDTSVSATSRPRMRKKLKMLNIAKKILRIQKETPTLQRKEPPPAVLEADLTEGDLANSHLPSEVLYMLKNVRVLGHFEKPLFLELCRHMVFQRLGQGDYVFRPGQPDASIYVVQDGLLELCLPGPDGKECVVKEVVPGDSVNSLLSILDVITGHQHPQRTVSARAARDSTVLRLPVEAFSAVFTKYPESLVRVVQIIMVRLQRVTFLALHNYLGLTNELFSHEIQPLRLFPSPGLPTRTSPVRGSKRMVSTSATDEPRETPGRPPDPTGAPLPGPTGDPVKPTSLETPSAPLLSRCVSMPGDISGLQGGPRSDFDMAYERGRISVSLQEEASGGSLAAPARTPTQEPREQPAGACEYSYCEDESATGGCPFGPYQGRQTSSIFEAAKQELAKLMRIEDPSLLNSRVLLHHAKAGTIIARQGDQDVSLHFVLWGCLHVYQRMIDKAEDVCLFVAQPGELVGQLAVLTGEPLIFTLRAQRDCTFLRISKSDFYEIMRAQPSVVLSAAHTVAARMSPFVRQMDFAIDWTAVEAGRALYRQGDRSDCTYIVLNGRLRSVIQRGSGKKELVGEYGRGDLIGVVEALTRQPRATTVHAVRDTELAKLPEGTLGHIKRRYPQVVTRLIHLLSQKILGNLQQLQGPFPAGSGLGVPPHSELTNPASNLATVAILPVCAEVPMVAFTLELQHALQAIGPTLLLNSDIIRARLGASALDSIQEFRLSGWLAQQEDAHRIVLYQTDASLTPWTVRCLRQADCILIVGLGDQEPTLGQLEQMLENTAVRALKQLVLLHREEGAGPTRTVEWLNMRSWCSGHLHLRCPRRLFSRRSPAKLHELYEKVFSRRADRHSDFSRLARVLTGNTIALVLGGGGARGCSHIGVLKALEEAGVPVDLVGGTSIGSFIGALYAEERSASRTKQRAREWAKSMTSVLEPVLDLTYPVTSMFTGSAFNRSIHRVFQDKQIEDLWLPYFNVTTDITASAMRVHKDGSLWRYVRASMTLSGYLPPLCDPKDGHLLMDGGYINNLPVCHTWNIRAEMCVDKDYRSVDIRCESSQDETDLSTYGDSLSGWWLLWKRLNPWADKVKVPDMAEIQSRLAYVSCVRQLEVVKSSSYCEYLRPPIDCFKTMDFGKFDQIYDVGYQYGKAVFGGWSRGNVIEKMLTDRRSTDLNESRRADVLAFPSSGFTDLAEIVSRIEPPTSYVSDGCADGEESDCLTEYEEDAGPDCSRDEGGSPEGASPSTASEMEEEKSILRQRRCLPQEPPGSATDA

SEQ ID NO: 828647 - protein, 1045 aa, Homo sapiens
  misc_feature (1041)..(1041): Xaa can be any naturally occurring amino acid
GRVAPPGREQHWPILQMGTSSHGLATNSSGAKVAERDGFQDVLAPGEGSAGRICGAQPVPFVPQVLGVMIGAGVAVVVTAVLILLVVRRLRVPKTPAPDGPRYRFRKRDKVLFYGRKIMRKVSQSTSSLVDTSVSATSRPRMRKKLKMLNIAKKILRIQKETPTLQRKEPPPAVLEADLTEGDLANSHLPSEVLYMLKNVRVLGHFEKPLFLELCRHMVFQRLGQGDYVFRPGQPDASIYVVQDGLLELCLPGPDGKECVVKEVVPGDSVNSLLSILDVITGHQHPQRTVSARAARDSTVLRLPVEAFSAVFTKYPESLVRVVQIIMVRLQRVTFLALHNYLGLTNELFSHEIQPLRLFPSPGLPTRTSPVRGSKRMVSTSATDEPRETPGRPPDPTGAPLPGPTGDPVKPTSLETPSAPLLSRCVSMPGDISGLQGGPRSDFDMAYERGRISVSLQEEASGGSLAAPARTPTQEPREQPAGACEYSYCEDESATGGCPFGPYQGRQTSSIFEAAKQELAKLMRIEDPSLLNSRVLLHHAKAGTIIARQGDQDVSLHFVLWGCLHVYQRMIDKAEDVCLFVAQPGELVGQLAVLTGEPLIFTLRAQRDCTFLRISKSDFYEIMRAQPSVVLSAAHTVAARMSPFVRQMDFAIDWTAVEAGRALYRQGDRSDCTYIVLNGRLRSVIQRGSGKKELVGEYGRGDLIGVVEALTRQPRATTVHAVRDTELAKLPEGTLGHIKRRYPQVVTRLIHLLSQKILGNLQQLQGPFPAGSGLGVPPHSELTNPASNLATVAILPVCAEVPMVAFTLELQHALQAIGPTLLLNSDIIRARLGASALDSIQEFRLSGWLAQQEDAHRIVLYQTDASLTPWTVRCLRQADCILIVGLGDQEPTLGQLEQMLENTAVRALKQLVLLHREEGAGPTRTVEWLNMRSWCSGHLHLRCPRRLFSRRSPAKLVLAFPSSGFTDLAEIVSRIEPPTSYVSDGCADGEESDCLTEYEEDAGPDCSRDEGGSPEGASPSTASEMDGGRSRSSPGQQNAWXWGPK

SEQ ID NO: 828648 - protein, 1382 aa, Homo sapiens
GRVAPPGREQHWPILQMGTSSHGLATNSSGAKVAERDGFQDVLAPGEGSAGRICGAQPVPFVPQVLGVMIGAGVAVVVTAVLILLVVRRLRVPKTPAPDGPRYRFRKRDKVLFYGRKIMRKVSQSTSSLVDTSVSATSRPRMRKKLKMLNIAKKILRIQKETPTLQRKEPPPAVLEADLTEGDLANSHLPSEVLYMLKNVRVLGHFEKPLFLELCRHMVFQRLGQGDYVFRPGQPDASIYVVQDGLLELCLPGPDGKECVVKEVVPGDSVNSLLSILDVITGHQHPQRTVSARAARDSTVLRLPVEAFSAVFTKYPESLVRVVQIIMVRLQRVTFLALHNYLGLTNELFSHEIQPLRLFPSPGLPTRTSPVRGSKRMVSTSATDEPRETPGRPPDPTGAPLPGPTGDPVKPTSLETPSAPLLSRCVSMPGDISGLQGGPRSDFDMAYERGRISVSLQEEASGGSLAAPARTPTQEPREQPAGACEYSYCEDESATGGCPFGPYQGRQTSSIFEAAKQELAKLMRIEDPSLLNSRVLLHHAKAGTIIARQGDQDVSLHFVLWGCLHVYQRMIDKAEDVCLFVAQPGELVGQLAVLTGEPLIFTLRAQRDCTFLRISKSDFYEIMRAQPSVVLSAAHTVAARMSPFVRQMDFAIDWTAVEAGRALYRQGDRSDCTYIVLNGRLRSVIQRGSGKKELVGEYGRGDLIGVVEALTRQPRATTVHAVRDTELAKLPEGTLGHIKRRYPQVVTRLIHLLSQKILGNLQQLQGPFPAGSGLGVPPHSELTNPASNLATVAILPVCAEVPMVAFTLELQHALQAIGPTLLLNSDIIRARLGASALDSIQEFRLSGWLAQQEDAHRIVLYQTDASLTPWTVRCLRQADCILIVGLGDQEPTLGQLEQMLENTAVRALKQLVLLHREEGAGPTRTVEWLNMRSWCSGHLHLRCPRRLFSRRSPAKLHELYEKVFSRRADRHSDFSRLARVLTGNTIALVLGGGGARGCSHIGVLKALEEAGVPVDLVGGTSIGSFIGALYAEERSASRTKQRAREWAKSMTSVLEPVLDLTYPVTSMFTGSAFNRSIHRVFQDKQIEDLWLPYFNVTTDITASAMRVHKDGSLWRYVRASMTLSGYLPPLCDPKDGHLLMDGGYINNLPADIARSMGAKTVIAIDVGSQDETDLSTYGDSLSGWWLLWKRLNPWADKVKVPDMAEIQSRLAYVSCVRQLEVVKSSSYCEYLRPPIDCFKTMDFGKFDQIYDVGYQYGKAVFGGWSRGNVIEKMLTDRRSTDLNESRRADVLAFPSSGFTDLAEIVSRIEPPTSYVSDGCADGEESDCLTEYEEDAGPDCSRDEGGSPEGASPSTASEMEEEKSILRQRRCLPQEPPGSATDA

SEQ ID NO: 828649 - protein, 1408 aa, Homo sapiens
GRVAPPGREQHWPILQMGTSSHGLATNSSGAKVAERDGFQDVLAPGEGSAGRICGAQPVPFVPQVLGVMIGAGVAVVVTAVLILLVVRRLRVPKTPAPDGPRYRFRKRDKVLFYGRKIMRKVSQSTSSLVDTSVSATSRPRMRKKLKMLNIAKKILRIQKETPTLQRKEPPPAVLEADLTEGDLANSHLPSEVLYMLKNVRVLGHFEKPLFLELCRHMVFQRLGQGDYVFRPGQPDASIYVVQDGLLELCLPGPDGKECVVKEVVPGDSVNSLLSILDVITGHQHPQRTVSARAARDSTVLRLPVEAFSAVFTKYPESLVRVVQIIMVRLQRVTFLALHNYLGLTNELFSHEIQPLRLFPSPGLPTRTSPVRGSKRMVSTSATDEPRETPGRPPDPTGAPLPGPTGDPVKPTSLETPSAPLLSRCVSMPGDISGLQGGPRSDFDMAYERGRISVSLQEEASGGSLAAPARTPTQEPREQPAGACEYSYCEDESATGGCPFGPYQGRQTSSIFEAAKQELAKLMRIEVGSRGELGTGRKGGLAAPISTPLPPQDPSLLNSRVLLHHAKAGTIIARQGDQDVSLHFVLWGCLHVYQRMIDKAEDVCLFVAQPGELVGQLAVLTGEPLIFTLRAQRDCTFLRISKSDFYEIMRAQPSVVLSAAHTVAARMSPFVRQMDFAIDWTAVEAGRALYRQGDRSDCTYIVLNGRLRSVIQRGSGKKELVGEYGRGDLIGVVEALTRQPRATTVHAVRDTELAKLPEGTLGHIKRRYPQVVTRLIHLLSQKILGNLQQLQGPFPAGSGLGVPPHSELTNPASNLATVAILPVCAEVPMVAFTLELQHALQAIGPTLLLNSDIIRARLGASALDSIQEFRLSGWLAQQEDAHRIVLYQTDASLTPWTVRCLRQADCILIVGLGDQEPTLGQLEQMLENTAVRALKQLVLLHREEGAGPTRTVEWLNMRSWCSGHLHLRCPRRLFSRRSPAKLHELYEKVFSRRADRHSDFSRLARVLTGNTIALVLGGGGARGCSHIGVLKALEEAGVPVDLVGGTSIGSFIGALYAEERSASRTKQRAREWAKSMTSVLEPVLDLTYPVTSMFTGSAFNRSIHRVFQDKQIEDLWLPYFNVTTDITASAMRVHKDGSLWRYVRASMTLSGYLPPLCDPKDGHLLMDGGYINNLPADIARSMGAKTVIAIDVGSQDETDLSTYGDSLSGWWLLWKRLNPWADKVKVPDMAEIQSRLAYVSCVRQLEVVKSSSYCEYLRPPIDCFKTMDFGKFDQIYDVGYQYGKAVFGGWSRGNVIEKMLTDRRSTDLNESRRADVLAFPSSGFTDLAEIVSRIEPPTSYVSDGCADGEESDCLTEYEEDAGPDCSRDEGGSPEGASPSTASEMEEEKSILRQRRCLPQEPPGSATDA

SEQ ID NO: 828650 - protein, 1345 aa, Homo sapiens
GRVAPPGREQHWPILQMGTSSHGLATNSSGAKVAERDGFQDVLAPGEGSAGRICGAQPVPFVPQVLGVMIGAGVAVVVTAVLILLVVRRLRVPKTPAPDGPRYRFRKRDKVLFYGRKIMRKVSQSTSSLVDTSVSATSRPRMRKKLKMLNIAKKILRIQKETPTLQRKEPPPAVLEADLTEGDLANSHLPSEVLYMLKNVRVLGHFEKPLFLELCRHMVFQRLGQGDYVFRPGQPDASIYVVQDGLLELCLPGPDGKECVVKEVVPGDSVNSLLSILDVITGHQHPQRTVSARAARDSTVLRLPVEAFSAVFTKYPESLVRVVQIIMVRLQRVTFLALHNYLGLTNELFSHEIQPLRLFPSPGLPTRTSPVRGSKRMVSTSATDEPRETPGRPPDPTGAPLPGPTGDPVKPTSLETPSAPLLSRCVSMPGDISGLQGGPRSDFDMAYERGRISVSLQEEASGGSLAAPARTPTQEPREQPAGACEYSYCEDESATGGCPFGPYQGRQTSSIFEAAKQELAKLMRIEDPSLLNSRVLLHHAKAGTIIARQGDQDVSLHFVLWGCLHVYQRMIDKAEDVCLFVAQPGELVGQLAVLTGEPLIFTLRAQRDCTFLRISKSDFYEIMRAQPSVVLSAAHTVAARMSPFVRQMDFAIDWTAVEAGRALYRQGDRSDCTYIVLNGRLRSVIQRGSGKKELVGEYGRGDLIGVVEALTRQPRATTVHAVRDTELAKLPEGTLGHIKRRYPQVVTRLIHLLSQKILGNLQQLQGPFPAGSGLGVPPHSELTNPASNLATVAILPVCAEVPMVAFTLELQHALQAIGPTLLLNSDIIRARLGASALDSIQEFRLSGWLAQQEDAHRIVLYQTDASLTPWTVRCLRQADCILIVGLGDQEPTLGQSWCSGHLHLRCPRRLFSRRSPAKLHELYEKVFSRRADRHSDFSRLARVLTGNTIALVLGGGGARGCSHIGVLKALEEAGVPVDLVGGTSIGSFIGALYAEERSASRTKQRAREWAKSMTSVLEPVLDLTYPVTSMFTGSAFNRSIHRVFQDKQIEDLWLPYFNVTTDITASAMRVHKDGSLWRYVRASMTLSGYLPPLCDPKDGHLLMDGGYINNLPADIARSMGAKTVIAIDVGSQDETDLSTYGDSLSGWWLLWKRLNPWADKVKVPDMAEIQSRLAYVSCVRQLEVVKSSSYCEYLRPPIDCFKTMDFGKFDQIYDVGYQYGKAVFGGWSRGNVIEKMLTDRRSTDLNESRRADVLAFPSSGFTDLAEIVSRIEPPTSYVSDGCADGEESDCLTEYEEDAGPDCSRDEGGSPEGASPSTASEMEEEKSILRQRRCLPQEPPGSATDA

SEQ ID NO: 828651 - protein, 227 aa, Homo sapiens [sequence omitted]

SEQ ID NO: 828652 - protein, 150 aa, Homo sapiens
MAARGVIAPVGESLRYAEYLQPSAKRPDADVDQQRLVRSLIAVGLGVAALAFAGRYAFRIWKPLEQVITETAKKISTPSFSSYYKGGFEQKMSRREAGLILGVSPSAGKAKIRTAHRRVMILNHPDKGGSPYVAAKINEAKDLLETTTKH

SEQ ID NO: 828653 - protein, 138 aa, Homo sapiens
PTRRPRVRTHASERPDADVDQQRLVRSLIAVGLGVAALAFAGRYAFRIWKPLEQVITETAKKISTPSFSSYYKGGFEQKMSRREAGLILGVSPSAGKAKIRTAHRRVMILNHPDKGGSPYVAAKINEAKDLLETTTKH

SEQ ID NO: 828654 - protein, 150 aa, Homo sapiens; identical to SEQ ID NO: 828652

SEQ ID NO: 828655 - protein, 150 aa, Homo sapiens; identical to SEQ ID NO: 828652

SEQ ID NO: 828656 - protein, 150 aa, Homo sapiens; identical to SEQ ID NO: 828652

SEQ ID NO: 828657 - protein, 150 aa, Homo sapiens; identical to SEQ ID NO: 828652

SEQ ID NO: 828658 - protein, 104 aa, Homo sapiens
MAARGVIAPVGESLRYAEYLQPSAKRPDADVDQQRLVRSLIAVGLGVAALAFAGRYAFRIWKPLEQVITETAKKISTPSFSSYYKGGFEQKMSRREAGLILGVR

SEQ ID NO: 828659 - protein, 577 aa, Homo sapiens
MTELAGASSSCCHRPAGRGAMQSVLHHFQRLRGREGGSHFINTSSPRGEAKMSITSDEVNFLVYRYLQESGFSHSAFTFGIESHISQSNINGTLVPPAALISILQKGLQYVEAEISINEDGTVFDGRPIESLSLIDAVMPDVVQTRQQAFREKLAQQQASAAAAAAAATAAATAATTTSAGVSHQNPSKNREATVNGEENRAHSVNNHAKPMEIDGEVEIPSSKATVLRGHESEVFICAWNPVSDLLASGSGDSTARIWNLNENSNGGSTQLVLRHCIREGGHDVPSNKDVTSLDWNTNGTLLATGSYDGFARIWTEDGNLASTLGQHKGPIFALKWNRKGNYILSAGVDKTTIIWDAHTGEAKQQFPFHSAPALDVDWQNNTTFASCSTDMCIHVCRLGCDRPVKTFQGHTNEVNAIKWDPSGMLLASCSDDMTLKIWSMKQEVCIHDLQAHNKEIYTIKWSPTGPATSNPNSNIMLASASFDSTVRLWDIERGVCTHTLTKHQEPVYSVAFSPDGKYLASGSFDKCVHIWNTQSGNLVHSYRGTGGIFEVCWNARGDKVGASASDGSVCVLDLRK

SEQ ID NO: 828660 - protein, 78 aa, Homo sapiens
DGAWGPRPPSPGFYLTIPTWFTFIKTKAIPRERPWLPTFISIPVLSGTTPWTAVFRASSICTPLLTLSAAGMLVESSL

SEQ ID NO: 828661 - protein, 526 aa, Homo sapiens
MSITSDEVNFLVYRYLQESGFSHSAFTFGIESHISQSNINGTLVPPAALISILQKGLQYVEAEISINEDGTVFDGRPIESLSLIDAVMPDVVQTRQQAFREKLAQQQASAAAAAAAATAAATAATTTSAGVSHQNPSKNREATVNGEENRAHSVNNHAKPMEIDGEVEIPSSKATVLRGHESEVFICAWNPVSDLLASGSGDSTARIWNLNENSNGGSTQLVLRHCIREGGHDVPSNKDVTSLDWNTNGTLLATGSYDGFARIWTEDGNLASTLGQHKGPIFALKWNRKGNYILSAGVDKTTIIWDAHTGEAKQQFPFHSAPALDVDWQNNTTFASCSTDMCIHVCRLGCDRPVKTFQGHTNEVNAIKWDPSGMLLASCSDDMTLKIWSMKQEVCIHDLQAHNKEIYTIKWSPTGPATSNPNSNIMLASASFDSTVRLWDIERGVCTHTLTKHQEPVYSVAFSPDGKYLASGSFDKCVHIWNTQSGNLVHSYRGTGGIFEVCWNARGDKVGASASDGSVCVLDLRK

SEQ ID NO: 828662 - protein, 439 aa, Homo sapiens
MPDVVQTRQQAFREKLAQQQASAAAAAAAATAAATAATTTSAGVSHQNPSKNREATVNGEENRAHSVNNHAKPMEIDGEVEIPSSKATVLRGHESEVFICAWNPVSDLLASGSGDSTARIWNLNENSNGGSTQLVLRHCIREGGHDVPSNKDVTSLDWNTNGTLLATGSYDGFARIWTEDGNLASTLGQHKGPIFALKWNRKGNYILSAGVDKTTIIWDAHTGEAKQQFPFHSAPALDVDWQNNTTFASCSTDMCIHVCRLGCDRPVKTFQGHTNEVNAIKWDPSGMLLASCSDDMTLKIWSMKQEVCIHDLQAHNKEIYTIKWSPTGPATSNPNSNIMLASASFDSTVRLWDIERGVCTHTLTKHQEPVYSVAFSPDGKYLASGSFDKCVHIWNTQSGNLVHSYRGTGGIFEVCWNARGDKVGASASDGSVCVLDLRK

SEQ ID NO: 828663 - protein, 526 aa, Homo sapiens; identical to SEQ ID NO: 828661

SEQ ID NO: 828664 - protein, 526 aa, Homo sapiens; identical to SEQ ID NO: 828661

SEQ ID NO: 828665 - protein, 429 aa, Homo sapiens [sequence omitted]

SEQ ID NO: 828666 - protein, 140 aa, Homo sapiens
MTELAGASSSCCHRPAGRGAMQSVLHHFQRLRGREGGSHFINTSSPRGEAKMSITSDEVNFLVYRYLQESGKRLGFLSVGNSSTASYKQKDQRLIQNQAVEEEEEELRRFLVLMGRREGSGAVPSPGGKRECVLSSLDTS

SEQ ID NO: 828667 - protein, 526 aa, Homo sapiens; identical to SEQ ID NO: 828661

SEQ ID NO: 828668 - protein, 526 aa, Homo sapiens; identical to SEQ ID NO: 828661

SEQ ID NO: 828669 - protein, 110 aa, Homo sapiens
PGSPGATKGRLKGRPHHVLLGGLEWQLIHNKTQSILLIHNYGDCISVRVEENHTISDASQSTRPTVKGWSLQTASHFYDRMLGSLLVHRSIHEVTIRGWFPLHQHLIAAR

SEQ ID NO: 828670 - protein, 233 aa, Homo sapiens
MAATSGTDEPVSGELVSVAHALSLPAESYGNDPDIEMAWAMRAMQHAEVYYKLISSVDPQFLKLTKVDDQIYSEFRKNFETLRIDVLDPEELKSESAKEKWRPFCLKFNGIVEDFNYGTLLRLDCSQGYTEENTIFAPRIQFFAIEIARNREGYNKAVYISVQDKEGEKGVNNGGEKRADSGEEENTKNGGEKGADSGEEKEEGINREDKTDKGGEKGKEADKEINKSGEKAM

SEQ ID NO: 828671 - protein, 210 aa, Homo sapiens
MAATSGTDEPVSGELVSVAHALSLPAESYGNDPDIEMAWAMRAMQHAEVYYKLISSVDPQFLKLTKVDDQIYSEFRKNFETLRIDVLDPEELKSESAKEKWRPFCLKFNGIVEDFNYGTLLRLDCSQGYTEENTIFAPRIQFFAIEIARNREGYNKAVYISVQDKEGEKGVNNGGEKRADSGEEENTKNGGEKGADSGEEKEEGINREDK

SEQ ID NO: 828672 - protein, 232 aa, Homo sapiens
MAATSGTDEPVSGELVSVAHALSLPAESYGNDPDIEMAWAMRAMQHAEVYYKLISSVDPQFLKLTKVDDQIYSEFRKNFETLRIDVLDPEELKSESAKEPPGYNSLPLKLLGTGKAITKLFISVFRTKKERKESTMEEKKELTVEKKRTPRMEERKELIVEKKKRKESTEKTKLTKEEKKGKKLTKKSTKVVKKLCKVYREQHSRSYDSIETTSTTVLLAQTPLVKCKFLYN

SEQ ID NO: 828673 - protein, 140 aa, Homo sapiens
MAATSGTDEPVSGELVSVAHALSLPAESYGNDPDIEMAWAMRAMQHAEVYYKLISSVDPQFLKLTKVDDQIYSEFRKNFETLRIDVLDPEELKSESAKEKWRPFCLKFNGIVEDFNYGTLLRLDCSQGYTEENTIFAGRL

SEQ ID NO: 828674 - protein, 189 aa, Homo sapiens
MAATSGTDEPVSGELVSVAHALSLPAESYGNDPDIEMAWAMRAMQHAEVYYKLISSVDPQFLKLTKVDDQIYSEFRKNFETLRIDVLDPEELKSESAKEKWRPFCLKFNGIVEDFNYGTLLRLDCSQGYTEENTIFAPRIQFFAIEIARNREGYNKAVYISVQDKEGEKGVNNRARLHLKKKNEEEEKK

SEQ ID NO: 828675 - protein, 124 aa, Homo sapiens
MAATSGTDEPVSGELVSVAHALSLPAESYGNDPDIEMAWAMRAMQHAEVYYKLISSVDPQFLKLTKVDDQIYSEFRKNFETLRIDVLDPEELKSESAKEKWRPFCLKFNGIVEDFNYGTLLRLD

SEQ ID NO: 828676 - protein, 233 aa, Homo sapiens; identical to SEQ ID NO: 828670

SEQ ID NO: 828677 - protein, 233 aa, Homo sapiens; identical to SEQ ID NO: 828670

SEQ ID NO: 828678 - protein, 106 aa, Homo sapiens [sequence omitted]

SEQ ID NO: 828679 - protein, 232 aa, Homo sapiens; identical to SEQ ID NO: 828672

SEQ ID NO: 828680 - protein, 66 aa, Homo sapiens
GLATTAVADAWAQLETLQPRVLRTRSCSSFWTFRHPQACSSVPAFTVCERSPGLGPSPSRVAGGQG

SEQ ID NO: 828681 - protein, 759 aa, Homo sapiens
MCDLPQYVEHPLADHVSHLENVSEDEINRLLGMVVDVENLFMSVHKEEDTDTKQVYFYLFKLLRKCILQMTRPVVEGSLGSPPFEKPNIEQGVLNFVQYKFSHLAPRERQTMFELSKMFLLCLNYWKLETPAQFRQRSQAEDVATYKVNYTRWLCYCHVPQSCDSLPRYETTHVFGRSLLRSIFTVTRRQLLEKFRVEKDKLVPEKRTLILTHFPPSKAPSGLPGFGPKFTSSLLSPFFQEGFLDWSLLSLHGPFGIWASTWQTCPWPRSNLLVLVWGWRFLSMLEEEIYGANSPIWESGFTMPPSEGTQLVPRPASVSAAVVPSTPIFSPSMGGGSNSSLSLDSAGAEPMPGEKRTLPENLTLEDAKRLRVMGDIPMELVNEVMLTITDPAAMLGPETSLLSANAARDETARLEERRGIIEFHVIGNSLTPKANRRVLLWLVGLQNVFSHQLPRMPKEYIARLVFDPKHKTLALIKDGRVIGGICFRMFPTQGFTEIVFCAVTSNEQVKGYGTHLMNHLKEYHIKHNILYFLTYADEYAIGYFKKQGFSKDIKVPKSRYLGYIKDYEGATLMECELNPRIPYTELSHIIKKQKEIIKKLIERKQAQIRKVYPGLSCFKEGVRQIPVESVPGIRETGWKPLGKEKGKELKDPDQLYTTLKNLLAQIKSHPSAWPFMEPVKKSEAPDYYEVIRFPIDLKTMTERLRSRYYVTRKLFVADLQRVIANCREYNPPDSEYCRCASALEKFFYFKLKEGGLIDK

SEQ ID NO: 828682 - protein, 707 aa, Homo sapiens
  misc_feature (4)..(4): Xaa can be any naturally occurring amino acid
RGSXDPKTQLLRKCILQMTRPVVEGSLGSPPFEKPNIEQGVLNFVQYKFSHLAPRERQTMFELSKMFLLCLNYWKLETPAQFRQRSQAEDVATYKVNYTRWLCYCHVPQSCDSLPRYETTHVFGRSLLRSIFTVTRRQLLEKFRVEKDKLVPEKRTLILTHFPPSKAPSGLPGFGPKFTSSLLSPFFQEGFLDWSLLSLHGPFGIWASTWQTCPWPRSNLLVLVWGWRFLSMLEEEIYGANSPIWESGFTMPPSEGTQLVPRPASVSAAVVPSTPIFSPSMGGGSNSSLSLDSAGAEPMPGEKRTLPENLTLEDAKRLRVMGDIPMELVNEVMLTITDPAAMLGPETSLLSANAARDETARLEERRGIIEFHVIGNSLTPKANRRVLLWLVGLQNVFSHQLPRMPKEYIARLVFDPKHKTLALIKDGRVIGGICFRMFPTQGFTEIVFCAVTSNEQVKGYGTHLMNHLKEYHIKHNILYFLTYADEYAIGYFKKQGFSKDIKVPKSRYLGYIKDYEGATLMECELNPRIPYTELSHIIKKQKEIIKKLIERKQAQIRKVYPGLSCFKEGVRQIPVESVPGIRETGWKPLGKEKGKELKDPDQLYTTLKNLLAQIKSHPSAWPFMEPVKKSEAPDYYEVIRFPIDLKTMTERLRSRYYVTRKLFVADLQRVIANCREYNPPDSEYCRCASALEKFFYFKLKEGGLIDK

SEQ ID NO: 828683 - protein, 479 aa, Homo sapiens
LVRGWVLIGRGANSPIWESGFTMPPSEGTQLVPRPASVSAAVVPSTPIFSPSMGGGSNSSLSLDSAGAEPMPGEKRTLPENLTLEDAKRLRVMGDIPMELVNEVMLTITDPAAMLGPETSLLSANAARDETARLEERRGIIEFHVIGNSLTPKANRRVLLWLVGLQNVFSHQLPRMPKEYIARLVFDPKHKTLALIKDGRVIGGICFRMFPTQGFTEIVFCAVTSNEQVKGYGTHLMNHLKEYHIKHNILYFLTYADEYAIGYFKKQGFSKDIKVPKSRYLGYIKDYEGATLMECELNPRIPYTELSHIIKKQKEIIKKLIERKQAQIRKVYPGLSCFKEGVRQIPVESVPGIRETGWKPLGKEKGKELKDPDQLYTTLKNLLAQIKSHPSAWPFMEPVKKSEAPDYYEVIRFPIDLKTMTERLRSRYYVTRKLFVADLQRVIANCREYNPPDSEYCRCASALEKFFYFKLKEGGLIDK

SEQ ID NO: 828684 - protein, 901 aa, Homo sapiens
MAEPSQAPTPAPAAQPRPLQSPAPAPTPTPAPSPASAPIPTPTPAPAPAPAAAPAGSTGTGGPGVGSGGAGSGGDPARPGLSQQQRASQRKAQVRGLPRAKKLEKLGVFSACKANETCKCNGWKNPKPPTAPRMDLQQPAANLSELCRSCEHPLADHVSHLENVSEDEINRLLGMVVDVENLFMSVHKEEDTDTKQVYFYLFKLLRKCILQMTRPVVEGSLGSPPFEKPNIEQGVLNFVQYKFSHLAPRERQTMFELSKMFLLCLNYWKLETPAQFRQRSQAEDVATYKVNYTRWLCYCHVPQSCDSLPRYETTHVFGRSLLRSIFTVTRRQLLEKFRVEKDKLVPEKRTLILTHFHPSKAPSGLPGFGPKFTSSLLSPFFQEGFLDWSLLSLHGPFGIWASTWQTCPWPRSNLLVLVWGWRFLSMLEEEIYGANSPIWESGFTMPPSEGTQLVPRPASVSAAVVPSTPIFSPSMGGGSNSSLSLDSAGAEPMPGEKRTLPENLTLEDAKRLRVMGDIPMELVNEVMLTITDPAAMLGPETSLLSANAARDETARLEERRGIIEFHVIGNSLTPKANRRVLLWLVGLQNVFSHQLPRMPKEYIARLVFDPKHKTLALIKDGRVIGGICFRMFPTQGFTEIVFCAVTSNEQVKGYGTHLMNHLKEYHIKHNILYFLTYADEYAIGYFKKQGFSKDIKVPKSRYLGYIKDYEGATLMECELNPRIPYTELSHIIKKQKEIIKKLIERKQAQIRKVYPGLSCFKEGVRQIPVESVPGIRETGWKPLGKEKGKELKDPDQLYTTLKNLLAQIKSHPSAWPFMEPVKKSEAPDYYEVIRFPIDLKTMTERLRSRYYVTRKLFVADLQRVIANCREYNPPDSEYCRCASALEKFFYFKLKEGGLIDK

SEQ ID NO: 828685 - protein, 90 aa, Homo sapiens
GNGFNEMAFLLASTRMRQVKGYGTHLMNHLKEYHIKHNILYFLTYADEYAIGYFKKQGFSKDIKVPKSRYLGYIKDYEGATLMEYHQEAD

SEQ ID NO: 828686 - protein, 183 aa, Homo sapiens
SLPIHWKSDLSHIIKKQKEIIKKLIERKQAQIRKVYPGLSCFKEGVRQIPVESVPGIRETGWKPLGKEKGKELKDPDQLYTTLKNLLAQIKSHPSAWPFMEPVKKSEAPDYYEVIRFPIDLKTMTERLRSRYYVTRKLFVADLQRVIANCREYNPPDSEYCRCASALEKFFYFKLKEGGLIDK

SEQ ID NO: 828687 - protein, 901 aa, Homo sapiens; identical to SEQ ID NO: 828684

SEQ ID NO: 828688 - protein, 901 aa, Homo sapiens; identical to SEQ ID NO: 828684

SEQ ID NO: 828689 - protein, 778 aa, Homo sapiens
MAEPSQAPTPAPAAQPRPLQSPAPAPTPTPAPSPASAPIPTPTPAPAPAPAAAPAGSTGTGGPGVGSGGAGSGGDPARPGLSQQQRASQRKAQVRGLPRAKKLEKLGVFSACKANETCKCNGWKNPKPPTAPRMDLQQPAANLSELCRSCEHPLADHVSHLENVSEDEINRLLGMVVDVENLFMSVHKEEDTDTKQVYFYLFKLLRKCILQMTRPVVEGSLGSPPFEKPNIEQGVLNFVQYKFSHLAPRERQTMFELSKMFLLCLNYWKLETPAQFRQRSQAEDVATYKVNYTRWLCYCHVPQSCDSLPRYETTHVFGRSLLRSIFTVTRRQLLEKFRVEKDKLVPEKRTLILTHFHPSKAPSGLPGFGPKFTSSLLSPFFQEGFLDWSLLSLHGPFGIWASTWQTCPWPRSNLLVLVWGWRFLSMLEEEIYGANSPIWESGFTMPPSEGTQLVPRPASVSAAVVPSTPIFSPSMGGGSNSSLSLDSAGAEPMPGEKRTLPENLTLEDAKRLRVMGDIPMELVNEVMLTITDPAAMLGPETSLLSANAARDETARLEERRGIIEFHVIGNSLTPKANRRVLLWLVGLQNVFSHQLPRMPKEYIARLVFDPCVPQRAPPPGQHTQFPSSSASSLLKIGDPLLPTSEVHPLSILYFSLPNPDYSSDFQGSGDLKGTVRGYDMPPSLFRKHKTLALIKDGRVIGGICFRMFPTQGFTEIVFCAVTSNEQVKGYGTHLMNHLKEYHIKHNILYFLTYADEYAIGYFKKQVTRSLVPHRSFAW

SEQ ID NO: 828690 - protein, 257 aa, Homo sapiens
MAEPSQAPTPAPAAQPRPLQSPAPAPTPTPAPSPASAPIPTPTPAPAPAPAAAPAGSTGTGGPGVGSGGAGSGGDPARPGLSQQQRASQRKAQVRGLPRAKKLEKLGVFSACKANETCKCNGWKNPKPPTAPRMDLQQPAANLSELCRSCEHPLADHVSHLENVSEDEINRLLGMVVDVENLFMSVHKEEDTDTKQVYFYLFKLLRKCILQMTRPVVEGSLGSPPFEKPNIEQGVLNFVQYKFSHLAPRAYILITIF

SEQ ID NO: 828691 - protein, 836 aa, Homo sapiens
MAEPSQAPTPAPAAQPRPLQSPAPAPTPTPAPSPASAPIPTPTPAPAPAPAAAPAGSTGTGGPGVGSGGAGSGGDPARPGLSQQQRASQRKAQVRGLPRAKKLEKLGVFSACKANETCKCNGWKNPKPPTAPRMDLQQPAANLSELCRSCEHPLADHVSHLENVSEDEINRLLGMVVDVENLFMSVHKEEDTDTKQVYFYLFKLLRKCILQMTRPVVEGSLGSPPFEKPNIEQGVLNFVQYKFSHLAPRERQTMFELSKMFLLCLNYWKLETPAQFRQRSQAEDVATYKVNYTRWLCYCHVPQSCDSLPRYETTHVFGRSLLRSIFTVTRRQLLEKFRVEKDKLVPEKRTLILTHFPFLSMLEEEIYGANSPIWESGFTMPPSEGTQLVPRPASVSAAVVPSTPIFSPSMGGGSNSSLSLDSAGAEPMPGEKRTLPENLTLEDAKRLRVMGDIPMELVNEVMLTITDPAAMLGPETSLLSANAARDETARLEERRGIIEFHVIGNSLTPKANRRVLLWLVGLQNVFSHQLPRMPKEYIARLVFDPKHKTLALIKDGRVIGGICFRMFPTQGFTEIVFCAVTSNEQVKGYGTHLMNHLKEYHIKHNILYFLTYADEYAIGYFKKQGFSKDIKVPKSRYLGYIKDYEGATLMECELNPRIPYTELSHIIKKQKEIIKKLIERKQAQIRKVYPGLSCFKEGVRQIPVESVPGIRETGWKPLGKEKGKELKDPDQLYTTLKNLLAQIKSHPSAWPFMEPVKKSEAPDYYEVIRFPIDLKTMTERLRSRYYVTRKLFVADLQRVIANCREYNPPDSEYCRCASALEKFFYFKLKEGGLIDK

SEQ ID NO: 828692 - protein, 901 aa, Homo sapiens; identical to SEQ ID NO: 828684

SEQ ID NO: 828693 - protein, 977 aa, Homo sapiens
MAEPSQAPTPAPAAQPRPLQSPAPAPTPTPAPSPASAPIPTPTPAPAPAPAAAPAGSTGTGGPGVGSGGAGSGGDPARPGLSQQQRASQRKAQVRGLPRAKKLEKLGVFSACKANETCKCNGWKNPKPPTAPRMDLQQPAANLSELCRSCEHPLADHVSHLENVSEDEINRLLGMVVDVENLFMSVHKEEDTDTKQVYFYLFKLLRKCILQMTRPVVEGSLGSPPFEKPNIEQGVLNFVQYKFSHLAPRERQTMFELSKMFLLCLNYWKLETPAQFRQRSQAEDVATYKVNYTRWLCYCHVPQSCDSLPRYETTHVFGRSLLRSIFTVTRRQLLEKFRVEKDKLVPEKRTLILTHFHPSKAPSGLPGFGPKFTSSLLSPFFQEGFLDWSLLSLHGPFGIWASTWQTCPWPRSNLLVLVWGWRFLSMLEEEIYGANSPIWESGFTMPPSEGTQLVPRPASVSAAVVPSTPIFSPSMGGGSNSSLSLDSAGAEPMPGEKRTLPENLTLEDAKRLRVMGDIPMELVNEVMLTITDPAAMLGPETSLLSANAARDETARLEERRGIIEFHVIGNSLTPKANRRVLLWLVGLQNVFSHQLPRMPKEYIARLVFDPCVPQRAPPPGQHTQFPSSSASSLLKIGDPLLPTSEVHPLSILYFSLPNPDYSSDFQGSGDLKGTVRGYDMPPSLFRKHKTLALIKDGRVIGGICFRMFPTQGFTEIVFCAVTSNEQVKGYGTHLMNHLKEYHIKHNILYFLTYADEYAIGYFKKQGFSKDIKVPKSRYLGYIKDYEGATLMECELNPRIPYTELSHIIKKQKEIIKKLIERKQAQIRKVYPGLSCFKEGVRQIPVESVPGIRETGWKPLGKEKGKELKDPDQLYTTLKNLLAQIKSHPSAWPFMEPVKKSEAPDYYEVIRFPIDLKTMTERLRSRYYVTRKLFVADLQRVIANCREYNPPDSEYCRCASALEKFFYFKLKEGGLIDK

SEQ ID NO: 828694 - protein, 883 aa, Homo sapiens
MAEPSQAPTPAPAAQPRPLQSPAPAPTPTPAPSPASAPIPTPTPAPAPAPAAAPAGSTGTGGPGVGSGGAGSGGDPARPGLSQQQRASQRKAQVRGLPRAKKLEKLGVFSACKANETCKCNGWKNPKPPTAPRMDLQQPAANLSELCRSCEHPLADHVSHLENVSEDEINRLLGMVVDVENLFMSVHKEEDTDTKQVYFYLFKLLRKCILQMTRPVVEGSLGSPPFEKPNIEQGVLNFVQYKFSHLAPRERQTMFELSKMFLLCLNYWKLETPAQFRQRSQAEDVATYKVNYTRWLCYCHVPQSCDSLPRYETTHVFGRSLLRSIFTVTRRQLLEKFRVEKDKLVPEKRTLILTHFHPSKAPSGLPGFGPKFTSSLLSPFFQEGFLDWSLLSLHGPFGIWASTWQTCPWPRSNLLVLVWGWRFLSMLEEEIYGANSPIWESGFTMPPSEGTQLVPRPASVSAAVVPSTPIFSPSMGGGSNSSLSLDSAGAEPMPGEKRTLPENLTLEDAKRLRVMGDIPMELVNEVMLTITDPAAMLGPETSLLSANAARDETARLEERRGIIEFHVIGNSLTPKANRRVLLWLVGLQNVFSHQLPRMPKEYIARLVFDPKHKTLALIKDGRVIGGICFRMFPTQGFTEIVFCAVTSNEQVKGYGTHLMNHLKEYHIKHNILYFLTYADEYAIGYFKKQGFSKDIKVPKSRYLGYIKDYEGATLMECELNPRIPYTELSHIIKKQKEIIKKLIERKQAQIRKVYPGLSCFKEGVRQIPVESVPGIRETGWKPLGKEKGKELKDPDQLYTTLTVKKSEAPDYYEVIRFPIDLKTMTERLRSRYYVTRKLFVADLQRVIANCREYNPPDSEYCRCASALEKFFYFKLKEGGLIDK

SEQ ID NO: 828695 - protein, 901 aa, Homo sapiens; identical to SEQ ID NO: 828684

SEQ ID NO: 828696 - protein, 901 aa, Homo sapiens; identical to SEQ ID NO: 828684

SEQ ID NO: 828697 - protein, 901 aa, Homo sapiens; identical to SEQ ID NO: 828684

SEQ ID NO: 828698 - protein, 128 aa, Homo sapiens
PGTSLVSPGLQCNEIITAPYSLDIPGVKGSSCRSLPILLGLQACITTPSLVVLLYIHVVLDTADASECFRRMQRGSRVNPCPLFVADLQRVIANCREYNPPDSEYCRCASALEKFFYFKLKEGGLIDK

SEQ ID NO: 828699 - protein, 111 aa, Homo sapiens
GAELFYREHPRERGEGEPCPWPGSIFLCLRRPCGLLTPHSWFYPPPTPSQGVLNFVQYKFSHLAPRERQTMFELSKMFLLCLNYWKLETPAQFRQRSQAEDVATYKVNYTR

SEQ ID NO: 828700 - protein, 111 aa, Homo sapiens
TLSPEREPDADPSGSDVRCPPEVSLVCCATGLEGELGPAPGEIRLCRSKSNLRSESCGGDVRALPGAWRLRVWGGGYSGEGIREAREWRAISLPPKKHLGSRYLGGGPTGK

SEQ ID NO: 828701 - protein, 1298 aa, Homo sapiens
MLGSTFKNVSSYFCRPLCPLLNVSIYYVQTSGEGFFKKFCSLVIYLFKKFILFFLRWSLALLPRLECSGAISANCNFHFPGSSDSPALASQVAGTTGACQHAWLIFVFLVERGFCHVGQAGLELLTSGDPPALASQSAGITGMSHCAQPCNFTFDGDLKCSMILYVARSNVSVFAELILGSTKKSLFPSHILYHISHLPQNLQLFGPGNDICCHFDDLKMVVGVEHSHEFRIPEHVDSHPSGKTRSLKRSLSKRKQFMLKKFLEKSLRIFDLSLDLMKLVVMMCIVCITVYEDGESSQHVWFILGIFREHFCCWHQVMNMVKKKTRFCLNIGKKSKLKGVIKTDKSSSYLCDDEAGSYTRKGWERLPGGTRGRSKHREPNRGLQCGTAARYVLGKMIGVLGDQAKRAGLGAVKYIFFFFLNKIMHWVNMYNAKLKICLSQVTLVNLSTTSFRTNLKNTLILSLNGHTLLTLLGACLSEAPRGRPSSIEGWGSPAPLQRPYSQTAAGSGRARAGRTAGSGAPLLRVVGGRSPILGPGPVEPLTGGRETAHPLEPTVRACRRRVTSLLQNWRSHRLKGRWQRLRERELAAGNQCSLPSELGVCSRFLGKCSAAATRFNGCCSLALNIEAKLPGVKINSMSIKDICPIPYSAVELMTGKHCAEVFGSSMAFFFFFFLTANGINLRYNSVSSSPVVFFQHVLLLPLTASVEPFLAMSAAIFNSQNNVMRVRKCTMKKQVSRREAPNSVQLARSSALKTRCDSEARFFFSLASLSILLSVPPQSLGLGRDKEYMDCSSTCCKHIHLSRAQVVRGVERTELEDSGCQSLLSLLLAVLEQWFLQVSRDRHILRSYPRPTESEIGGGAQQACSNLRAGRLQGSFRIYKRCFNSCCQSQKFHAEKPNLNDKGARLTLKITFFQIAIACQCSHSLCFYSFIFHYFKRRNCYEVYVQVRKFPGLRLFKTYNRPGTVAQACNPSTLGGRGGWITRSGVQDHPGQHGDTLSLLRIQNEPGMVAHACSPSYLRRLRQENSWNPGGRGCSELRLCHCTPAWVTEQDLVSKTKNKKTKLGIARAAHYLTFHGNFNSGILFQVVNIKSMCQCWWLSTLAAHNHFDAEATPSRVIQNPWRVGPDECFNVSRVIPMVAKVKNQYRTYKKVEKLISRTENLPLFQSTLKRHNWPLLLFPTSMNGQEKHHRESRVSAGTCIFVDDDLGYMFFHRLCFIGFVFSEALPHYIVLRIECGCLHGNEEVQQRLLVVVIIQAEKLHRQTYQFLPLQDITIEVGAKVIAVFAIKSNGTLLLHQPT

SEQ ID NO: 828702 - protein, 1244 aa, Homo sapiens
MRWSLALLPRLECSGAISANCNFHFPGSSDSPALASQVAGTTGACQHAWLIFVFLVERGFCHVGQAGLELLTSGDPPALASQSAGITGMSHCAQPCNFTFDGDLKCSMILYVARSNVSVFAELILGSTKKSLFPSHILYHISHLPQNLQLFGPGNDICCHFDDLKMVVGVEHSHEFRIPEHVDSHPSGKTRSLKRSLSKRKQFMLKKFLEKSLRIFDLSLDLMKLVVMMCIVCITVYEDGESSQHVWFILGIFREHFCCWHQVMNMVKKKTRFCLNIGKKSKLKGVIKTDKSSSYLCDDEAGSYTRKGWERLPGGTRGRSKHREPNRGLQCGTAARYVLGKMIGVLGDQAKRAGLGAVKYIFFFFLNKIMHWVNMYNAKLKICLSQVTLVNLSTTSFRTNLKNTLILSLNGHTLLTLLGACLSEAPRGRPSSIEGWGSPAPLQRPYSQTAAGSGRARAGRTAGSGAPLLRVVGGRSPILGPGPVEPLTGGRETAHPLEPTVRACRRRVTSLLQNWRSHRLKGRWQRLRERELAAGNQCSLPSELGVCSRFLGKCSAAATRFNGCCSLALNIEAKLPGVKINSMSIKDICPIPYSAVELMTGKHCAEVFGSSMAFFFFFFLTANGINLRYNSVSSSPVVFFQHVLLLPLTASVEPFLAMSAAIFNSQNNVMRVRKCTMKKQVSRREAPNSVQLARSSALKTRCDSEARFFFSLASLSILLSVPPQSLGLGRDKEYMDCSSTCCKHIHLSRAQVVRGVERTELEDSGCQSLLSLLLAVLEQWFLQVSRDRHILRSYPRPTESEIGGGAQQACSNLRAGRLQGSFRIYKRCFNSCCQSQKFHAEKPNLNDKGARLTLKITFFQIAIACQCSHSLCFYSFIFHYFKRRNCYEVYVQVRKFPGLRLFKTYNRPGTVAQACNPSTLGGRGGWITRSGVQDHPGQHGDTLSLLRIQNEPGMVAHACSPSYLRRLRQENSWNPGGRGCSELRLCHCTPAWVTEQDLVSKTKNKKTKLGIARAAHYLTFHGNFNSGILFQVVNIKSMCQCWWLSTLAAHNHFDAEATPSRVIQNPWRVGPDECFNVSRVIPMVAKVKNQYRTYKKVEKLISRTENLPLFQSTLKRHNWPLLLFPTSMNGQEKHHRESRVSAGTCIFVDDDLGYMFFHRLCFIGFVFSEALPHYIVLRIECGCLHGNEEVQQRLLVVVIIQAEKLHRQTYQFLPLQDITIEVGAKVIAVFAIKSNGTLLLHQPT

SEQ ID NO: 828703 - protein, 513 aa, Homo sapiens [sequence omitted]

SEQ ID NO: 828704 - protein, 739 aa, Homo sapiens
MKICLSQVTLVNLSTTSFRTNLKNTLILSLNGHTLLTLLGAYLSEAPRGRPSSIEGWGSPAPLQRPYSQTAAGSGRARAGRTAGSGAPLLRVVGGRSPILGPGPVEPLTGGRETAHPLEPTVRACRRRVTSLLQNWRSHRLKGRWQRLRERELAAGNQCSLPSELGVCSRFLGKCSAAATRFNGCCSLALNIEAKLPGVKINSMSIKDICPIPYSAVELMTGKHCAEVFGSSMAFFFFFFLTANGINLRYNSVSSSPVVFFQHVLLLPLTASVEPFLAMSAAIFNSQNNVMRVRKCTMKKQVSRREAPNSVQLARSSALKTRCDSEAEVFFLSCLTLNIAVSSSSIFRFGQGQRIHGLFLHMLQTHSPKQSTGSEMSRENWIRGFWMSVFAVTSFGSVLEQWFLQVSRDRHILRSYPRPTESEIGGGAQQACSNLRAGRLQGSFRIYKRCFNSCCQSQKFHAEKPNLNDKGARLTLKITFFQIAIACQCSHSLCFYSFIFHYFKRRNCYEVYVQVRKFPGLRLFKTYNRPGTVAQACNPSTLGGRGGWITRSGVQDHPGQHGDTLSLLKDTKLAGHGGTRLESQLPRRLRQENSWNPGGRGCSELRLCHCTPAWVTEQDLVSKTKNKKTKLGIARAAHYLTFHGNFNSGILFQVVNIKSMCQCWWLSTLAAHNHFDAEATPSRVIQNPWRVGPDECFNVSRVIPMVAKVKNQYRTYKKVEKLISRTENLPLFQEHSQAT

SEQ ID NO: 828705 - protein, 460 aa, Homo sapiens
MSIEIESSDVIRLIMQYLKENSLHRALATLQEETTVSLNTVDSIESFVADINSGHWDTVLQAIQSLKLPDKTLIDLYEQVVLELIELRELGAARSLLRQTDPMIMLKQTQPERYIHLENLLARSYFDPREAYPDGSSKEKRRAAIAQALAGEVSVVPPSRLMALLGQALKWQQHQGLLPPGMTIDLFRGKAAVKDVEEEKFPTQLSRHIKFGQKSHVECARFSPDGQYLVTGSVDGFIEVWNFTTGKIRKDLKYQAQDNFMMMDDAVLCMCFSRDTEMLATGAQDGKIKVWKIQSGQCLRRFERAHSKGVTCLSFSKDSSQILSASFDQTIRIHGLKSGKTLKEFRGHSSFVNEATFTQDGHYIISASSDGTVKIWNMKTTECSNTFKSLGSTAGTDITVNSVILLPKNPEHFVVCNRSNTVVIMNMQGQVSVQNVPLHRNCGPFPNQHFLVQAHPPNNQ

SEQ ID NO: 828706 - protein, 88 aa, Homo sapiens
RLIMQYLKENSLHRALATLQEETTVSLNTVDSIESFVADINSGHWDTVLQAIQSLKLPDKTLIDLYEQVRVVVMLIPMGWFVVGQLPN

SEQ ID NO: 828707 - protein, 513 aa, Homo sapiens [sequence omitted]

SEQ ID NO: 828708 - protein, 1276 aa, Homo sapiens
MLAFIRYKLVGKVFLKSFAVLLFTFLKIYFIFLRWSLALLPRLECSGAISANCNFHFPGSSDSPALASQVAGTTGACQHAWLIFVFLVERGFCHVGQAGLELLTSGDPPALASQSAGITGMSHCAQPCNFTFDGDLKCSMILYVARSNVSVFAELILGSTKKSLFPSHILYHISHLPQNLQLFGPGNDICCHFDDLKMVVGVEHSHEFRIPEHVDSHPSGKTRSLKRSLSKRKQFMLKKFLEKSLRIFDLSLDLMKLVVMMCIVCITVYEDGESSQHVWFILGIFREHFCCWHQVMNMVKKKTRFCLNIGKKSKLKGVIKTDKSSSYLCDDEAGSYTRKGWERLPGGTRGRSKHREPNRGLQCGTAARYVLGKMIGVLGDQAKRAGLGAVKYIFFFFLNKIMHWVNMYNAKLKICLSQVTLVNLSTTSFRTNLKNTLILSLNGHTLLTLLGACLSEAPRGRPSSIEGWGSPAPLQRPYSQTAAGSGRARAGRTAGSGAPLLRVVGGRSPILGPGPVEPLTGGRETAHPLEPTVRACRRRVTSLLQNWRSHRLKGRWQRLRERELAAGNQCSLPSELGVCSRFLGKCSAAATRFNGCCSLALNIEAKLPGVKINSMSIKDICPIPYSAVELMTGKHCAEVFGSSMAFFFFFFLTANGINLRYNSVSSSPVVFFQHVLLLPLTASVEPFLAMSAAIFNSQNNVMRVRKCTMKKQVSRREAPNSVQLARSSALKTRCDSEARFFFSLASLSILLSVPPQSLGLGRDKEYMDCSSTCCKHIHLSRAQVVRGVERTELEDSGCQSLLSLLLACARTVVLTSVTDRHILRSYPRPTESEIGGGAQQACSNLRAGRLQGSFRIYKRCFNSCCQSQKFHAEKPNLNDKGARLTLKITFFQIAIACQCSHSLCFYSFIFHYFKRRNCYEVYVQVRKFPGLRLFKTYNRPGTVAQACNPSTLGGRGGWITRSGVQDHPGQHGDTLSLLKDTKLAGHGGTRLESQLPRRLRQENSWNPGGRGCSELRLCHCTPAWVTEQDLVSKTKNKKTKLGIARAAHYLTFHGNFNSGILFQVVNIKSMCQCWWLSTLAAHNHFDAEATPSRVIQNPWRVGPDECFNVSRVIPMVAKVKNQYRTYKKVEKLISRTENLPLFQSTLKRHNWPLLLFPTSMNGQEKHHRESRVSAGTCIFVDDDLGYMFFHRLCFIGFVFSEALPHYIVLRIECGCLHGNEEVQQRLLVVVIIQAEKLHRQTYQFLPLQDITIMVGAKVIAVFAIKSNGTLLLHQPT

SEQ ID NO: 828709 - protein, 1008 aa, Homo sapiens
MKMENLVSTCWFILGIFREHFCCWHQVMNMVKKKTRFCLNIGKKSKLKGVIKTDKSSSYLCDDEAGSYTRKGWERLPGGTRGRSKHREPNRGLQCGTAARYVLGKMIGVLGDQAKRAGLGAVKYIFFFFLNKIMHWVNMYNAKLKICLSQVTLVNLSTTSFRTNLKNTLILSLNGHTLLTLLGASLSEAPRGRPSSIEGWGSPAPLQRPYSQTAAGSGRARAGRTAGSGAPLLRVVGGRSPILGPGPVEPLTGGRETAHPLEPTVRACRRRVTSLLQNWRSHRLKGRWQRLRERELAAGNQCSLPSELGVCSRFLGKCSAAATRFNGCCSLALNIEAKLPGVKINSMSIKDICPIPYSAVELMTGKHCAEVFGSSMAFFFFFFLTANGINLRYNSVSSSPVVFFQHVLLLPLTASVEPFLAMSAAIFNSQNNVMRVRKCTMKKQVSRREAPNSVQLARSSALKTRCDSEARFFFSLASLSILLSVPPQSLGLGRDKEYMDCSSTCCKHIHLSRAQVVRWVERTELEDSGCQSLLSLLLACARTVVLTSVTDRHILRSYPRPTESEIGGGAQQACSNLRAGRLQGSFRIYKRCFNSCCQSQKFHAEKPNLNDKGARLTLKITFFQIAIACQCSHSLCFYSFIFHYFKRRNCYEVYVQVRKFPGLRLFKTYNRPGTVAQACNPSTLGGRGGWITRSGVQDHPGQHGDTLSLLKDTKLAGHGGTRLESQLPRRLRQENSWNPGGRGCSELRLCHCTPAWVTEQDLVSKTKNKKTKLGIARAAHYLTFHGNFNSGILFQVVNIKSMCQCWWLSTLAAHNHFDAEATPSRVIQNPWRVGPDECFNVSRVIPMVAKVKNQYRTYKKVEKLISRTENLPLFQSTLKRHNWPLLLFPTSMNGQEKHHRESRVSAGTCIFVDDDLGYMFFHRLCFIGFVFSEALPHYIVLRIECGCLHGNEEVQQRLLVVVIIQAEKLHRQTYQFLPLQDITIEVGAKVIAVFAIKSNGTLLLHQPT

SEQ ID NO: 828710 - protein, 513 aa, Homo sapiens [sequence omitted]

SEQ ID NO: 828711 - protein, 199 aa, Homo sapiens
MSIEIESSDVIRLIMQYLKENSLHRALATLQEETTVSLNTVDSIESFVADINSGHWDTVLQAIQSLKLPDKTLIDLYEQVVLELIELRELGAARSLLRQTDPMIMLKQTQPERYIHLENLLARSYFDPREAYPDGSSKEKRRAAIAQALAGEVSVVPPSRLMALLGQALKWQQHQGLLPPGMTIDLFRGKAAPPIRGIL

SEQ ID NO: 828712 - protein, 209 aa, Homo sapiens
MVTFGQSGDCCTDSGTMNIFDRKINFDALLKFSHITPSTQQHLKKVYASFALCMFVAAAGAYVHMVTHFIQAGLLSALGSLILMIWLMATPHSHETEQKRLGLLAGFAFLTGVGLGPALEFCIAVNPSILPTAFMGTAMIFTCFTLSALYARRRSYLFLGGILMSALSLLLLSSLGNVFFGSIWLFQANLYVGLVVMCGFVLFDTPTHY

SEQ ID NO: 828713 - protein, 114 aa, Homo sapiens
LGFEVVAHLSIHPSIQSSIHPSTHPPIYPPNYPFTSLFHSPVYPSTHSSIHPSTCPPNFSSTYPSTHPSIYPPLIHSSILPPRRVERSTRRGGGGDSCLTFILGRSVGNFGNHQ

SEQ ID NO: 828714 - protein, 114 aa, Homo sapiens
MTDHYCTIWPDPYLESRITGDIEDDDEEEEELESELELEALRRETLLLAVAEDDSVFSFAFLGGFLVELSCPLTSCNRFSNSRFFSKASSSFVFPTGFLMVEGFRGFLRRQERT

SEQ ID NO: 828715 - protein, 75 aa, Homo sapiens
HTPRTHIRRPHCTRRTRGGGNSEVTVDEVVAAHAEGPEQDYIWHCIDLFLDFITVFRKLMMILAMNEKDKKKEKK

SEQ ID NO: 828716 - protein, 117 aa, Homo sapiens
RIPVLTPQTAGVRFPTRLHSPSGPELFGRATRPFLPHCCLVCAQFLWDWAVSFPLERSSVVPLLTQPQISTVRPYKENGEPLLVDALLPLSCPCWSGKHTFLLCLHKSNVFPFPPLA

SEQ ID NO: 828717 - protein, 193 aa, Homo sapiens
MNIFDRKINFDALLKFSHITPSTQQHLKKVYASFALCMFVAAAGAYVHMVTHFIQAGLLSALGSLILMIWLMATPHSHETEQKRLGLLAGFAFLTGVGLGPALEFCIAVNPSILPTAFMGTAMIFTCFTLSALYARRRSYLFLGGILMSALSLLLLSSLGNVFFGSIWLFQANLYVGLVVMCGFVLFDTPTHY

SEQ ID NO: 828718 - protein, 193 aa, Homo sapiens; identical to SEQ ID NO: 828717

SEQ ID NO: 828719 - protein, 283 aa, Homo sapiens
GERKWARESTSGVRSAGRPWRGGLGSVDAGPLGLASIVRIQSTSFRGEGTRNSTHPIAVRLRAGPLVGLTLGERPGAKTESGDCCTDSGTMNIFDRKINFDALLKFSHITPSTQQHLKKVYASFALCMFVAAAGAYVHMVTHFIQAGLLSALGSLILMIWLMATPHSHETEQKRLGLLAGFAFLTGVGLGPALEFCIAVNPSILPTAFMGTAMIFTCFTLSALYARRRSYLFLGGILMSALSLLLLSSLGNVFFGSIWLFQANLYVGLVVMCGFVLFDTPTHY

SEQ ID NO: 828720 - protein, 137 aa, Homo sapiens
MNIFDRKINFDALLKFSHITPSTQQHLKKVYASFALCMFGVGLGPALEFCIAVNPSILPTAFMGTAMIFTCFTLSALYARRRSYLFLGGILMSALSLLLLSSLGNVFFGSIWLFQANLYVGLVVMCGFVLFDTPTHY

SEQ ID NO: 828721 - protein, 193 aa, Homo sapiens; identical to SEQ ID NO: 828717

SEQ ID NO: 828722 - protein, 193 aa, Homo sapiens; identical to SEQ ID NO: 828717

SEQ ID NO: 828723 - protein, 193 aa, Homo sapiens; identical to SEQ ID NO: 828717

SEQ ID NO: 828724 - protein, 114 aa, Homo sapiens; identical to SEQ ID NO: 828713

SEQ ID NO: 828725 - protein, 175 aa, Homo sapiens
MNIFDRKINFDALLKFSHITPSTQQHLKKVYASFALCMFVAAAGAYVHMVTHFIQAGLLSALGSLILMIWLMATPHSHETEQKRLGLLAGFAFLTGVGLGPALEFCIAVNPSILPTAFMGTAMIFTCFTLSALYARRRSYLFLGGILMSALSLLLLSSLGNVFFGSIWLFQATAN

SEQ ID NO: 828726 - protein, 75 aa, Homo sapiens; identical to SEQ ID NO: 828715

SEQ ID NO: 828727 - protein, 134 aa, Homo sapiens
KIRLVRGGGESAEAHDEKWDQQRAPTSGVRFPTRLHSPSGPELFGRATRPFLPHCCLVCAQFLWDWAVSFPLERSSVVPLLTQPQISTVRPYKENGEPLLVDALLPLSCPCWSGKHTFLLCLHKSNVFPFPPLA

SEQ ID NO: 828728 - protein, 193 aa, Homo sapiens; identical to SEQ ID NO: 828717

SEQ ID NO: 828729 - protein, 209 aa, Homo sapiens; identical to SEQ ID NO: 828712

SEQ ID NO: 828730 - protein, 193 aa, Homo sapiens; identical to SEQ ID NO: 828717

SEQ ID NO: 828731 - protein, 109 aa, Homo sapiens; identical to SEQ ID NO: 761274

SEQ ID NO: 828732 - protein, 193 aa, Homo sapiens; identical to SEQ ID NO: 828717

SEQ ID NO: 828733 - protein, 193 aa, Homo sapiens; identical to SEQ ID NO: 828717

SEQ ID NO: 828734 - protein, 193 aa, Homo sapiens; identical to SEQ ID NO: 828717

SEQ ID NO: 828735 - protein, 114 aa, Homo sapiens; identical to SEQ ID NO: 828713

SEQ ID NO: 828736 - protein, 727 aa, Homo sapiens
MEGDAVEAIVEESETFIKGKERKTYQRRREGGQEEDACHLPQNQTDGGEVVQDVNSSVQMVMMEQLDPTLLQMKTEVMEGTVAPEAEAAVDDTQIITLQVVNMEEQPINIGELQLVQVPVPVTVPVATTSVEELQGAYENEVSKEGLAESEPMICHTLPLPEGFQVVKVGANGEVETLEQGELPPQEDPSWQKDPDYQPPAKKTKKTKKSKLRYTEEGKDVDVSVYDFEEEQQEGLLSEVNAEKVVGNMKPPKPTKIKKKGVKKTFQCELCSYTCPRRSNLDRHMKSHTDERPHKCHLCGRAFRTVTLLRNHLNTHTGTRPHKCPDCDMAFVTSGELVRHRRYKHTHEKPFKCSMCDYASVEVSKLKRHIRSHTGERPFQCSLCSYASRDTYKLKRHMRTHSGEKPYECYICHARFTQSGTMKMHILQKHTENVAKFHCPHCDTVIARKSDLGVHLRKQHSYIEQGKKCRYCDAVFHERYALIQHQKSHKNEKRFKCDQCDYACRQERHMIMHKRTHTGEKPYACSHCDKTFRQKQLLDMHFKRYHDPNFVPAAFVCSKCGKTFTRRNTMARHADNCAGPDGVEGENGGETKKSKRGRKRKMRSKKEDSSDSENAEPDLDDNEDEEEPAVEIEPEPEPQPVTPAPPPAKKRRGRPPGRTNQPKQNQPTAIIQVEDQNTGAIENIIVEVKKEPDAEPAEGEEEEAQPAATDAPNGDLTPEMILSMMDR

SEQ ID NO: 828737 - protein, 420 aa, Homo sapiens
KGTLLYLHTHSTRPHKCPDCDMAFVTSGELVRHRRYKHTHEKPFKCSMCDYASVEVSKLKRHIRSHTGERPFQCSLCSYASRDTYKLKRHMRTHSGEKPYECYICHARFTQSGTMKMHILQKHTENVAKFHCPHCDTVIARKSDLGVHLRKQHSYIEQGKKCRYCDAVFHERYALIQHQKSHKNEKRFKCDQCDYACRQERHMIMHKRTHTGEKPYACSHCDKTFRQKQLLDMHFKRYHDPNFVPAAFVCSKCGKTFTRRNTMARHADNCAGPDGVEGENGGETKKSKRGRKRKMRSKKEDSSDSENAEPDLDDNEDEEEPAVEIEPEPEPQPVTPAPPPAKKRRGRPPGRTNQPKQNQPTAIIQVEDQNTGAIENIIVEVKKEPDAEPAEGEEEEAQPAATDAPNGDLTPEMILSMMDR

SEQ ID NO: 828738 - protein, 587 aa, Homo sapiens
MEGDAVEAIVEESETFIKGKERKTYQRRREGGQEEDACHLPQNQTDGGEVVQDVNSSVQMVMMEQLDPTLLQMKTEVMEGTVAPEAEAAVDDTQIITLQVVNMEEQPINIGELQLVQVPVPVTVPVATTSVEELQGAYENEVSKEGLAESEPMICHTLPLPEGFQVVKVGANGEVETLEQGELPPQEDPSWQKDPDYQPPAKKTKKTKKSKLRYTEEGKDVDVSVYDFEEEQQEGLLSEVNAEKVVGNMKPPKPTKIKKKGVKKTFQCELCSYTCPRRSNLDRHMKSHTDERPHKCHLCGRAFRTVTLLRNHLNTHTGTRPHKCPDCDMAFVTSGELVRHRRYKHTHEKPFKCSMCDYASVEVSKLKRHIRSHTGERPFQCSLCSYASRDTYKLKRHMRTHSGEKPYECYICHARFTQSGTMKMHILQKHTENVAKFHCPHCDTVIARKSDLGVHLRKQHSYIEQGKKCRYCDAVFHERYALIQHQKSHKNEKRFKCDQCDYACRQERHMIMHKRTHTGEKPYACSHCDKTFRQKQLLDMHFKRYHDPNFVPAAFVCSKCGKTFTRRNTMARHADNCAGLQHMHGIL

SEQ ID NO: 828739 - protein, 545 aa, Homo sapiens
MEGDAVEAIVEESETFIKGKERKTYQRRREGGQEEDACHLPQNQTDGGEVVQDVNSSVQMVMMEQLDPTLLQMKTEVMEGTVAPEAEAAVDDTQIITLQVVNMEEQPINIGELQLVQVPVPVTVPVATTSVEELQGAYENEVSKEGLAESEPMICHTLPLPEGFQVVKVGANGEVETLEQGELPPQEDPSWQKDPDYQPPAKKTKKTKKSKLRYTEEGKDVDVSVYDFEEEQQEGLLSEVNAEKVVGNMKPPKPTKIKKKGVKKTFQCELCSYTCPRRSNLDRHMKSHTDERPHKCHLCGRAFRTVTLLRNHLNTHTGTRPHKCPDCDMAFVTSGELVRHRRYKHTHEKPFKCSMCDYASVEVSKLKRHIRSHTGERPFQCSLCSYASRDTYKLKRHMRTHSGEKPYECYICHARFTQSGTMKMHILQKHTENVAKFHCPHCDTVIARKSDLGVHLRKQHSYIEQGKKCRYCDAVFHERYALIQHQKSHKNEKRFKCDQCDYACRQVGTFIESCWCFLGVWCYQRAFTYLVQWLFLKIVFSNCGL

SEQ ID NO: 828740 - protein, 727 aa, Homo sapiens; identical to SEQ ID NO: 828736

SEQ ID NO: 828741 - protein, 699 aa, Homo sapiens
MEGDAVEAIVEESETFIKGKERKTYQRRREGGQEEDACHLPQNQTDGGEVVQDVNSSVQMVMMEQLDPTLLQMKTEVMEGTVAPEAEAAVDDTQIITLQVVNMEEQPINIGELQLVQVPVPVTVPVATTSVEELQGAYENEVSKEGLAESEPMICHTLPLPEGFQVVKVGANGEVETLEQGELPPQEDPSWQKDPDYQPPAKKTKKTKKSKLRYTEEGKDVDVSVYDFEEEQQEGLLSEVNAEKVVGNMKPPKPTKIKKKGVKKTFQCELCSYTCPRRSNLDRHMKSHTDERPHKCHLCGRAFRTVTLLRNHLNTHTGTRPHKCPDCDMAFVTSGELVRHRRYKHTHEKPFKCSMCDYASVEVSKLKRHIRSHTGERPFQCSLCSYASRDTYKLKRHMRTHSGEKPYECYICHARFTQSGTMKMHILQKHTENVAKFHCPHCDTVIARKSDLGVHLRKQHSYIEQGKKCRYCDAVFHERYALIQHQKSHKNEKRFKCDQCDYACRQERHMIMHKRTHTGEKPYACSHCDKTFRQKQLLDMHFKRYHDPNFVPAAFVCSKCGKTFTRRNTMARHADNCAGPDGVEGENGGETKKSKRGRKRKMRSKKEDSSDSENAEPDLDDNEDEEEPAVEIEPEPEPQPVTPAPPPAKKRRGRPPGRTNQPKQNQRKLFISALEAGVFSEHVGEPDGSLFFGDVGTKP

SEQ ID NO: 828742 - protein, 116 aa, Homo sapiens
MEGDAVEAIVEESETFIKGKERKTYQRRREGGQEEDACHLPQNQTDGGEVVQDVNSSVQMVMMEQLDPTLLQMKTEVMEGTVAPEAEAAVDDTQIITFRKALFRHFIFISPLKFFY

SEQ ID NO: 828743 - protein, 235 aa, Homo sapiens [sequence omitted]

SEQ ID NO: 828744 - protein, 1855 aa, Homo sapiens
CSLHPAPCLDTGSLAAFFWGKPASCQPQLLPPPLATAPVLGVPWPRHPPDFSGSSAGKVAAPCVPPSNHELVPITTENAPKNVVDKGEGGSRGGNTRKSLEDNGSTRVTPSVQPHLQPIRNMSVSRTMEDSCELDLVYVTERIIAVSFPSTANEENFRSNLREVAQMLKSKHGGNYLFNLSERRPDITKLHAKVLEFGWPDLHTPALEKICSICKAMDTWLNADPHNVVVLHNKGNRGRIGVVIAAYMHYSNISASADQALDRFAMKRFYEDKIVPIGQPSQRRYVHYFSGLLSGSIKMNNKPLFLHHVIMHGIPNFESKGGCRPFLRIYQAMQPVYTSGIYNIPGDSQTSVCITIEPGLLLKGDILLKCYHKKFRSPARDVIFRVQFHTCAIHDLGVVFGKEDLDDAFKDDRFPEYGKVEFVFSYGPEKIQGMEHLENGPSVSVDYNTSDPLIRWDSYDNFSGHRDDGMEEVVGHTQGPLDGSLYAKVKKKDSLHGSTGAVNATRPTLSATPNHVEHTLSVSSDSGNSTASTKTDKTDEPVPGASSATAALSPQEKRELDRLLSGFGLEREKQGAMYHTQHLRSRPAGGSAVPSSGRHVVPAQVHVNGGALASERETDILDDELPNQDGHSAGSMGTLSSLDGVTNTSEGGYPEALSPLTNGLDKSYPMEPMVNGGGYPYESASRAGPAHAGHTAPMRPSYSAQEGLAGYQREGPHPAWPQPVTTSHYAHDPSGMFRSQSFSEAEPQLPPAPVRGGSSREAVQRGLNSWQQQQQQQQQPRPPPRQQERAHLESLVASRPSPQPLAETPIPSLPEFPRAASQQEIEQSIETLNMLMLDLEPASAAAPLHKSQSVPGAWPGASPLSSQPLSGSSRQSHPLTQSRSGYIPSGHSLGTPEPAPRASLESVPPGRSYSPYDYQPCLAGPNQDFHSKSPASSSLPAFLPTTHSPPGPQQPPASLPGLTAQPLLSPKEATSDPSRTPEEEPLNLEGLVAHRVAGVQAREKQPAEPPAPLRRRAASDGQYENQSPEATSPRSPGVRSPVQCVSPELALTIALNPGGRPKEPHLHSYKEAFEEMEGTSPSSPPPSGVRSPPGLAKTPLSALGLKPHNPADILLHPTGVTRRRIQPEEDEGKVVVRLSEEPRSYVESVARTAVAGPRAQDSEPKSFSAPATQAYGHEIPLRNGTLGGSFVSPSPLSTSSPILSADSTSVGSFPSGESSDQGPRTPTQPLLESGFRSGSLGQPSPSAQRNYQSSSPLPTVGSSYSSPDYSLQHFSSSPESQARAQFSVAGVHTVPGSPQARHRTVGTNTPPSPGFGRRAINPSMAAPSSPSLSHHQMMGPPGTGFHGSTVSSPQSSAATTPGSPSLCRHPAGVYQVSGLHNKVATTPGSPSLGRHPGAHQGNLASGLHSNAIASPGSPSLGRHLGGSGSVVPGSPCLDRHVAYGGYSTPEDRRPTLSRQSSASGYQAPSTPSFPVSPAYYPGLSSPATSPSPDSAAFRQGSPTPALPEKRRMSVGDRAGSLPNYATINGKVSSPVASGMSSPSGGSTVSFSHTLPDFSKYSMPDNSPETRAKVKFVQDTSKYWYKPEISREQAIALLKDQEPGAFIIRDSHSFRGAYGLAMKVSSPPPTIMQQNKKGDMTHELVRHFLIETGPRGVKLKGCPNEPNFGSLSALVYQHSIIPLALPCKLVIPNRDPTDESKDSSGPANSTADLLKQGAACNVLFINSVDMESLTGPQAISKATSETLAADPTPAATIVHFKVSAQGITLTDNQRKLFFRRHYPLNTVTFCDLDPQERKWMKTEGGAPAKLFGFVARKQGSTTDNACHLFAELDPNQPASAIVNFVSKVMLNAGQKR

SEQ ID NO: 828745 - protein, 1855 aa, Homo sapiens; identical to SEQ ID NO: 828744

SEQ ID NO: 828746 - protein, 1752 aa, Homo sapiens
MVPFQQRKDCVLEGSTRVTPSVQPHLQPIRNMSVSRTMEDSCELDLVYVTERIIAVSFPSTANEENFRSNLREVAQMLKSKHGGNYLFNLSERRPDITKLHAKVLEFGWPDLHTPALEKICSICKAMDTWLNADPHNVVVLHNKGNRGRIGVVIAAYMHYSNISASADQALDRFAMKRFYEDKIVPIGQPSQRRYVHYFSGLLSGSIKMNNKPLFLHHVIMHGIPNFESKGGCRPFLRIYQAMQPVYTSGIYNIPGDSQTSVCITIEPGLLLKGDILLKCYHKKFRSPARDVIFRVQFHTCAIHDLGVVFGKEDLDDAFKDDRFPEYGKVEFVFSYGPEKIQGMEHLENGPSVSVDYNTSDPLIRWDSYDNFSGHRDDGMEEVVGHTQGPLDGSLYAKVKKKDSLHGSTGAVNATRPTLSATPNHVEHTLSVSSDSGNSTASTKTDKTDEPVPGASSATAALSPQEKRELDRLLSGFGLEREKQGAMYHTQHLRSRPAGGSAVPSSGRHVVPAQVHVNGGALASERETDILDDELPNQDGHSAGSMGTLSSLDGVTNTSEGGYPEALSPLTNGLDKSYPMEPMVNGGGYPYESASRAGPAHAGHTAPMRPSYSAQEGLAGYQREGPHPAWPQPVTTSHYAHDPSGMFRSQSFSEAEPQLPPAPVRGGSSREAVQRGLNSWQQQQQQQQQPRPPPRQQERAHLESLVASRPSPQPLAETPIPSLPEFPRAASQQEIEQSIETLNMLMLDLEPASAAAPLHKSQSVPGAWPGASPLSSQPLSGSSRQSHPLTQSRSGYIPSGHSLGTPEPAPRASLESVPPGRSYSPYDYQPCLAGPNQDFHSKSPASSSLPAFLPTTHSPPGPQQPPASLPGLTAQPLLSPKEATSDPSRTPEEEPLNLEGLVAHRVAGVQAREKQPAEPPAPLRRRAASDGQYENQSPEATSPRSPGVRSPVQCVSPELALTIALNPGGRPKEPHLHSYKEAFEEMEGTSPSSPPPSGVRSPPGLAKTPLSALGLKPHNPADILLHPTGVTRRRIQPEPRSYVESVARTAVAGPRAQDSEPKSFSAPATQAYGHEIPLRNGTLGGSFVSPSPLSTSSPILSADSTSVGSFPSGESSDQGPRTPTQPLLESGFRSGSLGQPSPSAQRNYQSSSPLPTVGSSYSSPDYSLQHFSSSPESQARAQFSVAGVHTVPGSPQARHRTVGTNTPPSPGFGRRAINPSMAAPSSPSLSHHQMMGPPGTGFHGSTVSSPQSSAATTPGSPSLCRHPAGVYQVSGLHNKVATTPGSPSLGRHPGAHQGNLASGLHSNAIASPGSPSLGRHLGGSGSVVPGSPCLDRHVAYGGYSTPEDRRPTLSRQSSASGYQAPSTPSFPVSPAYYPGLSSPATSPSPDSAAFRQGSPTPALPEKRRMSVGDRAGSLPNYATINGKVSSPVASGMSSPSGGSTVSFSHTLPDFSKYSMPDNSPETRAKVKFVQDTSKYWYKPEISREQAIALLKDQEPGAFIIRDSHSFRGAYGLAMKVSSPPPTIMQQNKKGDMTHELVRHFLIETGPRGVKLKGCPNEPNFGSLSALVYQHSIIPLALPCKLVIPNRDPTDESKDSSGPANSTADLLKQGAACNVLFINSVDMESLTGPQAISKATSETLAADPTPAATIVHFKVSAQGITLTDNQRKLFFRRHYPLNTVTFCDLDPQERKWMKTEGGAPAKLFGFVARKQGSTTDNACHLFAELDPNQPASAIVNFVSKVMLNAGQKR

SEQ ID NO: 828747 - protein, 1119 aa, Homo sapiens
CGDLEDPDALSVGTGSGEPPFTDVGDPVPEKKSLPPAPVRGGSSREAVQRGLNSWQQQQQQQQQPRPPPRQQERAHLESLVASRPSPQPLAETPIPSLPEFPRAASQQEIEQSIETLNMLMLDLEPASAAAPLHKSQSVPGAWPGASPLSSQPLSGSSRQSHPLTQSRSGYIPSGHSLGTPEPAPRASLESVPPGRSYSPYDYQPCLAGPNQDFHSKSPASSSLPAFLPTTHSPPGPQQPPASLPGLTAQPLLSPKEATSDPSRTPEEEPLNLEGLVAHRVAGVQAREKQPAEPPAPLRRRAASDGQYENQSPEATSPRSPGVRSPVQCVSPELALTIALNPGGRPKEPHLHSYKEAFEEMEGTSPSSPPPSGVRSPPGLAKTPLSALGLKPHNPADILLHPTGEPRSYVESVARTAVAGPRAQDSEPKSFSAPATQAYGHEIPLRNGTLGGSFVSPSPLSTSSPILSADSTSVGSFPSGESSDQGPRTPTQPLLESGFRSGSLGQPSPSAQRNYQSSSPLPTVGSSYSSPDYSLQHFSSSPESQARAQFSVAGVHTVPGSPQARHRTVGTNTPPSPGFGRRAINPSMAAPSSPSLSHHQMMGPPGTGFHGSTVSSPQSSAATTPGSPSLCRHPAGVYQVSGLHNKVATTPGSPSLGRHPGAHQGNLASGLHSNAIASPGSPSLGRHLGGSGSVVPGSPCLDRHVAYGGYSTPEDRRPTLSRQSSASGYQAPSTPSFPVSPAYYPGLSSPATSPSPDSAAFRQGSPTPALPEKRRMSVGDRAGSLPNYATINGKVSSPVASGMSSPSGGSTVSFSHTLPDFSKYSMPDNSPETRAKVKFVQDTSKYWYKPEISREQAIALLKDQEPGAFIIRDSHSFRGAYGLAMKVSSPPPTIMQQNKKGDMTHELVRHFLIETGPRGVKLKGCPNEPNFGSLSALVYQHSIIPLALPCKLVIPNRDPTDESKDSSGPANSTADLLKQGAACNVLFINSVDMESLTGPQAISKATSETLAADPTPAATIVHFKVSAQGITLTDNQRKLFFRRHYPLNTVTFCDLDPQERKWMKTEGGAPAKLFGFVARKQGSTTDNACHLFAELDPNQPASAIVNFVSKVMLNAGQKR

SEQ ID NO: 828748 - protein, 405 aa, Homo sapiens
GRHLPTQPSHAAANPGPTATPSFPVSPAYYPGLSSPATSPSPDSAAFRQGSPTPALPEKRRMSVGDRAGSLPNYATINGKVSSPVASGMSSPSGGSTVSFSHTLPDFSKYSMPDNSPETRAKVKFVQDTSKYWYKPEISREQAIALLKDQEPGAFIIRDSHSFRGAYGLAMKVSSPPPTIMQQNKKGDMTHELVRHFLIETGPRGVKLKGCPNEPNFGSLSALVYQHSIIPLALPCKLVIPNRDPTDESKDSSGPANSTADLLKQGAACNVLFINSVDMESLTGPQAISKATSETLAADPTPAATIVHFKVSAQGITLTDNQRKLFFRRHYPLNTVTFCDLDPQERKWMKTEGGAPAKLFGFVARKQGSTTDNACHLFAELDPNQPASAIVNFVSKVMLNAGQKR

SEQ ID NO: 828749 - protein, 312 aa, Homo sapiens
MYVLGEHNLTHNTFFPSPALDNSPETRAKVKFVQDTSKYWYKPEISREQAIALLKDQEPGAFIIRDSHSFRGAYGLAMKVSSPPPTIMQQNKKGDMTHELVRHFLIETGPRGVKLKGCPNEPNFGSLSALVYQHSIIPLALPCKLVIPNRDPTDESKDSSGPANSTADLLKQGAACNVLFINSVDMESLTGPQAISKATSETLAADPTPAATIVHFKVSAQGITLTDNQRKLFFRRHYPLNTVTFCDLDPQERKWMKTEGGAPAKLFGFVARKQGSTTDNACHLFAELDPNQPASAIVNFVSKVMLNAGQKR

SEQ ID NO: 828750 - protein, 1855 aa, Homo sapiens; identical to SEQ ID NO: 828744

SEQ ID NO: 828751 - protein, 1855 aa, Homo sapiens; identical to SEQ ID NO: 828744

SEQ ID NO: 828752 - protein, 1855 aa, Homo sapiens; identical to SEQ ID NO: 828744

SEQ ID NO: 828753 - protein, 1855 aa, Homo sapiens; identical to SEQ ID NO: 828744

SEQ ID NO: 828754 - protein, 1663 aa, Homo sapiens
MVPFQQRKDCVLEGSTRVTPSVQPHLQPIRNMSVSRTMEDSCELDLVYVTERIIAVSFPSTANEENFRSNLREVAQMLKSKHGGNYLFNLSERRPDITKLHAKVLEFGWPDLHTPALEKICSICKAMDTWLNADPHNVVVLHNKGNRGRIGVVIAAYMHYSNISASADQALDRFAMKRFYEDKIVPIGQPSQRRYVHYFSGLLSGSIKMNNKPLFLHHVIMHGIPNFESKGGCRPFLRIYQAMQPVYTSGIYNIPGDSQTSVCITIEPGLLLKGDILLKCYHKKFRSPARDVIFRVQFHTCAIHDLGVVFGKEDLDDAFKDDRFPEYGKVEFVFSYGPEKIQGMEHLENGPSVSVDYNTSDPLIRWDSYDNFSGHRDDGMEEVVGHTQGPLDGSLYAKVKKKDSLHGSTGAVNATRPTLSATPNHVEHTLSVSSDSGNSTASTKTDKTDEPVPGASSATAALSPQEKRELDRLLSGFGLEREKQGAMYHTQHLRSRPAGGSAVPSSGRHVVPAQVHVNGGALASERETDILDDELPNQDGHSAGSMGTLSSLDGVTNTSEGGYPEALSPLTNGLDKSYPMEPMVNGGGYPYESASRAGPAHAGHTAPMRPSYSAQEGLAGYQREGPHPAWPQPVTTSHYAHDPSGMFRSQSFSEAEPQLPPAPVRGGSSREAVQRGLNSWQQQQQQQQQPRPPPRQQERAHLESLVASRPSPQPLAETPIPSLPEFPRAASQQEIEQSIETLNMLMLDLEPASAAAPLHKSQSVPGAWPGASPLSSQPLSGSSRQSHPLTQSRSGYIPSGHSLGTPEPAPRASLESVPPGRSYSPYDYQPCLAGPNQDFHSKSPASSSLPAFLPTTHSPPGPQQPPASLPGLTAQPLLSPKEATSDPSRTPEEEPLNLEGLVAHRVAGVQAREKQPAEPPAPLRRRAASDGQYENQSPEATSPRSPGVRSPVQCVSPELALTIALNPGGRPKEPHLHSYKEAFEEMEGTSPSSPPPSGVRSPPGLAKTPLSALGLKPHNPADILLHPTGEPRSYVESVARTAVAGPRAQDSEPKSFSAPATQAYGHEIPLRNGTLGGSFVSPSPLSTSSPILSADSTSVGSFPSGESSDQGPRTPTQPLLESGFRSGSLGQPSPSAQRNYQSSSPLPTVGSSYSSPDYSLQHFSSSPESQARAQFSVAGVHTVPGSPQARHRTVGTNTPPSPGFGRRAINPSMAAPSSPSLSHHQMMGPPGTGFHGSTVSSPQSSAATTPGSPSLCRHPAGVYQVSGLHNKVATTPGSPSLGRHPGAHQGNLASGLHSNAIASPGSPSLGRHLGGSGSVVPGSPCLDRHVAYGGYSTPEDRRPTLSRQSSASGYQAPSTPSFPVSPAYYPGLSSPATSPSPDSAAFRQGSPTPALPEKRRMSVGDRAGSLPNYATINGKVSSPVASGMSSPSGGSTVSFSHTLPDFSKYSMPDNSPETRAKVKFVQDTSKYWYKPEISREQAIALLKDQEPGAFIIRDSHSFRGAYGLAMKVSSPPPTIMQQNKKGDMTHELVRHFLIETGPRGVKLKGCPNEPNFGSLSALVYQHSIIPLALPCKLVIPNRDPTDESKDSSGPANSTADLLKQGAACNVLFINSVDMESLTGPQAISKATSETLAADPTPAATIVHFKVSAQGITLTDNQRK

SEQ ID NO: 828755 - protein, 1082 aa, Homo sapiens
MVPFQQRKDCVLEGSTRVTPSVQPHLQPIRNMSVSRTMEDSCELDLVYVTERIIAVSFPSTANEENFRSNLREVAQMLKSKHGGNYLFNLSERRPDITKLHAKVLEFGWPDLHTPALEKICSICKAMDTWLNADPHNVVVLHNKGNRGRIGVVIAAYMHYSNISASADQALDRFAMKRFYEDKIVPIGQPSQRRYVHYFSGLLSGSIKMNNKPLFLHHVIMHGIPNFESKGGCRPFLRIYQAMQPVYTSGIYNIPGDSQTSVCITIEPGLLLKGDILLKCYHKKFRSPARDVIFRVQFHTCAIHDLGVVFGKEDLDDAFKDDRFPEYGKVEFVFSYGPEKIQGMEHLENGPSVSVDYNTSDPLIRWDSYDNFSGHRDDGMEEVVGHTQGPLDGSLYAKVKKKDSLHGSTGAVNATRPTLSATPNHVEHTLSVSSDSGNSTASTKTDKTDEPVPGASSATAALSPQEKRELDRLLSGFGLEREKQGAMYHTQHLRSRPAGGSAVPSSGRHVVPAQVHVNGGALASERETDILDDELPNQDGHSAGSMGTLSSLDGVTNTSEGGYPEALSPLTNGLDKSYPMEPMVNGGGYPYESASRAGPAHAGHTAPMRPSYSAQEGLAGYQREGPHPAWPQPVTTSHYAHDPSGMFRSQSFSEAEPQLPPAPVRGGSSREAVQRGLNSWQQQQQQQQQPRPPPRQQERAHLESLVASRPSPQPLAETPIPSLPEFPRAASQQEIEQSIETLNMLMLDLEPASAAAPLHKSQSVPGAWPGASPLSSQPLSGSSRQSHPLTQSRSGYIPSGHSLGTPEPAPRASLESVPPGRSYSPYDYQPCLAGPNQDFHSKSPASSSLPAFLPTTHSPPGPQQPPASLPGLTAQPLLSPKEATSDPSRTPEEEPLNLEGLVAHRVAGVQAREKQPAEPPAPLRRRAASDGQYENQSPEATSPRSPGVRSPVQCVSPELALTIALNPGGRPKEPHLHSYKEAFEEMEGTSPSSPPPSGVRSPPGLAKTPLSALGLKPHNPADILLHPTGGELGRGKMGRGARGRRTPVVLDRNPGLRIWSAASFVPTLRSGLGWGSLCRGWG

SEQ ID NO: 828756 - protein, 37 aa, Homo sapiens
MEHLENGPSVSVDYNTSDPLIRWDSYDNFSGHRDDGM

SEQ ID NO: 828757 - protein, 82 aa, Homo sapiens
KNAHCPLHPAFLPGVQAREKQPAEPPAPLRRRAASDGQYENQSPEATSPRSPGVRSPVQCVSPELALTIALNPGGRPKEVSP

SEQ ID NO: 828758 - protein, 481 aa, Homo sapiens
SRPLAVCSFSCHRKCQAKVAAPCVPPSNHELVPITTENAPKNVVDKGEGGSRGGNTRKSLEDNGSTRVTPSVQPHLQPIRNMSVSRTMEDSCELDLVYVTERIIAVSFPSTANEENFRSNFNLSERRPDITKLHAKVLEFGWPDLHTPALEKICSICKAMDTWLNADPHNVVVLHNKGNRGRIGVVIAAYMHYSNISASADQALDRFAMKRFYEDKIVPIGQPSQRRYVHYFSGLLSGSIKMNNKPLFLHHVIMHGIPNFESKGGCRPFLRIYQAMQPVYTSGIYNIPGDSQTSVCITIEPGLLLKGDILLKCYHKKFRSPARDVIFRVQFHTCAIHDLGVVFGKEDLDDAFKDDRFPEYGKVEFVFSYGPEKIQGMEHLENGPSVSVDYNTSDPLIRWDSYDNFSGHRDDGMEEVVGHTQGPLDGSLYAKVKKKDSLHGSTGAVNATRPTLSATPNHVEHTLSVYLYRWKYTLYFVSSCL

SEQ ID NO: 828759 - protein, 75 aa, Homo sapiens
CTHRDGIAVPRWGCTRRKFSDASLQWCELRHTGEPGSQPVVCARRLAQHLTLRPVLESSATFMGKHESGDKKALV

SEQ ID NO: 828760 - protein, 1744 aa, Homo sapiens
MVPFQQRKDCVLEGSTRVTPSVQPHLQPIRNMSVSRTMEDSCELDLVYVTERIIAVSFPSTANEENFRSNLREVAQMLKSKHGGNYLFNLSERRPDITKLHAKVLEFGWPDLHTPALEKICSICKAMDTWLNADPHNVVVLHNKGNRGRIGVVIAAYMHYSNISASADQALDRFAMKRFYEDKIVPIGQPSQRRYVHYFSGLLSGSIKMNNKPLFLHHVIMHGIPNFESKGGCRPFLRIYQAMQPVYTSGIYNIPGDSQTSVCITIEPGLLLKGDILLKCYHKKFRSPARDVIFRVQFHTCAIHDLGVVFGKEDLDDAFKDDRFPEYGKVEFVFSYGPEKIQGMEHLENGPSVSVDYNTSDPLIRWDSYDNFSGHRDDGMEEVVGHTQGPLDGSLYAKVKKKDSLHGSTGAVNATRPTLSATPNHVEHTLSVSSDSGNSTASTKTDKTDEPVPGASSATAALSPQEKRELDRLLSGFGLEREKQGAMYHTQHLRSRPAGGSAVPSSGRHVVPAQVHVNGGALASERETDILDDELPNQDGHSAGSMGTLSSLDGVTNTSEGGYPEALSPLTNGLDKSYPMEPMVNGGGYPYESASRAGPAHAGHTAPMRPSYSAQEGLAGYQREGPHPAWPQPVTTSHYAHDPSGMFRSQSFSEAEPQLPPAPVRGGSSREAVQRGLNSWQQQQQQQQQPRPPPRQQERAHLESLVASRPSPQPLAETPIPSLPEFPRAASQQEIEQSIETLNMLMLDLEPASAAAPLHKSQSVPGAWPGASPLSSQPLSGSSRQSHPLTQSRSGYIPSGHSLGTPEPAPRASLESVPPGRSYSPYDYQPCLAGPNQDFHSKSPASSSLPAFLPTTHSPPGPQQPPASLPGLTAQPLLSPKEATSDPSRTPEEEPLNLEGLVAHRVAGVQAREKQPAEPPAPLRRRAASDGQYENQSPEATSPRSPGVRSPVQCVSPELALTIALNPGGRPKEPHLHSYKEAFEEMEGTSPSSPPPSGVRSPPGLAKTPLSALGLKPHNPADILLHPTGEPRSYVESVARTAVAGPRAQDSEPKSFSAPATQAYGHEIPLRNGTLGGSFVSPSPLSTSSPILSADSTSVGSFPSGESSDQGPRTPTQPLLESGFRSGSLGQPSPSAQRNYQSSSPLPTVGSSYSSPDYSLQHFSSSPESQARAQFSVAGVHTVPGSPQARHRTVGTNTPPSPGFGRRAINPSMAAPSSPSLSHHQMMGPPGTGFHGSTVSSPQSSAATTPGSPSLCRHPAGVYQVSGLHNKVATTPGSPSLGRHPGAHQGNLASGLHSNAIASPGSPSLGRHLGGSGSVVPGSPCLDRHVAYGGYSTPEDRRPTLSRQSSASGYQAPSTPSFPVSPAYYPGLSSPATSPSPDSAAFRQGSPTPALPEKRRMSVGDRAGSLPNYATINGKVSSPVASGMSSPSGGSTVSFSHTLPDFSKYSMPDNSPETRAKVKFVQDTSKYWYKPEISREQAIALLKDQEPGAFIIRDSHSFRGAYGLAMKVSSPPPTIMQQNKKGDMTHELVRHFLIETGPRGVKLKGCPNEPNFGSLSALVYQHSIIPLALPCKLVIPNRDPTDESKDSSGPANSTADLLKQGAACNVLFINSVDMESLTGPQAISKATSETLAADPTPAATIVHFKVSAQGITLTDNQRKLFFRRHYPLNTVTFCDLDPQERKWMKTEGGAPAKLFGFVARKQGSTTDNACHLFAELDPNQPASAIVNFVSKVMLNAGQKR

SEQ ID NO: 828761 - protein, 1777 aa, Homo sapiens
SRPLAVCSFSCHRKCQAKVAAPCVPPSNHELVPITTENAPKNVVDKGEGGSRGGNTRKSLEDNGSTRVTPSVQPHLQPIRNMSVSRTMEDSCELDLVYVTERIIAVSFPSTANEENFRSNFNLSERRPDITKLHAKVLEFGWPDLHTPALEKICSICKAMDTWLNADPHNVVVLHNKGNRGRIGVVIAAYMHYSNISASADQALDRFAMKRFYEDKIVPIGQPSQRRYVHYFSGLLSGSIKMNNKPLFLHHVIMHGIPNFESKGGCRPFLRIYQAMQPVYTSGIYNIPGDSQTSVCITIEPGLLLKGDILLKCYHKKFRSPARDVIFRVQFHTCAIHDLGVVFGKEDLDDAFKDDRFPEYGKVEFVFSYGPEKIQGMEHLENGPSVSVDYNTSDPLIRWDSYDNFSGHRDDGMEEVVGHTQGPLDGSLYAKVKKKDSLHGSTGAVNATRPTLSATPNHVEHTLSVSSDSGNSTASTKTDKTDEPVPGASSATAALSPQEKRELDRLLSGFGLEREKQGAMYHTQHLRSRPAGGSAVPSSGRHVVPAQVHVNGGALASERETDILDDELPNQDGHSAGSMGTLSSLDGVTNTSEGGYPEALSPLTNGLDKSYPMEPMVNGGGYPYESASRAGPAHAGHTAPMRPSYSAQEGLAGYQREGPHPAWPQPVTTSHYAHDPSGMFRSQSFSEAEPQLPPAPVRGGSSREAVQRGLNSWQQQQQQQQQPRPPPRQQERAHLESLVASRPSPQPLAETPIPSLPEFPRAASQQEIEQSIETLNMLMLDLEPASAAAPLHKSQSVPGAWPGASPLSSQPLSGSSRQSHPLTQSRSGYIPSGHSLGTPEPAPRASLESVPPGRSYSPYDYQPCLAGPNQDFHSKSPASSSLPAFLPTTHSPPGPQQPPASLPGLTAQPLLSPKEATSDPSRTPEEEPLNLEGLVAHRVAGVQAREKQPAEPPAPLRRRAASDGQYENQSPEATSPRSPGVRSPVQCVSPELALTIALNPGGRPKEPHLHSYKEAFEEMEGTSPSSPPPSGVRSPPGLAKTPLSALGLKPHNPADILLHPTGEPRSYVESVARTAVAGPRAQDSEPKSFSAPATQAYGHEIPLRNGTLGGSFVSPSPLSTSSPILSADSTSVGSFPSGESSDQGPRTPTQPLLESGFRSGSLGQPSPSAQRNYQSSSPLPTVGSSYSSPDYSLQHFSSSPESQARAQFSVAGVHTVPGSPQARHRTVGTNTPPSPGFGRRAINPSMAAPSSPSLSHHQMMGPPGTGFHGSTVSSPQSSAATTPGSPSLCRHPAGVYQVSGLHNKVATTPGSPSLGRHPGAHQGNLASGLHSNAIASPGSPSLGRHLGGSGSVVPGSPCLDRHVAYGGYSTPEDRRPTLSRQSSASGYQAPSTPSFPVSPAYYPGLSSPATSPSPDSAAFRQGSPTPALPEKRRMSVGDRAGSLPNYATINGKVSSPVASGMSSPSGGSTVSFSHTLPDFSKYSMPDNSPETRAKVKFVQDTSKYWYKPEISREQAIALLKDQEPGAFIIRDSHSFRGAYGLAMKVSSPPPTIMQQNKKGDMTHELVRHFLIETGPRGVKLKGCPNEPNFGSLSALVYQHSIIPLALPCKLVIPNRDPTDESKDSSGPANSTADLLKQGAACNVLFINSVDMESLTGPQAISKATSETLAADPTPAATIVHFKVSAQGITLTDNQRKLFFRRHYPLNTVTFCDLDPQERKWMKTEGGAPAKLFGFVARKQGSTTDNACHLFAELDPNQPASAIVNFVSKVMLNAGQKR

SEQ ID NO: 828762 - protein, 880 aa, Homo sapiens
MASELGGTAFSDGIRPIDHFLHKNAHCPLHPAFLPGVQAREKQPAEPPAPLRRRAASDGQYENQSPEATSPRSPGVRSPVQCVSPELALTIALNPGGRPKEPHLHSYKEAFEEMEGTSPSSPPPSGVRSPPGLAKTPLSALGLKPHNPADILLHPTGVTRRRIQPEPRSYVESVARTAVAGPRAQDSEPKSFSAPATQAYGHEIPLRNGTLGGSFVSPSPLSTSSPILSADSTSVGSFPSGESSDQGPRTPTQPLLESGFRSGSLGQPSPSAQRNYQSSSPLPTVGSSYSSPDYSLQHFSSSPESQARAQFSVAGVHTVPGSPQARHRTVGTNTPPSPGFGRRAINPSMAAPSSPSLSHHQMMGPPGTGFHGSTVSSPQSSAATTPGSPSLCRHPAGVYQVSGLHNKVATTPGSPSLGRHPGAHQGNLASGLHSNAIASPGSPSLGRHLGGSGSVVPGSPCLDRHVAYGGYSTPEDRRPTLSRQSSASGYQAPSTPSFPVSPAYYPGLSSPATSPSPDSAAFRQGSPTPALPEKRRMSVGDRAGSLPNYATINGKVSSPVASGMSSPSGGSTVSFSHTLPDFSKYSMPDNSPETRAKVKFVQDTSKYWYKPEISREQAIALLKDQEPGAFIIRDSHSFRGAYGLAMKVSSPPPTIMQQNKKGDMTHELVRHFLIETGPRGVKLKGCPNEPNFGSLSALVYQHSIIPLALPCKLVIPNRDPTDESKDSSGPANSTADLLKQGAACNVLFINSVDMESLTGPQAISKATSETLAADPTPAATIVHFKVSAQGITLTDNQRKLFFRRHYPLNTVTFCDLDPQERKWMKTEGGAPAKLFGFVARKQGSTTDNACHLFAELDPNQPASAIVNFVSKVMLNAGQKR

SEQ ID NO: 828763 - protein, 235 aa, Homo sapiens [sequence omitted]

SEQ ID NO: 828764 - protein, 1855 aa, Homo sapiens; identical to SEQ ID NO: 828744

SEQ ID NO: 828765 - protein, 1855 aa, Homo sapiens; identical to SEQ ID NO: 828744

SEQ ID NO: 828766 - protein, 1855 aa, Homo sapiens; identical to SEQ ID NO: 828744

SEQ ID NO: 828767 - protein, 146 aa, Homo sapiens
RGRKTRWGASPLGRGGQQAGRCSLGWARSNPPLPAYPLGVHVCVSVVVFLCVCVYGCVFQSVFCLCVCVRAHQCVQAVFPHFSPPFRPIIENKCKKSLPTTLPASQALCGGNKITQHPSPPQLCIYIDGNILYILYHRAYSRCHRV

SEQ ID NO: 828768 - protein, 101 aa, Homo sapiens
MRIRLCPLASHPKEGGSLGLTAPCMYVCTHSMWGLDLCTHRDGIAVPRWGCTRRKFSDASLQWCELRHTGEPGSQPVVCARRLAQHLTLRPVLESSATFMG

SEQ ID NO: 828769 - protein, 99 aa, Homo sapiens
LLHLSESLMLRPAGGMGKRGWPETSLLTWAAVHLLGFHLPFPHARVPSPACRLFGFVARKQGSTTDNACHLFAELDPNQPASAIVNFVSKVMLNAGQKR

SEQ ID NO: 828770 - protein, 895 aa, Homo sapiens
MRMSVGLSLLLPLWGRTFLLLLSVVMAQSHWPSEPSEAVRDWENQLEASMHSVLSDLHEAVPTVVGIPDGTAVVGRSFRVTIPTDLIASSGDIIKVSAAGKEALPSWLHWDSQSHTLEGLPLDTDKGVHYISVSATRLGANGSHIPQTSSVFSIEVYPEDHSELQSVRTASPDPGEVVSSACAADEPVTVLTVILDADLTKMTPKQRIDLLHRMRSFSEVELHNMKLVPVVNNRLFDMSAFMAGPGNAKKVVENGALLSWKLGCSLNQNSVPDIHGVEAPAREGAMSAQLGYPVVGWHIANKKPPLPKRVRRQIHATPTPVTAIGPPTTAIQEPPSRIVPTPTSPAIAPPTETMAPPVRDPVPGKPTVTIRTRGAIIQTPTLGPIQPTRVSEAGTTVPGQIRPTMTIPGYVEPTAVATPPTTTTKKPRVSTPKPATPSTDSTTTTTRRPTKKPRTPRPVPRVTTKVSITRLETASPPTRIRTTTSGVPRGGEPNQRPELKNHIDRVDAWVGTYFEVKIPSDTFYDHEDTTTDKLKLTLKLREQQLVGEKSWVQFNSNSQLMYGLPDSSHVGKHEYFMHATDKGGLSAVDAFEIHVHRRPQGDRAPARFKAKFVGDPALVLNDIHKKIALVKKLAFAFGDRNCSTITLQNITRGSIVVEWTNNTLPLEPCPKEQIAGLSRRIAEDDGKPRPAFSNALEPDFKATSITVTGSGSCRHLQFIPVVPPRRVPSEAPPTEVPDRDPEKSSEDDVYLHTVIPAVVVAAILLIAGIIAMICYRKKRKGKLTLEDQATFIKKGVPIIFADELDDSKPPPSSSMPLILQEEKAPLPPPEYPNQSVPETTPLNQDTMGEYTPLRDEDPNAPPYQPPPPFTAPMEGKGSRPKNMTPYRSPPPYVPP

SEQ ID NO: 828771 - protein, 895 aa, Homo sapiens; identical to SEQ ID NO: 828770

SEQ ID NO: 828772 - protein, 893 aa, Homo sapiens
MSVGLSLLLPLWGRTFLLLLSVVMAQSHWPSEPSEAVRDWENQLEASMHSVLSDLHEAVPTVVGIPDGTAVVGRSFRVTIPTDLIASSGDIIKVSAAGKEALPSWLHWDSQSHTLEGLPLDTDKGVHYISVSATRLGANGSHIPQTSSVFSIEVYPEDHSELQSVRTASPDPGEVVSSACAADEPVTVLTVILDADLTKMTPKQRIDLLHRMRSFSEVELHNMKLVPVVNNRLFDMSAFMAGPGNAKKVVENGALLSWKLGCSLNQNSVPDIHGVEAPAREGAMSAQLGYPVVGWHIANKKPPLPKRVRRQIHATPTPVTAIGPPTTAIQEPPSRIVPTPTSPAIAPPTETMAPPVRDPVPGKPTVTIRTRGAIIQTPTLGPIQPTRVSEAGTTVPGQIRPTMTIPGYVEPTAVATPPTTTTKKPRVSTPKPATPSTDSTTTTTRRPTKKPRTPRPVPRVTTKVSITRLETASPPTRIRTTTSGVPRGGEPNQRPELKNHIDRVDAWVGTYFEVKIPSDTFYDHEDTTTDKLKLTLKLREQQLVGEKSWVQFNSNSQLMYGLPDSSHVGKHEYFMHATDKGGLSAVDAFEIHVHRRPQGDRAPARFKAKFVGDPALVLNDIHKKIALVKKLAFAFGDRNCSTITLQNITRGSIVVEWTNNTLPLEPCPKEQIAGLSRRIAEDDGKPRPAFSNALEPDFKATSITVTGSGSCRHLQFIPVVPPRRVPSEAPPTEVPDRDPEKSSEDDVYLHTVIPAVVVAAILLIAGIIAMICYRKKRKGKLTLEDQATFIKKGVPIIFADELDDSKPPPSSSMPLILQEEKAPLPPPEYPNQSVPETTPLNQDTMGEYTPLRDEDPNAPPYQPPPPFTAPMEGKGSRPKNMTPYRSPPPYVPP

SEQ ID NO: 828773 - protein, 353 aa, Homo sapiens
LRIPYRRSWVQFNSNSQLMYGLPDSSHVGKHEYFMHATDKGGLSAVDAFEIHVHRRPQGDRAPARFKAKFVGDPALVLNDIHKKIALVKKLAFAFGDRNCSTITLQNITRGSIVVEWTNNTLPLEPCPKEQIAGLSRRIAEDDGKPRPAFSNALEPDFKATSITVTGSGSCRHLQFIPVVPPRRVPSEAPPTEVPDRDPEKSSEDDVYLHTVIPAVVVAAILLIAGIIAMICYRKKRKGKLTLEDQATFIKKGVPIIFADELDDSKPPPSSSMPLILQEEKAPLPPPEYPNQSVPETTPLNQDTMGEYTPLRDEDPNAPPYQPPPPFTAPMEGKGSRPKNMTPYRSPPPYVPP

SEQ ID NO: 828774 - protein, 895 aa, Homo sapiens; identical to SEQ ID NO: 828770

SEQ ID NO: 828775 - protein, 895 aa, Homo sapiens; identical to SEQ ID NO: 828770

SEQ ID NO: 828776 - protein, 106 aa, Homo sapiens
EAGGARTASRRRAELAAGLAATLACQAVARLRPRAPPLRSAPSHRPVRARAKAAARRSRLLGLAVAAAAASRRIPGERRWRRPGARRSEHLPRSSRRRWGHCSPGR

SEQ ID NO: 828777 - protein, 531 aa, Homo sapiens
LGLASSHTQPTVPSTPTLGPIQPTRVSEAGTTVPGQIRPTMTIPGYVEPTAVATPPTTTTKKPRVSTPKPATPSTDSTTTTTRRPTKKPRTPRPVPRVTTKVSITRLETASPPTRIRTTTSGVPRGGEPNQRPELKNHIDRVDAWVGTYFEVKIPSDTFYDHEDTTTDKLKLTLKLREQQLVGEKSWVQFNSNSQLMYGLPDSSHVGKHEYFMHATDKGGLSAVDAFEIHVHRRPQGDRAPARFKAKFVGDPALVLNDIHKKIALVKKLAFAFGDRNCSTITLQNITRGSIVVEWTNNTLPLEPCPKEQIAGLSRRIAEDDGKPRPAFSNALEPDFKATSITVTGSGSCRHLQFIPVVPPRRVPSEAPPTEVPDRDPEKSSEDDVYLHTVIPAVVVAAILLIAGIIAMICYRKKRKGKLTLEDQATFIKKGVPIIFADELDDSKPPPSSSMPLILQEEKAPLPPPEYPNQSVPETTPLNQDTMGEYTPLRDEDPNAPPYQPPPPFTAPMEGKGSRPKNMTPYRSPPPYVPP

SEQ ID NO: 828778 - protein, 895 aa, Homo sapiens; identical to SEQ ID NO: 828770

SEQ ID NO: 828779 - protein, 642 aa, Homo sapiens
MPCGEDWLSHPLGIVQGFFAQNGVNPDWEKKVIEYFKEKLKENNAPKWVPSLNEVPLHYLKPNSFVKFRCMIQDMFDPEFYMGVYETVNQNTKAHVLHFGKYRDVAECGPQQELDLNSPRNTTLERQTFYCVPVPGESTWVKEAYVNANQARVSPSTSYTPSRHKRSYEDDDDMDLQPNKQKDQHAGARQAGSVGGLQWCGEPKRLETEASTGQQLNSLNLSSPFDLNFPLPGEKGPACLVKVYEDWDCFKVNDILELYGILSVDPVLSILNNDERDASALLDPMECTDTAEEQRVHSPPASLVPRIHVILAQKLQHINPLLPACLNKEESKTCKFVSSFMSELSPVRAELLGFLTHALLGDSLAAEYLILHLISTVYTRRDVLPLGKFTVNLSGCPRNSTFTEHLYRIIQHLVPASFRLQMTIENMNHLKFIPHKDYTANRLVSGLLQLPSNTSLVIDETLLEQGQLDTPGVHNVTALSNLITWQKVDYDFSYHQMEFPCNINVFITSEGRSLLPADCQIHLQPQLIPPNMEEYMNSLLSAVLPSVLNKFRIYLTLLRFLEYSISDEITKAVEDDFVEMRKNDPQSITADDLHQLLVVARCLSLSAGQTTLSRERWLRAKQLESLRRTRLQQQKCVNGNEL

SEQ ID NO: 828780 - protein, 191 aa, Homo sapiens
MGPSLRGCKCTYTYSLPPGPRYGEGIARRLPAALSNATIVGSDTASVRPQRHGPYGAARPTSSRRPRSTLRLGAAMLDYGPPSSEFGTRPVLSILNNDERDASALLDPMECTDTAEEQRVHSPPASLVPRIHVILAQKLQHINPLLPACLNKEESKTCKFVSSFMSELSPVRAELLGFLTHALLGDSLAAE

SEQ ID NO: 828781 - protein, 642 aa, Homo sapiens; identical to SEQ ID NO: 828779

SEQ ID NO: 828782 - protein, 390 aa, Homo sapiens
PWVYPAPPEYGISSPRSDLNNDERDASALLDPMECTDTAEEQRVHSPPASLVPRIHVILAQKLQHINPLLPACLNKEESKTCKFVSSFMSELSPVRAELLGFLTHALLGDSLAAEYLILHLISTVYTRRDVLPLGKFTVNLSGCPRNSTFTEHLYRIIQHLVPASFRLQMTIENMNHLKFIPHKDYTANRLVSGLLQLPSNTSLVIDETLLEQGQLDTPGVHNVTALSNLITWQKVDYDFSYHQMEFPCNINVFITSEGRSLLPADCQIHLQPQLIPPNMEEYMNSLLSAVLPSVLNKFRIYLTLLRFLEYSISDEITKAVEDDFVEMRKNDPQSITADDLHQLLVVARCLSLSAGQTTLSRERWLRAKQLESLRRTRLQQQKCVNGNEL

SEQ ID NO: 828783 - protein, 146 aa, Homo sapiens
MEFPCNINVFITSEGRSLLPADCQIHLQPQLIPPNMEEYMNSLLSAVLPSVLNKFRIYLTLLRFLEYSISDEITKAVEDDFVEMRKNDPQSITADDLHQLLVVARCLSLSAGQTTLSRERWLRAKQLESLRRTRLQQQKCVNGNEL

SEQ ID NO: 828784 - protein, 146 aa, Homo sapiens
RAVYFNMLYLREWRSKERERAIGVWLVGGALRTHTHLSIQVCCLIWALLVVSRNNYNSNIKDHCSQLTISDEITKAVEDDFVEMRKNDPQSITADDLHQLLVVARCLSLSAGQTTLSRERWLRAKQLESLRRTRLQQQKCVNGNEL

SEQ ID NO: 828785 - protein, 534 aa, Homo sapiens
MPCGEDWLSHPLGIVQGFFAQNGVNPDWEKKVIEYFKEKLKENNAPKWVPSLNEVPLHYLKPNSFVKFRCMIQDMFDPEFYMGVYETVNQNTKAHVLHFGKYRDVAECGPQQELDLNSPRNTTLERQTFYCVPVPGESTWVKEAYVNANQARVSPSTSYTPSRHKRSYEDDDDMDLQPNKQKDQHAGARQAGSVGGLQWCGEPKRLETEASTGQQLNSLNLSSPFDLNFPLPGEKGPACLVKVYEDWDCFKVNDILELYGILSVDPVLSILNNDERDASALLDPMECTDTAEEQRVHSPPASLVPRIHVILAQKLQHINPLLPACLNKEESKTCKFVSSFMSELSPVRAELLGFLTHALLGDSLAAEYLILHLISTVYTRRDVLPLGKFTVNLSGCPRNSTFTEHLYRIIQHLVPASFRLQMTIENMNHLKFIPHKDYTANRLVSGLLQLPSNTSLVIDETLLEQGQLDTPGVHNVTALSNLITWQKVDYDFSYHQMEFPCNINVFITSEGRSLLPQTARFTYSPNLACLGYRA

SEQ ID NO: 828786 - protein, 642 aa, Homo sapiens; identical to SEQ ID NO: 828779

SEQ ID NO: 828787 - protein, 123 aa, Homo sapiens
RLEDPLDVSEDWYRIIQHLVPASFRLQMTIENMNHLKFIPHKDYTANRLVSGLLQLPSNTSLVIDETLLEQGQLDTPGVHNVTALSNLITWQKVDYDFSYHQMEFPCNINVFITSEGRSLLPV

SEQ ID NO: 828788 - protein, 469 aa, Homo sapiens
MDLQPNKQKDQHAGARQAGSVGGLQWCGEPKRLETEASTGQQLNSLNLSSPFDLNFPLPGEKGPACLVKVYEDWDCFKVNDILELYGILSVDPVLSILNNDERDASALLDPMECTDTAEEQRVHSPPASLVPRIHVILAQKLQHINPLLPACLNKEESKTCKFVSSFMSELSPVRAELLGFLTHALLGDSLAAEYLILHLISTVYTRRDVLPLGKFTVNLSGCPRNSTFTEHLYRIIQHLVPASFRLQMTIENMNHLKFIPHKDYTANRLVSGLLQLPSNTSLVIDETLLEQGQLDTPGVHNVTALSNLITWQKVDYDFSYHQMEFPCNINVFITSEGRSLLPADCQIHLQPQLIPPNMEEYMNSLLSAVLPSVLNKFRIYLTLLRFLEYSISDEITKAVEDDFVEMRKNDPQSITADDLHQLLVVARCLSLSAGQTTLSRERWLRAKQLESLRRTRLQQQKCVNGNEL

SEQ ID NO: 828789 - protein, 587 aa, Homo sapiens
MPCGEDWLSHPLGIVQGFFAQNGVNPDWEKKVIEYFKEKLKENNAPKWVPSLNEVPLHYLKPNSFVKFRCMIQDMFDPEFYMGVYETVNQNTKAHVLHFGKYRDVAECGPQQELDLNSPRNTTLERQTFYCVPVPGESTWVKEAYVNANQARVSPSTSYTPSRHKRSYEDDDDMDLQPNKQKDQHAGARQAGSVGGLQWCGEPKRLETEASTGQQLNSLNLSSPFDLNFPLPGEKGPACLVKVYEDWDCFKVNDILELYGILSVDPVLSILNNDERDASALLDPMECTDTAEEQRVHSPPASLVPRIHVILAQKLQHINPLLPACLNKEESKTCKFVSSFMSELSPVRAELLGFLTHALLGDSLAAEYLILHLISTVYTRRDVLPLGKFTVNLSGCPRNSTFTEHLYRIIQHLVPASFRLQMTIENMNHLKFIPHKDYTANRLVSGLLQLPSNTSLVIDETLLEQGQLDTPGVHNVTALSNLITWQKVDYDFSYHQMEFPCNINVFITSEGRSLLPAVEDDFVEMRKNDPQSITADDLHQLLVVARCLSLSAGQTTLSRERWLRAKQLESLRRTRLQQQKCVNGNEL

SEQ ID NO: 828790 - protein, 150 aa, Homo sapiens
FLRVNNTPFKPRKKIHQEGRSLLPADCQIHLQPQLIPPNMEEYMNSLLSAVLPSVLNKFRIYLTLLRFLEYSISDEITKAVEDDFVEMRKNDPQSITADDLHQLLVVARCLSLSAGQTTLSRERWLRAKQLESLRRTRLQQQKCVNGNEL

SEQ ID NO: 828791 - protein, 142 aa, Homo sapiens
MQTALFLRLASLTDGYVKLYLLSTELCFAHVVIFLPKTLERNWSVCPDSGLPFSFRSLFQVSCPNCLQSEQNFLGSLLMPFWGIVWLLNTLYYISSPQCKCCILVGIRGVWCVWKWKSGKIAGVICVFSLLGFITWFLSVQC

SEQ ID NO: 828792 - protein, 987 aa, Homo sapiens
MELRVLLCWASLAAALEETLLNTKLETADLKWVTFPQVDGQWEELSGLDEEQHSVRTYEVCDVQRAPGQAHWLRTGWVPRRGAVHVYATLRFTMLECLSLPRAGRSCKETFTVFYYESDADTATALTPAWMENPYIKVDTVAAEHLTRKRPGAEATGKVNVKTLRLGPLSKAGFYLAFQDQGACMALLSLHLFYKKCAQLTVNLTRFPETVPRELVVPVAGSCVVDAVPAPGPSPSLYCREDGQWAEQPVTGCSCAPGFEAAEGNTKCRACAQGTFKPLSGEGSCQPCPANSHSNTIGSAVCQCRVGYFRARTDPRGAPCTTPPSAPRSVVSRLNGSSLHLEWSAPLESGGREDLTYALRCRECRPGGSCAPCGGDLTFDPGPRDLVEPWVVVRGLRPDFTYTFEVTALNGVSSLATGPVPFEPVNVTTDREVPPAVSDIRVTRSSPSSLSLAWAVPRAPSGAVLDYEVKYHEKGAEGPSSVRFLKTSENRAELRGLKRGASYLVQVRARSEAGYGPFGQEHHSQTQLDESEGWREQLALIAGTAVVGVVLVLVVIVVAVLCLRKQSNGREAEYSDKHGQYLIGHGTKVYIDPFTYEDPNEAVREFAKEIDVSYVKIEEVIGAGEFGEVCRGRLKAPGKKESCVAIKTLKGGYTERQRREFLSEASIMGQFEHPNIIRLEGVVTNSMPVMILTEFMENGALDSFLRLNDGQFTVIQLVGMLRGIASGMRYLAEMSYVHRDLAARNILVNSNLVCKVSDFGLSRFLEENSSDPTYTSSLGGKIPIRWTAPEAIAFRKFTSASDAWSYGIVMWEVMSFGERPYWDMSNQDVINAIEQDYRLPPPPDCPTSLHQLMLDCWQKDRNARPRFPQVVSALDKMIRNPASLKIVARENGGASHPLLDQRQPHYSAFGSVGEWLRAIKMGRYEESFAAAGFGSFELVSQISAEDLLRIGVTLAGHQKKILASVQHMKSQAKPGTPGGTGGPAPQY

SEQ ID NO: 828793 - protein, 935 aa, Homo sapiens
MELRVLLCWASLAAALEETLLNTKLETADLKWVTFPQVDGQWEELSGLDEEQHSVRTYEVCDVQRAPGQAHWLRTGWVPRRGAVHVYATLRFTMLECLSLPRAGRSCKETFTVFYYESDADTATALTPAWMENPYIKVDTVAAEHLTRKRPGAEATGKVNVKTLRLGPLSKAGFYLAFQDQGACMALLSLHLFYKKCAQLTVNLTRFPETVPRELVVPVAGSCVVDAVPAPGPSPSLYCREDGQWAEQPVTGCSCAPGFEAAEGNTKCRACAQGTFKPLSGEGSCQPCPANSHSNTIGSAVCQCRVGYFRARTDPRGAPCTTPPSAPRSVVSRLNGSSLHLEWSAPLESGGREDLTYALRCRECRPGGSCAPCGGDLTFDPGPRDLVEPWVVVRGLRPDFTYTFEVTALNGVSSLATGPVPFEPVNVTTDREVPPAVSDIRVTRSSPSSLSLAWAVPRAPSGAVLDYEVKYHEKGAEGPSSVRFLKTSENRAELRGLKRGASYLVQVRARSEAGYGPFGQEHHSQTQLDESEGWREQLALIAGTAVVGVVLVLVVIVVAVLCLRKQSNGREAEYSDKHGQYLIGHGTKVYIDPFTYEDPNEAVREFAKEIDVSYVKIEEVIGAGEFGEVCRGRLKAPGKKESCVAIKTLKGGYTERQRREFLSEASIMGQFEHPNIIRLEGVVTNSMPVMILTEFMENGALDSFLRLNDGQFTVIQLVGMLRGIASGMRYLAEMSYVHRDLAARNILVNSNLVCKVSDFGLSRFLEENSSDPTYTSSLGGKIPIRWTAPEAIAFRKFTSASDAWSYGIVMWEVMSFGERPYWDMSNQDVINAIEQDYRLPPPPDCPTSLHQLMLDCWQKDRNARPRFPQVVSALDKMIRNPASLKIVARENGGDLLRIGVTLAGHQKKILASVQHMKSQAKPGTPGGTGGPAPQY

SEQ ID NO: 828794 - protein, 509 aa, Homo sapiens
SLTLPACVLSLHLSPVLGTCSQEITVHCSKPGLGPPTGPSVSPDQQPFLSAESEGWREQLALIAGTAVVGVVLVLVVIVVAVLCLRKQSNGREAEYSDKHGQYLIGHGTKVYIDPFTYEDPNEAVREFAKEIDVSYVKIEEVIGAGEFGEVCRGRLKAPGKKESCVAIKTLKGGYTERQRREFLSEASIMGQFEHPNIIRLEGVVTNSMPVMILTEFMENGALDSFLRLNDGQFTVIQLVGMLRGIASGMRYLAEMSYVHRDLAARNILVNSNLVCKVSDFGLSRFLEENSSDPTYTSSLGGKIPIRWTAPEAIAFRKFTSASDAWSYGIVMWEVMSFGERPYWDMSNQDVINAIEQDYRLPPPPDCPTSLHQLMLDCWQKDRNARPRFPQVVSALDKMIRNPASLKIVARENGGASHPLLDQRQPHYSAFGSVGEWLRAIKMGRYEESFAAAGFGSFELVSQISAEDLLRIGVTLAGHQKKILASVQHMKSQAKPGTPGGTGGPAPQY

SEQ ID NO: 828795 - protein, 987 aa, Homo sapiens; identical to SEQ ID NO: 828792

SEQ ID NO: 828796 - protein, 107 aa, Homo sapiens
MSYVHRDLAARNILVNSNLVCKVSDFGLSRFLEENSSDPTYTSSLVMLGVILGVSFLGPGGQGRLERWEAEGLAALLQGEDTGAGCGWGDSQLQEADFQMSRKITVG

SEQ ID NO: 828797 - protein, 732 aa, Homo sapiens
MFLCMLLMNAFSLSACAQGTFKPLSGEGSCQPCPANSHSNTIGSAVCQCRVGYFRARTDPRGAPCTTPPSAPRSVVSRLNGSSLHLEWSAPLESGGREDLTYALRCRECRPGGSCAPCGGDLTFDPGPRDLVEPWVVVRGLRPDFTYTFEVTALNGVSSLATGPVPFEPVNVTTDREVPPAVSDIRVTRSSPSSLSLAWAVPRAPSGAVLDYEVKYHEKGAEGPSSVRFLKTSENRAELRGLKRGASYLVQVRARSEAGYGPFGQEHHSQTQLDESEGWREQLALIAGTAVVGVVLVLVVIVVAVLCLRKQSNGREAEYSDKHGQYLIGHGTKVYIDPFTYEDPNEAVREFAKEIDVSYVKIEEVIGAGEFGEVCRGRLKAPGKKESCVAIKTLKGGYTERQRREFLSEASIMGQFEHPNIIRLEGVVTNSMPVMILTEFMENGALDSFLRLNDGQFTVIQLVGMLRGIASGMRYLAEMSYVHRDLAARNILVNSNLVCKVSDFGLSRFLEENSSDPTYTSSLGGKIPIRWTAPEAIAFRKFTSASDAWSYGIVMWEVMSFGERPYWDMSNQDVINAIEQDYRLPPPPDCPTSLHQLMLDCWQKDRNARPRFPQVVSALDKMIRNPASLKIVARENGGASHPLLDQRQPHYSAFGSVGEWLRAIKMGRYEESFAAAGFGSFELVSQISAEDLLRIGVTLAGHQKKILASVQHMKSQAKPGTPGGTGGPAPQY

SEQ ID NO: 828798 - protein, 987 aa, Homo sapiens; identical to SEQ ID NO: 828792

SEQ ID NO: 828799 - protein, 893 aa, Homo sapiens
MELRVLLCWASLAAALEETLLNTKLETADLKWVTFPQVDGQWEELSGLDEEQHSVRTYEVCDVQRAPGQAHWLRTGWVPRRGAVHVYATLRFTMLECLSLPRAGRSCKETFTVFYYESDADTATALTPAWMENPYIKVDTVAAEHLTRKRPGAEATGKVNVKTLRLGPLSKAGFYLAFQDQGACMALLSLHLFYKKCAQLTVNLTRFPETVPRELVVPVAGSCVVDAVPAPGPSPSLYCREDGQWAEQPVTGCSCAPGFEAAEGNTKCRACAQGTFKPLSGEGSCQPCPANSHSNTIGSAVCQCRVGYFRARTDPRGAPCTTPPSAPRSVVSRLNGSSLHLEWSAPLESGGREDLTYALRCRECRPGGSCAPCGGDLTFDPGPRDLVEPWVVVRGLRPDFTYTFEVTALNGVSSLATGPVPFEPVNVTTDREVPPAVSDIRVTRSSPSSLSLAWAVPRAPSGAVLDYEVKYHEKGAEGPSSVRFLKTSENRAELRGLKRGASYLVQVRARSEAGYGPFGQEHHSQTQLDESEGWREQLALIAGTAVVGVVLVLVVIVVAVLCLRKQSNGREAEYSDKHGQYLIGHGTKVYIDPFTYEDPNEAVREFAKEIDVSYVKIEEVIGAGEFGEVCRGRLKAPGKKESCVAIKTLKGGYTERQRREFLSEASIMGQFEHPNIIRLEGVVTNSMPVMILTEFMENGALDSFLRLNDGQFTVIQLVGMLRGIASGMRYLAEMSYVHRDLAARNILVNSNLVCKVSDFGLSRFLEENSSDPTYTSSLGGKIPIRWTAPEAIAFRKFTSASDAWSYGIVMWEVMSFGERPYWDMSNQDVINAIEQDYRLPPPPDCPTSLHQLMLDCWQKDRNARPRFPQVVSALDKMIRNPASLKIVARENGG

SEQ ID NO: 828800 - protein, 761 aa, Homo sapiens
MMDGKNSSGSKRYNRKRELSYPKNESFNNQSRRSSSQKSKTFNKMPPQRGGGSSKLFSSSFNGGRRDEVAEAQRAEFSPAQFSGPKKINLNHLLNFTFEPRGQTGHFEGSGHGSWGKRNKWGHKPFNKELFLQANCQFVVSEDQDYTAHFADPDTLVNWDFVEQVRICSHEVPSCPICLYPPTAAKITRCGHIFCWACILHYLSLSEKTWSKCPICYSSVHKKDLKSVVATESHQYVVGDTITMQLMKREKGVLVALPKSKWMNVDHPIHLGDEQHSQYSKLLLASKEQVLHRVVLEEKVALEQQLAEEKHTPESCFIEAAIQELKTREEALSGLAGSRREVTGVVAALEQLVLMAPLAKESVFQPRKGVLEYLSAFDEETTEVCSLDTPSRPLALPLVEEEEAVSEPEPEGLPEACDDLELADDNLKEGTICTESSQQEPITKSGFTRLSSSPCYYFYQAEDGQHMFLHPVNVRCLVREYGSLERSPEKISATVVEIAGYSMSEDVRQRHRYLSHLPLTCEFSICELALQPPVVSKETLEMFSDDIEKRKRQRQKKAREERRRERRIEIEENKKQGKYPEVHIPLENLQQFPAFNSYTCSSDSALGPTSTEGHGALSISPLSRSPGSHADFLLTPLSPTASQGSPSFCVGSLEEDSPFPSFAQMLRVGKAKADVWPKTAPKKDENSLVPPAPVDSDGESDNSDRVPVPSFQNSFSQAIEAAFMKLDTPATSDPLSEEKGGKKRKKQKQKLLFSTSVVHTK

SEQ ID NO: 828801 - protein, 761 aa, Homo sapiens; identical to SEQ ID NO: 828800

SEQ ID NO: 828802 - protein, 811 aa, Homo sapiens
MPLSSPNAAATASDMDKNSGSNSSSASSGSSKGQQPPRSASAGPAGESKPKSDGKNSSGSKRYNRKRELSYPKNESFNNQSRRSSSQKSKTFNKMPPQRGGGSSKLFSSSFNGGRRDEVAEAQRAEFSPAQFSGPKKINLNHLLNFTFEPRGQTGHFEGSGHGSWGKRNKWGHKPFNKELFLQANCQFVVSEDQDYTAHFADPDTLVNWDFVEQVRICSHEVPSCPICLYPPTAAKITRCGHIFCWACILHYLSLSEKTWSKCPICYSSVHKKDLKSVVATESHQYVVGDTITMQLMKREKGVLVALPKSKWMNVDHPIHLGDEQHSQYSKLLLASKEQVLHRVVLEEKVALEQQLAEEKHTPESCFIEAAIQELKTREEALSGLAGSRREVTGVVAALEQLVLMAPLAKESVFQPRKGVLEYLSAFDEETTEVCSLDTPSRPLALPLVEEEEAVSEPEPEGLPEACDDLELADDNLKEGTICTESSQQEPITKSGFTRLSSSPCYYFYQAEDGQHMFLHPVNVRCLVREYGSLERSPEKISATVVEIAGYSMSEDVRQRHRYLSHLPLTCEFSICELALQPPVVSKETLEMFSDDIEKRKRQRQKKAREERRRERRIEIEENKKQGKYPEVHIPLENLQQFPAFNSYTCSSDSALGPTSTEGHGALSISPLSRSPGSHADFLLTPLSPTASQGSPSFCVGSLEEDSPFPSFAQMLRVGKAKADVWPKTAPKKDENSLVPPAPVDSDGESDNSDRVPVPSFQNSFSQAIEAAFMKLDTPATSDPLSEEKGGKKRKKQKQKLLFSTSVVHTK

SEQ ID NO: 828803 - protein, 811 aa, Homo sapiens; identical to SEQ ID NO: 828802

SEQ ID NO: 828804 - protein, 751 aa, Homo sapiens
RPAHGFSELSYPKNESFNNQSRRSSSQKSKTFNKMPPQRGGGSSKLFSSSFNGGRRDEVAEAQRAEFSPAQFSGPKKINLNHLLNFTFEPRGQTGHFEGSGHGSWGKRNKWGHKPFNKELFLQANCQFVVSEDQDYTAHFADPDTLVNWDFVEQVRICSHEVPSCPICLYPPTAAKITRCGHIFCWACILHYLSLSEKTWSKCPICYSSVHKKDLKSVVATESHQYVVGDTITMQLMKREKGVLVALPKSKWMNVDHPIHLGDEQHSQYSKLLLASKEQVLHRVVLEEKVALEQQLAEEKHTPESCFIEAAIQELKTREEALSGLAGSRREVTGVVAALEQLVLMAPLAKESVFQPRKGVLEYLSAFDEETTEVCSLDTPSRPLALPLVEEEEAVSEPEPEGLPEACDDLELADDNLKEGTICTESSQQEPITKSGFTRLSSSPCYYFYQAEDGQHMFLHPVNVRCLVREYGSLERSPEKISATVVEIAGYSMSEDVRQRHRYLSHLPLTCEFSICELALQPPVVSKETLEMFSDDIEKRKRQRQKKAREERRRERRIEIEENKKQGKYPEVHIPLENLQQFPAFNSYTCSSDSALGPTSTEGHGALSISPLSRSPGSHADFLLTPLSPTASQGSPSFCVGSLEEDSPFPSFAQMLRVGKAKADVWPKTAPKKDENSLVPPAPVDSDGESDNSDRVPVPSFQNSFSQAIEAAFMKLDTPATSDPLSEEKGGKKRKKQKQKLLFSTSVVHTK

SEQ ID NO: 828805 - protein, 837 aa, Homo sapiens
MPLSSPNAAATASDMDKNSGSNSSSASSGSSKGQQPPRSASAGPAGESKPKSDGKNSSGSKRYNRKRELSYPKNESFNNQSRRSSSQKSKTFNKMPPQRGGGSSKLFSSSFNGGRRDEVAEAQRAEFSPAQFSGPKKINLNHLLNFTFEPRGQTGHFEGSGHGSWGKRNKWGHKPFNKELFLQANCQFVVSEDQDYTAHFADPDTLVNWDFVEQVRICSHEVPSCPICLYPPTAAKITRCGHIFCWACILHYLSLSEKTWSKCPICYSSVHKKDLKREIETFTQLDPNLFTPCPATYECPCFSVVATESHQYVVGDTITMQLMKREKGVLVALPKSKWMNVDHPIHLGDEQHSQYSKLLLASKEQVLHRVVLEEKVALEQQLAEEKHTPESCFIEAAIQELKTREEALSGLAGSRREVTGVVAALEQLVLMAPLAKESVFQPRKGVLEYLSAFDEETTEVCSLDTPSRPLALPLVEEEEAVSEPEPEGLPEACDDLELADDNLKEGTICTESSQQEPITKSGFTRLSSSPCYYFYQAEDGQHMFLHPVNVRCLVREYGSLERSPEKISATVVEIAGYSMSEDVRQRHRYLSHLPLTCEFSICELALQPPVVSKETLEMFSDDIEKRKRQRQKKAREERRRERRIEIEENKKQGKYPEVHIPLENLQQFPAFNSYTCSSDSALGPTSTEGHGALSISPLSRSPGSHADFLLTPLSPTASQGSPSFCVGSLEEDSPFPSFAQMLRVGKAKADVWPKTAPKKDENSLVPPAPVDSDGESDNSDRVPVPSFQNSFSQAIEAAFMKLDTPATSDPLSEEKGGKKRKKQKQKLLFSTSVVHTK

SEQ ID NO: 828806 - protein, 902 aa, Homo sapiens
MPLSSPNAAATASDMDKNSGSNSSSASSGSSKGQQPPRSASAGPAGESKPKSDGKNSSGSKRYNRKRELSYPKNESFNNQSRRSSSQKSKTFNKMPPQRGGGSSKLFSSSFNGGRRDEVAEAQRAEFSPAQFSGPKKINLNHLLNFTFEPRGQTGHFEGSGHGSWGKRNKWGHKPFNKELFLQANCQFVVSEDQDYTAHFADPDTLVNWDFVEQVRICSHEVPSCPICLYPPTAAKITRCGHIFCWACILHYLSLSEKTWSKCPICYSSVHKKDLKSVVATESHQYVVGDTITMQLMKREKGVLVALPKSKWMNVDHPIHLGDEQHSQYSKLLLASKEQVLHRVVLEEKVALEQQLAEEKHTPESCFIEAAIQELKTREEALSGLAGSRREVTGVVAALEQLVLMAPLAKESVFQPRKVSVFLLLSGCRSSNAVIELVGITVRSKPSQEKKGTMSIFCMLVISSFPRGVKSVNTTAKINIQGAWLLGLHLPHCFRKAGDILSVDLEFAAGVLEYLSAFDEETTEVCSLDTPSRPLALPLVEEEEAVSEPEPEGLPEACDDLELADDNLKEGTICTESSQQEPITKSGFTRLSSSPCYYFYQAEDGQHMFLHPVNVRCLVREYGSLERSPEKISATVVEIAGYSMSEDVRQRHRYLSHLPLTCEFSICELALQPPVVSKETLEMFSDDIEKRKRQRQKKAREERRRERRIEIEENKKQGKYPEVHIPLENLQQFPAFNSYTCSSDSALGPTSTEGHGALSISPLSRSPGSHADFLLTPLSPTASQGSPSFCVGSLEEDSPFPSFAQMLRVGKAKADVWPKTAPKKDENSLVPPAPVDSDGESDNSDRVPVPSFQNSFSQAIEAAFMKLDTPATSDPLSEEKGGKKRKKQKQKLLFSTSVVHTK

SEQ ID NO: 828807 - protein, 518 aa, Homo sapiens
MQLMKREKGVLVALPKSKWMNVDHPIHLGDEQHSQYSKLLLASKEQVLHRVVLEEKVALEQQLAEEKHTPESCFIEAAIQELKTREEALSGLAGSRREVTGVVAALEQLVLMAPLAKESVFQPRKGVLEYLSAFDEETTEVCSLDTPSRPLALPLVEEEEAVSEPEPEGLPEACDDLELADDNLKEGTICTESSQQEPITKSGFTRLSSSPCYYFYQAEDGQHMFLHPVNVRCLVREYGSLERSPEKISATVVEIAGYSMSEDVRQRHRYLSHLPLTCEFSICELALQPPVVSKETLEMFSDDIEKRKRQRQKKAREERRRERRIEIEENKKQGKYPEVHIPLENLQQFPAFNSYTCSSDSALGPTSTEGHGALSISPLSRSPGSHADFLLTPLSPTASQGSPSFCVGSLEEDSPFPSFAQMLRVGKAKADVWPKTAPKKDENSLVPPAPVDSDGESDNSDRVPVPSFQNSFSQAIEAAFMKLDTPATSDPLSEEKGGKKRKKQKQKLLFSTSVVHTK

SEQ ID NO: 828808 - protein, 611 aa, Homo sapiens
YAQNCNRWDIYSTSSHSVKDMQDACPAEDVSTTGYLGCSRWIEAYWACILHYLSLSEKTWSKCPICYSSVHKKDLKSVVATESHQYVVGDTITMQLMKREKGVLVALPKSKWMNVDHPIHLGDEQHSQYSKLLLASKEQVLHRVVLEEKVALEQQLAEEKHTPESCFIEAAIQELKTREEALSGLAGSRREVTGVVAALEQLVLMAPLAKESVFQPRKGVLEYLSAFDEETTEVCSLDTPSRPLALPLVEEEEAVSEPEPEGLPEACDDLELADDNLKEGTICTESSQQEPITKSGFTRLSSSPCYYFYQAEDGQHMFLHPVNVRCLVREYGSLERSPEKISATVVEIAGYSMSEDVRQRHRYLSHLPLTCEFSICELALQPPVVSKETLEMFSDDIEKRKRQRQKKAREERRRERRIEIEENKKQGKYPEVHIPLENLQQFPAFNSYTCSSDSALGPTSTEGHGALSISPLSRSPGSHADFLLTPLSPTASQGSPSFCVGSLEEDSPFPSFAQMLRVGKAKADVWPKTAPKKDENSLVPPAPVDSDGESDNSDRVPVPSFQNSFSQAIEAAFMKLDTPATSDPLSEEKGGKKRKKQKQKLLFSTSVVHTK

SEQ ID NO: 828809 - protein, 761 aa, Homo sapiens; identical to SEQ ID NO: 828800

SEQ ID NO: 828810 - protein, 761 aa, Homo sapiens; identical to SEQ ID NO: 828800

SEQ ID NO: 828811 - protein, 403 aa, Homo sapiens
VLAVILCSMVGVLEYLSAFDEETTEVCSLDTPSRPLALPLVEEEEAVSEPEPEGLPEACDDLELADDNLKEGTICTESSQQEPITKSGFTRLSSSPCYYFYQAEDGQHMFLHPVNVRCLVREYGSLERSPEKISATVVEIAGYSMSEDVRQRHRYLSHLPLTCEFSICELALQPPVVSKETLEMFSDDIEKRKRQRQKKAREERRRERRIEIEENKKQGKYPEVHIPLENLQQFPAFNSYTCSSDSALGPTSTEGHGALSISPLSRSPGSHADFLLTPLSPTASQGSPSFCVGSLEEDSPFPSFAQMLRVGKAKADVWPKTAPKKDENSLVPPAPVDSDGESDNSDRVPVPSFQNSFSQAIEAAFMKLDTPATSDPLSEEKGGKKRKKQKQKLLFSTSVVHTK

SEQ ID NO: 828812 - protein, 822 aa, Homo sapiens
MPLSSPNAAATASDMDKNSGSNSSSASSGSSKGQQPPRSASAGPAGESKPKSDGKNSSGSKRYNRKRELSYPKNESFNNQSRRSSSQKSKTFNKMPPQRGGGSSKLFSSSFNGGRRDEVAEAQRAEFSPAQFSGPKKINLNHLLNFTFEPRGQTGHFEGSGHGSWGKRNKWGHKPFNKELFLQANCQFVVSEDQDYTAHFADPDTLVNWDFVEQVRICSHEVPSCPICLYPPTAAKITRCGHIFCWACILHYLSLSEKTWSKCPICYSSVHKKDLKSVVATESHQYVVGDTITMQLMKREKGVLVALPKSKWMNVDHPIHLGDEQHSQYSKLLLASKEQVLHRVVLEEKVALEQQLAEEKHTPESCFIEAAIQELKTREEALSGLAGSRREVTGVVAALEQLVLMAPLAKESVFQPRKGVLEYLSAFDEETTEVCSLDTPSRPLALPLVEEEEAVSEPEPEGLPEACDDLELADDNLKEGTICTESSQQEPITKSGFTRLSSSPCYYFYQAEDGQHMFLHPVNVRCLVREYGSLERSPEKISATVVEIAGYSMSEDVRQRHRYLSHLPLTCEFSICELALQPPVVSKETLEMFSDDIEKRKRQRQKKAREERRRERRIEIEENKKQGKYPEVHIPLENLQQFPAFNSYTCSSDSALGPTSTEGHGALSISPLSRSPGSHADFLLTPLSPTASQGSPSFCVGSLEEDSPFPSFAQMLRVGKAKADVWPKTAPKKDENSLVPPAPVDSDGESDNSDRVPVPSFQNSFSQAIEAAFMKLDTPATSDPLSGKGRGWSAQGCQTYYTCTAIPAWIQWQTSLIRLFPF

SEQ ID NO: 828813 - protein, 811 aa, Homo sapiens; identical to SEQ ID NO: 828802

SEQ ID NO: 828814 - protein, 375 aa, Homo sapiens
MPLSSPNAAATASDMDKNSGSNSSSASSGSSKGQQPPRSASAGPAGESKPKSDGKNSSGSKRYNRKRELSYPKNESFNNQSRRSSSQKSKTFNKMPPQRGGGSSKLFSSSFNGGRRDEVAEAQRAEFSPAQFSGPKKINLNHLLNFTFEPRGQTGHFEGSGHGSWGKRNKWGHKPFNKELFLQANCQFVVSEDQDYTAHFADPDTLVNWDFVEQVRICSHEVPSCPICLYPPTAAKITRCGHIFCWACILHYLSLSEKTWSKCPICYSSVHKKDLKSVVATESHQYVVGDTITMQLMKREKGVLVALPLHFSSQQKSRFPCRLSADPSVTHCQSGQSLILRWESGRRLSLPFLCPDAEGWKSKSRCVAQNCSKER

SEQ ID NO: 828815 - protein, 700 aa, Homo sapiens
MPLSSPNAAATASDMDKNSGSNSSSASSGSSKGQQPPRSASAGPAGESKPKSDGKNSSGSKRYNRKRELSYPKNESFNNQSRRSSSQKSKTFNKMPPQRGGGSSKLFSSSFNGGRRDEVAEAQRAEFSPAQFSGPKKINLNHLLNFTFEPRGQTGHFEGSGHGSWGKRNKWGHKPFNKELFLQANCQFVVSEDQDYTAHFADPDTLVNWDFVEQVRICSHEVPSCPICLYPPTAAKITRCGHIFCWACILHYLSLSEKTWSKCPICYSSVHKKDLKSVVATESHQYVVGDTITMQLMKREKGVLVALPKSKWMNVDHPIHLGDEQHSQYSKLLLASKEQVLHRVVLEEKVALEQQLAEEKHTPESCFIEAAIQELKTREEALSGLAGSRREVTGVVAALEQLVLMAPLAKESVFQPRKGVLEYLSAFDEETTEVCSLDTPSRPLALPLVEEEEAVSEPEPEGLPEACDDLELADDNLKEGTICTESSQQEPITKSGFTRLSSSPCYYFYQAEDGQHMFLHPVNVRCLVREYGSLERSPEKISATVVEIAGYSMSEDVRQRHRYLSHLPLTCEFSICELALQPPVVSKETLEMFSDDIEKRKRQRQKKAREERRRERRIEIEENKKQGKYPEVHIPLENLQQFPAFNSYTCSSDSALGPTSTEGHGALSISPLSRSPGSHADAEGWKSKSRCVAQNCSKER

SEQ ID NO: 828816 - protein, 220 aa, Homo sapiens [sequence omitted]

SEQ ID NO: 828817 - protein, 266 aa, Homo sapiens
MPLSSPNAAATASDMDKNSGSNSSSASSGSSKGQQPPRSASAGPAGESKPKSDGKNSSGSKRYNRKRELSYPKNESFNNQSRRSSSQKSKTFNKMPPQRGGGSSKLFSSSFNGGRRDEVAEAQRAEFSPAQFSGPKKINLNHLLNFTFEPRGQTGHFEGSGHGSWGKRNKWGHKPFNKELFLQANCQFVVSEDQDYTAHFADPDTLVNWDFVEQVRICSHEVPSCPICLYPPTAAKITRCGHIFCWACILHYLSLSEKTHSRVLLY

SEQ ID NO: 828818 - protein, 772 aa, Homo sapiens
MPLSSPNAAATASDMDKNSGSNSSSASSGSSKGQQPPRSASAGPAGESKPKSDGKNSSGSKRYNRKRELSYPKNESFNNQSRRSSSQKSKTFNKMPPQRGGGSSKLFSSSFNGGRRDEVAEAQRAEFSPAQFSGPKKINLNHLLNFTFEPRGQTGHFEGSGHGSWGKRNKWGHKPFNKELFLQANCQFVVSEDQDYTAHFADPDTLVNWDFVEQVRICSHEVPSCPICLYPPTAAKITRCGHIFCWACILHYLSLSEKTWSKCPICYSSVHKKDLKSVVATESHQYVVGDTITMQLMKREKGVLVALPKSKWMNVDHPIHLGDEQHSQYSKLLLASKEQVLHRVVLEEKVALEQQLAEEKHTPESCFIEAAIQELKTREEALSGLAGSRREVTGVVAALEQLVLMAPLAKESVFQPRKGVLEYLSAFDEETTEVCSLDTPSRPLALPLVEEEEAVSEPEPEGLPEACDDLELADDNLKEGTICTESSQQEPITKSGFTRLSSSPCYYFYQAEDGQHMFLHPVNVRCLVREYGSLERSPEKISATVVEIAGYSMSEDVRQRHRYLSHLPLTCEFSICELALQPPVVSKETLEMFSDDIEKRKRQRQKKAREERRRERRIEIEENKKQGKYPEVHIPLENLQQFPAFNSYTCSSDSALGPTSTEGHGALSISPLSRSPGSHADFLLTPLSPTASQGSPSFCVGSLEEDSPFPSFAQRSPYMKVFHGFACWTSVLPTPKSLETILTHLITSSTNPHGKKCQFIFVCIGFLLGSSS

SEQ ID NO: 828819 - protein, 701 aa, Homo sapiens
MPLSSPNAAATASDMDKNSGSNSSSASSGSSKGQQPPRSASAGPAGESKPKSDGKNSSGSKRYNRKRELSYPKNESFNNQSRRSSSQKSKTFNKMPPQRGGGSSKLFSSSFNGGRRDEVAEAQRAEFSPAQFSGPKKINLNHLLNFTFEPRGQTGHFEGSGHGSWGKRNKWGHKPFNKELFLQANCQFVVSEDQDYTAHFADPDTLVNWDFVEQVRICSHEVPSCPICLYPPTAAKITRCGHIFCWACILHYLSLSEKTWSKCPICYSSVHKKDLKSVVATESHQYVVGDTITMQLMKREKGVLVALPKSKWMNVDHPIHLGDEQHSQYSKLLLASKEQVLHRVVLEEKVALEQQLAEEKHTPESCFIEAAIQELKTREEALSGLAGSRREVTGVVAALEQLVLMAPLAKESVFQPRKGVLEYLSAFDEETTEVCSLDTPSRPLALPLVEEEEAVSEPEPEGLPEACDDLELADDNLKEGTICTESSQQEPITKSGFTRLSSSPCYYFYQAEDGQHMFLHPVNVRCLVREYGSLERSPEKISATVVEIAGYSMSEDVRQRHRYLSHLPLTCEFSICELALQPPVVSKETLEMFSDDIEKRKRQRQKKAREERRRERRIEIEENKKQGKYPEVHIPLENLQQFPAFNSYTCSSDSALGPTSTEGHGALSISPLSRSPGSHAGKQVKFNEFTHQLDLMQSFGV

SEQ ID NO: 828820 - protein, 701 aa, Homo sapiens; identical to SEQ ID NO: 828819

SEQ ID NO: 828821 - protein, 700 aa, Homo sapiens; identical to SEQ ID NO: 828815

SEQ ID NO: 828822 - protein, 671 aa, Homo sapiens
MPLSSPNAAATASDMDKNSGSNSSSASSGSSKGQQPPRSASAGPAGESKPKSDGKNSSGSKRYNRKRELSYPKNESFNNQSRRSSSQKSKTFNKMPPQRGGGSSKLFSSSFNGGRRDEVAEAQRAEFSPAQFSGPKKINLNHLLNFTFEPRGQTGHFEGSGHGSWGKRNKWGHKPFNKELFLQANCQFVVSEDQDYTAHFADPDTLVNWDFVEQVRICSHEVPSCPICLYPPTAAKITRCGHIFCWACILHYLSLSEKTWSKCPICYSSVHKKDLKSVVATESHQYVVGDTITMQLMKREKGVLVALPKSKWMNVDHPIHLGDEQHSQYSKLLLASKEQVLHRVVLEEKVALEQQLAEEKHTPESCFIEAAIQELKTREEALSGLAGSRREVTGVVAALEQLVLMAPLAKESVFQPRKGVLEYLSAFDEETTEVCSLDTPSRPLALPLVEEEEAVSEPEPEGLPEACDDLELADDNLKEGTICTESSQQEPITKSGFTRLSSSPCYYFYQAEDGQHMFLHPVNVRCLVREYGSLERSPEKISATVVEIAGYSMSEDVRQRHRYLSHLPLTCEFSICELALQPPVVSKETLEMFSDDIEKRKRQRQKKAREERRRERRIEIEENKKQGKYPEVHIPLENLQQFPAFNSYTCSSIILGSYIRMLLDLNCDHLR

SEQ ID NO: 828823 - protein, 569 aa, Homo sapiens
MPLSSPNAAATASDMDKNSGSNSSSASSGSSKGQQPPRSASAGPAGESKPKSDGKNSSGSKRYNRKRELSYPKNESFNNQSRRSSSQKSKTFNKMPPQRGGGSSKLFSSSFNGGRRDEVAEAQRAEFSPAQFSGPKKINLNHLLNFTFEPRGQTGHFEGSGHGSWGKRNKWGHKPFNKELFLQANCQFVVSEDQDYTAHFADPDTLVNWDFVEQVRICSHEVPSCPICLYPPTAAKITRCGHIFCWACILHYLSLSEKTWSKCPICYSSVHKKDLKSVVATESHQYVVGDTITMQLMKREKGVLVALPKSKWMNVDHPIHLGDEQHSQYSKLLLASKEQVLHRVVLEEKVALEQQLAEEKHTPESCFIEAAIQELKTREEALSGLAGSRREVTGVVAALEQLVLMAPLAKESVFQPRKGVLEYLSAFDEETTEVCSLDTPSRPLALPLVEEEEAVSEPEPEGLPEACDDLELADDNLKEGTICTESSQQEPITKSGFTRLSSSPCYYFYQAEDGKHMFPAPGKGAAPGGEEGAGERPQENSAGRGNGANPGEGAQGRNPGTRGATEGDR

SEQ ID NO: 828824 - protein, 384 aa, Homo sapiens
MPLSSPNAAATASDMDKNSGSNSSSASSGSSKGQQPPRSASAGPAGESKPKSDGKNSSGSKRYNRKRELSYPKNESFNNQSRRSSSQKSKTFNKMPPQRGGGSSKLFSSSFNGGRRDEVAEAQRAEFSPAQFSGPKKINLNHLLNFTFEPRGQTGHFEGSGHGSWGKRNKWGHKPFNKELFLQANCQFVVSEDQDYTAHFADPDTLVNWDFVEQVRICSHEVPSCPICLYPPTAAKITRCGHIFCWACILHYLSLSEKTWSKCPICYSSVHKKDLKSVVATESHQYVVGDTITMQLMKREKGVLVALPKSKWMNVDHPIHLGDEQHSQYSKLLLASKEQVLHRVVLEEKVALEQQLAEEKHTPESCFIEAAIQELKTQVDALEM

SEQ ID NO: 828825 - protein, 761 aa, Homo sapiens; identical to SEQ ID NO: 828800

SEQ ID NO: 828826 - protein, 811 aa, Homo sapiens; identical to SEQ ID NO: 828802

SEQ ID NO: 828827 - protein, 735 aa, Homo sapiens
MLPLWRCLSTKKSKTFNKMPPQRGGGSSKLFSSSFNGGRRDEVAEAQRAEFSPAQFSGPKKINLNHLLNFTFEPRGQTGHFEGSGHGSWGKRNKWGHKPFNKELFLQANCQFVVSEDQDYTAHFADPDTLVNWDFVEQVRICSHEVPSCPICLYPPTAAKITRCGHIFCWACILHYLSLSEKTWSKCPICYSSVHKKDLKSVVATESHQYVVGDTITMQLMKREKGVLVALPKSKWMNVDHPIHLGDEQHSQYSKLLLASKEQVLHRVVLEEKVALEQQLAEEKHTPESCFIEAAIQELKTREEALSGLAGSRREVTGVVAALEQLVLMAPLAKESVFQPRKGVLEYLSAFDEETTEVCSLDTPSRPLALPLVEEEEAVSEPEPEGLPEACDDLELADDNLKEGTICTESSQQEPITKSGFTRLSSSPCYYFYQAEDGQHMFLHPVNVRCLVREYGSLERSPEKISATVVEIAGYSMSEDVRQRHRYLSHLPLTCEFSICELALQPPVVSKETLEMFSDDIEKRKRQRQKKAREERRRERRIEIEENKKQGKYPEVHIPLENLQQFPAFNSYTCSSDSALGPTSTEGHGALSISPLSRSPGSHADFLLTPLSPTASQGSPSFCVGSLEEDSPFPSFAQMLRVGKAKADVWPKTAPKKDENSLVPPAPVDSDGESDNSDRVPVPSFQNSFSQAIEAAFMKLDTPATSDPLSEEKGGKKRKKQKQKLLFSTSVVHTK

SEQ ID NO: 828828 - protein, 518 aa, Homo sapiens; identical to SEQ ID NO: 828807

SEQ ID NO: 828829 - protein, 590 aa, Homo sapiens
  misc_feature (4)..(4): Xaa can be any naturally occurring amino acid
PRGXSDESYPPTAAKITRCGHIFCWACILHYLSLSEKTWSKCPICYSSVHKKDLKSVVATESHQYVVGDTITMQLMKREKGVLVALPKSKWMNVDHPIHLGDEQHSQYSKLLLASKEQVLHRVVLEEKVALEQQLAEEKHTPESCFIEAAIQELKTREEALSGLAGSRREVTGVVAALEQLVLMAPLAKESVFQPRKGVLEYLSAFDEETTEVCSLDTPSRPLALPLVEEEEAVSEPEPEGLPEACDDLELADDNLKEGTICTESSQQEPITKSGFTRLSSSPCYYFYQAEDGQHMFLHPVNVRCLVREYGSLERSPEKISATVVEIAGYSMSEDVRQRHRYLSHLPLTCEFSICELALQPPVVSKETLEMFSDDIEKRKRQRQKKAREERRRERRIEIEENKKQGKYPEVHIPLENLQQFPAFNSYTCSSDSALGPTSTEGHGALSISPLSRSPGSHADFLLTPLSPTASQGSPSFCVGSLEEDSPFPSFAQMLRVGKAKADVWPKTAPKKDENSLVPPAPVDSDGESDNSDRVPVPSFQNSFSQAIEAAFMKLDTPATSDPLSEEKGGKKRKKQKQKLLFSTSVVHTK

SEQ ID NO: 828830 - protein, 572 aa, Homo sapiens
MHRTVTDGTLLHVFSLSERQCRMHAQQKMCPQRVILAAVVATESHQYVVGDTITMQLMKREKGVLVALPKSKWMNVDHPIHLGDEQHSQYSKLLLASKEQVLHRVVLEEKVALEQQLAEEKHTPESCFIEAAIQELKTREEALSGLAGSRREVTGVVAALEQLVLMAPLAKESVFQPRKGVLEYLSAFDEETTEVCSLDTPSRPLALPLVEEEEAVSEPEPEGLPEACDDLELADDNLKEGTICTESSQQEPITKSGFTRLSSSPCYYFYQAEDGQHMFLHPVNVRCLVREYGSLERSPEKISATVVEIAGYSMSEDVRQRHRYLSHLPLTCEFSICELALQPPVVSKETLEMFSDDIEKRKRQRQKKAREERRRERRIEIEENKKQGKYPEVHIPLENLQQFPAFNSYTCSSDSALGPTSTEGHGALSISPLSRSPGSHADFLLTPLSPTASQGSPSFCVGSLEEDSPFPSFAQMLRVGKAKADVWPKTAPKKDENSLVPPAPVDSDGESDNSDRVPVPSFQNSFSQAIEAAFMKLDTPATSDPLSEEKGGKKRKKQKQKLLFSTSVVHTK

SEQ ID NO: 828831 - protein, 700 aa, Homo sapiens; identical to SEQ ID NO: 828815

SEQ ID NO: 828832 - protein, 287 aa, Homo sapiens
  misc_feature (1)..(1): Xaa can be any naturally occurring amino acid
XTPQLKGYPLERSPEKISATVVEIAGYSMSEDVRQRHRYLSHLPLTCEFSICELALQPPVVSKETLEMFSDDIEKRKRQRQKKAREERRRERRIEIEENKKQGKYPEVHIPLENLQQFPAFNSYTCSSDSALGPTSTEGHGALSISPLSRSPGSHADFLLTPLSPTASQGSPSFCVGSLEEDSPFPSFAQMLRVGKAKADVWPKTAPKKDENSLVPPAPVDSDGESDNSDRVPVPSFQNSFSQAIEAAFMKLDTPATSDPLSEEKGGKKRKKQKQKLLFSTSVVHTK

SEQ ID NO: 828833 - protein, 838 aa, Homo sapiens
MPLSSPNAAATASDMDKNSGSNSSSASSGSSKGQQPPRSASAGPAGESKPKSDGKNSSGSKRYNRKRELSYPKNESFNNQSRRSSSQKSKTFNKMPPQRGGGSSKLFSSSFNGGRRDEVAEAQRAEFSPAQFSGPKKINLNHLLNFTFEPRGQTGHFEGSGHGSWGKRNKWGHKPFNKELFLQANCQFVVSEDQDYTAHFADPDTLVNWDFVEQVRICSHEVPSCPICLYPPTAAKITRCGHIFCWACILHYLSLSEKTWSKCPICYSSVHKKDLKSVVATESHQYVVGDTITMQLMKREKGVLVALPKSKWMNVDHPIHLGDEQHSQYSKLLLASKEQVLHRVVLEEKVALEQQLAEEKHTPESCFIEAAIQELKTREEALSGLAGSRREVTGVVAALEQLVLMAPLAKESVFQPRKGVLEYLSAFDEETTEVCSLDTPSRPLALPLVEEEEAVSEPEPEGLPEACDDLELADDNLKEGTICTESSQQEPITKSGFTRLSSSPCYYFYQAEDGQHMFLHPVNVRCLVREYGSLERSPEKISATVVEIAGYSMSEDVRQRHRYLSHLPLTCEFSICELALQPPVVSKETLEMFSDDIEKRKRQRQKKAREERRRERRIEIEENKKQGKYPEVHIPLENLQQFPAFNSYTCSSDSALGPTSTEGHGALSISPLSRSPGSHADFLLTPLSPTASQGSPSFCVGSLEEDSPFPSFAQMLRVGKAKADVWPKTAPKKDENSLVPPAPVDSDGESDNSDRVPVPSFQNSFSQAIEAAFMKLDTPATSDPLSEETGERHNGSVRPAPVHGRTSRWLVPVGRLSGHRGVPGLGLPKRRPLCVVSS

SEQ ID NO: 828834 - protein, 730 aa, Homo sapiens
MPLSSPNAAATASDMDKNSGSNSSSASSGSSKGQQPPRSASAGPAGESKPKSDGKNSSGSKRYNRKRELSYPKNESFNNQSRRSSSQKSKTFNKMPPQRGGGSSKLFSSSFNGGRRDEVAEAQRAEFSPAQFSGPKKINLNHLLNFTFEPRGQTGHFEGSGHGSWGKRNKWGHKPFNKELFLQANCQFVVSEDQDYTAHFADPDTLVNWDFVEQVRICSHEVPSCPICLYPPTAAKITRCGHIFCWACILHYLSLSEKTWSKCPICYSSVHKKDLKSVVATESHQYVVGDTITMQLMKREKGVLVALPKSKWMNVDHPIHLGDEQHSQYSKLLLASKEQVLHRVVLEEKVALEQQLAEEKHTPESCFIEAAIQELKTREEALSGLAGSRREVTGVVAALEQLVLMAPLAKESVFQPRKGVLEYLSAFDEETTEVCSLDTPSRPLALPLVEEEEAVSEPEPEGLPEACDDLELADDNLKEGTICTESSQQEPITKSGFTRLSSSPCYYFYQAEDGQHMFLHPVNVRCLVREYGSLERSPEKISATVVEIAGYSMSEDVRQRHRYLSHLPLTCEFSICELALQPPVVSKETLEMFSDDIEKRKRQRQKKAREERRRERRIEIEENKKQGKYPEVHIPLENLQQFPAFNSYTCSSDSALGPTSTEGHGALSISPLSRSPGSHADAEGLEKQSRCVGQTGPEDETVFPALWKGGDVFDGPGRLISHCSFEGTLP

SEQ ID NO: 828835 - protein, 136 aa, Homo sapiens
GRSNIRMRDCPDWQWVTEGSPSFCVGSLEEDSPFPSFAQMLRVGKAKADVWPKTAPKKDENSLVPPAPVDSDGESDNSDRVPVPSFQNSFSQAIEAAFMKLDTPATSDPLSEEKGGKKRKKQKQKLLFSTSVVHTK

SEQ ID NO: 828836 - protein, 754 aa, Homo sapiens
MPLSSPNAAATASDMDKNSGSNSSSASSGSSKGQQPPRSASAGPAGESKPKSDGKNSSGSKRYNRKRELSYPKNESFNNQSRRSSSQKSKTFNKMPPQRGGGSSKLFSSSFNGGRRDEVAEAQRAEFSPAQFSGPKKINLNHLLNFTFEPRGQTGHFEGSGHGSWGKRNKWGHKPFNKELFLQANCQFVVSEDQDYTAHFADPDTLVNWDFVEQVRICSHEVPSCPICLYPPTAAKITRCGHIFCWACILHYLSLSEKTWSKCPICYSSVHKKDLKSVVATESHQYVVGDTITMQLMKREKGVLVALPKSKWMNVDHPIHLGDEQHSQYSKLLLASKEQVLHRVVLEEKVALEQQLAEEKHTPESCFIEAAIQELKTREEALSGLAGSRREVTGVVAALEQLVLMAPLAKESVFQPRKGVLEYLSAFDEETTEVCSLDTPSRPLALPLVEEEEAVSEPEPEGLPEACDDLELADDNLKEGTICTESSQQEPITKSGFTRLSSSPCYYFYQAEDGQHMFLHPVNVRCLVREYGSLERSPEKISATVVEIAGYSMSEDVRQRHRYLSHLPLTCEFSICELALQPPVVSKETLEMFSDDIEKRKRQRQKKAREERRRERRSPGSHADFLLTPLSPTASQGSPSFCVGSLEEDSPFPSFAQMLRVGKAKADVWPKTAPKKDENSLVPPAPVDSDGESDNSDRVPVPSFQNSFSQAIEAAFMKLDTPATSDPLSEEKGGKKRKKQKQKLLFSTSVVHTK

SEQ ID NO: 828837 - protein, 453 aa, Homo sapiens [sequence omitted]

SEQ ID NO: 828838 - protein, 367 aa, Homo sapiens
AGGEQAGERAGSSGSARARGRAAWAVGPACDARRRSVLPVTAAAAAAPDTCGGGGDPAAGAEMWPLVAALLLGSACCGSAQLLFNKTKSVEFTFCNDTVVIPCFVTNMEAQNTTEVYVKWKFKGRDIYTFDGALNKSTVPTDFSSAKIEVSQLLKGDASLKMDKSDAVSHTGNYTCEVTELTREGETIIELKYRVVSWFSPNENILIVIFPIFAILLFWGQFGIKTLKYRSGGMDEKTIALLVAGLVITVIVIVGAILFVPGEYSLKNATGLGLIVTSTGILILLHYYVFSTAIGLTSFVIAILVIQVIAYILAVVGLSLCIAACIPMHGPLLISGLSILALAQLLGLVYMKFVASNQKTIQPPRNN

SEQ ID NO: 828839 - protein, 367 aa, Homo sapiens; identical to SEQ ID NO: 828838

SEQ ID NO: 828840 - protein, 367 aa, Homo sapiens; identical to SEQ ID NO: 828838

SEQ ID NO: 828841 - protein, 385 aa, Homo sapiens
AGGEQAGERAGSSGSARARGRAAWAVGPACDARRRSVLPVTAAAAAAPDTCGGGGDPAAGAEMWPLVAALLLGSACCGSAQLLFNKTKSVEFTFCNDTVVIPCFVTNMEAQNTTEVYVKWKFKGRDIYTFDGALNKSTVPTDFSSAKIEVSQLLKGDASLKMDKSDAVSHTGNYTCEVTELTREGETIIELKYRVVSWFSPNENILIVIFPIFAILLFWGQFGIKTLKYRSGGMDEKTIALLVAGLVITVIVIVGAILFVPGEYSLKNATGLGLIVTSTGILILLHYYVFSTAIGLTSFVIAILVIQVIAYILAVVGLSLCIAACIPMHGPLLISGLSILALAQLLGLVYMKFVASNQKTIQPPRKAVEEPLNAFKESKGMMNDE

SEQ ID NO: 828842 - protein, 374 aa, Homo sapiens
AGGEQAGERAGSSGSARARGRAAWAVGPACDARRRSVLPVTAAAAAAPDTCGGGGDPAAGAEMWPLVAALLLGSACCGSAQLLFNKTKSVEFTFCNDTVVIPCFVTNMEAQNTTEVYVKWKFKGRDIYTFDGALNKSTVPTDFSSAKIEVSQLLKGDASLKMDKSDAVSHTGNYTCEVTELTREGETIIELKYRVVSWFSPNENILIVIFPIFAILLFWGQFGIKTLKYRSGGMDEKTIALLVAGLVITVIVIVGAILFVPGEYSLKNATGLGLIVTSTGILILLHYYVFSTAIGLTSFVIAILVIQVIAYILAVVGLSLCIAACIPMHGPLLISGLSILALAQLLGLVYMKFVASNQKTIQPPRKAVEEPLNE

SEQ ID NO: 828843 - protein, 363 aa, Homo sapiens
AGGEQAGERAGSSGSARARGRAAWAVGPACDARRRSVLPVTAAAAAAPDTCGGGGDPAAGAEMWPLVAALLLGSACCGSAQLLFNKTKSVEFTFCNDTVVIPCFVTNMEAQNTTEVYVKWKFKGRDIYTFDGALNKSTVPTDFSSAKIEVSQLLKGDASLKMDKSDAVSHTGNYTCEVTELTREGETIIELKYRVVSWFSPNENILIVIFPIFAILLFWGQFGIKTLKYRSGGMDEKTIALLVAGLVITVIVIVGAILFVPGEYSLKNATGLGLIVTSTGILILLHYYVFSTAIGLTSFVIAILVIQVIAYILAVVGLSLCIAACIPMHGPLLISGLSILALAQLLGLVYMKFVGFRGTPTVS

SEQ ID NO: 828844 - protein, 367 aa, Homo sapiens
  misc_feature (326)..(326): Xaa can be any naturally occurring amino acid
  misc_feature (331)..(331): Xaa can be any naturally occurring amino acid
  misc_feature (333)..(334): Xaa can be any naturally occurring amino acid
  misc_feature (343)..(343): Xaa can be any naturally occurring amino acid
  misc_feature (352)..(353): Xaa can be any naturally occurring amino acid
  misc_feature (358)..(358): Xaa can be any naturally occurring amino acid
  misc_feature (362)..(362): Xaa can be any naturally occurring amino acid
AGGEQAGERAGSSGSARARGRAAWAVGPACDARRRSVLPVTAAAAAAPDTCGGGGDPAAGAEMWPLVAALLLGSACCGSAQLLFNKTKSVEFTFCNDTVVIPCFVTNMEAQNTTEVYVKWKFKGRDIYTFDGALNKSTVPTDFSSAKIEVSQLLKGDASLKMDKSDAVSHTGNYTCEVTELTREGETIIELKYRVVSWFSPNENILIVIFPIFAILLFWGQFGIKTLKYRSGGMDEKTIALLVAGLVITVIVIVGAILFVPGEYSLKNATGLGLIVTSTGILILLHYYVFSTAIGLTSFVIAILVIQVIAYILAVVGLSLCIAAGXPTHGXRXXPGGRVLGLXQRLGRGYRXXGAANXKTIXPPRNN

SEQ ID NO: 828845 - protein, 374 aa, Homo sapiens; identical to SEQ ID NO: 828842

SEQ ID NO: 828846 - protein, 385 aa, Homo sapiens; identical to SEQ ID NO: 828841

SEQ ID NO: 828847 - protein, 355 aa, Homo sapiens
AGGEQAGERAGSSGSARARGRAAWAVGPACDARRRSVLPVTAAAAAAPDTCGGGGDPAAGAEMWPLVAALLLGSACCGSAQLLFNKTKSVEFTFCNDTVVIPCFVTNMEAQNTTEVYVKWKFKGRDIYTFDGALNKSTVPTDFSSAKIEVSQLLKGDASLKMDKSDAVSHTGNYTCEVTELTREGETIIELKYRVVSWFSPNENILIVIFPIFAILLFWGQFGIKTLKYRSGGMDEKTIALLVAGLVITVIVIVGAILFVPGEYSLKNATGLGLIVTSTGILILLHYYVFSTAIGLTSFVIAILVIQVIAYILAVVGLSLCIAACIPMHGPLLISGLSILALAQLLGLVYMKFVE

SEQ ID NO: 828848 - protein, 355 aa, Homo sapiens; identical to SEQ ID NO: 828847

SEQ ID NO: 828849 - protein, 367 aa, Homo sapiens; identical to SEQ ID NO: 828838

SEQ ID NO: 828850 - protein, 385 aa, Homo sapiens; identical to SEQ ID NO: 828841

SEQ ID NO: 828851 - protein, 367 aa, Homo sapiens; identical to SEQ ID NO: 828838

SEQ ID NO: 828852 - protein, 367 aa, Homo sapiens; identical to SEQ ID NO: 828838

SEQ ID NO: 828853 - protein, 355 aa, Homo sapiens; identical to SEQ ID NO: 828847

SEQ ID NO: 828854 - protein, 367 aa, Homo sapiens; identical to SEQ ID NO: 828838

SEQ ID NO: 828855 - protein, 367 aa, Homo sapiens; identical to SEQ ID NO: 828838

SEQ ID NO: 828856 - protein, 367 aa, Homo sapiens; identical to SEQ ID NO: 828838

SEQ ID NO: 828857 - protein, 363 aa, Homo sapiens; identical to SEQ ID NO: 828843

SEQ ID NO: 828858 - protein, 360 aa, Homo sapiens
AGGEQAGERAGSSGSARARGRAAWAVGPACDARRRSVLPVTAAAAAAPDTCGGGGDPAAGAEMWPLVAALLLGSACCGSAQLLFNKTKSVEFTFCNDTVVIPCFVTNMEAQNTTEVYVKWKFKGRDIYTFDGALNKSTVPTDFSSAKIEVSQLLKGDASLKMDKSDAVSHTGNYTCEVTELTREGETIIELKYRVVSWFSPNENILIVIFPIFAILLFWGQFGIKTLKYRSGGMDEKTIALLVAGLVITVIVIVGAILFVPGEYSLKNATGLGLIVTSTGILILLHYYVFSTAIGLTSFVIAILVIQVIAYILAVVGLSLCIAACIPMHGPLLISGLSILALAQLLGLVYMKFVASIRRL

SEQ ID NO: 828859 - protein, 123 aa, Homo sapiens
MTEADVNPKAYPLADAHLTKKLLDLVQQSCNYKQLRKGANEATKTLNRGISEFIVMAADAEPLEIILHLPLLCEDKNVPYVFVRSKQALGRACGVSRPVIACSVTIKEGSQLETADPIHSAVH

SEQ ID NO: 828860 - protein, 123 aa, Homo sapiens; identical to SEQ ID NO: 828859

SEQ ID NO: 828861 - protein, 213 aa, Homo sapiens
MARYEAGVGGTQPCCPGTKTNSPKIRSYVEDRASWCTGWPWTSLPLAAVASLPALGGGASVSLRCWAADRPNRHAWYPRGVRQETTKTDAMTEADVNPKAYPLADAHLTKKLLDLVQQSCNYKQLRKGANEATKTLNRGISEFIVMAADAEPLEIILHLPLLCEDKNVPYVFVRSKQALGRACGVSRPVIACSVTIKEGSQLETADPIHSAVH

SEQ ID NO: 828862 - protein, 238 aa, Homo sapiens
AARGHFRCCFCEFFRCTRVLLKRQLRSPRSAEPAEPQPCCPGTKTNSPKIRSYVEDRASWCTGWPWTSLPLAAVASLPALGGGASVSLRCWAADRPNRHAWYPRGVRQETTKTDAMTEADVNPKAYPLADAHLTKKLLDLVQQSCNYKQLRKGANEATKTLNRGISEFIVMAADAEPLEIILHLPLLCEDKNVPYVFVRSKQALGRACGVSRPVIACSVTIKEGSQLETADPIHSAVH

SEQ ID NO: 828863 - protein, 127 aa, Homo sapiens
MLGYRTEADVNPKAYPLADAHLTKKLLDLVQQSCNYKQLRKGANEATKTLNRGISEFIVMAADAEPLEIILHLPLLCEDKNVPYVFVRSKQALGRACGVSRPVIACSVTIKEGSQLETADPIHSAVH

SEQ ID NO: 828864 - protein, 127 aa, Homo sapiens; identical to SEQ ID NO: 828863

SEQ ID NO: 828865 - protein, 71 aa, Homo sapiens
AARGHFRCCFCEFFRCTRVLLKRQLRSPRSAEPAEPQPWRRSPMGLRLVPAASHTRQGPRGAFGIWGLWGT

SEQ ID NO: 828866 - protein, 123 aa, Homo sapiens; identical to SEQ ID NO: 828859

SEQ ID NO: 828867 - protein, 123 aa, Homo sapiens; identical to SEQ ID NO: 828859

SEQ ID NO: 828868 - protein, 123 aa, Homo sapiens; identical to SEQ ID NO: 828859

SEQ ID NO: 828869 - protein, 123 aa, Homo sapiens; identical to SEQ ID NO: 828859

SEQ ID NO: 828870 - protein, 123 aa, Homo sapiens; identical to SEQ ID NO: 828859

SEQ ID NO: 828871 - protein, 123 aa, Homo sapiens; identical to SEQ ID NO: 828859

SEQ ID NO: 828872 - protein, 200 aa, Homo sapiens
SLGTRPGVGGTQPCCPGTKTNSPKIRSYVEDRASWCTGWPWTSLPLAAVASLPALGGGASVSLRCWAADRPNRHAWYPRGVRQETTKTDAMTEADVNPKAYPLADAHLTKKLLDLVQQSCNYKQLRKGANEASHWRSFCTCRCCVKTRMCPTCLCAPSRPWGEPVGSPGLSSPVLSPSKKARSLKQQIQSIQQSIERLLV

SEQ ID NO: 828873 - protein, 110 aa, Homo sapiens
MTEADVNPKAYPLADAHLTKKLLDLVQQSCNYKQLRKGANEASHWRSFCTCRCCVKTRMCPTCLCAPSRPWGEPVGSPGLSSPVLSPSKKARSLKQQIQSIQQSIERLLV

SEQ ID NO: 828874 - protein, 238 aa, Homo sapiens; identical to SEQ ID NO: 828862

SEQ ID NO: 828875 - protein, 123 aa, Homo sapiens; identical to SEQ ID NO: 828859

SEQ ID NO: 828876 - protein, 158 aa, Homo sapiens
LSPLCHLTVVVAGSGCGGASSAGRPLPHPSARARARSPPLPPLRTPVGYGKVQAAAGCPRAVVAAVATGPNGAAESLSGEALRVRPVQRPGPAAQPHHAGEGHCLGLQTLWLMWGVQKSQKKSFWSTSPPWGSPCSEVRPTTSLNTIVTPSATKWHSS

SEQ ID NO: 828877 - protein, 168 aa, Homo sapiens
MEPPNLYPVKLYVYDLSKGLARRLSPIMLGKQLEGIWHTSIVVHKDEFFFGSGGISSCPPGGTLLGPPDSVVDVGSTEVTEEIFLEYLSSLGESLFRGEAYNLFEHNCNTFSNEVAQFLTGRKIPSYITDLPSEVLSTPFGQALRPLLDSIQIQPPGGSSVGRPNGQS

SEQ ID NO: 828878 - protein, 168 aa, Homo sapiens; identical to SEQ ID NO: 828877

SEQ ID NO: 828879 - protein, 168 aa, Homo sapiens; identical to SEQ ID NO: 828877

SEQ ID NO: 828880 - protein, 143 aa, Homo sapiens
FSGLLCLSLCDRHTSIVVHKDEFFFGSGGISSCPPGGTLLGPPDSVVDVGSTEVTEEIFLEYLSSLGESLFRGEAYNLFEHNCNTFSNEVAQFLTGRKIPSYITDLPSEVLSTPFGQALRPLLDSIQIQPPGGSSVGRPNGQS

SEQ ID NO: 828881 - protein, 158 aa, Homo sapiens; identical to SEQ ID NO: 828876

SEQ ID NO: 828882 - protein, 168 aa, Homo sapiens; identical to SEQ ID NO: 828877

SEQ ID NO: 828883 - protein, 168 aa, Homo sapiens; identical to SEQ ID NO: 828877

SEQ ID NO: 828884 - protein, 120 aa, Homo sapiens
QVSQAQQGGLFFISEEAPPRKSLHRKQDCCGRLALWTGTSAPPGLHSDPASRRELRGQTQRPELTGLPGTALPHQGFSFLNKTNPTRFLFYNFTSELTTRGRLFKFPREGDRQAACRQCC

SEQ ID NO: 828885 - protein, 168 aa, Homo sapiens; identical to SEQ ID NO: 828877

SEQ ID NO: 828886 - protein, 168 aa, Homo sapiens; identical to SEQ ID NO: 828877

SEQ ID NO: 828887 - protein, 168 aa, Homo sapiens; identical to SEQ ID NO: 828877

SEQ ID NO: 828888 - protein, 138 aa, Homo sapiens
MEPPNLYPVKLYVYDLSKGLARRLSPIMLGKQLEGIWHTSIVVHKDEFFFGSGGISSCPPGGTLLGPPDSVVDVGSTEVTEEIFLEYLSSLGESLFRGEAYNLFEHNCNTFSNEVAQFLTGRKIPSYITDLPSEVLST

SEQ ID NO: 828889 - protein, 116 aa, Homo sapiens
LSPLCHLTVVVAGSGCGGASSAGRPLPHPSARARARSPPLPPLRTPVGYGKVQAAAGCPRAVVAAVATGPNGAAESLSGEALRVRPVQRPGPAAQPHHAGETTGRHLAHIHSCAQG

SEQ ID NO: 828890 - protein, 106 aa, Homo sapiens
MASREAPRQSVEGKRRIKGEGSTLVCIFQSLPAQSPGLHLCLRSCSPSHSQTFPKPPDVPQYKPGPSRPHPAGLFSSVFLLFSPFLQNTHTHTHTLLSCKNTHIPF

SEQ ID NO: 828891 - protein, 184 aa, Homo sapiens
CVPGPRPSGVSCADRSEGSWPTAPSRSLPPPSTLSVVEKMVGRNSAIAAGVCGALFIGYCIYFDRKRRSDPNFKNRLRERRKKQKLAKERAGLSKLPDLKDAEAVQKFFLEEIQLGEELLAQGEYEKGVDHLTNAIAVCGQPQQLLQVLQQTLPPPVFQMLLTKLPTISQRIVSAQSLAEDDVE

SEQ ID NO: 828892 - protein, 4027 aa, Homo sapiens
MHNTVVLFSSSDKFTLNQDMCVVCGSFGQGAEGRLLACSQCGQCYHPYCVSIKITKVVLSKGWRCLECTVCEACGKATDPGRLLLCDDCDISYHTYCLDPPLQTVPKGGWKCKWCVWCRHCGATSAGLRCEWQNNYTQCAPCASLSSCPVCYRNYREEDLILQCRQCDRWMHAVCQNLNTEEEVENVADIGFDCSMCRPYMPASNVPSSDCCESSLVAQIVTKVKELDPPKTYTQDGVCLTESGMTQLQSLTVTVPRRKRSKPKLKLKIINQNSVAVLQTPPDIQSEHSRDGEMDDSREGELMDCDGKSESSPEREAVDDETKGVEGTDGVKKRKRKPYRPGIGGFMVRQRSRTGQGKTKRSVIRKDSSGSISEQLPCRDDGWSEQLPDTLVDESVSVTESTEKIKKRYRKRKNKLEETFPAYLQEAFFGKDLLDTSRQSKISLDNLSEDGAQLLYKTNMNTGFLDPSLDPLLSSSSAPTKSGTHGPADDPLADISEVLNTDDDILGIISDDLAKSVDHSDIGPVTDDPSSLPQPNVNQSSRPLSEEQLDGILSPELDKMVTDGAILGKLYKIPELGGKDVEDLFTAVLSPANTQPTPLPQPPPPTQLLPIHNQDAFSRMPLMNGLIGSSPHLPHNSLPPGSGLGTFSAIAQSSYPDARDKNSAFNPMASDPNNSWTSSAPTVEGENDTMSNAQRSTLKWEKEEALGEMATVAPVLYTNINFPNLKEEFPDWTTRVKQIAKLWRKASSQERAPYVQKARDNRAALRINKVQMSNDSMKRQQQQDSIDPSSRIDSELFKDPLKQRESEHEQEWKFRQQMRQKSKQQAKIEATQKLEQVKNEQQQQQQQQFGSQHLLVQSGSDTPSSGIQSPLTPQPGNGNMSPAQSFHKELFTKQPPSTPTSTSSDDVFVKPQAPPPPPAPSRIPIQDSLSQAQTSQPPSPQVFSPGSSNSRPPSPMDPYAKMVGTPRPPPVGHSFSRRNSAAPVENCTPLSSVSRPLQMNETTANRPSPVRDLCSSSTTNNDPYAKPPDTPRPVMTDQFPKSLGLSRSPVVSEQTAKGPIAAGTSDHFTKPSPRADVFQRQRIPDSYARPLLTPAPLDSGPGPFKTPMQPPPSSQDPYGSVSQASRRLSVDPYERPALTPRPIDNFSHNQSNDPYSQPPLTPHPAVNESFAHPSRAFSQPGTISRPTSQDPYSQPPGTPRPVVDSYSQSSGTARSNTDPYSQPPGTPRPTTVDPYSQQPQTPRPSTQTDLFVTPVTNQRHSDPYAHPPGTPRPGISVPYSQPPATPRPRISEGFTRSSMTRPVLMPNQDPFLQAAQNRGPALPGPLVRPPDTCSQTPRPPGPGLSDTFSRVSPSAARDPYDQSPMTPRSQSDSFGTSQTAHDVADQPRPGSEGSFCASSNSPMHSQGQQFSGVSQLPGPVPTSGVTDTQNTVNMAQADTEKLRQRQKLREIILQQQQQKKIAGRQEKGSQDSPAVPHPGPLQHWQPENVNQAFTRPPPPYPGNIRSPVAPPLGPRYAVFPKDQRGPYPPDVASMGMRPHGFRFGFPGGSHGTMPSQERFLVPPQQIQGSGVSPQLRRSVSVDMPRPLNNSQMNNPVGLPQHFSPQSLPVQQHNILGQAYIELRHRAPDGRQRLPFSAPPGSVVEASSNLRHGNFIPRPDFPGPRHTDPMRRPPQGLPNQLPVHPDLEQVPPSQQEQGHSVHSSSMVMRTLNHPLGGEFSEAPLSTSVPSETTSDNLQITTQPSDGLEEKLDSDDPSVKELDVKDLEGVEVKDLDDEDLENLNLDTEDGKVVELDTLDNLETNDPNLDDLLRSGEFDIIAYTDPELDMGDKKSMFNEELDLPIDDKLDNQCVSVEPKKKEQENKTLVLSDKHSPQKKSTVTNEVKTEVLSPNSKVESKCETEKNDENKDNVDTPCSQASAHSDLNDGEKTSLHPCDPDLFEKRTNRETAGPSANVIQASTQLPAQDVINSCGITGSTPVLSSLLANEKSDNSDIRPSGSPPPPTLPASPSNHVSSLPPFIAPPGRVLDNAMNSNVTVVSRVNHVFSQGVQVNPGLIPGQSTVNHSLGTGKPATQTGPQTSQSGTSSMSGPQQLMIPQTLAQQNRERPLLLEEQPLLLQDLLDQERQEQQQQRQMQAMIRQRSEPFFPNIDFDAITDPIMKAKMVALKGINKVMAQNNLGMPPMVMSRFPFMGQVVTGTQNSEGQNLGPQAIPQDGSITHQISRPNPPNFGPGFVNDSQRKQYEEWLQETQQLLQMQQKYLEEQIGAHRKSKKALSAKQRTAKKAGREFPEEDAEQLKHVTEQQSMVQKQLEQIRKQQKEHAELIEDYRIKQQQQCAMAPPTMMPSVQPQPPLIPGATPPTMSQPTFPMVPQQLQHQQHTTVISGHTSPVRMPSLPGWQPNSAPAHLPLNPPRIQPPIAQLPIKTCTPAPGTVSNANPQSGPPPRVEFDDNNPFSESFQERERKERLREQQERQRIQLMQEVDRQRALQQRMEMEQHGMVGSEISSSRTSVSQIPFYSSDLPCDFMQPLGPLQQSPQHQQQMGQVLQQQNIQQGSINSPSTQTFMQTNERRQVGPPSFVPDSPSIPVGSPNFSSVKQGHGNLSGTSFQQSPVRPSFTPALPAAPPVANSSLPCGQDSTITHGHSYPGSTQSLIQLYSDIIPEEKGKKKRTRKKKRDDDAESTKAPSTPHSDITAPPTPGISETTSTPAVSTPSELPQQADQESVEPVGPSTPNMAAGQLCTELENKLPNSDFSQATPNQQTYANSEVDKLSMETPAKTEEIKLEKAETESCPGQEEPKLEEQNGSKVEGNAVACPVSSAQSPPHSAGAPAAKGDSGNELLKHLLKNKKSSSLLNQKPEGSICSEDDCTKDNKLVEKQNPAEGLQTLGAQMQGGFGCGNQLPKTDGGSETKKQRSKRTQRTGEKAAPRSKKRKKDEEEKQAMYSSTDTFTHLKQQLSLLPLMEPIIGVNFAHFLPYGSGQFNSGNRLLGTFGSATLEGVSDYYSQLIYKQNNLSNPPTPPASLPPTPPPMACQKMANGFATTEELAGKAGVLVSHEVTKTLGPKPFQLPFRPQDDLLARALAQGPKTVDVPASLPTPPHNNQEELRIQDHCGDRDTPDSFVPSSSPESVVGVEVSRYPDLSLVKEEPPEPVPSPIIPILPSTAGKSSESRRNDIKTEPGTLYFASPFGPSPNGPRSGLISVAITLHPTAAENISSVVAAFSDLLHVRIPNSYEVSSAPDVPSMGLVSSHRINPGLEYRQHLLLRGPPPGSANPPRLVSSYRLKQPNVPFPPTSNGLSGYKDSSHGIAESAALRPQWCCHCKVVILGSGVRKSFKDLTLLNKDSRESTKRVEKDIVFCSNNCFILYSSTAQAKNSENKESIPSLPQSPMRETPSKAFHQYSNNISTLDVHCLPQLPEKASPPASPPIAFPPAFEAAQVEAKPDELKVTVKLKPRLRAVHGGFEDCRPLNKKWRGMKWKKWSIHIVIPKGTFKPPCEDEIDEFLKKLGTSLKPDPVPKDYRKCCFCHEEGDGLTDGPARLLNLDLDLWVHLNCALWSTEVYETQAGALINVELALRRGLQMKCVFCHKTGATSGCHRFRCTNIYHFTCAIKAQCMFFKDKTMLCPMHKPKGIHEQELSYFAVFRRVYVQRDEVRQIASIVQRGERDHTFRVGSLIFHTIGQLLPQQMQAFHSPKALFPVGYEASRLYWSTRYANRRCRYLCSIEEKDGRPVFVIRIVEQGHEDLVLSDISPKGVWDKILEPVACVRKKSEMLQLFPAYLKGEDLFGLTVSAVARIAESLPGVEACENYTFRYGRNPLMELPLAVNPTGCARSEPKMSAHVKRFVLRPHTLNSTSTSKSFQSTVTGELNAPYSKQFVHSKSSQYRKMKTEWKSNVYLARSRIQGLGLYAARDIEKHTMVIEYIGTIIRNEVANRKEKLYESQNRGVYMFRMDNDHVIDATLTGGPARYINHSCAPNCVAEVVTFERGHKIIISSSRRIQKGEELCYDYKFDFEDDQHKIPCHCGAVNCRKWMN

SEQ ID NO: 828893 - protein, 4027 aa, Homo sapiens; identical to SEQ ID NO: 828892

SEQ ID NO: 828894 - protein, 4027 aa, Homo sapiens; identical to SEQ ID NO: 828892

SEQ ID NO: 828895 - protein, 4027 aa, Homo sapiens; identical to SEQ ID NO: 828892

SEQ ID NO: 828896 - protein, 4027 aa, Homo sapiens; identical to SEQ ID NO: 828892

SEQ ID NO: 828897 - protein, 4027 aa, Homo sapiens; identical to SEQ ID NO: 828892

SEQ ID NO: 828898 - protein, 4027 aa, Homo sapiens; identical to SEQ ID NO: 828892

SEQ ID NO: 828899 - protein, 4367 aa, Homo sapiens
MDRLQPGEEVEIAELTTDYNNEMEVEGPEDQMVFSEQAANKDVNGQESTPGIVPDAVQVHTEEQQKSHPSESLDTDSLLIAVSSQHTVNTELEKQISNEVDSEDLKMSSEVKHICGEDQIEDKMEVTENIEVVTHQITVQQEQLQLLEEPETVVSREESRPPKLVMESVTLPLETLVSPHEESISLCPEEQLVIERLQGEKEQKENSELSTGLMDSEMTPTIEGCVKDVSYQGGKSIKLSSETESSFSSSADISKADVSSSPTPSSDLPSHDMLHNYPSALSSSAGNIMPTTYISVTPKIGMGKPAITKRKFSPGRPRSKQGAWSTHNTVSPPSWSPDISEGREIFKPRQLPGSAIWSIKVGRGSGFPGKRRPRGAGLSGRGGRGRSKLKSGIGAVVLPGVSTADISSNKDDEENSMHNTVVLFSSSDKFTLNQDMCVVCGSFGQGAEGRLLACSQCGQCYHPYCVSIKITKVVLSKGWRCLECTVCEACGKATDPGRLLLCDDCDISYHTYCLDPPLQTVPKGGWKCKWCVWCRHCGATSAGLRCEWQNNYTQCAPCASLSSCPVCYRNYREEDLILQCRQCDRWMHAVCQNLNTEEEVENVADIGFDCSMCRPYMPASNVPSSDCCESSLVAQIVTKVKELDPPKTYTQDGVCLTESGMTQLQSLTVTVPRRKRSKPKLKLKIINQNSVAVLQTPPDIQSEHSRDGEMDDSREGELMDCDGKSESSPEREAVDDETKGVEGTDGVKKRKRKPYRPGIGGFMVRQRSRTGQGKTKRSVIRKDSSGSISEQLPCRDDGWSEQLPDTLVDESVSVTESTEKIKKRYRKRKNKLEETFPAYLQEAFFGKDLLDTSRQSKISLDNLSEDGAQLLYKTNMNTGFLDPSLDPLLSSSSAPTKSGTHGPADDPLADISEVLNTDDDILGIISDDLAKSVDHSDIGPVTDDPSSLPQPNVNQSSRPLSEEQLDGILSPELDKMVTDGAILGKLYKIPELGGKDVEDLFTAVLSPANTQPTPLPQPPPPTQLLPIHNQDAFSRMPLMNGLIGSSPHLPHNSLPPGSGLGTFSAIAQSSYPDARDKNSAFNPMASDPNNSWTSSAPTVEGENDTMSNAQRSTLKWEKEEALGEMATVAPVLYTNINFPNLKEEFPDWTTRVKQIAKLWRKASSQERAPYVQKARDNRAALRINKVQMSNDSMKRQQQQDSIDPSSRIDSELFKDPLKQRESEHEQEWKFRQQMRQKSKQQAKIEATQKLEQVKNEQQQQQQQQFGSQHLLVQSGSDTPSSGIQSPLTPQPGNGNMSPAQSFHKELFTKQPPSTPTSTSSDDVFVKPQAPPPPPAPSRIPIQDSLSQAQTSQPPSPQVFSPGSSNSRPPSPMDPYAKMVGTPRPPPVGHSFSRRNSAAPVENCTPLSSVSRPLQMNETTANRPSPVRDLCSSSTTNNDPYAKPPDTPRPVMTDQFPKSLGLSRSPVVSEQTAKGPIAAGTSDHFTKPSPRADVFQRQRIPDSYARPLLTPAPLDSGPGPFKTPMQPPPSSQDPYGSVSQASRRLSVDPYERPALTPRPIDNFSHNQSNDPYSQPPLTPHPAVNESFAHPSRAFSQPGTISRPTSQDPYSQPPGTPRPVVDSYSQSSGTARSNTDPYSQPPGTPRPTTVDPYSQQPQTPRPSTQTDLFVTPVTNQRHSDPYAHPPGTPRPGISVPYSQPPATPRPRISEGFTRSSMTRPVLMPNQDPFLQAAQNRGPALPGPLVRPPDTCSQTPRPPGPGLSDTFSRVSPSAARDPYDQSPMTPRSQSDSFGTSQTAHDVADQPRPGSEGSFCASSNSPMHSQGQQFSGVSQLPGPVPTSGVTDTQNTVNMAQADTEKLRQRQKLREIILQQQQQKKIAGRQEKGSQDSPAVPHPGPLQHWQPENVNQAFTRPPPPYPGNIRSPVAPPLGPRYAVFPKDQRGPYPPDVASMGMRPHGFRFGFPGGSHGTMPSQERFLVPPQQIQGSGVSPQLRRSVSVDMPRPLNNSQMNNPVGLPQHFSPQSLPVQQHNILGQAYIELRHRAPDGRQRLPFSAPPGSVVEASSNLRHGNFIPRPDFPGPRHTDPMRRPPQGLPNQLPVHPDLEQVPPSQQEQGHSVHSSSMVMRTLNHPLGGEFSEAPLSTSVPSETTSDNLQITTQPSDGLEEKLDSDDPSVKELDVKDLEGVEVKDLDDEDLENLNLDTEDGKVVELDTLDNLETNDPNLDDLLRSGEFDIIAYTDPELDMGDKKSMFNEELDLPIDDKLDNQCVSVEPKKKEQENKTLVLSDKHSPQKKSTVTNEVKTEVLSPNSKVESKCETEKNDENKDNVDTPCSQASAHSDLNDGEKTSLHPCDPDLFEKRTNRETAGPSANVIQASTQLPAQDVINSCGITGSTPVLSSLLANEKSDNSDIRPSGSPPPPTLPASPSNHVSSLPPFIAPPGRVLDNAMNSNVTVVSRVNHVFSQGVQVNPGLIPGQSTVNHSLGTGKPATQTGPQTSQSGTSSMSGPQQLMIPQTLAQQNRERPLLLEEQPLLLQDLLDQERQEQQQQRQMQAMIRQRSEPFFPNIDFDAITDPIMKAKMVALKGINKVMAQNNLGMPPMVMSRFPFMGQVVTGTQNSEGQNLGPQAIPQDGSITHQISRPNPPNFGPGFVNDSQRKQYEEWLQETQQLLQMQQKYLEEQIGAHRKSKKALSAKQRTAKKAGREFPEEDAEQLKHVTEQQSMVQKQLEQIRKQQKEHAELIEDYRIKQQQQCAMAPPTMMPSVQPQPPLIPGATPPTMSQPTFPMVPQQLQHQQHTTVISGHTSPVRMPSLPGWQPNSAPAHLPLNPPRIQPPIAQLPIKTCTPAPGTVSNANPQSGPPPRVEFDDNNPFSESFQERERKERLREQQERQRIQLMQEVDRQRALQQRMEMEQHGMVGSEISSSRTSVSQIPFYSSDLPCDFMQPLGPLQQSPQHQQQMGQVLQQQNIQQGSINSPSTQTFMQTNERRQVGPPSFVPDSPSIPVGSPNFSSVKQGHGNLSGTSFQQSPVRPSFTPALPAAPPVANSSLPCGQDSTITHGHSYPGSTQSLIQLYSDIIPEEKGKKKRTRKKKRDDDAESTKAPSTPHSDITAPPTPGISETTSTPAVSTPSELPQQADQESVEPVGPSTPNMAAGQLCTELENKLPNSDFSQATPNQQTYANSEVDKLSMETPAKTEEIKLEKAETESCPGQEEPKLEEQNGSKVEGNAVACPVSSAQSPPHSAGAPAAKGDSGNELLKHLLKNKKSSSLLNQKPEGSICSEDDCTKDNKLVEKQNPAEGLQTLGAQMQGGFGCGNQLPKTDGGSETKKQRSKRTQRTGEKAAPRSKKRKKDEEEKQAMYSSTDTFTHLKQQLSLLPLMEPIIGVNFAHFLPYGSGQFNSGNRLLGTFGSATLEGVSDYYSQLIYKQNNLSNPPTPPASLPPTPPPMACQKMANGFATTEELAGKAGVLVSHEVTKTLGPKPFQLPFRPQDDLLARALAQGPKTVDVPASLPTPPHNNQEELRIQDHCGDRDTPDSFVPSSSPESVVGVEVSRYPDLSLVKEEPPEPVPSPIIPILPSTAGKSSESRRNDIKTEPGTLYFASPFGPSPNGPRSGLISVAITLHPTAAENISSVVAAFSDLLHVRIPNSYEVSSAPDVPSMGLVSSHRINPGLEYRQHLLLRGPPPGSANPPRLVSSYRLKQPNVPFPPTSNGLSGYKDSSHGIAESAALRPQWCCHCKVVILGSGVRKSFKDLTLLNKDSRESTKRVEKDIVFCSNNCFILYSSTAQAKNSENKESIPSLPQSPMRETPSKAFHQYSNNISTLDVHCLPQLPEKASPPASPPIAFPPAFEAAQVEAKPDELKVTVKLKPRLRAVHGGFEDCRPLNKKWRGMKWKKWSIHIVIPKGTFKPPCEDEIDEFLKKLGTSLKPDPVPKDYRKCCFCHEEGDGLTDGPARLLNLDLDLWVHLNCALWSTEVYETQAGALINVELALRRGLQMKCVFCHKTGATSGCHRFRCTNIYHFTCAIKAQCMFFKDKTMLCPMHKPKGIHEQELSYFAVFRRVYVQRDEVRQIASIVQRGERDHTFRVGSLIFHTIGQLLPQQMQAFHSPKALFPVGYEASRLYWSTRYANRRCRYLCSIEEKDGRPVFVIRIVEQGHEDLVLSDISPKGVWDKILEPVACVRKKSEMLQLFPAYLKGEDLFGLTVSAVARIAESLPGVEACENYTFRYGRNPLMELPLAVNPTGCARSEPKMSAHVKRFVLRPHTLNSTSTSKSFQSTVTGELNAPYSKQFVHSKSSQYRKMKTEWKSNVYLARSRIQGLGLYAARDIEKHTMVIEYIGTIIRNEVANRKEKLYESQNRGVYMFRMDNDHVI

SEQ ID NO: 828900 - protein, 4260 aa, Homo sapiens
LGAEMDRLQPGEEVEIAELTTDYNNEMEVEGPEDQMVFSEQAANKDVNGQESTPGIVPDAVQVHTEEQQKSHPSESLDTDSLLIAVSSQHTVNTELEKQISNEVDSEDLKMSSEVKHICGEDQIEDKMEVTENIEVVTHQITVQQEQLQLLEEPETVVSREESRPPKLVMESVTLPLETLVSPHEESISLCPEEQLVIERLQGEKEQKENSELSTGLMDSEMTPTIEGCVKDVSYQGGKSIKLSSETESSFSSSADISKADVSSSPTPSSDLPSHDMLHNYPSALSSSAGNIMPTTYISVTPKIGMGKPAITKRKFSPGRPRSKQGAWSTHNTVSPPSWSPDISEGREIFKPRQLPGSAIWSIKVGRGSGFPGKRRPRGAGLSGRGGRGRSKLKSGIGAVVLPGVSTADISSNKDDEENSMHNTVVLFSSSDKFTLNQDMCVVCGSFGQGAEGRLLACSQCGQCYHPYCVSIKITKVVLSKGWRCLECTVCEACGKATDPGRLLLCDDCDISYHTYCLDPPLQTVPKGGWKCKWCVWCRHCGATSAGLRCEWQNNYTQCAPCASLSSCPVCYRNYREEDLILQCRQCDRWMHAVCQNLNTEEEVENVADIGFDCSMCRPYMPASNVPSSDCCESSLVAQIVTKVKELDPPKTYTQDGVCLTESGMTQLQSLTVTVPRRKRSKPKLKLKIINQNSVAVLQTPPDIQSEHSRDGEMDDSREGELMDCDGKSESSPEREAVDDETKGVEGTDGVKKRKRKPYRPGIGGFMVRQRSRTGQGKTKRSVIRKDSSGSISEQLPCRDDGWSEQLPDTLVDESVSVTESTEKIKKRYRKRKNKLEETFPAYLQEAFFGKDLLDTSRQSKISLDNLSEDGAQLLYKTNMNTGFLDPSLDPLLSSSSAPTKSGTHGPADDPLADISEVLNTDDDILGIISDDLAKSVDHSDIGPVTDDPSSLPQPNVNQSSRPLSEEQLDGILSPELDKMVTDGAILGKLYKIPELGGKDVEDLFTAVLSPANTQPTPLPQPPPPTQLLPIHNQDAFSRMPLMNGLIGSSPHLPHNSLPPGSGLGTFSAIAQSSYPDARDKNSAFNPMASDPNNSWTSSAPTVEGENDTMSNAQRSTLKWEKEEALGEMATVAPVLYTNINFPNLKEEFPDWTTRVKQIAKLWRKASSQERAPYVQKARDNRAALRINKVQMSNDSMKRQQQQDSIDPSSRIDSELFKDPLKQRESEHEQEWKFRQQMRQKSKQQAKIEATQKLEQVKNEQQQQQQQQFGSQHLLVQSGSDTPSSGIQSPLTPQPGNGNMSPAQSFHKELFTKQPPSTPTSTSSDDVFVKPQAPPPPPAPSRIPIQDSLSQAQTSQPPSPQVFSPGSSNSRPPSPMDPYAKMVGTPRPPPVGHSFSRRNSAAPVENCTPLSSVSRPLQMNETTANRPSPVRDLCSSSTTNNDPYAKPPDTPRPVMTDQFPKSLGLSRSPVVSEQTAKGPIAAGTSDHFTKPSPRADVFQRQRIPDSYARPLLTPAPLDSGPGPFKTPMQPPPSSQDPYGSVSQASRRLSVDPYERPALTPRPIDNFSHNQSNDPYSQPPLTPHPAVNESFAHPSRAFSQPGTISRPTSQDPYSQPPGTPRPVVDSYSQSSGTARSNTDPYSQPPGTPRPTTVDPYSQQPQTPRPSTQTDLFVTPVTNQRHSDPYAHPPGTPRPGISVPYSQPPATPRPRISEGFTRSSMTRPVLMPNQDPFLQAAQNRGPALPGPLVRPPDTCSQTPRPPGPGLSDTFSRVSPSAARDPYDQSPMTPRSQSDSFGTSQTAHDVADQPRPGSEGSFCASSNSPMHSQGQQFSGVSQLPGPVPTSGVTDTQNTVNMAQADTEKLRQRQKLREIILQQQQQKKIAGRQEKGSQDSPAVPHPGPLQHWQPENVNQAFTRPPPPYPGNIRSPVAPPLGPRYAVFPKDQRGPYPPDVASMGMRPHGFRFGFPGGSHGTMPSQERFLVPPQQIQGSGVSPQLRRSVSVDMPRPLNNSQMNNPVGLPQHFSPQSLPVQQHNILGQAYIELRHRAPDGRQRLPFSAPPGSVVEASSNLRHGNFIPRPDFPGPRHTDPMRRPPQGLPNQLPVHPDLEQVPPSQQEQGHSVHSSSMVMRTLNHPLGGEFSEAPLSTSVPSETTSDNLQITTQPSDGLEEKLDSDDPSVKELDVKDLEGVEVKDLDDEDLENLNLDTEDGKVVELDTLDNLETNDPNLDDLLRSGEFDIIAYTDPELDMGDKKSMFNEELDLPIDDKLDNQCVSVEPKKKEQENKTLVLSDKHSPQKKSTVTNEVKTEVLSPNSKVESKCETEKNDENKDNVDTPCSQASAHSDLNDGEKTSLHPCDPDLFEKRTNRETAGPSANVIQASTQLPAQDVINSCGITGSTPVLSSLLANEKSDNSDIRPSGSPPPPTLPASPSNHVSSLPPFIAPPGRVLDNAMNSNVTVVSRVNHVFSQGVQVNPGLIPGQSTVNHSLGTGKPATQTGPQTSQSGTSSMSGPQQLMIPQTLAQQNRERPLLLEEQPLLLQDLLDQERQEQQQQRQMQAMIRQRSEPFFPNIDFDAITDPIMKAKMVALKGINKVMAQNNLGMPPMVMSRFPFMGQVVTGTQNSEGQNLGPQAIPQDGSITHQISRPNPPNFGPGFVNDSQRKQYEEWLQETQQLLQMQQKYLEEQIGAHRKSKKALSAKQRTAKKAGREFPEEDAEQLKHVTEQQSMVQKQLEQIRKQQKEHAELIEDYRIKQQQQCAMAPPTMMPSVQPQPPLIPGATPPTMSQPTFPMVPQQLQHQQHTTVISGHTSPVRMPSLPGWQPNSAPAHLPLNPPRIQPPIAQLPIKTCTPAPGTVSNANPQSGPPPRVEFDDNNPFSESFQERERKERLREQQERQRIQLMQEVDRQRALQQRMEMEQHGMVGSEISSSRTSVSQIPFYSSDLPCDFMQPLGPLQQSPQHQQQMGQVLQQQNIQQGSINSPSTQTFMQTNERRQVGPPSFVPDSPSIPVGSPNFSSVKQGHGNLSGTSFQQSPVRPSFTPALPAAPPVANSSLPCGQDSTITHGHSYPGSTQSLIQLYSDIIPEEKGKKKRTRKKKRDDDAESTKAPSTPHSDITAPPTPGISETTSTPAVSTPSELPQQADQESVEPVGPSTPNMAAGQLCTELENKLPNSDFSQATPNQQTYANSEVDKLSMETPAKTEEIKLEKAETESCPGQEEPKLEEQNGSKVEGNAVACPVSSAQSPPHSAGAPAAKGDSGNELLKHLLKNKKSSSLLNQKPEGSICSEDDCTKDNKLVEKQNPAEGLQTLGAQMQGGFGCGNQLPKTDGGSETKKQRSKRTQRTGEKAAPRSKKRKKDEEEKQAMYSSTDTFTHLKQQLSLLPLMEPIIGVNFAHFLPYGSGQFNSGNRLLGTFGSATLEGVSDYYSQLIYKQNNLSNPPTPPASLPPTPPPMACQKMANGFATTEELAGKAGVLVSHEVTKTLGPKPFQLPFRPQDDLLARALAQGPKTVDVPASLPTPPHNNQEELRIQDHCGDRDTPDSFVPSSSPESVVGVEVSRYPDLSLVKEEPPEPVPSPIIPILPSTAGKSSESRRNDIKTEPGTLYFASPFGPSPNGPRSGLISVAITLHPTAAENISSVVAAFSDLLHVRIPNSYEVSSAPDVPSMGLVSSHRINPGLEYRQHLLLRGPPPGSANPPRLVSSYRLKQPNVPFPPTSNGLSGYKDSSHGIAESAALRPQWCCHCKVVILGSGVRKSFKDLTLLNKDSRESTKRVEKDIVFCSNNCFILYSSTAQAKNSENKESIPSLPQSPMRETPSKAFHQYSNNISTLDVHCLPQLPEKASPPASPPIAFPPAFEAAQVEAKPDELKVTVKLKPRLRAVHGGFEDCRPLNKKWRGMKWKKWSIHIVIPKGTFKPPCEDEIDEFLKKLGTSLKPDPVPKDYRKCCFCHEEGDGLTDGPARLLNLDLDLWVHLNCALWSTEVYETQAGALINVELALRRGLQMKCVFCHKTGATSGCHRFRCTNIYHFTCAIKAQCMFFKDKTMLCPMHKPKGIHEQELSYFAVFRRVYVQRDEVRQIASIVQRGERDHTFRVGSLIFHTIGQLLPQQMQAFHSPKALFPVGYEASRLYWSTRYANRRCRYLCSIEEKDGRPVFVIRIVEQGHEDLVLSDISPKGVWDKILEPVACVRKKSEMLQLFPAYLKGEDLFGLTVSAVARIAESLPGVEACENYTFRYGRNPLMELPLAVNPTGCARSEPQSHFRAQSLEN

SEQ ID NO: 828901 - protein, 2665 aa, Homo sapiens
GACARKGGGSEQINFSDAHDVADQPRPGSEGSFCASSNSPMHSQGQQFSGVSQLPGPVPTSGVTDTQNTVNMAQADTEKLRQRQKLREIILQQQQQKKIAGRQEKGSQDSPAVPHPGPLQHWQPENVNQAFTRPPPPYPGNIRSPVAPPLGPRYAVFPKDQRGPYPPDVASMGMRPHGFRFGFPGGSHGTMPSQERFLVPPQQIQGSGVSPQLRRSVSVDMPRPLNNSQMNNPVGLPQHFSPQSLPVQQHNILGQAYIELRHRAPDGRQRLPFSAPPGSVVEASSNLRHGNFIPRPDFPGPRHTDPMRRPPQGLPNQLPVHPDLEQVPPSQQEQGHSVHSSSMVMRTLNHPLGGEFSEAPLSTSVPSETTSDNLQITTQPSDGLEEKLDSDDPSVKELDVKDLEGVEVKDLDDEDLENLNLDTEDGKVVELDTLDNLETNDPNLDDLLRSGEFDIIAYTDPELDMGDKKSMFNEELDLPIDDKLDNQCVSVEPKKKEQENKTLVLSDKHSPQKKSTVTNEVKTEVLSPNSKVESKCETEKNDENKDNVDTPCSQASAHSDLNDGEKTSLHPCDPDLFEKRTNRETAGPSANVIQASTQLPAQDVINSCGITGSTPVLSSLLANEKSDNSDIRPSGSPPPPTLPASPSNHVSSLPPFIAPPGRVLDNAMNSNVTVVSRVNHVFSQGVQVNPGLIPGQSTVNHSLGTGKPATQTGPQTSQSGTSSMSGPQQLMIPQTLAQQNRERPLLLEEQPLLLQDLLDQERQEQQQQRQMQAMIRQRSEPFFPNIDFDAITDPIMKAKMVALKGINKVMAQNNLGMPPMVMSRFPFMGQVVTGTQNSEGQNLGPQAIPQDGSITHQISRPNPPNFGPGFVNDSQRKQYEEWLQETQQLLQMQQKYLEEQIGAHRKSKKALSAKQRTAKKAGREFPEEDAEQLKHVTEQQSMVQKQLEQIRKQQKEHAELIEDYRIKQQQQCAMAPPTMMPSVQPQPPLIPGATPPTMSQPTFPMVPQQLQHQQHTTVISGHTSPVRMPSLPGWQPNSAPAHLPLNPPRIQPPIAQLPIKTCTPAPGTVSNANPQSGPPPRVEFDDNNPFSESFQERERKERLREQQERQRIQLMQEVDRQRALQQRMEMEQHGMVGSEISSSRTSVSQIPFYSSDLPCDFMQPLGPLQQSPQHQQQMGQVLQQQNIQQGSINSPSTQTFMQTNERRQVGPPSFVPDSPSIPVGSPNFSSVKQGHGNLSGTSFQQSPVRPSFTPALPAAPPVANSSLPCGQDSTITHGHSYPGSTQSLIQLYSDIIPEEKGKKKRTRKKKRDDDAESTKAPSTPHSDITAPPTPGISETTSTPAVSTPSELPQQADQESVEPVGPSTPNMAAGQLCTELENKLPNSDFSQATPNQQTYANSEVDKLSMETPAKTEEIKLEKAETESCPGQEEPKLEEQNGSKVEGNAVACPVSSAQSPPHSAGAPAAKGDSGNELLKHLLKNKKSSSLLNQKPEGSICSEDDCTKDNKLVEKQNPAEGLQTLGAQMQGGFGCGNQLPKTDGGSETKKQRSKRTQRTGEKAAPRSKKRKKDEEEKQAMYSSTDTFTHLKQQLSLLPLMEPIIGVNFAHFLPYGSGQFNSGNRLLGTFGSATLEGVSDYYSQLIYKQNNLSNPPTPPASLPPTPPPMACQKMANGFATTEELAGKAGVLVSHEVTKTLGPKPFQLPFRPQDDLLARALAQGPKTVDVPASLPTPPHNNQEELRIQDHCGDRDTPDSFVPSSSPESVVGVEVSRYPDLSLVKEEPPEPVPSPIIPILPSTAGKSSESRRNDIKTEPGTLYFASPFGPSPNGPRSGLISVAITLHPTAAENISSVVAAFSDLLHVRIPNSYEVSSAPDVPSMGLVSSHRINPGLEYRQHLLLRGPPPGSANPPRLVSSYRLKQPNVPFPPTSNGLSGYKDSSHGIAESAALRPQWCCHCKVVILGSGVRKSFKDLTLLNKDSRESTKRVEKDIVFCSNNCFILYSSTAQAKNSENKESIPSLPQSPMRETPSKAFHQYSNNISTLDVHCLPQLPEKASPPASPPIAFPPAFEAAQVEAKPDELKVTVKLKPRLRAVHGGFEDCRPLNKKWRGMKWKKWSIHIVIPKGTFKPPCEDEIDEFLKKLGTSLKPDPVPKDYRKCCFCHEEGDGLTDGPARLLNLDLDLWVHLNCALWSTEVYETQAGALINVELALRRGLQMKCVFCHKTGATSGCHRFRCTNIYHFTCAIKAQCMFFKDKTMLCPMHKPKGIHEQELSYFAVFRRVYVQRDEVRQIASIVQRGERDHTFRVGSLIFHTIGQLLPQQMQAFHSPKALFPVGYEASRLYWSTRYANRRCRYLCSIEEKDGRPVFVIRIVEQGHEDLVLSDISPKGVWDKILEPVACVRKKSEMLQLFPAYLKGEDLFGLTVSAVARIAESLPGVEACENYTFRYGRNPLMELPLAVNPTGCARSEPKMSAHVKRFVLRPHTLNSTSTSKSFQSTVTGELNAPYSKQFVHSKSSQYRKMKTEWKSNVYLARSRIQGLGLYAARDIEKHTMVIEYIGTIIRNEVANRKEKLYESQNRGVYMFRMDNDHVIDATLTGGPARYINHSCAPNCVAEVVTFERGHKIIISSSRRIQKGEELCYDYKFDFEDDQHKIPCHCGAVNCRKWMN

SEQ ID NO: 828902 - protein, 4350 aa, Homo sapiens
MDRLQPGEEVEIAELTTDYNNEMEVEGPEDQMVFSEQAANKDVNGQESTPGIVPDAVQVHTEEQQKSHPSESLDTDSLLIAVSSQHTVNTELEKQISNEVDSEDLKMSSEVKHICGEDQIEDKMEVTENIEVVTHQITVQQEQLQLLEEPETVVSREESRPPKLVMESVTLPLETLVSPHEESISLCPEEQLVIERLQGEKEQKENSELSTGLMDSEMTPTIEGCVKDVSYQGGKSIKLSSETESSFSSSADISKADVSSSPTPSSDLPSHDMLHNYPSALSSSAGNIMPTTYISVTPKIGMGKPAITKRKFSPGRPRSKQGAWSTHNTVSPPSWSPDISEGREIFKPRQLPGSAIWSIKVGRGSGFPGKRRPRGAGLSGRGGRGRSKLKSGIGAVVLPGVSTADISSNKDDEENSMHNTVVLFSSSDKFTLNQDMCVVCGSFGQGAEGRLLACSQCGQCYHPYCVSIKITKVVLSKGWRCLECTVCEACGKATDPGRLLLCDDCDISYHTYCLDPPLQTVPKGGWKCKWCVWCRHCGATSAGLRCEWQNNYTQCAPCASLSSCPVCYRNYREEDLILQCRQCDRWMHAVCQNLNTEEEVENVADIGFDCSMCRPYMPASNVPSSDCCESSLVAQIVTKVKELDPPKTYTQDGVCLTESGMTQLQSLTVTVPRRKRSKPKLKLKIINQNSVAVLQTPPDIQSEHSRDGEMDDSREGELMDCDGKSESSPEREAVDDETKGVEGTDGVKKRKRKPYRPGIGGFMVRQRSRTGQGKTKRSVIRKDSSGSISEQLPCRDDGWSEQLPDTLVDESVSVTESTEKIKKRYRKRKNKLEETFPAYLQEAFFGKDLLDTSRQSKISLDNLSEDGAQLLYKTNMNTGFLDPSLDPLLSSSSAPTKSGTHGPADDPLADISEVLNTDDDILGIISDDLAKSVDHSDIGPVTDDPSSLPQPNVNQSSRPLSEEQLDGILSPELDKMVTDGAILGKLYKIPELGGKDVEDLFTAVLSPANTQPTPLPQPPPPTQLLPIHNQDAFSRMPLMNGLIGSSPHLPHNSLPPGSGLGTFSAIAQSSYPDARDKNSAFNPMASDPNNSWTSSAPTVEGENDTMSNAQRSTLKWEKEEALGEMATVAPVLYTNINFPNLKEEFPDWTTRVKQIAKLWRKASSQERAPYVQKARDNRAALRINKVQMSNDSMKRQQQQDSIDPSSRIDSELFKDPLKQRESEHEQEWKFRQQMRQKSKQQAKIEATQKLEQVKNEQQQQQQQQFGSQHLLVQSGSDTPSSGIQSPLTPQPGNGNMSPAQSFHKELFTKQPPSTPTSTSSDDVFVKPQAPPPPPAPSRIPIQDSLSQAQTSQPPSPQVFSPGSSNSRPPSPMDPYAKMVGTPRPPPVGHSFSRRNSAAPVENCTPLSSVSRPLQMNETTANRPSPVRDLCSSSTTNNDPYAKPPDTPRPVMTDQFPKSLGLSRSPVVSEQTAKGPIAAGTSDHFTKPSPRADVFQRQRIPDSYARPLLTPAPLDSGPGPFKTPMQPPPSSQDPYGSVSQASRRLSVDPYERPALTPRPIDNFSHNQSNDPYSQPPLTPHPAVNESFAHPSRAFSQPGTISRPTSQDPYSQPPGTPRPVVDSYSQSSGTARSNTDPYSQPPGTPRPTTVDPYSQQPQTPRPSTQTDLFVTPVTNQRHSDPYAHPPGTPRPGISVPYSQPPATPRPRISEGFTRSSMTRPVLMPNQDPFLQAAQNRGPALPGPLVRPPDTCSQTPRPPGPGLSDTFSRVSPSAARDPYDQSPMTPRSQSDSFGTSQTAHDVADQPRPGSEGSFCASSNSPMHSQGQQFSGVSQLPGPVPTSGVTDTQNTVNMAQADTEKLRQRQKLREIILQQQQQKKIAGRQEKGSQDSPAVPHPGPLQHWQPENVNQAFTRPPPPYPGNIRSPVAPPLGPRYAVFPKDQRGPYPPDVASMGMRPHGFRFGFPGGSHGTMPSQERFLVPPQQIQGSGVSPQLRRSVSVDMPRPLNNSQMNNPVGLPQHFSPQSLPVQQHNILGQAYIELRHRAPDGRQRLPFSAPPGSVVEASSNLRHGNFIPRPDFPGPRHTDPMRRPPQGLPNQLPVHPDLEQVPPSQQEQGHSVHSSSMVMRTLNHPLGGEFSEAPLSTSVPSETTSDNLQITTQPSDGLEEKLDSDDPSVKELDVKDLEGVEVKDLDDEDLENLNLDTEDGKVVELDTLDNLETNDPNLDDLLRSGEFDIIAYTDPELDMGDKKSMFNEELDLPIDDKLDNQCVSVEPKKKEQENKTLVLSDKHSPQKKSTVTNEVKTEVLSPNSKVESKCETEKNDENKDNVDTPCSQASAHSDLNDGEKTSLHPCDPDLFEKRTNRETAGPSANVIQASTQLPAQDVINSCGITGSTPVLSSLLANEKSDNSDIRPSGSPPPPTLPASPSNHVSSLPPFIAPPGRVLDNAMNSNVTVVSRVNHVFSQGVQVNPGLIPGQSTVNHSLGTGKPATQTGPQTSQSGTSSMSGPQQLMIPQTLAQQNRERPLLLEEQPLLLQDLLDQERQEQQQQRQMQAMIRQRSEPFFPNIDFDAITDPIMKAKMVALKGINKVMAQNNLGMPPMVMSRFPFMGQVVTGTQNSEGQNLGPQAIPQDGSITHQISRPNPPNFGPGFVNDSQRKQYEEWLQETQQLLQMQQKYLEEQIGAHRKSKKALSAKQRTAKKAGREFPEEDAEQLKHVTEQQSMVQKQLEQIRKQQKEHAELIEDYRIKQQQQCAMAPPTMMPSVQPQPPLIPGATPPTMSQPTFPMVPQQLQHQQHTTVISGHTSPVRMPSLPGWQPNSAPAHLPLNPPRIQPPIAQLPIKTCTPAPGTVSNANPQSGPPPRVEFDDNNPFSESFQERERKERLREQQERQRIQLMQEVDRQRALQQRMEMEQHGMVGSEISSSRTSVSQIPFYSSDLPCDFMQPLGPLQQSPQHQQQMGQVLQQQNIQQGSINSPSTQTFMQTNERRQVGPPSFVPDSPSIPVGSPNFSSVKQGHGNLSGTSFQQSPVRPSFTPALPAAPPVANSSLPCGQDSTITHGHSYPGSTQSLIQLYSDIIPEEKGKKKRTRKKKRDDDAESTKAPSTPHSDITAPPTPGISETTSTPAVSTPSELPQQADQESVEPVGPSTPNMAAGQLCTELENKLPNSDFSQATPNQQTYANSEVDKLSMETPAKTEEIKLEKAETESCPGQEEPKLEEQNGSKVEGNAVACPVSSAQSPPHSAGAPAAKGDSGNELLKHLLKNKKSSSLLNQKPEGSICSEDDCTKDNKLVEKQNPAEGLQTLGAQMQGGFGCGNQLPKTDGGSETKKQRSKRTQRTGEKAAPRSKKRKKDEEEKQAMYSSTDTFTHLKQQLSLLPLMEPIIGVNFAHFLPYGSGQFNSGNRLLGTFGSATLEGVSDYYSQLIYKQNNLSNPPTPPASLPPTPPPMACQKMANGFATTEELAGKAGVLVSHEVTKTLGPKPFQLPFRPQDDLLARALAQGPKTVDVPASLPTPPHNNQEELRIQDHCGDRDTPDSFVPSSSPESVVGVEVSRYPDLSLVKEEPPEPVPSPIIPILPSTAGKSSESRRNDIKTEPGTLYFASPFGPSPNGPRSGLISVAITLHPTAAENISSVVAAFSDLLHVRIPNSYEVSSAPDVPSMGLVSSHRINPGLEYRQHLLLRGPPPGSANPPRLVSSYRLKQPNVPFPPTSNGLSGYKDSSHGIAESAALRPQWCCHCKVVILGSGVRKSFKDLTLLNKDSRESTKRVEKDIVFCSNNCFILYSSTAQAKNSENKESIPSLPQSPMRETPSKAFHQYSNNISTLDVHCLPQLPEKASPPASPPIAFPPAFEAAQVEAKPDELKVTVKLKPRLRAVHGGFEDCRPLNKKWRGMKWKKWSIHIVIPKGTFKPPCEDEIDEFLKKLGTSLKPDPVPKDYRKCCFCHEEGDGLTDGPARLLNLDLDLWVHLNCALWSTEVYETQAGALINVELALRRGLQMKCVFCHKTGATSGCHRFRCTNIYHFTCAIKAQCMFFKDKTMLCPMHKPKGIHEQELSYFAVFRRVYVQRDEVRQIASIVQRGERDHTFRVGSLIFHTIGQLLPQQMQAFHSPKALFPVGYEASRLYWSTRYANRRCRYLCSIEEKDGRPVFVIRIVEQGHEDLVLSDISPKGVWDKILEPVACVRKKSEMLQLFPAYLKGEDLFGLTVSAVARIAESLPGVEACENYTFRYGRNPLMELPLAVNPTGCARSEPKMSAHVKRFVLRPHTLNSTSTSKSFQSTVTGELNAPYSKQFVHSKSSQYRKMKTEWKSNVYLARSRIQGLGLYAARDIEKHTMVIEYIGTIIRNAVTRQDSVASD

SEQ ID NO: 828903 - protein, 3315 aa, Homo sapiens
LGAEMDRLQPGEEVEIAELTTDYNNEMEVEGPEDQMVFSEQAANKDVNGQESTPGIVPDAVQVHTEEQQKSHPSESLDTDSLLIAVSSQHTVNTELEKQISNEVDSEDLKMSSEVKHICGEDQIEDKMEVTENIEVVTHQITVQQEQLQLLEEPETVVSREESRPPKLVMESVTLPLETLVSPHEESISLCPEEQLVIERLQGEKEQKENSELSTGLMDSEMTPTIEGCVKDVSYQGGKSIKLSSETESSFSSSADISKADVSSSPTPSSDLPSHDMLHNYPSALSSSAGNIMPTTYISVTPKIGMGKPAITKRKFSPGRPRSKQGAWSTHNTVSPPSWSPDISEGREIFKPRQLPGSAIWSIKVGRGSGFPGKRRPRGAGLSGRGGRGRSKLKSGIGAVVLPGVSTADISSNKDDEENSMHNTVVLFSSSDKFTLNQDMCVVCGSFGQGAEGRLLACSQCGQCYHPYCVSIKITKVVLSKGWRCLECTVCEACGKATDPGRLLLCDDCDISYHTYCLDPPLQTVPKGGWKCKWCVWCRHCGATSAGLRCEWQNNYTQCAPCASLSSCPVCYRNYREEDLILQCRQCDRWMHAVCQNLNTEEEVENVADIGFDCSMCRPYMPASNVPSSDCCESSLVAQIVTKVKELDPPKTYTQDGVCLTESGMTQLQSLTVTVPRRKRSKPKLKLKIINQNSVAVLQTPPDIQSEHSRDGEMDDSREGELMDCDGKSESSPEREAVDDETKGVEGTDGVKKRKRKPYRPGIGGFMVRQRSRTGQGKTKRSVIRKDSSGSISEQLPCRDDGWSEQLPDTLVDESVSVTESTEKIKKRYRKRKNKLEETFPAYLQEAFFGKDLLDTSRQSKISLDNLSEDGAQLLYKTNMNTGFLDPSLDPLLSSSSAPTKSGTHGPADDPLADISEVLNTDDDILGIISDDLAKSVDHSDIGPVTDDPSSLPQPNVNQSSRPLSEEQLDGILSPELDKMVTDGAILGKLYKIPELGGKDVEDLFTAVLSPANTQPTPLPQPPPPTQLLPIHNQDAFSRMPLMNGLIGSSPHLPHNSLPPGSGLGTFSAIAQSSYPDARDKNSAFNPMASDPNNSWTSSAPTVEGENDTMSNAQRSTLKWEKEEALGEMATVAPVLYTNINFPNLKEEFPDWTTRVKQIAKLWRKASSQERAPYVQKARDNRAALRINKVQMSNDSMKRQQQQDSIDPSSRIDSELFKDPLKQRESEHEQEWKFRQQMRQKSKQQAKIEATQKLEQVKNEQQQQQQQQFGSQHLLVQSGSDTPSSGIQSPLTPQPGNGNMSPAQSFHKELFTKQPPSTPTSTSSDDVFVKPQAPPPPPAPSRIPIQDSLSQAQTSQPPSPQVFSPGSSNSRPPSPMDPYAKMVGTPRPPPVGHSFSRRNSAAPVENCTPLSSVSRPLQMNETTANRPSPVRDLCSSSTTNNDPYAKPPDTPRPVMTDQFPKSLGLSRSPVVSEQTAKGPIAAGTSDHFTKPSPRADVFQRQRIPDSYARPLLTPAPLDSGPGPFKTPMQPPPSSQDPYGSVSQASRRLSVDPYERPALTPRPIDNFSHNQSNDPYSQPPLTPHPAVNESFAHPSRAFSQPGTISRPTSQDPYSQPPGTPRPVVDSYSQSSGTARSNTDPYSQPPGTPRPTTVDPYSQQPQTPRPSTQTDLFVTPVTNQRHSDPYAHPPGTPRPGISVPYSQPPATPRPRISEGFTRSSMTRPVLMPNQDPFLQAAQNRGPALPGPLVRPPDTCSQTPRPPGPGLSDTFSRVSPSAARDPYDQSPMTPRSQSDSFGTSQTAHDVADQPRPGSEGSFCASSNSPMHSQGQQFSGVSQLPGPVPTSGVTDTQNTVNMAQADTEKLRQRQKLREIILQQQQQKKIAGRQEKGSQDSPAVPHPGPLQHWQPENVNQAFTRPPPPYPGNIRSPVAPPLGPRYAVFPKDQRGPYPPDVASMGMRPHGFRFGFPGGSHGTMPSQERFLVPPQQIQGSGVSPQLRRSVSVDMPRPLNNSQMNNPVGLPQHFSPQSLPVQQHNILGQAYIELRHRAPDGRQRLPFSAPPGSVVEASSNLRHGNFIPRPDFPGPRHTDPMRRPPQGLPNQLPVHPDLEQVPPSQQEQGHSVHSSSMVMRTLNHPLGGEFSEAPLSTSVPSETTSDNLQITTQPSDGLEEKLDSDDPSVKELDVKDLEGVEVKDLDDEDLENLNLDTEDGKVVELDTLDNLETNDPNLDDLLRSGEFDIIAYTDPELDMGDKKSMFNEELDLPIDDKLDNQCVSVEPKKKEQENKTLVLSDKHSPQKKSTVTNEVKTEVLSPNSKVESKCETEKNDENKDNVDTPCSQASAHSDLNDGEKTSLHPCDPDLFEKRTNRETAGPSANVIQASTQLPAQDVINSCGITGSTPVLSSLLANEKSDNSDIRPSGSPPPPTLPASPSNHVSSLPPFIAPPGRVLDNAMNSNVTVVSRVNHVFSQGVQVNPGLIPGQSTVNHSLGTGKPATQTGPQTSQSGTSSMSGPQQLMIPQTLAQQNRERPLLLEEQPLLLQDLLDQERQEQQQQRQMQAMIRQRSEPFFPNIDFDAITDPIMKAKMVALKGINKVMAQNNLGMPPMVMSRFPFMGQVVTGTQNSEGQNLGPQAIPQDGSITHQISRPNPPNFGPGFVNDSQRKQYEEWLQETQQLLQMQQKYLEEQIGAHRKSKKALSAKQRTAKKAGREFPEEDAEQLKHVTEQQSMVQKQLEQIRKQQKEHAELIEDYRIKQQQQCAMAPPTMMPSVQPQPPLIPGATPPTMSQPTFPMVPQQLQHQQHTTVISGHTSPVRMPSLPGWQPNSAPAHLPLNPPRIQPPIAQLPIKTCTPAPGTVSNANPQSGPPPRVEFDDNNPFSESFQERERKERLREQQERQRIQLMQEVDRQRALQQRMEMEQHGMVGSEISSSRTSVSQIPFYSSDLPCDFMQPLGPLQQSPQHQQQMGQVLQQQNIQQGSINSPSTQTFMQTNERRQVGPPSFVPDSPSIPVGSPNFSSVKQGHGNLSGTSFQQSPVRPSFTPALPAAPPVANSSLPCGQDSTITHGHSYPGSTQSLIQLYSDIIPEEKGKKKRTRKKKRDDDAESTKAPSTPHSDITAPPTPGISETTSTPAVSTPSELPQQADQESVEPVGPSTPNMAAGQLCTELENKLPNSDFSQATPNQQTYANSEVDKLSMETPAKTEEIKLEKAETESCPGQEEPKLEEQNGSKVEGNAVACPVSSAQSPPHSAGAPAAKGDSGNELLKHLLKNKKSSSLLNQKPEGSICSEDDCTKDNKLVEKQNPAEGLVSVNHKNDNFFLLF

SEQ ID NO: 828904 - protein, 1723 aa, Homo sapiens
MMHFVIQIRKQQKEHAELIEDYRIKQQQQCAMAPPTMMPSVQPQPPLIPGATPPTMSQPTFPMVPQQLQHQQHTTVISGHTSPVRMPSLPGWQPNSAPAHLPLNPPRIQPPIAQLPIKTCTPAPGTVSNANPQSGPPPRVEFDDNNPFSESFQERERKERLREQQERQRIQLMQEVDRQRALQQRMEMEQHGMVGSEISSSRTSVSQIPFYSSDLPCDFMQPLGPLQQSPQHQQQMGQVLQQQNIQQGSINSPSTQTFMQTNERRQVGPPSFVPDSPSIPVGSPNFSSVKQGHGNLSGTSFQQSPVRPSFTPALPAAPPVANSSLPCGQDSTITHGHSYPGSTQSLIQLYSDIIPEEKGKKKRTRKKKRDDDAESTKAPSTPHSDITAPPTPGISETTSTPAVSTPSELPQQADQESVEPVGPSTPNMAAGQLCTELENKLPNSDFSQATPNQQTYANSEVDKLSMETPAKTEEIKLEKAETESCPGQEEPKLEEQNGSKVEGNAVACPVSSAQSPPHSAGAPAAKGDSGNELLKHLLKNKKSSSLLNQKPEGSICSEDDCTKDNKLVEKQNPAEGLQTLGAQMQGGFGCGNQLPKTDGGSETKKQRSKRTQRTGEKAAPRSKKRKKDEEEKQAMYSSTDTFTHLKQQLSLLPLMEPIIGVNFAHFLPYGSGQFNSGNRLLGTFGSATLEGVSDYYSQLIYKQNNLSNPPTPPASLPPTPPPMACQKMANGFATTEELAGKAGVLVSHEVTKTLGPKPFQLPFRPQDDLLARALAQGPKTVDVPASLPTPPHNNQEELRIQDHCGDRDTPDSFVPSSSPESVVGVEVSRYPDLSLVKEEPPEPVPSPIIPILPSTAGKSSESRRNDIKTEPGTLYFASPFGPSPNGPRSGLISVAITLHPTAAENISSVVAAFSDLLHVRIPNSYEVSSAPDVPSMGLVSSHRINPGLEYRQHLLLRGPPPGSANPPRLVSSYRLKQPNVPFPPTSNGLSGYKDSSHGIAESAALRPQWCCHCKVVILGSGVRKSFKDLTLLNKDSRESTKRVEKDIVFCSNNCFILYSSTAQAKNSENKESIPSLPQSPMRETPSKAFHQYSNNISTLDVHCLPQLPEKASPPASPPIAFPPAFEAAQVEAKPDELKVTVKLKPRLRAVHGGFEDCRPLNKKWRGMKWKKWSIHIVIPKGTFKPPCEDEIDEFLKKLGTSLKPDPVPKDYRKCCFCHEEGDGLTDGPARLLNLDLDLWVHLNCALWSTEVYETQAGALINVELALRRGLQMKCVFCHKTGATSGCHRFRCTNIYHFTCAIKAQCMFFKDKTMLCPMHKPKGIHEQELSYFAVFRRVYVQRDEVRQIASIVQRGERDHTFRVGSLIFHTIGQLLPQQMQAFHSPKALFPVGYEASRLYWSTRYANRRCRYLCSIEEKDGRPVFVIRIVEQGHEDLVLSDISPKGVWDKILEPVACVRKKSEMLQLFPAYLKGEDLFGLTVSAVARIAESLPGVEACENYTFRYGRNPLMELPLAVNPTGCARSEPKMSAHVKRFVLRPHTLNSTSTSKSFQSTVTGELNAPYSKQFVHSKSSQYRKMKTEWKSNVYLARSRIQGLGLYAARDIEKHTMVIEYIGTIIRNEVANRKEKLYESQNRGVYMFRMDNDHVIDATLTGGPARYINHSCAPNCVAEVVTFERGHKIIISSSRRIQKGEELCYDYKFDFEDDQHKIPCHCGAVNCRKWMN

SEQ ID NO: 828905 - protein, 1140 aa, Homo sapiens [sequence omitted]

SEQ ID NO: 828906 - protein, 215 aa, Homo sapiens [sequence omitted]

SEQ ID NO: 828907 - protein, 2738 aa, Homo sapiens
LGAEMDRLQPGEEVEIAELTTDYNNEMEVEGPEDQMVFSEQAANKDVNGQESTPGIVPDAVQVHTEEQQKSHPSESLDTDSLLIAVSSQHTVNTELEKQISNEVDSEDLKMSSEVKHICGEDQIEDKMEVTENIEVVTHQITVQQEQLQLLEEPETVVSREESRPPKLVMESVTLPLETLVSPHEESISLCPEEQLVIERLQGEKEQKENSELSTGLMDSEMTPTIEGCVKDVSYQGGKSIKLSSETESSFSSSADISKADVSSSPTPSSDLPSHDMLHNYPSALSSSAGNIMPTTYISVTPKIGMGKPAITKRKFSPGRPRSKQGAWSTHNTVSPPSWSPDISEGREIFKPRQLPGSAIWSIKVGRGSGFPGKRRPRGAGLSGRGGRGRSKLKSGIGAVVLPGVSTADISSNKDDEENSMHNTVVLFSSSDKFTLNQDMCVVCGSFGQGAEGRLLACSQCGQCYHPYCVSIKITKVVLSKGWRCLECTVCEACGKATDPGRLLLCDDCDISYHTYCLDPPLQTVPKGGWKCKWCVWCRHCGATSAGLRCEWQNNYTQCAPCASLSSCPVCYRNYREEDLILQCRQCDRWMHAVCQNLNTEEEVENVADIGFDCSMCRPYMPASNVPSSDCCESSLVAQIVTKVKELDPPKTYTQDGVCLTESGMTQLQSLTVTVPRRKRSKPKLKLKIINQNSVAVLQTPPDIQSEHSRDGEMDDSREGELMDCDGKSESSPEREAVDDETKGVEGTDGVKKRKRKPYRPGIGGFMVRQRSRTGQGKTKRSVIRKDSSGSISEQLPCRDDGWSEQLPDTLVDESVSVTESTEKIKKRYRKRKNKLEETFPAYLQEAFFGKDLLDTSRQSKISLDNLSEDGAQLLYKTNMNTGFLDPSLDPLLSSSSAPTKSGTHGPADDPLADISEVLNTDDDILGIISDDLAKSVDHSDIGPVTDDPSSLPQPNVNQSSRPLSEEQLDGILSPELDKMVTDGAILGKLYKIPELGGKDVEDLFTAVLSPANTQPTPLPQPPPPTQLLPIHNQDAFSRMPLMNGLIGSSPHLPHNSLPPGSGLGTFSAIAQSSYPDARDKNSAFNPMASDPNNSWTSSAPTVEGENDTMSNAQRSTLKWEKEEALGEMATVAPVLYTNINFPNLKEEFPDWTTRVKQIAKLWRKASSQERAPYVQKARDNRAALRINKVQMSNDSMKRQQQQDSIDPSSRIDSELFKDPLKQRESEHEQEWKFRQQMRQKSKQQAKIEATQKLEQVKNEQQQQQQQQFGSQHLLVQSGSDTPSSGIQSPLTPQPGNGNMSPAQSFHKELFTKQPPSTPTSTSSDDVFVKPQAPPPPPAPSRIPIQDSLSQAQTSQPPSPQVFSPGSSNSRPPSPMDPYAKMVGTPRPPPVGHSFSRRNSAAPVENCTPLSSVSRPLQMNETTANRPSPVRDLCSSSTTNNDPYAKPPDTPRPVMTDQFPKSLGLSRSPVVSEQTAKGPIAAGTSDHFTKPSPRADVFQRQRIPDSYARPLLTPAPLDSGPGPFKTPMQPPPSSQDPYGSVSQASRRLSVDPYERPALTPRPIDNFSHNQSNDPYSQPPLTPHPAVNESFAHPSRAFSQPGTISRPTSQDPYSQPPGTPRPVVDSYSQSSGTARSNTDPYSQPPGTPRPTTVDPYSQQPQTPRPSTQTDLFVTPVTNQRHSDPYAHPPGTPRPGISVPYSQPPATPRPRISEGFTRSSMTRPVLMPNQDPFLQAAQNRGPALPGPLVRPPDTCSQTPRPPGPGLSDTFSRVSPSAARDPYDQSPMTPRSQSDSFGTSQTAHDVADQPRPGSEGSFCASSNSPMHSQGQQFSGVSQLPGPVPTSGVTDTQNTVNMAQADTEKLRQRQKLREIILQQQQQKKIAGRQEKGSQDSPAVPHPGPLQHWQPENVNQAFTRPPPPYPGNIRSPVAPPLGPRYAVFPKDQRGPYPPDVASMGMRPHGFRFGFPGGSHGTMPSQERFLVPPQQIQGSGVSPQLRRSVSVDMPRPLNNSQMNNPVGLPQHFSPQSLPVQQHNILGQAYIELRHRAPDGRQRLPFSAPPGSVVEASSNLRHGNFIPRPDFPGPRHTDPMRRPPQGLPNQLPVHPDLEQVPPSQQEQGHSVHSSSMVMRTLNHPLGGEFSEAPLSTSVPSETTSDNLQITTQPSDGLEEKLDSDDPSVKELDVKDLEGVEVKDLDDEDLENLNLDTEDGKVVELDTLDNLETNDPNLDDLLRSGEFDIIAYTDPELDMGDKKSMFNEELDLPIDDKLDNQCVSVEPKKKEQENKTLVLSDKHSPQKKSTVTNEVKTEVLSPNSKVESKCETEKNDENKDNVDTPCSQASAHSDLNDGEKTSLHPCDPDLFEKRTNRETAGPSANVIQASTQLPAQDVINSCGITGSTPVLSSLLANEKSDNSDIRPSGSPPPPTLPASPSNHVSSLPPFIAPPGRVLDNAMNSNVTVVSRVNHVFSQGVQVNPGLIPGQSTVNHSLGTGKPATQTGPQTSQSGTSSMSGPQQLMIPQTLAQQNRERPLLLEEQPLLLQDLLDQERQEQQQQRQMQAMIRQRSEPFFPNIDFDAITDPIMKAKMVALKGINKVMAQNNLGMPPMVMSRFPFMGQVVTGTQNSEGQNLGPQAIPQDGSITHQISRPNPPNFGPGFVNDSQRKQYEEWLQETQQLLQMQQKYLEEQIGAHRKSKKALSAKQRTAKKAGREFPEEDAEQLKHVTEQQSMVQKQLEQVINRFAK

SEQ ID NO: 828908 - protein, 2099 aa, Homo sapiens
LGAEMDRLQPGEEVEIAELTTDYNNEMEVEGPEDQMVFSEQAANKDVNGQESTPGIVPDAVQVHTEEQQKSHPSESLDTDSLLIAVSSQHTVNTELEKQISNEVDSEDLKMSSEVKHICGEDQIEDKMEVTENIEVVTHQITVQQEQLQLLEEPETVVSREESRPPKLVMESVTLPLETLVSPHEESISLCPEEQLVIERLQGEKEQKENSELSTGLMDSEMTPTIEGCVKDVSYQGGKSIKLSSETESSFSSSADISKADVSSSPTPSSDLPSHDMLHNYPSALSSSAGNIMPTTYISVTPKIGMGKPAITKRKFSPGRPRSKQGAWSTHNTVSPPSWSPDISEGREIFKPRQLPGSAIWSIKVGRGSGFPGKRRPRGAGLSGRGGRGRSKLKSGIGAVVLPGVSTADISSNKDDEENSMHNTVVLFSSSDKFTLNQDMCVVCGSFGQGAEGRLLACSQCGQCYHPYCVSIKITKVVLSKGWRCLECTVCEACGKATDPGRLLLCDDCDISYHTYCLDPPLQTVPKGGWKCKWCVWCRHCGATSAGLRCEWQNNYTQCAPCASLSSCPVCYRNYREEDLILQCRQCDRWMHAVCQNLNTEEEVENVADIGFDCSMCRPYMPASNVPSSDCCESSLVAQIVTKVKELDPPKTYTQDGVCLTESGMTQLQSLTVTVPRRKRSKPKLKLKIINQNSVAVLQTPPDIQSEHSRDGEMDDSREGELMDCDGKSESSPEREAVDDETKGVEGTDGVKKRKRKPYRPGIGGFMVRQRSRTGQGKTKRSVIRKDSSGSISEQLPCRDDGWSEQLPDTLVDESVSVTESTEKIKKRYRKRKNKLEETFPAYLQEAFFGKDLLDTSRQSKISLDNLSEDGAQLLYKTNMNTGFLDPSLDPLLSSSSAPTKSGTHGPADDPLADISEVLNTDDDILGIISDDLAKSVDHSDIGPVTDDPSSLPQPNVNQSSRPLSEEQLDGILSPELDKMVTDGAILGKLYKIPELGGKDVEDLFTAVLSPANTQPTPLPQPPPPTQLLPIHNQDAFSRMPLMNGLIGSSPHLPHNSLPPGSGLGTFSAIAQSSYPDARDKNSAFNPMASDPNNSWTSSAPTVEGENDTMSNAQRSTLKWEKEEALGEMATVAPVLYTNINFPNLKEEFPDWTTRVKQIAKLWRKASSQERAPYVQKARDNRAALRINKVQMSNDSMKRQQQQDSIDPSSRIDSELFKDPLKQRESEHEQEWKFRQQMRQKSKQQAKIEATQKLEQVKNEQQQQQQQQFGSQHLLVQSGSDTPSSGIQSPLTPQPGNGNMSPAQSFHKELFTKQPPSTPTSTSSDDVFVKPQAPPPPPAPSRIPIQDSLSQAQTSQPPSPQVFSPGSSNSRPPSPMDPYAKMVGTPRPPPVGHSFSRRNSAAPVENCTPLSSVSRPLQMNETTANRPSPVRDLCSSSTTNNDPYAKPPDTPRPVMTDQFPKSLGLSRSPVVSEQTAKGPIAAGTSDHFTKPSPRADVFQRQRIPDSYARPLLTPAPLDSGPGPFKTPMQPPPSSQDPYGSVSQASRRLSVDPYERPALTPRPIDNFSHNQSNDPYSQPPLTPHPAVNESFAHPSRAFSQPGTISRPTSQDPYSQPPGTPRPVVDSYSQSSGTARSNTDPYSQPPGTPRPTTVDPYSQQPQTPRPSTQTDLFVTPVTNQRHSDPYAHPPGTPRPGISVPYSQPPATPRPRISEGFTRSSMTRPVLMPNQDPFLQAAQNRGPALPGPLVRPPDTCSQTPRPPGPGLSDTFSRVSPSAARDPYDQSPMTPRSQSDSFGTSQTAHDVADQPRPGSEGSFCASSNSPMHSQGQQFSGVSQLPGPVPTSGVTDTQNTVNMAQADTEKLRQRQKLREIILQQQQQKKIAGRQEKGSQDSPAVPHPGPLQHWQPENVNQAFTRPPPPYPGNIRSPVAPPLGPRYAVFPKDQRGPYPPDVASMGMRPHGFRFGFPGGSHGTMPSQERFLVPPQQIQGSGVSPQLRRSVSVDMPRPLNNSQMNNPVGLPQHFSPQSLPVQQHNILGQAYIELRHRAPDGRQRLPFSAPPGSVVEASSNLRHGTAVSGQTVTSTLTPLITHVTTLHGSSV

SEQ ID NO: 828909 - protein, 732 aa, Homo sapiens
LGAEMDRLQPGEEVEIAELTTDYNNEMEVEGPEDQMVFSEQAANKDVNGQESTPGIVPDAVQVHTEEQQKSHPSESLDTDSLLIAVSSQHTVNTELEKQISNEVDSEDLKMSSEVKHICGEDQIEDKMEVTENIEVVTHQITVQQEQLQLLEEPETVVSREESRPPKLVMESVTLPLETLVSPHEESISLCPEEQLVIERLQGEKEQKENSELSTGLMDSEMTPTIEGCVKDVSYQGGKSIKLSSETESSFSSSADISKADVSSSPTPSSDLPSHDMLHNYPSALSSSAGNIMPTTYISVTPKIGMGKPAITKRKFSPGRPRSKQGAWSTHNTVSPPSWSPDISEGREIFKPRQLPGSAIWSIKVGRGSGFPGKRRPRGAGLSGRGGRGRSKLKSGIGAVVLPGVSTADISSNKDDEENSMHNTVVLFSSSDKFTLNQDMCVVCGSFGQGAEGRLLACSQCGQCYHPYCVSIKITKVVLSKGWRCLECTVCEACGKATDPGRLLLCDDCDISYHTYCLDPPLQTVPKGGWKCKWCVWCRHCGATSAGLRCEWQNNYTQCAPCASLSSCPVCYRNYREEDLILQCRQCDRWMHAVCQNLNTEEEVENVADIGFDCSMCRPYMPASNVPSSDCCESSLVAQIVTKVKELDPPKTYTQDGVCLTESGMTQLQSLTVTVPRRKRSKPKLKLKIINQNSVAVLQTPPDIQSEHSRDGEMDDSRGNTNLFSMKYVCKN

SEQ ID NO: 828910 - protein, 542 aa, Homo sapiens
LGAEMDRLQPGEEVEIAELTTDYNNEMEVEGPEDQMVFSEQAANKDVNGQESTPGIVPDAVQVHTEEQQKSHPSESLDTDSLLIAVSSQHTVNTELEKQISNEVDSEDLKMSSEVKHICGEDQIEDKMEVTENIEVVTHQITVQQEQLQLLEEPETVVSREESRPPKLVMESVTLPLETLVSPHEESISLCPEEQLVIERLQGEKEQKENSELSTGLMDSEMTPTIEGCVKDVSYQGGKSIKLSSETESSFSSSADISKADVSSSPTPSSDLPSHDMLHNYPSALSSSAGNIMPTTYISVTPKIGMGKPAITKRKFSPGRPRSKQGAWSTHNTVSPPSWSPDISEGREIFKPRQLPGSAIWSIKVGRGSGFPGKRRPRGAGLSGRGGRGRSKLKSGIGAVVLPGVSTADISSNKDDEENSMHNTVVLFSSSDKFTLNQDMCVVCGSFGQGAEGRLLACSQCGQCYHPYCVSIKITKVVLSKGWRCLECTVCEACGKATDPGRLLLCDDCDISYHTYCLDPPLQTVPKGGWKCKWYSRVCLPC

SEQ ID NO: 828911 - protein, 508 aa, Homo sapiens
MLPTQAGAAAALGRGSALGGSLNRTPTGRPGGGGGTRGANGGRVPGNGAGLGPGRLEREAAAAAATTPAPTAGALYSGSEGDSESGEEEELGAERRGLKRSLSEMEIGMVVGGPEASAAATGGYGPVSGAVSGAKPGKKTRGRVKIKMEFIDNKLRRYTTFSKRKTGIMKKAYELSTLTGTQVLLLVASETGHVYTFATRKLQPMITSETGKALIQTCLNSPDSPPRSDPTTDQRMSATGFEETDLTYQVSESDSSGETKDTLKPAFTVTNLPGTTSTIQTAPSTSTTMQVSSGPSFPITNYLAPVSASVSPSAVSSANGTVLKSTGSGPVSSGGLMQLPTSFTLMPGGAVAQQVPVQAIQVHQAPQQASPSRDSSTDLTQTSSSGTVTLPATIMTSSVPTTVGGHMMYPSPHAVMYAPTSGLGDGSLTVLNAFSQAPSTMQVSHSQVQEPGGVPQVFLTASSGTVQIPVSAVQLHQMAVIGQQAGSSSNLTELQVVNLDTAHSTKSE

SEQ ID NO: 828912 - protein, 508 aa, Homo sapiens; identical to SEQ ID NO: 828911

SEQ ID NO: 828913 - protein, 362 aa, Homo sapiens
RNRGERRRGGSDRRQRGRGPLLSEGAYELSTLTGTQVLLLVASETGHVYTFATRKLQPMITSETGKALIQTCLNSPDSPPRSDPTTDQRMSATGFEETDLTYQVSESDSSGETKDTLKPAFTVTNLPGTTSTIQTAPSTSTTMQVSSGPSFPITNYLAPVSASVSPSAVSSANGTVLKSTGSGPVSSGGLMQLPTSFTLMPGGAVAQQVPVQAIQVHQAPQQASPSRDSSTDLTQTSSSGTVTLPATIMTSSVPTTVGGHMMYPSPHAVMYAPTSGLGDGSLTVLNAFSQAPSTMQVSHSQVQEPGGVPQVFLTASSGTVQIPVSAVQLHQMAVIGQQAGSSSNLTELQVVNLDTAHSTKSE

SEQ ID NO: 828914 - protein, 508 aa, Homo sapiens; identical to SEQ ID NO: 828911

SEQ ID NO: 828915 - protein, 508 aa, Homo sapiens; identical to SEQ ID NO: 828911

SEQ ID NO: 828916 - protein, 508 aa, Homo sapiens; identical to SEQ ID NO: 828911

SEQ ID NO: 828917 - protein, 180 aa, Homo sapiens
MLPTQAGAAAALGRGSALGGSLNRTPTGRPGGGGGTRGANGGRVPGNGAGLGPGRLEREAAAAAATTPAPTAGALYSGSEGDSESGEEEELGAERRGLKRSLSEMEIGMVVGGPEASAAATGGYGPVSGAVSGAKPGKKTRGRVKIKMEFIDNKLRRYTTLGVSLPRWLWGMCVWVCAPE

SEQ ID NO: 828918 - protein, 102 aa, Homo sapiens
LTWEMARGLWGPGIPRDGMGVISGDQCRADTCLCLPVTLPATIMTSSVPTTVGGHMMYPSPHAVMYAPTSGLGDGSLTVLNAFSQAPSTMQVSHSQVQEPGE

SEQ ID NO: 828919 - protein, 105 aa, Homo sapiens
APSTSTTMQVSSGPSFPITNYLAPVSASVSPSAVSSANGTVLKSTGSGPVSSGGLMQLPTSFTLMPGESRGAGRDSSFLGQIKHAKSVFRAGTKRTSFPAQKEGE

SEQ ID NO: 828920 - protein, 729 aa, Homo sapiens
MNKGWLELESDPGLFTLLVEDFGVKGVQVEEIYDLQSKCQGPVYGFIFLFKWIEERRSRRKVSTLVDDTSVIDDDIVNNMFFAHQLIPNSCATHALLSVLLNCSSVDLGPTLSRMKDFTKGFSPESKGYAIGNAPELAKAHNSHARPEPRHLPEKQNGLSAVRTMEAFHFVSYVPITGRLFELDGLKVYPIDHGPWGEDEEWTDKARRVIMERIGLATAGEPYHDIRFNLMAVVPDRRIKYEARLHVLKVNRQTVLEALQQLIRVTQPELIQTHKSQESQLPEESKSASNKSPLVLEANRAPAASEGNHTDGAEEAAGSCAQAPSHSPPNKPKLVVKPPGSSLNGVHPNPTPIVQRLPAFLDNHNYAKSPMQEEEDLAAGVGRSRVPVRPPQQYSDDEDDYEDDEEDDVQNTNSALRYKGKGTGKPGALSGSADGQLSVLQPNTINVLAEKLKESQKDLSIPLSIKTSSGAGSPAVAVPTHSQPSPTPSNESTDTASEIGSAFNSPLRSPIRSANPTRPSSPVTSHISKVLFGEDDSLLRVDCIRYNRAVRDLGPVISTGLLHLAEDGVLSPLALTEGGKGSSPSIRPIQGSQGSSSPVEKEVVEATDSREKTGMVRPGEPLSGEKYSPKELLALLKCVEAEIANYEACLKEEVEKRKKFKIDDQRRTHNYDEFICTFISMLAQEGMLANLVEQNISVRRRQGVSIGRLHKQRKPDRRKRSRPYKAKRQ

SEQ ID NO: 828921 - protein, 729 aa, Homo sapiens; identical to SEQ ID NO: 828920

SEQ ID NO: 828922 - protein, 729 aa, Homo sapiens; identical to SEQ ID NO: 828920

SEQ ID NO: 828923 - protein, 711 aa, Homo sapiens
MNKGWLELESDPGLFTLLVEDFGVKGVQVEEIYDLQSKCQGPVYGFIFLFKWIEERRSRRKVSTLVDDTSVIDDDIVNNMFFAHQLIPNSCATHALLSVLLNCSSVDLGPTLSRMKDFTKGFSPESKGYAIGNAPELAKAHNSHARPEPRHLPEKQNGLSAVRTMEAFHFVSYVPITGRLFELDGLKVYPIDHGPWGEDEEWTDKARRVIMERIGLATAGIKYEARLHVLKVNRQTVLEALQQLIRVTQPELIQTHKSQESQLPEESKSASNKSPLVLEANRAPAASEGNHTDGAEEAAGSCAQAPSHSPPNKPKLVVKPPGSSLNGVHPNPTPIVQRLPAFLDNHNYAKSPMQEEEDLAAGVGRSRVPVRPPQQYSDDEDDYEDDEEDDVQNTNSALRYKGKGTGKPGALSGSADGQLSVLQPNTINVLAEKLKESQKDLSIPLSIKTSSGAGSPAVAVPTHSQPSPTPSNESTDTASEIGSAFNSPLRSPIRSANPTRPSSPVTSHISKVLFGEDDSLLRVDCIRYNRAVRDLGPVISTGLLHLAEDGVLSPLALTEGGKGSSPSIRPIQGSQGSSSPVEKEVVEATDSREKTGMVRPGEPLSGEKYSPKELLALLKCVEAEIANYEACLKEEVEKRKKFKIDDQRRTHNYDEFICTFISMLAQEGMLANLVEQNISVRRRQGVSIGRLHKQRKPDRRKRSRPYKAKRQ

SEQ ID NO: 828924 - protein, 729 aa, Homo sapiens; identical to SEQ ID NO: 828920

SEQ ID NO: 828925 - protein, 752 aa, Homo sapiens
MNKGWLELESDPGLFTLLVEDFGVKGVQVEEIYDLQSKCQGPVYGFIFLFKWIEERRSRRKVSTLVDDTSVIDDDIVNNMFFAHQLIPNSCATHALLSVLLNCSSVDLGPTLSRMKDFTKGFSPESKGYAIGNAPELAKAHNSHARPEPRHLPEKQNGLSAVRTMEAFHFVSYVPITGRLFELDGLKVYPIDHGPWGEDEEWTDKARRVIMERIGLATAGEPYHDIRFNLMAVVPDRRIKYEARLHVLKVNRQTVLEALQQLIRVTQPELIQTHKSQESQLPEESKSASNKSPLVLEANRAPAASEGNHTDGAEEAAGSCAQAPSHSPPNKPKLVVKPPGSSLNGVHPNPTPIVQRLPAFLDNHNYAKSPMQEEEDLAAGVGRSRVPVRPPQQYSDDEDDYEDDEEDDVQNTNSALRYKGKGTGKPGALSGSADGQLSVLQPNTINVLAEKLKESQKDLSIPLSIKTSSGAGSPAVAVPTHSQPSPTPSNESTDTASEIGSAFNSPLRSPIRSANPTRPSSPVTSHISKVLFGEDDSLLRVDCIRYNRAVRDLGPVISTGLLHLAEDGVLSPLALTEGGKGSSPSIRPIQGSQGSSSPVEKEVVEATDSREKTGMVRPGEPLSGEKYSPKLPIARGALLLARPDQRCNAGFWQELLALLKCVEAEIANYEACLKEEVEKRKKFKIDDQRRTHNYDEFICTFISMLAQEGMLANLVEQNISVRRRQGVSIGRLHKQRKPDRRKRSRPYKAKRQ

SEQ ID NO: 828926 - protein, 768 aa, Homo sapiens
MNKGWLELESDPGLFTLLVEDFGVKGVQVEEIYDLQSKCQGPVYGFIFLFKWIEERRSRRKVSTLVDDTSVIDDDIVNNMFFAHQLIPNSCATHALLSVLLNCSSVDLGPTLSRMKDFTKGFSPESKGYAIGNAPELAKAHNSHARPEPRHLPEKQNGLSAVRTMEAFHFVSYVPITGRLFELDGLKVYPIDHGPWGEDEEWTDKARRVIMERIGLATAGEPYHDIRFNLMAVVPDRRIKYEARLHVLKVNRQTVLEALQQLIRVTQPELIQTHKSQESQLPEESKSASNKSPLVLEANRAPAASEGNHTDGAEEAAGSCAQAPSHSPPNKPKLVVKPPGSSLNGVHPNPTPIVQRLPAFLDNHNYAKSPMQEEEDLAAGVGRSRVPVRPPQQYSDDEDDYEDDEEDDVQNTNSALRYKGKGTGKPGALSGSADGQLSVLQPNTINVLAEKLKESQKDLSIPLSIKTSSGAGSPAVAVPTHSQPSPTPSNESTDTASEIGSAFNSPLRSPIRSANPTRPSSPVTSHISKVLFGEDDSLLRVDCIRYNRAVRDLGPVISTGLLHLAEDGVLSPLALTGGPWTGSLATWCTQEGGGKWPSDHKVSCTLMIFLGPLFPEGGKGSSPSIRPIQGSQGSSSPVEKEVVEATDSREKTGMVRPGEPLSGEKYSPKELLALLKCVEAEIANYEACLKEEVEKRKKFKIDDQRRTHNYDEFICTFISMLAQEGMLANLVEQNISVRRRQGVSIGRLHKQRKPDRRKRSRPYKAKRQ

SEQ ID NO: 828927 - protein, 359 aa, Homo sapiens
MQEEEDLAAGVGRSRVPVRPPQQYSDDEDDYEDDEEDDVQNTNSALRYKGKGTGKPGALSGSADGQLSVLQPNTINVLAEKLKESQKDLSIPLSIKTSSGAGSPAVAVPTHSQPSPTPSNESTDTASEIGSAFNSPLRSPIRSANPTRPSSPVTSHISKVLFGEDDSLLRVDCIRYNRAVRDLGPVISTGLLHLAEDGVLSPLALTEGGKGSSPSIRPIQGSQGSSSPVEKEVVEATDSREKTGMVRPGEPLSGEKYSPKELLALLKCVEAEIANYEACLKEEVEKRKKFKIDDQRRTHNYDEFICTFISMLAQEGMLANLVEQNISVRRRQGVSIGRLHKQRKPDRRKRSRPYKAKRQ

SEQ ID NO: 828928 - protein, 729 aa, Homo sapiens; identical to SEQ ID NO: 828920

SEQ ID NO: 828929 - protein, 143 aa, Homo sapiens
  misc_feature (8)..(9): Xaa can be any naturally occurring amino acid
  misc_feature (16)..(16): Xaa can be any naturally occurring amino acid
  misc_feature (19)..(19): Xaa can be any naturally occurring amino acid
LRSRSEFXXPRVTKRXLCXKVGGSSSPVEKEVVEATDSREKTGMELLALLKCVEAEIANYEACLKEEVEKRKKFKIDDQRRTHNYDEFICTFISMLAQEGMLANLVEQNISVRRRQGVSIGRLHKQRKPDRRKRSRPYKAKRQ

SEQ ID NO: 828930 - protein, 639 aa, Homo sapiens
MNKGWLELESDPGLFTLLVEDFGVKGVQVEEIYDLQSKCQGPVYGFIFLFKWIEERRSRRKVSTLVDDTSVIDDDIVNNMFFAHQLIPNSCATHALLSVLLNCSSVDLGPTLSRMKDFTKGFSPESKGYAIGNAPELAKAHNSHARPEPRHLPEKQNGLSAVRTMEAFHFVSYVPITGRLFELDGLKVYPIDHGPWGEDEEWTDKARRVIMERIGLATAGEPYHDIRFNLMAVVPDRRIKYEARLHVLKVNRQTVLEALQQLIRVTQPELIQTHKSQESQLPEESKSASNKSPLVLEANRAPAASEGNHTDGAEEAAGSCAQAPSHSPPNKPKLVVKPPGSSLNGVHPNPTPIVQRLPAFLDNHNYAKSPMQEEEDLAAGVGRSRVPVRPPQQYSDDEDDYEDDEEDDVQNTNSALRYKGKGTGKPGALSGSADGQLSVLQPNTINVLAEKLKESQKDLSIPLSIKTSSGAGSPAVAVPTHSQPSPTPSNESTDTASEIGSAFNSPLRSPIRSANPTRPSSPVTSHISKVLFGEDDSLLRVDCIRYNRAVRDLGPVISTGLLHLAEDGVLSPLALTEGGKGSSPSIRPIQGSQGSSSPVEKEVVEATDSREKTGMVRPGEPLSGEKYSPKVSLRCGFLL

SEQ ID NO: 828931 - protein, 427 aa, Homo sapiens
MNKGWLELESDPGLFTLLVEDFGVKGVQVEEIYDLQSKCQGPVYGFIFLFKWIEERRSRRKVSTLVDDTSVIDDDIVNNMFFAHQLIPNSCATHALLSVLLNCSSVDLGPTLSRMKDFTKGFSPESKGYAIGNAPELAKAHNSHARPEPRHLPEKQNGLSAVRTMEAFHFVSYVPITGRLFELDGLKVYPIDHGPWGEDEEWTDKARRVIMERIGLATAGEPYHDIRFNLMAVVPDRRIKYEARLHVLKVNRQTVLEALQQLIRVTQPELIQTHKSQESQLPEESKSASNKSPLVLEANRAPAASEGNHTDGAEEAAGSCAQAPSHSPPNKPKLVVKPPGSSLNGVHPNPTPIVQRLPAFLDNHNYAKSPMQEEEDLAAGVGRSRVPVRPPQQYSDDEDDYEDDEEDDVQNTNSALRSAQLSKATRF

SEQ ID NO: 828932 - protein, 126 aa, Homo sapiens
MNKGWLELESDPGLFTLLVEDFGVKGVQVEEIYDLQSKCQGPVYGFIFLFKWIEERRSRRKVSTLVDDTSVIDDDIVNNMFFAHQLIPNSCATHALLSVLLNCSSVDLGPTLSRMKDFTKGFSPEG

SEQ ID NO: 828933 - protein, 729 aa, Homo sapiens; identical to SEQ ID NO: 828920

SEQ ID NO: 828934 - protein, 427 aa, Homo sapiens; identical to SEQ ID NO: 828931

SEQ ID NO: 828935 - protein, 473 aa, Homo sapiens
MNKGWLELESDPGLFTLLVEDFGVKGVQVEEIYDLQSKCQGPVYGFIFLFKWIEERRSRRKVSTLVDDTSVIDDDIVNNMFFAHQLIPNSCATHALLSVLLNCSSVDLGPTLSRMKDFTKGFSPESKGYAIGNAPELAKAHNSHARPEPRHLPEKQNGLSAVRTMEAFHFVSYVPITGRLFELDGLKVYPIDHGPWGEDEEWTDKARRVIMERIGLATAGEPYHDIRFNLMAVVPDRRIKYEARLHVLKVNRQTVLEALQQLIRVTQPELIQTHKSQESQLPEESKSASNKSPLVLEANRAPAASEGNHTDGAEEAAGSCAQAPSHSPPNKPKLVVKPPGSSLNGVHPNPTPIVQRLPAFLDNHNYAKSPMQEEEDLAAGVGRSRVPVHPPPAMRVQTRPLRSAVLSTRHCARLSAQPTRRGPPALSPPTSPRCFLERMTACCVLTAYATTVLSVIWVLSSAQACCTWLRMGC

SEQ ID NO: 828936 - protein, 729 aa, Homo sapiens; identical to SEQ ID NO: 828920

SEQ ID NO: 828937 - protein, 729 aa, Homo sapiens; identical to SEQ ID NO: 828920

SEQ ID NO: 828938 - protein, 729 aa, Homo sapiens; identical to SEQ ID NO: 828920

SEQ ID NO: 828939 - protein, 118 aa, Homo sapiens
ARYELGCVMAEGERELSPKELLALLKCVEAEIANYEACLKEEVEKRKKFKIDDQRRTHNYDEFICTFISMLAQEGMLANLVEQNISVRRRQGVSIGRLHKQRKPDRRKRSRPYKAKRQ

SEQ ID NO: 828940 - protein, 610 aa, Homo sapiens
MNKGWLELESDPGLFTLLVEDFGVKGVQVEEIYDLQSKCQGPVYGFIFLFKWIEERRSRRKVSTLVDDTSVIDDDIVNNMFFAHQLIPNSCATHALLSVLLNCSSVDLGPTLSRMKDFTKGFSPESKGYAIGNAPELAKAHNSHARPEPRHLPEKQNGLSAVRTMEAFHFVSYVPITGRLFELDGLKVYPIDHGPWGEDEEWTDKARRVIMERIGLATAGEPYHDIRFNLMAVVPDRRIKYEARLHVLKVNRQTVLEALQQLIRVTQPELIQTHKSQESQLPEESKSASNKSPLVLEANRAPAASEGNHTDGAEEAAGSCAQAPSHSPPNKPKLVVKPPGSSLNGVHPNPTPIVQRLPAFLDNHNYAKSPMQEEEDLAAGVGRSRVPVRPPQQYSDDEDDYEDDEEDDVQNTNSALRYKGKGTGKPGALSGSADGQLSVLQPNTINVLAEKLKESQKDLSIPLSIKTSSGAGSPAVAVPTHSQPSPTPSNESTDTASEIGSAFNSPLRSPIRSANPTRPSSPVTSHISKVLFGEDDSLLRVDCIRYNRAVRDLGPVISTGLLHLAEDGVLSPLALTGGPWTGSLATWCTQEGGGKWPSDHKVSCTLMIFL

SEQ ID NO: 828941 - protein, 422 aa, Homo sapiens
MNKGWLELESDPGLFTLLVEDFGVKGVQVEEIYDLQSKCQGPVYGFIFLFKWIEERRSRRKVSTLVDDTSVIDDDIVNNMFFAHQLIPNSCATHALLSVLLNCSSVDLGPTLSRMKDFTKGFSPESKGYAIGNAPELAKAHNSHARPEPRHLPEKQNGLSAVRTMEAFHFVSYVPITGRLFELDGLKVYPIDHGPWGEDEEWTDKARRVIMERIGLATAGEPYHDIRFNLMAVVPDRRIKYEARLHVLKVNRQTVLEALQQLIRVTQPELIQTHKSQESQLPEESKSASNKSPLVLEANRAPAASEGNHTDGAEEAAGSCAQAPSHSPPNKPKLVVKPPGSSLNGVHPNPTPIVQRLPAFLDNHNYAKSPMQVSWEHPCRILYLILLRGCNRQFSHVVPWCSSLAWLGQAAWAWVARFLCLI

SEQ ID NO: 828942 - protein, 116 aa, Homo sapiens
AGETVSFSWRSYWRSCLCSCPVSDGAEEAAGSCAQAPSHSPPNKPKLVVKPPGSSLNGVHPNPTPIVQRLPAFLDNHNYAKSPMQVSWEHPCRILYLILLRGCNRQFSHVVPWCSS

SEQ ID NO: 828943 - protein, 491 aa, Homo sapiens
RRVPSSAVGAAVRRQETSAPRCTRPSRRQRGYCQQRRRLPRSAPTAPARPCRAERGSGGGMLALLAASVALAVAAGAQDSPAPGSRFVCTALPPEAVHAGCPLPAMPMQGGAQSPEEELRAAVLQLRETVVQQKETLGAQREAIRELTGKLARCEGLAGGKARGAGATGKDTMGDLPRDPGHVVEQLSRSLQTLKDRLESLEHQLRANVSNAGLPGDFREVLQQRLGELERQLLRKVAELEDEKSLLHNETSAHRQKTESTLNALLQRVTELERGNSAFKSPDAFKVSLPLRTNYLYGKIKKTLPELYAFTICLWLRSSASPGIGTPFSYAVPGQANEIVLIEWGNNPIELLINDKVAQLPLFVSDGKWHHICVTWTTRDGMWEAFQDGEKLGTGENLAPWHPIKPGGVLILGQEQDTVGGRFDATQAFVGELSQFNIWDRVLRAQEIVNIANCSTNMPGNIIPWVDNNVDVFGGASKWPVETCEERLLDL

SEQ ID NO: 828944 - protein, 491 aa, Homo sapiens; identical to SEQ ID NO: 828943

SEQ ID NO: 828945 - protein, 333 aa, Homo sapiens
RRVPSSAVGAAVRRQETSAPRCTRPSRRQRGYCQQRRRLPRSAPTAPARPCRAERGSGGGMLALLAASVALAVAAGAQDSPAPGSRFVCTALPPEAVHAGCPLPAMPMQGGAQSPEEELRAAVLQLRETVVQQKETLGAQREAIRELTGKLARCEGLAGGKARGAGATGKDTMGDLPRDPGHVVEQLSRSLQTLKDRLESLEHQLRANVSNAGLPGDFREVLQQRLGELERQLLRKVAELEDEKSLLHNETSAHRQKTESTLNALLQRVTELERGNSAFKSPDAFKVSLPLRTNYLYGKIKKTLPELYAFTICLWLRSSASPGIGTPSSPGAC

SEQ ID NO: 828946 - protein, 125 aa, Homo sapiens
NSAFKSPDAFKVSLPLRTNYLYGKIKKTLPELYAFTICLWLRSSASPGIGTPFSYAVPGQANEIVLIEWGNNPIELLINDKVRPACTATLPRTHHVVEGATAPTPAVLALLGPHSSVPDMGLRGC

SEQ ID NO: 828947 - protein, 177 aa, Homo sapiens [sequence omitted]

SEQ ID NO: 828948 - protein, 388 aa, Homo sapiens
LPGRRGRGLRGLRGCRGARGAGKAHLGWPWRAGGDMEDGVLKEGFLVKRGHIVHNWKARWFILRQNTLVYYKLEGGRRVTPPKGRILLDGCTITCPCLEYENRPLLIKLKTQTSTEYFLEACSREERDAWAFEITGAIHAGQPGKVQQLHSLRNSFKLPPHISLHRIVDKMHDSNTGIRSSPNMEQGSTYKKTFLGSSLVDWLISNSFTASRLEAVTLASMLMEENFLRPVGVRSMGAIRSGDLAEQFLDDSTALYTFAESYKKKISPKEEISLSTVELSGTVVKQGYLAKQGHKRKNWKVRRFVLRKDPAFLHYYDPSKEENRPVGGFSLRGSLVSALEDNGVPTGVKGNVQGNLFKVITKDDTHYYIQASSKAERAEWIEAIKKLT

SEQ ID NO: 828949 - protein, 388 aa, Homo sapiens; identical to SEQ ID NO: 828948

SEQ ID NO: 828950 - protein, 396 aa, Homo sapiens
LPGRRGRGLRGLRGCRGARGAGKAHLGWPWRAGGDMEDGVLKEGFLVKRGHIVHNWKARWFILRQNTLVYYKLEGGRRVTPPKGRILLDGCTITCPCLEYENRPLLIKLKTQTSTEYFLEACSREERDAWAFEITGAIHAGQPGKVQQLHSLRNSFKLPPHISLHRIVDKMHDSNTGIRSSPNMEQGSTYKKTFLGSSLVDWLISNSFTASRLEAVTLASMLMEENFLRPVGVRSMGAIRSGDLAEQFLDDSTALYTFAESYKKKISPKEEISLSTVELSGTVVKQGYLAKQGHKRKNWKVRRFVLRKDPAFLHYYDPSKEENRPVGGFSLRGSLVSALEDNGVPTGVKGNVQGNLFKVITKDDTHYYIQASSKAERAEWIEAIMTQTRVPGEWEC

SEQ ID NO: 828951 - protein, 140 aa, Homo sapiens [sequence omitted]

SEQ ID NO: 828952 - protein, 140 aa, Homo sapiens [sequence omitted]

SEQ ID NO: 828953 - protein, 79 aa, Homo sapiens
MCLGFFSPVPGSTSSATNVSMVVSADPLSSERAEMNILEINQELRSQLAESNQQFRDLKEKFLISQATAYSLANQLKKY

SEQ ID NO: 828954 - protein, 43 aa, Homo sapiens
MTMTTMTASSSSWSWKDKVLWRRGGNSDSLGLHHLLHRRDEVV

SEQ ID NO: 828955 - protein, 261 aa, Homo sapiens
WRGEVFVEESAAGEQSSGTQIPRHLEEKDLKPIFEQFGRIFELTVIKDKYTGLHKGEGSGRLKRLRGGLGGWGKLSQAGGVERLGRADVEGEEFRPEEKWMEELKKNSARVIRKPRWRTKEGLFWLKSCQDGCKDVDPRHMGCAFLTYCARDSALKAQSALHEQKTLPGMNRPIQVKPADSESRGEDRKLFVGMLGKQQTDEDVRKMFEPFGTIDECTVLRGPDGTSKGCAFVKFQTHAEAQAAINTLHSSRTLPVSPTPL

SEQ ID NO: 828956 - protein, 472 aa, Homo sapiens
WRGEVFVEESAAGEQSSGTQIPRHLEEKDLKPIFEQFGRIFELTVIKDKYTGLHKGCAFLTYCARDSALKAQSALHEQKTLPGMNRPIQVKPADSESRGEDRKLFVGMLGKQQTDEDVRKMFEPFGTIDECTVLRGPDGTSKGCAFVKFQTHAEAQAAINTLHSSRTLPGASSSLVVKFADTEKERGLRRMQQVATQLGMFSPIALQFGAYSAYTQALMQQQAALVAAHSAYLSPMATMAAVQMQHMAAINANGLIATPITPSSGTSTPPAIAATPVSAIPAALGVNGYSPVPTQPTGQPAPDALYPNGVHPYPAQSPAAPVDPLQQAYAGMQHYTAAYPAAYSLVAPAFPQPPALVAQQPPPPPQQQQQQQQQQQQQQQREGPDGCNIFIYHLPQEFTDSEILQMFVPFGHVISAKVFVDRATNQSKCFGFVSFDNPASAQAAIQAMNGFQIGMKRLKVQLKRPKDANRPY

SEQ ID NO: 828957 - protein, 396 aa, Homo sapiens
QGGQKEGHLERTPTGHQPTESRGEDRKLFVGMLGKQQTDEDVRKMFEPFGTIDECTVLRGPDGTSKGCAFVKFQTHAEAQAAINTLHSSRTLPGASSSLVVKFADTEKERGLRRMQQVATQLGMFSPIALQFGAYSAYTQALMQQQAALVAAHSAYLSPMATMAAVQMQHMAAINANGLIATPITPSSGTSTPPAIAATPVSAIPAALGVNGYSPVPTQPTGQPAPDALYPNGVHPYPAQSPAAPVDPLQQAYAGMQHYTAAYPAAYSLVAPAFPQPPALVAQQPPPPPQQQQQQQQQQQQQQQREGPDGCNIFIYHLPQEFTDSEILQMFVPFGHVISAKVFVDRATNQSKCFGFVSFDNPASAQAAIQAMNGFQIGMKRLKVQLKRPKDANRPY

SEQ ID NO: 828958 - protein, 259 aa, Homo sapiens
MKEPDAIKLFVGQIPRHLEEKDLKPIFEQFGRIFELTVIKDKYTGLHKGCAFLTYCARDSALKAQSALHEQKTLPGMNRPIQVKPADSESRGEDRKLFVGMLGKQQTDEDVRKMFEPFGTIDECTVLRGPDGTSKGCAFVKFQTHAEAQAAINTLHSSRTLPGASSSLVVKFADTEKERGLRRMQQVATQLGMFSPIALQFGAYSAYTQALMQQQAALVAAHSAYLSPMATMAAVQMQHMAAINANGLIATPITPSSAL

SEQ ID NO: 828959 - protein, 116 aa, Homo sapiens
SHGLSISFLIPFGFLYGLPPPSCLLYPCSHGWGWGQMGPFGLRPDDLPSSGSPILDAVTHPSPLPSPRARDPHRGSLPHASPMFLPSQVWRSQRKGRLTPSSHDWPRPSPHTCPGP

SEQ ID NO: 828960 - protein, 109 aa, Homo sapiens
MKEPDAIKLFVGQIPRHLEEKDLKPIFEQFGRIFELTVIKDKYTGLHKGEGSGRLKRLRGGLGGWGKLSQAGGVERLGRADVEGEEFRPEEKWMEELKKNSARVIRKPR

SEQ ID NO: 828961 - protein, 116 aa, Homo sapiens; identical to SEQ ID NO: 828959

SEQ ID NO: 828962 - protein, 465 aa, Homo sapiens
MKEPDAIKLFVGQIPRHLEEKDLKPIFEQFGRIFELTVIKDKYTGLHKGCAFLTYCARDSALKAQSALHEQKTLPGMNRPIQVKPADSESRGEDRKLFVGMLGKQQTDEDVRKMFEPFGTIDECTVLRGPDGTSKGCAFVKFQTHAEAQAAINTLHSSRTLPGASSSLVVKFADTEKERGLRRMQQVATQLGMFSPIALQFGAYSAYTQALMQQQAALVAAHSAYLSPMATMAAVQMQHMAAINANGLIATPITPSSGTSTPPAIAATPVSAIPAALGVNGYSPVPTQPTGQPAPDALYPNGVHPYPAQSPAAPVDPLQQAYAGMQHYTAAYPAAYSLVAPAFPQPPALVAQQPPPPPQQQQQQQQQQQQQQQREGPDGCNIFIYHLPQEFTDSEILQMFVPFGHVISAKVFVDRATNQSKCFGFVSFDNPASAQAAIQAMNGFQIGMKRLKVQLKRPKDANRPY

SEQ ID NO: 828963 - protein, 365 aa, Homo sapiens
MLGKQQTDEDVRKMFEPFGTIDECTVLRGPDGTSKGCAFVKFQTHAEAQAAINTLHSSRTLPGASSSLVVKFADTEKERGLRRMQQVATQLGMFSPIALQFGAYSAYTQALMQQQAALVAAHSAYLSPMATMAAVQMQHMAAINANGLIATPITPSSGTSTPPAIAATPVSAIPAALGVNGYSPVPTQPTGQPAPDALYPNGVHPYPAQSPAAPVDPLQQAYAGMQHYTAAYPAAYSLVAPAFPQPPALVAQQPPPPPQQQQQQQQQQQQQQQREGPDGCNIFIYHLPQEFTDSEILQMFVPFGHVISAKVFVDRATNQSKCFGFVSFDNPASAQAAIQAMNGFQIGMKRLKVQLKRPKDANRPY

SEQ ID NO: 828964 - protein, 465 aa, Homo sapiens; identical to SEQ ID NO: 828962

SEQ ID NO: 828965 - protein, 465 aa, Homo sapiens; identical to SEQ ID NO: 828962

SEQ ID NO: 828966 - protein, 85 aa, Homo sapiens
VPRAASLQSPSRCPLQLPVPPGGAVSKAGPDAWCHQRGLEPGPRALAEENESRQRRWPRLAARKQWGGQQGDIGLFPGAWGTDGD

SEQ ID NO: 828967 - protein, 112 aa, Homo sapiens
RRGERKWRCQNLSTAPAQSSPEVLRREHSCPRGLGGRDLCTATQPRSRVHAYARVYVLCVFADVCPCVCVCVVAVPGESDLRRCCGEGCKVLAGGGTPHASPWAGLFLAGEC

SEQ ID NO: 828968 - protein, 344 aa, Homo sapiens
GGEGAAAGGCEERPAGGGGRRAAMAAAEAGGDDARCVRLSAERAQALLADVDTLLFDCDGVLWRGETAVPGAPEALRALRARGKRLGFITNNSSKTRAAYAEKLRRLGFGGPAGPGASLEVFGTAYCTALYLRQRLAGAPAPKAYVLGSPALAAELEAVGVASVGVGPEPLQGEGPGDWLHAPLEPDVRAVVVGFDPHFSYMKLTKALRYLQQPGCLLVGTNMDNRLPLENGRFIAGTGCLVRAVEMAAQRQADIIGKPSRFIFDCVSQEYGINPERTVMVGDRLDTDILLGATCGLKTILTLTGVSTLGDVKNNQESDCVSKKKMVPDFYVDSIADLLPALQG

SEQ ID NO: 828969 - protein, 315 aa, Homo sapiens
RGGRRGGRLRGAAGGRRRPAGGDGGGGGRWRRRPLRAAERRAGTGAAGRRGHAAVRLRRRAVARGDRRAWRARGPAGAASPRQAPGLHHQQQQQDPRCLRREAAAPGLRRPRGARRQPGGLRHGLLHRALPAPAVGVGPEPLQGEGPGDWLHAPLEPDVRAVVVGFDPHFSYMKLTKALRYLQQPGCLLVGTNMDNRLPLENGRFIAGTGCLVRAVEMAAQRQADIIGKPSRFIFDCVSQEYGINPERTVMVGDRLDTDILLGATCGLKTILTLTGVSTLGDVKNNQESDCVSKKKMVPDFYVDSIADLLPALQG

SEQ ID NO: 828970 - protein, 344 aa, Homo sapiens; identical to SEQ ID NO: 828968

SEQ ID NO: 828971 - protein, 344 aa, Homo sapiens; identical to SEQ ID NO: 828968

SEQ ID NO: 828972 - protein, 372 aa, Homo sapiens
GGEGAAAGGCEERPAGGGGRRAAMAAAEAGGDDARCVRLSAERAQALLADVDTLLFDCDGVLWRGETAVPGAPEALRALRARGKRLGFITNNSSKTRAAYAEKLRRLGFGGPAGPGASLEVFGTAYCTALYLRQRLAGAPAPKAYVLGSPALAAELEAVGVASVGVGPEPLQGEGPGDWLHAPLEPDVRAVVVGFDPHFSYMKLTKALRYLQQPGCLLVGTNMDNRLPLENGRFIAGPCALGREAGGRAAGPLPAPLTRSPVPRGTGCLVRAVEMAAQRQADIIGKPSRFIFDCVSQEYGINPERTVMVGDRLDTDILLGATCGLKTILTLTGVSTLGDVKNNQESDCVSKKKMVPDFYVDSIADLLPALQG

SEQ ID NO: 828973 - protein, 352 aa, Homo sapiens
  misc_feature (243)..(243): Xaa can be any naturally occurring amino acid
GGEGAAAGGCEERPAGGGGRRAAMAAAEAGGDDARCVRLSAERAQALLADVDTLLFDCDGVLWRGETAVPGAPEALRALRARGKRLGFITNNSSKTRAAYAEKLRRLGFGGPAGPGASLEVFGTAYCTALYLRQRLAGAPAPKAYVLGSPALAAELEAVGVASVGVGPEPLQGEGPGDWLHAPLEPDVRAVVVGFDPHFSYMKLTKALRYLQQPGCLLVGTNMDNRLPLENGRFIADGCLAEXPPRVWVEKGKNMAAQRQADIIGKPSRFIFDCVSQEYGINPERTVMVGDRLDTDILLGATCGLKTILTLTGVSTLGDVKNNQESDCVSKKKMVPDFYVDSIADLLPALQG

SEQ ID NO: 828974 - protein, 622 aa, Homo sapiens
MALPTARPLLGSCGTPALGSLLFLLFSLGWVQPSRTLAGETGQEAAPLDGVLANPPNISSLSPRQLLGFPCAEVSGLSTERVRELAVALAQKNVKLSTEQLRCLAHRLSEPPEDLDALPLDLLLFLNPDAFSGPQACTRFFSRITKANVDLLPRGAPERQRLLPAALACWGVRGSLLSEADVRALGGLACDLPGRFVAESAEVLLPRLVSCPGPLDQDQQEAARAALQGGGPPYGPPSTWSVSTMDALRGLLPVLGQPIIRSIPQGIVAAWRQRSSRDPSWRQPERTILRPRFRREVEKTACPSGKKAREIDESLIFYKKWELEACVDAALLATQMDRVNAIPFTYEQLDVLKHKLDELYPQGYPESVIQHLGYLFLKMSPEDIRKWNVTSLETLKALLEVNKGHEMSPQVATLIDRFVKGRGQLDKDTLDTLTAFYPGYLCSLSPEELSSVPPSSIWAVRPQDLDTCDPRQLDVLYPKARLAFQNMNGSEYFVKIQSFLGGAPTEDLKALSQQNVSMDLATFMKLRTDAVLPLTVAEVQKLLGPHVEGLKAEERHRPVRDWILRQRQDDLDTLGLGLQGGIPNGYLVLDLSMQEALSGTPCLLGPGPVLTVLALLLASTLA

SEQ ID NO: 828975 - protein, 657 aa, Homo sapiens
QALHPHFPIEETEAEEAQRATGGPTVPPSLGSTQTMALPTARPLLGSCGTPALGSLLFLLFSLGWVQPSRTLAGETGQEAAPLDGVLANPPNISSLSPRQLLGFPCAEVSGLSTERVRELAVALAQKNVKLSTEQLRCLAHRLSEPPEDLDALPLDLLLFLNPDAFSGPQACTRFFSRITKANVDLLPRGAPERQRLLPAALACWGVRGSLLSEADVRALGGLACDLPGRFVAESAEVLLPRLVSCPGPLDQDQQEAARAALQGGGPPYGPPSTWSVSTMDALRGLLPVLGQPIIRSIPQGIVAAWRQRSSRDPSWRQPERTILRPRFRREVEKTACPSGKKAREIDESLIFYKKWELEACVDAALLATQMDRVNAIPFTYEQLDVLKHKLDELYPQGYPESVIQHLGYLFLKMSPEDIRKWNVTSLETLKALLEVNKGHEMSPQVATLIDRFVKGRGQLDKDTLDTLTAFYPGYLCSLSPEELSSVPPSSIWAVRPQDLDTCDPRQLDVLYPKARLAFQNMNGSEYFVKIQSFLGGAPTEDLKALSQQNVSMDLATFMKLRTDAVLPLTVAEVQKLLGPHVEGLKAEERHRPVRDWILRQRQDDLDTLGLGLQGGIPNGYLVLDLSMQEALSGTPCLLGPGPVLTVLALLLASTLA

SEQ ID NO: 828976 - protein, 677 aa, Homo sapiens
QALHPHFPIEETEAEEAQRHALLFLPGRPLPSAVTRGQRATGGPTVPPSLGSTQTMALPTARPLLGSCGTPALGSLLFLLFSLGWVQPSRTLAGETGQEAAPLDGVLANPPNISSLSPRQLLGFPCAEVSGLSTERVRELAVALAQKNVKLSTEQLRCLAHRLSEPPEDLDALPLDLLLFLNPDAFSGPQACTRFFSRITKANVDLLPRGAPERQRLLPAALACWGVRGSLLSEADVRALGGLACDLPGRFVAESAEVLLPRLVSCPGPLDQDQQEAARAALQGGGPPYGPPSTWSVSTMDALRGLLPVLGQPIIRSIPQGIVAAWRQRSSRDPSWRQPERTILRPRFRREVEKTACPSGKKAREIDESLIFYKKWELEACVDAALLATQMDRVNAIPFTYEQLDVLKHKLDELYPQGYPESVIQHLGYLFLKMSPEDIRKWNVTSLETLKALLEVNKGHEMSPQVATLIDRFVKGRGQLDKDTLDTLTAFYPGYLCSLSPEELSSVPPSSIWAVRPQDLDTCDPRQLDVLYPKARLAFQNMNGSEYFVKIQSFLGGAPTEDLKALSQQNVSMDLATFMKLRTDAVLPLTVAEVQKLLGPHVEGLKAEERHRPVRDWILRQRQDDLDTLGLGLQGGIPNGYLVLDLSMQEALSGTPCLLGPGPVLTVLALLLASTLA

SEQ ID NO: 828977 - protein, 630 aa, Homo sapiens
MALPTARPLLGSCGTPALGSLLFLLFSLGWVQPSRTLAGETGQEAAPLDGVLANPPNISSLSPRQLLGFPCAEVSGLSTERVRELAVALAQKNVKLSTEQLRCLAHRLSEPPEDLDALPLDLLLFLNPDAFSGPQACTRFFSRITKANVDLLPRGAPERQRLLPAALACWGVRGSLLSEADVRALGGLACDLPGRFVAESAEVLLPRLVSCPGPLDQDQQEAARAALQGGGPPYGPPSTWSVSTMDALRGLLPVLGQPIIRSIPQGIVAAWRQRSSRDPSWRQPERTILRPRFRREVEKTACPSGKKAREIDESLIFYKKWELEACVDAALLATQMDRVNAIPFTYEQLDVLKHKLDELYPQGYPESVIQHLGYLFLKMSPEDIRKWNVTSLETLKALLEVNKGHEMSPQAPRRPLPQVATLIDRFVKGRGQLDKDTLDTLTAFYPGYLCSLSPEELSSVPPSSIWAVRPQDLDTCDPRQLDVLYPKARLAFQNMNGSEYFVKIQSFLGGAPTEDLKALSQQNVSMDLATFMKLRTDAVLPLTVAEVQKLLGPHVEGLKAEERHRPVRDWILRQRQDDLDTLGLGLQGGIPNGYLVLDLSMQEALSGTPCLLGPGPVLTVLALLLASTLA

SEQ ID NO: 828978 - protein, 317 aa, Homo sapiens
IQIRSVPLLGSLLKKWELEACVDAALLATQMDRVNAIPFTYEQLDVLKHKLDELYPQGYPESVIQHLGYLFLKMSPEDIRKWNVTSLETLKALLEVNKGHEMSPQVATLIDRFVKGRGQLDKDTLDTLTAFYPGYLCSLSPEELSSVPPSSIWAVRPQDLDTCDPRQLDVLYPKARLAFQNMNGSEYFVKIQSFLGGAPTEDLKALSQQNVSMDLATFMKLRTDAVLPLTVAEVQKLLGPHVEGLKAEERHRPVRDWILRQRQDDLDTLGLGLQGGIPNGYLVLDLSMQEALSGTPCLLGPGPVLTVLALLLASTLA

SEQ ID NO: 828979 - protein, 340 aa, Homo sapiens
FRESLIGRAGLRQLADKTACPSGKKAREIDESLIFYKKWELEACVDAALLATQMDRVNAIPFTYEQLDVLKHKLDELYPQGYPESVIQHLGYLFLKMSPEDIRKWNVTSLETLKALLEVNKGHEMSPQVATLIDRFVKGRGQLDKDTLDTLTAFYPGYLCSLSPEELSSVPPSSIWAVRPQDLDTCDPRQLDVLYPKARLAFQNMNGSEYFVKIQSFLGGAPTEDLKALSQQNVSMDLATFMKLRTDAVLPLTVAEVQKLLGPHVEGLKAEERHRPVRDWILRQRQDDLDTLGLGLQGGIPNGYLVLDLSMQEALSGTPCLLGPGPVLTVLALLLASTLA

SEQ ID NO: 828980 - protein, 631 aa, Homo sapiens
MALPTARPLLGSCGTPALGSLLFLLFSLGWVQPSRTLAGETGQEAAPLDGVLANPPNISSLSPRQLLGFPCAEVSGLSTERVRELAVALAQKNVKLSTEQLRCLAHRLSEPPEDLDALPLDLLLFLNPDAFSGPQACTRFFSRITKANVDLLPRGAPERQRLLPAALACWGVRGSLLSEADVRALGGLACDLPGRFVAESAEVLLPRLVSCPGPLDQDQQEAARAALQGGGPPYGPPSTWSVSTMDALRGLLPVLGQPIIRSIPQGIVAAWRQRSSRDPSWRQPERTILRPRFRREVEKTACPSGKKAREIDESLIFYKKWELEACVDAALLATQMDRVNAIPFTYEQLDVLKHKLDELYPQGYPESVIQHLGYLFLKMSPEDIRKWNVTSLETLKALLEVNKGHEMSPQVATLIDRFVKGRGQLDKDTLDTLTAFYPGYLCSLSPEELSSVPPSSIWAVRPQDLDTCDPRQLDVLYPKARLAFQNMNGSEYFVKIQSFLGGAPTEDLKALSQQNVSMDLATFMKLRTDAVLPLTVAEVQKLLGPHVEGLKAEERHRPVRDWILRQRQDDLDTLGLGLQGGIPNGYLVLDLSMQGGRGGQARAGGRAGGVEVGALSHPSLCRRPSRGRPAS

SEQ ID NO: 828981 - protein, 612 aa, Homo sapiens
MALPTARPLLGSCGTPALGSLLFLLFSLGWVQPSRTLAGETGQEAAPLDGVLANPPNISSLSPRQLLGFPCAEVSGLSTERVRELAVALAQKNVKLSTEQLRCLAHRLSEPPEDLDALPLDLLLFLNPDAFSGPQACTRFFSRITKANVDLLPRGAPERQRLLPAALACWGVRGSLLSEADVRALGGLACDLPGRFVAESAEVLLPRLVSCPGPLDQDQQEAARAALQGGGPPYGPPSTWSVSTMDALRGLLPVLGQPIIRSIPQGIVAAWRQRSSRDPSWRQPERTILRPRFRREVEKTACPSGKKAREIDESLIFYKKWELEACVDAALLATQMDRVNAIPFTYEQLDVLKHKLDELYPQGYPESVIQHLGYLFLKMSPEDIRKWNVTSLETLKALLEVNKGHEMSPQVATLIDRFVKGRGQLDKDTLDTLTAFYPGYLCSLSPEELSSVPPSSIWAVRPQDLDTCDPRQLDVLYPKARLAFQNMNGSEYFVKIQSFLGGAPTEDLKALSQQNVSMDLATFMKLRTDAVLPLTVAEVQKLLGPHVEGLKAEERHRPVRDWILRQRQDDLDTLGLGLQGGIPNGYLVLDLSMQGPGPVLTVLALLLASTLA

SEQ ID NO: 828982 - protein, 310 aa, Homo sapiens
MALPTARPLLGSCGTPALGSLLFLLFSLGWVQPSRTLAGETGQEAAPLDGVLANPPNISSLSPRQLLGFPCAEVSGLSTERVRELAVALAQKNVKLSTEQLRCLAHRLSEPPEDLDALPLDLLLFLNPDAFSGPQACTRFFSRITKANVDLLPRGAPERQRLLPAALACWGVRGSLLSEADVRALGGLACDLPGRFVAESAEVLLPRLVSCPGPLDQDQQEAARAALQGGGPPYGPPSTWSVSTMDALRGLLPVLGQPIIRSIPQGIVAAWRQRSSRDPSWRQLNGPSSGRGSGGKWRRQPVLQARRPAR

SEQ ID NO: 828983 - protein, 73 aa, Homo sapiens
LSEADVRALGGLACDLPGRFVAESAEVLLPRLVSCPGPLDQDQQEAARAALQGGGPPYGYSEGVWNLEGSPGG

SEQ ID NO: 828984 - protein, 472 aa, Homo sapiens
MGCDRNCGLIAGAVIGAVLAVFGGILMPVGDLLIQKTIKKQVVLEEGTIAFKNWVKTGTEVYRQFWIFDVQNPQEVMMNSSNIQVKQRGPYTYRVRFLAKENVTQDAEDNTVSFLQPNGAIFEPSLSVGTEADNFTVLNLAVAAASHIYQNQFVQMILNSLINKSKSSMFQVRTLRELLWGYRDPFLSLVPYPVTTTVGLFYPYNNTADGVYKVFNGKDNISKVAIIDTYKGKRNLSYWESHCDMINGTDAASFPPFVEKSQVLQFFSSDICRSIYAVFESDVNLKGIPVYRFVLPSKAFASPVENPDNYCFCTEKIISKNCTSYGVLDISKCKEGRPVYISLPHFLYASPDVSEPIDGLNPNEEEHRTYLDIEPITGFTLQFAKRLQVNLLVKPSEKIQVLKNLKRNYIVPILWLNETGTIGDEKANMFRSQVTGKINLLGLIEMILLSVGVVMFVAFMISYCACRSKTIK

SEQ ID NO: 828985 - protein, 472 aa, Homo sapiens; identical to SEQ ID NO: 828984

SEQ ID NO: 828986 - protein, 472 aa, Homo sapiens; identical to SEQ ID NO: 828984

SEQ ID NO: 828987 - protein, 71 aa, Homo sapiens
HGPSLIKPKNRHNIVPLQILWLNETGTIGDEKANMFRSQVTGKINLLGLIEMILLSVGVVIVCFRGPLERH

SEQ ID NO: 828988 - protein, 472 aa, Homo sapiens; identical to SEQ ID NO: 828984

SEQ ID NO: 828989 - protein, 472 aa, Homo sapiens; identical to SEQ ID NO: 828984

SEQ ID NO: 828990 - protein, 472 aa, Homo sapiens; identical to SEQ ID NO: 828984

SEQ ID NO: 828991 - protein, 472 aa, Homo sapiens; identical to SEQ ID NO: 828984

SEQ ID NO: 828992 - protein, 472 aa, Homo sapiens; identical to SEQ ID NO: 828984

SEQ ID NO: 828993 - protein, 472 aa, Homo sapiens; identical to SEQ ID NO: 828984

SEQ ID NO: 828994 - protein, 472 aa, Homo sapiens; identical to SEQ ID NO: 828984

SEQ ID NO: 828995 - protein, 472 aa, Homo sapiens; identical to SEQ ID NO: 828984

SEQ ID NO: 828996 - protein, 472 aa, Homo sapiens; identical to SEQ ID NO: 828984

SEQ ID NO: 828997 - protein, 472 aa, Homo sapiens; identical to SEQ ID NO: 828984

SEQ ID NO: 828998 - protein, 472 aa, Homo sapiens; identical to SEQ ID NO: 828984

SEQ ID NO: 828999 - protein, 472 aa, Homo sapiens; identical to SEQ ID NO: 828984

SEQ ID NO: 829000 - protein, 396 aa, Homo sapiens
MMNSSNIQVKQRGPYTYRVRFLAKENVTQDAEDNTVSFLQPNGAIFEPSLSVGTEADNFTVLNLAVAAASHIYQNQFVQMILNSLINKSKSSMFQVRTLRELLWGYRDPFLSLVPYPVTTTVGLFYPYNNTADGVYKVFNGKDNISKVAIIDTYKGKRNLSYWESHCDMINGTDAASFPPFVEKSQVLQFFSSDICRSIYAVFESDVNLKGIPVYRFVLPSKAFASPVENPDNYCFCTEKIISKNCTSYGVLDISKCKEGRPVYISLPHFLYASPDVSEPIDGLNPNEEEHRTYLDIEPITGFTLQFAKRLQVNLLVKPSEKIQVLKNLKRNYIVPILWLNETGTIGDEKANMFRSQVTGKINLLGLIEMILLSVGVVMFVAFMISYCACRSKTIK

SEQ ID NO: 829001 - protein, 396 aa, Homo sapiens; identical to SEQ ID NO: 829000

SEQ ID NO: 829002 - protein, 317 aa, Homo sapiens
MILNSLINKSKSSMFQVRTLRELLWGYRDPFLSLVPYPVTTTVGLFYPYNNTADGVYKVFNGKDNISKVAIIDTYKGKRNLSYWESHCDMINGTDAASFPPFVEKSQVLQFFSSDICRSIYAVFESDVNLKGIPVYRFVLPSKAFASPVENPDNYCFCTEKIISKNCTSYGVLDISKCKEGRPVYISLPHFLYASPDVSEPIDGLNPNEEEHRTYLDIEPITGFTLQFAKRLQVNLLVKPSEKIQVLKNLKRNYIVPILWLNETGTIGDEKANMFRSQVTGKINLLGLIEMILLSVGVVMFVAFMISYCACRSKTIK

SEQ ID NO: 829003 - protein, 228 aa, Homo sapiens [sequence omitted]

SEQ ID NO: 829004 - protein, 431 aa, Homo sapiens
MGCDRNCGLIAGAVIGAVLAVFGGILMPVGDLLIQKTIKKQVVLEEGTIAFKNWVKTGTEVYRQFWIFDVQNPQEVMMNSSNIQVKQRGPYTYRVRFLAKENVTQDAEDNTVSFLQPNGAIFEPSLSVGTEADNFTVLNLAVAAASHIYQNQFVQMILNSLINKSKSSMFQVRTLRELLWGYRDPFLSLVPYPVTTTVGLFYPYNNTADGVYKVFNGKDNISKVAIIDTYKGKRNLSYWESHCDMINGTDAASFPPFVEKSQVLQFFSSDICRSIYAVFESDVNLKGIPVYRFVLPSKAFASPVENPDNYCFCTEKIISKNCTSYGVLDISKCKEGRPVYISLPHFLYASPDVSEPIDGLNPNEEEHRTYLDIEPITGFTLQFAKRLQVNLLVKPSEKIQVLKNLKRNYIVPILWLNETATIGDEITPGQK

SEQ ID NO: 829005 - protein, 234 aa, Homo sapiens [sequence omitted]

SEQ ID NO: 829006 - protein, 227 aa, Homo sapiens
MGCDRNCGLIAGAVIGAVLAVFGGILMPVGDLLIQKTIKKQVVLEEGTIAFKNWVKTGTEVYRQFWIFDVQNPQEVMMNSSNIQVKQRGPYTYRVRFLAKENVTQDAEDNTVSFLQPNGAIFEPSLSVGTEADNFTVLNLAVAVSRQTTKLSILKYSRTHVINPIIRIIRFYLFFHFYQNVFLYHYFEWRHGHLESDKIIRIDCIRRPLYFFHYFLSKHSLYLISIL

SEQ ID NO: 829007 - protein, 255 aa, Homo sapiens
MGCDRNCGLIAGAVIGAVLAVFGGILMPVGDLLIQKTIKKQVVLEEGTIAFKNWVKTGTEVYRQFWIFDVQNPQEVMMNSSNIQVKQRGPYTYRVRFLAKENVTQDAEDNTVSFLQPNGAIFEPSLSVGTEADNFTVLNLAVAAASHIYQNQFVQMILNSLINKSKSSMFQVRTLRELLWGYRDPFLSLVPYPVTTTVGLFYPYNNTADGVYKVFNGKDNISKVAIIDTYKGKRGVKKGILSLIWGKGPLAEHWI

SEQ ID NO: 829008 - protein, 229 aa, Homo sapiens
  misc_feature (208)..(208): Xaa can be any naturally occurring amino acid
  misc_feature (227)..(227): Xaa can be any naturally occurring amino acid
MGCDRNCGLIAGAVIGAVLAVFGGILMPVGDLLIQKTIKKQVVLEEGTIAFKNWVKTGTEVYRQFWIFDVQNPQEVMMNSSNIQVKQRGPYTYRVRFLAKENVTQDAEDNTVSFLQPNGAIFEPSLSVGTEADNFTVLNLAVAAASHIYQNQFVQMILNSLINKSKSSMFQVRTLRELLWGYRDPFLSLVPYPVTTTVGLFYPYTYCXWSYKFHGKILSKCISPFKXRI

SEQ ID NO: 829009 - protein, 1227 aa, Homo sapiens [sequence omitted]

SEQ ID NO: 829010 - protein, 196 aa, Homo sapiens
DVDYDGKRDRWNGYNPEEHIENVEEYAKVDLAKRTLKAQKLQEELALGKLVEQANSPKHQREKRANKGSKATERLKKKLSEQESLLLLMSPSMAFRVHSRNGKSYTFLISSDYERAEWRENIREQQKKCFRSFSLTSVELQMLTNSCVKLQTVHSIPLTINKEGGPPPSPCTGHLQGGQTASLKADPPYPVSTFDA

SEQ ID NO: 829011 - protein, 131 aa, Homo sapiens
MGSQDPNFEKGIALSDPVAKESCMLNLLLSLPEANLLTFLFLLDHLKRVAEKEAVNKMSLHNLATVFGPTLLRPSEKESKLPANPSQPITMTDSWSLEVMSQVQVLLYFLQLEAIPAPDSKRQSILFSTEV

SEQ ID NO: 829012 - protein, 1271 aa, Homo sapiens [sequence omitted]

SEQ ID NO: 829013 - protein, 1064 aa, Homo sapiens
MQMERKKSQHGAGSSVGDASRPPYRGRSSESSCGVDGDYEDAELNPRFLKDNLIDANGGSRPPWPPLEYQPYQSIYVGGMMEGEGKGPLLRSQSTSEQEKRLTWPRRSYSPRSFEDCGGGYTPDCSSNENLTSSEEDFSSGQSSRVSPSPTTYRMFRDKSRSPSQNSQQSFDSSSPPTPQCHKRHRHCPVVVSEATIVGVRKTGQIWPNDGEGAFHGDADGSFGTPPGYGCAADRAEEQRRHQDGLPYIDDSPSSSPHLSSKGRGSRDALVSGALESTKASELDLEKGLEMRKWVLSGILASEETYLSHLEALLLPMKPLKAAATTSQPVLTSQQIETIFFKVPELYEIHKEFYDGLFPRVQQWSHQQRVGDLFQKLASQLGVYRAFVDNYGVAMEMAEKCCQANAQFAEISENLRARSNKDAKDPTTKNSLETLLYKPVDRVTRSTLVLHDLLKHTPASHPDHPLLQDALRISQNFLSSINEEITPRRQSMTVKKGEHRQLLKDSFMVELVEGARKLRHVFLFTDLLLCTKLKKQSGGKTQQYDCKWYIPLTDLSFQMVDELEAVPNIPLVPDEELDALKIKISQIKSDIQREKRANKGSKATERLKKKLSEQESLLLLMSPSMAFRVHSRNGKSYTFLISSDYERAEWRENIREQQKKCFRSFSLTSVELQMLTNSCVKLQTVHSIPLTINKEDDESPGLYGFLNVIVHSATGFKQSSNLYCTLEVDSFGYFVNKAKTRVYRDTAEPNWNEEFEIELEGSQTLRILCYEKCYNKTKIPKEDGESTDRLMGKGQVQLDPQALQDRDWQRTVIAMNGIEVKLSVKFNSREFSLKRMPSRKQTGVFGVKIAVVTKRERSKVPYIVRQCVEEIERRGMEEVGIYRVSGVATDIQALKAAFDVNNKDVSVMMSEMDVNAIAGTLKLYFRELPEPLFTDEFYPNFAEGIALSDPVAKESCMLNLLLSLPEANLLTFLFLLDHLKRVAEKEAVNKMSLHNLATVFGPTLLRPSEKESKLPANPSQPITMTDSWSLEVMSQVQVLLYFLQLEAIPAPDSKRQSILFSTEV

SEQ ID NO: 829014 - protein, 1294 aa, Homo sapiens
MVDPVGFAEAWKAQFPDSEPPRMELRSVGDIEQELERCKASIRRLEQEVNQERFRMIYLQTLLAKEKKSYDRQRWGFRRAAQAPDGASEPRASASRPQPAPADGADPPPAEEPEARPDGEGSPGKARPGTARRPGAAASGERDDRGPPASVAALRSNFERIRKGHGQPGADAEKPFYVNVEFHHERGLVKVNDKEVSDRISSLGSQAMQMERKKSQHGAGSSVGDASRPPYRGRSSESSCGVDGDYEDAELNPRFLKDNLIDANGGSRPPWPPLEYQPYQSIYVGGMMEGEGKGPLLRSQSTSEQEKRLTWPRRSYSPRSFEDCGGGYTPDCSSNENLTSSEEDFSSGQSSRVSPSPTTYRMFRDKSRSPSQNSQQSFDSSSPPTPQCHKRHRHCPVVVSEATIVGVRKTGQIWPNDGEGAFHGDADGSFGTPPGYGCAADRAEEQRRHQDGLPYIDDSPSSSPHLSSKGRGSRDALVSGALESTKASELDLEKGLEMRKWVLSGILASEETYLSHLEALLLPMKPLKAAATTSQPVLTSQQIETIFFKVPELYEIHKEFYDGLFPRVQQWSHQQRVGDLFQKLASQLGVYRAFVDNYGVAMEMAEKCCQANAQFAEISENLRARSNKDAKDPTTKNSLETLLYKPVDRVTRSTLVLHDLLKHTPASHPDHPLLQDALRISQNFLSSINEEITPRRQSMTVKKGEHRQLLKDSFMVELVEGARKLRHVFLFTDLLLCTKLKKQSGGKTQQYDCKWYIPLTDLSFQMVDELEAVPNIPLVPDEELDALKIKISQIKSDIQREKRANKGSKATERLKKKLSEQESLLLLMSPSMAFRVHSRNGKSYTFLISSDYERAEWRENIREQQKKCFRSFSLTSVELQMLTNSCVKLQTVHSIPLTINKEDDESPGLYGFLNVIVHSATGFKQSSNLYCTLEVDSFGYFVNKAKTRVYRDTAEPNWNEEFEIELEGSQTLRILCYEKCYNKTKIPKEDGESTDRLMGKGQVQLDPQALQDRDWQRTVIAMNGIEVKLSVKFNSREFSLKRMPSRKQTGVFGVKIAVVTKRERSKVPYIVRQCVEEIERRGMEEVGIYRVSGVATDIQALKAAFDVNNKDVSVMMSEMDVNAIAGTLKLYFRELPEPLFTDEFYPNFAEGIALSDPVAKESCMLNLLLSLPEANLLTFLFLLDHLKRVAEKEAVNKMSLHNLATVFGPTLLRPSEKESKLPANPSQPITMTDSWSLEVMSQGPRAGGCFGSTATSYPPPASTACVVAKPVWGWGTQRSPGGGPGSPSAVQAKA

SEQ ID NO: 829015 - protein, 1188 aa, Homo sapiens
MVDPVGFAEAWKAQFPDSEPPRMELRSVGDIEQELERCKASIRRLEQEVNQERFRMIYLQTLLAKEKKSYDRQRWGFRRAAQAPDGASEPRASASRPQPAPADGADPPPAEEPEARPDGEGSPGKARPGTARRPGAAASGERDDRGPPASVAALRSNFERIRKGHGQPGADAEKPFYVNVEFHHERGLVKVNDKEVSDRISSLGSQAMQMERKKSQHGAGSSVGDASRPPYRGRSSESSCGVDGDYEDAELNPRFLKDNLIDANGGSRPPWPPLEYQPYQSIYVGGMMEGEGKGPLLRSQSTSEQEKRLTWPRRSYSPRSFEDCGGGYTPDCSSNENLTSSEEDFSSGQSSRVSPSPTTYRMFRDKSRSPSQNSQQSFDSSSPPTPQCHKRHRHCPVVVSEATIVGVRKTGQIWPNDGEGAFHGDADGSFGTPPGYGCAADRAEEQRRHQDGLPYIDDSPSSSPHLSSKGRGSRDALVSGALESTKASELDLEKGLEMRKWVLSGILASEETYLSHLEALLLPMKPLKAAATTSQPVLTSQQIETIFFKVPELYEIHKEFYDGLFPRVQQWSHQQRVGDLFQKLASQLGVYRAFVDNYGVAMEMAEKCCQANAQFAEISENLRARSNKDAKDPTTKNSLETLLYKPVDRVTRSTLVLHDLLKHTPASHPDHPLLQDALRISQNFLSSINEEITPRRQSMTVKKGEHRQLLKDSFMVELVEGARKLRHVFLFTDLLLCTKLKKQSGGKTQQYDCKWYIPLTDLSFQMVDELEAVPNIPLVPDEELDALKIKISQIKSDIQREKRANKGSKATERLKKKLSEQESLLLLMSPSMAFRVHSRNGKSYTFLISSDYERAEWRENIREQQKKCFRSFSLTSVELQMLTNSCVKLQTVHSIPLTINKEDDESPGLYGFLNVIVHSATGFKQSSNLYCTLEVDSFGYFVNKAKTRVYRDTAEPNWNEEFEIELEGSQTLRILCYEKCYNKTKIPKEDGESTDRLMGKGQVQLDPQALQDRDWQRTVIAMNGIEVKLSVKFNSREFSLKRMPSRKQTGVFGVKIAVVTKRERSKVPYIVRQCVEEIERRGMEEVGIYRVSGVATDIQALKAAFDVNNKDVSVMMSEMDVNAIAGTLKLYFRELPEPLFTDEFYPNFAEGIALSDPVAKESCMLNLLLSLPEANLLTFLFLLDHLKR

SEQ ID NO: 829016 - protein, 446 aa, Homo sapiens
MIRGAPGVMHSGTGLKLSYTFLISSDYERAEWRENIREQQKKCFRSFSLTSVELQMLTNSCVKLQTVHSIPLTINKEDDESPGLYGFLNVIVHSATGFKQSSNLYCTLEVDSFGYFVNKAKTRVYRDTAEPNWNEEFEIELEGSQTLRILCYEKCYNKTKIPKEDGESTDRLMGKGQVQLDPQALQDRDWQRTVIAMNGIEVKLSVKFNSREFSLKRMPSRKQTGVFGVKIAVVTKRERSKVPYIVRQCVEEIERRGMEEVGIYRVSGVATDIQALKAAFDVNNKDVSVMMSEMDVNAIAGTLKLYFRELPEPLFTDEFYPNFAEGIALSDPVAKESCMLNLLLSLPEANLLTFLFLLDHLKRVAEKEAVNKMSLHNLATVFGPTLLRPSEKESKLPANPSQPITMTDSWSLEVMSQVQVLLYFLQLEAIPAPDSKRQSILFSTEV

SEQ ID NO: 829017 - protein, 932 aa, Homo sapiens
MVDPVGFAEAWKAQFPDSEPPRMELRSVGDIEQELERCKASIRRLEQEVNQERFRMIYLQTLLAKEKKSYDRQRWGFRRAAQAPDGASEPRASASRPQPAPADGADPPPAEEPEARPDGEGSPGKARPGTARRPGAAASGERDDRGPPASVAALRSNFERIRKGHGQPGADAEKPFYVNVEFHHERGLVKVNDKEVSDRISSLGSQAMQMERKKSQHGAGSSVGDASRPPYRGRSSESSCGVDGDYEDAELNPRFLKDNLIDANGGSRPPWPPLEYQPYQSIYVGGMMEGEGKGPLLRSQSTSEQEKRLTWPRRSYSPRSFEDCGGGYTPDCSSNENLTSSEEDFSSGQSSRVSPSPTTYRMFRDKSRSPSQNSQQSFDSSSPPTPQCHKRHRHCPVVVSEATIVGVRKTGQIWPNDGEGAFHGDADGSFGTPPGYGCAADRAEEQRRHQDGLPYIDDSPSSSPHLSSKGRGSRDALVSGALESTKASELDLEKGLEMRKWVLSGILASEETYLSHLEALLLPMKPLKAAATTSQPVLTSQQIETIFFKVPELYEIHKEFYDGLFPRVQQWSHQQRVGDLFQKLASQLGVYRAFVDNYGVAMEMAEKCCQANAQFAEISENLRARSNKDAKDPTTKNSLETLLYKPVDRVTRSTLVLHDLLKHTPASHPDHPLLQDALRISQNFLSSINEEITPRRQSMTVKKGEHRQLLKDSFMVELVEGARKLRHVFLFTDLLLCTKLKKQSGGKTQQYDCKWYIPLTDLSFQMVDELEAVPNIPLVPDEELDALKIKISQIKSDIQREKRANKGSKATERLKKKLSEQESLLLLMSPSMAFRVHSRNGKSYTFLISSDYERAEWRENIREQQKKCFRSFSLTSVELQMLTNSCVKLQTVHSIPLTINKEDDESPGLYGFLNVIVHSATGFKQSSKEAIR

SEQ ID NO: 829018 - protein, 378 aa, Homo sapiens
QGSRRCSEGRVCAVAPARSWPKPAQTAHLCGMEQNLYCTLEVDSFGYFVNKAKTRVYRDTAEPNWNEEFEIELEGSQTLRILCYEKCYNKTKIPKEDGESTDRLMGKGQVQLDPQALQDRDWQRTVIAMNGIEVKLSVKFNSREFSLKRMPSRKQTGVFGVKIAVVTKRERSKVPYIVRQCVEEIERRGMEEVGIYRVSGVATDIQALKAAFDVNNKDVSVMMSEMDVNAIAGTLKLYFRELPEPLFTDEFYPNFAEGIALSDPVAKESCMLNLLLSLPEANLLTFLFLLDHLKRVAEKEAVNKMSLHNLATVFGPTLLRPSEKESKLPANPSQPITMTDSWSLEVMSQVQVLLYFLQLEAIPAPDSKRQSILFSTEV

SEQ ID NO: 829019 - protein, 1076 aa, Homo sapiens
MVDPVGFAEAWKAQFPDSEPPRMELRSVGDIEQELERCKASIRRLEQEVNQERFRMIYLQTLLAKEKKSYDRQRWGFRRAAQAPDGASEPRASASRPQPAPADGADPPPAEEPEARPDGEGSPGKARPGTARRPGAAASGERDDRGPPASVAALRSNFERIRKGHGQPGADAEKPFYVNVEFHHERGLVKVNDKEVSDRISSLGSQAMQMERKKSQHGAGSSVGDASRPPYRGRSSESSCGVDGDYEDAELNPRFLKDNLIDANGGSRPPWPPLEYQPYQSIYVGGMMEGEGKGPLLRSQSTSEQEKRLTWPRRSYSPRSFEDCGGGYTPDCSSNENLTSSEEDFSSGQSSRVSPSPTTYRMFRDKSRSPSQNSQQSFDSSSPPTPQCHKRHRHCPVVVSEATIVGVRKTGQIWPNDGEGAFHGDADGSFGTPPGYGCAADRAEEQRRHQDGLPYIDDSPSSSPHLSSKGRGSRDALVSGALESTKASELDLEKGLEMRKWVLSGILASEETYLSHLEALLLPMKPLKAAATTSQPVLTSQQIETIFFKVPELYEIHKEFYDGLFPRVQQWSHQQRVGDLFQKLASQLGVYRAFVDNYGVAMEMAEKCCQANAQFAEISENLRARSNKDAKDPTTKNSLETLLYKPVDRVTRSTLVLHDLLKHTPASHPDHPLLQDALRISQNFLSSINEEITPRRQSMTVKKGEHRQLLKDSFMVELVEGARKLRHVFLFTDLLLCTKLKKQSGGKTQQYDCKWYIPLTDLSFQMVDELEAVPNIPLVPDEELDALKIKISQIKSDIQREKRANKGSKATERLKKKLSEQESLLLLMSPSMAFRVHSRNGKSYTFLISSDYERAEWRENIREQQKKCFRSFSLTSVELQMLTNSCVKLQTVHSIPLTINKEDDESPGLYGFLNVIVHSATGFKQSSRKAPGLSYNHNGEWCEAQTKNGQGWVPSNYITPVNSLEKHSWYHGPVSRNAAEYLLSSGINGSFLVRESESSPGQRSISLRYEGRVYHYRINTASDGKLYVSSESRFNTLAELVHHHSTVADGLITTLHYPAPKRNKPTVYGVSPNYDK

SEQ ID NO: 829020 - protein, 303 aa, Homo sapiens
AVEAGSSRLAPPASQSSKAKHARVTIHPGHDAGPPLLDPQALQDRDWQRTVIAMNGIEVKLSVKFNSREFSLKRMPSRKQTGVFGVKIAVVTKRERSKVPYIVRQCVEEIERRGMEEVGIYRVSGVATDIQALKAAFDVNNKDVSVMMSEMDVNAIAGTLKLYFRELPEPLFTDEFYPNFAEGIALSDPVAKESCMLNLLLSLPEANLLTFLFLLDHLKRVAEKEAVNKMSLHNLATVFGPTLLRPSEKESKLPANPSQPITMTDSWSLEVMSQVQVLLYFLQLEAIPAPDSKRQSILFSTEV

SEQ ID NO: 829021 - protein, 131 aa, Homo sapiens; identical to SEQ ID NO: 829011

SEQ ID NO: 829022 - protein, 822 aa, Homo sapiens
MVDPVGFAEAWKAQFPDSEPPRMELRSVGDIEQELERCKASIRRLEQEVNQERFRMIYLQTLLAKEKKSYDRQRWGFRRAAQAPDGASEPRASASRPQPAPADGADPPPAEEPEARPDGEGSPGKARPGTARRPGAAASGERDDRGPPASVAALRSNFERIRKGHGQPGADAEKPFYVNVEFHHERGLVKVNDKEVSDRISSLGSQAMQMERKKSQHGAGSSVGDASRPPYRGRSSESSCGVDGDYEDAELNPRFLKDNLIDANGGSRPPWPPLEYQPYQSIYVGGMMEGEGKGPLLRSQSTSEQEKRLTWPRRSYSPRSFEDCGGGYTPDCSSNENLTSSEEDFSSGQSSRVSPSPTTYRMFRDKSRSPSQNSQQSFDSSSPPTPQCHKRHRHCPVVVSEATIVGVRKTGQIWPNDGEGAFHGDADGSFGTPPGYGCAADRAEEQRRHQDGLPYIDDSPSSSPHLSSKGRGSRDALVSGALESTKASELDLEKGLEMRKWVLSGILASEETYLSHLEALLLPMKPLKAAATTSQPVLTSQQIETIFFKVPELYEIHKEFYDGLFPRVQQWSHQQRVGDLFQKLASQLGVYRAFVDNYGVAMEMAEKCCQANAQFAEISENLRARSNKDAKDPTTKNSLETLLYKPVDRVTRSTLVLHDLLKHTPASHPDHPLLQDALRISQNFLSSINEEITPRRQSMTVKKGEVSVAGDGLGPPILLSWGHAGPLDLRSGALPGPQQTLPSGIGEIGRTLSPVWKVSGCSLRGDPASTMPSRWQPSPCLTQPPLSFSVIVGCVQGPLFFYPPQSCQLRLPSQGDLCKGGE

SEQ ID NO: 829023 - protein, 649 aa, Homo sapiens
MVDPVGFAEAWKAQFPDSEPPRMELRSVGDIEQELERCKASIRRLEQEVNQERFRMIYLQTLLAKEKKSYDRQRWGFRRAAQAPDGASEPRASASRPQPAPADGADPPPAEEPEARPDGEGSPGKARPGTARRPGAAASGERDDRGPPASVAALRSNFERIRKGHGQPGADAEKPFYVNVEFHHERGLVKVNDKEVSDRISSLGSQAMQMERKKSQHGAGSSVGDASRPPYRGRSSESSCGVDGDYEDAELNPRFLKDNLIDANGGSRPPWPPLEYQPYQSIYVGGMMEGEGKGPLLRSQSTSEQEKRLTWPRRSYSPRSFEDCGGGYTPDCSSNENLTSSEEDFSSGQSSRVSPSPTTYRMFRDKSRSPSQNSQQSFDSSSPPTPQCHKRHRHCPVVVSEATIVGVRKTGQIWPNDGEGAFHGDADGSFGTPPGYGCAADRAEEQRRHQDGLPYIDDSPSSSPHLSSKGRGSRDALVSGALESTKASELDLEKGLEMRKWVLSGILASEETYLSHLEALLLPMKPLKAAATTSQPVLTSQQIETIFFKVPELYEIHKEFYDGLFPRVQQWSHQQRVGDLFQKLASQLGVYRAFVDNYGVAMEMAEKCCQANAQFAEISENLRARSNKDAKDPTTKNSLESEFCMLRSV

SEQ ID NO: 829024 - protein, 113 aa, Homo sapiens
VRVRGTLLVPTSPRRIGWPLFISNQSEVAEPEAASEREPGWRREGPQEQNHHARESSFIGWNAVASQALSIPPQTKVSWHHQDRWGLHSGTWGLPIEMETPDLSLGTPERFRP

SEQ ID NO: 829025 - protein, 1271 aa, Homo sapiens [sequence omitted]

SEQ ID NO: 829026 - protein, 155 aa, Homo sapiens [sequence omitted]

SEQ ID NO: 829027 - protein, 1271 aa, Homo sapiens [sequence omitted]

SEQ ID NO: 829028 - protein, 1298 aa, Homo sapiens
MVDPVGFAEAWKAQFPDSEPPRMELRSVGDIEQELERCKASIRRLEQEVNQERFRMIYLQTLLAKEKKSYDRQRWGFRRAAQAPDGASEPRASASRPQPAPADGADPPPAEEPEARPDGEGSPGKARPGTARRPGAAASGERDDRGPPASVAALRSNFERIRKGHGQPGADAEKPFYVNVEFHHERGLVKVNDKEVSDRISSLGSQAMQMERKKSQHGAGSSVGDASRPPYRGRSSESSCGVDGDYEDAELNPRFLKDNLIDANGGSRPPWPPLEYQPYQSIYVGGMMEGEGKGPLLRSQSTSEQEKRLTWPRRSYSPRSFEDCGGGYTPDCSSNENLTSSEEDFSSGQSSRVSPSPTTYRMFRDKSRSPSQNSQQSFDSSSPPTPQCHKRHRHCPVVVSEATIVGVRKTGQIWPNDGEGAFHGDADGSFGTPPGYGCAADRAEEQRRHQDGLPYIDDSPSSSPHLSSKGRGSRDALVSGALESTKASELDLEKGLEMRKWVLSGILASEETYLSHLEALLLPMKPLKAAATTSQPVLTSQQIETIFFKVPELYEIHKEFYDGLFPRVQQWSHQQRVGDLFQKLASQLGVYRAFVDNYGVAMEMAEKCCQANAQFAEISENLRARSNKDAKDPTTKNSLETLLYKPVDRVTRSTLVLHDLLKHTPASHPDHPLLQDALRISQNFLSSINEEITPRRQSMTVKKGEHRQLLKDSFMVELVEGARKLRHVFLFTDLLLCTKLKKQSGGKTQQYDCKWYIPLTDLSFQMVDELEAVPNIPLVPDEELDALKIKISQIKSDIQREKRANKGSKATERLKKKLSEQESLLLLMSPSMAFRVHSRNGKSYTFLISSDYERAEWRENIREQQKKCFRSFSLTSVELQMLTNSCVKLQTVHSIPLTINKEDDESPGLYGFLNVIVHSATGFKQSSNLYCTLEVDSFGYFVNKAKTRVYRDTAEPNWNEEFEIELEGSQTLRILCYEKCYNKTKIPKEDGESTDRLMGKGQVQLDPQALQDRDWQRTVIAMNGIEVKLSVKFNSREFSLKRMPSRKQTGVFGVKIAVVTKRERSKVPYIVRQCVEEIERRGMEEVGIYRVSGVATDIQALKAAFDVSECWPAQDGMEVWAMVSAMRSQSAPGPDNKDVSVMMSEMDVNAIAGTLKLYFRELPEPLFTDEFYPNFAEGIALSDPVAKESCMLNLLLSLPEANLLTFLFLLDHLKRVAEKEAVNKMSLHNLATVFGPTLLRPSEKESKLPANPSQPITMTDSWSLEVMSQVQVLLYFLQLEAIPAPDSKRQSILFSTEV

SEQ ID NO: 829029 - protein, 1370 aa, Homo sapiens
MVDPVGFAEAWKAQFPDSEPPRMELRSVGDIEQELERCKASIRRLEQEVNQERFRMIYLQTLLAKEKKSYDRQRWGFRRAAQAPDGASEPRASASRPQPAPADGADPPPAEEPEARPDGEGSPGKARPGTARRPGAAASGERDDRGPPASVAALRSNFERIRKGHGQPGADAEKPFYVNVEFHHERGLVKVNDKEVSDRISSLGSQAMQMERKKSQHGAGSSVGDASRPPYRGRSSESSCGVDGDYEDAELNPRFLKDNLIDANGGSRPPWPPLEYQPYQSIYVGGMMEGEGKGPLLRSQSTSEQEKRLTWPRRSYSPRSFEDCGGGYTPDCSSNENLTSSEEDFSSGQSSRVSPSPTTYRMFRDKSRSPSQNSQQSFDSSSPPTPQCHKRHRHCPVVVSEATIVGVRKTGQIWPNDGEGAFHGDADGSFGTPPGYGCAADRAEEQRRHQDGLPYIDDSPSSSPHLSSKGRGSRDALVSGALESTKASELDLEKGLEMRKWVLSGILASEETYLSHLEALLLGGGFRELSRAGWGRVTGLGSLFALKSQVSCQSLGAARHPWSGYQWKTECQTKLVLKLYLLCDLKIKVHMSGNLTVYCHTMHLTDGSPSHLCYLTCALFQPMKPLKAAATTSQPVLTSQQIETIFFKVPELYEIHKEFYDGLFPRVQQWSHQQRVGDLFQKLASQLGVYRAFVDNYGVAMEMAEKCCQANAQFAEISENLRARSNKDAKDPTTKNSLETLLYKPVDRVTRSTLVLHDLLKHTPASHPDHPLLQDALRISQNFLSSINEEITPRRQSMTVKKGEHRQLLKDSFMVELVEGARKLRHVFLFTDLLLCTKLKKQSGGKTQQYDCKWYIPLTDLSFQMVDELEAVPNIPLVPDEELDALKIKISQIKSDIQREKRANKGSKATERLKKKLSEQESLLLLMSPSMAFRVHSRNGKSYTFLISSDYERAEWRENIREQQKKCFRSFSLTSVELQMLTNSCVKLQTVHSIPLTINKEDDESPGLYGFLNVIVHSATGFKQSSNLYCTLEVDSFGYFVNKAKTRVYRDTAEPNWNEEFEIELEGSQTLRILCYEKCYNKTKIPKEDGESTDRLMGKGQVQLDPQALQDRDWQRTVIAMNGIEVKLSVKFNSREFSLKRMPSRKQTGVFGVKIAVVTKRERSKVPYIVRQCVEEIERRGMEEVGIYRVSGVATDIQALKAAFDVNNKDVSVMMSEMDVNAIAGTLKLYFRELPEPLFTDEFYPNFAEGIALSDPVAKESCMLNLLLSLPEANLLTFLFLLDHLKRVAEKEAVNKMSLHNLATVFGPTLLRPSEKESKLPANPSQPITMTDSWSLEVMSQVQVLLYFLQLEAIPAPDSKRQSILFSTEV

SEQ ID NO: 829030 - protein, 1135 aa, Homo sapiens
MVDPVGFAEAWKAQFPDSEPPRMELRSVGDIEQELERCKASIRRLEQEVNQERFRMIYLQTLLAKEKKSYDRQRWGFRRAAQAPDGASEPRASASRPQPAPADGADPPPAEEPEARPDGEGSPGKARPGTARRPGAAASGERDDRGPPASVAALRSNFERIRKGHGQPGADAEKPFYVNVEFHHERGLVKVNDKEVSDRISSLGSQAMQMERKKSQHGAGSSVGDASRPPYRGRSSESSCGVDGDYEDAELNPRFLKDNLIDANGGSRPPWPPLEYQPYQSIYVGGMMEGEGKGPLLRSQSTSEQEKRLTWPRRSYSPRSFEDCGGGYTPDCSSNENLTSSEEDFSSGQSSRVSPSPTTYRMFRDKSRSPSQNSQQSFDSSSPPTPQCHKRHRHCPVVVSEATIVGVRKTGQIWPNDGEGAFHGDADGSFGTPPGYGCAADRAEEQRRHQDGLPYIDDSPSSSPHLSSKGRGSRDALVSGALESTKASELDLEKGLEMRKWVLSGILASEETYLSHLEALLLPMKPLKAAATTSQPVLTSQQIETIFFKVPELYEIHKEFYDGLFPRVQQWSHQQRVGDLFQKLASQLGVYRAFVDNYGVAMEMAEKCCQANAQFAEISENLRARSNKDAKDPTTKNSLETLLYKPVDRVTRSTLVLHDLLKHTPASHPDHPLLQDALRISQNFLSSINEEITPRRQSMTVKKGEHRQLLKDSFMVELVEGARKLRHVFLFTDLLLCTKLKKQSGGKTQQYDCKWYIPLTDLSFQMVDELEAVPNIPLVPDEELDALKIKISQIKSDIQREKRANKGSKATERLKKKLSEQESLLLLMSPSMAFRVHSRNGKSYTFLISSDYERAEWRENIREQQKKCFRSFSLTSVELQMLTNSCVKLQTVHSIPLTINKEDDESPGLYGFLNVIVHSATGFKQSSKALQRPVASDFEPQGLSEAARWNSKENLLAGPSENDPNLFVALYDFVASGDNTLSITKGEKLRVLGYNHNGEWCEAQTKNGQGWVPSNYITPVNSLEKHSWYHGPVSRNAAEYLLSSGINGSFLVRESESSPGQRSISLRYEGRVYHYRINTASDGKLYVSSESRFNTLAELVHHHSTVADGLITTLHYPAPKRNKPTVYGVSPNYDK

SEQ ID NO: 829031 - protein, 1110 aa, Homo sapiens
MVDPVGFAEAWKAQFPDSEPPRMELRSVGDIEQELERCKASIRRLEQEVNQERFRMIYLQTLLAKEKKSYDRQRWGFRRAAQAPDGASEPRASASRPQPAPADGADPPPAEEPEARPDGEGSPGKARPGTARRPGAAASGERDDRGPPASVAALRSNFERIRKGHGQPGADAEKPFYVNVEFHHERGLVKVNDKEVSDRISSLGSQAMQMERKKSQHGAGSSVGDASRPPYRGRSSESSCGVDGDYEDAELNPRFLKDNLIDANGGSRPPWPPLEYQPYQSIYVGGMMEGEGKGPLLRSQSTSEQEKRLTWPRRSYSPRSFEDCGGGYTPDCSSNENLTSSEEDFSSGQSSRVSPSPTTYRMFRDKSRSPSQNSQQSFDSSSPPTPQCHKRHRHCPVVVSEATIVGVRKTGQIWPNDGEGAFHGDADGSFGTPPGYGCAADRAEEQRRHQDGLPYIDDSPSSSPHLSSKGRGSRDALVSGALESTKASELDLEKGLEMRKWVLSGILASEETYLSHLEALLLPMKPLKAAATTSQPVLTSQQIETIFFKVPELYEIHKEFYDGLFPRVQQWSHQQRVGDLFQKLASQLGVYRAFVDNYGVAMEMAEKCCQANAQFAEISENLRARSNKDAKDPTTKNSLETLLYKPVDRVTRSTLVLHDLLKHTPASHPDHPLLQDALRISQNFLSSINEEITPRRQSMTVKKGEHRQLLKDSFMVELVEGARKLRHVFLFTDLLLCTKLKKQSGGKTQQYDCKWYIPLTDLSFQMVDELEAVPNIPLVPDEELDALKIKISQIKSDIQREKRANKGSKATERLKKKLSEQESLLLLMSPSMAFRVHSRNGKSYTFLISSDYERAEWRENIREQQKKCFRSFSLTSVELQMLTNSCVKLQTVHSIPLTINKEEALQRPVASDFEPQGLSEAARWNSKENLLAGPSENDPNLFVALYDFVASGDNTLSITKGEKLRVLGYNHNGEWCEAQTKNGQGWVPSNYITPVNSLEKHSWYHGPVSRNAAEYLLSSGINGSFLVRESESSPGQRSISLRYEGRVYHYRINTASDGKLYVSSESRFNTLAELVHHHSTVADGLITTLHYPAPKRNKPTVYGVSPNYDK

SEQ ID NO: 829032 - protein, 968 aa, Homo sapiens
MVDPVGFAEAWKAQFPDSEPPRMELRSVGDIEQELERCKASIRRLEQEVNQERFRMIYLQTLLAKEKKSYDRQRWGFRRAAQAPDGASEPRASASRPQPAPADGADPPPAEEPEARPDGEGSPGKARPGTARRPGAAASGERDDRGPPASVAALRSNFERIRKGHGQPGADAEKPFYVNVEFHHERGLVKVNDKEVSDRISSLGSQAMQMERKKSQHGAGSSVGDASRPPYRGRSSESSCGVDGDYEDAELNPRFLKDNLIDANGGSRPPWPPLEYQPYQSIYVGGMMEGEGKGPLLRSQSTSEQEKRLTWPRRSYSPRSFEDCGGGYTPDCSSNENLTSSEEDFSSGQSSRVSPSPTTYRMFRDKSRSPSQNSQQSFDSSSPPTPQCHKRHRHCPVVVSEATIVGVRKTGQIWPNDGEGAFHGDADGSFGTPPGYGCAADRAEEQRRHQDGLPYIDDSPSSSPHLSSKGRGSRDALVSGALESTKASELDLEKGLEMRKWVLSGILASEETYLSHLEALLLPMKPLKAAATTSQPVLTSQQIETIFFKVPELYEIHKEFYDGLFPRVQQWSHQQRVGDLFQKLASQLGVYRAFVDNYGVAMEMAEKCCQANAQFAEISENLRARSNKDAKDPTTKNSLETLLYKPVDRVTRSTLVLHDLLKHTPASHPDHPLLQDALRISQNFLSSINEEITPRRQSMTVKKGEHRQLLKDSFMVELVEGARKLRHVFLFTDLLLCTKLKKQSGGKTQQYDCKWYIPLTDLSFQMVDELEAVPNIPLVPDEELDALKIKISQIKSDIQREKRANKGSKATERLKKKLSEQESLLLLMSPSMAFRVHSRNGKSYTFLISSDYERAEWRENIREQQKKCFRSFSLTSVELQMLTNSCVKLQTVHSIPLTINKEDDESPGLYGFLNVIVHSATGFKQSSSRGEKGEQTESQVSRRSCRRRGCSCPEGSRITFKEVCGVPG

SEQ ID NO: 829033 - protein, 250 aa, Homo sapiens
MNGIEVKLSVKFNSREFSLKRMPSRKQTGVFGVKIAVVTKRERSKVPYIVRQCVEEIERRGMEEVGIYRVSGVATDIQALKAAFDVNNKDVSVMMSEMDVNAIAGTLKLYFRELPEPLFTDEFYPNFAEGIALSDPVAKESCMLNLLLSLPEANLLTFLFLLDHLKRVAEKEAVNKMSLHNLATVFGPTLLRPSEKESKLPANPSQPITMTDSWSLEVMSQVQVLLYFLQLEAIPAPDSKRQSILFSTEV

SEQ ID NO: 829034 - protein, 330 aa, Homo sapiens
AVEAGSSRLAPPASQSSKAKHARVTIHPGHDAGPPLLDPQALQDRDWQRTVIAMNGIEVKLSVKFNSREFSLKRMPSRKQTGVFGVKIAVVTKRERSKVPYIVRQCVEEIERRGMEEVGIYRVSGVATDIQALKAAFDVSECWPAQDGMEVWAMVSAMRSQSAPGPDNKDVSVMMSEMDVNAIAGTLKLYFRELPEPLFTDEFYPNFAEGIALSDPVAKESCMLNLLLSLPEANLLTFLFLLDHLKRVAEKEAVNKMSLHNLATVFGPTLLRPSEKESKLPANPSQPITMTDSWSLEVMSQVQVLLYFLQLEAIPAPDSKRQSILFSTEV

SEQ ID NO: 829035 - protein, 931 aa, Homo sapiens
MVDPVGFAEAWKAQFPDSEPPRMELRSVGDIEQELERCKASIRRLEQEVNQERFRMIYLQTLLAKEKKSYDRQRWGFRRAAQAPDGASEPRASASRPQPAPADGADPPPAEEPEARPDGEGSPGKARPGTARRPGAAASGERDDRGPPASVAALRSNFERIRKGHGQPGADAEKPFYVNVEFHHERGLVKVNDKEVSDRISSLGSQAMQMERKKSQHGAGSSVGDASRPPYRGRSSESSCGVDGDYEDAELNPRFLKDNLIDANGGSRPPWPPLEYQPYQSIYVGGMMEGEGKGPLLRSQSTSEQEKRLTWPRRSYSPRSFEDCGGGYTPDCSSNENLTSSEEDFSSGQSSRVSPSPTTYRMFRDKSRSPSQNSQQSFDSSSPPTPQCHKRHRHCPVVVSEATIVGVRKTGQIWPNDGEGAFHGDADGSFGTPPGYGCAADRAEEQRRHQDGLPYIDDSPSSSPHLSSKGRGSRDALVSGALESTKASELDLEKGLEMRKWVLSGILASEETYLSHLEALLLPMKPLKAAATTSQPVLTSQQIETIFFKVPELYEIHKEFYDGLFPRVQQWSHQQRVGDLFQKLASQLGVYRAFVDNYGVAMEMAEKCCQANAQFAEISENLRARSNKDAKDPTTKNSLETLLYKPVDRVTRSTLVLHDLLKHTPASHPDHPLLQDALRISQNFLSSINEEITPRRQSMTVKKGEGEDRMKASSTRKRLLLMEEALQRPVASDFEPQGLSEAARWNSKENLLAGPSENDPNLFVALYDFVASGDNTLSITKGEKLRVLGYNHNGEWCEAQTKNGQGWVPSNYITPVNSLEKHSWYHGPVSRNAAEYLLSSGINGSFLVRESESSPGQRSISLRYEGRVYHYRINTASDGKLYVSSESRFNTLAELVHHHSTVADGLITTLHYPAPKRNKPTVYGVSPNYDK

SEQ ID NO: 829036 - protein, 516 aa, Homo sapiens
MVDPVGFAEAWKAQFPDSEPPRMELRSVGDIEQELERCKASIRRLEQEVNQERFRMIYLQTLLAKEKKSYDRQRWGFRRAAQAPDGASEPRASASRPQPAPADGADPPPAEEPEARPDGEGSPGKARPGTARRPGAAASGERDDRGPPASVAALRSNFERIRKGHGQPGADAEKPFYVNVEFHHERGLVKVNDKEVSDRISSLGSQAMQMERKKSQHGAGSSVGDASRPPYRGRSSESSCGVDGDYEDAELNPRFLKDNLIDANGGSRPPWPPLEYQPYQSIYVGGMMEGEGKGPLLRSQSTSEQEKRLTWPRRSYSPRSFEDCGGGYTPDCSSNENLTSSEEDFSSGQSSRVSPSPTTYRMFRDKSRSPSQNSQQSFDSSSPPTPQCHKRHRHCPVVVSEATIVGVRKTGQIWPNDGEGAFHGDADGSFGTPPGYGCAADRAEEQRRHQDGLPYIDDSPSSSPHLSSKGRGSRDALVSGALESTKASELDLEKGLEMRKWVLSGILASEETYLSP

SEQ ID NO: 829037 - protein, 122 aa, Homo sapiens
DCGGGYTPDCSSNENLTSSEEDFSSGQSSRVSPSPTTYRMFRDKSRSPSQNSQQSFDSSSPPTPQCHKRHRHCPVVVSEATIVGVRKTGQIWPNDGEGAFHGDAGEFLTPRAWAHLHGGGKP

SEQ ID NO: 829038 - protein, 456 aa, Homo sapiens
PEAAAAPCAGAEPGAGRRPAGGGWGPRPGVPERRRRRRQRRPSGLGGWVRGGSGSARGLRCERAARLPSSPARRRRCDWVEDGAGRMEILMTVSKFASICTMGANASALEKEIGPEQFPVNEHYFGLVNFGNTCYCNSVLQALYFCRPFREKVLAYKSQPRKKESLLTCLADLFHSIATQKKKVGVIPPKKFITRLRKENELFDNYMQQDAHEFLNYLLNTIADILQEERKQEKQNGRLPNGNIDNENNNSTPDPTWVHEIFQGTLTNETRCLTCETISSKDEDFLDLSVDVEQNTSITHCLRGFSNTETLCSEYKYYCEECRSKQEAHKRMKVKKLPMILALHLKRFKYMDQLHRYTKLSYRVVFPLELRLFNTSGDATNPDRMYDLVAVVVHCGSGPNRGHYIAIVKSHDFWLLFDDDIVEKIDAQAIEEFYGLTSDISKNSESGYILFYQSRD

SEQ ID NO: 829039 - protein, 250 aa, Homo sapiens
MQQDAHEFLNYLLNTIADILQEERKQEKQNGRLPNGNIDNENNNSTPDPTWVHEIFQGTLTNETRCLTCETISSKDEDFLDLSVDVEQNTSITHCLRGFSNTETLCSEYKYYCEECRSKQEAHKRMKVKKLPMILALHLKRFKYMDQLHRYTKLSYRVVFPLELRLFNTSGDATNPDRMYDLVAVVVHCGSGPNRGHYIAIVKSHDFWLLFDDDIVEKIDAQAIEEFYGLTSDISKNSESGYILFYQSRD

SEQ ID NO: 829040 - protein, 116 aa, Homo sapiens
GLVIGGVECAEAGIGPEAVEMARVVFPLELRLFNTSGDATNPDRMYDLVAVVVHCGSGPNRGHYIAIVKSHDFWLLFDDDIVEKIDAQAIEEFYGLTSDISKNSESGYILFYQSRD

SEQ ID NO: 829041 - protein, 418 aa, Homo sapiens
PEAAAAPCAGAEPGAGRRPAGGGWGPRPGVPERRRRRRQRRPSGLGGWVRGGSGSARGLRCERAARLPSSPARRRRCDWVEDGAGRMEILMTVSKFASICTMGANASALEKEIGPEQFPVNEHYFGLVNFGNTCYCNSVLQALYFCRPFREKVLAYKSQPRKKESLLTCLADLFHSIATQKKKVGVIPPKKFITRLRKENELFDNYMQQDAHEFLNYLLNTIADILQEERKQEKQNGRLPNGNIDNENNNSTPDPTWVHEIFQGTLTNETRCLTCETISSKDEDFLDLSVDVEQNTSITHCLRGFSNTETLCSEYKYYCEECRSKQEAHKRMKVKKLPMILALHLKRFKYMDQLHRYTKLSYRVVFPLELRLFNTSGDATNPDRMYDLVAVVVHCGREYHFKVQWRRTPRAPKWKDDL

SEQ ID NO: 829042 - protein, 89 aa, Homo sapiens
RRQRLRPAPGRSRGRAGGRQAGAGARGRECLSAGGDDGSGGPAGSVVGSAAARGPPAGCGASGRPGSPPPPPAAAAVIGWKMALAGWKS

SEQ ID NO: 829043 - protein, 251 aa, Homo sapiens
DAWVDPRVRLNYLLNTIADILQEERKQEKQNGRLPNGNIDNENNNSTPDPTWVHEIFQGTLTNETRCLTCETISSKDEDFLDLSVDVEQNTSITHCLRGFSNTETLCSEYKYYCEECRSKQEAHKRMKVKKLPMILALHLKRFKYMDQLHRYTKLSYRVVFPLELRLFNTSGDATNPDRMYDLVAVVVHCGSGPNRGHYIAIVKSHDFWLLFDDDIVEKIDAQAIEEFYGLTSDISKNSESGYILFYQSRD

SEQ ID NO: 829044 - protein, 67 aa, Homo sapiens
EDPKSLMAGPNRGHYIAIVKSHDFWLLFDDDIVEKIDAQAIEEFYGLTSDISKNSESGYILFYQSRD

SEQ ID NO: 829045 - protein, 203 aa, Homo sapiens
KLHTGEKPYECKECGKAFRVRQQLTLHQRIHTGEKPYECKECGKTFSRGYHLILHHRIHTGEKPYECKECWKAFSRYSQLISHQSIHIGVKPYDCKECGKAFRLLSQLTQHQSIHIGEKPYKCKECGKAFRLRQKLTLHQSIHTGEKPFECKECRKAFRLNSSLIQHLRIHSGEKPYECKECKKAFRQHSHLTHHLKIHNVKI

SEQ ID NO: 829046 - protein, 203 aa, Homo sapiens; identical to SEQ ID NO: 829045

SEQ ID NO: 829047 - protein, 717 aa, Homo sapiens
MSVDKAELCGSLLTWLQTFHVPSPCASPQDLSSGLAVAYVLNQIDPSWFNEAWLQGISEDPGPNWKLKVSNLKMVLRSLVEYSQDVLAHPVSEEHLPDVSLIGEFSDPAELGKLLQLVLGCAISCEKKQDHIQRIMTLEESVQHVVMEAIQELMTKDTPDSLSPETYGNFDSQSRRYYFLSEEAEEGDELQQRCLDLERQLMLLSEEKQSLAQENAGLRERMGRPEGEGTPGLTAKKLLLLQSQLEQLQEENFRLESGREDERLRCAELEREVAELQHRNQALTSLAQEAQALKDEMDELRQSSERAGQLEATLTSCRRRLGELRELRRQVRQLEERNAGHAERTRQLEDELRRAGSLRAQLEAQRRQVQELQGQRQEEAMKAEKWLFECRNLEEKYESVTKEKERLLAERDSLREANEELRCAQLQPRGLTQADPSLDPTSTPVDNLAAEILPAELRETLLRLQLENKRLCRQEAADRERQEELQRHLEDANRARHGLETQHRLNQQQLSELRAQVEDLQKALQEQGGKTEDSILLKRKLEEHLQKLHEADLELQRKREYIEELEPPTDSSTARRIEELQHNLQKKDADLRAMEERYRRYVDKARMVMQTMEPKQRPAAGAPPELHSLRTQLRERDVRIRHLEMDFEKSRSQREQEEKLLISAWYNMGMALQQRAGEERAPAHAQSFLAQQRLATNSRRGPLGRLASLNLRPTDKH

SEQ ID NO: 829048 - protein, 136 aa, Homo sapiens
ICLALALIPAFGLSSVVHECFFSSMVWKRHGQTWRWYQGGIGWYSPDTTQLTAAARRIEELQHNLQKKDADLRAMEERYRRYVDKARMVMQTMEPKQRPAAGAPPELHSLRTQLRERDVRIRHLEMDFEKTPVTEQ

SEQ ID NO: 829049 - protein, 644 aa, Homo sapiens
MVLRSLVEYSQDVLAHPVSEEHLPDVSLIGEFSDPAELGKLLQLVLGCAISCEKKQDHIQRIMTLEESVQHVVMEAIQELMTKDTPDSLSPETYGNFDSQSRRYYFLSEEAEEGDELQQRCLDLERQLMLLSEEKQSLAQENAGLRERMGRPEGEGTPGLTAKKLLLLQSQLEQLQEENFRLESGREDERLRCAELEREVAELQHRNQALTSLAQEAQALKDEMDELRQSSERAGQLEATLTSCRRRLGELRELRRQVRQLEERNAGHAERTRQLEDELRRAGSLRAQLEAQRRQVQELQGQRQEEAMKAEKWLFECRNLEEKYESVTKEKERLLAERDSLREANEELRCAQLQPRGLTQADPSLDPTSTPVDNLAAEILPAELRETLLRLQLENKRLCRQEAADRERQEELQRHLEDANRARHGLETQHRLNQQQLSELRAQVEDLQKALQEQGGKTEDSILLKRKLEEHLQKLHEADLELQRKREYIEELEPPTDSSTARRIEELQHNLQKKDADLRAMEERYRRYVDKARMVMQTMEPKQRPAAGAPPELHSLRTQLRERDVRIRHLEMDFEKSRSQREQEEKLLISAWYNMGMALQQRAGEERAPAHAQSFLAQQRLATNSRRGPLGRLASLNLRPTDKH

SEQ ID NO: 829050 - protein, 733 aa, Homo sapiens
MRVSAHLVTDVPRSVSLCQPSGPEQRPCRSLCAEPDVSGAEGEDPKSVPQSAHPTFSPPGDPSWFNEAWLQGISEDPGPNWKLKVSNLKMVLRSLVEYSQDVLAHPVSEEHLPDVSLIGEFSDPAELGKLLQLVLGCAISCEKKQDHIQRIMTLEESVQHVVMEAIQELMTKDTPDSLSPETYGNFDSQSRRYYFLSEEAEEGDELQQRCLDLERQLMLLSEEKQSLAQENAGLRERMGRPEGEGTPGLTAKKLLLLQSQLEQLQEENFRLESGREDERLRCAELEREVAELQHRNQALTSLAQEAQALKDEMDELRQSSERAGQLEATLTSCRRRLGELRELRRQVRQLEERNAGHAERTRQLEDELRRAGSLRAQLEAQRRQVQELQGQRQEEAMKAEKWLFECRNLEEKYESVTKEKERLLAERDSLREANEELRCAQLQPRGLTQADPSLDPTSTPVDNLAAEILPAELRETLLRLQLENKRLCRQEAADRERQEELQRHLEDANRARHGLETQHRLNQQQLSELRAQVEDLQKALQEQGGKTEDSILLKRKLEEHLQKLHEADLELQRKREYIEELEPPTDSSTARRIEELQHNLQKKDADLRAMEERYRRYVDKARMVMQTMEPKQRPAAGAPPELHSLRTQLRERDVRIRHLEMDFEKSRSQREQEEKLLISAWYNMGMALQQRAGEERAPAHAQSFLAQQRLATNSRRGPLGRLASLNLRPTDKH

SEQ ID NO: 829051 - protein, 740 aa, Homo sapiens
PALVPFPHYPLHPLPGAGVWKTTREEVVGIWTSIRGPRLQTFHVPSPCASPQDLSSGLAVAYVLNQIDPSWFNEAWLQGISEDPGPNWKLKVSNLKMVLRSLVEYSQDVLAHPVSEEHLPDVSLIGEFSDPAELGKLLQLVLGCAISCEKKQDHIQRIMTLEESVQHVVMEAIQELMTKDTPDSLSPETYGNFDSQSRRYYFLSEEAEEGDELQQRCLDLERQLMLLSEEKQSLAQENAGLRERMGRPEGEGTPGLTAKKLLLLQSQLEQLQEENFRLESGREDERLRCAELEREVAELQHRNQALTSLAQEAQALKDEMDELRQSSERAGQLEATLTSCRRRLGELRELRRQVRQLEERNAGHAERTRQLEDELRRAGSLRAQLEAQRRQVQELQGQRQEEAMKAEKWLFECRNLEEKYESVTKEKERLLAERDSLREANEELRCAQLQPRGLTQADPSLDPTSTPVDNLAAEILPAELRETLLRLQLENKRLCRQEAADRERQEELQRHLEDANRARHGLETQHRLNQQQLSELRAQVEDLQKALQEQGGKTEDSILLKRKLEEHLQKLHEADLELQRKREYIEELEPPTDSSTARRIEELQHNLQKKDADLRAMEERYRRYVDKARMVMQTMEPKQRPAAGAPPELHSLRTQLRERDVRIRHLEMDFEKSRSQREQEEKLLISAWYNMGMALQQRAGEERAPAHAQSFLAQQRLATNSRRGPLGRLASLNLRPTDKH

SEQ ID NO: 829052 - protein, 606 aa, Homo sapiens
RRIPFFLGPVLSVAKKSRHHIQRIMTLEESVQHVVMEAIQELMTKDTPDSLSPETYGNFDSQSRRYYFLSEEAEEGDELQQRCLDLERQLMLLSEEKQSLAQENAGLRERMGRPEGEGTPGLTAKKLLLLQSQLEQLQEENFRLESGREDERLRCAELEREVAELQHRNQALTSLAQEAQALKDEMDELRQSSERAGQLEATLTSCRRRLGELRELRRQVRQLEERNAGHAERTRQLEDELRRAGSLRAQLEAQRRQVQELQGQRQEEAMKAEKWLFECRNLEEKYESVTKEKERLLAERDSLREANEELRCAQLQPRGLTQADPSLDPTSTPVDNLAAEILPAELRETLLRLQLENKRLCRQEAADRERQEELQRHLEDANRARHGLETQHRLNQQQLSELRAQVEDLQKALQEQGGKTEDSILLKRKLEEHLQKLHEADLELQRKREYIEELEPPTDSSTARRIEELQHNLQKKDADLRAMEERYRRYVDKARMVMQTMEPKQRPAAGAPPELHSLRTQLRERDVRIRHLEMDFEKSRSQREQEEKLLISAWYNMGMALQQRAGEERAPAHAQSFLAQQRLATNSRRGPLGRLASLNLRPTDKH

SEQ ID NO: 829053 - protein, 362 aa, Homo sapiens
MAHLGKKPVQRRQVQELQGQRQEEAMKAEKWLFECRNLEEKYESVTKEKERLLAERDSLREANEELRCAQLQPRGLTQADPSLDPTSTPVDNLAAEILPAELRETLLRLQLENKRLCRQEAADRERQEELQRHLEDANRARHGLETQHRLNQQQLSELRAQVEDLQKALQEQGGKTEDSILLKRKLEEHLQKLHEADLELQRKREYIEELEPPTDSSTARRIEELQHNLQKKDADLRAMEERYRRYVDKARMVMQTMEPKQRPAAGAPPELHSLRTQLRERDVRIRHLEMDFEKSRSQREQEEKLLISAWYNMGMALQQRAGEERAPAHAQSFLAQQRLATNSRRGPLGRLASLNLRPTDKH

SEQ ID NO: 829054 - protein, 717 aa, Homo sapiens; identical to SEQ ID NO: 829047

SEQ ID NO: 829055 - protein, 655 aa, Homo sapiens
MSVDKAELCGSLLTWLQTFHVPSPCASPQDLSSGLAVAYVLNQIDPSWFNEAWLQGISEDPGPNWKLKVSNLKMVLRSLVEYSQDVLAHPVSEEHLPDVSLIGEFSDPAELGKLLQLVLGCAISCEKKQDHIQRIMTLEESVQHVVMEAIQELMTKDTPDSLSPETYGNFDSQSRRYYFLSEEAEEGDELQQRCLDLERQLMLLSEEKQSLAQENAGLRERMGRPEGEGTPGLTAKKLLLLQSQLEQLQEENFRLESGREDERLRCAELEREVAELQHRNQALTSLAQEAQALKDEMDELRQSSERAGQLEATLTSCRRRLGELRELRRQVRQLEERNAGHAERTRQLEDELRRAGSLRAQLEAQRRQVQELQGQRQEEAMKAEKWLFECRNLEEKYESVTKEKERLLAERDSLREANEELRCAQLQPRGLTQADPSLDPTSTPVDNLAAEILPAELRETLLRLQLENKRLCRQEAADRERQEELQRHLEDANRARHGLETQHRLNQQQLSELRAQVEDLQKALQEQGGKTEDSILLKRKLEEHLQKLHEADLELQRKREYIEELEPPTDSSTARRIEELQHNLQKKDADLRAMEERYRRYVDKARMVMQTMEPKQRPAAGAPPELHSLRTQLRERDVRIRHLEMDFEKTPVTEQ

SEQ ID NO: 829056 - protein, 465 aa, Homo sapiens
MSVDKAELCGSLLTWLQTFHVPSPCASPQDLSSGLAVAYVLNQIDPSWFNEAWLQGISEDPGPNWKLKVSNLKMVLRSLVEYSQDVLAHPVSEEHLPDVSLIGEFSDPAELGKLLQLVLGCAISCEKKQDHIQRIMTLEESVQHVVMEAIQELMTKDTPDSLSPETYGNFDSQSRRYYFLSEEAEEGDELQQRCLDLERQLMLLSEEKQSLAQENAGLRERMGRPEGEGTPGLTAKKLLLLQSQLEQLQEENFRLESGREDERLRCAELEREVAELQHRNQALTSLAQEAQALKDEMDELRQSSERAGQLEATLTSCRRRLGELRELRRQVRQLEERNAGHAERTRQLEDELRRAGSLRAQLEAQRRQVQELQGQRQEEAMKAEKWLFECRNLEEKYESVTKEKERLLAERDSLREANEELRCAQLQPRGLTQADPHGSTHTGDTSAKPAAEQVDARARGTTWRE

SEQ ID NO: 829057 - protein, 202 aa, Homo sapiens
PALVPFPHYPLHPLPGAGVWKTTREEVVGIWTSIRGPRVRTAAHEWAVIGCLGLQTFHVPSPCASPQDLSSGLAVAYVLNQIDPSWFNEAWLQGISEDPGPNWKLKVTSGLLIRGQTGEEMTRDGPARHMSWVMGRKRDRCLVINHLFIHSSMEYSPCARPGHSARNNTDKNLPHTAIILVTSNTYTTIKINFQAGRSGSCL

SEQ ID NO: 829058 - protein, 202 aa, Homo sapiens; identical to SEQ ID NO: 829057

SEQ ID NO: 829059 - protein, 68 aa, Homo sapiens
QQRGADGPPLPPAARRIEELQHNLQKKDADLRAMEERYRRYVDKARMVRTLGVPTSCLPWLLTFCASY

SEQ ID NO: 829060 - protein, 124 aa, Homo sapiens [sequence omitted]

SEQ ID NO: 829061 - protein, 755 aa, Homo sapiens
PALVPFPHYPLHPLPGAGVWKTTREEVVGIWTSIRGPRVRTAAHEWAVIGCLGLQTFHVPSPCASPQDLSSGLAVAYVLNQIDPSWFNEAWLQGISEDPGPNWKLKVSNLKMVLRSLVEYSQDVLAHPVSEEHLPDVSLIGEFSDPAELGKLLQLVLGCAISCEKKQDHIQRIMTLEESVQHVVMEAIQELMTKDTPDSLSPETYGNFDSQSRRYYFLSEEAEEGDELQQRCLDLERQLMLLSEEKQSLAQENAGLRERMGRPEGEGTPGLTAKKLLLLQSQLEQLQEENFRLESGREDERLRCAELEREVAELQHRNQALTSLAQEAQALKDEMDELRQSSERAGQLEATLTSCRRRLGELRELRRQVRQLEERNAGHAERTRQLEDELRRAGSLRAQLEAQRRQVQELQGQRQEEAMKAEKWLFECRNLEEKYESVTKEKERLLAERDSLREANEELRCAQLQPRGLTQADPSLDPTSTPVDNLAAEILPAELRETLLRLQLENKRLCRQEAADRERQEELQRHLEDANRARHGLETQHRLNQQQLSELRAQVEDLQKALQEQGGKTEDSILLKRKLEEHLQKLHEADLELQRKREYIEELEPPTDSSTARRIEELQHNLQKKDADLRAMEERYRRYVDKARMVMQTMEPKQRPAAGAPPELHSLRTQLRERDVRIRHLEMDFEKSRSQREQEEKLLISAWYNMGMALQQRAGEERAPAHAQSFLAQQRLATNSRRGPLGRLASLNLRPTDKH

SEQ ID NO: 829062 - protein, 644 aa, Homo sapiens; identical to SEQ ID NO: 829049

SEQ ID NO: 829063 - protein, 759 aa, Homo sapiens
PALVPFPHYPLHPLPGAGVWKTTREEVVGIWTSIRGPRLQTFHVPSPCASPQDLSSGLAVAYVLNQIDPSWFNEAWLQGISEDPGPNWKLKVTSGLLIRGQTGQQSEDGLTEPSRVLPGCPGASCVRRASPRCEPHWRVLRPGRARQAASAGAGLCHQLREKAGLPHLDPQDHIQRIMTLEESVQHVVMEAIQELMTKDTPDSLSPETYGNFDSQSRRYYFLSEEAEEGDELQQRCLDLERQLMLLSEEKQSLAQENAGLRERMGRPEGEGTPGLTAKKLLLLQSQLEQLQEENFRLESGREDERLRCAELEREVAELQHRNQALTSLAQEAQALKDEMDELRQSSERAGQLEATLTSCRRRLGELRELRRQVRQLEERNAGHAERTRQLEDELRRAGSLRAQLEAQRRQVQELQGQRQEEAMKAEKWLFECRNLEEKYESVTKEKERLLAERDSLREANEELRCAQLQPRGLTQADPSLDPTSTPVDNLAAEILPAELRETLLRLQLENKRLCRQEAADRERQEELQRHLEDANRARHGLETQHRLNQQQLSELRAQVEDLQKALQEQGGKTEDSILLKRKLEEHLQKLHEADLELQRKREYIEELEPPTDSSTARRIEELQHNLQKKDADLRAMEERYRRYVDKARMVMQTMEPKQRPAAGAPPELHSLRTQLRERDVRIRHLEMDFEKSRSQREQEEKLLISAWYNMGMALQQRAGEERAPAHAQSFLAQQRLATNSRRGPLGRLASLNLRPTDKH

SEQ ID NO: 829064 - protein, 295 aa, Homo sapiens
MVLRSLVEYSQDVLAHPVSEEHLPDVSLIGEFSDPAELGKLLQLVLGCAISCEKKQDHIQRIMTLEESVQHVVMEAIQELMTKDTPDSLSPETYGNFDSQPCRSSGGKTEDSILLKRKLEEHLQKLHEADLELQRKREYIEELEPPTDSSTARRIEELQHNLQKKDADLRAMEERYRRYVDKARMVMQTMEPKQRPAAGAPPELHSLRTQLRERDVRIRHLEMDFEKSRSQREQEEKLLISAWYNMGMALQQRAGEERAPAHAQSFLAQQRLATNSRRGPLGRLASLNLRPTDKH

SEQ ID NO: 829065 - protein, 267 aa, Homo sapiens
GRWWLNQLGSCGMGRSGQQGLFRGIPAKGAEGCGSDSCGAGGTRAHSPRHEGQAERALWPCRGISGWRGGLWLPLGQKRSQPGGQPTAAHPRPTGQKLHEADLELQRKREYIEELEPPTDSSTARRIEELQHNLQKKDADLRAMEERYRRYVDKARMVMQTMEPKQRPAAGAPPELHSLRTQLRERDVRIRHLEMDFEKSRSQREQEEKLLISAWYNMGMALQQRAGEERAPAHAQSFLAQQRLATNSRRGPLGRLASLNLRPTDKH

SEQ ID NO: 829066 - protein, 169 aa, Homo sapiens
DLVTRGWGDPRAQQRGADGPPLPPAARRIEELQHNLQKKDADLRAMEERYRRYVDKARMVMQTMEPKQRPAAGAPPELHSLRTQLRERDVRIRHLEMDFEKSRSQREQEEKLLISAWYNMGMALQQRAGEERAPAHAQSFLAQQRLATNSRRGPLGRLASLNLRPTDKH

SEQ ID NO: 829067 - protein, 202 aa, Homo sapiens; identical to SEQ ID NO: 829057

SEQ ID NO: 829068 - protein, 128 aa, Homo sapiens
MVLRSLVEYSQDVLAHPVSEEHLPDVSLIGEFSDPAELGKLLQLVLGCAISCEKKQASPTLTPDHIQRIMTLEESVQHVVMEAIQELMTKDTPDSLSPETYGNFDSQMESHSVTQAGVQWHDLGSLQP

SEQ ID NO: 829069 - protein, 1007 aa, Homo sapiens
GFVDSRLLRRIRQSCKGVEGMCVSFQEYELCEEWGCLYPIPREHLISLHQKHLLHLLERRDHDKALQLLRRIPDPTMCLEVTEQSLDQHTSLATSHFLANYLTTHFYGQLTAVRHREIQALYVGSKILLTLPEQHRASYSHLSSNPLFMLEQLLMNMKVDWATVAVQTLQQLLVGQEIGFTMDEVDSLLSRYAEKALDFPYPQREKRSDSVIHLQEIVHQAADPETLPRSPSAEFSPAAPPGISSIHSPSLRERSFPPTQPSQEFVPPATPPARHQWVPDETESICMVCCREHFTMFNRRHHCRRCGRLVCSSCSTKKMVVEGCRENPARVCDQCYSYCNKDVPEEPSEKPEALDSSKSESPPYSFVVRVPKADEVEWILDLKEEENELVRSEFYYEQAPSASLCIAILNLHRDSIACGHQLIEHCCRLSKGLTNPEVDAGLLTDIMKQLLFSAKMMFVKAGQSQDLALCDSYISKVDVLNILVAAAYRHVPSLDQILQPAAVTRLRNQLLEAEYYQLGVEVSTKTGLDTTGAWHAWGMACLKAGNLTAAREKFSRCLKPPFDLNQLNHGSRLVQDVVEYLESTVRPFVSLQDDDYFATLRELEATLRTQSLSLAVIPEGKIMNNTYYQECLFYLHNYSTNLAIISFYVRHSCLREALLHLLNKESPPEVFIEGIFQPSYKSGKLHTLENLLESIDPTLESWGKYLIAACQHLQKKNYYHILYELQQFMKDQVRAAMTCIRFFSHKAKSYTELGEKLSWLLKAKDHLKIYLQETSRSSGRKKTTFFRKKMTAADVSRHMNTLQLQMEVTRFLHRCESAGTSQITTLPLPTLFGNNHMKMDVACKVMLGGKNVEDGFGIAFRVLQDFQLDAAMTYCRAARQLVEKEKYSEIQQLLKCVSESGMAAKSDGDTILLNCLEAFKRIPPQELEGLIQAIHNDDNKVRAYLICCKLRSAYLIAVKQEHSRATALVQQVQQAAKSSGDAVVQDICAQWLLTSHPRGAHGPGSRK

SEQ ID NO: 829070 - protein, 362 aa, Homo sapiens
SGQHGVPPWREALLHLLNKESPPEVFIEGIFQPSYKSGKLHTLENLLESIDPTLESWGKYLIAACQHLQKKNYYHILYELQQFMKDQVRAAMTCIRFFSHKAKSYTELGEKLSWLLKAKDHLKIYLQETSRSSGRKKTTFFRKKMTAADVSRHMNTLQLQMEVTRFLHRCESAGTSQITTLPLPTLFGNNHMKMDVACKVMLGGKNVEDGFGIAFRVLQDFQLDAAMTYCRAARQLVEKEKYSEIQQLLKCVSESGMAAKSDGDTILLNCLEAFKRIPPQELEGLIQAIHNDDNKVRAYLICCKLRSAYLIAVKQEHSRATALVQQVQQAAKSSGDAVVQDICAQWLLTSHPRGAHGPGSRK

SEQ ID NO: 829071 - protein, 1228 aa, Homo sapiens
RLNSSLERRGRRIDHVLLNADGIRGFPVVLQQISKSLNYLLMSASQTKSESVEEKGGGPPRCSITELLQMCWPSLSEDCVASHTTLSQQLDQVLQSLREALELPEPRTPPLSSLVEQAAQKAPEAEAHPVQIQTQLLQKNLGKQTPSGSRQMDYLGTFFSYCSTLAAVLLQSLSSEPDHVEVKVGNPFVLLQQSSSQLVSHLLFERQVPPERLAALLAQENLSLSVPQVIVSCCCEPLALCSSRQSQQTSSLLTRLGTLAQLHASHCLDDLPLSTPSSPRTTENPTLERKPYSSPRDSSLPALTSSALAFLKSRSKLLATVACLGASPRLKVSKPSLSWKELRGRREVPLAAEQVARECERLLEQFPLFEAFLLAAWEPLRGSLQQGQSLAVNLCGWASLSTVLLGLHSPIALDVLSEAFEESLVARDWSRALQLTEVYGRDVDDLSSIKDAVLSCAVACDKEGWQYLFPVKDASLRSRLALQFVDRWPLESCLEILAYCISDTAVQEGLKCELQRKLAELQVYQKILGLQSPPVWCDWQTLRSCCVEDPSTVMNMILEAQEYELCEEWGCLYPIPREHLISLHQKHLLHLLERRDHDKALQLLRRIPDPTMCLEVTEQSLDQHTSLATSHFLANYLTTHFYGQLTAVRHREIQALYVGSKILLTLPEQHRASYSHLSSNPLFMLEQLLMNMKVDWATVAVQTLQQLLVGQEIGFTMDEVDSLLSRYAEKALDFPYPQREKRSDSVIHLQEIVHQAADPETLPRSPSAEFSPAAPPGISSIHSPSLRERSFPPTQPSQEFVPPATPPARHQWVPDETESICMVCCREHFTMFNRRHHCRRCGRLVCSSCSTKKMVVEGCRENPARVCDQCYSYCNKDVPEEPSEKPEALDSSKSESPPYSFVVRVPKADEVEWILDLKEEENELVRSEFYYEQAPSASLCIAILNLHRDSIACGHQLIEHCCRLSKGLTNPEVDAGLLTDIMKQLLFSAKMMFVKAGQSQDLALCDSYISKVDVLNILVAAAYRHVPSLDQILQPAAVTRLRNQLLEAEYYQLGVEVSTKTGLDTTGAWHAWGMACLKAGNLTAAREKFSRCLKPPFDLNQLNHGSRLVQDVVEYLESTVRPFVSLQDDDYFATLRELEATLRTQSLSLAVIPEGKIMNNTYYQECLFYLHNYSTNLAIISFYVRHSCLREALLHLLNKVGHGHSSKRQCLPYSSGLDHSALSGTITP

SEQ ID NO: 829072 - protein, 1007 aa, Homo sapiens
RLNSSLERRGRRIDHVLLNADGIRGFPVVLQQISKSLNYLLMSASQTKSESVEEKGGGPPRCSITELLQMCWPSLSEDCVASHTTLSQQLDQVLQSLREALELPEPRTPPLSSLVEQAAQKAPEAEAHPVQIQTQLLQKNLGKQTPSGSRQMDYLGTFFSYCSTLAAVLLQSLSSEPDHVEVKVGNPFVLLQQSSSQLVSHLLFERQVPPERLAALLAQENLSLSVPQVIVSCCCEPLALCSSRQSQQTSSLLTRLGTLAQLHASHCLDDLPLSTPSSPRTTENPTLERKPYSSPRDSSLPALTSSALAFLKSRSKLLATVACLGASPRLKVSKPSLSWKELRGRREVPLAAEQVARECERLLEQFPLFEAFLLAAWEPLRGSLQQGQSLAVNLCGWASLSTVLLGLHSPIALDVLSEAFEESLVARDWSRALQLTEVYGRDVDDLSSIKDAVLSCAVACDKEGWQYLFPVKDASLRSRLALQFVDRWPLESCLEILAYCISDTAVQEGLKCELQRKLAELQVYQKILGLQSPPVWCDWQTLRSCCVEDPSTVMNMILEAQEYELCEEWGCLYPIPREHLISLHQKHLLHLLERRDHDKALQLLRRIPDPTMCLEVTEQSLDQHTSLATSHFLANYLTTHFYGQLTAVRHREIQALYVGSKILLTLPEQHRASYSHLSSNPLFMLEQLLMNMKVDWATVAVQTLQQLLVGQEIGFTMDEVDSLLSRYAEKALDFPYPQREKRSDSVIHLQEIVHQAADPETLPRSPSAEFSPAAPPGISSIHSPSLRERSFPPTQPSQEFVPPATPPARHQWVPDETESICMVCCREHFTMFNRRHHCRRCGRLVCSSCSTKKMVVEGCRENPARVCDQCYSYCNKDVPEEPSEKPEALDSSKSESPPYSFVVRVPKADEVEWILDLKEEENELVRSEFYYEQAPSASLCIAILNLHRDSIACGHQLIEHCCRLSKGLTNPEVDAGLLTDIMKQLLFSAKMMFVKAGQSQDLALCDR

SEQ ID NO: 829073 - protein, 1542 aa, Homo sapiens
RLNSSLERRGRRIDHVLLNADGIRGFPVVLQQISKSLNYLLMSASQTKSESVEEKGGGPPRCSITELLQMCWPSLSEDCVASHTTLSQQLDQVLQSLREALELPEPRTPPLSSLVEQAAQKAPEAEAHPVQIQTQLLQKNLGKQTPSGSRQMDYLGTFFSYCSTLAAVLLQSLSSEPDHVEVKVGNPFVLLQQSSSQLVSHLLFERQVPPERLAALLAQENLSLSVPQVIVSCCCEPLALCSSRQSQQTSSLLTRLGTLAQLHASHCLDDLPLSTPSSPRTTENPTLERKPYSSPRDSSLPALTSSALAFLKSRSKLLATVACLGASPRLKVSKPSLSWKELRGRREVPLAAEQVARECERLLEQFPLFEAFLLAAWEPLRGSLQQGQSLAVNLCGWASLSTVLLGLHSPIALDVLSEAFEESLVARDWSRALQLTEVYGRDVDDLSSIKDAVLSCAVACDKEGWQYLFPVKDASLRSRLALQFVDRWPLESCLEILAYCISDTAVQEGLKCELQRKLAELQVYQKILGLQSPPVWCDWQTLRSCCVEDPSTVMNMILEAQEYELCEEWGCLYPIPREHLISLHQKHLLHLLERRDHDKALQLLRRIPDPTMCLEVTEQSLDQHTSLATSHFLANYLTTHFYGQLTAVRHREIQALYVGSKILLTLPEQHRASYSHLSSNPLFMLEQLLMNMKVDWATVAVQTLQQLLVGQEIGFTMDEVDSLLSRYAEKALDFPYPQREKRSDSVIHLQEIVHQAADPETLPRSPSAEFSPAAPPGISSIHSPSLRERSFPPTQPSQEFVPPATPPARHQWVPDETESICMVCCREHFTMFNRRHHCRRCGRLVCSSCSTKKMVVEGCRENPARVCDQCYSYCNKDVPEEPSEKPEALDSSKSESPPYSFVVRVPKADEVEWILDLKEEENELVRSEFYYEQAPSASLCIAILNLHRDSIACGHQLIEHCCRLSKGLTNPEVDAGLLTDIMKQLLFSAKMMFVKAGQSQDLALCDSYISKVDVLNILVAAAYRHVPSLDQILQPAAVTRLRNQLLEAEYYQLGVEVSTKTGLDTTGAWHAWGMACLKAGNLTAAREKFSRCLKPPFDLNQLNHGSRLVQDVVEYLESTVRPFVSLQDDDYFATLRELEATLRTQSLSLAVIPEGKIMNNTYYQECLFYLHNYSTNLAIISFYVRHSCLREALLHLLNKESPPEVFIEGIFQPSYKSGKLHTLENLLESIDPTLESWGKYLIAACQHLQKKNYYHILYELQQFMKDQVRAAMTCIRFFSHKAKSYTELGEKLSWLLKAKDHLKIYLQETSRSSGRKKTTFFRKKMTAADVSRHMNTLQLQMEVTRFLHRCESAGTSQITTLPLPTLFGNNHMKMDVACKVMLGGKNVEDGFGIAFRVLQDFQLDAAMTYCRAARQLVEKEKYSEIQQLLKCVSESGMAAKSDGDTILLNCLEAFKRIPPQELEGLIQAIHNDDNKVRAYLICCKLRSAYLIAVKQEHSRATALVQQVQQAAKSSGDAVVQDICAQWLLTSHPRGAHGPGSRK

SEQ ID NO: 829074 - protein, 1484 aa, Homo sapiens
RLNSSLERRGRRIDHVLLNADGIRGFPVVLQQISKSLNYLLMSASQTKSESVEEKGGGPPRCSITELLQMCWPSLSEDCVASHTTLSQQLDQVLQSLREALELPEPRTPPLSSLVEQAAQKAPEAEAHPVQIQTQLLQKNLGKQTPSGSRQMDYLGTFFSYCSTLAAVLLQSLSSEPDHVEVKVGNPFVLLQQSSSQLVSHLLFERQVPPERLAALLAQENLSLSVPQVIVSCCCEPLALCSSRQSQQTSSLLTRLGTLAQLHASHCLDDLPLSTPSSPRTTENPTLERKPYSSPRDSSLPALTSSALAFLKSRSKLLATVACLGASPRLKVSKPSLSWKELRGRREVPLAAEQVARECERLLEQFPLFEAFLLAAWEPLRGSLQQGQSLAVNLCGWASLSTVLLGLHSPIALDVLSEAFEESLVARDWSRALQLTEVYGRDVDDLSSIKDAVLSCAVACDKEGWQYLFPVKDASLRSRLALQFVDRWPLESCLEILAYCISDTAVQEGLKCELQRKLAELQVYQKILGLQSPPVWCDWQTLRSCCVEDPSTVMNMILEAQEYELCEEWGCLYPIPREHLISLHQKHLLHLLERRDHDKALQLLRRIPDPTMCLEVTEQSLDQHTSLATSHFLANYLTTHFYGQLTAVRHREIQALYVGSKILLTLPEQHRASYSHLSSNPLFMLEQLLMNMKVDWATVAVQTLQQLLVGQEIGFTMDEVDSLLSRYAEKALDFPYPQREKRSDSVIHLQEIVHQAADPETLPRSPSAEFSPAAPPGISSIHSPSLRERSFPPTQPSQEFVPPATPPARHQWVPDETESICMVCCREHFTMFNRRHHCRRCGRLVCSSCSTKKMVVEGCRENPARVCDQCYSYCNKDVPEEPSEKPEALDSSKSESPPYSFVVRVPKADEVEWILDLKEEENELVRSEFYYEQAPSASLCIAILNLHRDSIACGHQLIEHCCRLSKGLTNPEVDAGLLTDIMKQLLFSAKMMFVKAGQSQDLALCDSYISKVDVLNILVAAAYRHVPSLDQILQPAAVTRLRNQLLEAEYYQLGVEVSTKTGLDTTGAWHAWGMACLKAGNLTAAREKFSRCLKPPFDLNQLNHGSRLVQDVVEYLESTVRPFVSLQDDDYFATLRELEATLRTQSLSLAVIPEGKIMNNTYYQECLFYLHNYSTNLAIISFYVRHSCLREALLHLLNKESPPEVFIEGIFQPSYKSGKLHTLENLLESIDPTLESWGKYLIAACQHLQKKNYYHILYELQQFMKDQVRAAMTCIRFFSHKAKSYTELGEKLSWLLKAKDHLKIYLQETSRSSGRKKTTFFRKKMTAADVSRHMNTLQLQMEVTRFLHRCESAGTSQITTLPLPTLFGNNHMKMDVACKVMLGGKNVEDGFGIAFRVLQDFQLDAAMTYCRAARQLVEKEKYSEIQQLLKCVSESGMAAKSDGDTILLNCLEAFKRIPPQELEGLIQAIHNDDNKVSGIVSKRW

SEQ ID NO: 829075 - protein, 1167 aa, Homo sapiens
RLNSSLERRGRRIDHVLLNADGIRGFPVVLQQISKSLNYLLMSASQTKSESVEEKGGGPPRCSITELLQMCWPSLSEDCVASHTTLSQQLDQVLQSLREALELPEPRTPPLSSLVEQAAQKAPEAEAHPVQIQTQLLQKNLGKQTPSGSRQMDYLGTFFSYCSTLAAVLLQSLSSEPDHVEVKVGNPFVLLQQSSSQLVSHLLFERQVPPERLAALLAQENLSLSVPQVIVSCCCEPLALCSSRQSQQTSSLLTRLGTLAQLHASHCLDDLPLSTPSSPRTTENPTLERKPYSSPRDSSLPALTSSALAFLKSRSKLLATVACLGASPRLKVSKPSLSWKELRGRREVPLAAEQVARECERLLEQFPLFEAFLLAAWEPLRGSLQQGQSLAVNLCGWASLSTVLLGLHSPIALDVLSEAFEESLVARDWSRALQLTEVYGRDVDDLSSIKDAVLSCAVACDKEGWQYLFPVKDASLRSRLALQFVDRWPLESCLEILAYCISDTAVQEGLKCELQRKLAELQVYQKILGLQSPPVWCDWQTLRSCCVEDPSTVMNMILEAQEYELCEEWGCLYPIPREHLISLHQKHLLHLLERRDHDKALQLLRRIPDPTMCLEVTEQSLDQHTSLATSHFLANYLTTHFYGQLTAVRHREIQALYVGSKILLTLPEQHRASYSHLSSNPLFMLEQLLMNMKVDWATVAVQTLQQLLVGQEIGFTMDEVDSLLSRYAEKALDFPYPQREKRSDSVIHLQEIVHQAADPETLPRSPSAEFSPAAPPGISSIHSPSLRERSFPPTQPSQEFVPPATPPARHQWVPDETESICMVCCREHFTMFNRRHHCRRCGRLVCSSCSTKKMVVEGCRENPARVCDQCYSYCNKDVPEEPSEKPEALDSSKSESPPYSFVVRVPKADEVEWILDLKEEENELVRSEFYYEQAPSASLCIAILNLHRDSIACGHQLIEHCCRLSKGLTNPEVDAGLLTDIMKQLLFSAKMMFVKAGQSQDLALCDSYISKVDVLNILVAAAYRHVPSLDQILQPAAVTRLRNQLLEAEYYQLGVEVSTKTGLDTTGAWHAWGMACLKAGNLTAAREKFSRCLKPPFDLNQLNHGSRLVQDVVEYLESTVRPFVSLVRARQEECLAQGGRPRNSNDLGKESVEIQLTVSVLAQHQAG

SEQ ID NO: 829076 - protein, 501 aa, Homo sapiens
RLNSSLERRGRRIDHVLLNADGIRGFPVVLQQISKSLNYLLMSASQTKSESVEEKGGGPPRCSITELLQMCWPSLSEDCVASHTTLSQQLDQVLQSLREALELPEPRTPPLSSLVEQAAQKAPEAEAHPVQIQTQLLQKNLGKQTPSGSRQMDYLGTFFSYCSTLAAVLLQSLSSEPDHVEVKVGNPFVLLQQSSSQLVSHLLFERQVPPERLAALLAQENLSLSVPQVIVSCCCEPLALCSSRQSQQTSSLLTRLGTLAQLHASHCLDDLPLSTPSSPRTTENPTLERKPYSSPRDSSLPALTSSALAFLKSRSKLLATVACLGASPRLKVSKPSLSWKELRGRREVPLAAEQVARECERLLEQFPLFEAFLLAAWEPLRGSLQQGQSLAVNLCGWASLSTVLLGLHSPIALDVLSEAFEESLVARDWSRALQLTEVYGRDVDDLSSIKDAVLSCAVACGEQNAMPPFFTSGNIWYSLGILSHLILTVTLERSPTIISCY

SEQ ID NO: 829077 - protein, 112 aa, Homo sapiens
AGVGAARLRRRRAPSGTLNGPYAQDKHGLNQVHAPAGDALTEVRTAVPGQVKPRTLGPKNLTGTPCLMKLRTARCASSESETKFRHVAQADLKLLGSSNPPALASRSAGITG

SEQ ID NO: 829078 - protein, 81 aa, Homo sapiens
AGVGAARLRRRRAPSGTLNGPYAQDKHGLNQVHAPAGDALTEVRTAVPGQVKPRTLGPKNLTGTPCLMKLRTARCASSESG

SEQ ID NO: 829079 - protein, 119 aa, Homo sapiens
AGVGAARLRRRRAPSGTLNGPYAQDKHGLNQVHAPAGDALTEVRTAVPGQVKPRTLGPKNLTGTPCLMKLRTARCASSESDHHYEEQNRPLAHLDRAGKWQSQDHPDGSASKPASLIAM

SEQ ID NO: 829080 - protein, 112 aa, Homo sapiens; identical to SEQ ID NO: 829077

SEQ ID NO: 829081 - protein, 582 aa, Homo sapiens
MASSLAFLLLNFHVSLFLVQLLTPCSAQFSVLGPSGPILAMVGEDADLPCHLFPTMSAETMELRWVSSSLRQVVNVYADGKEVEDRQSAPYRGRTSILRDGITAGKAALRIHNVTASDSGKYLCYFQDGDFYEKALVELKVAALGSDLHIEVKGYEDGGIHLECRSTGWYPQPQIKWSDTKGENIPAVEAPVVADGVGLYAVAASVIMRGSSGGGVSCIIRNSLLGLEKTASISIADPFFRSAQPWIAALAGTLPISLLLLAGASYFLWRQQKEKIALSRETEREREMKEMGYAATEQEISLREKLQEELKWRKIQYMARGEKSLAYHEWKMALFKPADVILDPDTANAILLVSEDQRSVQRAEEPRDLPDNPERFEWRYCVLGCENFTSGRHYWEVEVGDRKEWHIGVCSKNVERKKGWVKMTPENGYWTMGLTDGNKYRALTEPRTNLKLPEPPRKVGIFLDYETGEISFYNATDGSHIYTFPHASFSEPLYPVFRILTLEPTALTICPIPKEVESSPDPDLVPDHSLETPLTPGLANESGEPQAEVTSLLLPAHPGAEVSPSATTNQNHKLQARTEALY

SEQ ID NO: 829082 - protein, 494 aa, Homo sapiens
MVGEDADLPCHLFPTMSAETMELRWVSSSLRQVVNVYADGKEVEDRQSAPYRGRTSILRDGITAGKAALRIHNVTASDSGKYLCYFQDGDFYEKALVELKVAAVVADGVGLYAVAASVIMRGSSGGGVSCIIRNSLLGLEKTASISIADPFFRSAQPWIAALAGTLPISLLLLAGASYFLWRQQKEKIALSRETEREREMKEMGYAATEQEISLREKLQEELKWRKIQYMARGEKSLAYHEWKMALFKPADVILDPDTANAILLVSEDQRSVQRAEEPRDLPDNPERFEWRYCVLGCENFTSGRHYWEVEVGDRKEWHIGVCSKNVERKKGWVKMTPENGYWTMGLTDGNKYRALTEPRTNLKLPEPPRKVGIFLDYETGEISFYNATDGSHIYTFPHASFSEPLYPVFRILTLEPTALTICPIPKEVESSPDPDLVPDHSLETPLTPGLANESGEPQAEVTSLLLPAHPGAEVSPSATTNQNHKLQARTEALY

SEQ ID NO: 829083 - protein, 280 aa, Homo sapiens
PFPIHSIAEWRKIQYMARGEKSLAYHEWKMALFKPADVILDPDTANAILLVSEDQRSVQRAEEPRDLPDNPERFEWRYCVLGCENFTSGRHYWEVEVGDRKEWHIGVCSKNVERKKGWVKMTPENGYWTMGLTDGNKYRALTEPRTNLKLPEPPRKVGIFLDYETGEISFYNATDGSHIYTFPHASFSEPLYPVFRILTLEPTALTICPIPKEVESSPDPDLVPDHSLETPLTPGLANESGEPQAEVTSLLLPAHPGAEVSPSATTNQNHKLQARTEALY

SEQ ID NO: 829084 - protein, 577 aa, Homo sapiens
MASSLAFLLLNFHVSLFLVQLLTPCSAQFSVLGPSGPILAMVGEDADLPCHLFPTMSAETMELRWVSSSLRQVVNVYADGKEVEDRQSAPYRGRTSILRDGITAGKAALRIHNVTASDSGKYLCYFQDGDFYEKALVELKVAALGSDLHIEVKGYEDGGIHLECRSTGWYPQPQIKWSDTKGENIPAVEAPVVADGVGLYAVAASVIMRGSSGGGVSCIIRNSLLGLEKTASISIADPFFRSAQPWIAALAGTLPISLLLLAGASYFLWRQQKEKIALSRETEREREMKEMGYAATEQEISLREKLQEELKWRKIQYMARGEKSLAYHEWKMALFKPADVILDPDTANAILLVSEDQRSVQRAEEPRDLPDNPERFEWRYCVLGCENFTSGRHYWEVEVGDRKEWHIGVCSKNVERKKGWVKMTPENGYWTMGLTDGNKYRALTEPRTNLKLPEPPRKVGIFLDYETGEISFYNATDGSHIYTFPHASFSEPLYPVFRILTLEPTALTICPIPKEVESSPDPDLVPDHSLETPLTPGLANESGEPQAEVTSLLLQDVLERLSPEWPRLDPVAPSGVG

SEQ ID NO: 829085 - protein, 246 aa, Homo sapiens
MASSLAFLLLNFHVSLFLVQLLTPCSAQFSVLGPSGPILAMVGEDADLPCHLFPTMSAETMELRWVSSSLRQVVNVYADGKEVEDRQSAPYRGRTSILRDGITAGKAALRIHNVTASDSGKYLCYFQDGDFYEKALVELKVAALGSDLHIEVKGYEDGGIHLECRSTGWYPQPQIKWSDTKGENIPAVEAPVVADGVGLYAVAASVIMRGSSGGGVSCIIRNSLLGLEKTASISIAGQYPAWPQLY

SEQ ID NO: 829086 - protein, 582 aa, Homo sapiens; identical to SEQ ID NO: 829081

SEQ ID NO: 829087 - protein, 354 aa, Homo sapiens
MTHSLPFADPFFRSAQPWIAALAGTLPISLLLLAGASYFLWRQQKEKIALSRETEREREMKEMGYAATEQEISLREKLQEELKWRKIQYMARGEKSLAYHEWKMALFKPADVILDPDTANAILLVSEDQRSVQRAEEPRDLPDNPERFEWRYCVLGCENFTSGRHYWEVEVGDRKEWHIGVCSKNVERKKGWVKMTPENGYWTMGLTDGNKYRALTEPRTNLKLPEPPRKVGIFLDYETGEISFYNATDGSHIYTFPHASFSEPLYPVFRILTLEPTALTICPIPKEVESSPDPDLVPDHSLETPLTPGLANESGEPQAEVTSLLLPAHPGAEVSPSATTNQNHKLQARTEALY

SEQ ID NO: 829088 - protein, 228 aa, Homo sapiens
MASSLAFLLLNFHVSLFLVQLLTPCSAQFSVLGPSGPILAMVGEDADLPCHLFPTMSAETMELRWVSSSLRQVVNVYADGKEVEDRQSAPYRGRTSILRDGITAGKAALRIHNVTASDSGKYLCYFQDGDFYEKALVELKVAALGSDLHIEVKGYEDGGIHLECRSTGWYPQPQIKWSDTKGENIPAVEAPVVADGVGLYAVAASVIMRGSSGGGVSCIIRNSPRDSL

SEQ ID NO: 829089 - protein, 84 aa, Homo sapiens
SSLRQVVNVYADGKEVEDRQSAPYRGRTSILRDGITAGKAALRIHNVTASDSGKYLCYFQDGDFYEKALVELKVAVQVSLQVLF

SEQ ID NO: 829090 - protein, 371 aa, Homo sapiens
MIEDSGKRGNTMAERRQLFAEMRAQDLDRIRLSTYRTACKLRFVQKKCNLHLVDIWNVIEALRENALNNLDPNTELNVSRLEAVLSTIFYQLNKRMPTTHQIHVEQSISLLLNFLLAAFDPEGHGKISVFAVKMALATLCGGKIMDKLRYIFSMISDSSGVMVYGRYDQFLREVLKLPTAVFEGPSFGYTEQSARSCFSQQKKVTLNGFLDTLMSDPPPQCLVWLPLLHRLANVENVFHPVECSYCHSESMMGFRYRCQQCHNYQLCQDCFWRGHAGGSHSNQHQMKEYTSWKSPAKKLTNALSKSLSCASSREPLHPMFPDQPEKPLNLAHIVPPRPVTSMNDTLFSHSVPSSGSPFITRSSDGAFGGCV

SEQ ID NO: 829091 - protein, 371 aa, Homo sapiens; identical to SEQ ID NO: 829090

SEQ ID NO: 829092 - protein, 683 aa, Homo sapiens
MIEDSGKRGNTMAERRQLFAEMRAQDLDRIRLSTYRTACKLRFVQKKCNLHLVDIWNVIEALRENALNNLDPNTELNVSRLEAVLSTIFYQLNKRMPTTHQIHVEQSISLLLNFLLAAFDPEGHGKISVFAVKMALATLCGGKIMDKLRYIFSMISDSSGVMVYGRYDQFLREVLKLPTAVFEGPSFGYTEQSARSCFSQQKKVTLNGFLDTLMSDPPPQCLVWLPLLHRLANVENVFHPVECSYCHSESMMGFRYRCQQCHNYQLCQDCFWRGHAGGSHSNQHQMKEYTSWKSPAKKLTNALSKSLSCASSREPLHPMFPDQPEKPLNLAHIVPPRPVTSMNDTLFSHSVPSSGSPFITRSMLESSNRLDEEHRLIARYAARLAAESSSSQPPQQRSAPDISFTIDANKQQRQLIAELENKNREILQEIQRLRLEHEQASQPTPEKAQQNPTLLAELRLLRQRKDELEQRMSALQESRRELMVQLEGLMKLLKTQGAGSPRSSPSHTISRPIPMPIRSASACSTPTHTPQDSLTGVGGDVQEAFAQSSRRNLRNDLLVAADSITNTMSSLVKELNSEVGSETESNVDSEFARTQFEDLVPSPTSEKAFLAQIHARKPGYIHSGATTSTMRGDMVTEDADPYVQPEDENYENDSVRQLENELQMEEYLKQKLQDEAYQVSLQG

SEQ ID NO: 829093 - protein, 683 aa, Homo sapiens; identical to SEQ ID NO: 829092

SEQ ID NO: 829094 - protein, 683 aa, Homo sapiens; identical to SEQ ID NO: 829092

SEQ ID NO: 829095 - protein, 740 aa, Homo sapiens
MIEDSGKRGNTMAERRQLFAEMRAQDLDRIRLSTYRTACKLRFVQKKCNLHLVDIWNVIEALRENALNNLDPNTELNVSRLEAVLSTIFYQLNKRMPTTHQIHVEQSISLLLNFLLAAFDPEGHGKISVFAVKMALATLCGGKIMDKLRYIFSMISDSSGVMVYGRYDQFLREVLKLPTAVFEGPSFGYTEQSARSCFSQQKKVTLNGFLDTLMSDPPPQCLVWLPLLHRLANVENVFHPVECSYCHSESMMGFRYRCQQCHNYQLCQDCFWRGHAGGSHSNQHQMKEYTSWKSPAKKLTNALSKSLSCASSREPLHPMFPDQPEKPLNLAHIVPPRPVTSMNDTLFSHSVPSSGSPFITRSSPPKDSEVEQNKLLARAAPAFLKGKGIQYSLNVADRLADEHVLIGLYVNMLRNNPSCMLESSNRLDEEHRLIARYAARLAAESSSSQPPQQRSAPDISFTIDANKQQRQLIAELENKNREILQEIQRLRLEHEQASQPTPEKAQQNPTLLAELRLLRQRKDELEQRMSALQESRRELMVQLEGLMKLLKTQGAGSPRSSPSHTISRPIPMPIRSASACSTPTHTPQDSLTGVGGDVQEAFAQSSRRNLRNDLLVAADSITNTMSSLVKELNSEVGSETESNVDSEFARTQFEDLVPSPTSEKAFLAQIHARKPGYIHSGATTSTMRGDMVTEDADPYVQPEDENYENDSVRQLENELQMEEYLKQKLQDEAYQVSLQG

SEQ ID NO: 829096 - protein, 510 aa, Homo sapiens
MIEDSGKRGNTMAERRQLFAEMRAQDLDRIRLSTYRTACKLRFVQKKCNLHLVDIWNVIEALRENALNNLDPNTELNVSRLEAVLSTIFYQLNKRMPTTHQIHVEQSISLLLNFLLAAFDPEGHGKISVFAVKMALATLCGGKIMDKLRYIFSMISDSSGVMVYGRYDQFLREVLKLPTAVFEGPSFGYTEQSARSCFSQQKKVTLNGFLDTLMSDPPPQCLVWLPLLHRLANVENVFHPVECSYCHSESMMGFRYRCQQCHNYQLCQDCFWRGHAGGSHSNQHQMKEYTSWKSPAKKLTNALSKSLSCASSREPLHPMFPDQPEKPLNLAHIVPPRPVTSMNDTLFSHSVPSSGSPFITRSMLESSNRLDEEHRLIARYAARLAAESSSSQPPQQRSAPDISFTIDANKQQRQLIAELENKNREILQEIQRLRLEHEQASQPTPEKAQQNPTLLAELRLLRQRKDELEQRMSALQESRRELMVQLEGLMKLLKEEELKQGVSYVPYCRS

SEQ ID NO: 829097 - protein, 365 aa, Homo sapiens
MFPDQPEKPLNLAHIVPPRPVTSMNDTLFSHSVPSSGSPFITRSMLESSNRLDEEHRLIARYAARLAAESSSSQPPQQRSAPDISFTIDANKQQRQLIAELENKNREILQEIQRLRLEHEQASQPTPEKAQQNPTLLAELRLLRQRKDELEQRMSALQESRRELMVQLEGLMKLLKTQGAGSPRSSPSHTISRPIPMPIRSASACSTPTHTPQDSLTGVGGDVQEAFAQSSRRNLRNDLLVAADSITNTMSSLVKELNSEVGSETESNVDSEFARTQFEDLVPSPTSEKAFLAQIHARKPGYIHSGATTSTMRGDMVTEDADPYVQPEDENYENDSVRQLENELQMEEYLKQKLQDEAYQVSLQG

SEQ ID NO: 829098 - protein, 567 aa, Homo sapiens
MIEDSGKRGNTMAERRQLFAEMRAQDLDRIRLSTYRTACKLRFVQKKCNLHLVDIWNVIEALRENALNNLDPNTELNVSRLEAVLSTIFYQLNKRMPTTHQIHVEQSISLLLNFLLAAFDPEGHGKISVFAVKMALATLCGGKIMDKLRYIFSMISDSSGVMVYGRYDQFLREVLKLPTAVFEGPSFGYTEQSARSCFSQQKKVTLNGFLDTLMSDPPPQCLVWLPLLHRLANVENVFHPVECSYCHSESMMGFRYRCQQCHNYQLCQDCFWRGHAGGSHSNQHQMKEYTSWKSPAKKLTNALSKSLSCASSREPLHPMFPDQPEKPLNLAHIVPPRPVTSMNDTLFSHSVPSSGSPFITRSSPPKDSEVEQNKLLARAAPAFLKGKGIQYSLNVADRLADEHVLIGLYVNMLRNNPSCMLESSNRLDEEHRLIARYAARLAAESSSSQPPQQRSAPDISFTIDANKQQRQLIAELENKNREILQEIQRLRLEHEQASQPTPEKAQQNPTLLAELRLLRQRKDELEQRMSALQESRRELMVQLEGLMKLLKEEELKQGVSYVPYCRS

SEQ ID NO: 829099 - protein, 724 aa, Homo sapiens
MIEDSGKRGNTMAERRQLFAEMRAQDLDRIRLSTYRTACKLRFVQKKCNLHLVDIWNVIEALRENALNNLDPNTELNVSRLEAVLSTIFYQLNKRMPTTHQIHVEQSISLLLNFLLAAFDPEGHGKISVFAVKMALATLCGGKIMDKLRYIFSMISDSSGVMVYGRYDQFLREVLKLPTAVFEGPSFGYTEQSARSCFSQQKKVTLNGFLDTLMSDPPPQCLVWLPLLHRLANVENVFHPVECSYCHSESMMGFRYRCQQCHNYQLCQDCFWRGHAGGSHSNQHQMKEYTSWKSPAKKLTNALSKSLSCASSREPLHPMFPDQPEKPLNLAHIVPPRPVTSMNDTLFSHSVPSSGSPFITRSMLESSNRLDEEHRLIARYAARLAAESSSSQPPQQRSAPDISFTIDANKQQRQLIAELENKNREILQEIQRLRLEHEQASQPTPEKAQQNPTLLAELRLLRQRKDELEQRMSALQESRRELMVQLEGLMKLLKTQGAGSPRSSPSHTISRPIPMPIRSASACSTPTHTPQDSLTGVGGDVQEAFAQSSRRNLRNDLLVAADSITNTMSSLVKELNSEVGSETESNVDSEFARTQFEDLVPSPTSEKAFLAQIHARKPGYIHSGATTSTMRGDMVTEDADPYVQPEDENYENDSVRQLENELQMEEYLKQKLQDEAYQLHVSTETRLEHPCPVSETKWRVLFWGFVFFGGFLSLALQIYFWGLF

SEQ ID NO: 829100 - protein, 237 aa, Homo sapiens
MIEDSGKRGNTMAERRQLFAEMRAQDLDRIRLSTYRTACKLRFVQKKCNLHLVDIWNVIEALRENALNNLDPNTELNVSRLEAVLSTIFYQLNKRMPTTHQIHVEQSISLLLNFLLAAFDPEGHGKISVFAVKMALATLCGGKIMDKLRYIFSMISDSSGVMVYGRYDQFLREVLKLPTAVFEGPSFGYTEQSARSCFSQQKKVTLNGFLDTLMSDPPPQCLVWLPLLHRLANVENV

SEQ ID NO: 829101 - protein, 121 aa, Homo sapiens
MIEDSGKRGNTMAERRQLFAEMRAQDLDRIRLSTYRTACKLRFVQKKCNLHLVDIWNVIEALRENALNNLDPNTELNVSRLEAVLSTIFYQLNKRMPTTHQIHVEQSISLLLNFLLAAFDP

SEQ ID NO: 829102 - protein, 683 aa, Homo sapiens; identical to SEQ ID NO: 829092

SEQ ID NO: 829103 - protein, 391 aa, Homo sapiens
MFPDQPEKPLNLAHIVPPRPVTSMNDTLFSHSVPSSGSPFITRSSPPKDSEVEQNKLLARAAPAFLKGKGMLESSNRLDEEHRLIARYAARLAAESSSSQPPQQRSAPDISFTIDANKQQRQLIAELENKNREILQEIQRLRLEHEQASQPTPEKAQQNPTLLAELRLLRQRKDELEQRMSALQESRRELMVQLEGLMKLLKTQGAGSPRSSPSHTISRPIPMPIRSASACSTPTHTPQDSLTGVGGDVQEAFAQSSRRNLRNDLLVAADSITNTMSSLVKELNSEVGSETESNVDSEFARTQFEDLVPSPTSEKAFLAQIHARKPGYIHSGATTSTMRGDMVTEDADPYVQPEDENYENDSVRQLENELQMEEYLKQKLQDEAYQVSLQG

SEQ ID NO: 829104 - protein, 567 aa, Homo sapiens; identical to SEQ ID NO: 829098

SEQ ID NO: 829105 - protein, 567 aa, Homo sapiens; identical to SEQ ID NO: 829098

SEQ ID NO: 829106 - protein, 192 aa, Homo sapiens
MFPDQPEKPLNLAHIVPPRPVTSMNDTLFSHSVPSSGSPFITRSMLESSNRLDEEHRLIARYAARLAAESSSSQPPQQRSAPDISFTIDANKQQRQLIAELENKNREILQEIQRLRLEHEQASQPTPEKAQQNPTLLAELRLLRQRKDELEQRMSALQESRRELMVQLEGLMKLLKEEELKQGVSYVPYCRS

SEQ ID NO: 829107 - protein, 740 aa, Homo sapiens; identical to SEQ ID NO: 829095

SEQ ID NO: 829108 - protein, 740 aa, Homo sapiens; identical to SEQ ID NO: 829095

SEQ ID NO: 829109 - protein, 735 aa, Homo sapiens [sequence omitted]

SEQ ID NO: 829110 - protein, 160 aa, Homo sapiens
MFAFSECILHKTLSNKCHSPFQECMNRCCNATTCTLKPDAVCAHGLCCEDCQLKPAGTACRDSSNSCDLPEFCTGASPHCPANVYLHDGHSCQDVDGYCYNGICQTHEQQCVTLWGPGTWPPQARHQERHWQTWAVGLGACALFWLAPTPGGRCPHSIRC

SEQ ID NO: 829111 - protein, 144 aa, Homo sapiens
MVCGCSWLPCPAQAEQELRVAQTEFDRQAEVTRLLLEGISSTHVNHLLLPPQRERLETNIPLQQGGRILCRGTHVYLGDDMPDPGLVLAGTKCADGKICLNRQCQNISVFGVHECAMQCHGRGCVQQQEELHCEGGWTSLTLDF

SEQ ID NO: 829112 - protein, 906 aa, Homo sapiens [sequence omitted]

SEQ ID NO: 829113 - protein, 906 aa, Homo sapiens [sequence omitted]

SEQ ID NO: 829114 - protein, 906 aa, Homo sapiens [sequence omitted]

SEQ ID NO: 829115 - protein, 735 aa, Homo sapiens [sequence omitted]

SEQ ID NO: 829116 - protein, 552 aa, Homo sapiens
MNHDTLDRGCSCQMAVEKGGCIMNASTGYPFPMVFSSCSRKDLETSLEKGMGVCLFNLPEVRESFGGQKCGNRFVEEGEECDCGEPEECMNRCCNATTCTLKPDAVCAHGLCCEDCQLKPAGTACRDSSNSCDLPEFCTGASPHCPANVYLHDGHSCQDVDGYCYNGICQTHEQQCVTLWGPGAKPAPGICFERVNSAGDPYGNCGKVSKSSFAKCEMRDAKCGKIQCQGGASRPVIGTNAVSIETNIPLQQGGRILCRGTHVYLGDDMPDPGLVLAGTKCADGKICLNRQCQNISVFGVHECAMQCHGRGVCNNRKNCHCEAHWAPPFCDKFGFGGSTDSGPIRQADNQGLTIGILVTILCLLAAGFVVYLKRKTLIRLLFTNKKTTIEKLRCVRPSRPPRGFQPCQAHLGHLGKGLMRKPPDSYPPKDNPRRLLQCQNVDISRPLNGLNVPQPQSTQRVLPPLHRAPRAPSVPARPLPAKPALRQAQGTCKPNPPQKPLPADPLARTTRLTHALARTPGQWETGLRLAPLRPAPQYPHQVPRSTHTAYIK

SEQ ID NO: 829117 - protein, 735 aa, Homo sapiens [sequence omitted]

SEQ ID NO: 829118 - protein, 728 aa, Homo sapiens
LSPYQNSTVRECVSTILSDMVLKHKRETLKATKYVELVIVADNREFQRQGKDLEKVKQRLIEIANHVDKFYRPLNIRIVLVGVEVWNDMDKCSVSQDPFTSLHEFLDWRKMKLLPRKSHDNAQLVSGVYFQGTTIGMAPIMSMCTADQSGGIVMDHSDNPLGAAVTLAHELGHNFGMNHDTLDRGCSCQMAVEKGGCIMNASTGYPFPMVFSSCSRKDLETSLEKGMGVCLFNLPEVRESFGGQKCGNRFVEEGEECDCGEPEECMNRCCNATTCTLKPDAVCAHGLCCEDCQLKPAGTACRDSSNSCDLPEFCTGASPHCPANVYLHDGHSCQDVDGYCYNGICQTHEQQCVTLWGPGAKPAPGICFERVNSAGDPYGNCGKVSKSSFAKCEMRDAKCGKIQCQGGASRPVIGTNAVSIETNIPLQQGGRILCRGTHVYLGDDMPDPGLVLAGTKCADGKICLNRQCQNISVFGVHECAMQCHGRGVCNNRKNCHCEAHWAPPFCDKFGFGGSTDSGPIRQADNQGLTIGILVTILCLLAAGFVVYLKRKTLIRLLFTNKKTTIEKLRCVRPSRPPRGFQPCQAHLGHLGKGLMRKPPDSYPPKDNPRRLLQCQNVDISRPLNGLNVPQPQSTQRVLPPLHRAPRAPSVPARPLPAKPALRQAQGTCKPNPPQKPLPADPLARTTRLTHALARTPGQWETGLRLAPLRPAPQYPHQVPRSTHTAYIK

SEQ ID NO: 829119 - protein, 778 aa, Homo sapiens
MAARPLPVSPARALLLALAGALLAPCEARGVSLWNQGRADEVVSASVRSGDLWIPVKSFDSKNHPEVLNIRLQRESKELIINLERNEGLIASSFTETHYLQDGTDVSLARNYTGHCYYHGHVRGYSDSAVSLSTCSGLRGLIVFENESYVLEPMKSATNRYKLFPAKKLKSVRGSCGSHHNTPNLAAKNVFPPPSQTWARRHKRETLKATKYVELVIVADNREFQRQGKDLEKVKQRLIEIANHVDKFYRPLNIRIVLVGVEVWNDMDKCSVSQDPFTSLHEFLDWRKMKLLPRKSHDNAQLVSGVYFQGTTIGMAPIMSMCTADQSGGIVMDHSDNPLGAAVTLAHELGHNFGMNHDTLDRGCSCQMAVEKGGCIMNASTGYPFPMVFSSCSRKDLETSLEKGMGVCLFNLPEVRESFGGQKCGNRFVEEGEECDCGEPEECMNRCCNATTCTLKPDAVCAHGLCCEDCQLKPAGTACRDSSNSCDLPEFCTGASPHCPANVYLHDGHSCQDVDGYCYNGICQTHEQQCVTLWGPGAKPAPGICFERVNSAGDPYGNCGKVSKSSFAKCEMRDAKCGKIQCQGGASRPVIGTNAVSIETNIPLQQGGRILCRGTHVYLGDDMPDPGLVLAGTKCADGKICLNRQCQNISVFGVHECAMQCHGRGVCNNRKNCHCEAHWAPPFCDKFGFGGSTDSGPIRQADNQGLTIGILVTILCLLAAGFVVYLKRKTLIRLLFTNKKTTIEKLRYPGFSLSSVLEMVAQRLGAVAQACNPSTLGG

SEQ ID NO: 829120 - protein, 575 aa, Homo sapiens
MDHSDNPLGAAVTLAHELGHNFGMNHDTLDRGCSCQMAVEKGGCIMNASTGYPFPMVFSSCSRKDLETSLEKGMGVCLFNLPEVRESFGGQKCGNRFVEEGEECDCGEPEECMNRCCNATTCTLKPDAVCAHGLCCEDCQLKPAGTACRDSSNSCDLPEFCTGASPHCPANVYLHDGHSCQDVDGYCYNGICQTHEQQCVTLWGPGAKPAPGICFERVNSAGDPYGNCGKVSKSSFAKCEMRDAKCGKIQCQGGASRPVIGTNAVSIETNIPLQQGGRILCRGTHVYLGDDMPDPGLVLAGTKCADGKICLNRQCQNISVFGVHECAMQCHGRGVCNNRKNCHCEAHWAPPFCDKFGFGGSTDSGPIRQADNQGLTIGILVTILCLLAAGFVVYLKRKTLIRLLFTNKKTTIEKLRCVRPSRPPRGFQPCQAHLGHLGKGLMRKPPDSYPPKDNPRRLLQCQNVDISRPLNGLNVPQPQSTQRVLPPLHRAPRAPSVPARPLPAKPALRQAQGTCKPNPPQKPLPADPLARTTRLTHALARTPGQWETGLRLAPLRPAPQYPHQVPRSTHTAYIK

SEQ ID NO: 829121 - protein, 463 aa, Homo sapiens
MNRCCNATTCTLKPDAVCAHGLCCEDCQLKPAGTACRDSSNSCDLPEFCTGASPHCPANVYLHDGHSCQDVDGYCYNGICQTHEQQCVTLWGPGAKPAPGICFERVNSAGDPYGNCGKVSKSSFAKCEMRDAKCGKIQCQGGASRPVIGTNAVSIETNIPLQQGGRILCRGTHVYLGDDMPDPGLVLAGTKCADGKICLNRQCQNISVFGVHECAMQCHGRGVCNNRKNCHCEAHWAPPFCDKFGFGGSTDSGPIRQADNQGLTIGILVTILCLLAAGFVVYLKRKTLIRLLFTNKKTTIEKLRCVRPSRPPRGFQPCQAHLGHLGKGLMRKPPDSYPPKDNPRRLLQCQNVDISRPLNGLNVPQPQSTQRVLPPLHRAPRAPSVPARPLPAKPALRQAQGTCKPNPPQKPLPADPLARTTRLTHALARTPGQWETGLRLAPLRPAPQYPHQVPRSTHTAYIK

SEQ ID NO: 829122 - protein, 487 aa, Homo sapiens [sequence omitted]

SEQ ID NO: 829123 - protein, 351 aa, Homo sapiens
MTPGYCGKLKTPCQCEMRDAKCGKIQCQGGASRPVIGTNAVSIETNIPLQQGGRILCRGTHVYLGDDMPDPGLVLAGTKCADGKICLNRQCQNISVFGVHECAMQCHGRGVCNNRKNCHCEAHWAPPFCDKFGFGGSTDSGPIRQADNQGLTIGILVTILCLLAAGFVVYLKRKTLIRLLFTNKKTTIEKLRCVRPSRPPRGFQPCQAHLGHLGKGLMRKPPDSYPPKDNPRRLLQCQNVDISRPLNGLNVPQPQSTQRVLPPLHRAPRAPSVPARPLPAKPALRQAQGTCKPNPPQKPLPADPLARTTRLTHALARTPGQWETGLRLAPLRPAPQYPHQVPRSTHTAYIK

SEQ ID NO: 829124 - protein, 471 aa, Homo sapiens [sequence omitted]

SEQ ID NO: 829125 - protein, 105 aa, Homo sapiens
MSISIVFVLPNFEYGLHSKLFTTTNTLCNAVPGRGVCNNRKNCHCEAHWAPPFCDKFGFGGSTDSGPIRQAEARQEAAESNRERGQGQEPVGSQEHASTASLTLI

SEQ ID NO: 829126 - protein, 242 aa, Homo sapiens
MAARPLPVSPARALLLALAGALLAPCEARGVSLWNQGRADEVVSASVRSGDLWIPVKSFDSKNHPEVLNIRLQRESKELIINLERNEGLIASSFTETHYLQDGTDVSLARNYTGHCYYHGHVRGYSDSAVSLSTCSGLRGLIVFENESYVLEPMKSATNRYKLFPAKKLKSVRGSCGSHHNTPNLAAKNVFPPPSQTWARREGEELSHLVLWLTLTWLLGGRTLYPNPKEQSLKITPPTSTL

SEQ ID NO: 829127 - protein, 122 aa, Homo sapiens
MNSRVWNDFVSSHLLHMPPAAATSLLQSRPPLLTSPSPQSPPPPPPPNIITISLMTIITISLPLPPPSSLQPSPSPHYCNHCHLHSYCHHRGHTSIHIATSITATIPTPIIIPTTTITSANA

SEQ ID NO: 829128 - protein, 122 aa, Homo sapiens; identical to SEQ ID NO: 829127

SEQ ID NO: 829129 - protein, 130 aa, Homo sapiens
  misc_feature (120)..(120): Xaa can be any naturally occurring amino acid
MAARPLPVSPARALLLALAGALLAPCEARGVSLWNQGRADEVVSASVRSGDLWIPVKSFDSKNHPEVLNIRLQRESKELIINLERNEGLIASSFTETHYLQDGTDVSLARNYTVLYYMNXGNLLHHYTVC

SEQ ID NO: 829130 - protein, 134 aa, Homo sapiens [sequence omitted]

SEQ ID NO: 829131 - protein, 70 aa, Homo sapiens
SVYLVSETRGRQPRFQRQGKDLEKVKQRLIEIANHVDKFYRPLNIRIVLVGLGMSVKFSLSSKGDSEMNQ

SEQ ID NO: 829132 - protein, 778 aa, Homo sapiens; identical to SEQ ID NO: 829119

SEQ ID NO: 829133 - protein, 735 aa, Homo sapiens [sequence omitted]

SEQ ID NO: 829134 - protein, 735 aa, Homo sapiens [sequence omitted]

SEQ ID NO: 829135 - protein, 724 aa, Homo sapiens
APLLSTPLFSYLWKKRRKYHKRETLKATKYVELVIVADNREFQRQGKDLEKVKQRLIEIANHVDKFYRPLNIRIVLVGVEVWNDMDKCSVSQDPFTSLHEFLDWRKMKLLPRKSHDNAQLVSGVYFQGTTIGMAPIMSMCTADQSGGIVMDHSDNPLGAAVTLAHELGHNFGMNHDTLDRGCSCQMAVEKGGCIMNASTGYPFPMVFSSCSRKDLETSLEKGMGVCLFNLPEVRESFGGQKCGNRFVEEGEECDCGEPEECMNRCCNATTCTLKPDAVCAHGLCCEDCQLKPAGTACRDSSNSCDLPEFCTGASPHCPANVYLHDGHSCQDVDGYCYNGICQTHEQQCVTLWGPGAKPAPGICFERVNSAGDPYGNCGKVSKSSFAKCEMRDAKCGKIQCQGGASRPVIGTNAVSIETNIPLQQGGRILCRGTHVYLGDDMPDPGLVLAGTKCADGKICLNRQCQNISVFGVHECAMQCHGRGVCNNRKNCHCEAHWAPPFCDKFGFGGSTDSGPIRQADNQGLTIGILVTILCLLAAGFVVYLKRKTLIRLLFTNKKTTIEKLRCVRPSRPPRGFQPCQAHLGHLGKGLMRKPPDSYPPKDNPRRLLQCQNVDISRPLNGLNVPQPQSTQRVLPPLHRAPRAPSVPARPLPAKPALRQAQGTCKPNPPQKPLPADPLARTTRLTHALARTPGQWETGLRLAPLRPAPQYPHQVPRSTHTAYIK

SEQ ID NO: 829136 - protein, 640 aa, Homo sapiens
MDKCSVSQDPFTSLHEFLDWRKMKLLPRKSHDNAQLVSGVYFQGTTIGMAPIMSMCTADQSGGIVMDHSDNPLGAAVTLAHELGHNFGMNHDTLDRGCSCQMAVEKGGCIMNASTGYPFPMVFSSCSRKDLETSLEKGMGVCLFNLPEVRESFGGQKCGNRFVEEGEECDCGEPEECMNRCCNATTCTLKPDAVCAHGLCCEDCQLKPAGTACRDSSNSCDLPEFCTGASPHCPANVYLHDGHSCQDVDGYCYNGICQTHEQQCVTLWGPGAKPAPGICFERVNSAGDPYGNCGKVSKSSFAKCEMRDAKCGKIQCQGGASRPVIGTNAVSIETNIPLQQGGRILCRGTHVYLGDDMPDPGLVLAGTKCADGKICLNRQCQNISVFGVHECAMQCHGRGVCNNRKNCHCEAHWAPPFCDKFGFGGSTDSGPIRQADNQGLTIGILVTILCLLAAGFVVYLKRKTLIRLLFTNKKTTIEKLRCVRPSRPPRGFQPCQAHLGHLGKGLMRKPPDSYPPKDNPRRLLQCQNVDISRPLNGLNVPQPQSTQRVLPPLHRAPRAPSVPARPLPAKPALRQAQGTCKPNPPQKPLPADPLARTTRLTHALARTPGQWETGLRLAPLRPAPQYPHQVPRSTHTAYIK

SEQ ID NO: 829137 - protein, 519 aa, Homo sapiens
MTKPCSRKDLETSLEKGMGVCLFNLPEVRESFGGQKCGNRFVEEGEECDCGEPEECMNRCCNATTCTLKPDAVCAHGLCCEDCQLKPAGTACRDSSNSCDLPEFCTGASPHCPANVYLHDGHSCQDVDGYCYNGICQTHEQQCVTLWGPGAKPAPGICFERVNSAGDPYGNCGKVSKSSFAKCEMRDAKCGKIQCQGGASRPVIGTNAVSIETNIPLQQGGRILCRGTHVYLGDDMPDPGLVLAGTKCADGKICLNRQCQNISVFGVHECAMQCHGRGVCNNRKNCHCEAHWAPPFCDKFGFGGSTDSGPIRQADNQGLTIGILVTILCLLAAGFVVYLKRKTLIRLLFTNKKTTIEKLRCVRPSRPPRGFQPCQAHLGHLGKGLMRKPPDSYPPKDNPRRLLQCQNVDISRPLNGLNVPQPQSTQRVLPPLHRAPRAPSVPARPLPAKPALRQAQGTCKPNPPQKPLPADPLARTTRLTHALARTPGQWETGLRLAPLRPAPQYPHQVPRSTHTAYIK

SEQ ID NO: 829138 - protein, 487 aa, Homo sapiens [sequence omitted]

SEQ ID NO: 829139 - protein, 478 aa, Homo sapiens
MATSLNCNGPISRLPGGPGVLAVDLPIPAGHRATEAGPLGEEELKPAGTACRDSSNSCDLPEFCTGASPHCPANVYLHDGHSCQDVDGYCYNGICQTHEQQCVTLWGPGAKPAPGICFERVNSAGDPYGNCGKVSKSSFAKCEMRDAKCGKIQCQGGASRPVIGTNAVSIETNIPLQQGGRILCRGTHVYLGDDMPDPGLVLAGTKCADGKICLNRQCQNISVFGVHECAMQCHGRGVCNNRKNCHCEAHWAPPFCDKFGFGGSTDSGPIRQADNQGLTIGILVTILCLLAAGFVVYLKRKTLIRLLFTNKKTTIEKLRCVRPSRPPRGFQPCQAHLGHLGKGLMRKPPDSYPPKDNPRRLLQCQNVDISRPLNGLNVPQPQSTQRVLPPLHRAPRAPSVPARPLPAKPALRQAQGTCKPNPPQKPLPADPLARTTRLTHALARTPGQWETGLRLAPLRPAPQYPHQVPRSTHTAYIK

SEQ ID NO: 829140 - protein, 433 aa, Homo sapiens
MAARPLPVSPARALLLALAGALLAPCEARGVSLWNQGRADEVVSASVRSGDLWIPVKSFDSKNHPEVLNIRLQRESKELIINLERNEGLIASSFTETHYLQDGTDVSLARNYTGHCYYHGHVRGYSDSAVSLSTCSGLRGLIVFENESYVLEPMKSATNRYKLFPAKKLKSVRGSCGSHHNTPNLAAKNVFPPPSQTWARRHKRETLKATKYVELVIVADNREFQRQGKDLEKVKQRLIEIANHVDKFYRPLNIRIVLVGVEVWNDMDKCSVSQDPFTSLHEFLDWRKMKLLPRKSHDNAQLVSGVYFQGTTIGMAPIMSMCTADQSGGIVMDHSDNPLGAAVTLAHELGHNFGMNHDTLDRGCSCQMAVEKGGCIMNASTGYPFPMVFSSCSRKDLETSLEKGMGVCLFNLPEVRESFGGQKCAWVRTQAHF

SEQ ID NO: 829141 - protein, 340 aa, Homo sapiens
MAARPLPVSPARALLLALAGALLAPCEARGVSLWNQGRADEVVSASVRSGDLWIPVKSFDSKNHPEVLNIRLQRESKELIINLERNEGLIASSFTETHYLQDGTDVSLARNYTGHCYYHGHVRGYSDSAVSLSTCSGLRGLIVFENESYVLEPMKSATNRYKLFPAKKLKSVRGSCGSHHNTPNLAAKNVFPPPSQTWARRHKRETLKATKYVELVIVADNREFQRQGKDLEKVKQRLIEIANHVDKFYRPLNIRIVLVGVEVWNDMDKCSVSQDPFTSLHEFLDWRKMKLLPRKSHDNAQLVSGVYFQGTTIGMAPIMSQWSRAAPMGICLNGPCTIPP

SEQ ID NO: 829142 - protein, 127 aa, Homo sapiens
MNSRVWNDFVSSHLLHMPPAAATSLLQSRPPLLTSPSPQSPPPPPPPNIITISLMTIITISLPLPPPSSLQPSPSPHYCNHCHLHSYCHHRGHTSIHIATSITATIPTPIIIPTTTPSVERDPLDLT

SEQ ID NO: 829143 - protein, 191 aa, Homo sapiens
INVRHVGKAFILPRHFKDMKKLTLQRNPMNASNVVKPSVVPVPFGTMKGLTLERNPMSVSNVGKPSDLPQSFKCMLGLTLKRSPTSVSNVGKPSDLPHTFESMGRTHTGEKPYECKECGKAFRSAKNLRIHERTQTHVRMHSVERPYKCKICGKGFYSAKSFQIHEKSYTGEKPYECKQCGKAFISFTSFR

SEQ ID NO: 829144 - protein, 100 aa, Homo sapiens
MKDEEKMEIQEMQLKEAKHIAEEADRKYEEVSGAEQMAQQQEVGGNASAEIGRTPGPTEGSSRLGQLSSCVNICLSRDNHLAEETISHDASKCCGRLSNV

SEQ ID NO: 829145 - protein, 333 aa, Homo sapiens
RTFQQLWPAVPTSGPPPAVLTSAVRPGDLIAPTAAGPGGGERRGKPPHRQRLGGPGRGCAALAGAEPSRASAAARAPLRLRAMAGLNSLEAVKRKIQALQQQADEAEDRAQGLQRELDGERERREKAEGDVAALNRRIQLVEEELDRAQERLATALQKLEEAEKAADESERGMKVIENRAMKDEEKMEIQEMQLKEAKHIAEEADRKYEEVARKLVILEGELERAEERAERAEVSELKCGDLEEELKNVTNHLKSLEAASEKYSEKEDKYEEEIKLLSDKLKEAETRAEFAERTVAKLEKTIDDLEEKLAQAKEENVGLHQTLDQTLNELNCI

SEQ ID NO: 829146 - protein, 291 aa, Homo sapiens
MTCGLLDMADLNWTELHHIPAEWVITGMRHLLFREQLYFYFFLRWSLTLSTRLERCGTISAHCSLRSWVQVILLPQPPEHVELQAEGDVAALNRRIQLVEEELDRAQERLATALQKLEEAEKAADESERGMKVIENRAMKDEEKMEIQEMQLKEAKHIAEEADRKYEEVARKLVILEGELERAEERAERAEVSELKCGDLEEELKNVTNHLKSLEAASEKYSEKEDKYEEEIKLLSDKLKEAETRAEFAERTVAKLEKTIDDLEEKLAQAKEENVGLHQTLDQTLNELNCI

SEQ ID NO: 829147 - protein, 271 aa, Homo sapiens
MFFPDIFREDHTEIWYECKFTYGLDSWVGFDREDQVNRGQDMGEAPTGGWPDDFLTWLHLRPPQAEGDVAALNRRIQLVEEELDRAQERLATALQKLEEAEKAADESERGMKVIENRAMKDEEKMEIQEMQLKEAKHIAEEADRKYEEVARKLVILEGELERAEERAERAEVSELKCGDLEEELKNVTNHLKSLEAASEKYSEKEDKYEEEIKLLSDKLKEAETRAEFAERTVAKLEKTIDDLEEKLAQAKEENVGLHQTLDQTLNELNCI

SEQ ID NO: 829148 - protein, 100 aa, Homo sapiens
APPRLRASAPPRHLNSLEAVKRKIQALQQQADEAEDRAQGLQRELDGERERREKAEGDVAALNRRIQLVEEELDRAQERLATALQKLEEAEKAADESESI

SEQ ID NO: 829149 - protein, 336 aa, Homo sapiens
SAPQPQPLTAAAPTEPAAHPTSPRQRPAMEAIKKKMQMLKLDKENAIDRAEQAEADKKAAEDKCKQVEEELTHLQKKLKGTEDELDKYSEDLKDAQEKLELTEKKASDAEGDVAALNRRIQLVEEELDRAQERLATALQKLEEAEKAADESERGMKVIENRAMKDEEKMEIQEMQLKEAKHIAEEADRKYEEVARKLVILEGELERAEERAERAEVSELKCGDLEEELKNVTNHLKSLEAASEKYSEKEDKYEEEIKLLSDKLKEAETRAEFAERTVAKLEKTIDDLVSYTLQKLKYKAISEELDHALNDMTSPERQPGRCPLSFSHGASYGPVAF

SEQ ID NO: 829150 - protein, 315 aa, Homo sapiens
SAPQPQPLTAAAPTEPAAHPTSPRQRPAMEAIKKKMQMLKLDKENAIDRAEQAEADKKAAEDKCKQVEEELTHLQKKLKGTEDELDKYSEDLKDAQEKLELTEKKASDAEGDVAALNRRIQLVEEELDRAQERLATALQKLEEAEKAADESERGMKVIENRAMKDEEKMEIQEMQLKEAKHIAEEADRKYEEVARKLVILEGELERAEERAERAEVSELKCGDLEEELKNVTNHLKSLEAASEKYSEKEDKYEEEIKLLSDKLKEAETRAEFAERTVAKLEKTIDDLEEKLAQAKEENVGLHQTLDQTLNELNCI

SEQ ID NO: 829151 - protein, 221 aa, Homo sapiens
MILLPQPPEHVELQAEGDVAALNRRIQLVEEELDRAQERLATALQKLEEAEKAADESERGMKVIENRAMKDEEKMEIQEMQLKEAKHIAEEADRKYEEVARKLVILEGELERAEERAERAEVSELKCGDLEEELKNVTNHLKSLEAASEKYSEKEDKYEEEIKLLSDKLKEAETRAEFAERTVAKLEKTIDDLEEKLAQAKEENVGLHQTLDQTLNELNCI

SEQ ID NO: 829152 - protein, 271 aa, Homo sapiens
SAPQPQPLTAAAPTEPAAHPTSPRQRPAMEAIKKKMQMLKLDKENAIDRAEQAEADKKAAEDKCKQVEEELTHLQKKLKGTEDELDKYSEDLKDAQEKLELYGEEGLRRGMKVIENRAMKDEEKMEIQEMQLKEAKHIAEEADRKYEEVARKLVILEGELERAEERAERAEVSELKCGDLEEELKNVTNHLKSLEAASEKYSEKEDKYEEEIKLLSDKLKEAETRAEFAERTVAKLEKTIDDLEEKLAQAKEENVGLHQTLDQTLNELNCI

SEQ ID NO: 829153 - protein, 315 aa, Homo sapiens; identical to SEQ ID NO: 829150

SEQ ID NO: 829154 - protein, 266 aa, Homo sapiens
SAPQPQPLTAAAPTEPAAHPTSPRQRPAMEAIKKKMQMLKLDKENAIDRAEQAEADKKAAEDKCKQVEEELTHLQKKLKGTEDELDKYSEDLKDAQEKLELTEKKASDAEGDVAALNRRIQLVEEELDRAQERLATALQKLEEAEKAADESERGMKVIENRAMKDEEKMEIQEMQLKEAKHIAEEADRKYEEVARKLVILEGELERAEERARCLNCEWQNRTERGWLDSWGGVGRSWLCWELALTGVSAQVDGRQGLMAHLFSWLL

SEQ ID NO: 829155 - protein, 477 aa, Homo sapiens
MTSKFLLVSFILAALSLSTTFSLQPDQQKVLLVSFDGFRWDYLYKVPTPHFHYIMKYGVHVKQVTNVFITKTYPNHYTLVTGLFAENHGIVANDMFDPIRNKSFSLDHMNIYDSKFWEEATPIWITNQRAGHTSGAAMWPGTDVKIHKRFPTHYMPYNESVSFEDRVAKIIEWFTSKEPINLGLLYWEDPDDMGHHLGPDSPLMGPVISDIDKKLGYLIQMLKKAKLWNTLNLIITSDHGMTQCSEERLIELDQYLDKDHYTLIDQSPVAAILPKEGKFDEVYEALTHAHPNLTVYKKEDVPERWHYKYNSRIQPIIAVADEGWHILQNKSDDFLLGNHGYDNALADMHPIFLAHGPAFRKNFSKEAMNSTDLYPLLCHLLNITAMPHNGSFWNVQDLLNSAMPRVVPYTQSTILLPGSVKPAEYDQEGSYPYFIGVSLGSIIVIVFFVIFIKHLIHSQIPALQDMHAEIAQPLLQA

SEQ ID NO: 829156 - protein, 358 aa, Homo sapiens [sequence omitted]

SEQ ID NO: 829157 - protein, 477 aa, Homo sapiens; identical to SEQ ID NO: 829155

SEQ ID NO: 829158 - protein, 357 aa, Homo sapiens
MPILTGGFSASYTSIYAENINTTSLTCSSDRMRVIISKSYLEAFNSNGNNLQLKDPTCRPKLSNVVEFSVPLNGCGTIRKVEDQSITYTNIITFSASSTSEVITRQKQLQIIVKCEMGHNSTVEIIYITEDDVIQSQNALGKYNTSMALFESNSFEKTILESPYYVDLNQTLFVQVSLHTSDPNLVVFLDTCRASPTSDFASPTYDLIKSGCSRDETCKVYPLFGHYGRFQFNAFKFLRSMSSVYLQCKVLICDSSDHQSRCNQGCVSRSKRDISSYKWKTDSIIGPIRLKRDRSASGNSGFQHETHAEETPNQPFNSVHLFSFMVLALNVVTVATITVRHFVNQRADYKYQKLQNY

SEQ ID NO: 829159 - protein, 617 aa, Homo sapiens
AKMELVRRLMPLTLLILSCLAELTMAEAEGNASCTVSLGGANMAETHKAMILQLNPSENCTWTIERPENKSIRIIFSYVQLDPDGSCESENIKVFDGTSSNGPLLGQVCSKNDYVPVFESSSSTLTFQIVTDSARIQRTVFVFYYFFSPNISIPNCGGYLDTLEGSFTSPNYPKPHPELAYCVWHIQVEKDYKIKLNFKEILGPHSLAYEIDKQCKFDFLAIYDGPSTNSGLIGQVCGRVTPTFRNWSSNSLTVGVVLQIMPILTGGFSASYTSIYAENINTTSLTCSSDRMRVIISKSYLEAFNSNGNNLQLKDPTCRPKLSNVVEFSVPLNGCGTIRKVEDQSITYTNIITFSASSTSEVITRQKQLQIIVKCEMGHNSTVEIIYITEDDVIQSQNALGKYNTSMALFESNSFEKTILESPYYVDLNQTLFVQVSLHTSDPNLVVFLDTCRASPTSDFASPTYDLIKSGCSRDETCKVYPLFGHYGRFQFNAFKFLRSMSSVYLQCKVLICDSSDHQSRCNQGCVSRSKRDISSYKWKTDSIIGPIRLKRDRSASGNSGFQHETHAEETPNQPFNSVHLFSFMVLALNVVTVATITVRHFVNQRADYKYQKLQNY

SEQ ID NO: 829160 - protein, 155 aa, Homo sapiens
MHPFQWCNGCFCGLGLVSTNKSCSMPPISFQDLPLNIYMVIFGTGIFVFMLSLIFCCYFISKLRNQAQSERYGYKEVVLKGDAKKLQLYGQTCAVCLEDFKGKDELGVLPCQHAFHRKCLVKWLEVRCVCPMCNKPIASPSEATQNIGILLDELV

SEQ ID NO: 829161 - protein, 380 aa, Homo sapiens
MDDATVLRKKGYIVGINLGKGSYAKVKSAYSERLKFNVAVKIIDRKKTPTDFVERFLPREMDILATVNHGSIIKTYEIFETSDGRIYIIMELGVQGDLLEFIKCQGALHEDVARKMFRQLSSAVKYCHDLDIVHRDLKCENLLLDKDFNIKLSDFGFSKRCLRDSNGRIILSKTFCGSAAYAAPEVLQSIPYQPKVYDIWSLGVILYIMVCGSMPYDDSDIRKMLRIQKEHRVDFPRSKNLTCECKDLIYRMLQPDVSQRLHIDEILSHSWLQPPKPKATSSASFKREGEGKYRAECKLDTKTGLRPDHRPDHKLGAKTQHIPHIGQNEIESLGAHPSAAQQQYFPRLGEGCVGNERPVPMDEVKEMAMVFSQVEGETGQ

SEQ ID NO: 829162 - protein, 358 aa, Homo sapiens
MDDATVLRKKGYIVGINLGKGSYAKVKSAYSERLKFNVAVKIIDRKKTPTDFVERFLPREMDILATVNHGSIIKTYEIFETSDGRIYIIMELGVQGDLLEFIKCQGALHEDVARKMFRQLSSAVKYCHDLDIVHRDLKCENLLLDKDFNIKLSDFGFSKRCLRDSNGRIILSKTFCGSAAYAAPEVLQSIPYQPKVYDIWSLGVILYIMVCGSMPYDDSDIRKMLRIQKEHRVDFPRSKNLTCECKDLIYRMLQPDVSQRLHIDEILSHSWLQPPKPKATSSASFKREGEGKYRAECKLDTKTGLRPDHRPDHKLGAKTQHRLLVVPENENRMEDRLAETSRAKDHHISGAEVGKAST

SEQ ID NO: 829163 - protein, 203 aa, Homo sapiens [sequence omitted]

SEQ ID NO: 829164 - protein, 237 aa, Homo sapiens
VASPPGLQSPASHSAPGRVQPPAASSLPPLPASTQPKAPKGKSAGREKKVIHPYSRKAAQITREAHKQEKKEKLKNEKALRLNLVGEKLQWFQNHLDPPKKRYSKKDACELIERYLNRFSSELEQIELHNSIRDRQGRRHCSRETVIKQTMERERQQFEGYGLEIPDILNASNLKTFREWDFDLKKLPNIKMRKICANDAIPKTCKRKTTITVDQDLGELELNDESSDSDEEMTAVA

SEQ ID NO: 829165 - protein, 214 aa, Homo sapiens
MVGPLLLPPNRSPKAPKGKSAGREKKVIHPYSRKAAQITREAHKQEKKEKLKNEKALRLNLVGEKLQWFQNHLDPPKKRYSKKDACELIERYLNRFSSELEQIELHNSIRDRQGRRHCSRETVIKQTMERERQQFEGYGLEIPDILNASNLKTFREWDFDLKKLPNIKMRKICANDAIPKTCKRKTTITVDQDLGELELNDESSDSDEEMTAVA

SEQ ID NO: 829166 - protein, 185 aa, Homo sapiens
MPKAPKGKSAGREKKVIHPYSRKAAQITREAHKQEKKEKLKNEKALRLNLVGEKLQWFQNHLDPPKKRYSKKDACELIERYLNRFSSELEQIELHNSIRDRQGRRHCSRETVIKQTMERERQQFEGYGLEIPDILNASNLKTFREWDFDLKKLPNIKMRKICANDAIPKTCKRSSDSDEEMTAVA

SEQ ID NO: 829167 - protein, 203 aa, Homo sapiens [sequence omitted]

SEQ ID NO: 829168 - protein, 203 aa, Homo sapiens [sequence omitted]

SEQ ID NO: 829169 - protein, 230 aa, Homo sapiens
LVDSRWIPVLTETFVNLSCSVATRTSPLPKAPKGKSAGREKKVIHPYSRKAAQITREAHKQEKKEKLKNEKALRLNLVGEKLQWFQNHLDPPKKRYSKKDACELIERYLNRFSSELEQIELHNSIRDRQGRRHCSRETVIKQTMERERQQFEGYGLEIPDILNASNLKTFREWDFDLKKLPNIKMRKICANDAIPKTCKRKTTITVDQDLGELELNDESSDSDEEMTAVA

SEQ ID NO: 829170 - protein, 128 aa, Homo sapiens
SATRLNRSGVLENSRMKGKRGREELGNTQSAFFSTFGDAKPRVQLLGEARSPPPAAALLDMDPETCPCPSGGSCTCADSCKCEGCKCTSCKKSCCSCCPAECEKCAKDCVCKGGEAAEAEAEKCSCCQ

SEQ ID NO: 829171 - protein, 111 aa, Homo sapiens
GSARTAAASGSCTRMRGGSGGARAGVGERAPAVHTHGRGGRQMQCVRRSPSAQTERAGAVRRGGRPAGLACAPPPEAIKASPPAATSQAARPVAWRSPFTASSCCSPRHGP

SEQ ID NO: 829172 - protein, 96 aa, Homo sapiens
SATRLNRSGVLENSRMKGKRGREELGNTQSAFFSTFGDGGSCTCADSCKCEGCKCTSCKKSCCSCCPAECEKCAKDCVCKGGEAAEAEAEKCSCCQ

SEQ ID NO: 829173 - protein, 91 aa, Homo sapiens
HQAHFCRPQDPHELTSNEFIGLSARRCQVRLRLPSNLLLSLHVILCSEKCAWVRTQAHFWWLLHLRGLLQVRGMQMHLLQEELLLLLPCGV

SEQ ID NO: 829174 - protein, 128 aa, Homo sapiens; identical to SEQ ID NO: 829170

SEQ ID NO: 829175 - protein, 111 aa, Homo sapiens; identical to SEQ ID NO: 829171

SEQ ID NO: 829176 - protein, 111 aa, Homo sapiens; identical to SEQ ID NO: 829171

SEQ ID NO: 829177 - protein, 117 aa, Homo sapiens
SVVPHVHLPPCSCSRCLKRKASWGSTTIRGPRVAQYDGRIGMKREMTRSAPGCAPRRTSGGSCTCADSCKCEGCKCTSCKKSCCSCCPAECEKCAKDCVCKGGEAAEAEAEKCSCCQ

SEQ ID NO: 829178 - protein, 104 aa, Homo sapiens
MSDKSWPAKTILLLLLFLLLVLPHIMGVILTPLCRSAPGCAPRRTSGGSCTCADSCKCEGCKCTSCKKSCCSCCPAECEKCAKDCVCKGGEAAEAEAEKCSCCQ

SEQ ID NO: 829179 - protein, 111 aa, Homo sapiens; identical to SEQ ID NO: 829171

SEQ ID NO: 829180 - protein, 36 aa, Homo sapiens
AHCWIKGAAPTGHFHGLHLASRPCARSAEPLCQPSG

SEQ ID NO: 829181 - protein, 472 aa, Homo sapiens
MELQDPKMNGALPSDAVGYRQEREGFLPSRGPAPGSKPVQFMDFEGKTSFGMSVFNLSNAIMGSGILGLAYAMAHTGVIFFLALLLCIALLSSYSIHLLLTCAGIAGIRAYEQLGQRAFGPAGKVVVATVICLHNVGAMSSYLFIIKSELPLVIGTFLYMDPEGDWFLKGNLLIIIVSVLIILPLALMKHLGYLGYTSGLSLTCMLFFLVSVIYKKFQLGCAIGHNETAMESEALVGLPSQGLNSSCEAQMFTVDSQMSYTVPIMAFAFVCHPEVLPIYTELCRPSKRRMQAVANVSIGAMFCMYGLTATFGYLTFYSSVKAEMLHMYSQKDPLILCVRLAVLLAVTLTVPVVLFPIRRALQQLLFPGKAFSWPRHVAIALILLVLVNVLVICVPTIRDIFGVIGSTSAPSLIFILPSIFYLRIVPSEVEPFLSWPKIQALCFGVLGVLFMAVSLGFMFANWATGQSRMSGH

SEQ ID NO: 829182 - protein, 199 aa, Homo sapiens
LGLGLGGGGRPGAGASELFPSVTTDLSVSKQKVCLTCVDFVTVHVCMGFWGIGPGALSTSCIPYPLSHGPGSVKAEMLHMYSQKDPLILCVRLAVLLAVTLTVPVVLFPIRRALQQLLFPGKAFSWPRHVAIALILLVLVNVLVICVPTIRDIFGVIGSTSAPSLIFILPSIFYLRIVPSEVEPFLSWPKIQVSIPGQS

SEQ ID NO: 829183 - protein, 430 aa, Homo sapiens
MELQDPKMNGALPSDAVGYRQEREGFLPSRGPAPGSKPVQFMDFEGKTSFGMSVFNLSNAIMGSGILGLAYAMAHTGVIFFLALLLCIALLSSYSIHLLLTCAGIAGIRAYEQLGQRAFGPAGKVVVATVICLHNVGAMSSYLFIIKSELPLVIGTFLYMDPEGDWFLKGNLLIIIVSVLIILPLALMKHLGYLGYTSGLSLTCMLFFLVSVIYKKFQLGCAIGHNETAMESEALVGLPSQGLNSSCEAQMFTVDSQMSYTVPIMAFAFVCHPEVLPIYTELCRPSKRRMQAVANVSIGAMFCMYGLTATFGYLTFYSSVKAEMLHMYSQKDPLILCVRLAVLLAVTLTVPVVLFPIRRALQQLLFPGKAFSWPRHVAIALILLVLVNVLVICVPTIRDIFGVIGSTSAPSLIFILPSISALERDPIDRP

SEQ ID NO: 829184 - protein, 430 aa, Homo sapiens; identical to SEQ ID NO: 829183

SEQ ID NO: 829185 - protein, 449 aa, Homo sapiens
QRLGQGSPSLSPTLSSLNRMELQDPKMNGALPSDAVGYRQEREGFLPSRGPAPGSKPVQFMDFEGKTSFGMSVFNLSNAIMGSGILGLAYAMAHTGVIFFLALLLCIALLSSYSIHLLLTCAGIAGIRAYEQLGQRAFGPAGKVVVATVICLHNVGAMSSYLFIIKSELPLVIGTFLYMDPEGDWFLKGNLLIIIVSVLIILPLALMKHLGYLGYTSGLSLTCMLFFLVSVIYKKFQLGCAIGHNETAMESEALVGLPSQGLNSSCEAQMFTVDSQMSYTVPIMAFAFVCHPEVLPIYTELCRPSKRRMQAVANVSIGAMFCMYGLTATFGYLTFYSSVKAEMLHMYSQKDPLILCVRLAVLLAVTLTVPVVLFPIRRALQQLLFPGKAFSWPRHVAIALILLVLVNVLVICVPTIRDIFGVIGSTSAPSLIFILPSISALERDPIDRP

SEQ ID NO: 829186 - protein, 472 aa, Homo sapiens; identical to SEQ ID NO: 829181

SEQ ID NO: 829187 - protein, 680 aa, Homo sapiens
MELQDPKMNGALPSDAVGYRQEREGFLPSRGPAPGSKPVQFMDFEGKTSFGMSVFNLSNAIMGSGILGLAYAMAHTGVIFFLALLLCIALLSSYSIHLLLTCAGIAGIRAYEQLGQRAFGPAGKVVVATVICLHNVGAMSSYLFIIKSELPLVIGTFLYMDPEGDWFLKGNLLIIIVSVLIILPLALMKHLGYLGYTSGLSLTCMLFFLVSVIYKKFQLGCAIGHNETAMESEALVGLPSQGLNSSCEAQMFTVDSQMSYTVPIMAFAFVCHPEVLPIYTELCRPSKRRMQAVANVSIGAMFCMYGLTATFGYLTFYSSVKAEMLHMYSQKDPLILCVRLAVLLAVTLTVPVVLFPIRRALQQLLFPGKAFSWPRHVAIALILLVLVNVLVICVPTIRDIFGVIGSTSAPSLIFILPSIFYLRIVPSEVEPFLSWPKIQALCFGVLGVLFMAVSLGFMFANWATARAACLDTDQALLAQVPVRMHMEGSGPLPRVPPAQHVEVAGSHERGCQRRGTAEAADWPTSLLPRDAKLGMSVFTSATPFMGSGILGLAYAMAHTGVIFFLALLLCIALLSSYSIHLLLTCAGIAGIRAYEQLGQRAFGPAGKVVVATVICLHNVGAMSSYLFIIKSELPLVIGTFLYMDPEGDWFLKEEEEEEEEEEARSWWSLCPAQSSLPPPG

SEQ ID NO: 829188 - protein, 379 aa, Homo sapiens
MSVFNLSNAIMGSGILGLAYAMAHTGVIFFLALLLCIALLSSYSIHLLLTCAGIAGIRAYEQLGQRAFGPAGKVVVATVICLHNVGAMSSYLFIIKSELPLVIGTFLYMDPEGDWFLKGNLLIIIVSVLIILPLALMKHLGYLGYTSGLSLTCMLFFLVSVIYKKFQLGCAIGHNETAMESEALVGLPSQGLNSSCEAQMFTVDSQMSYTVPIMAFAFVCHPEVLPIYTELCRPSKRRMQAVANVSIGAMFCMYGLTATFGYLTFYSSVKAEMLHMYSQKDPLILCVRLAVLLAVTLTVPVVLFPIRRALQQLLFPGKAFSWPRHVAIALILLVLVNVLVICVPTIRDIFGVIGSTSAPSLIFILPSISALERDPIDRP

SEQ ID NO: 829189 - protein, 454 aa, Homo sapiens
MELQDPKMNGALPSDAVGYRQEREGFLPSRGPAPGSKPVQFMDFEGKTSFGMSVFNLSNAIMGSGILGLAYAMAHTGVIFFLALLLCIALLSSYSIHLLLTCAGIAGIRAYEQLGQRAFGPAGKVVVATVICLHNVGAMSSYLFIIKSELPLVIGTFLYMDPEGDWFLKGNLLIIIVSVLIILPLALMKHLGYLGYTSGLSLTCMLFFLVSVIYKKFQLGCAIGHNETAMESEALVGLPSQGLNSSCEAQMFTVDSQMSYTVPIMAFAFVCHPEVLPIYTELCRPSKRRMQAVANVSIGAMFCMYGLTATFGYLTFYSSVKAEMLHMYSQKDPLILCVRLAVLLAVTLTVPVVLFPIRRALQQLLFPGKAFSWPRHVAIALILLVLVNVLVICVPTIRDIFGVIGSTSAPSLIFILPSISALDFQSGDAANVLIFVNPEPGALTRTLRASISAW

SEQ ID NO: 829190 - protein, 423 aa, Homo sapiens
MELQDPKMNGALPSDAVGYRQEREGFLPSRGPAPGSKPVQFMDFEGKTSFGMSVFNLSNAIMGSGILGLAYAMAHTGVIFFLALLLCIALLSSYSIHLLLTCAGIAGIRAYEQLGQRAFGPAGKVVVATVICLHNVGAMSSYLFIIKSELPLVIGTFLYMDPEGDWFLKGNLLIIIVSVLIILPLALMKHLGYLGYTSGLSLTCMLFFLVSVIYKKFQLGCAIGHNETAMESEALVGLPSQGLNSSCEAQMFTVDSQMSYTVPIMAFAFVCHPEVLPIYTELCRPSKRRMQAVANVSIGAMFCMYGLTATFGYLTFYSSVKAEMLHMYSQKDPLILCVRLAVLLAVTLTVPVVLFPIRRALQQLLFPGKAFSWPRHVAIALILLVLVNVLVICVPTIRDIFGVIGSTCSRQQYDITTQMKRER

SEQ ID NO: 829191 - protein, 225 aa, Homo sapiens
LGLGLGGGGRPGAGASELFPSVTTDLSVSKQKVCLTCVDFVTVHVCMGFWGIGPGALSTSCIPYPLSHGPGSVKAEMLHMYSQKDPLILCVRLAVLLAVTLTVPVVLFPIRRALQQLLFPGKAFSWPRHVAIALILLVLVNVLVICVPTIRDIFGVIGSTSAPSLIFILPSIFYLRIVPSEVEPFLSWPKIQALCFGVLGVLFMAVSLGFMFANWATGQSRMSGH

SEQ ID NO: 829192 - protein, 257 aa, Homo sapiens
MELQDPKMNGALPSDAVGYRQEREGFLPSRGPAPGSKPVQFMDFEGKTSFGMSVFNLSNAIMGSGILGLAYAMAHTGVIFFLALLLCIALLSSYSIHLLLTCAGIAGIRAYEQLGQRAFGPAGKVVVATVICLHNVGAMSSYLFIIKSELPLVIGTFLYMDPEGDWFLKGNLLIIIVSVLIILPLALMKHLGYLGYTSGLSLTCMLFFLVSVIYRSSIGLCYRPHGTGWKGTLVDPSHDKEWEPISVGRFYGPMVLF

SEQ ID NO: 829193 - protein, 447 aa, Homo sapiens
MRMPLTVAALTLTVPVVTCKIRRALQQLLFPGKAFSWPRHVAIALILLVLVNVLVICVPTIRDIFGVIGSTSAPSLIFILPSIFYLRIVPSEVEPFLSWPKIQALCFGVLGVLFMAVSLGFMFANWATGQSRIVWTLIRPCWPRSLCACTWRGQGRSLGSLLPNMWRWLVPMNVVVRGGGQQRLQTGPLPSSPGMPSLDHGPNPNPNPMGGGGGGRRGGGGGGGGGGGGGQVLVEPLPSPVLSASSWLKLFVRITLGLKRKNKDVELPKKTLKTTQKKTRGHTNFGGRTKTVTNSAHSQHKVPEPPPCHHGGKTARDPPKEHHIIENTGKPGSSNRNEAHDSNTADRRGKDDDTTQTSSHDTENITLHNKTPKTGKEKTKETTDPNERCKNATQTTYSREQEKISNEQNEHNTRNKYCTNKKDDEGYREDNHTEPSSSGLRWTAADS

SEQ ID NO: 829194 - protein, 202 aa, Homo sapiens
MHGWKDEWRMDGWMDRCINGWIKEWDDGWMDGWMDKWMDGCTHGWMDAWMKDGWVNEWEDGLMEARSVKAEMLHMYSQKDPLILCVRLAVLLAVTLTVPVVLFPIRRALQQLLFPGKAFSWPRHVAIALILLVLVNVLVICVPTIRDIFGVIGSTSAPSLIFILPSISALDFQSGDAANVLIFVNPEPGALTRTLRASISAW

SEQ ID NO: 829195 - protein, 263 aa, Homo sapiens
MARETAMELQDPKMNGALPSDAVGYRQEREGFLPSRGPAPGSKPVQFMDFEGKTSFGMSVFNLSNAIMGSGILGLAYAMAHTGVIFFLALLLCIALLSSYSIHLLLTCAGIAGIRAYEQLGQRAFGPAGKVVVATVICLHNVGAMSSYLFIIKSELPLVIGTFLYMDPEGDWFLKGNLLIIIVSVLIILPLALMKHLGYLGYTSGLSLTCMLFFLVSVIYRSSIGLCYRPHGTGWKGTLVDPSHDKEWEPISVGRFYGPMVLF

SEQ ID NO: 829196 - protein, 480 aa, Homo sapiens
WPRGEGGGKERGWRGGPGNERHRWQERQRESGVWEERLSLLHVVGSSALGMELQDPKMNGALPSDAVGYRQEREGFLPSRGPAPGSKPVQFMDFEGKTSFGMSVFNLSNAIMGSGILGLAYAMAHTGVIFFLALLLCIALLSSYSIHLLLTCAGIAGIRAYEQLGQRAFGPAGKVVVATVICLHNVGAMSSYLFIIKSELPLVIGTFLYMDPEGDWFLKGNLLIIIVSVLIILPLALMKHLGYLGYTSGLSLTCMLFFLVSVIYKKFQLGCAIGHNETAMESEALVGLPSQGLNSSCEAQMFTVDSQMSYTVPIMAFAFVCHPEVLPIYTELCRPSKRRMQAVANVSIGAMFCMYGLTATFGYLTFYSSVKAEMLHMYSQKDPLILCVRLAVLLAVTLTVPVVLFPIRRALQQLLFPGKAFSWPRHVAIALILLVLVNVLVICVPTIRDIFGVIGSTSAPSLIFILPSISALERDPIDRP

SEQ ID NO: 829197 - protein, 436 aa, Homo sapiens
MARETAMELQDPKMNGALPSDAVGYRQEREGFLPSRGPAPGSKPVQFMDFEGKTSFGMSVFNLSNAIMGSGILGLAYAMAHTGVIFFLALLLCIALLSSYSIHLLLTCAGIAGIRAYEQLGQRAFGPAGKVVVATVICLHNVGAMSSYLFIIKSELPLVIGTFLYMDPEGDWFLKGNLLIIIVSVLIILPLALMKHLGYLGYTSGLSLTCMLFFLVSVIYKKFQLGCAIGHNETAMESEALVGLPSQGLNSSCEAQMFTVDSQMSYTVPIMAFAFVCHPEVLPIYTELCRPSKRRMQAVANVSIGAMFCMYGLTATFGYLTFYSSVKAEMLHMYSQKDPLILCVRLAVLLAVTLTVPVVLFPIRRALQQLLFPGKAFSWPRHVAIALILLVLVNVLVICVPTIRDIFGVIGSTSAPSLIFILPSISALERDPIDRP

SEQ ID NO: 829198 - protein, 474 aa, Homo sapiens
SEIPPSQGVSAGGSWGFFRDAVPTRQGLQARVGIAETPPPQETRMELQDPKMNGALPSDAVGYRQEREGFLPSRGPAPGSKPVQFMDFEGKTSFGMSVFNLSNAIMGSGILGLAYAMAHTGVIFFLALLLCIALLSSYSIHLLLTCAGIAGIRAYEQLGQRAFGPAGKVVVATVICLHNVGAMSSYLFIIKSELPLVIGTFLYMDPEGDWFLKGNLLIIIVSVLIILPLALMKHLGYLGYTSGLSLTCMLFFLVSVIYKKFQLGCAIGHNETAMESEALVGLPSQGLNSSCEAQMFTVDSQMSYTVPIMAFAFVCHPEVLPIYTELCRPSKRRMQAVANVSIGAMFCMYGLTATFGYLTFYSSVKAEMLHMYSQKDPLILCVRLAVLLAVTLTVPVVLFPIRRALQQLLFPGKAFSWPRHVAIALILLVLVNVLVICVPTIRDIFGVIGSTSAPSLIFILPSISALERDPIDRP

SEQ ID NO: 829199 - protein, 243 aa, Homo sapiens
MKHLGYLGYTSGLSLTCMLFFLVSVIYKKFQLGCAIGHNETAMESEALVGLPSQGLNSSCEAQMFTVDSQMSYTVPIMAFAFVCHPEVLPIYTELCRPSKRRMQAVANVSIGAMFCMYGLTATFGYLTFYSSVKAEMLHMYSQKDPLILCVRLAVLLAVTLTVPVVLFPIRRALQQLLFPGKAFSWPRHVAIALILLVLVNVLVICVPTIRDIFGVIGSTSAPSLIFILPSISALERDPIDRP

SEQ ID NO: 829200 - protein, 243 aa, Homo sapiens; identical to SEQ ID NO: 829199

SEQ ID NO: 829201 - protein, 291 aa, Homo sapiens
RLVPPEVWISSTHGAPSGLSLTCMLFFLVSVIYKKFQLGCAIGHNETAMESEALVGLPSQGLNSSCEAQMFTVDSQMSYTVPIMAFAFVCHPEVLPIYTELCRPSKRRMQAVANVSIGAMFCMYGLTATFGYLTFYSSVKAEMLHMYSQKDPLILCVRLAVLLAVTLTVPVVLFPIRRALQQLLFPGKAFSWPRHVAIALILLVLVNVLVICVPTIRDIFGVIGSTSAPSLIFILPSIFYLRIVPSEVEPFLSWPKIQALCFGVLGVLFMAVSLGFMFANWATGQSRMSGH

SEQ ID NO: 829202 - protein, 217 aa, Homo sapiens
MELQDPKMNGALPSDAVGYRQEREGFLPSRGPAPGSKPVQFMDFEGKTSFGMSVFNLSNAIMGSGILGLAYAMAHTGVIFFLALLLCIALLSSYSIHLLLTCAGIAGIRAYEQLGQRAFGPAGKVVVATVICLHNVGAMSSYLFIIKSELPLVIGTFLYMDPEGDWFLKGNLLIIIVSVLIILPLALMKHLGYLGYTSGLSLTCMLFFLVSVSHREA

SEQ ID NO: 829203 - protein, 118 aa, Homo sapiens
MSLLNKPKSEMTPEELQKREEEEFNTGPLSVLTQSVKNNTQVLINCRNNKKLLGRVKAFDRHCNMVLENVKEMWTEVPKSGKGKKKSKPVNKDRYISKMFLRGDSVIVVLRNPLIAGK

SEQ ID NO: 829204 - protein, 118 aa, Homo sapiens; identical to SEQ ID NO: 829203

SEQ ID NO: 829205 - protein, 118 aa, Homo sapiens; identical to SEQ ID NO: 829203

SEQ ID NO: 829206 - protein, 282 aa, Homo sapiens
LPRVSPLLACILCPALGPPYPGEALLLGGPRGVSPSVFRGATPIERSGDQRAYSVIRGNRAWWATISSRLSPLALCPPPEILSVIRVSLVSHSMAKCRPLGVAGVRPRSRPRLICRPMIGGPQGNFSAFHSGGDASGPPTRCWPGSPSSLLGEPPSFSSGVVTLMSLLNKPKSEMTPEELQKREEEEFNTGPLSVLTQSVKNNTQVLINCRNNKKLLGRVKAFDRHCNMVLENVKEMWTEVPKSGKGKKKSKPVNKDRYISKMFLRGDSVIVVLRNPLIAGK

SEQ ID NO: 829207 - protein, 118 aa, Homo sapiens; identical to SEQ ID NO: 829203

SEQ ID NO: 829208 - protein, 118 aa, Homo sapiens; identical to SEQ ID NO: 829203

SEQ ID NO: 829209 - protein, 118 aa, Homo sapiens; identical to SEQ ID NO: 829203

SEQ ID NO: 829210 - protein, 118 aa, Homo sapiens; identical to SEQ ID NO: 829203

SEQ ID NO: 829211 - protein, 118 aa, Homo sapiens; identical to SEQ ID NO: 829203

SEQ ID NO: 829212 - protein, 118 aa, Homo sapiens; identical to SEQ ID NO: 829203

SEQ ID NO: 829213 - protein, 139 aa, Homo sapiens
  misc_feature (5)..(5): Xaa can be any naturally occurring amino acid
IILVXSVLFLRRPPLPSRSPFLSDTTPTPFEMTPEELQKREEEEFNTGPLSVLTQSVKNNTQVLINCRNNKKLLGRVKAFDRHCNMVLENVKEMWTEVPKSGKGKKKSKPVNKDRYISKMFLRGDSVIVVLRNPLIAGK

SEQ ID NO: 829214 - protein, 118 aa, Homo sapiens; identical to SEQ ID NO: 829203

SEQ ID NO: 829215 - protein, 118 aa, Homo sapiens; identical to SEQ ID NO: 829203

SEQ ID NO: 829216 - protein, 118 aa, Homo sapiens; identical to SEQ ID NO: 829203

SEQ ID NO: 829217 - protein, 118 aa, Homo sapiens; identical to SEQ ID NO: 829203

SEQ ID NO: 829218 - protein, 118 aa, Homo sapiens; identical to SEQ ID NO: 829203

SEQ ID NO: 829219 - protein, 140 aa, Homo sapiens
  misc_feature (105)..(105): Xaa can be any naturally occurring amino acid
MSLLNKPKSEMTPEELQKREEEEFNTGPLSVLTQSVKNNTQVLINCRNNKKLLGRVKAFDRHCNMVLENVKEMWTEVPKSGKGKKKSKPVNKDRYISKMFLRGGXKPLFFPQKGGFSPPGAACLLTELTPLSYEDRCHWC

SEQ ID NO: 829220 - protein, 108 aa, Homo sapiens
MTPEELQKREEEEFNTGPLSVLTQSVKNNTQVLINCRNNKKLLGRVKAFDRHCNMVLENVKEMWTEVPKSGKGKKKSKPVNKDRYISKMFLRGDSVIVVLRNPLIAGK

SEQ ID NO: 829221 - protein, 95 aa, Homo sapiens
MSLLNKPKSEMTPEELQKREEEEFNTGPLSVLTQSVKNNTQEAYNNLILDGRLRSEIYTGEKFKPIDVQTDYFLYTLLLFQRKAGIPNEESILGG

SEQ ID NO: 829222 - protein, 140 aa, Homo sapiens
  misc_feature (5)..(5): Xaa can be any naturally occurring amino acid
PSFRXFNSNAEETGVNRERSYIMSLLNKPKSEMTPEELQKREEEEFNTGPLSVLTQSVKNNTQVLINCRNNKKLLGRVKAFDRHCNMVLENVKEMWTEVPKSGKGKKKSKPVNKDRYISKMFLRGDSVIVVLRNPLIAGK

SEQ ID NO: 829223 - protein, 118 aa, Homo sapiens; identical to SEQ ID NO: 829203

SEQ ID NO: 829224 - protein, 89 aa, Homo sapiens
GVNGERVTIMSLLNKPKSEMTPEELQKREEEEFNTGPLSVLTQSVKNNTQVLINCRNNKKLLGRVKAFDRHCLVLEVSIAPPGSNGFNQ

SEQ ID NO: 829225 - protein, 108 aa, Homo sapiens; identical to SEQ ID NO: 829220

SEQ ID NO: 829226 - protein, 108 aa, Homo sapiens; identical to SEQ ID NO: 829220

SEQ ID NO: 829227 - protein, 118 aa, Homo sapiens; identical to SEQ ID NO: 829203

SEQ ID NO: 829228 - protein, 118 aa, Homo sapiens; identical to SEQ ID NO: 829203

SEQ ID NO: 829229 - protein, 118 aa, Homo sapiens; identical to SEQ ID NO: 829203

SEQ ID NO: 829230 - protein, 118 aa, Homo sapiens; identical to SEQ ID NO: 829203

SEQ ID NO: 829231 - protein, 118 aa, Homo sapiens; identical to SEQ ID NO: 829203

SEQ ID NO: 829232 - protein, 118 aa, Homo sapiens; identical to SEQ ID NO: 829203

SEQ ID NO: 829233 - protein, 105 aa, Homo sapiens
MSLLNKPKSEMTPEELQKREEEEFNTGPLSVLTQSVKNNTQVLINCRNNKKLLGRVKAFDRHCNMVLENVKEMWTEVNKDRYISKMFLRGDSVIVVLRNPLIAGK

SEQ ID NO: 829234 - protein, 108 aa, Homo sapiens
AELLWQLGHPGLAPAPFPKPCCWRGRAAGSRGHCQRHAPHAQCLPSLFPTRHCNMVLENVKEMWTEVPKSGKGKKKSKPVNKDRYISKMFLRGDSVIVVLRNPLIAGK

SEQ ID NO: 829235 - protein, 306 aa, Homo sapiens
PSVLVPAGIYTSNKDPISHSGGMLRAVCSTPLSSSLLGPPGTSALPRLSRSPFTSTLPSSSASISTTQVFSLAGSTFSLPSTHIFGTPMGAVNPLLSQAESSHTEPDLEDCSFRCRGTSPQESLSSMSPISSLPALFDQTASAPCGGGQLDPAAPGTTNMEQLLEKQGDGEAGVNIVEMLKALHALQKENQRLQEQILSLTAKKERLQILNVQLSVPFPALPAALPAANGPVPGPYGLPPQAGSSDSLSTSKSPPGKSSLGLDNSLSTSSEVGATRSGAGRRGRLKALLVPSLPRSYWRLGNEVTD

SEQ ID NO: 829236 - protein, 96 aa, Homo sapiens
HGSMKEMVGGCCVCSDERGWAENPLVYCDGHACSVAVHQACYGIVQVPTGPWFCRKCESQERAARVRCELCPHKDGALKRTDNGGEAGSSAEVSRA

SEQ ID NO: 829237 - protein, 1096 aa, Homo sapiens
HGSMKEMVGGCCVCSDERGWAENPLVYCDGHACSVAVHQACYGIVQVPTGPWFCRKCESQERAARVRCELCPHKDGALKRTDNGGWAHVVCALYIPEVQFANVLTMEPIVLQYVPHDRFNKTCYICEEQGRESKAASGACMTCNRHGCRQAFHVTCAQMAGLLCEEEVLEVDNVKYCGYCKYHFSKMKTSRHSSGGGGGGAGGGGGSMGGGGSGFISGRRSRSASPSTQQEKHPTHHERGQKKSRKDKERLKQKHKKRPESPPSILTPPVVPTADKVSSSASSSSHHEASTQETSESSRESKGKKSSSHSLSHKGKKLSSGKGVSSFTSASSSSSSSSSSSGGPFQPAVSSLQSSPDFSAFPKLEQPEEDKYSKPTAPAPSAPPSPSAPEPPKADLFEQKVVFSGFGPIMRFSTTTSSSGRARAPSPGDYKSPHVTGSGASAGTHKRMPALSATPVPADETPETGLKEKKHKASKRSRHGPGRPKGSRNKEGTGGPAAPSLPSAQLAGFTATAASPFSGGSLVSSGLGGLSSRTFGPSGSLPSLSLESPLLGAGIYTSNKDPISHSGGMLRAVCSTPLSSSLLGPPGTSALPRLSRSPFTSTLPSSSASISTTQVFSLAGSTFSLPSTHIFGTPMGAVNPLLSQAESSHTEPDLEDCSFRCRGTSPQESLSSMSPISSLPALFDQTASAPCGGGQLDPAAPGTTNMEQLLEKQGDGEAGVNIVEMLKALHALQKENQRLQEQILSLTAKKERLQILNVQLSVPFPALPAALPAANGPVPGPYGLPPQAGSSDSLSTSKSPPGKSSLGLDNSLSTSSEDPHSGCPSRSSSSLSFHSTPPPLPLLQQSPATLPLALPGAPAPLPPQPQNGLGRAPGAAGLGAMPMAEGLLGGLAGSGGLPLNGLLGGLNGAAAPNPASLSQAGGAPTLQLPGCLNSLTEQQRHLLQQQEQQLQQLQQLLASPQLTPEHQTVVYQMIQQIQQKRELQRLQMAGGSQLPMASLLAGSSTPLLSAGTPGLLPTASAPPLLPAGALVAPSLGNNTSLMAAAAAAAAVAAAGGPPVLTAQTNPFLSLSGAEGSGGGPKGGTADKGASANQEKG

SEQ ID NO: 829238 - protein, 1096 aa, Homo sapiens; identical to SEQ ID NO: 829237

SEQ ID NO: 829239 - protein, 424 aa, Homo sapiens [sequence omitted]

SEQ ID NO: 829240 - protein, 1096 aa, Homo sapiens; identical to SEQ ID NO: 829237

SEQ ID NO: 829241 - protein, 105 aa, Homo sapiens
AAQNLESNGRVIFCPQCLSYPICEGEDSDDNAIVHLKTQPRCRSVGTKSNACPMINVSTWEWEIVCECVCACMCVCVCVCVCVCLPVSLLLDPGQPRAGIGAVVR

SEQ ID NO: 829242 - protein, 1096 aa, Homo sapiens; identical to SEQ ID NO: 829237

SEQ ID NO: 829243 - protein, 1096 aa, Homo sapiens; identical to SEQ ID NO: 829237

SEQ ID NO: 829244 - protein, 1096 aa, Homo sapiens; identical to SEQ ID NO: 829237

SEQ ID NO: 829245 - protein, 852 aa, Homo sapiens
HGSMKEMVGGCCVCSDERGWAENPLVYCDGHACSVAVHQACYGIVQVPTGPWFCRKCESQERAARVRCELCPHKDGALKRTDNGGWAHVVCALYIPEVQFANVLTMEPIVLQYVPHDRFNKTCYICEEQGRESKAASGACMTCNRHGCRQAFHVTCAQMAGLLCEEEVLEVDNVKYCGYCKYHFSKMKTSRHSSGGGGGGAGGGGGSMGGGGSGFISGRRSRSASPSTQQEKHPTHHERGQKKSRKDKERLKQKHKKRPESPPSILTPPVVPTADKVSSSASSSSHHEASTQETSESSRESKGKKSSSHSLSHKGKKLSSGKGVSSFTSASSSSSSSSSSSGGPFQPAVSSLQSSPDFSAFPKLEQPEEDKYSKPTAPAPSAPPSPSAPEPPKADLFEQKVVFSGFGPIMRFSTTTSSSGRARAPSPGDYKSPHVTGSGASAGTHKRMPALSATPVPADETPETGLKEKKHKASKRSRHGPGRPKGSRNKEGTGGPAAPSLPSAQLAGFTATAASPFSGGSLVSSGLGGLSSRTFGPSGSLPSLSLESPLLGAGIYTSNKDPISHSGGMLRAVCSTPLSSSLLGPPGTSALPRLSRSPFTSTLPSSSASISTTQVFSLAGSTFSLPSTHIFGTPMGAVNPLLSQAESSHTEPDLEDCSFRCRGTSPQESLSSMSPISSLPALFDQTASAPCGGGQLDPAAPGTTNMEQLLEKQGDGEAGVNIVEMLKALHALQKENQRLQEQILSLTAKKERLQILNVQLSVPFPALPAALPAANGPVPGPYGLPPQAGSSDSLSTSKSPPGKSSLGLDNSLSTSSEVGATRSGAGRRGRLKALLVPSLPRSYWRLGNEVTD

SEQ ID NO: 829246 - protein, 1035 aa, Homo sapiens
HGSMKEMVGGCCVCSDERGWAENPLVYCDGHACSVAVHQACYGIVQVPTGPWFCRKCESQERAARVRCELCPHKDGALKRTDNGGWAHVVCALYIPEVQFANVLTMEPIVLQYVPHDRFNKTCYICEEQGRESKAASGACMTCNRHGCRQAFHVTCAQMAGLLCEEEVLEVDNVKYCGYCKYHFSKMKTSRHSSGGGGGGAGGGGGSMGGGGSGFISGRRSRSASPSTQQEKHPTHHERGQKKSRKDKERLKQKHKKRPESPPSILTPPVVPTADKVSSSASSSSHHEASTQETSESSRESKGKKSSSHSLSHKGKKLSSGKGVSSFTSASSSSSSSSSSSGGPFQPAVSSLQSSPDFSAFPKLEQPEEDKYSKPTAPAPSAPPSPSAPEPPKADLFEQKVVFSGFGPIMRFSTTTSSSGRARAPSPGDYKSPHVTGSGASAGTHKRMPALSATPVPADETPETGLKEKKHKASKRSRHGPGRPKGSRNKEGTGGPAAPSLPSAQLAGFTATAASPFSGGSLVSSGLGGLSSRTFGPSGSLPSLSLESPLLGAGIYTSNKDPISHSGGMLRAVCSTPLSSSLLGPPGTSALPRLSRSPFTSTLPSSSASISTTQVFSLAGSTFSLPSTHIFGTPMGAVNPLLSQAESSHTEPDLEDCSFRCRGTSPQESLSSMSPISSLPALFDQTASAPCGGGQLDPAAPGTTNMEQLLEKQGDGEAGVNIVEMLKALHALQKENQRLQEQILSLTAKKERLQILNVQLSVPFPALPAALPAANGPVPGPYGLPPQAGSSDSLSTSKSPPGKSSLGLDNSLSTSSEDPHSGCPSRSSSSLSFHSTPPPLPLLQQSPATLPLALPGAPAPLPPQPQNGLGRAPGAAGLGAMPMAEGLLGGLAGSGGLPLNGLLGGLNGAAAPNPASLSQAGGAPTLQLPGCLNSLTEQQRHLLQQQEQQLQQLQQLLASPQLTPEHQTVVYQMIQQIQQKRELQRLQMAGGSQLPMASLLAGSSTPLLSAGTPGLLPTASAPPSFSFFALVSSAQ

SEQ ID NO: 829247 - protein, 652 aa, Homo sapiens
HGSMKEMVGGCCVCSDERGWAENPLVYCDGHACSVAVHQACYGIVQVPTGPWFCRKCESQERAARVRCELCPHKDGALKRTDNGGWAHVVCALYIPEVQFANVLTMEPIVLQYVPHDRFNKTCYICEEQGRESKAASGACMTCNRHGCRQAFHVTCAQMAGLLCEEEVLEVDNVKYCGYCKYHFSKMKTSRHSSGGGGGGAGGGGGSMGGGGSGFISGRRSRSASPSTQQEKHPTHHERGQKKSRKDKERLKQKHKKRPESPPSILTPPVVPTADKVSSSASSSSHHEASTQETSESSRESKGKKSSSHSLSHKGKKLSSGKGVSSFTSASSSSSSSSSSSGGPFQPAVSSLQSSPDFSAFPKLEQPEEDKYSKPTAPAPSAPPSPSAPEPPKADLFEQKVVFSGFGPIMRFSTTTSSSGRARAPSPGDYKSPHVTGSGASAGTHKRMPALSATPVPADETPETGLKEKKHKASKRSRHGPGRPKGSRNKEGTGGPAAPSLPSAQLAGFTATAASPFSGGSLVSSGLGGLSSRTFGPSGSLPSLSLESPLLGAGIYTSNKDPISHSGGMLRAVCSTPLSSSLLGPPGTSALPRLSRSPFTSTLPSSSASISTTQVFSLAGSTFSLPSTHIFGTPMGAVNPLLSQAESSHTGM

SEQ ID NO: 829248 - protein, 120 aa, Homo sapiens
HGSMKEMVGGCCVCSDERGWAENPLVYCDGHACSVAVHQACYGIVQVPTGPWFCRKCESQERAARVRCELCPHKDGALKRTDNGGWAHVVCALYIPEVQFANVLTMEPIVLQYPISDSWL

SEQ ID NO: 829249 - protein, 148 aa, Homo sapiens
HGSMKEMVGGCCVCSDERGWAENPLVYCDGHACSVAVHQACYGIVQVPTGPWFCRKCESQERAARVRCELCPHKDGALKRTDNGGWAHVVCALYIPEVQFANVLTMEPIVLQYVPHDRFNKVSGPPPCPLPVPSHLWVPPTLSSSGVI

SEQ ID NO: 829250 - protein, 1096 aa, Homo sapiens; identical to SEQ ID NO: 829237

SEQ ID NO: 829251 - protein, 687 aa, Homo sapiens
MRFSTTTSSSGRARAPSPGDYKSPHVTGSGASAGTHKRMPALSATPVPADETPETGLKEKKHKASKRSRHGPGRPKGSRNKEGTGGPAAPSLPSAQLAGFTATAASPFSGGSLVSSGLGGLSSRTFGPSGSLPSLSLESPLLGAGIYTSNKDPISHSGGMLRAVCSTPLSSSLLGPPGTSALPRLSRSPFTSTLPSSSASISTTQVFSLAGSTFSLPSTHIFGTPMGAVNPLLSQAESSHTEPDLEDCSFRCRGTSPQESLSSMSPISSLPALFDQTASAPCGGGQLDPAAPGTTNMEQLLEKQGDGEAGVNIVEMLKALHALQKENQRLQEQILSLTAKKERLQILNVQLSVPFPALPAALPAANGPVPGPYGLPPQAGSSDSLSTSKSPPGKSSLGLDNSLSTSSEDPHSGCPSRSSSSLSFHSTPPPLPLLQQSPATLPLALPGAPAPLPPQPQNGLGRAPGAAGLGAMPMAEGLLGGLAGSGGLPLNGLLGGLNGAAAPNPASLSQAGGAPTLQLPGCLNSLTEQQRHLLQQQEQQLQQLQQLLASPQLTPEHQTVVYQMIQQIQQKRELQRLQMAGGSQLPMASLLAGSSTPLLSAGTPGLLPTASAPPLLPAGALVAPSLGNNTSLMAAAAAAAAVAAAGGPPVLTAQTNPFLSLSGAEGSGGGPKGGTADKGASANQEKG

SEQ ID NO: 829252 - protein, 572 aa, Homo sapiens
PPTTGPPRKEVPKTTPSEPKKKQPPPPESGIYTSNKDPISHSGGMLRAVCSTPLSSSLLGPPGTSALPRLSRSPFTSTLPSSSASISTTQVFSLAGSTFSLPSTHIFGTPMGAVNPLLSQAESSHTEPDLEDCSFRCRGTSPQESLSSMSPISSLPALFDQTASAPCGGGQLDPAAPGTTNMEQLLEKQGDGEAGVNIVEMLKALHALQKENQRLQEQILSLTAKKERLQILNVQLSVPFPALPAALPAANGPVPGPYGLPPQAGSSDSLSTSKSPPGKSSLGLDNSLSTSSEDPHSGCPSRSSSSLSFHSTPPPLPLLQQSPATLPLALPGAPAPLPPQPQNGLGRAPGAAGLGAMPMAEGLLGGLAGSGGLPLNGLLGGLNGAAAPNPASLSQAGGAPTLQLPGCLNSLTEQQRHLLQQQEQQLQQLQQLLASPQLTPEHQTVVYQMIQQIQQKRELQRLQMAGGSQLPMASLLAGSSTPLLSAGTPGLLPTASAPPLLPAGALVAPSLGNNTSLMAAAAAAAAVAAAGGPPVLTAQTNPFLSLSGAEGSGGGPKGGTADKGASANQEKG

SEQ ID NO: 829253 - protein, 1096 aa, Homo sapiens; identical to SEQ ID NO: 829237

SEQ ID NO: 829254 - protein, 1096 aa, Homo sapiens; identical to SEQ ID NO: 829237

SEQ ID NO: 829255 - protein, 1036 aa, Homo sapiens
HGSMKEMVGGCCVCSDERGWAENPLVYCDGHACSVAVHQACYGIVQVPTGPWFCRKCESQERAARVRCELCPHKDGALKRTDNGGWAHVVCALYIPEVQFANVLTMEPIVLQYVPHDRFNKTCYICEEQGRESKAASGACMTCNRHGCRQAFHVTCAQMAGLLCEEEVLEVDNVKYCGYCKYHFSKMKTSRHSSGGGGGGAGGGGGSMGGGGSGFISGRRSRSASPSTQQEKHPTHHERGQKKSRKDKERLKQKHKKRPESPPSILTPPVVPTADKVSSSASSSSHHEASTQETSESSRESKGKKSSSHSLSHKGKKLSSGKGVSSFTSASSSSSSSSSSSGGPFQPAVSSLQSSPDFSAFPKLEQPEEDKYSKPTAPAPSAPPSPSAPEPPKADLFEQKVVFSGFGPIMRFSTTTSSSGRARAPSPGDYKSPHVTGSGASAGTHKRMPALSATPVPADETPETGLKEKKHKASKRSRHGPGRPKGSRNKEGTGGPAAPSLPSAQSGGMLRAVCSTPLSSSLLGPPGTSALPRLSRSPFTSTLPSSSASISTTQVFSLAGSTFSLPSTHIFGTPMGAVNPLLSQAESSHTEPDLEDCSFRCRGTSPQESLSSMSPISSLPALFDQTASAPCGGGQLDPAAPGTTNMEQLLEKQGDGEAGVNIVEMLKALHALQKENQRLQEQILSLTAKKERLQILNVQLSVPFPALPAALPAANGPVPGPYGLPPQAGSSDSLSTSKSPPGKSSLGLDNSLSTSSEDPHSGCPSRSSSSLSFHSTPPPLPLLQQSPATLPLALPGAPAPLPPQPQNGLGRAPGAAGLGAMPMAEGLLGGLAGSGGLPLNGLLGGLNGAAAPNPASLSQAGGAPTLQLPGCLNSLTEQQRHLLQQQEQQLQQLQQLLASPQLTPEHQTVVYQMIQQIQQKRELQRLQMAGGSQLPMASLLAGSSTPLLSAGTPGLLPTASAPPLLPAGALVAPSLGNNTSLMAAAAAAAAVAAAGGPPVLTAQTNPFLSLSGAEGSGGGPKGGTADKGASANQEKG

SEQ ID NO: 829256 - protein, 254 aa, Homo sapiens
HGSMKEMVGGCCVCSDERGWAENPLVYCDGHACSVAVHQACYGIVQVPTGPWFCRKCESQERAARVRCELCPHKDGALKRTDNGGWAHVVCALYIPEVQFANVLTMEPIVLQYVPHDRFNKTCYICEEQGRESKAASGACMTCNRHGCRQAFHVTCAQMAGLLCEEEVLEVDNVKYCGYCKYHFSKMKTSRHSSGGGGGGAGGGGGSMGGGGSGFISGRRSRSASPSTQQEKHPTHHERGQKKSRKDKERLKQN

SEQ ID NO: 829257 - protein, 655 aa, Homo sapiens
HGSMKEMVGGCCVCSDERGWAENPLVYCDGHACSVAVHQACYGIVQVPTGPWFCRKCESQERAARVRCELCPHKDGALKRTDNGGWAHVVCALYIPEVQFANVLTMEPIVLQYVPHDRFNKTCYICEEQGRESKAASGACMTCNRHGCRQAFHVTCAQMAGLLCEEEVLEVDNVKYCGYCKYHFSKMKTSRHSSGGGGGGAGGGGGSMGGGGSGFISGRRSRSASPSTQQEKHPTHHERGQKKSRKDKERLKQKHKKRPESPPSILTPPVVPTADKVSSSASSSSHHEASTQETSESSRESKGKKSSSHSLSHKGKKLSSGKGVSSFTSASSSSSSSSSSSGGPFQPAVSSLQSSPDFSAFPKLEQPEEDKYSKPTAPAPSAPPSPSAPEPPKADLFEQKVVFSGFGPIMRFSTTTSSSGRARAPSPGDYKSPHVTGSGASAGTHKRMPALSATPVPADETPETGLKEKKHKASKRSRHGPGRPKGSRNKEGTGGPAAPSLPSAQLAGFTATAASPFSGGSLVSSGLGGLSSRTFGPSGSLPSLSLESPLLGAGIYTSNKDPISHSGGMLRAVCSTPLSSSLLGPPGTSALPRLSRSPFTSTLPSSSASISTTQVGHPSPACDPRKNGRAFWLPPPSGHCPPCKNKQAGCGGSRL

SEQ ID NO: 829258 - protein, 402 aa, Homo sapiens
HGSMKEMVGGCCVCSDERGWAENPLVYCDGHACSVAVHQACYGIVQVPTGPWFCRKCESQERAARVRCELCPHKDGALKRTDNGGWAHVVCALYIPEVQFANVLTMEPIVLQYVPHDRFNKTCYICEEQGRESKAASGACMTCNRHGCRQAFHVTCAQMAGLLCEEEVLEVDNVKYCGYCKYHFSKMKTSRHSSGGGGGGAGGGGGSMGGGGSGFISGRRSRSASPSTQQEKHPTHHERGQKKSRKDKERLKQKHKKRPESPPSILTPPVVPTADKVSSSASSSSHHEASTQETSESSRESKGKKSSSHSLSHKGKKLSSGKGVSSFTSASSSSSSSSSSSGGPFQPAGECGHPGGSWEPGKPFVLSFSGRDFAYWVCISFTSPLVQDKDGESPPPPTCLYV

SEQ ID NO: 829259 - protein, 144 aa, Homo sapiens
REAGLRAGSPSAAGGLAWVSLALGSGSRGRDHSGSGVGTAMAGALVRKAADYVRSKDFRDYLMSTHFWGPVANWGLPIAAINDMKKSPEIISGRMTFALCCYSLTFMRFAYKVQPRNWLLFACHATNEVAQLIQGRAAYQTRDD

SEQ ID NO: 829260 - protein, 144 aa, Homo sapiens; identical to SEQ ID NO: 829259

SEQ ID NO: 829261 - protein, 111 aa, Homo sapiens
MLVTPSKQSSKQKNALKILCGHKFELVIMVIEILVPNSARGRGRDHSGSGVGTAMAGALVRKAADYVRSKDFRDYLMSRTIRDDLVVVWKPVGTLGSCQTLSSSGLSCKNC

SEQ ID NO: 829262 - protein, 157 aa, Homo sapiens
REAGLRAGSPSAAGGLAWVSLALGSGSRGRDHSGSGVGTAMAGALVRKAADYVRSKDFRDYLMSTHFWGPVANWGLPIAAINDMKKSPEIISGRMTFALCCYSLTFMRFAYKVQPRNWLLFACHATNEVAQLIQGRAAYQTRGQHCQLLLSHRFHYK

SEQ ID NO: 829263 - protein, 144 aa, Homo sapiens; identical to SEQ ID NO: 829259

SEQ ID NO: 829264 - protein, 158 aa, Homo sapiens
MLVTPSKQSSKQKNALKILCGHKFELVIMVIEILVPNSARGRGRDHSGSGVGTAMAGALVRKAADYVRSKDFRDYLMSTHFWGPVANWGLPIAAINDMKKSPEIISGRMTFALCCYSLTFMRFAYKVQPRNWLLFACHATNEVAQLIQGRAAYQTRDD

SEQ ID NO: 829265 - protein, 144 aa, Homo sapiens; identical to SEQ ID NO: 829259

SEQ ID NO: 829266 - protein, 144 aa, Homo sapiens; identical to SEQ ID NO: 829259

SEQ ID NO: 829267 - protein, 124 aa, Homo sapiens
MLVTPSKQSSKQKNALKILCGHKFELVIMVIEILVPNSARGRGRDHSGSGVGTAMAGALVRKAADYVRSKDFRDYLMSTHFWGPVANWGLPIAAINDMKKSPEIISGRMTFASELASVCMPRNK

SEQ ID NO: 829268 - protein, 69 aa, Homo sapiens
MVIEILVPNSARGRGRDHSGSGVGTAMAGALVRKAADYVRSKDFRDYLMSHRTGSGVVTAMAARCRKRR

SEQ ID NO: 829269 - protein, 477 aa, Homo sapiens
HEAEAAGLARVEPPRRSSGVGAARLRFPGGSRPLRARACVLALAVLALLERNNADSMSAHSMLCERIAIAKELIKRAESLSRSRKGGIEGGAKLCSKLKAELKFLQKVEAGKVAIKESHLQSTNLTHLRAIVESAENLEEVVSVLHVFGYTDTLGEKQTLVVDVVANGGHTWVKAIGRKAEALHNIWLGRGQYGDKSIIEQAEDFLQASHQQPVQYSNPHIIFAFYNSVSSPMAEKLKEMGISVRGDIVAVNALLDHPEELQPSESESDDEGPELLQVTRVDRENILASVAFPTEIKVDVCKRVNLDITTLITYVSALSYGGCHFIFKEKVLTEQAEQERKEQVLPQLEAFMKDKELFACESAVKDFQSILDTLGGPGERERATVLIKRINVVPDQPSERALRLVASSKINSRSLTIFGTGDTLKAITMTANSGFVRAANNQGVKFSVFIHQPRALTESKEALATPLPKDYTTDSEH

SEQ ID NO: 829270 - protein, 160 aa, Homo sapiens
HEAEAAGLARVEPPRRSSGVGAARLRFPGGSRPLRARACVLALAVLALLERNNADSMSAHSMLCERIAIAKELIKRAESLSRSRKGGIEGGAKLCSKLKAELKFLQKVEAGKVAIKESHLQSTNLTHLRAIVESAENLEEVVSVLHVFGYTDTLGEKLHN

SEQ ID NO: 829271 - protein, 477 aa, Homo sapiens; identical to SEQ ID NO: 829269

SEQ ID NO: 829272 - protein, 477 aa, Homo sapiens; identical to SEQ ID NO: 829269

SEQ ID NO: 829273 - protein, 435 aa, Homo sapiens
MRHTQAQERNNADSMSAHSMLCERIAIAKELIKRAESLSRSRKGGIEGGAKLCSKLKAELKFLQKVEAGKVAIKESHLQSTNLTHLRAIVESAENLEEVVSVLHVFGYTDTLGEKQTLVVDVVANGGHTWVKAIGRKAEALHNIWLGRGQYGDKSIIEQAEDFLQASHQQPVQYSNPHIIFAFYNSVSSPMAEKLKEMGISVRGDIVAVNALLDHPEELQPSESESDDEGPELLQVTRVDRENILASVAFPTEIKVDVCKRVNLDITTLITYVSALSYGGCHFIFKEKVLTEQAEQERKEQVLPQLEAFMKDKELFACESAVKDFQSILDTLGGPGERERATVLIKRINVVPDQPSERALRLVASSKINSRSLTIFGTGDTLKAITMTANSGFVRAANNQGVKFSVFIHQPRALTESKEALATPLPKDYTTDSEH

SEQ ID NO: 829274 - protein, 499 aa, Homo sapiens
MASTTTCTRFTDEYQLFEELGKGAFSVVRRCMKIPTGQEYAAKIINTKKLSARDHQKLEREARICRLLKHPNIVRLHDSISEEGFHYLVFDLVTGGELFEDIVAREYYSEADASHCIQQILESVNHCHLNGIVHRDLKPENLLLASKSKGAAVKLADFGLAIEVQGDQQAWFGFAGTPGYLSPEVLRKDPYGKPVDMWACGVILYILLVGYPPFWDEDQHRLYQQIKAGAYDFPSPEWDTVTPEAKDLINKMLTINPAKRITASEALKHPWICQRSTVASMMHRQETVDCLKKFNARRKLKGAILTTMLATRNFSAAKSLLKKPDGVKESTESSNTTIEDEDVKARKQEIIKVTEQLIEAINNGDFEAYTKICDPGLTAFEPEALGNLVEGMDFHRFYFENALSKSNKPIHTIILNPHVHLVGDDAACIAYIRLTQYMDGSGMPKTMQSEETRVWHRRDGKWQNVHFHRSGSPTVPIKPPCIPNGKENFSGGTSLWQNI

SEQ ID NO: 829275 - protein, 499 aa, Homo sapiens; identical to SEQ ID NO: 829274

SEQ ID NO: 829276 - protein, 478 aa, Homo sapiens
MASTTTCTRFTDEYQLFEELGKGAFSVVRRCMKIPTGQEYAAKIINTKKLSARDHQKLEREARICRLLKHPNIVRLHDSISEEGFHYLVFDLVTGGELFEDIVAREYYSEADASHCIQQILESVNHCHLNGIVHRDLKPENLLLASKSKGAAVKLADFGLAIEVQGDQQAWFGFAGTPGYLSPEVLRKDPYGKPVDMWACGVILYILLVGYPPFWDEDQHRLYQQIKAGAYDFPSPEWDTVTPEAKDLINKMLTINPAKRITASEALKHPWICQRSTVASMMHRQETVDCLKKFNARRKLKGAILTTMLATRNFSAAKSLLKKPDGVKESTESSNTTIEDEDVKARKQEIIKVTEQLIEAINNGDFEAYTKICDPGLTAFEPEALGNLVEGMDFHRFYFENALSKSNKPIHTIILNPHVHLVGDDAACIAYIRLTQYMDGSGMPKTMQSEETRVWHRRDGKWQNVHFHRSGSPTVPIK

SEQ ID NO: 829277 - protein, 499 aa, Homo sapiens; identical to SEQ ID NO: 829274

SEQ ID NO: 829278 - protein, 439 aa, Homo sapiens
MSDGSKTSKFLQEGNHQKLEREARICRLLKHPNIVRLHDSISEEGFHYLVFDLVTGGELFEDIVAREYYSEADASHCIQQILESVNHCHLNGIVHRDLKPENLLLASKSKGAAVKLADFGLAIEVQGDQQAWFGFAGTPGYLSPEVLRKDPYGKPVDMWACGVILYILLVGYPPFWDEDQHRLYQQIKAGAYDFPSPEWDTVTPEAKDLINKMLTINPAKRITASEALKHPWICQRSTVASMMHRQETVDCLKKFNARRKLKGAILTTMLATRNFSAAKSLLKKPDGVKESTESSNTTIEDEDVKARKQEIIKVTEQLIEAINNGDFEAYTKICDPGLTAFEPEALGNLVEGMDFHRFYFENALSKSNKPIHTIILNPHVHLVGDDAACIAYIRLTQYMDGSGMPKTMQSEETRVWHRRDGKWQNVHFHRSGSPTVPIK

SEQ ID NO: 829279 - protein, 492 aa, Homo sapiens
MASTTTCTRFTDEYQLFEELGKGAFSVVRRCMKIPTGQEYAAKIINTKKLSARDHQKLEREARICRLLKHPNIVRLHDSISEEGFHYLVFDLVTGGELFEDIVAREYYSEADASHCIQQILESVNHCHLNGIVHRDLKPENLLLASKSKGAAVKLADFGLAIEVQGDQQAWFGFAGTPGYLSPEVLRKDPYGKPVDMWACGVILYILLVGYPPFWDEDQHRLYQQIKAGAYDFPSPEWDTVTPEAKDLINKMLTINPAKRITASEALKHPWICQRSTVASMMHRQETVDCLKKFNARRKLKGAILTTMLATRNFSAAKSLLKKPDGVKEPQTTVIHNPDGNKESTESSNTTIEDEDVKARKQEIIKVTEQLIEAINNGDFEAYTKICDPGLTAFEPEALGNLVEGMDFHRFYFENALSKSNKPIHTIILNPHVHLVGDDAACIAYIRLTQYMDGSGMPKTMQSEETRVWHRRDGKWQNVHFHRSGSPTVPIN

SEQ ID NO: 829280 - protein, 69 aa, Homo sapiens
  misc_feature (2)..(2): Xaa can be any naturally occurring amino acid
CXSARARAAHMHHLIIYSFLYIVYTSTTGMFHTNLNYCWQNNRGRLDKKKNPQYSKYNSSSSFSVNAKI

SEQ ID NO: 829281 - protein, 293 aa, Homo sapiens [sequence omitted]

SEQ ID NO: 829282 - protein, 293 aa, Homo sapiens [sequence omitted]

SEQ ID NO: 829283 - protein, 499 aa, Homo sapiens; identical to SEQ ID NO: 829274

SEQ ID NO: 829284 - protein, 478 aa, Homo sapiens
MASTTTCTRFTDEYQLFEELGKGAFSVVRRCMKIPTGQEYAAKIINTKKLSARDHQKLEREARICRLLKHPNIVRLHDSISEEGFHYLVFDLVTGGELFEDIVAREYYSEADASHCIQQILESVNHCHLNGIVHRDLKPENLLLASKSKGAAVKLADFGLAIEVQGDQQAWFGFAGTPGYLSPEVLRKDPYGKPVDMWACGVILYILLVGYPPFWDEDQHRLYQQIKAGAYDFPSPEWDTVTPEAKDLINKMLTINPAKRITASEALKHPWICQRSTVASMMHRQETVDCLKKFNARRKLKGAILTTMLATRNFSAAKSLLKKPDGVKESTESSNTTIEDEDVKARKQEIIKVTEQLIEAINNGDFEAYTKICDPGLTAFEPEALGNLVEGMDFHRFYFENALSKSNKPIHTIILNPHVHLVGDDAACIAYIRLTQYMDGSGMPKTMQSEETRVWHRRDGKWQNVHFHRSGSPTVPIN

SEQ ID NO: 829285 - protein, 293 aa, Homo sapiens [sequence omitted]

SEQ ID NO: 829286 - protein, 478 aa, Homo sapiens; identical to SEQ ID NO: 829276

SEQ ID NO: 829287 - protein, 243 aa, Homo sapiens
SLTTVKSPTFPGSTVPGHAGRLVFGFLNGRACVMMQGRFHMYEGYPLWKVTFPVRVFHLLGVDTLVVTNAAGGLNPKFEVGDIMLIRDHINLPGFSGQNPLRGPNDERFGDRFPAMSDAYDRTMRQRALSTWKQMGEQRELQEGTYVMVAGPSFETVAECRVLQKLGADAVGMSTVPEVIVARHCGLRVFGFSLITNKVIMDYESLEKANHEEVLAAGKQAAQKLEQFVSILMASIPLPDKAS

SEQ ID NO: 829288 - protein, 243 aa, Homo sapiens; identical to SEQ ID NO: 829287

SEQ ID NO: 829289 - protein, 243 aa, Homo sapiens; identical to SEQ ID NO: 829287

SEQ ID NO: 829290 - protein, 243 aa, Homo sapiens; identical to SEQ ID NO: 829287

SEQ ID NO: 829291 - protein, 243 aa, Homo sapiens; identical to SEQ ID NO: 829287

SEQ ID NO: 829292 - protein, 109 aa, Homo sapiens
MGEQRELQEGTYVMVAGPSFETVAECRVLQKLGADAVGMSTVPEVIVARHCGLRVFGFSLITNKVIMDYESLEKANHEEVLAAGKQAAQKLEQFVSILMASIPLPDKAS

SEQ ID NO: 829293 - protein, 160 aa, Homo sapiens [sequence omitted]

SEQ ID NO: 829294 - protein, 128 aa, Homo sapiens [sequence omitted]

SEQ ID NO: 829295 - protein, 243 aa, Homo sapiens; identical to SEQ ID NO: 829287

SEQ ID NO: 829296 - protein, 111 aa, Homo sapiens
MQGTPGGGTRPGPSPVDRRTLLVFSFILAAALGQMNFTGDQVLRVLAKDEKQLSLLGDLEGLKPQKVDFWRGPARPSLPVDMRVPFSELKDIKAYLESHGLAYSIMIKDIQ

SEQ ID NO: 829297 - protein, 111 aa, Homo sapiens; identical to SEQ ID NO: 829296

SEQ ID NO: 829298 - protein, 559 aa, Homo sapiens
MAAVGRVGSFGSSPPGLSSTYTGGPLGNEIASGNGGAAAGDDEDGQNLWSCILSEVSTRSRSKLPAGKNVLLLGEDGAGKTSLIRKIQGIEEYKKGRGLEYLYLNVHDEDRDDQTRCNVWILDGDLYHKGLLKFSLDAVSLKDTLVMLVVDMSKPWTALDSLQKWASVVREHVDKLKIPPEEMKQMEQKLIRDFQEYVEPGEDFPASPQRRNTASQEDKDDSVVLPLGADTLTHNLGIPVLVVCTKCDAISVLEKEHDYRDEHFDFIQSHIRKFCLQYGAALIYTSVKENKNIDLVYKYIVQKLYGFPYKIPAVVVEKDAVFIPAGWDNDKKIGILHENFQTLKAEDNFEDIITKPPVRKFVHEKEIMAEDDQVFLMKLQSLLAKQPPTAAGRPVDASPRVPGGSPRTPNRSVSSNVASVSPIPAGSKKIDPNMKAGATSEGVLANFFNSLLSKKTGSPGGPGVSGGSPAGGAGGGSSGLPPSTKKSGQKPVLDVHAELDRITRFLKIPNKAIYSVFWDNVNMPLPFPSKVELESWSASSDGLNLCRVCVCVCVWLPIF

SEQ ID NO: 829299 - protein, 488 aa, Homo sapiens
GQPAQPRPASPPDLSRMAGREGEHETLDPGPAGTRPPSGEDGAGKTSLIRKIQGIEEYKKGRGLEYLYLNVHDEDRDDQTRCNVWILDGDLYHKGLLKFSLDAVSLKDTLVMLVVDMSKPWTALDSLQKWASVVREHVDKLKIPPEEMKQMEQKLIRDFQEYVEPGEDFPASPQRRNTASQEDKDDSVVLPLGADTLTHNLGIPVLVVCTKCDAISVLEKEHDYRDEHFDFIQSHIRKFCLQYGAALIYTSVKENKNIDLVYKYIVQKLYGFPYKIPAVVVEKDAVFIPAGWDNDKKIGILHENFQTLKAEDNFEDIITKPPVRKFVHEKEIMAEDDQVFLMKLQSLLAKQPPTAAGRPVDASPRVPGGSPRTPNRSVSSNVASVSPIPAGSKKIDPNMKAGATSEGVLANFFNSLLSKKTGSPGGPGVSGGSPAGGAGGGSSGLPPSTKKSGQKPVLDVHAELDRITRKPVTVSPTTPTSPTEGEAS

SEQ ID NO: 829300 - protein, 156 aa, Homo sapiens [sequence omitted]

SEQ ID NO: 829301 - protein, 523 aa, Homo sapiens
MAAVGRVGSFGSSPPGLSSTYTGGPLGNEIASGNGGAAAGDDEDGQNLWSCILSEVSTRSRSKLPAGKNVLLLGEDGAGKTSLIRKIQGIEEYKKGRGLEYLYLNVHDEDRDDQTRCNVWILDGDLYHKGLLKFSLDAVSLKDTLVMLVVDMSKPWTALDSLQKWASVVREHVDKLKIPPEEMKQMEQKLIRDFQEYVEPGEDFPASPQRRNTASQEDKDDSVVLPLGADTLTHNLGIPVLVVCTKCDAISVLEKEHDYRDEHFDFIQSHIRKFCLQYGAALIYTSVKENKNIDLVYKYIVQKLYGFPYKIPAVVVEKDAVFIPAGWDNDKKIGILHENFQTLKAEDNFEDIITKPPVRKFVHEKEIMAEDDQVFLMKLQSLLAKQPPTAAGRPVDASPRVPGGSPRTPNRSVSSNVASVSPIPAGSKKIDPNMKAGATSEGVLANFFNSLLSKKTGSPGGPGVSGGSPAGGAGGGSSGLPPSTKKSGQKPVLDVHAELDRITRKPVTVSPTTPTSPTEGEAS

SEQ ID NO: 829302 - protein, 523 aa, Homo sapiens; identical to SEQ ID NO: 829301

SEQ ID NO: 829303 - protein, 505 aa, Homo sapiens
MAAVGRVGSFGSSPPGLSSTYTGGPLGNEIASGNGGAAAGDDEDGQNLWSCILSEVSTRSRSKLPAGKNVLLLGEDGAGKTSLIRLNVHDEDRDDQTRCNVWILDGDLYHKGLLKFSLDAVSLKDTLVMLVVDMSKPWTALDSLQKWASVVREHVDKLKIPPEEMKQMEQKLIRDFQEYVEPGEDFPASPQRRNTASQEDKDDSVVLPLGADTLTHNLGIPVLVVCTKCDAISVLEKEHDYRDEHFDFIQSHIRKFCLQYGAALIYTSVKENKNIDLVYKYIVQKLYGFPYKIPAVVVEKDAVFIPAGWDNDKKIGILHENFQTLKAEDNFEDIITKPPVRKFVHEKEIMAEDDQVFLMKLQSLLAKQPPTAAGRPVDASPRVPGGSPRTPNRSVSSNVASVSPIPAGSKKIDPNMKAGATSEGVLANFFNSLLSKKTGSPGGPGVSGGSPAGGAGGGSSGLPPSTKKSGQKPVLDVHAELDRITRKPVTVSPTTPTSPTEGEAS

SEQ ID NO: 829304 - protein, 541 aa, Homo sapiens
MAAVGRVGSFGSSPPGLSSTYTGGPLGNEIASGNGGAAAGDDEDGQNLWSCILSEVSTRSRSKLPAGKNVLLLGEDGAGKTSLIRKIQGIEEYKKGRGLEYLYLNVHDEDRDDQTRCNVWILDGDLYHKGLLKFSLDAVSLKDTLVMLVVDMSKPWTALDSLQKWASVVREHVDKLKIPPEEMKQMEQKLIRDFQEYVEPGEDFPASPQRRNTASQEDKDDSVVLPLGADTLTHNLGIPVLVVCTKCDAISVLEKEHDYRDEHFDFIQSHIRKFCLQYGAALIYTSVKENKNIDLVYKYIVQKLYGFPYKIPAVVVEKDAVFIPAGWDNDKKIGILHENFQTLKAEDNFEDIITKPPVRKFVHEKEIMAEDDQVFLMKLQSLLAKQPPTAAGRPVDASPRVPGGSPRTPNRSVSSNVASVSPIPAGSKKIDPNMKAGATSEGVLANFFNSLLSKKTGSPGGPGVSGGSPAGGAGGGSSGLPPSTKKSGQKPVLDVHAELDRITRKPVTVSPTTPTLSPENRINGFIWYLQEASPSVGDVGR

SEQ ID NO: 829305 - protein, 132 aa, Homo sapiens
GLPRLLLLSMAALGTVLFTGVRRLHCSAAAWAGGQWRLQQGLAANPSGYGPLTELPDWSYADGRPAPPMKGQLRRKAERETFARRVVLLSQEMDAGLQAWQLRQQKLQEEQRKQENALKPKGASLKSPLPSQ

SEQ ID NO: 829306 - protein, 132 aa, Homo sapiens; identical to SEQ ID NO: 829305

SEQ ID NO: 829307 - protein, 73 aa, Homo sapiens
RATPATPAQHGCFRDCSLHRCPEAALQRSRLGGRPVATTAGTGCQPLRLRAPYRAPRLVICGGMILLNWIIGD

SEQ ID NO: 829308 - protein, 96 aa, Homo sapiens
GLPRLLLLSMAALGTVLFTGVRRLHCSAAAWAGGQWRLQQGLAANPSGYGPLTELPDWSYAETSCTAVTGNGRWITSMAAQAAEVAGRTKEAGKCS

SEQ ID NO: 829309 - protein, 154 aa, Homo sapiens
KSSTYVKNGTSFNIHYVSGSLSGYLSQDTVMVPCQSASSASALGGVKVERQVFGEATKQPGITFIAAKFDGILGMAYPRISVNNVLPVFDNLMQLRRKAERETFARRVVLLSQEMDAGLQAWQLRQQKLQEEQRKQENALKPKGASLKSPLPSQ

SEQ ID NO: 829310 - protein, 117 aa, Homo sapiens
AAAYYYYIRGRVDTEYSSLHTRTSHCCSMSSQQQKQPCIPPPQLQQQQVKQPCQPPPQEPCIPKTKEPCHPKVPEPCHPKVPEPCQPKVPEPCHPKVPEPCPSIVTPAPAQQKTKQK

SEQ ID NO: 829311 - protein, 120 aa, Homo sapiens
SRGSPTTYFRPVLRDHTEYSSLHTRTSHCCSMSSQQQKQPCIPPPQLQQQQVKQPCQPPPQEPCIPKTKEPCHPKVPEPCHPKVPEPCQPKVPEPCHPKVPEPCPSIVTPAPAQQKTKQK

SEQ ID NO: 829312 - protein, 120 aa, Homo sapiens; identical to SEQ ID NO: 829311

SEQ ID NO: 829313 - protein, 147 aa, Homo sapiens
SRGSPTTYFRPVLRDHTEYSSLHTRTSHCCSMSSQQQKQPCIPPPQLQQQQVKQPCQPPPQEPCIPKTKEPCHPKVPEPCHPKVPEPCQPKVPEPCHPKVPEPCPSIVTPAPAQQTVAAMSSQQQKQPCIPPPQLQQQQVKQPCQPP

SEQ ID NO: 829314 - protein, 477 aa, Homo sapiens
RTYTIRNEHVDYVDVGGAYVGPTQNRILRLSKELGIETYKVDVSERLVQYVKGKTYPFRGAFPPVWNPIAYLDYNNLWRTIDNMGKEIPTDAPWEAQHADKWDKMTMKELIDKICWTKTARRFAYLFVNINVTSEPHEVSALWFLWYVKQCGGTTRIFSVTNGGQERKFVGGSGQVSERIMDLLGDQVKLNHPVTHVDQSSDNIIIETLNHEHYECKYVINAIPPTLTAKIHFRPELPAERNQLIQRLPMGAVIKCMMYYKEAFWKKKDYCGCMIIEDEDAPISITLDDTKPDGSLPAIMGFILARKADRLAKLHKEIRKKKICELYAKVLGSQEALHPVHYEEKNWCEEQYSGGCYTAYFPPGIMTQYGRVIRQPVGRIFFAGTETATKWSGYMEGAVEAGERAAREVLNGLGKVTEKDIWVQEPESKDVPAVEITHTFWERNLPSVSGLLKIIGFSTSVTALGFVLYKYKLLPRS

SEQ ID NO: 829315 - protein, 369 aa, Homo sapiens
MVSSRNKPWRTARRFAYLFVNINVTSEPHEVSALWFLWYVKQCGGTTRIFSVTNGGQERKFVGGSGQVSERIMDLLGDQVKLNHPVTHVDQSSDNIIIETLNHEHYECKYVINAIPPTLTAKIHFRPELPAERNQLIQRLPMGAVIKCMMYYKEAFWKKKDYCGCMIIEDEDAPISITLDDTKPDGSLPAIMGFILARKADRLAKLHKEIRKKKICELYAKVLGSQEALHPVHYEEKNWCEEQYSGGCYTAYFPPGIMTQYGRVIRQPVGRIFFAGTETATKWSGYMEGAVEAGERAAREVLNGLGKVTEKDIWVQEPESKDVPAVEITHTFWERNLPSVSGLLKIIGFSTSVTALGFVLYKYKLLPRS

SEQ ID NO: 829316 - protein, 477 aa, Homo sapiens; identical to SEQ ID NO: 829314

SEQ ID NO: 829317 - protein, 477 aa, Homo sapiens; identical to SEQ ID NO: 829314

SEQ ID NO: 829318 - protein, 477 aa, Homo sapiens; identical to SEQ ID NO: 829314

SEQ ID NO: 829319 - protein, 399 aa, Homo sapiens
MRPERPRPRGSAPGPMETPPWDPARNDSLPPTLTPAVPPYVKLGLTVVYTVFYALLFVFIYVQLWLVLRYRHKRLSYQSVFLFLCLFWASLRTVLFSFYFKDFVAANSLSPFVFWLLYCFPVCLQFFTLTLMNLYFTQVIFKAKSKYSPELLKYRLPLYLASLFISLVFLLVNLTCAVLVKTGNWERKVIVSVRVAINDTLFVLCAVSLSICLYKISKMSLANIYLESKGSSVCQVTAIGVTVILLYTSRACYNLFILSFSQNKSVHSFDYDWYNVSDQADLKNQLGDAGYVLFGVVLFVWELLPTTLVVYFFRVRNPTKDLTNPGMVPSHGFSPRSYFFDNPRRYDSDDDLAWNIAPQGLQGGFAPDYYDWGQQTNSFLAQAGTLQDSTLDPDKPSLG

SEQ ID NO: 829320 - protein, 109 aa, Homo sapiens
ALMPSRLPLYLASLFISLVFLLVNLTCAVLVKTGNWERKVIVSVRVAINDTLFVLCAVSLSICLYKISKMSLANIYLESKVGGNVVKIPPMKRVLKRVSWFAKVHFDEF

SEQ ID NO: 829321 - protein, 326 aa, Homo sapiens
MRPERPRPRGSAPGPMETPPWDPARNDSLPPTLTPAVPPYVKLGLTVVYTVFYALLFVFIYVQLWLVLRYRHKRLSYQSVFLFLCLFWASLRTVLFSFYFKDFVAANSLSPFVFWLLYCFPVCLQFFTLTLMNLYFTQVIFKAKSKYSPELLKYRLPLYLASLFISLVFLLVNLTCAVLVKTGNWERKVIVSVRVAINDTLFVLCAVSLSICLYKISKMSLANIYLESKGSSVCQVTAIGVTVILLYTSRACYNLFILSFSQNKSVHSFDYDWYNVSDQADLKNQLGDAGYVLFGVVLFVWELLPTTLVVYFFRVRNPTKDLTFLM

SEQ ID NO: 829322 - protein, 180 aa, Homo sapiens
MRPERPRPRGSAPGPMETPPWDPARNDSLPPTLTPAVPPYVKLGLTVVYTVFYALLFVFIYVQLWLVLRYRHKRLSYQSVFLFLCLFWASLRTVLFSFYFKDFVAANSLSPFVFWLLYCFPVCLQFFTLTLMNLYFTQVAPLPGLPLHQPCFPVGEFNLCCAGKDGKLGEEGYRLCASGH

SEQ ID NO: 829323 - protein, 155 aa, Homo sapiens
MRPERPRPRGSAPGPMETPPWDPARNDSLPPTLTPAVPPYVKLGLTVVYTVFYALLFVFIYVQLWLVLRYRHKRLSYQSVFLFLCLFWASLRTVLFSFYFKDFVAANSLSPFVFWLLYCFPVCLQFFTLTLMNLYFTQNSLKKVPVLSPFSRGGN

SEQ ID NO: 829324 - protein, 399 aa, Homo sapiens; identical to SEQ ID NO: 829319

SEQ ID NO: 829325 - protein, 399 aa, Homo sapiens; identical to SEQ ID NO: 829319

SEQ ID NO: 829326 - protein, 218 aa, Homo sapiens
METPPWDPARNDSLPPTLTPAVPPYVKLGLTVVYTVFYALLFVFIYVQLWLVLRYRHKRLSYQSVFLFLCLFWASLRTVLFSFYFKDFVAANSLSPFVFWLLYCFPVCLQFFTLTLMNLYFTQGSSVCQVTAIGVTVILLYTSRACYNLFILSFSQNKSVHSFDYDWYNVSDQVSGGAEEVSPDQGLLVSSRHWFQDPRKYQNLDAQVPDIKWCSICI

SEQ ID NO: 829327 - protein, 432 aa, Homo sapiens
METPPWDPARNDSLPPTLTPAVPPYVKLGLTVVYTVFYALLFVFIYVQLWLVLRYRHKRLSYQSVFLFLCLFWASLRTVLFSFYFKDFVAANSLSPFVFWLLYCFPVCLQFFTLTLMNLYFTQNSLKKVPVIVPIFQRRKLRLRGRRDLLKVTLSVHGGAGIQHTSVLSECVIFKAKSKYSPELLKYRLPLYLASLFISLVFLLVNLTCAVLVKTGNWERKVIVSVRVAINDTLFVLCAVSLSICLYKISKMSLANIYLESKGSSVCQVTAIGVTVILLYTSRACYNLFILSFSQNKSVHSFDYDWYNVSDQADLKNQLGDAGYVLFGVVLFVWELLPTTLVVYFFRVRNPTKDLTNPGMVPSHGFSPRSYFFDNPRRYDSDDDLAWNIAPQGLQGGFAPDYYDWGQQTNSFLAQAGTLQDSTLDPDKPSLG

SEQ ID NO: 829328 - protein, 234 aa, Homo sapiens
SLRRSDGFIRGFRFCFFLIFFSLLLPCKKCLSPPTVILRLPQPCGTVIFKAKSKYSPELLKYRLPLYLASLFISLVFLLVNLTCAVLVKTGNWERKVIVSVRVAINDTLFVLCAVSLSICLYKISKMSLANIYLESKGSSVCQVTAIGVTVILLYTSRACYNLFILSFSQNKSVHSFDYDWYNVSDQADLKNQLGDAGYVLFGVVLFVWELLPTTLVVYFFRVRNPTKDLTFLM

SEQ ID NO: 829329 - protein, 375 aa, Homo sapiens
MRPERPRPRGSAPGPMETPPWDPARNDSLPPTLTPAVPPYVKLGLTVVYTVFYALLFVFIYVQLWLVLRYRHKRLSYQSVFLFLCLFWASLRTVLFSFYFKDFVAANSLSPFVFWLLYCFPVCLQFFTLTLMNLYFTQVIFKAKSKYSPELLKYRLPLYLASLFISLVFLLVNLTCAVLVKTGNWERKVIVSVRVAINDTLFVLCAVSLSICLYKISKMSLANIYLESKGSSVCQVTAIGVTVILLYTSRACYNLFILSFSQNKSVHSFDYDWYNVSDQADLKNQLGDAGYVLFGVVLFVWELLPTTLVVYFFRVRNPTKDLTNPGMVPSHGFSPRSYFFDNPRRYDSDDDLAWNIAPQGLQGGKNTLDLPIPKF

SEQ ID NO: 829330 - protein, 144 aa, Homo sapiens
MRVRKCSTPEEIKKRTKAVIFLSQCRQKVHHVEGKEILVGDVGVTISEPFKHFVGMLPEKDCCYALYDASFETKESRRIDVFLWASELAPLKSKMIYTSSKDAIKKKFQGIKHEWQTNGPEDLNRACTAEKLGGSFFFFFEMES

SEQ ID NO: 829331 - protein, 48 aa, Homo sapiens
MAPQVGPQGNPGARAMRWASPPHKKTPGGTPEVSETIPKGGSGSQTGS

SEQ ID NO: 829332 - protein, 105 aa, Homo sapiens
MAKISSPTETERCIESLIAVFQKYAGKDGYNYTLSKTEFLSFMNTELAAFTKNQKDPGVLDRMMKKLDTNSDGQLDFSEFLNLIGGLAMACHDSFLKAVPSQKRT

SEQ ID NO: 829333 - protein, 105 aa, Homo sapiens; identical to SEQ ID NO: 829332

SEQ ID NO: 829334 - protein, 72 aa, Homo sapiens
RVRYPHKGNVAKISSPTETERCIESLIAVFQKYAGKDGYNYTLSQDRVPKLHEYRTSCLHKEPEGPLVSLTA

SEQ ID NO: 829335 - protein, 87 aa, Homo sapiens
DDFIIHCNSRSHSALGCGCVGSSNMAKISSPTETERCIESLIAVFQKYAGKDGYNYTLSQDRVPKLHEYRTSCLHKEPEGPLVSLTA

SEQ ID NO: 829336 - protein, 106 aa, Homo sapiens
MDQFEICSLVKSLTLIEGWPHILMFGHPLARICLVEQTFVASQMAKISSPTETERCIESLIAVFQKYAGKDGYNYTLSQDRVPKLHEYRTSCLHKEPEGPLVSLTA

SEQ ID NO: 829337 - protein, 105 aa, Homo sapiens; identical to SEQ ID NO: 829332

SEQ ID NO: 829338 - protein, 66 aa, Homo sapiens
  misc_feature (5)..(5): Xaa can be any naturally occurring amino acid
GSPAXEFRRVDTARENDRRVEERLQTRTPRAQSSQRRSQPQPPAPRSAPTWQKSPALQRLSGASSP

SEQ ID NO: 829339 - protein, 81 aa, Homo sapiens
IRLVEAGGESAEASLSSYMAKISSPTETERCIESLIAVFQKYAGKDGYNYTLSQDRVPKLHEYRTSCLHKEPEGPLVSLTA

SEQ ID NO: 829340 - protein, 86 aa, Homo sapiens
AADYYYYCSEFKLLTMYGDMAKISSPTETERCIESLIAVFQKYAGKDGYNYTLSQDRVPKLHVPVIPATQEAEAGESLEPRRQRLQ

SEQ ID NO: 829341 - protein, 105 aa, Homo sapiens; identical to SEQ ID NO: 829332

SEQ ID NO: 829342 - protein, 92 aa, Homo sapiens
LGHIEPIGGIRSNTIGEDSSMYSEPDITKEAKISSPTETERCIESLIAVFQKYAGKDGYNYTLSQDRVPKLHEYRTSCLHKEPEGPLVSLTA

SEQ ID NO: 829343 - protein, 155 aa, Homo sapiens
  misc_feature (5)..(5): Xaa can be any naturally occurring amino acid
GSPAXEFRRVDTARETTEGLRRGSRPARRAHRALSAAPSHSPVAHAVLAKLNAFKADTPSLGEGPEKTRSQLLIMDRAADPVSPLLHELSSNMAKISSPTETERCIESLIAVFQKYAGKDGYNYTLSQDRVPKLHEYRTSCLHKEPEGPLVSLTA

SEQ ID NO: 829344 - protein, 216 aa, Homo sapiens
MPDGRESAPRHVRHRSRKIVSAESEDHATSCGPKTAASERERLHKFKAAELHKLAPGTLLNAGPQESCNTGEETLSGPTLGPKGGPGKASTARHDRSDQHPDLGLPEAPGARPSFDIERGCWLQFTSGEQQELKTLGATILGPTASRASLSSNMAKISSPTETERCIESLIAVFQKYAGKDGYNYTLSQDRVPKLHEYRTSCLHKEPEGPLVSLTA

SEQ ID NO: 829345 - protein, 105 aa, Homo sapiens
LSPGTATRIRAPLRAPRCRYHTTLLPREPLPATASRASLSSNMAKISSPTETERCIESLIAVFQKYAGKDGYNYTLSQDRVPKLHEYRTSCLHKEPEGPLVSLTA

SEQ ID NO: 829346 - protein, 105 aa, Homo sapiens; identical to SEQ ID NO: 829332

SEQ ID NO: 829347 - protein, 105 aa, Homo sapiens; identical to SEQ ID NO: 829332

SEQ ID NO: 829348 - protein, 105 aa, Homo sapiens; identical to SEQ ID NO: 829332

SEQ ID NO: 829349 - protein, 116 aa, Homo sapiens
EAPKAMAADLLRSFWHSLEDPVVHSFQAEATTASSLPLCQSCLNRWMVGTDGSSMLAMRYRFYDNRTMTVFKSIKIHPPVLGIIMCPRLYFNSDLDPVVGLIQDLYLSFKACLLSN

SEQ ID NO: 829350 - protein, 187 aa, Homo sapiens
METSPTNMKNVANTVTISHILPHIKIIHTEEKPDKCEECNKVFNWSSTHTKYKRIHTEDKFYKYEECDKSFKNISTLITHKIIYVVEKFYKCEECGKVFFFFLKWSLTLSPKLECNGAISVHCNLRLLGSSDSLASTSQAAGIAGACHHAQLIFVFLVETGFHHFDQAGFELLTSSDPPALASQSAP

SEQ ID NO: 829351 - protein, 213 aa, Homo sapiens
MAAAADERSPEDGEDEEEEEQLVLVELSGIIDSDFLSKCENKCKVLGIDTERPILQVDSCVFAGEYEDTLGTCVIFEENVEHADTEGNNKTVLKYKCHTMKKLSMTRTLLTEKKEGEENIGGVEWLQIKDNDFSYRPNMICNFLHENEDEEVVASAPDKSLELEEEEIQMNDSSNLSCEQEKPMHLEIEDSGPLIDIPSETEGSVFMETQMLP

SEQ ID NO: 829352 - protein, 298 aa, Homo sapiens
MAAAADERSPEDGEDEEEEEQLVLVELSGIIDSDFLSKCENKCKVLGIDTERPILQVDSCVFAGEYEDTLGTCVIFEENVEHADTEGNNKTVLKYKCHTMKKLSMTRTLLTEKKEGEENIGGVEWLQIKDNDFSYRPNMICNFLHENEDEEVVASAPDKSLELEEEEIQMNDSSNLSCEQEKPMHLEIEDSGPLIDIPSETEGSVYGNSNVCLKTSLKKGSLNTAEPLSGPNKLGGLHTHPTHAPRTTRGAPNPVKKRRQTDTPQNYTRVKTHSRSILPRHRITTAPRDTARNHARRR

SEQ ID NO: 829353 - protein, 135 aa, Homo sapiens
LHVGTGALGARSHPPAGSRHLEFWQKQFARRGAERQEPNKLLRLGAEARTQDGGSGRAWPVTRRRGAAGPWRRRRTSGVQRTEKTRKRRSSWFWWNYQELLIQTSSQNVKINARFWALTLRAHSASDTNVRYRTR

SEQ ID NO: 829354 - protein, 211 aa, Homo sapiens
THASGPTRPDGEDEEEEEQLVLVELSGIIDSDFLSKCENKCKVLGIDTERPILQVDSCVFAGEYEDTLGTCVIFEENVEHADTEGNNKTVLKYKCHTMKKLSMTRTLLTEKKEGEENIGGVEWLQIKDNDFSYRPNMICNFLHENEDEEVVASAPDKSLELEEEEIQMNDSSNLSCEQEKPMHLEIEDSGPLIDIPSETEGSVFMETQMLP

SEQ ID NO: 829355 - protein, 195 aa, Homo sapiens
MAAAADERSPEDGEDEEEEEQLVLVELSGIIDSDFLSKCENKCKVLGIDTERPILQVDSCVFAGEYEDTLGTCVIFEENVEHADTEGNNKTVLKYKCHTMKKLSMTRTLLTEKKEGEENIGGVEWLQIKDNDFSYRPNMICNFLHENEDEEVVASAPDKSLELEEEEIQMNDSSNLSCEQEKPMHLEIMETQMLP

SEQ ID NO: 829356 - protein, 213 aa, Homo sapiens
VYLIDVKFNGTHIPGSPFKIRVGSLGMEGTQAWCLLTEQLVLVELSGIIDSDFLSKCENKCKVLGIDTERPILQVDSCVFAGEYEDTLGTCVIFEENVEHADTEGNNKTVLKYKCHTMKKLSMTRTLLTEKKEGEENIGGVEWLQIKDNDFSYRPNMICNFLHENEDEEVVASAPDKSLELEEEEIQMNDSSNLSCEQEKPMHLEIMETQMLP

SEQ ID NO: 829357 - protein, 213 aa, Homo sapiens; identical to SEQ ID NO: 829351

SEQ ID NO: 829358 - protein, 213 aa, Homo sapiens; identical to SEQ ID NO: 829351

SEQ ID NO: 829359 - protein, 106 aa, Homo sapiens
MAAAADERSPEDGEDEEEEEQLVLVELSGIIDSDFLSKCENKCKVLGIDTERPILQVDSCVFAGEYEDTLGTCVIFEENVEHVIQKGNIKTRAKKLINKPPSHTNL

SEQ ID NO: 829360 - protein, 232 aa, Homo sapiens
PLLLTGFLLLGARSRAAWDLSPNRHPVLGMGSTGKLPEEQLVLVELSGIIDSDFLSKCENKCKVLGIDTERPILQVDSCVFAGEYEDTLGTCVIFEENVEHADTEGNNKTVLKYKCHTMKKLSMTRTLLTEKKEGEENIGGVEWLQIKDNDFSYRPNMICNFLHENEDEEVVASAPDKSLELEEEEIQMNDSSNLSCEQEKPMHLEIEDSGPLIDIPSETEGSVFMETQMLP

SEQ ID NO: 829361 - protein, 213 aa, Homo sapiens; identical to SEQ ID NO: 829351

SEQ ID NO: 829362 - protein, 102 aa, Homo sapiens
CLFLIPSKLGGVEWLQIKDNDFSYRPNMICNFLHENEDEEVVASAPDKSLELEEEEIQMNDSSNLSCEQEKPMHLEIEDSGPLIDIPSETEGSVFMETQMLP

SEQ ID NO: 829363 - protein, 753 aa, Homo sapiens
MERRAWSLQCTAFVLFCAWCALNSAKAKRQFVNEWAAEIPGGPEAASAIAEELGYDLLGQIGSLENHYLFKHKNHPRRSRRSAFHITKRLSDDDRVIWAEQQYEKERSKRSALRDSALNLFNDPMWNQQWYLQDTRMTAALPKLDLHVIPVWQKGITGKGVVITVLDDGLEWNHTDIYANYDPEASYDFNDNDHDPFPRYDPTNENKHGTRCAGEIAMQANNHKCGVGVAYNSKVGGIRMLDGIVTDAIEASSIGFNPGHVDIYSASWGPNDDGKTVEGPGRLAQKAFEYGVKQGRQGKGSIFVWASGNGGRQGDNCDCDGYTDSIYTISISSASQQGLSPWYAEKCSSTLATSYSSGDYTDQRITSADLHNDCTETHTGTSASAPLAAGIFALALEANPNLTWRDMQHLVVWTSEYDPLANNPGWKKNGAGLMVNSRFGFGLLNAKALVDLADPRTWRSVPEKKECVVKDNDFEPRALKANGEVIIEIPTRACEGQENAIKSLEHVQFEATIEYSRRGDLHVTLTSAAGTSTVLLAERERDTSPNGFKNWDFMSVHTWGENPIGTWTLRITDMSGRIQNEGRIVNWKLILHGTSSQPEHMKQPRVYTSYNTVQNDRRGVEKMVDPGEEQPTQENPKENTLVSKSPSSSSVGGRRDELEEGAPSQAMLRLLQSAFSKNSPPKQSPKKSPSAKLNIPYENFYEALEKLNKPSQLKDSEDSLYNDYVDVFYNTKPYKHRDDRLLQALVDILNEEN

SEQ ID NO: 829364 - protein, 185 aa, Homo sapiens
MERRAWSLQCTAFVLFCAWCALNSAKAKRQFVNEWAAEIPGGPEAASAIAEELGYDLLGQIGSLENHYLFKHKNHPRRSRRSAFHITKRLSDDDRVIWAEQQYEKERSKRSALRDSALNLFNDPMWNQQWYLQDTRMTAALPKLDLHVIPVWQKGITGKGVVITVLDDGLEWNHTDIYANYDPVR

SEQ ID NO: 829365 - protein, 753 aa, Homo sapiens; identical to SEQ ID NO: 829363

SEQ ID NO: 829366 - protein, 117 aa, Homo sapiens
MATAATEEPFPFHGLLPKKETGAASFLCRYPEYDGRGVLIAVLDTGVDPGAPGMQVTTDGKPKIVDIIDTTGSGDVNTATEVEPKDGEIVGLSGRVLKVEVQWHNLGSPRPLLPVFK

SEQ ID NO: 829367 - protein, 999 aa, Homo sapiens
MFCHFPTFVSLGAHGTHVASIAAGHFPEEPERNGVAPGAQILSIKIGDTRLSTMETGTGLIRAMIEVINHKCDLVNYSYGEATHWPNSGRICEVINEAVWKHNIIYVSSAGNNGPCLSTVGCPGGTTSSVIGVGAYVSPDMMVAEYSLREKLPANQYTWSSRGPSADGALGVSISAPGGAIASVPNWTLRGTQLMNGTSMSSPNACGGIALILSGLKANNIDYTVHSVRRALENTAVKADNIEVFAQGHGIIQVDKAYDYLVQNTSFANKLGFTVTVGNNRGIYLRDPVQVAAPSDHGVGIEPVFPENTENSEKISLQLHLALTSNSSWVQCPSHLELMNQCRHINIRVDPRGLREGLHYTEVCGYDIASPNAGPLFRVPITAVIAAKVNESSHYDLAFTDVHFKPGQIRRHFIEVPEGATWAEVTVCSCSSEVSAKFVLHAVQLVKQRAYRSHEFYKFCSLPEKGTLTEAFPVLGGKAIEFCIARWWASLSDVNIDYTISFHGIVCTAPQLNIHASEGINRFDVQSSLKYEDLAPCITLKNWVQTLRPVSAKTKPLGSRDVLPNNRQLYEMVLTYNFHQPKSGEVTPSCPLLCELLYESEFDSQLWIIFDQNKRQMGSGDAYPHQYSLKLEKGDYTIRLQIRHEQISDLERLKDLPFIVSHRLSNTLSLDIHENHSFALLGKKKSSNLTLPPKYNQPFFVTSLPDDKIPKGAGPGCYLAGSLTLSKTELGKKADVIPVHYYLIPPPTKTKNGSKDKEKDSEKEKDLKEEFTEALRDLKIQWMTKLDSSDIYNELKETYPNYLPLYVARLHQLDAEKERMKRLNEIVDAANAVISHIDQTALAVYIAMKTDPRPDAATIKNDMDKQKSTLVDALCRKGCALADHLLHTQAQDGAISTDAEGKEEEGESPLDSLAETFWETTKWTDLFDNKVLTFAYKHALVNKMYGRGLKFATKLVEEKPTKENWKNCIQLMKLLGWTHCASFTENWLPIMYPPDYCVF

SEQ ID NO: 829368 - protein, 661 aa, Homo sapiens
MNQCRHINIRVDPRGLREGLHYTEVCGYDIASPNAGPLFRVPITAVIAAKVNESSHYDLAFTDVHFKPGQIRRHFIEVPEGATWAEVTVCSCSSEVSAKFVLHAVQLVKQRAYRSHEFYKFCSLPEKGTLTEAFPVLGGKAIEFCIARWWASLSDVNIDYTISFHGIVCTAPQLNIHASEGINRFDVQSSLKYEDLAPCITLKNWVQTLRPVSAKTKPLGSRDVLPNNRQLYEMVLTYNFHQPKSGEVTPSCPLLCELLYESEFDSQLWIIFDQNKRQMGSGDAYPHQYSLKLEKGDYTIRLQIRHEQISDLERLKDLPFIVSHRLSNTLSLDIHENHSFALLGKKKSSNLTLPPKYNQPFFVTSLPDDKIPKGAGPGCYLAGSLTLSKTELGKKADVIPVHYYLIPPPTKTKNGSKDKEKDSEKEKDLKEEFTEALRDLKIQWMTKLDSSDIYNELKETYPNYLPLYVARLHQLDAEKERMKRLNEIVDAANAVISHIDQTALAVYIAMKTDPRPDAATIKNDMDKQKSTLVDALCRKGCALADHLLHTQAQDGAISTDAEGKEEEGESPLDSLAETFWETTKWTDLFDNKVLTFAYKHALVNKMYGRGLKFATKLVEEKPTKENWKNCIQLMKLLGWTHCASFTENWLPIMYPPDYCVF

SEQ ID NO: 829369 - protein, 397 aa, Homo sapiens
NLMGLVRTKKEELAGSDSLILPATYSLKLEKGDYTIRLQIRHEQISDLERLKDLPFIVSHRLSNTLSLDIHENHSFALLGKKKSSNLTLPPKYNQPFFVTSLPDDKIPKGAGPGCYLAGSLTLSKTELGKKADVIPVHYYLIPPPTKTKNGSKDKEKDSEKEKDLKEEFTEALRDLKIQWMTKLDSSDIYNELKETYPNYLPLYVARLHQLDAEKERMKRLNEIVDAANAVISHIDQTALAVYIAMKTDPRPDAATIKNDMDKQKSTLVDALCRKGCALADHLLHTQAQDGAISTDAEGKEEEGESPLDSLAETFWETTKWTDLFDNKVLTFAYKHALVNKMYGRGLKFATKLVEEKPTKENWKNCIQLMKLLGWTHCASFTENWLPIMYPPDYCVF

SEQ ID NO: 829370 - protein, 217 aa, Homo sapiens
MTKLDSSDIYNELKETYPNYLPLYVARLHQLDAEKERMKRLNEIVDAANAVISHIDQTALAVYIAMKTDPRPDAATIKNDMDKQKSTLVDALCRKGCALADHLLHTQAQDGAISTDAEGKEEEGESPLDSLAETFWETTKWTDLFDNKVLTFAYKHALVNKMYGRGLKFATKLVEEKPTKENWKNCIQLMKLLGWTHCASFTENWLPIMYPPDYCVF

SEQ ID NO: 829371 - protein, 259 aa, Homo sapiens
MTKLDSSDIYNELKETYPNYLPLYVARLHQLDAEKERMKRLNEIVDAANAVISHIDQTALAVYIAMKTDPRPDAATIKKLPSDFCIIPALLWAARIHQAAFAESALQTLAERRMKGVLRHSDMDKQKSTLVDALCRKGCALADHLLHTQAQDGAISTDAEGKEEEGESPLDSLAETFWETTKWTDLFDNKVLTFAYKHALVNKMYGRGLKFATKLVEEKPTKENWKNCIQLMKLLGWTHCASFTENWLPIMYPPDYCVF

SEQ ID NO: 829372 - protein, 159 aa, Homo sapiens
IFVVTGYDLALIRPDAATIKNDMDKQKSTLVDALCRKGCALADHLLHTQAQDGAISTDAEGKEEEGESPLDSLAETFWETTKWTDLFDNKVLTFAYKHALVNKMYGRGLKFATKLVEEKPTKENWKNCIQLMKLLGWTHCASFTENWLPIMYPPDYCVF

SEQ ID NO: 829373 - protein, 107 aa, Homo sapiens
LLISEIFFNLLYSDMDKQKSTLVDALCRKGCALADHLLHTQAQDGAISTDAEGKEEEGESPLDSLAETFWETTKWTDLFDNKVTFLLLVSAKFLGLPHRPLLCPIAG

SEQ ID NO: 829374 - protein, 217 aa, Homo sapiens; identical to SEQ ID NO: 829370

SEQ ID NO: 829375 - protein, 288 aa, Homo sapiens
GSWVLKELAQAIDLFPFPSLMFHDVIPVHYYLIPPPTKTKNGSKDKEKDSEKEKDLKEEFTEALRDLKIQWMTKLDSSDIYNELKETYPNYLPLYVARLHQLDAEKERMKRLNEIVDAANAVISHIDQTALAVYIAMKTDPRPDAATIKNDMDKQKSTLVDALCRKGCALADHLLHTQAQDGAISTDAEGKEEEGESPLDSLAETFWETTKWTDLFDNKVLTFAYKHALVNKMYGRGLKFATKLVEEKPTKENWKNCIQLMKLLGWTHCASFTENWLPIMYPPDYCVF

SEQ ID NO: 829376 - protein, 386 aa, Homo sapiens
VTGSLVCTPPLLGFFWQVIVQRCLSAKNMSHVKGGCILCGYLKLMPMFIMVMPGMISRILYTEKIACVVPSECEKYCGTKVGCTNIAYPTLVVELMPNGLRGLMLSVMLASLMSSLTSIFNSASTLFTMDIYAKVRKRASEKELMIAGRLFILVLIGISIAWVPIVQSAQSGQLFDYIQSITSYLGPPIAAVFLLAIFWKRVNEPGAFWGLILGLLIGISRMITEFAYGTGSCMEPSNCPTIICGVHYLYFAIILFAISFITIVVISLLTKPIPDVHLYRLCWSLRNSKEERIDLDAEEENIQEGPKETIEIETQVPEKKKGIFRRAYDLFCGLEQHGAPKMTEEEEKAMKMKMTDTSEKPLWRTVLNVNGIILVTVAVFCHAYFA

SEQ ID NO: 829377 - protein, 537 aa, Homo sapiens
MPEYLRKRFGGQRIQVYLSLLSLLLYIFTKISADIFSGAIFINLALGLNLYLAIFLLLAITALYTITGGLAAVIYTDTLQTVIMLVGSLILTGFAFHEVGGYDAFMEKYMKAIPTIVSDGNTTFQEKCYTPRADSFHIFRDPLTGDLPWPGFIFGMSILTLWYWCTDQVIVQRCLSAKNMSHVKGGCILCGYLKLMPMFIMVMPGMISRILYTEKIACVVPSECEKYCGTKVGCTNIAYPTLVVELMPNGLRGLMLSVMLASLMSSLTSIFNSASTLFTMDIYAKVRKRASEKELMIAGRLFILVLIGISIAWVPIVQSAQSGQLFDYIQSITSYLGPPIAAVFLLAIFWKRVNEPGAFWGLILGLLIGISRMITEFAYGTGSCMEPSNCPTIICGVHYLYFAIILFAISFITIVVISLLTKPIPDVHLYRLCWSLRNSKEERIDLDAEEENIQEGPKETIEIETQVPEKKKGIFRRAYDLFCGLEQHGAPKMTEEEEKAMKMKMTDTSEKPLWRTVLNVNGIILVTVAVFCHAYFA

SEQ ID NO: 829378 - protein, 664 aa, Homo sapiens
MDSSTWSPKTTAVTRPVETHELIRNAADISIIVIYFVVVMAVGLWAMFSTNRGTVGGFFLAGRSMVWWPIGASLFASNIGSGHFVGLAGTGAASGIAIGGFEWNALVLVVVLGWLFVPIYIKAGVVTMPEYLRKRFGGQRIQVYLSLLSLLLYIFTKISADIFSGAIFINLALGLNLYLAIFLLLAITALYTITGGLAAVIYTDTLQTVIMLVGSLILTGFAFHEVGGYDAFMEKYMKAIPTIVSDGNTTFQEKCYTPRADSFHIFRDPLTGDLPWPGFIFGMSILTLWYWCTDQVIVQRCLSAKNMSHVKGGCILCGYLKLMPMFIMVMPGMISRILYTEKIACVVPSECEKYCGTKVGCTNIAYPTLVVELMPNGLRGLMLSVMLASLMSSLTSIFNSASTLFTMDIYAKVRKRASEKELMIAGRLFILVLIGISIAWVPIVQSAQSGQLFDYIQSITSYLGPPIAAVFLLAIFWKRVNEPGAFWGLILGLLIGISRMITEFAYGTGSCMEPSNCPTIICGVHYLYFAIILFAISFITIVVISLLTKPIPDVHLYRLCWSLRNSKEERIDLDAEEENIQEGPKETIEIETQVPEKKKGIFRRAYDLFCGLEQHGAPKMTEEEEKAMKMKMTDTSEKPLWRTVLNVNGIILVTVAVFCHAYFA

SEQ ID NO: 829379 - protein, 379 aa, Homo sapiens
MPEYLRKRFGGQRIQVYLSLLSLLLYIFTKISADIFSGAIFINLALGLNLYLAIFLLLAITALYTITGGLAAVIYTDTLQTVIMLVGSLILTGFAFHEVGGYDAFMEKYMKAIPTIVSDGNTTFQEKCYTPRADSFHIFRDPLTGDLPWPGFIFGMSILTLWYWCTDQVIVQRCLSAKNMSHVKGGCILCGYLKLMPMFIMVMPGMISRILYTEKIACVVPSECEKYCGTKVGCTNIAYPTLVVELMPNGLRGLMLSVMLASLMSSLTSIFNSASTLFTMDIYAKVRKRASEKETLSSHSVGMGSSRRQTLLLSGLAAGCPLLLEGHHIDAKLSVDAQLVECTTAQNSWTQVSLPSPWDYRFLNDPAAWQRWCLLIWLR

SEQ ID NO: 829380 - protein, 67 aa, Homo sapiens
AQPANAWTLAERLSAANPVEPPDFCHQKPSVSAGLRSQAAKLTEISTQLQKMNASPFYAFCCGGREC

SEQ ID NO: 829381 - protein, 67 aa, Homo sapiens; identical to SEQ ID NO: 829380

SEQ ID NO: 829382 - protein, 152 aa, Homo sapiens
MSTPARRRLMRDFKRLQEDPPVGVSGAPSENNIMQWNAVIFGPEGTPFEDGTFKLVIEFSEEYPNKPPTVRFLSKMFHPNVYADGSICLDILQNRWSPTYDVSSILTSIQSLLDEPNPNSPANSQAAQLYQENKREYEKRVSAIVEQSWNDS

SEQ ID NO: 829383 - protein, 152 aa, Homo sapiens; identical to SEQ ID NO: 829382

SEQ ID NO: 829384 - protein, 152 aa, Homo sapiens; identical to SEQ ID NO: 829382

SEQ ID NO: 829385 - protein, 152 aa, Homo sapiens; identical to SEQ ID NO: 829382

SEQ ID NO: 829386 - protein, 152 aa, Homo sapiens; identical to SEQ ID NO: 829382

SEQ ID NO: 829387 - protein, 99 aa, Homo sapiens
HEDSSENSITSLKVPTVRFLSKMFHPNVYADGSICLDILQNRWSPTYDVSSILTSIQSLLDEPNPNSPANSQAAQLYQENKREYEKRVSAIVEQSWNDS

SEQ ID NO: 829388 - protein, 122 aa, Homo sapiens
MSTPARRRLMRDFKRLQEDPPVGVSGAPSENNIMQWNAVIFGPEGTPFEDVYADGSICLDILQNRWSPTYDVSSILTSIQSLLDEPNPNSPANSQAAQLYQENKREYEKRVSAIVEQSWNDS

SEQ ID NO: 829389 - protein, 152 aa, Homo sapiens; identical to SEQ ID NO: 829382

SEQ ID NO: 829390 - protein, 152 aa, Homo sapiens; identical to SEQ ID NO: 829382

SEQ ID NO: 829391 - protein, 152 aa, Homo sapiens; identical to SEQ ID NO: 829382

SEQ ID NO: 829392 - protein, 167 aa, Homo sapiens
TQLRGELLTQGQLRSMSTPARRRLMRDFKRLQEDPPVGVSGAPSENNIMQWNAVIFGPEGTPFEDGTFKLVIEFSEEYPNKPPTVRFLSKMFHPNVYADGSICLDILQNRWSPTYDVSSILTSIQSLLDEPNPNSPANSQAAQLYQENKREYEKRVSAIVEQSWNDS

SEQ ID NO: 829393 - protein, 107 aa, Homo sapiens
MQLYLGTFKLVIEFSEEYPNKPPTVRFLSKMFHPNVYADGSICLDILQNRWSPTYDVSSILTSIQSLLDEPNPNSPANSQAAQLYQENKREYEKRVSAIVEQSWNDS

SEQ ID NO: 829394 - protein, 139 aa, Homo sapiens
MSTPARRRLMRDFKRLQEDPPVGVSGAPSENNIMQWNAVIFGPEGTPFEDGTFKLVIEFSEEYPNKPPTVRFLSKMFHPNVYADGSICLDILQNRWSPTYDVSSILTSIQCLALLPRLECNGTILAHRNLCLPGSISAG

SEQ ID NO: 829395 - protein, 152 aa, Homo sapiens; identical to SEQ ID NO: 829382

SEQ ID NO: 829396 - protein, 86 aa, Homo sapiens
AQHLQGRPAPVPGPILSGQKPETRSWNWILHKLDHPSESRIAPGTHGEHSLHGCRINNGARKVEMDAYTWGIVSGRSVCVIKTCST

SEQ ID NO: 829397 - protein, 127 aa, Homo sapiens
RGVRRGIAASAVGGEPGGESLCFLSPQAQHLQGRPAPVPGPILSGQKPETRSWNWILHKLDHVSWARPEVEATAAGGGHLMILKDPINRGYKPGAGHQGGLSLWPDLVCLHQEGPAFHLQENMAAAE

SEQ ID NO: 829398 - protein, 366 aa, Homo sapiens
MSAANPETPNSTISREASTQSSSAAASQGWVLPEGKIVPNTVFVGGIDARMDETEIGSCFGRYGSVKEVKIITNRTGVSKGYGFVSFVNDVDVQKIVGSQIHFHGKKLKLGPAIRKQKLCARHVQPRPLVVNPPPPPQFQNVWRNPNTETYLQPQITPNPVTQHVQAYSAYPHSPGQVITGCQLLVYNYQEYPTYPDSAFQVTTGYQLPVYNYQPFPAYPSSPFQVTAGYQLPVYNYQAFPAYPSSPFQVTTGYQLPVYNYQAFPAYPSSPFQVTTGYQLPVYNYQAFPAYPSSPFQVTTGYQLPVYNYQAFPAYPNSAVQVTTGYQFHVYNYQMPPQCPVGEQRRNLWTEAYKWWYLVCLIQRRD

SEQ ID NO: 829399 - protein, 579 aa, Homo sapiens
MSAANPETPNSTISREASTQSSSAAASQGWVLPEGKIVPNTVFVGGIDARMDETEIGSCFGRYGSVKEVKIITNRTGVSKGYGFVSFVNDVDVQKIVGSQIHFHGKKLKLGPAIRKQKLCARHVQPRPLVVNPPPPPQFQNVWRNPNTETYLQPQITPNPVTQHVQSAANPETPNSTISREASTQSSSAAASQGWVLPEGKIVPNTVFVGGIDARMDETEIGSCFGRYGSVKEVKIITNRTGVSKGYGFVSFVNDVDVQKIVGSQIHFHGKKLKLGPAIRKQKLCARHVQPRPLVVNPPPPPQFQNVWRNPNTETYLQPQITPNPVTQHVQAYSAYPHSPGQVITGCQLLVYNYQEYPTYPDSAFQVTTGYQLPVYNYQPFPAYPRSPFQVTAGYQLPVYNYQAFPAYPNSPFQVATGYQFPVYNYQPFPAYPSSPFQVTAGYQLPVYNYQAFPAYPNSPFQVATGYQFPVYNYQAFPAYPNSPVQVTTGYQLPVYNYQAFPAYPSSPFQVTTGYQLPVYNYQAFPAYPNSAVQVTTGYQFHVYNYQMPPQCPVGEQRRNLWTEAYKWWYLVCLIQRRD

SEQ ID NO: 829400 - protein, 289 aa, Homo sapiens
MSAANPETPNSTISREASTQSSSAAASQGWVLPEGKIVPNTVFVGGIDARMDETEIGSCFGRYGSVKEVKIITNRTGVSKGYGFVSFVNDVDVQKIVGSQIHFHGKKLKLGPAIRKQKLCARHVQPRPLVVNPPPPPQFQNVWRNPNTETYLQPQITPNPVTQHVQSAANPETPNSTISREASTQSSSAAASQGWVLPEGKIVPNTVFVGGIDARMDETEIGSCFGRYGSVKEVKIITNRTGVSKGYGFVSFVNDVDVQKIVGVSNLIEKSLIYLIATTFSVSDTLGLV

SEQ ID NO: 829401 - protein, 549 aa, Homo sapiens
AQRHIGADLPLLSVGGQWCWPRSVMAGVVHVSLAAHCGACPWGRGRLRKGRAACKSAAQRHIGADLPLLSVGGQWCWPRSVMAGVVHVSLAALLLLPMAPAMHSDCIFKKEQAMCLEKIQRANELMGFNDSSPGCPGMWDNITCWKPAHVGEMVLVSCPELFRIFNPDQVWETETIGESDFGDSNSLDLSDMGVVSRNCTEDGWSEPFPHYFDACGFDEYESETGDQDYYYLSVKALYTVGYSTSLVTLTTAMVILCRFRKLHCTRNFIHMNLFVSFMLRAISVFIKDWILYAEQDSNHCFISTVECKAVMVFFHYCVVSNYFWLFIEGLYLFTLLVETFFPERRYFYWYTIIGWGTPTVCVTVWATLRLYFDDTGCWDMNDSTALWWVIKGPVVGSIMVNFVLFIGIIVILVQKLQSPDMGGNESSIYLRLARSTLLLIPLFGIHYTVFAFSPENVSKRERLVFELGLGSFQGFVVAVLYCFLNGEVQAEIKRKWRSWKVNRYFAVDFKHRHPSLASSGVNGGTQLSILSKSSSQIRMSGLPADNLAT

SEQ ID NO: 829402 - protein, 468 aa, Homo sapiens
MAGVVHVSLAALLLLPMAPAMHSDCIFKKEQAMCLEKIQRANELMGFNDSSPGCPGMWDNITCWKPAHVGEMVLVSCPELFRIFNPDQVWETETIGESDFGDSNSLDLSDMGVVSRNCTEDGWSEPFPHYFDACGFDEYESETGDQDYYYLSVKALYTVGYSTSLVTLTTAMVILCRFRKLHCTRNFIHMNLFVSFMLRAISVFIKDWILYAEQDSNHCFISTVECKAVMVFFHYCVVSNYFWLFIEGLYLFTLLVETFFPERRYFYWYTIIGWGTPTVCVTVWATLRLYFDDTGCWDMNDSTALWWVIKGPVVGSIMVNFVLFIGIIVILVQKLQSPDMGGNESSIYLRLARSTLLLIPLFGIHYTVFAFSPENVSKRERLVFELGLGSFQGFVVAVLYCFLNGEVQAEIKRKWRSWKVNRYFAVDFKHRHPSLASSGVNGGTQLSILSKSSSQIRMSGLPADNLAT

SEQ ID NO: 829403 - protein, 447 aa, Homo sapiens
MAGVVHVSLAALLLLPMAPAMHSDCIFKKEQAMCLEKIQRANELMGFNDSSPGCPGMWDNITCWKPAHVGEMVLVSCPELFRIFNPDQDMGVVSRNCTEDGWSEPFPHYFDACGFDEYESETGDQDYYYLSVKALYTVGYSTSLVTLTTAMVILCRFRKLHCTRNFIHMNLFVSFMLRAISVFIKDWILYAEQDSNHCFISTVECKAVMVFFHYCVVSNYFWLFIEGLYLFTLLVETFFPERRYFYWYTIIGWGTPTVCVTVWATLRLYFDDTGCWDMNDSTALWWVIKGPVVGSIMVNFVLFIGIIVILVQKLQSPDMGGNESSIYLRLARSTLLLIPLFGIHYTVFAFSPENVSKRERLVFELGLGSFQGFVVAVLYCFLNGEVQAEIKRKWRSWKVNRYFAVDFKHRHPSLASSGVNGGTQLSILSKSSSQIRMSGLPADNLAT

SEQ ID NO: 829404 - protein, 270 aa, Homo sapiens
MRSPRIAQKIKGPPRSRVRRIAAGTKPERGAALPVVAAVPGLGPARLPAQAPAPALAQAVAPALPQHPAAQEAPAPPAAPALAALLALQVLLGADTTTGGAPAPNPNHLKEMNKERKRRSPSPKPTKVHIGRLTRNVTKDHIMEIFSTYGKIKMIDMPVERMHPHLSKGYAYVEFENPDEAEKALKHMDGGQIDGQEITATAVLAPWPRPPPRRFSPPRRMLPPPPMWRRSPPRMRRRSRSPRRRSPVRRRSRSPGRRRHRSRSSSNSSR

SEQ ID NO: 829405 - protein, 150 aa, Homo sapiens
MDLSGVKKKSLLGVKENNKKSSTRAPSPTKRKDRSDEKSKDRSKDKGATKESSEKDRGRDKTRKRRSASSGSSSTRSRSSSTSSSGSSTSTGSSSGSSSSSASSRSGSSSTSRSSSSSSSSGSPSPSRRRHDNRRRSRSKSKPPSSAYPM

SEQ ID NO: 829406 - protein, 270 aa, Homo sapiens; identical to SEQ ID NO: 829404

SEQ ID NO: 829407 - protein, 270 aa, Homo sapiens; identical to SEQ ID NO: 829404

SEQ ID NO: 829408 - protein, 270 aa, Homo sapiens; identical to SEQ ID NO: 829404

SEQ ID NO: 829409 - protein, 270 aa, Homo sapiens; identical to SEQ ID NO: 829404

SEQ ID NO: 829410 - protein, 270 aa, Homo sapiens; identical to SEQ ID NO: 829404

SEQ ID NO: 829411 - protein, 270 aa, Homo sapiens; identical to SEQ ID NO: 829404

SEQ ID NO: 829412 - protein, 270 aa, Homo sapiens; identical to SEQ ID NO: 829404

SEQ ID NO: 829413 - protein, 398 aa, Homo sapiens
RQAEGKVEDDDPGTGLKRKSALGAAGWAHQEPGGSALEGLKRKSALGAAGWAHQEPGGSPASAAEESRRRWRRREDVSWGGIRLHPCFGGCPAGPAGRLVKPVHSSAPQCAVAWQRGLLHLPNAKTAQMRSPRIAQKIKGPPRSRVRRIAAGTKPERGAALPVVAAVPGLGPARLPAQAPAPALAQAVAPALPQHPAAQEAPAPPAAPALAALLALQVLLGADTTTGGAPAPNPNHLKEMNKERKRRSPSPKPTKVHIGRLTRNVTKDHIMEIFSTYGKIKMIDMPVERMHPHLSKGYAYVEFENPDEAEKALKHMDGGQIDGQEITATAVLAPWPRPPPRRFSPPRRMLPPPPMWRRSPPRMRRRSRSPRRRSPVRRRSRSPGRRRHRSRSSSNSSR

SEQ ID NO: 829414 - protein, 300 aa, Homo sapiens
HEGERGGGKQEEVAAAGRWLLHLPNAKTAQMRSPRIAQKIKGPPRSRVRRIAAGTKPERGAALPVVAAVPGLGPARLPAQAPAPALAQAVAPALPQHPAAQEAPAPPAAPALAALLALQVLLGADTTTGGAPAPNPNHLKEMNKERKRRSPSPKPTKVHIGRLTRNVTKDHIMEIFSTYGKIKMIDMPVERMHPHLSKGYAYVEFENPDEAEKALKHMDGGQIDGQEITATAVLAPWPRPPPRRFSPPRRMLPPPPMWRRSPPRMRRRSRSPRRRSPVRRRSRSPGRRRHRSRSSSNSSR

SEQ ID NO: 829415 - protein, 270 aa, Homo sapiens; identical to SEQ ID NO: 829404

SEQ ID NO: 829416 - protein, 159 aa, Homo sapiens
MNKERKRRSPSPKPTKVHIGRLTRNVTKDHIMEIFSTYGKIKMIDMPVERMHPHLSKGYAYVEFENPDEAEKALKHMDGGQIDGQEITATAVLAPWPRPPPRRFSPPRRMLPPPPMWRRSPPRMRRRSRSPRRRSPVRRRSRSPGRRRHRSRSSSNSSR

SEQ ID NO: 829417 - protein, 276 aa, Homo sapiens
MSKVSLDKMEGAAIGRIEMHESDRRVAGHKLGSDGAGSSSDSNIDHGLGPARLPAQAPAPALAQAVAPALPQHPAAQEAPAPPAAPALAALLALQVLLGADTTTGGAPAPNPNHLKEMNKERKRRSPSPKPTKVHIGRLTRNVTKDHIMEIFSTYGKIKMIDMPVERMHPHLSKGYAYVEFENPDEAEKALKHMDGGQIDGQEITATAVLAPWPRPPPRRFSPPRRMLPPPPMWRRSPPRMRRRSRSPRRRSPVRRRSRSPGRRRHRSRSSSNSSR

SEQ ID NO: 829418 - protein, 232 aa, Homo sapiens
MAYEHFQTAEVSRSDHALAQAVAPALPQHPAAQEAPAPPAAPALAALLALQVLLGADTTTGGAPAPNPNHLKEMNKERKRRSPSPKPTKVHIGRLTRNVTKDHIMEIFSTYGKIKMIDMPVERMHPHLSKGYAYVEFENPDEAEKALKHMDGGQIDGQEITATAVLAPWPRPPPRRFSPPRRMLPPPPMWRRSPPRMRRRSRSPRRRSPVRRRSRSPGRRRHRSRSSSNSSR

SEQ ID NO: 829419 - protein, 270 aa, Homo sapiens; identical to SEQ ID NO: 829404

SEQ ID NO: 829420 - protein, 147 aa, Homo sapiens
MGSKVHIGRLTRNVTKDHIMEIFSTYGKIKMIDMPVERMHPHLSKGYAYVEFENPDEAEKALKHMDGGQIDGQEITATAVLAPWPRPPPRRFSPPRRMLPPPPMWRRSPPRMRRRSRSPRRRSPVRRRSRSPGRRRHRSRSSSNSSR

SEQ ID NO: 829421 - protein, 117 aa, Homo sapiens
MIDMPVERMHPHLSKGYAYVEFENPDEAEKALKHMDGGQIDGQEITATAVLAPWPRPPPRRFSPPRRMLPPPPMWRRSPPRMRRRSRSPRRRSPVRRRSRSPGRRRHRSRSSSNSSR

SEQ ID NO: 829422 - protein, 104 aa, Homo sapiens
DAWVGRVGRPTRPDEAEKALKHMDGQIDGQEITATAVLAPWPRPPPRRFSPPRRMLPPPPMWRRSPPRMRRRSRSPRRRSPVRRRSRSPGRRRHRSRSSSNSSR

SEQ ID NO: 829423 - protein, 265 aa, Homo sapiens
MRSPRIAQKIKGPPRSRVRRIAAGTKPERGAALPVVAAVPGLGPARLPAQAPAPALAQAVAPALPQHPAAQEAPAPPAAPALAALLALQVLLGADTTTGGAPAPNPNHLKEMNKERKRRSPSPKPTKVHIGRLTRNVTKDHIMEIFSTYGKIKMIDMPVERMHPHLSKGYAYVEFENPDEAEKALKHMDGGQIDGQEITATAVLAPWPRPPPRRFSPPRRMLPPPPMWRRSPPRMRRRSRSPRRRSPVRRRSRSPGRKTVSSILP

SEQ ID NO: 829424 - protein, 281 aa, Homo sapiens
MRSPRIAQKIKGPPRSRVRRIAAGTKPERGAALPVVAAVPGLGPARLPAQAPAPALAQAVAPALPQHPAAQEAPAPPAAPALAALLALQVLLGADTTTGGAPAPNPNHLKEMNKERKRRSPSPKPTKVHIGRLTRNVTKDHIMEIFSTYGKIKMIDMPVERMHPHLSKGYAYVEFENPDEAEKALKHMDGGQIDGQEITATAVLAPWPRPPPRRFSPPRRMLPPPPMWRRSPPRMRRRSRSPRRRSPVRRRSRSPGRKPRVHRIELLVADSITITGNIMFP

SEQ ID NO: 829425 - protein, 272 aa, Homo sapiens
MRSPRIAQKIKGPPRSRVRRIAAGTKPERGAALPVVAAVPGLGPARLPAQAPAPALAQAVAPALPQHPAAQEAPAPPAAPALAALLALQVLLGADTTTGGAPAPNPNHLKEMNKERKRRSPSPKPTKVHIGRLTRNVTKDHIMEIFSTYGKIKMIDMPVERMHPHLSKGYAYVEFENPDEAEKALKHMDGDKLMAGDHWHDVKARARHPRRSASQGNVNNASGRSPHDKKSRTEAVPARNTARATTERQTLKREPAIPHSCCRTETAERNTS

SEQ ID NO: 829426 - protein, 158 aa, Homo sapiens
MDLSGVKKKSLLGVKENNKKSSTRAPSPTKRKDRSDEKSKDRSKDKGATKESSEKDRGRDKTRKRRSASSGSSSTRSRSSSTSSSGSSTSTGSSSGSSSSSASSRSGSSSTSRSSSSSSSSGSPSPSRRRHDNRRRSRSKSKPPKRDEQGEEKAEPIS

SEQ ID NO: 829427 - protein, 210 aa, Homo sapiens
RQAEGKVEDDDPGTGLKRKSALGAAGWAHQEPGGSALEGLKRKLRWELQAGPIRSLGARRPRRLRKAGGGGGGGKMAPSPTKRKDRSDEKSKDRSKDKGATKESSEKDRGRDKTRKRRSASSGSSSTRSRSSSTSSSGSSTSTGSSSGSSSSSASSRSGSSSTSRSSSSSSSSGSPSPSRRRHDNRRRSRSKSKPPKRDEQGEEKAEPIS

SEQ ID NO: 829428 - protein, 101 aa, Homo sapiens
LCSCVLCMRVCCVCMCVLCAVFMCVLCVRVLCACVCCVCVCAVCAVFVCAVFAVCAVCACVCCVFVCVLCASVCAVCACVRVCVLCVCVCAVCSSVCCSVL

SEQ ID NO: 829429 - protein, 167 aa, Homo sapiens
VVGAAADGRAPVLRPLGGGPARPAGLRPAGSAASALGALPPGRRPKPPTPGPALEALAARRLDGGVVSERGRVAARSACRAGVGGRGVSLWDAVEGRPIPPSESLIQTCTRERFPDSRVQLSALGRGDTAHYGPSTVAELSLMGYPRGADTGRLSLLEEKRGVGFLS

SEQ ID NO: 829430 - protein, 244 aa, Homo sapiens
MRSPRIAQKIKGPPRSRVRRIAAGTKPERGAALPVVAAVPGLGPARLPAQAPAPALAQAVAPALPQHPAAQEAPAPPAAPALAALLALQVLLGADTTTGGAPAPNPNHLKEMNKERKRRSPSPKPTKVHIGRLTRNVTKDHIMEIFSTYGKIKMIDMPVERMHPHLSKGYAYVEFENPDEAEKALKHMDGANWWPENKWQRAGGHWAKHPKENSPPGKWHHRYERSPGKRRAPGEPGRNKKPRT

SEQ ID NO: 829431 - protein, 114 aa, Homo sapiens
MDLSGVKKKSLLGVKENNKKSSTRAPSPTKRKDRSDEKSKDRSKDKGATKESSEKDRGRDKTRKRRSASSGSSSTRWGGLAWSLERTCATATPPLPTDGSVFLIIYKENTSSDC

SEQ ID NO: 829432 - protein, 270 aa, Homo sapiens; identical to SEQ ID NO: 829404

SEQ ID NO: 829433 - protein, 270 aa, Homo sapiens; identical to SEQ ID NO: 829404

SEQ ID NO: 829434 - protein, 270 aa, Homo sapiens; identical to SEQ ID NO: 829404

SEQ ID NO: 829435 - protein, 270 aa, Homo sapiens; identical to SEQ ID NO: 829404

SEQ ID NO: 829436 - protein, 270 aa, Homo sapiens; identical to SEQ ID NO: 829404

SEQ ID NO: 829437 - protein, 270 aa, Homo sapiens; identical to SEQ ID NO: 829404

SEQ ID NO: 829438 - protein, 348 aa, Homo sapiens
VVGGRCGRKGACASSARRWPSQARGTQTSGERGLRPWGPPAGPETQAPNARPCPGSARGPAPGRGSWLLHLPNAKTAQMRSPRIAQKIKGPPRSRVRRIAAGTKPERGAALPVVAAVPGLGPARLPAQAPAPALAQAVAPALPQHPAAQEAPAPPAAPALAALLALQVLLGADTTTGGAPAPNPNHLKEMNKERKRRSPSPKPTKVHIGRLTRNVTKDHIMEIFSTYGKIKMIDMPVERMHPHLSKGYAYVEFENPDEAEKALKHMDGGQIDGQEITATAVLAPWPRPPPRRFSPPRRMLPPPPMWRRSPPRMRRRSRSPRRRSPVRRRSRSPGRRRHRSRSSSNSSR

SEQ ID NO: 829439 - protein, 270 aa, Homo sapiens; identical to SEQ ID NO: 829404

SEQ ID NO: 829440 - protein, 159 aa, Homo sapiens; identical to SEQ ID NO: 829416

SEQ ID NO: 829441 - protein, 239 aa, Homo sapiens
MRSPRIAQKIKGPPRSRVRRIAAGTKPERGAALPQHPAAQEAPAPPAAPALAALLALQVLLGADTTTGGAPAPNPNHLKEMNKERKRRSPSPKPTKVHIGRLTRNVTKDHIMEIFSTYGKIKMIDMPVERMHPHLSKGYAYVEFENPDEAEKALKHMDGGQIDGQEITATAVLAPWPRPPPRRFSPPRRMLPPPPMWRRSPPRMRRRSRSPRRRSPVRRRSRSPGRRRHRSRSSSNSSR

SEQ ID NO: 829442 - protein, 159 aa, Homo sapiens; identical to SEQ ID NO: 829416

SEQ ID NO: 829443 - protein, 270 aa, Homo sapiens; identical to SEQ ID NO: 829404

SEQ ID NO: 829444 - protein, 245 aa, Homo sapiens
MRSPRIAQKIKGPPRSRVRRIAAGTKPERGAALPVVAAVPGLGPARLPAQAPAPALAQAVAPALPQHPAAQEAPAPPAAPALAALLALQVLLGADTTTGGAPAPNPNHLKEMNKERKRRSPSPKPTKVHIGRLTRNVTKDHIMEIFSTYGKIKMIDMPVERMHPHLSKGYAYVEFENPDEAEKALKHMDGGPAPRGAGPPCAGDHGPRAAAATGAAPAPTPPDKQATEALAPVTYTPPSSVLSLF

SEQ ID NO: 829445 - protein, 270 aa, Homo sapiens; identical to SEQ ID NO: 829404

SEQ ID NO: 829446 - protein, 265 aa, Homo sapiens; identical to SEQ ID NO: 829423

SEQ ID NO: 829447 - protein, 244 aa, Homo sapiens; identical to SEQ ID NO: 829430

SEQ ID NO: 829448 - protein, 158 aa, Homo sapiens; identical to SEQ ID NO: 829426

SEQ ID NO: 829449 - protein, 167 aa, Homo sapiens; identical to SEQ ID NO: 829429

SEQ ID NO: 829450 - protein, 114 aa, Homo sapiens; identical to SEQ ID NO: 829431

SEQ ID NO: 829451 - protein, 411 aa, Homo sapiens
MATTATMATSGSARKRLLKEEDMTKVEFETSEEVDVTPTFDTMGLREDLLRGIYAYGFEKPSAIQQRAIKQIIKGRDVIAQSQSGTGKTATFSISVLQCLDIQVRETQALILAPTRELAVQIQKGLLALGDYMNVQCHACIGGTNVGEDIRKLDYGQHVVAGTPGRVFDMIRRRSLRTRAIKMLVLDEADEMLNKGFKEQIYDVYRYLPPATQVVLISATLPHEILEMTNKFMTDPIRILVKRDELTLEGIKQFFVAVEREEWKFDTLCDLYDTLTITQAVIFCNTKRKVDWLTEKMREANFTVSSMHGDMPQKERESIMKEFRSGASRVLISTDVWARGLDVPQVSLIINYDLPNNRELYIHRIGRSGRYGRKGVAINFVKNDDIRILRDIEQYYSTQIDEMPMNVADLI

SEQ ID NO: 829452 - protein, 411 aa, Homo sapiens; identical to SEQ ID NO: 829451

SEQ ID NO: 829453 - protein, 411 aa, Homo sapiens; identical to SEQ ID NO: 829451

SEQ ID NO: 829454 - protein, 411 aa, Homo sapiens; identical to SEQ ID NO: 829451

SEQ ID NO: 829455 - protein, 411 aa, Homo sapiens; identical to SEQ ID NO: 829451

SEQ ID NO: 829456 - protein, 411 aa, Homo sapiens; identical to SEQ ID NO: 829451

SEQ ID NO: 829457 - protein, 301 aa, Homo sapiens
MATTATMATSGSARKRLLKEEDMTKVEFETSEEVDVTPTFDTMGLREDLLRGIYAYGFEKPSAIQQRAIKQIIKGRDVIAQSQSGTGKTATFSISVLQCLDIQVRETQALILAPTRELAVQIQKGLLALGDYMNVQCHACIGGTNVGEDIRKLDYGQHVVAGTPGRVFDMIRRRSLRTRAIKMLVLDEADEMLNKGFKEQIYDVYRYLPPATQVVLISATLPHEILEMTNKFMTDPIRILVKRDELTLEGIKQFFVAVEREEWKFDTLCDLYDTLTITQAVIFCNTKRKMETCPRKSGSPS

SEQ ID NO: 829458 - protein, 213 aa, Homo sapiens
MATTATMATSGSARKRLLKEEDMTKVEFETSEEVDVTPTFDTMGLREDLLRGIYAYGFEKPSAIQQRAIKQIIKGRDVIAQSQSGTGKTATFSISVLQCLDIQVRETQALILAPTRELAVQIQKGLLALGDYMNVQCHACIGGTNVGEDIRKLDYGQHVVAGTPGRVFDMIRRRSLRTRAIVSKSRFTMYTGTCLQPHRWFSSVPRCHTRFWR

SEQ ID NO: 829459 - protein, 279 aa, Homo sapiens
MNVQCHACIGGTNVGEDIRKLDYGQHVVAGTPGRVFDMIRRRSLRTRAIKMLVLDEADEMLNKGFKEQIYDVYRYLPPATQVVLISATLPHEILEMTNKFMTDPIRILVKRDELTLEGIKQFFVAVEREEWKFDTLCDLYDTLTITQAVIFCNTKRKVDWLTEKMREANFTVSSMHGDMPQKERESIMKEFRSGASRVLISTDVWARGLDVPQVSLIINYDLPNNRELYIHRIGRSGRYGRKGVAINFVKNDDIRILRDIEQYYSTQIDEMPMNVADLI

SEQ ID NO: 829460 - protein, 243 aa, Homo sapiens [sequence omitted]

SEQ ID NO: 829461 - protein, 228 aa, Homo sapiens
MEACVTEVVIGWRTGLGLLGLHQISRCDLFHQGLPGSWLGPPSSPRRKDEYVTGFVFAFSDELTLEGIKQFFVAVEREEWKFDTLCDLYDTLTITQAVIFCNTKRKVDWLTEKMREANFTVSSMHGDMPQKERESIMKEFRSGASRVLISTDVWARGLDVPQVSLIINYDLPNNRELYIHRIGRSGRYGRKGVAINFVKNDDIRILRDIEQYYSTQIDEMPMNVADLI

SEQ ID NO: 829462 - protein, 182 aa, Homo sapiens
NPLPSPNPPHLVKRDELTLEGIKQFFVAVEREEWKFDTLCDLYDTLTITQAVIFCNTKRKVDWLTEKMREANFTVSSMHGDMPQKERESIMKEFRSGASRVLISTDVWARGLDVPQVSLIINYDLPNNRELYIHRIGRSGRYGRKGVAINFVKNDDIRILRDIEQYYSTQIDEMPMNVADLI

SEQ ID NO: 829463 - protein, 411 aa, Homo sapiens; identical to SEQ ID NO: 829451

SEQ ID NO: 829464 - protein, 411 aa, Homo sapiens; identical to SEQ ID NO: 829451

SEQ ID NO: 829465 - protein, 411 aa, Homo sapiens; identical to SEQ ID NO: 829451

SEQ ID NO: 829466 - protein, 279 aa, Homo sapiens; identical to SEQ ID NO: 829459

SEQ ID NO: 829467 - protein, 390 aa, Homo sapiens
MATTATMATSGSARKRLLKEEDMTKVEFETSEEVDVTPTFDTMGLREDLLRGIYAYGFEKPSAIQQRAIKQIIKGRDVIAQSQSGTGKTATFSISVLQCLDIQGLLALGDYMNVQCHACIGGTNVGEDIRKLDYGQHVVAGTPGRVFDMIRRRSLRTRAIKMLVLDEADEMLNKGFKEQIYDVYRYLPPATQVVLISATLPHEILEMTNKFMTDPIRILVKRDELTLEGIKQFFVAVEREEWKFDTLCDLYDTLTITQAVIFCNTKRKVDWLTEKMREANFTVSSMHGDMPQKERESIMKEFRSGASRVLISTDVWARGLDVPQVSLIINYDLPNNRELYIHRIGRSGRYGRKGVAINFVKNDDIRILRDIEQYYSTQIDEMPMNVADLI

SEQ ID NO: 829468 - protein, 223 aa, Homo sapiens
PTRRPRVRFKEQIYDVYRYLPPATQVVLISATLPHEILEMTNKFMTDPIRILVKRDELTLEGIKQFFVAVEREEWKFDTLCDLYDTLTITQAVIFCNTKRKVDWLTEKMREANFTVSSMHGDMPQKERESIMKEFRSGASRVLISTDVWARGLDVPQVSLIINYDLPNNRELYIHRIGRSGRYGRKGVAINFVKNDDIRILRDIEQYYSTQIDEMPMNVADLI

SEQ ID NO: 829469 - protein, 257 aa, Homo sapiens
MATTATMATSGSARKRLLKEEDMTKVEFETSEEVDVTPTFDTMGLREDLLRGIYAYGFEKPSAIQQRAIKQIIKGRDVIAQSQSGTGKTATFSISVLQCLDIQVRETQALILAPTRELAVQIQKGLLALGDYMNVQCHACIGGTNVGEDIRKLDYGQHVVAGTPGRVFDLIRRRSLRDTGYTKVVRMYVSNGALQGSTEQNYPYNRDRAHGNPGGTNKGTLTPKTGNAPQSRTGPTATAHSTMHSRQQRSEANTENT

SEQ ID NO: 829470 - protein, 197 aa, Homo sapiens
MFGCLVAGRLVQTAAQQVAEDKFVFDLPDYESINHVVVFMLGTIPFPEGMGGSVYFSYPDSNGMPVWQLLGFVTNGKPSAIFKISGLKSGEGSQHPFGAMNIVRTPSVAQIGISVELLDSMAQQTPVGNAAVSSVDSFTQFTQKMLDNFYNFASSFAVSQAQMTPSPSEMFIPANVVLKWYENFQRRLAQNPLFWKT

SEQ ID NO: 829471 - protein, 204 aa, Homo sapiens
MFGCLVAGRLVQTAAQQVAEDKFVFDLPDYESINHVVVFMLGTIPFPEGMGGSVYFSYPDSNGMPVWQLLGFVTNGKPSAIFKISGLKSGEGSQHPFGAMNIVRTPSVAQIGISVELLDSMAQQTPVGNAAVSSVDSFTQFTQKMLDNFYNFASSFAVSQAQMTPSPSEMFIPANVVLKWYLNFTTTRQNLHTTTNICINLLYR

SEQ ID NO: 829472 - protein, 194 aa, Homo sapiens
MFGCLVAGRLVQTAAQQVAEDKFVFDLPDYESINHVVVFMLGTIPFPEGMGGSVYFSYPDSNGMPVWQLLGFVTNGKPSAIFKISGLKSGEGSQHPFGAMNIVRTPSVAQIGISVELLDSMAQQTPVGNAAVSSVDSFTQFTQKMLDNFYNFASSFAVSQAQMTPSPSEMFIPANVVLKWYEAFSVSNIKAFYN

SEQ ID NO: 829473 - protein, 179 aa, Homo sapiens
MFGCLVAGRLVQTAAQQVAEDKFVFDLPDYESINHVVVFMLGTIPFPEGMGGSVYFSYPDSNGMPVWQLLGFVTNGKPSAIFKISGLKSGEGSQHPFGAMNIVRTPSVAQIGISVELLDSMAQQTPVGNAAVSSVDSFTQFTQKMLDNFYNFASSFAVSQAQMTPSPSEMFIPANVVLK

SEQ ID NO: 829474 - protein, 179 aa, Homo sapiens; identical to SEQ ID NO: 829473

SEQ ID NO: 829475 - protein, 148 aa, Homo sapiens
MGGSVYFSYPDSNGMPVWQLLGFVTNGKPSAIFKISGLKSGEGSQHPFGAMNIVRTPSVAQIGISVELLDSMAQQTPVGNAAVSSVDSFTQFTQKMLDNFYNFASSFAVSQAQMTPSPSEMFIPANVVLKWYENFQRRLAQNPLFWKT

SEQ ID NO: 829476 - protein, 148 aa, Homo sapiens; identical to SEQ ID NO: 829475

SEQ ID NO: 829477 - protein, 109 aa, Homo sapiens
MFGCLVAGRLVQTAAQQVAEDKFVFDLPDYESINHVVVFMLGTIPFPEGMGGSVYFSYPDSNGMPVWQLLGFVTNGKPSAIFKISGLKSETGSYSVFQAGVQCPHYSSL

SEQ ID NO: 829478 - protein, 156 aa, Homo sapiens
MFGCLVAGRLVQTAAQQVAEDKFVFDLPDYESINHVVVFMLGTIPFPEGMGGSVYFSYPDSNGMPVWQLLGFVTNGKPSAIFKISGLKSGEGSQHPFGAMNIVRTPSVAQIGISVELLDSMAQQTPVGNAAVSSVDSFTQVKDFLEMVTILYEKIG

SEQ ID NO: 829479 - protein, 197 aa, Homo sapiens; identical to SEQ ID NO: 829470

SEQ ID NO: 829480 - protein, 194 aa, Homo sapiens; identical to SEQ ID NO: 829472

SEQ ID NO: 829481 - protein, 192 aa, Homo sapiens
MFGCLVAGRLVQTAAQQVAEDKFVFDLPDYESINHVVVFMLGTIPFPEGMGGSVYFSYPDSNGMPVWQLLGFVTNGKPSAIFKISGLKSGEGSQHPFGAMNIVRTPSVAQIGISVELLDSMAQQTPVGNAAVSSVDSFTQFTQKMLDNFYNFASSFAVSQAQMTPSPSEMFIPANVVLKCILEMGGCLGRVC

SEQ ID NO: 829482 - protein, 106 aa, Homo sapiens [sequence omitted]

SEQ ID NO: 829483 - protein, 148 aa, Homo sapiens; identical to SEQ ID NO: 829475

SEQ ID NO: 829484 - protein, 183 aa, Homo sapiens
MFGCLVAGRLVQTAAQQVAEDKFVFDLPDYESINHVVVFMLGTIPFPEGMGGSVYFSYPDSNGMPVWQLLGFVTNGKPSAIFKISGLKSGEGSQHPFGAMNIVRTPSVAQIGISVELLDSMAQQTPFTQKMLDNFYNFASSFAVSQAQMTPSPSEMFIPANVVLKWYENFQRRLAQNPLFWKT

SEQ ID NO: 829485 - protein, 887 aa, Homo sapiens
GAYHKHLMELALQQTYQDTCNCIKSRIKLEFEKRQQERLLLSLLPAHIAMEMKAEIIQRLQGPKAGQMENTNNFHNLYVKRHTNVSILYADIVGFTRLASDCSPGELVHMLNELFGKFDQIAKENECMRIKILGDCYYCVSGLPISLPNHAKNCVKMGLDMCEAIKKVRDATGVDINMRVGVHSGNVLCGVIGLQKWQYDVWSHDVTLANHMEAGGVPGRVHISSVTLEHLNGAYKVEEGDGDIRDPYLKQHLVKTYFVINPKGERRSPQHLFRPRHTLDGAKMRASVRMTRYLESWGAAKPFAHLHHRDSMTTENGKISTTDVPMGQHNFQNRTLRTKSQKKRFEEELNERMIQAIDGINAQKQWLKSEDIQRISLLFYNKVLEKEYRATALPAFKYYVTCACLIFFCIFIVQILVLPKTSVLGISFGAAFLLLAFILFVCFAGQLLQCSKKASPLLMWLLKSSGIIANRPWPRISLTIITTAIILMMAVFNMFFLSDSEETIPPTANTTNTSFSASNNQVAILRAQNLFFLPYFIYSCILGLISCSVFLRVNYELKMLIMMVALVGYNTILLHTHAHVLGDYSQVLFERPGIWKDLKTMGSVSLSIFFITLLVLGRQNEYYCRLDFLWKNKFKKEREEIETMENLNRVLLENVLPAHVAEHFLARSLKNEELYHQSYDCVCVMFASIPDFKEFYTESDVNKEGLECLRLLNEIIADFDDLLSKPKFSGVEKIKTIGSTYMAATGLSAVPSQEHSQEPERQYMHIGTMVEFAFALVGKLDAINKHSFNDFKLRVGINHGPVIAGVIGAQKPQYDIWGNTVNVASRMDSTGVLDKIQVTEETSLVLQTLGYTCTCRGIINVKGKGDLKTYFVNTEMSRSLSQSNVAS

SEQ ID NO: 829486 - protein, 887 aa, Homo sapiens; identical to SEQ ID NO: 829485

SEQ ID NO: 829487 - protein, 244 aa, Homo sapiens [sequence omitted]

SEQ ID NO: 829488 - protein, 208 aa, Homo sapiens
MSSKVSRDTLYEAVREVLHGNQRKRRKFLETVELQISLKNYDPQKDKRFSDPVAYRLVSDVCPDRSATCTVPSQEHSQEPERQYMHIGTMVEFAFALVGKLDAINKHSFNDFKLRVGINHGPVIAGVIGAQKPQYDIWGNTVNVASRMDSTGVLDKIQVTEETSLVLQTLGYTCTCRGIINVKGKGDLKTYFVNTEMSRSLSQSNVAS

SEQ ID NO: 829489 - protein, 632 aa, Homo sapiens
GAYHKHLMELALQQTYQDTCNCIKSRIKLEFEKRQQERLLLSLLPAHIAMEMKAEIIQRLQGPKAGQMENTNNFHNLYVKRHTNVSILYADIVGFTRLASDCSPGELVHMLNELFGKFDQIAKENECMRIKILGDCYYCVSGLPISLPNHAKNCVKMGLDMCEAIKKVRDATGVDINMRVGVHSGNVLCGVIGLQKWQYDVWSHDVTLANHMEAGGVPGRVHISSVTLEHLNGAYKVEEGDGDIRDPYLKQHLVKTYFVINPKGERRSPQHLFRPRHTLDGAKMRASVRMTRYLESWGAAKPFAHLHHRDSMTTENGKISTTDVPMGQHNFQNRTLRTKSQKKRFEEELNERMIQAIDGINAQKQWLKSEDIQRISLLFYNKVLEKEYRATALPAFKYYVTCACLIFFCIFIVQILVLPKTSVLGISFGAAFLLLAFILFVCFAGQLLQCSKKASPLLMWLLKSSGIIANRPWPRISLTIITTAIILMMAVFNMFFLSDSEETIPPTANTTNTSFSASNNQVAILRAQNLFFLPYFIYSCILGLISCSVFLRVNYELKMLIMMVALVGYNTILLHTHAHVLGDYSQVLFERPGIWKDLKTMGSVSLSIFFITLLVLGRQVRSLFIYMYVYLL

SEQ ID NO: 829490 - protein, 449 aa, Homo sapiens
LASSKLPLHPPLFLRKTQDLGDGPGIWKDLKTMGSVSLSIFFITLLVLGRQHMHIITVRFSTSFMAQHTNIHTHKQRAGSISSTHGQHTCTPALLARQQRCYPSDTWTEATSLAPGSHAQQCRQLIPTQLLMHMAVPAIHSISTSTSPGISQQHIFSSPAHTAQMQRRAGASGTMPYRSILSNGSIAIDIGTYKEWPSLSISHKATTTSQAGKISTHKACNSNPIEAQGKHHQWGKDPHKGSLADGPGGTNRTTRTPPSHQEARPLQDETQTTEWRTHFRAATHMGQWQESQDLSGTRTKISGDNAMEHVTKIQQTTRPIVPVSPTGTAYHPRSAPPQAAGSNIHSRPQWEETAPGGTIEDLGDGAADTLGRTKPLNQQSDSPPHADRRTTSQEESARPTHDGVPQTGTAPPTTQERTPAQTLESPEDNRNSHHAHTSHREKRQDKSIN

SEQ ID NO: 829491 - protein, 869 aa, Homo sapiens
GAYHKHLMELALQQTYQDTCNCIKSRIKLEFEKRQQERLLLSLLPAHIAMEMKAEIIQRLQGPKAGQMENTNNFHNLYVKRHTNVSILYADIVGFTRLASDCSPGELVHMLNELFGKFDQIAKENECMRIKILGDCYYCVSGLPISLPNHAKNCVKMGLDMCEAIKKVRDATGVDINMRVGVHSGNVLCGVIGLQKWQYDVWSHDVTLANHMEAGGVPGRVHISSVTLEHLNGAYKVEEGDGDIRDPYLKQHLVKTYFVINPKGERRSPQHLFRPRHTLDGAKMRASVRMTRYLESWGAAKPFAHLHHRDSMTTENGKISTTDVPMGQHNFQNRTLRTKSQKKRFEEELNERMIQAIDGINAQKQWLKSEDIQRISLLFYNKVLEKEYRATALPAFKYYVTCACLIFFCIFIVQILVLPKTSVLGISFGAAFLLLAFILFVCFAGQLLQCSKKASPLLMWLLKSSGIIANRPWPRISLTIITTAIILMMAVFNMFFLSDSEETIPPTANTTNTSFSASNNQVAILRAQNLFFLPYFIYSCILGLISCSVFLRVNYELKMLIMMVALVGYNTILLHTHAHVLGDYSQVLFERPGIWKDLKTMGSVSLSIFFITLLVLGRQNEYYCRLDFLWKNKFKKEREEIETMENLNRVLLENVLPAHVAEHFLARSLKNEELYHQSYDCVCVMFASIPDFKEFYTESDVNKEGLECLRLLNEIIADFDDLLSKPKFSGAVPSQEHSQEPERQYMHIGTMVEFAFALVGKLDAINKHSFNDFKLRVGINHGPVIAGVIGAQKPQYDIWGNTVNVASRMDSTGVLDKIQVTEETSLVLQTLGYTCTCRGIINVKGKGDLKTYFVNTEMSRSLSQSNVAS

SEQ ID NO: 829492 - protein, 887 aa, Homo sapiens; identical to SEQ ID NO: 829485

SEQ ID NO: 829493 - protein, 285 aa, Homo sapiens
MPAATVDHSQRICEVWACNLDEEMKKIRQVIRKYNYVAMDTEFPGVVARPIGEFRSNADYQYQLLRCNVDLLKIIQLGLTFMNEQGEYPPGTSTWQFNFKFNLTEDMYAQDSIELLTTSGIQFKKHEEEGIETQYFAELLMTSGVVLCEGVKWLSFHSGYDFGYLIKILTNSNLPEEELDFFEILRLFFPVIYDVKYLMKSCKNLKGGLQEVAEQLELERIGPQHQAGSDSLLTGMAFFKMREMFFEDHIDDAKYCGHLYGLGSGSSYVQNGTGNAYEEEANKQS

SEQ ID NO: 829494 - protein, 285 aa, Homo sapiens; identical to SEQ ID NO: 829493

SEQ ID NO: 829495 - protein, 244 aa, Homo sapiens
MPAATVDHSQRICEVWACNLDEEMKKIRQVIRKYNYVAMDTEFPGVVARPIGEFRSNADYQYQLLRCNVDLLKIIQLGLTFMNEQGEYPPGTSTWQFNFKFNLTEDMYAQDSIELLTTSGIQFKKHEEEGIETQYFAELLMTSGVVLCEGVKWLSFHSGYDFGYLIKILTNSNLPEEELDFFEILRLFFPVIYDVKYLMKSCKNLKGGLQEVAEQLELERIGPQHQAGSDSLLTGMAFFKMREV

SEQ ID NO: 829496 - protein, 285 aa, Homo sapiens; identical to SEQ ID NO: 829493

SEQ ID NO: 829497 - protein, 285 aa, Homo sapiens; identical to SEQ ID NO: 829493

SEQ ID NO: 829498 - protein, 285 aa, Homo sapiens; identical to SEQ ID NO: 829493

SEQ ID NO: 829499 - protein, 244 aa, Homo sapiens
MPAATVDHSQRICEVWACNLDEEMKKIRQVIRKYNYVAMDTEFPGVVARPIGEFRSNADYQYQLLRCNVDLLKIIQLGLTFMNEQGEYPPGTSTWQFNFKFNLTEDMYAQDSIELLTTSGIQFKKHEEEGIETQYFAELLMTSGVVLCEGVKWLSFHSGYDFGYLIKILTNSNLPEEELDFFEILRLFFPVIYDVKYLMKSCKNLKGGLQEVAEQLELERIGPQHQAGSDSLLTAYEEEANKQS

SEQ ID NO: 829500 - protein, 307 aa, Homo sapiens
MPAATVDHSQRICEVWACNLDEEMKKIRQVIRKYNYVAMDTEFPGVVARPIGEFRSNADYQYQLLRCNVDLLKIIQLGLTFMNEQGEYPPGTSTWQFNFKFNLTLGVVAHACNPSTLGGRGGRITTEDMYAQDSIELLTTSGIQFKKHEEEGIETQYFAELLMTSGVVLCEGVKWLSFHSGYDFGYLIKILTNSNLPEEELDFFEILRLFFPVIYDVKYLMKSCKNLKGGLQEVAEQLELERIGPQHQAGSDSLLTGMAFFKMREMFFEDHIDDAKYCGHLYGLGSGSSYVQNGTGNAYEEEANKQS

SEQ ID NO: 829501 - protein, 248 aa, Homo sapiens
MPAATVDHSQRICEVWACNLDEEMKKIRQVIRKYNYVAMDTEFPGVVARPIGEFRSNADYQYQLLRCNVDLLKIIQLGLTFMNEQGEYPPGTSTWQFNFKFNLTEDMYAQDSIELLTTSGIQFKKHEEEGIETQYFAELLMTSGVVLCEGVKWLSFHSGYDFGYLIKILTNSNLPEEELDFFEILRLFFPVIYDVKYLMKSCKNLKMFFEDHIDDAKYCGHLYGLGSGSSYVQNGTGNAYEEEANKQS

SEQ ID NO: 829502 - protein, 244 aa, Homo sapiens; identical to SEQ ID NO: 829495

SEQ ID NO: 829503 - protein, 295 aa, Homo sapiens
MPAATVDHSQRICEVWACNLDEEMKKIRQVIRKYNYVAMDTEFPGVVARPIGEFRSNADYQYQLLRCNVDLLKIIQLGLTFMNEQGEYPPGTSTWQFNFKFNLTEDMYAQDSIELLTTSGIQFKKHEEEGIETQYFAELLMTSGVVLCEGVKWLSFHSGYDFGYLIKILTNSNLPEEELDFFEILRLFFPVIYDVKYLMKSCKNLKGGLQEVAEQLELERIGPQHQAGSDSLLTGMAFFKMREMFFEDHIDDAKYCGHLYGLGSGSSYVQNGTGNARRGFSQSRQEIVRASAMSG

SEQ ID NO: 829504 - protein, 111 aa, Homo sapiens
MPAATVDHSQRICEVWACNLDEEMKKIRQVIRKYNYVAMDTEFPGVVARPIGEFRSNADYQYQLLRCNVDLLKIIQLGLTFMNEQGEYPPGTSTWQFNFKFNLTRKWEITV

SEQ ID NO: 829505 - protein, 285 aa, Homo sapiens; identical to SEQ ID NO: 829493

SEQ ID NO: 829506 - protein, 285 aa, Homo sapiens; identical to SEQ ID NO: 829493

SEQ ID NO: 829507 - protein, 285 aa, Homo sapiens; identical to SEQ ID NO: 829493

SEQ ID NO: 829508 - protein, 285 aa, Homo sapiens; identical to SEQ ID NO: 829493

SEQ ID NO: 829509 - protein, 285 aa, Homo sapiens; identical to SEQ ID NO: 829493

SEQ ID NO: 829510 - protein, 204 aa, Homo sapiens
MNEQGEYPPGTSTWQFNFKFNLTEDMYAQDSIELLTTSGIQFKKHEEEGIETQYFAELLMTSGVVLCEGVKWLSFHSGYDFGYLIKILTNSNLPEEELDFFEILRLFFPVIYDVKYLMKSCKNLKGGLQEVAEQLELERIGPQHQAGSDSLLTGMAFFKMREMFFEDHIDDAKYCGHLYGLGSGSSYVQNGTGNAYEEEANKQS

SEQ ID NO: 829511 - protein, 307 aa, Homo sapiens; identical to SEQ ID NO: 829500

SEQ ID NO: 829512 - protein, 107 aa, Homo sapiens
LQEVAEQLEIFAALHEVLHIINDRKNLKGGLQEVAEQLELERIGPQHQAGSDSLLTGMAFFKMREMFFEDHIDDAKYCGHLYGLGSGSSYVQNGTGNAYEEEANKQS

SEQ ID NO: 829513 - protein, 228 aa, Homo sapiens [sequence omitted]

SEQ ID NO: 829514 - protein, 141 aa, Homo sapiens
MNARGLGSELKDSIPVTELSASGPFESHDLLRKGFSCVKNELLPSHPLELSEKNFQLNQDKMNFSTLRNIQGLFAPLKLQMEFKAVQQVQRLPFLSSSNLSLDVLRGNDETIGFEDILNDPSQSEVMGEPHLMVEYKLGLL

SEQ ID NO: 829515 - protein, 159 aa, Homo sapiens
GLQEFGTRGERLFAELRKMNARGLGSELKDSIPVTELSASGPFESHDLLRKGFSCVKNELLPSHPLELSEKNFQLNQDKMNFSTLRNIQGLFAPLKLQMEFKAVQQVQRLPFLSSSNLSLDVLRGNDETIGFEDILNDPSQSEVMGEPHLMVEYKLGLL

SEQ ID NO: 829516 - protein, 141 aa, Homo sapiens; identical to SEQ ID NO: 829514

SEQ ID NO: 829517 - protein, 141 aa, Homo sapiens; identical to SEQ ID NO: 829514

SEQ ID NO: 829518 - protein, 141 aa, Homo sapiens; identical to SEQ ID NO: 829514

SEQ ID NO: 829519 - protein, 141 aa, Homo sapiens; identical to SEQ ID NO: 829514

SEQ ID NO: 829520 - protein, 141 aa, Homo sapiens; identical to SEQ ID NO: 829514

SEQ ID NO: 829521 - protein, 141 aa, Homo sapiens; identical to SEQ ID NO: 829514

SEQ ID NO: 829522 - protein, 159 aa, Homo sapiens; identical to SEQ ID NO: 829515

SEQ ID NO: 829523 - protein, 164 aa, Homo sapiens
MSPGAAGSTDGNGAERLFAELRKMNARGLGSELKDSIPVTELSASGPFESHDLLRKGFSCVKNELLPSHPLELSEKNFQLNQDKMNFSTLRNIQGLFAPLKLQMEFKAVQQVQRLPFLSSSNLSLDVLRGNDETIGFEDILNDPSQSEVMGEPHLMVEYKLGLL

SEQ ID NO: 829524 - protein, 141 aa, Homo sapiens; identical to SEQ ID NO: 829514

SEQ ID NO: 829525 - protein, 141 aa, Homo sapiens; identical to SEQ ID NO: 829514

SEQ ID NO: 829526 - protein, 132 aa, Homo sapiens
MNARGLGSELKDSIPVTELSASGPFESHDLLRKGFSCVKNELLPSHPLELSEKNFQLNQDKMNFSTLRNIQGLFAPLKLQMEFKAVQQVQRLPFLSSSNLSLDVFFGKKGGGRAPPFFLKKKIFGGNQWESH

SEQ ID NO: 829527 - protein, 209 aa, Homo sapiens
MKAVVQRVTRASVTVGGEQISAIGRGICVLLGISLEDTQKELEHMVRKILNLRVFEDESGKHWSKSVMDKQYEILCVSQFTLQCVLKGNKPDFHLAMPTEQAEGFYNSFLEQLRKTYRPELIKDGKFGAYMQVHIQNDGPVTIELESPAPGTATSDPKQLSKLEKQQQRKEKTRAKGPSESSKERNTPRKEDRSASSGAEGDVSSEREP

SEQ ID NO: 829528 - protein, 209 aa, Homo sapiens; identical to SEQ ID NO: 829527

SEQ ID NO: 829529 - protein, 209 aa, Homo sapiens; identical to SEQ ID NO: 829527

SEQ ID NO: 829530 - protein, 209 aa, Homo sapiens; identical to SEQ ID NO: 829527

SEQ ID NO: 829531 - protein, 209 aa, Homo sapiens; identical to SEQ ID NO: 829527

SEQ ID NO: 829532 - protein, 254 aa, Homo sapiens
MKAVVQRVTRASVTVGGEQISAIGRGICVLLGISLEDTQKELEHMVRKILNLRVFEDESGKHWSKSVMDKQYEILCVSQFTLQCVLKGNKPDFHLAMPTEQAEGFYNSFLEQLRKTYRPELIKDGKFGAYMQVHIQNDGPVTIELESPAPGTATSDPKQLSKLEKQQQRKEKTRAKGPSESSKVCARASPTERLCWFLPHLGLLLEQAGPASFVIKSTVVYSACPWRGFSNTLTLSMFFLLPGPVLKCQESNHQ

SEQ ID NO: 829533 - protein, 264 aa, Homo sapiens
RLPEDLPVDDAIFMENICSKGLHHRLVGRATWGIGPMTQVVTVNDKRPQALQSLSYGALPRATDASQPNYIETCGELWPFIWRPKQVPQFTLQCVLKGNKPDFHLAMPTEQAEGFYNSFLEQLRKTYRPELIKDGKFGAYMQVHIQNDGPVTIELESPAPGTATSDPKQLSKLEKQQQRKEKTRAKGPSESSKVCARASPTERLCWFLPHLGLLLEQAGPASFVIKSTVVYSACPWRGFSNTLTLSMFFLLPGPVLKCQESNHQ

SEQ ID NO: 829534 - protein, 115 aa, Homo sapiens
EIHHCCNVVFILIPAFPRVHVYGALLSTVAGGYSTSPLPRPAFEFQRTCPVQSQVLPLGFPSLGQVPWRPPAPGWQQSNGPGLAGSPIPNGYLNWVWSQVWIDVPPKVCCKSPFF

SEQ ID NO: 829535 - protein, 527 aa, Homo sapiens
GWAIARPRVGVADVGWVAADRVGPASWARFRVSPPEGAGCGAALRVARPDAARRRPTRPSRRHEGRGAARHPGQRHRSVGRGRAREEPPLTPATGCLAWGVFLRHPWGRCGPSASLVPFASSVRAAASPQGRLRGSAAAGEPPARARPAPARPWLPALGRGCRTSAPHSQHLCPACGMAEPRSISVVRSSGSVDEPRLEHFRSRHSSLFTAYFKCSIFAHFYVFQFLWGLTQDEMHRCGELLLGLSFDSCVHVRDWSLGWMRGAPCPGRPSPSPAELCAEGSGSKEFKMKNISLFLVDQATRPLVITQHFRLGWASEVQMISVDKVVVLRNHVGGEQISAIGRGICVLLGISLEDTQKELEHMVRKILNLRVFEDESGKHWSKSVMDKQYEILCVSQFTLQCVLKGNKPDFHLAMPTEQAEGFYNSFLEQLRKTYRPELIKDGKFGAYMQVHIQNDGPVTIELESPAPGTATSDPKQLSKLEKQQQRKEKTRAKGPSESSKERNTPRKEDRSASSGAEGDVSSEREP

SEQ ID NO: 829536 - protein, 105 aa, Homo sapiens
MTYFQREQDMEAAAEPTDCCFAWCIFCRRTRFCCQSSKNSSRGKKRPELRDLLNQARKETLPEKKTAVPAAGLRATCPLNGSRSSGGRIQCVIIGQNWILKNSRC

SEQ ID NO: 829537 - protein, 209 aa, Homo sapiens; identical to SEQ ID NO: 829527

SEQ ID NO: 829538 - protein, 188 aa, Homo sapiens
MKAVVQRVTRASVTVGGEQISAIGRGICVLLGISLEDTQKELEHMVRKILNLRVFEDESGKHWSKSVMDKQYEILCVSQFTLQCVLKGNKPDFHLAMPTEQAEGFYNSFLEQLRKTYRPELIKDGKFGAYMQVHIQNDGPVTIELESPAPGTATSDPKQARCRGAHLPLGGSRAMALDWPVHPFRMVT

SEQ ID NO: 829539 - protein, 102 aa, Homo sapiens
MLVIDPDKRISVDEALRHPYITVWYDPAEAEAPPPQIYDAQLEEREHAIEEWKELIYKEVMDWEERSKNGVVKDQPSALLQGPLPTPSPCLKHGAGAASTRI

SEQ ID NO: 829540 - protein, 424 aa, Homo sapiens
MSDSKCDSQFYSVQVADSTFTVLKRYQQLKPIGSGAQGIVCAAFDTVLGINVAVKKLSRPFQNQTHAKRAYRELVLLKCVNHKNIISLLNVFTPQKTLEEFQDVYLVMELMDANLCQVIHMELDHERMSYLLYQMLCGIKHLHSAGIIHRDLKPSNIVVKSDCTLKILDFGLARTACTNFMMTPYVVTRYYRAPEVILGMGYKENVDIWSVGCIMGELVKGCVIFQGTDHIDQWNKVIEQLGTPSAEFMKKLQPTVRNYVENRPKYPGIKFEELFPDWIFPSESERDKIKTSQARDLLSKMLVIDPDKRISVDEALRHPYITVWYDPAEAEAPPPQIYDAQLEEREHAIEEWKELIYKEVMDWEERSKNGVVKDQPSDAAVSSNATPSQSSSINDISSMSTEQTLASDTDSSLDASTGPLEGCR

SEQ ID NO: 829541 - protein, 424 aa, Homo sapiens; identical to SEQ ID NO: 829540

SEQ ID NO: 829542 - protein, 424 aa, Homo sapiens; identical to SEQ ID NO: 829540

SEQ ID NO: 829543 - protein, 424 aa, Homo sapiens; identical to SEQ ID NO: 829540

SEQ ID NO: 829544 - protein, 424 aa, Homo sapiens; identical to SEQ ID NO: 829540

SEQ ID NO: 829545 - protein, 210 aa, Homo sapiens
MGELVKGCVIFQGTDHIDQWNKVIEQLGTPSAEFMKKLQPTVRNYVENRPKYPGIKFEELFPDWIFPSESERDKIKTSQARDLLSKMLVIDPDKRISVDEALRHPYITVWYDPAEAEAPPPQIYDAQLEEREHAIEEWKELIYKEVMDWEERSKNGVVKDQPSDAAVSSNATPSQSSSINDISSMSTEQTLASDTDSSLDASTGPLEGCR

SEQ ID NO: 829546 - protein, 317 aa, Homo sapiens
MELMDANLCQVIHMELDHERMSYLLYQMLCGIKHLHSAGIIHRDLKPSNIVVKSDCTLKILDFGLARTACTNFMMTPYVVTRYYRAPEVILGMGYKENVDIWSVGCIMAEMVLHKVLFPGRDYIDQWNKVIEQLGTPSAEFMKKLQPTVRNYVENRPKYPGIKFEELFPDWIFPSESERDKIKTSQARDLLSKMLVIDPDKRISVDEALRHPYITVWYDPAEAEAPPPQIYDAQLEEREHAIEEWKELIYKEVMDWEERSKNGVVKDQPSDAAVSSNATPSQSSSINDISSMSTEQTLASDTDSSLDASTGPLEGCR

SEQ ID NO: 829547 - protein, 378 aa, Homo sapiens
MSDSKCDSQFYSVQVADSTFTVLKRYQQLKPIGSGAQGIVCAAFDTVLGINVAVKKLSRPFQNQTHAKRAYRELVLLKCVNHKNIISLLNVFTPQKTLEEFQDVYLVMELMDANLCQVIHMELDHERMSYLLYQMLCGIKHLHSAGIIHRDLKPSNIVVKSDCTLKILDFGLARTACTNFMMTPYVVTRYYRAPEVILGMGYKENVDIWSVGCIMGELVKGCVIFQGTDHIDQWNKVIEQLGTPSAEFMKKLQPTVRNYVENRPKYPGIKFEELFPDWIFPSESERDKIKTSQARDLLSKMLVIDPDKRISVDEALRHPYITVWYDPAEAEAPPPQIYDAQLEEREHAIEEWKELIYKEVMDWEERSKNGVVKDQPSG

SEQ ID NO: 829548 - protein, 302 aa, Homo sapiens
MSDSKCDSQFYSVQVADSTFTVLKRYQQLKPIGSGAQGIVCAAFDTVLGINVAVKKLSRPFQNQTHAKRAYRELVLLKCVNHKNIISLLNVFTPQKTLEEFQDVYLVMELMDANLCQVIHMELDHERMSYLLYQMLCGIKHLHSAGIIHRDLKPSNIVVKSDCTLKILDFGLARTACTNFMMTPYVVTRYYRAPEVILGMGYKENVDIWSVGCIMGELVKGCVIFQGTDHIDQWNKVIEQLGTPSAEFMKKLQPTVRNYVENRPKYPGIKFEELFPDWIFPSESERDKIKSKISFFSYTCVL

SEQ ID NO: 829549 - protein, 424 aa, Homo sapiens; identical to SEQ ID NO: 829540

SEQ ID NO: 829550 - protein, 424 aa, Homo sapiens; identical to SEQ ID NO: 829540

SEQ ID NO: 829551 - protein, 424 aa, Homo sapiens; identical to SEQ ID NO: 829540

SEQ ID NO: 829552 - protein, 424 aa, Homo sapiens; identical to SEQ ID NO: 829540

SEQ ID NO: 829553 - protein, 504 aa, Homo sapiens
MSDSKCDSQFYSVQVADSTFTVLKRYQQLKPIGSGAQGIVWRHHCSALPFIGRMRPVSVIVTPWINQEGMLCEGLGWPSLPWCLTSTVCPAQNVRIVSLTLNVSLLHGKRSAAAASRASSSAAFDTVLGINVAVKKLSRPFQNQTHAKRAYRELVLLKCVNHKNIISLLNVFTPQKTLEEFQDVYLVMELMDANLCQVIHMELDHERMSYLLYQMLCGIKHLHSAGIIHRDLKPSNIVVKSDCTLKILDFGLARTACTNFMMTPYVVTRYYRAPEVILGMGYKENVDIWSVGCIMGELVKGCVIFQGTDHIDQWNKVIEQLGTPSAEFMKKLQPTVRNYVENRPKYPGIKFEELFPDWIFPSESERDKIKTSQARDLLSKMLVIDPDKRISVDEALRHPYITVWYDPAEAEAPPPQIYDAQLEEREHAIEEWKELIYKEVMDWEERSKNGVVKDQPSDAAVSSNATPSQSSSINDISSMSTEQTLASDTDSSLDASTGPLEGCR

SEQ ID NO: 829554 - protein, 124 aa, Homo sapiens
MLVIDPDKRISVDEALRHPYITVWYDPAEAEAPPPQIYDAQLEEREHAIEEWKELIYKEVMDWEERSKNGVVKDQPSDAAVSSNATPSQSSSINDISSMSTEQTLASDTDSSLDASTGPLEGCR

SEQ ID NO: 829555 - protein, 242 aa, Homo sapiens
MSDSKCDSQFYSVQVADSTFTVLKRYQQLKPIGSGAQGIVCAAFDTVLGINVAVKKLSRPFQNQTHAKRAYRELVLLKCVNHKNIISLLNVFTPQKTLEEFQDVYLVMELMDANLCQVIHMELDHERMSYLLYQMLCGIKHLHSAGIIHRDLKPSNIVVKSDCTLKILDFGLARTACTNFMMTPYVVTRYYRAPEVILGMGYKENVDIWSVGCIMGELVKGCVIFQGTDRILPRDLGPAMLS

SEQ ID NO: 829556 - protein, 202 aa, Homo sapiens
MSDSKCDSQFYSVQVADSTFTVLKRYQQLKPIGSGAQGIVCAAFDTVLGINVAVKKLSRPFQNQTHAKRAYRELVLLKCVNHKNIISLLNVFTPQKTLEEFQDVYLVMELMDANLCQVIHMELDHERMSYLLYQMLCGIKHLHSAGIIHRDCTCGACGPAPGSWASVSLREGPAGVRKEWSLTSGMEMGIWDIYYVLGLSIK

SEQ ID NO: 829557 - protein, 339 aa, Homo sapiens
LTLNAACPLRLAVLAAMAAAALPAWLSLQSRARTLRAFSTAVYSATPVPTPSLPERTPGNERPPRRKALPPRTEKMAVDQDWPSVYPVAAPFKPSAVPLPVRMGYPVKKGVPMAKEGNLELLKIPNFLHLTPVAIKKHCEALKDFCTEWPAALDSDEKCEKHFPIEIDSTDYVSSGPSVRNPRARVVVLRVKLSSLNLDDHAKKKLIKLVGERYCKTTDVLTIKTDRCPLRRQNYDYAVYLLTVLYHESWNTEEWEKSKTEADMEEYIWENSSSERNILETLLQMKAAEKNMEINKEELLGTKEIEEYKKSVVSLKNEEENENSISQYKESVKRLLNVT

SEQ ID NO: 829558 - protein, 192 aa, Homo sapiens
LTLNAACPLRLAVLAAMAAAALPAWLSLQSRARTLRAFSTAVYSATPVPTPSLPERTPGNERPPRRKALPPRTEKMAVDQDWPSVYPVAAPFKPSAVPLPVRMGYPVKKGVPMAKEGNLELLKIPNFLHLTPVAIKKHCEALKDFCTEWPAALDSDEKCEKHFPIEIDSTDYVSSGPSVRNPRARVVVLREM

SEQ ID NO: 829559 - protein, 339 aa, Homo sapiens; identical to SEQ ID NO: 829557

SEQ ID NO: 829560 - protein, 210 aa, Homo sapiens
LTLNAACPLRLAVLAAMAAAALPAWLSLQSRARTLRAFSTAVYSATPVPTPSLPERTPGNERPPRRKALPPRTEKMAVDQDWPSVYPVAAPFKPSAVPLPVRMGYPVKKGVPMAKEGNLELLKIPNFLHLTPVAIKKHCEALKDFCTEWPAALDSDEKCEKHFPIEIDSTDYVSSGPSVRNPRARVVVLRVPFKEAELRLCSVSTNSVIP

SEQ ID NO: 829561 - protein, 339 aa, Homo sapiens; identical to SEQ ID NO: 829557

SEQ ID NO: 829562 - protein, 358 aa, Homo sapiens
LKGAILTTMLALNFFRHSTVSCLCIMDATVEVGRPMAAAALPAWLSLQSRARTLRAFSTAVYSATPVPTPSLPERTPGNERPPRRKALPPRTEKMAVDQDWPSVYPVAAPFKPSAVPLPVRMGYPVKKGVPMAKEGNLELLKIPNFLHLTPVAIKKHCEALKDFCTEWPAALDSDEKCEKHFPIEIDSTDYVSSGPSVRNPRARVVVLRVKLSSLNLDDHAKKKLIKLVGERYCKTTDVLTIKTDRCPLRRQNYDYAVYLLTVLYHESWNTEEWEKSKTEADMEEYIWENSSSERNILETLLQMKAAEKNMEINKEELLGTKEIEEYKKSVVSLKNEEENENSISQYKESVKRLLNVT

SEQ ID NO: 829563 - protein, 313 aa, Homo sapiens
ASDICVMLHLVVYGLTVPDPKSIACGKEHPEMKGPPYEREEALPPRTEKMAVDQDWPSVYPVAAPFKPSAVPLPVRMGYPVKKGVPMAKEGNLELLKIPNFLHLTPVAIKKHCEALKDFCTEWPAALDSDEKCEKHFPIEIDSTDYVSSGPSVRNPRARVVVLRVKLSSLNLDDHAKKKLIKLVGERYCKTTDVLTIKTDRCPLRRQNYDYAVYLLTVLYHESWNTEEWEKSKTEADMEEYIWENSSSERNILETLLQMKAAEKNMEINKEELLGTKEIEEYKKSVVSLKNEEENENSISQYKESVKRLLNVT

SEQ ID NO: 829564 - protein, 339 aa, Homo sapiens; identical to SEQ ID NO: 829557

SEQ ID NO: 829565 - protein, 162 aa, Homo sapiens
LKGAILTTMLALNFFRHSTVSCLCIMDATVELLADPWRPPRSQHGCLCSRGQGLCVHSPLPSTRPLRSRHLACNTEEWEKSKTEADMEEYIWENSSSERNILETLLQMKAAEKNMEINKEELLGTKEIEEYKKSVVSLKNEEENENSISQYKESVKRLLNVT

SEQ ID NO: 829566 - protein, 248 aa, Homo sapiens
LTLNAACPLRLAVLAAMAAAALPAWLSLQSRARTLRAFSTAVYSATPVPTPSLPERTPGNERPPRRKALPPRTEKMAVDQDWPSVYPVAAPFKPSAVPLPVRMGYPVKKGVPMAKEGNLELLKIPNFLHLTPVAIKKHCEALKDFCTEWPAALDSDEKCEKHFPIEIDSTDYVSSGPSVRNPRARVVVLRVKLSSLNLDDHAKKKLIKLVGERYCKTTDVLTIKTDSSQMGPFTRQNTIIRVTYRVSP

SEQ ID NO: 829567 - protein, 410 aa, Homo sapiens
ERAEALALAAPGRGVRRARSCALGQRSAMRSAARRGRAAPAARDSLPVLLFLCLLLKTCEPKTANAFKPNILLIMADDLGTGDLGCYGNNTLRTPNIDQLAEEGVRLTQHLAAAPLCTPSRAAFLTGRHSFRSGMDASNGYRALQWNAGSGGLPENETTFARILQQHGYATGLIGKWHQGVNCASRGDHCHHPLNHGFDYFYGMPFTLTNDCDPGRPPEVDAALRAQLWGYTQFLALGILTLAAGQTCGFFSVSARAVTGMAGVGCLFFISWYSSFGFVRRWNCILMRNHDVTEQPMVLEKTASLMLKEAVSYIERHKHGPFLLFLSLLHVHIPLVTTSAFLGKSQHGLYGDNVEEMDWLIASDFMSSSEVTESEAIKLMFRTMQRRCLPSMAFKKPWRGPVRLQILKRA

SEQ ID NO: 829568 - protein, 621 aa, Homo sapiens
ERAEALALAAPGRGVRRARSCALGQRSAMRSAARRGRAAPAARDSLPVLLFLCLLLKTCEPKTANAFKPNILLIMADDLGTGDLGCYGNNTLRTPNIDQLAEEGVRLTQHLAAAPLCTPSRAAFLTGRHSFRSGMDASNGYRALQWNAGSGGLPENETTFARILQQHGYATGLIGKWHQGVNCASRGDHCHHPLNHGFDYFYGMPFTLTNDCDPGRPPEVDAALRAQLWGYTQFLALGILTLAAGQTCGFFSVSARAVTGMAGVGCLFFISWYSSFGFVRRWNCILMRNHDVTEQPMVLEKTASLMLKEAVSYIERHKHGPFLLFLSLLHVHIPLVTTSAFLGKSQHGLYGDNVEEMDWLIGKVLNAIEDNGLKNSTFTYFTSDHGGHLEARDGHSQLGGWNGIYKGGKGMGGWEGGIRVPGIFHWPGVLPAGRVIGEPTSLMDVFPTVVQLVGGEVPQDRVIDGHSLVPLLQGAEARSAHEFLFHYCGQHLHAARWHQKDSGSVWKVHYTTPQFHPEGAGACYGRGVCPCSGEGVTHHRPPLLFDLSRDPSEARPLTPDSEPLYHAVIARVGAAVSEHRQTLSPVPQQFSMSNILWKPWLQPCCGHFPFCSCHEDGDGTP

SEQ ID NO: 829569 - protein, 621 aa, Homo sapiens; identical to SEQ ID NO: 829568

SEQ ID NO: 829570 - protein, 621 aa, Homo sapiens; identical to SEQ ID NO: 829568

SEQ ID NO: 829571 - protein, 621 aa, Homo sapiens; identical to SEQ ID NO: 829568

SEQ ID NO: 829572 - protein, 621 aa, Homo sapiens; identical to SEQ ID NO: 829568

SEQ ID NO: 829573 - protein, 621 aa, Homo sapiens; identical to SEQ ID NO: 829568

SEQ ID NO: 829574 - protein, 585 aa, Homo sapiens
ERAEALALAAPGRGVRRARSCALGQRSAMRSAARRGRAAPAARDSLPVLLFLCLLLKTCEPKTANAFKPNILLIMADDLGTGDLGCYGNNTLRTPNIDQLAEEGVRLTQHLAAAPLCTPSRAAFLTGRHSFRSGMDASNGYRALQWNAGSGGLPENETTFARILQQHGYATGLIGKWHQGVNCASRGDHCHHPLNHGFDYFYGMPFTLTNDCDPGRPPEVDAALRAQLWGYTQFLALGILTLAAGQTCGFFSVSARAVTGMAGVGCLFFISWYSSFGFVRRWNCILMRNHDVTEQPMVLEKTASLMLKEAVSYIERHKHGPFLLFLSLLHVHIPLVTTSAFLGKSQHGLYGDNVEEMDWLIGKVLNAIEDNGLKNSTFTYFTSDHGGHLEARDGHSQLGGWNGIYKGGKGMGGWEGGIRVPGIFHWPGVLPAGRVIGEPTSLMDVFPTVVQLVGGEVPQDRVIDGHSLVPLLQGAEARSAHEFLFHYCGQHLHAARWHQKDSGSVWKVHYTTPQFHPEGAGACYGRGVCPCSGEGVTHHRPPLLFDLSRDPSEARPLTPDSEPLYHAVIARGHLLAELNLKPKRR

SEQ ID NO: 829575 - protein, 209 aa, Homo sapiens
ERAEALALAAPGRGVRRARSCALGQRSAMRSAARRGRAAPAARDSLPVLLFLCLLLKTCEPKTANAFKPNILLIMADDLGTGDLGCYGNNTLRTPNIDQLAEEGVRLTQHLAAAPLCTPSRAAFLTGRHSFRSGMDASNGYRALQWNAGSGGLPENETTFARILQQHGYATGLIGVDMWEPHIIRWLGIFVIKKIPGQAWWRTPVVPAT

SEQ ID NO: 829576 - protein, 122 aa, Homo sapiens
MPWTESGSPLSFFLSFFFETECRSVPQAGMQWHDLCSLQPPPPGFKRFSCLSLLSTQDYRHQAPATMPSYIFVVLVETGFHHVAQAGLALLTSSHPPASASQSAGITGTSHCAHVGFPFPDL

SEQ ID NO: 829577 - protein, 621 aa, Homo sapiens; identical to SEQ ID NO: 829568

SEQ ID NO: 829578 - protein, 621 aa, Homo sapiens; identical to SEQ ID NO: 829568

SEQ ID NO: 829579 - protein, 317 aa, Homo sapiens
ERAEALALAAPGRGVRRARSCALGQRSAMRSAARRGRAAPAARDSLPVLLFLCLLLKTCEPKTANAFKPNILLIMADDLGTGDLGCYGNNTLRTPNIDQLAEEGVRLTQHLAAAPLCTPSRAAFLTGRHSFRSGMDASNGYRALQWNAGSGGLPENETTFARILQQHGYATGLIGKWHQGVNCASRGDHCHHPLNHGFDYFYGMPFTLTNDCDPGRPPEVDAALRAQLWGYTQFLALGILTLAAGQTCGFFSVSARAVTGMAGVGCLFFISWYSSFGFVRRWNCILMRNHDVTEQPMVLEKTASLMLKEAVSYIESQ

SEQ ID NO: 829580 - protein, 53 aa, Homo sapiens
MAKRQKQPIHQLRIRPLPRLSRAGLSKCRLTISTIIRFSHPIKKEIEILYNSY

SEQ ID NO: 829581 - protein, 254 aa, Homo sapiens
MRTPVNCYTPKEDVFVHQTAIKKNNPRKYLRSVGDGETVEFDVVEGEKGAEAANVTGPGGVPVQGSKYAADRNHYRRYPRRRGPPRNYQQNYQNSESGEKNEGSESAPEGQAQQRRPYRRRRFPPYYMRRPYGRRPQYSNPPVQGEVMEGADNQGAGEQGRPVRQNMYRGYRPRFRRGPPRQRQPREDGNEEDKENQGDETQGQQPPQRRYRRNFNYRRRRPENPKPQDGKETKAADPPAENSSAPEAEQGGAE

SEQ ID NO: 829582 - protein, 242 aa, Homo sapiens
MSISHQTAIKKNNPRKYLRSVGDGETVEFDVVEGEKGAEAANVTGPGGVPVQGSKYAADRNHYRRYPRRRGPPRNYQQNYQNSESGEKNEGSESAPEGQAQQRRPYRRRRFPPYYMRRPYGRRPQYSNPPVQGEVMEGADNQGAGEQGRPVRQNMYRGYRPRFRRGPPRQRQPREDGNEEDKENQGDETQGQQPPQRRYRRNFNYRRRRPENPKPQDGKETKAADPPAENSSAPEAEQGGAE

SEQ ID NO: 829583 - protein, 187 aa, Homo sapiens
IAVLEDPIRRVLRRRGPPRNYQQNYQNSESGEKNEGSESAPEGQAQQRRPYRRRRFPPYYMRRPYGRRPQYSNPPVQGEVMEGADNQGAGEQGRPVRQNMYRGYRPRFRRGPPRQRQPREDGNEEDKENQGDETQGQQPPQRRYRRNFNYRRRRPENPKPQDGKETKAADPPAENSSAPEAEQGGAE

SEQ ID NO: 829584 - protein, 179 aa, Homo sapiens
PRPAALAARLAWAMPAGRRTGGRHIRHGSESAPEGQAQQRRPYRRRRFPPYYMRRPYGRRPQYSNPPVQGEVMEGADNQGAGEQGRPVRQNMYRGYRPRFRRGPPRQRQPREDGNEEDKENQGDETQGQQPPQRRYRRNFNYRRRRPENPKPQDGKETKAADPPAENSSAPEAEQGGAE

SEQ ID NO: 829585 - protein, 284 aa, Homo sapiens
VSRRLYGVPRGPEGVFTQGFGNSKWFNVRNGYGFINRNDTKEDVFVHQTAIKKNNPRKYLRSVGDGETVEFDVVEGEKGAEAANVTGPGGVPVQGSKYAADRNHYRRYPRRRGPPRNYQQNYQNSESGEKNEGSESAPEGQAQQRRPYRRRRFPPYYMRRPYGRRPQYSNPPVQGEVMEGADNQGAGEQGRPVRQNMYRGYRPRFRRGPPRQRQPREDGNEEDKENQGDETQGQQPPQRRYRRNFNYRRRRPENPKPQDGKETKAADPPAENSSAPEAEQGGAE

SEQ ID NO: 829586 - protein, 284 aa, Homo sapiens; identical to SEQ ID NO: 829585

SEQ ID NO: 829587 - protein, 284 aa, Homo sapiens; identical to SEQ ID NO: 829585

SEQ ID NO: 829588 - protein, 179 aa, Homo sapiens
VSRRLYGVPRGPEGVFTQGFGNSKWFNVRNGYGFINRNDTKEDVFVHQTAIKKNNPRKYLRSYSNPPVQGEVMEGADNQGAGEQGRPVRQNMYRGYRPRFRRGPPRQRQPREDGNEEDKENQGDETQGQQPPQRRYRRNFNYRRRRPENPKPQDGKETKAADPPAENSSAPEAEQGGAE

SEQ ID NO: 829589 - protein, 112 aa, Homo sapiens
MTPTRPSRHRVPFSAGQGRPVRQNMYRGYRPRFRRGPPRQRQPREDGNEEDKENQGDETQGQQPPQRRYRRNFNYRRRRPENPKPQDGKETKAADPPAENSSAPEAEQGGAE

SEQ ID NO: 829590 - protein, 244 aa, Homo sapiens
VSRRLYGVPRGPEGVFTQGFGNSKWFNVRNGYGFINRNDTKEDVFVHQTAIKKNNPRKYLRSVGDGETVEFDVVEGEKGAEAANVTGPGGVPVQGSKYAADRNHYRRYPRRRGPPRNYQQNYQNSESGEKNEGSESAPEGQAQQRRPYRRRRFPPYYMRRPYGRRPQYSNPPVQGEVMEGADNQGAGEQGRPVRQNMYRGYRPRFRRGPPRQRQPREDGNEEDKENQGDETQGHQLPTQTPRKP

SEQ ID NO: 829591 - protein, 290 aa, Homo sapiens
VSRRLYGVPRGPEGVFTQGFGNSKWFNVRNGYGFINRNDTKEDVFVHQTAIKKNNPRKYLRSVGDGETVEFDVVEGEKGAEAANVTGPGGVPVQGSKYAADRNHYRRYPRRRGPPRNYQQNYQNSESGEKNEGSESAPEGQAQQRRPYRRRRFPPYYMRRPYGRRPQYSNPPVQGEVMEGADNQGAGEQGRPVRQNMYRGYRPRFRRIKEMRPKVSSHLNVGTAATSITDADAQKTLNHKMAKRQKQPIHQLRIRPLPRLSRAGLSKCRLTISTIIRFSHPTRRNMKFQQ

SEQ ID NO: 829592 - protein, 284 aa, Homo sapiens; identical to SEQ ID NO: 829585

SEQ ID NO: 829593 - protein, 121 aa, Homo sapiens
RTLFSFFIAVLSRLSLARRAPAESWSISPIHILPHWSTFFSCTLVQHPPSLLPAQEGSITDADAQKTLNHKMAKRQKQPIHQLRIRPLPRLSRAGLSKCRLTISTIIRFSHPTRRNMKFQQ

SEQ ID NO: 829594 - protein, 253 aa, Homo sapiens
VSRRLYGVPRGPEGVFTQGFGNSKWFNVRNGYGFINRNDTKEDVFVHQTAIKKNNPRKYLRSVGDGETVEFDVVEGEKGAEAANVTGPGGVPVQGSKYAADRNHYRRYPRRRGPPRNYQQNYQNSESGEKNEGSESAPEGQAQQRRPYRRRRFPPYYMRRPYGRRPQYSNPPVQGEVMEGADNQGAGEQGRPVRQNMYRGYRPRFRRGPPRQRQPREDGNEEDKENQGDETQGQQPPQRRYRRNWYAGGPLER

SEQ ID NO: 829595 - protein, 270 aa, Homo sapiens
VSRRLYGVPRGPEGVFTQGFGNSKWFNVRNGYGFINRNDTKEDVFVHQTAIKKNNPRKYLRSVGDGETVEFDVVEGEKGAEAANVTGPGGVPVQGSKYAADRNHYRRYPRRRGPPRNYQQNYQNSESGEKNEGSESAPEGQAQQRRPYRRRRFPPYYMRRPYGRRPQYSNPPVQGEVMEGADNQGAGEQGRPVRQNMYRGYRPRFRRGPPRQRQPREDGNEEDKEKKKKKKKKKKKKKGGQEKEKPQGAPKISEPKIRGQGGPQRGTKKK

SEQ ID NO: 829596 - protein, 235 aa, Homo sapiens
VSRRLYGVPRGPEGVFTQGFGNSKWFNVRNGYGFINRNDTKEDVFVHQTAIKKNNPRKYLRSVGDGETVEFDVVEGEKGAEAANVTGPGGVPVQGSKYAADRNHYRRYPRRRGPPRNYQQNYQNSESGEKNEGSESAPEGQAQQRRPYRRRRFPPYYMRRPYGRRPQYSNPPVQGEVMEGADNQGAGEQGRPVRQNMYRGYRPRFRRGPPRQRQPREDGLFSFCIGYTVKSEFQK

SEQ ID NO: 829597 - protein, 193 aa, Homo sapiens
VSRRLYGVPRGPEGVFTQGFGNSKWFNVRNGYGFINRNDTKEDVFVHQTAIKKNNPRKYLRSVGDGETVEFDVVEGEKGAEAANVTGPGGVPVQGSKYAADRNHYRRYPRRRGPPRNYQQNYQNSESGEKNEGSESAPEGQAQQRRPYRRRRFPPYYMRRPYGRRPQYSNPPVQGEVMEGADNQGAGEQGTGR

SEQ ID NO: 829598 - protein, 162 aa, Homo sapiens
VSRRLYGVPRGPEGVFTQGFGNSKWFNVRNGYGFINRNDTKEDVFVHQTAIKKNNPRKYLRSVGDGETVEFDVVEGEKGAEAANVTGPGGVPVQGSKYAADRNHYRRYPRRRGPPRNYQQNYQNSESGEKNEGSESAPEGQAQQRRPYRRRRFPLPGVILLY

SEQ ID NO: 829599 - protein, 180 aa, Homo sapiens
  misc_feature (67)..(67): Xaa can be any naturally occurring amino acid
SFRGTAGPTLTLKKAHVPPGFYSGWTEDRCLQDEGSLSHRLEFVWFELPVCTKEGSPMSYLNFAEEXALSTYYMRRPYGRRPQYSNPPVQGEVMEGADNQGAGEQGRPVRQNMYRGYRPRFRRGPPRQRQPREDGNEEDKENQGDETQGQQPPQRRYRRNCTERNCTRGVPLDVAAPSTA

SEQ ID NO: 829600 - protein, 284 aa, Homo sapiens; identical to SEQ ID NO: 829585

SEQ ID NO: 829601 - protein, 127 aa, Homo sapiens
MRRPYGRRPQYSNPPVQGEVMEGADNQGAGEQGRPVRQNMYRGYRPRFRRGPPRQRQPREDGNEEDKENQGDETQGQQPPQRRYRRNFNYRRRRPENPKPQDGKETKAADPPAENSSAPEAEQGGAE

SEQ ID NO: 829602 - protein, 284 aa, Homo sapiens; identical to SEQ ID NO: 829585

SEQ ID NO: 829603 - protein, 284 aa, Homo sapiens; identical to SEQ ID NO: 829585

SEQ ID NO: 829604 - protein, 284 aa, Homo sapiens; identical to SEQ ID NO: 829585

SEQ ID NO: 829605 - protein, 284 aa, Homo sapiens; identical to SEQ ID NO: 829585

SEQ ID NO: 829606 - protein, 104 aa, Homo sapiens
MSRALLAKDSLERTAMKKIKKIKEMRPKVSSHLNVGTAATSITDADAQKTLNHKMAKRQKQPIHQLRIRPLPRLSRAGLSKCRLTISTIIRFSHPTRRNMKFQQ

SEQ ID NO: 829607 - protein, 130 aa, Homo sapiens
SRSSYERSYERIVTSARTSVDSARRPRKTTCMQVKVIHCIHVLPLRNTENLTKKTISTYMKVGARYAYERKNQGDETQGQQPPQRRYRRNFNYRRRRPENPKPQDGKETKAADPPAENSSAPEAEQGGAE

SEQ ID NO: 829608 - protein, 284 aa, Homo sapiens; identical to SEQ ID NO: 829585

SEQ ID NO: 829609 - protein, 273 aa, Homo sapiens
VSRRLYGVPRGPEGVFTQGFGNSKWFNVRNGYGFINRNDTKEDVFVHQTAIKKNNPRKYLRSVGDGETVEFDVVEGEKGAEAANVTGPGGVPVQGSKYAADRNHYRRYPRRRGPPRNYQQNYQNSESGEKNEGSESAPEGQAQQRRPYRRRRFPPYYMRRPYGRRPQYSNPPVQGEVMEGADNQGAGEQGRPVRQNMYRGYRPRFRRGPPRQRQPREDGNEEDKENQGDETQGQQPPQRRYRRNFNYRRRRPENPKPQDGKETKAADPPADGE

SEQ ID NO: 829610 - protein, 235 aa, Homo sapiens
VSRRLYGVPRGPEGVFTQGFGNSKWFNVRNGYGFINRNDTKEDVFVHQTAIKKNNPRKYLRSVGDGETVEFDVVEGEKGAEAANVTGPGGVPVQGSKYAADRNHYRRYPRRRGPPRNYQQNYQNSESGEKNEGSESAPEGQAQQRRPYRRRRFPPYYMRRPYGRRPQYSNPPVQGEVMEGADNQGAGEQGRPVRQNMYRGYRPRFRRGPPRQRQPRESQFDGDSRQHMKKSGRMK

SEQ ID NO: 829611 - protein, 191 aa, Homo sapiens
VSRRLYGVPRGPEGVFTQGFGNSKWFNVRNGYGFINRNDTKEDVFVHQTAIKKNNPRKYLRSVGDGETVEFDVVEGEKGAEAANVTGPGGVPVQGSKYAADRNHYRRYPRRRGPPRNYQQNYQNSESGEKNEGSESAPEGQAQQRRPYRRRRFPPYYMRRPYGRRPQYSNPPVQGEVMEGADNISRGHHLF

SEQ ID NO: 829612 - protein, 232 aa, Homo sapiens
VSRRLYGVPRGPEGVFTQGFGNSKWFNVRNGYGFINRNDTKEDVFVHQTAIKKNNPRKYLRSVGDGETVEFDVVEGEKGAEAANVTGPGGVPVQGSKYAADRNHYRRYPRRRGPPRNYQQNYQNSESGEKNEGSESAPEGQAQQRRPYRRRRFPPYYMRRPYGRRPQYSNPPVQGEVMERLWSLMLLKEKRVRRQQMLQVLVVFQFKAVNMQQTVTIIDAIHVVGVLHGVPS

SEQ ID NO: 829613 - protein, 549 aa, Homo sapiens
MASASSGPSSSVGFSSFDPAVPSCTLSSASGIKRPMASEVPYASGMPIKKIGHRSVDSSGETTYKKTTSSALKGAIQLGITHTVGSLSTKPERDVLMQDFYVVESIFFPSEGSNLTPAHHYNDFRFKTYAPVAFRYFRELFGIRPDDYLYSLCSEPLIELCSSGASGSLFYVSSDDEFIIKTVQHKEAEFLQKLLPGYYMNLNQNPRTLLPKFYGLYCVQAGGKNIRIVVMNNLLPRSVKMHIKYDLKGSTYKRRASQKEREKPLPTFKDLDFLQDIPDGLFLDADMYNALCKTLQRDCLVLQSFKIMDYSLLMSIHNIDHAQREPLSSETQYSVDTRRPAPQKALYSTAMESIQGEARRGGTMETDDHMGGIPARNSKGERLLLYIGIIDILQSYRFVKKLEHSWKALVHDGDTVSVHRPGFYAERFQRFMCNTVFKKIPLKPSPSKKFRSGSSFSRRAGSSGNSCITYQPSVSGEHKAQVTTKAEVEPGVHLGRPDVLPQTPPLEEISEGSPIPDPSFSPLVGETLQMLTTSTTLEKLEVAESEFTH

SEQ ID NO: 829614 - protein, 121 aa, Homo sapiens
CAVLGFFAWLPGVKRPGWAINRPWLGRTEKGRSLLWDFSCLVFFSDVAWSGRKVPAASLSLLFCERGKYPLWKIRTTQLCCLPMSLRKYFLKLMGQTADSCLGEVIAVPYVLPPCLQQIFS

SEQ ID NO: 829615 - protein, 561 aa, Homo sapiens
MASASSGPSSSVGFSSFDPAVPSCTLSSASGIKRPMASEVLEARQDSYISLVPYASGMPIKKIGHRSVDSSGETTYKKTTSSALKGAIQLGITHTVGSLSTKPERDVLMQDFYVVESIFFPSEGSNLTPAHHYNDFRFKTYAPVAFRYFRELFGIRPDDYLYSLCSEPLIELCSSGASGSLFYVSSDDEFIIKTVQHKEAEFLQKLLPGYYMNLNQNPRTLLPKFYGLYCVQAGGKNIRIVVMNNLLPRSVKMHIKYDLKGSTYKRRASQKEREKPLPTFKDLDFLQDIPDGLFLDADMYNALCKTLQRDCLVLQSFKIMDYSLLMSIHNIDHAQREPLSSETQYSVDTRRPAPQKALYSTAMESIQGEARRGGTMETDDHMGGIPARNSKGERLLLYIGIIDILQSYRFVKKLEHSWKALVHDGDTVSVHRPGFYAERFQRFMCNTVFKKIPLKPSPSKKFRSGSSFSRRAGSSGNSCITYQPSVSGEHKAQVTTKAEVEPGVHLGRPDVLPQTPPLEEISEGSPIPDPSFSPLVGETLQMLTTSTTLEKLEVAESEFTH

SEQ ID NO: 829616 - protein, 545 aa, Homo sapiens
FNFLCCGVSGKRASGIKRPMASEVLEARQDSYISLVPYASGMPIKKIGHRSVDSSGETTYKKTTSSALKGAIQLGITHTVGSLSTKPERDVLMQDFYVVESIFFPSEGSNLTPAHHYNDFRFKTYAPVAFRYFRELFGIRPDDYLYSLCSEPLIELCSSGASGSLFYVSSDDEFIIKTVQHKEAEFLQKLLPGYYMNLNQNPRTLLPKFYGLYCVQAGGKNIRIVVMNNLLPRSVKMHIKYDLKGSTYKRRASQKEREKPLPTFKDLDFLQDIPDGLFLDADMYNALCKTLQRDCLVLQSFKIMDYSLLMSIHNIDHAQREPLSSETQYSVDTRRPAPQKALYSTAMESIQGEARRGGTMETDDHMGGIPARNSKGERLLLYIGIIDILQSYRFVKKLEHSWKALVHDGDTVSVHRPGFYAERFQRFMCNTVFKKIPLKPSPSKKFRSGSSFSRRAGSSGNSCITYQPSVSGEHKAQVTTKAEVEPGVHLGRPDVLPQTPPLEEISEGSPIPDPSFSPLVGETLQMLTTSTTLEKLEVAESEFTH

SEQ ID NO: 829617 - protein, 371 aa, Homo sapiens
MSHCTWLFSSSVLSSASSLGNENLNQNPRTLLPKFYGLYCVQAGGKNIRIVVMNNLLPRSVKMHIKYDLKGSTYKRRASQKEREKPLPTFKDLDFLQDIPDGLFLDADMYNALCKTLQRDCLVLQSFKIMDYSLLMSIHNIDHAQREPLSSETQYSVDTRRPAPQKALYSTAMESIQGEARRGGTMETDDHMGGIPARNSKGERLLLYIGIIDILQSYRFVKKLEHSWKALVHDGDTVSVHRPGFYAERFQRFMCNTVFKKIPLKPSPSKKFRSGSSFSRRAGSSGNSCITYQPSVSGEHKAQVTTKAEVEPGVHLGRPDVLPQTPPLEEISEGSPIPDPSFSPLVGETLQMLTTSTTLEKLEVAESEFTH

SEQ ID NO: 829618 - protein, 121 aa, Homo sapiens; identical to SEQ ID NO: 829614

SEQ ID NO: 829619 - protein, 469 aa, Homo sapiens
MASASSGPSSSVGFSSFDPAVPSCTLSSASGIKRPMASEVPYASGMPIKKIGHRSVDSSGETTYKKTTSSALKGAIQLGITHTVGSLSTKPERDVLMQDFYVVESIFFPSEGSNLTPAHHYNDFRFKTYAPVAFRYFRELFGIRPDDYLYSLCSEPLIELCSSGASGSLFYVSSDDEFIIKTVQHKEAEFLQKLLPGYYMNLNQNPRTLLPKFYGLYCVQAGGKNIRIVVMNNLLPRSVKMHIKYDLKGSTYKRRASQKEREKPLPTFKDLDFLQDIPDGLFLDADMYNALCKTLQRDCLVLQSFKIMDYSLLMSIHNIDHAQREPLSSETQYSVDTRRPAPQKALYSTAMESIQGEARRGGTMETDDHMGGIPARNSKGERLLLYIGIIDILQSYRFVKKLEHSWKALVHDGDTVSVHRPGFYAERFQRFMCNTVFKKIPCKWFLPIDCLLLPSGSLTPREQRAGHLW

SEQ ID NO: 829620 - protein, 224 aa, Homo sapiens
MASASSGPSSSVGFSSFDPAVPSCTLSSASGIKRPMASEVPYASGMPIKKIGHRSVDSSGETTYKKTTSSALKGAIQLGITHTVGSLSTKPERDVLMQDFYVVESIFFPSEGSNLTPAHHYNDFRFKTYAPVAFRYFRELFGIRPDDYLYSLCSEPLIELCSSGASGSLFYVSSDDEFIIKTVQHKEAEFLQKLLPGYYMSLALLSKPRLGHCSPVWAESETLS

SEQ ID NO: 829621 - protein, 364 aa, Homo sapiens
MASASSGPSSSVGFSSFDPAVPSCTLSSASGIKRPMASEVPYASGMPIKKIGHRSVDSSGETTYKKTTSSALKGAIQLGITHTVGSLSTKPERDVLTHSLTHSLTHHSLTHSLTHSSLTHSLTHSLITHSLTHSLTHHSLTHSLTHSSLTHSLTHSLITHSLTHSLTHHSLTHSLTHSSLTHSLTHSLITHSLTHSLTHHSLTHSLTHSSLTHSLTHSLITHSLTHSLTHHSLTHSLTHSSLTHSLTHSLITHSLTHSLTHHSLTHSLTHSSLTHSLTHSLITHSLTHSLTHHSLTHSLTHSSLTHSLTHSLITHSLTHSLTHHSLTHSLTHSSLTHSLTHSLITHSLTHSLTHHSLTHSLTHS

SEQ ID NO: 829622 - protein, 500 aa, Homo sapiens
MASASSGPSSSVGFSSFDPAVPSCTLSSASGIKRPMASEVPYASGMPIKKIGHRSVDSSGETTYKKTTSSALKGAIQLGITHTVGSLSTKPERDVLMQDFYVVESIFFPSEGSNLTPAHHYNDFRFKTYAPVAFRYFRELFGIRPDDYLYSLCSEPLIELCSSGASGSLFYVSSDDEFIIKTVQHKEAEFLQKLLPGYYMNLNQNPRTLLPKFYGLYCVQAGGKNIRIVVMNNLLPRSVKMHIKYDLKGSTYKRRASQKEREKPLPTFKDLDFLQDIPDGLFLDADMYNALCKTLQRDCLVLQSFKIMDYSLLMSIHNIDHAQREPLSSETQYSVDTRRPAPQKALYSTAMESIQGEARRGGTMETDDHMGGIPARNSKGERLLLYIGIIDILQSYRFVKKLEHSWKALVHDGDTVSVHRPGFYAERFQRFMCNTVFKKIPCVHLGRPDVLPQTPPLEEISEGSPIPDPSFSPLVGETLQMLTTSTTLEKLEVAESEFTH

SEQ ID NO: 829623 - protein, 514 aa, Homo sapiens
MASEVPYASGMPIKKIGHRSVDSSGETTYKKTTSSALKGAIQLGITHTVGSLSTKPERDVLMQDFYVVESIFFPSEGSNLTPAHHYNDFRFKTYAPVAFRYFRELFGIRPDDYLYSLCSEPLIELCSSGASGSLFYVSSDDEFIIKTVQHKEAEFLQKLLPGYYMNLNQNPRTLLPKFYGLYCVQAGGKNIRIVVMNNLLPRSVKMHIKYDLKGSTYKRRASQKEREKPLPTFKDLDFLQDIPDGLFLDADMYNALCKTLQRDCLVLQSFKIMDYSLLMSIHNIDHAQREPLSSETQYSVDTRRPAPQKALYSTAMESIQGEARRGGTMETDDHMGGIPARNSKGERLLLYIGIIDILQSYRFVKKLEHSWKALVHDGDTVSVHRPGFYAERFQRFMCNTVFKKIPLKPSPSKKFRSGSSFSRRAGSSGNSCITYQPSVSGEHKAQVTTKAEVEPGVHLGRPDVLPQTPPLEEISEGSPIPDPSFSPLVGETLQMLTTSTTLEKLEVAESEFTH

SEQ ID NO: 829624 - protein, 504 aa, Homo sapiens
MPIKKIGHRSVDSSGETTYKKTTSSALKGAIQLGITHTVGSLSTKPERDVLMQDFYVVESIFFPSEGSNLTPAHHYNDFRFKTYAPVAFRYFRELFGIRPDDYLYSLCSEPLIELCSSGASGSLFYVSSDDEFIIKTVQHKEAEFLQKLLPGYYMNLNQNPRTLLPKFYGLYCVQAGGKNIRIVVMNNLLPRSVKMHIKYDLKGSTYKRRASQKEREKPLPTFKDLDFLQDIPDGLFLDADMYNALCKTLQRDCLVLQSFKIMDYSLLMSIHNIDHAQREPLSSETQYSVDTRRPAPQKALYSTAMESIQGEARRGGTMETDDHMGGIPARNSKGERLLLYIGIIDILQSYRFVKKLEHSWKALVHDGDTVSVHRPGFYAERFQRFMCNTVFKKIPLKPSPSKKFRSGSSFSRRAGSSGNSCITYQPSVSGEHKAQVTTKAEVEPGVHLGRPDVLPQTPPLEEISEGSPIPDPSFSPLVGETLQMLTTSTTLEKLEVAESEFTH

SEQ ID NO: 829625 - protein, 561 aa, Homo sapiens; identical to SEQ ID NO: 829615

SEQ ID NO: 829626 - protein, 319 aa, Homo sapiens
MASASSGPSSSVGFSSFDPAVPSCTLSSASGIKRPMASEVPYASGMPIKKIGHRSVDSSGETTYKKTTSSALKGAIQLGITHTVGSLSTKPERDVLMQDFYVVESIFFPSEGSNLTPAHHYNDFRFKTYAPVAFRYFRELFGIRPDDYLYSLCSEPLIELCSSGASGSLFYVSSDDEFIIKTVQHKEAEFLQKLLPGYYMNLNQNPRTLLPKFYGLYCVQAGGKNIRIVVMNNLLPRSVKMHIKYDLKGSTYKRRASQKEREKPLPTFKDLDFLQDIPDGLFLDADMYNALCKTLQRDCLVSLLLRHQKSQLLKQLDCS

SEQ ID NO: 829627 - protein, 113 aa, Homo sapiens
MASASSGPSSSVGFSSFDPAVPSCTLSSASGIKRPMASEVPYASGMPIKKIGHRSVDSSGETTYKKTTSSALKGAIQLGITHTVGSLSTKPERDVLMQDFYVVESIFFPRYRV

SEQ ID NO: 829628 - protein, 123 aa, Homo sapiens
CAVLGFFAWLPGVKRPGWAINRPWLGRTEKGRSLLWDFSCLVFFSDVAWSGRKVPAASLSLLFCERGKYPLWKAVKLVEGVRDVSSSPCQANGVALSWSRSRLDVSEGGPGGGGEVAHRTRVL

SEQ ID NO: 829629 - protein, 1035 aa, Homo sapiens
MGKAENYELYSVELGPGPGGDMAAKMSKKKKAGGGGGKRKEKLENMKKEMEINDHQLSVAELEQKYQTSATKGLSASLAAELLLRDGPNALRPPRGTPEYVKFARQLAGGLQCLMWVAAAICLIAFAIQASEGDLTTDDNLYLAIALIAVVVVTGCFGYYQEFKSTNIIASFKNLVPQQATVIRDGDKFQINADQLVVGDLVEMKGGDRVPADIRILAAQGCKVDNSSLTGESEPQTRSPECTHESPLETRNIAFFSTMCLEGTVQGLVVNTGDRTIIGRIASLASGVENEKTPIAIEIEHFVDIIAGLAILFGATFFIVAMCIGYTFLRAMVFFMAIVVAYVPEGLLATVTVCLSLTAKRLASKNCVVKNLEAVETLGSTSVICSDKTGTLTQNRMTVSHLWFDNHIHTADTTEDQSGQTFDQSSETWRALCRVLTLCNRAAFKSGQDAVPVPKRIVIGDASETALLKFSELTLGNAMGYRDRFPKVCEIPFNSTNKFQLSIHTLEDPRDPRHLLVMKGAPERVLERCSSILIKGQELPLDEQWREAFQTAYLSLGGLGERVLGFCQLYLNEKDYPPGYAFDVEAMNFPSSGLCFAGLVSMIDPPRATVPDAVLKCRTAGIRVIMVTGDHPITAKAIAASVGIISEGSETVEDIAARLRVPVDQVNRKDARACVINGMQLKDMDPSELVEALRTHPEMVFARTSPQQKLVIVESCQRLGAIVAVTGDGVNDSPALKKADIGVAMGIAGSDAAKNAADMILLDDNFASIVTGVEQGRLIFDNLKKSIAYTLTKNIPELTPYLIYITVSVPLPLGCITILFIELCTDIFPSVSLAYEKAESDIMHLRPRNPKRDRLVNEPLAAYSYFQIGAIQSFAGFTDYFTAMAQEGWFPLLCVGLRAQWEDHHLQDLQDSYGQEWTFGQRLYQQYTCYTVFFISIEVCQIADVLIRKTRRLSAFQQGFFRNKILVIAIVFQVCIGCFLCYCPGMPNIFNFMPIRFQWWLVPLPYGILIFVYDEIRKLGVRCCPGSWWDQELYY

SEQ ID NO: 829630 - protein, 781 aa, Homo sapiens
MSPDLPQSARLCEENFQNLGWDSSERGLATVSGQTGEGVPNKALAEQKLGPRKHLVFAEARCTRSPAAGVKPSPFFDAGKRTGSQGGSPACGAHPFPKVCLSLTAKRLASKNCVVKNLEAVETLGSTSVICSDKTGTLTQNRMTVSHLWFDNHIHTADTTEDQSGQTFDQSSETWRALCRVLTLCNRAAFKSGQDAVPVPKRIVIGDASETALLKFSELTLGNAMGYRDRFPKVCEIPFNSTNKFQLSIHTLEDPRDPRHLLVMKGAPERVLERCSSILIKGQELPLDEQWREAFQTAYLSLGGLGERVLGFCQLYLNEKDYPPGYAFDVEAMNFPSSGLCFAGLVSMIDPPRATVPDAVLKCRTAGIRVIMVTGDHPITAKAIAASVGIISEGSETVEDIAARLRVPVDQVNRKDARACVINGMQLKDMDPSELVEALRTHPEMVFARTSPQQKLVIVESCQRLGAIVAVTGDGVNDSPALKKADIGVAMGIAGSDAAKNAADMILLDDNFASIVTGVEQGRLIFDNLKKSIAYTLTKNIPELTPYLIYITVSVPLPLGCITILFIELCTDIFPSVSLAYEKAESDIMHLRPRNPKRDRLVNEPLAAYSYFQIGAIQSFAGFTDYFTAMAQEGWFPLLCVGLRAQWEDHHLQDLQDSYGQEWTFGQRLYQQYTCYTVFFISIEVCQIADVLIRKTRRLSAFQQGFFRNKILVIAIVFQVCIGCFLCYCPGMPNIFNFMPIRFQWWLVPLPYGILIFVYDEIRKLGVRCCPGSWWDQELYY

SEQ ID NO: 829631 - protein, 1941 aa, Homo sapiens
MTLIPEQEPMEIDSEPGVENVFEVSKTQDNRNNNSQQDIDSENMKQKTSATVQKDELRTCTADSKATAPAYKPGRGTGVNSNSEKHADHRSTLTKKMHIQSAVSKMNPGEKEPIHRGTTEVNIDSETVHRMLLSAPSENDRVQKNLKNTAAEEHVAQGDATLEHSTNLDSSPSLSSVTVVPLRESYDPDVIPLFDKRTVLEGSTASTSPADHSALPNQSLTVRESEVLKTSDSKEGGEGFTVDTPAKASITSKRHIPEAHQATLLDGKQGKVIMPLGSKLTGVIVENENITKEGGLVDMAKKENDLNAEPNLKQTIKATVENGKKDGIAVDHVVGLNTEKYAETVKLKHKRSPGKVKDISIDVERRNENSEVDTSAGSGSAPSVLHQRNGQTEDVATGPRRAEKTSVATSTEGKDKDVTLSPVKAGPATTTSSETRQSEVALPCTSIEADEGLIIGTHSRNNPLHVGAEASECTVFAAAEEGGAVVTEGFAESETFLTSTKEGESGECAVAESEDRAADLLAVHAVKIEANVNSVVTEEKDDAVTSAGSEEKCDGSLSRDSEIVEGTITFISEVESDGAVTSAGTEIRAGSISSEEVDGSQGNMMRMGPKKETEGTVTCTGAEGRSDNFVICSVTGAGPREERMVTGAGVVLGDNDAPPGTSASQEGDGSVNDGTEGESAVTSTGITEDGEGPASCTGSEDSSEGFAISSESEENGESAMDSTVAKEGTNVPLVAAGPCDDEGIVTSTGAKEEDEEGEDVVTSTGRGNEIGHASTCTGLGEESEGVLICESAEGDSQIGTVVEHVEAEAGAAIMNANENNVDSMSGTEKGSKDTDICSSAKGIVESSVTSAVSGKDEVTPVPGGCEGPMTSAASDQSDSQLEKVEDTTISTGLVGGSYDVLVSGEVPECEVAHTSPSEKEDEDIITSVENEECDGLMATTASGDITNQNSLAGGKNQGKVLIISTSTTNDYTPQVSAITDVEGGLSDALRTEENMEGTRVTTEEFEAPMPSAVSGDDSQLTASRSEEKDECAMISTSIGEEFELPISSATTIKCAESLQPVAAAVEERATGPVLISTADFEGPMPSAPPEAESPLASTSKEEKDECALISTSIAEECEASVSGVVVESENERAGTVMEEKDGSGIISTSSVEDCEGPVSSAVPQEEGDPSVTPAEEMGDTAMISTSTSEGCEAVMIGAVLQDEDRLTITRVEDLSDAAIISTSTAECMPISASIDRHEENQLTADNPEGNGDLSATEVSKHKVPMPSLIAENNCRCPGPVRGGKEPGPVLAVSTEEGHNGPSVHKPSAGQGHPSAVCAEKEEKHGKECPEIGPFAGRGQKESTLHLINAEEKNVLLNSLQKEDKSPETGTAGGSSTASYSAGRGLEGNANSPAHLRGPEQTSGQTAKDPSVSIRYLAAVNTGAIKADDMPPVQGTVAEHSFLPAEQQGSEDNLKTSTTKCITGQESKIAPSHTMIPPATYSVALLAPKCEQDLTIKNDYSGKWTDQASAEKTGDDNSTRKSFPEEGDIMVTVSSEENVCDIGNEESPLNVLGGLKLKANLKMEAYVPSEEEKNGEILAPPESLCGGKPSGIAELQREPLLVNESLNVENSGFRTNEEIHSESYNKGEISSGRKDNAEAISGHSVEADPKEVEEEERHMPKRKRKQHYLSSEDEPDDNPDVLDSRIETAQRQCPETEPHDTKEENSRDLEELPKTSSETNSTTSRVMEEKDEYSSSETTGEKPEQNDDDTIKSQEEDQPIIIKRKRGRPRKYPVETTLKMKDDSKTDTGIVTVEQSPSSSKLKVMQTDESNKETANLQERSISNDDGEEKIVTSVRRRGRKPKRSLTVSDDAESSEPERKRQKSVSDPVEDKKEQESDEEEEEEEEDEPSGATTRSTTRSEAQRSKTQLSPSIKRKREVSPPGARTRGQQRVEEAPVKKAKR

SEQ ID NO: 829632 - protein, 1721 aa, Homo sapiens
MTLIPEQEPMEIDSEPGVENVFEVSKTQDNRNNNSQQDIDSENMKQKTSATVQKDELRTCTADSKATAPAYKPGRGTGVNSNSEKHADHRSTLTKKMHIQSAVSKMNPGEKEPIHRGTTEVNIDSETVHRMLLSAPSENDRVQKNLKNTAAEEHVAQGDATLEHSTNLDSSPSLSSVTVVPLRESYDPDVIPLFDKRTVLEGSTASTSPADHSALPNQSLTVRESEVLKTSDSKEGGEGFTVDTPAKASITSKRHIPEAHQATLLDGKQGKVIMPLGSKLTGVIVENENITKEGGLVDMAKKENDLNAEPNLKQTIKATVENGKKDGIAVDHVVGLNTEKYAETVKLKHKRSPGKVKDISIDVERRNENSEVDTSAGSGSAPSVLHQRNGQTEDVATGPEETEGRSDNFVICSVTGAGPREERMVTGAGVVLGDNDAPPGTSASQEGDGSVNDGTEGESAVTSTGITEDGEGPASCTGSEDSSEGFAISSESEENGESAMDSTVAKEGTNVPLVAAGPCDDEGIVTSTGAKEEDEEGEDVVTSTGRGNEIGHASTCTGLGEESEGVLICESAEGDSQIGTVVEHVEAEAGAAIMNANENNVDSMSGTEKGSKDTDICSSAKGIVESSVTSAVSGKDEVTPVPGGCEGPMTSAASDQSDSQLEKVEDTTISTGLVGGSYDVLVSGEVPECEVAHTSPSEKEDEDIITSVENEECDGLMATTASGDITNQNSLAGGKNQGKVLIISTSTTNDYTPQVSAITDVEGGLSDALRTEENMEGTRVTTEEFEAPMPSAVSGDDSQLTASRSEEKDECAMISTSIGEEFELPISSATTIKCAESLQPVAAAVEERATGPVLISTADFEGPMPSAPPEAESPLASTSKEEKDECALISTSIAEECEASVSGVVVESENERAGTVMEEKDGSGIISTSSVEDCEGPVSSAVPQEEGDPSVTPAEEMGDTAMISTSTSEGCEAVMIGAVLQDEDRLTITRVEDLSDAAIISTSTAECMPISASIDRHEENQLTADNPEGNGDLSATEVSKHKVPMPSLIAENNCRCPGPVRGGKEPGPVLAVSTEEGHNGPSVHKPSAGQGHPSAVCAEKEEKHGKECPEIGPFAGRGQKESTLHLINAEEKNVLLNSLQKEDKSPETGTAGGSSTASYSAGRGLEGNANSPAHLRGPEQTSGQTAKDPSVSIRYLAAVNTGAIKADDMPPVQGTVAEHSFLPAEQQGSEDNLKTSTTKCITGQESKIAPSHTMIPPATYSVALLAPKCEQDLTIKNDYSGKWTDQASAEKTGDDNSTRKSFPEEGDIMVTVSSEENVCDIGNEESPLNVLGGLKLKANLKMEAYVPSEEEKNGEILAPPESLCGGKPSGIAELQREPLLVNESLNVENSGFRTNEEIHSESYNKGEISSGRKDNAEAISGHSVEADPKEVEEEERHMPKRKRKQHYLSSEDEPDDNPDVLDSRIETAQRQCPETEPHDTKEENSRDLEELPKTSSETNSTTSRVMEEKDEYSSSETTGEKPEQNDDDTIKSQEEDQPIIIKRKRGRPRKYPVETTLKMKDDSKTDTGIVTVEQSPSSSKLKVMQTDESNKETANLQERSISNDDGEEKIVTSVRRRGRKPKRSLTVSDDAESSEPERKRQKSVSDPVEDKKEQESDEEEEEEEEDEPSGATTRSTTRSEAQRSKTQLSPSIKRKREVSPPGARTRGQQRVEEAPVKKAKR

SEQ ID NO: 829633 - protein, 284 aa, Homo sapiens
MPKRKRKQHYLSSEDEPDDNPDVLDSRIETAQRQCPETEPHDTKEENSRDLEELPKTSSETNSTTSRVMEEKDEYSSSETTGEKPEQNDDDTIKSQEEDQPIIIKRKRGRPRKYPVETTLKMKDDSKTDTGIVTVEQSPSSSKLKVMQTDESNKETANLQERSISNDDGEEKIVTSVRRRGRKPKRSLTVSDDAESSEPERKRQKSVSDPVEDKKEQESDEEEEEEEEDEPSGATTRSTTRSEAQRSKTQLSPSIKRKREVSPPGARTRGQQRVEEAPVKKAKR

SEQ ID NO: 829634 - protein, 1988 aa, Homo sapiens
MTLIPEQEPMEIDSEPGVENVFEVSKTQDNRNNNSQQDIDSENMKQKTSATVQKDELRTCTADSKATAPAYKPGRGTGVNSNSEKHADHRSTLTKKMHIQSAVSKMNPGEKEPIHRGTTEVNIDSETVHRMLLSAPSENDRVQKNLKNTAAEEHVAQGDATLEHSTNLDSSPSLSSVTVVPLRESYDPDVIPLFDKRTVLEGSTASTSPADHSALPNQSLTVRESEVLKTSDSKEGGEGFTVDTPAKASITSKRHIPEAHQATLLDGKQGKVIMPLGSKLTGVIVENENITKEGGLVDMAKKENDLNAEPNLKQTIKATVENGKKDGIAVDHVVGLNTEKYAETVKLKHKRSPGKVKDISIDVERRNENSEVDTSAGSGSAPSVLHQRNGQTEDVATGPRRAEKTSVATSTEGKDKDVTLSPVKAGPATTTSSETRQSEVALPCTSIEADEGLIIGTHSRNNPLHVGAEASECTVFAAAEEGGAVVTEGFAESETFLTSTKEGESGECAVAESEDRAADLLAVHAVKIEANVNSVVTEEKDDAVTSAGSEEKCDGSLSRDSEIVEGTITFISEVESDGAVTSAGTEIRAGSISSEEVDGSQGNMMRMGPKKETEGTVTCTGAEGRSDNFVICSVTGAGPREERMVTGAGVVLGDNDAPPGTSASQEGDGSVNDGTEGESAVTSTGITEDGEGPASCTGSEDSSEGFAISSESEENGESAMDSTVAKEGTNVPLVAAGPCDDEGIVTSTGAKEEDEEGEDVVTSTGRGNEIGHASTCTGLGEESEGVLICESAEGDSQIGTVVEHVEAEAGAAIMNANENNVDSMSGTEKGSKDTDICSSAKGIVESSVTSAVSGKDEVTPVPGGCEGPMTSAASDQSDSQLEKVEDTTISTGLVGGSYDVLVSGEVPECEVAHTSPSEKEDEDIITSVENEECDGLMATTASGDITNQNSLAGGKNQGKVLIISTSTTNDYTPQVSAITDVEGGLSDALRTEENMEGTRVTTEEFEAPMPSAVSGDDSQLTASRSEEKDECAMISTSIGEEFELPISSATTIKCAESLQPVAAAVEERATGPVLISTADFEGPMPSAPPEAESPLASTSKEEKDECALISTSIAEECEASVSGVVVESENERAGTVMEEKDGSGIISTSSVEDCEGPVSSAVPQEEGDPSVTPAEEMGDTAMISTSTSEGCEAVMIGAVLQDEDRLTITRVEDLSDAAIISTSTAECMPISASIDRHEENQLTADNPEGNGDLSATEVSKHKVPMPSLIAENNCRCPGPVRGGKEPGPVLAVSTEEGHNGPSVHKPSAGQGHPSAVCAEKEEKHGKECPEIGPFAGRGQKESTLHLINAEEKNVLLNSLQKEDKSPETGTAGGSSTASYSAGRGLEGNANSPAHLRGPEQTSGQTAKDPSVSIRYLAAVNTGAIKADDMPPVQGTVAEHSFLPAEQQGSEDNLKTSTTKCITGQESKIAPSHTMIPPATYSVALLAPKCEQDLTIKNDYSGKWTDQASAEKTGDDNSTRKSFPEEGDIMVTVSSEENVCDIGNEESPLNVLGGLKLKANLKMEAYVPSEEEKNGEILAPPESLCGGKPSGIAELQREPLLVNESLNVENSGFRTNEEIHSESYNKGEISSGRKDNAEAISGHSVEADPKEVEEEERHMPKRKRKQHYLSSEDEPDDNPDVLDSRIETAQRQCPETEPHDTKEENSRDLEELPKTSSETNSTTSRVMEEKDEYSSSETTGEKPEQNDDDTIKSQEEDQPIIIKRKRGRPRKYPVETTLKMKDDSKTDTGIVTVEQSPSSSKLKVMQTDESNKETANLQERSISNDDGEEKIVTSVRRRGRKPKRSLTVSDDAESSEPERKRQKSVSDPVEDKKEQESDEEEEEEEEDEPSGATTRSTTRSEAQRKQHSKPSARATSKLGSPDTVSPRNRQKLAKEKLPTSEKVSNSPPLGRSKTQLSPSIKRKREVSPPGARTRGQQRVEEAPVKKAKR

SEQ ID NO: 829635 - protein, 207 aa, Homo sapiens
MSSENCFVAENSSLHPESGQENDATSPHFSTRHEGSFQVPVLCAVMNVVFITILIIALIALSVGQYNCPGQYTFSMPSDSHVSSCSEDWVGYQRKCYFISTVKRSWTSAQNACSEHGATLAVIDSEKDMNFLKRYAGREEHWVGLKKEPGHPWKWSNGKEFNNWFNVTGSDKCVFLNPYNIRNRLLIGYIEGTKETGPAMLLWAETS

SEQ ID NO: 829636 - protein, 132 aa, Homo sapiens
MIRHNGRSDMVLRTFFLHTLFRILLFSFYPLLYHHLAQHSILRLVLHAVGIWFLLLLKQSIFLFTVGQYNCPGQYTFSMPSDSHVSSCSEDWVGYQRKCYFISTVKRSWTSAQNACSEHGATLAVIDSEKDM

SEQ ID NO: 829637 - protein, 199 aa, Homo sapiens
MSSENCFVAENSSLHPESGQENDATSPHFSTRHEGSFQVPVLCAVMNVVFITILIIALIALSVGQYNCPGQYTFSMPSDSHVSSCSEDWVGYQRKCYFISTVKRSWTSAQNACSEHGATLAVIDSEKDMNFLKRYAGREEHWVGLKKEPGHPWKWSNGKEFNNWFNVTGSDKCVFLKNTEVSSMECEKNLYWICNKPYK

SEQ ID NO: 829638 - protein, 135 aa, Homo sapiens
MSSENCFVAENSSLHPESGQENDATSPHFSTRHEGSFQVPVLCAVMNVVFITILIIALIALSVGQYNCPGQYTFSMPSDSHVSSCSEDWVGYQRKCYFISTVKRSWTSAQNACSEHGATLAVIDSEKDMVRIKKR

SEQ ID NO: 829639 - protein, 862 aa, Homo sapiens
MSDSGSQLGSMGSLTMKSQLQITVISAKLKENKKNWFGPSPYVEVTVDGQSKKTEKCNNTNSPKWKQPLTVIVTPVSKLHFRVWSHQTLKSDVLLGTAALDIYETLKSNNMKLEEVVVTLQLGGDKEPTETIGDLSICLDGLQLESEVVTNGETTCSESASQNDDGSRSKDETRVSTNGSDDPEDAGAGENRRVSGNNSPSLSNGGFKPSRPPRPSRPPPPTPRRPASVNGSPSATSESDGSSTGSLPPTNTNTNTSEGATSGLIIPLTISGGSGPRPLNPVTQAPLPPGWEQRVDQHGRVYYVDHVEKRTTWDRPEPLPPGWERRVDNMGRIYYVDHFTRTTTWQRPTLESVRNYEQWQLQRSQLQGAMQQFNQRFIYGNQDLFATSQSKEFDPLGPLPPGWEKRTDSNGRVYFVNHNTRITQWEDPRSQGQLNEKPLPEGWEMRFTVDGIPYFVDHNRRTTTYIDPRTGKSALDNGPQIAYVRDFKAKVQYFRFWCQQLAMPQHIKITVTRKTLFEDSFQQIMSFSPQDLRRRLWVIFPGEEGLDYGGVAREWFFLLSHEVLNPMYCLFEYAGKDNYCLQINPASYINPDHLKYFRFIGRFIAMALFHGKFIDTGFSLPFYKRILNKPVGLKDLESIDPEFYNSLIWVKENNIEECDLEMYFSVDKEILGEIKSHDLKPNGGNILVTEENKEEYIRMVAEWRLSRGVEEQTQAFFEGFNEILPQQYLQYFDAKELEVLLCGMQEIDLNDWQRHAIYRHYARTSKQIMWFWQFVKEIDNEKRMRLLQFVTGTCRLPVGGFADLMGSNGPQKFCIEKVGKENWLPRSHTCFNRLDLPPYKSYEQLKEKLLFAIEETEGFGQE

SEQ ID NO: 829640 - protein, 862 aa, Homo sapiens; identical to SEQ ID NO: 829639

SEQ ID NO: 829641 - protein, 903 aa, Homo sapiens
MSDSGSQLGSMGSLTMKSQLQITVISAKLKENKKNWFGPSPYVEVTVDGQSKKTEKCNNTNSPKWKQPLTVIVTPVSKLHFRVWSHQTLKSDVLLGTAALDIYETLKSNNMKLEEVVVTLQLGGDKEPTETIGDLSICLDGLQLESEVVTNGETTCSENGVSLCLPRLECNSAISAHCNLCLPGLSDSPISASRVAGFTGASQNDDGSRSKDETRVSTNGSDDPEDAGAGENRRVSGNNSPSLSNGGFKPSRPPRPSRPPPPTPRRPASVNGSPSATSESDGSSTGSLPPTNTNTNTSEGATSGLIIPLTISGGSGPRPLNPVTQAPLPPGWEQRVDQHGRVYYVDHVEKRTTWDRPEPLPPGWERRVDNMGRIYYVDHFTRTTTWQRPTLESVRNYEQWQLQRSQLQGAMQQFNQRFIYGNQDLFATSQSKEFDPLGPLPPGWEKRTDSNGRVYFVNHNTRITQWEDPRSQGQLNEKPLPEGWEMRFTVDGIPYFVDHNRRTTTYIDPRTGKSALDNGPQIAYVRDFKAKVQYFRFWCQQLAMPQHIKITVTRKTLFEDSFQQIMSFSPQDLRRRLWVIFPGEEGLDYGGVAREWFFLLSHEVLNPMYCLFEYAGKDNYCLQINPASYINPDHLKYFRFIGRFIAMALFHGKFIDTGFSLPFYKRILNKPVGLKDLESIDPEFYNSLIWVKENNIEECDLEMYFSVDKEILGEIKSHDLKPNGGNILVTEENKEEYIRMVAEWRLSRGVEEQTQAFFEGFNEILPQQYLQYFDAKELEVLLCGMQEIDLNDWQRHAIYRHYARTSKQIMWFWQFVKEIDNEKRMRLLQFVTGTCRLPVGGFADLMGSNGPQKFCIEKVGKENWLPRSHTCFNRLDLPPYKSYEQLKEKLLFAIEETEGFGQE

SEQ ID NO: 829642 - protein, 878 aa, Homo sapiens
MSDSGSQLGSMGSLTMKSQLQITVISAKLKENKKNWFGPSPYVEVTVDGQSKKTEKCNNTNSPKWKQPLTVIVTPVSKLHFRVWSHQTLKSDVLLGTAALDIYETLKSNNMKLEEVVVTLQLGGDKEPTETIGDLSICLDGLQLESEVVTNGETTCSESASQNDDGSRSKDETRVSTNGSDDPEDAGAGENRRVSGNNSPSLSNGGFKPSRPPRPSRPPPPTPRRPASVNGSPSATSESDGSSTGSLPPTNTNTNTSEGATSGLIIPLTISGGSGPRPLNPVTQAPLPPGWEQRVDQHGRVYYVDHVEKRTTWDRPEPLPPGWERRVDNMGRIYYVDHFTRTTTWQRPTLESVRNYEQWQLQRSQLQGAMQQFNQRFIYGNQDLFATSQSKEFDPLGPLPPGWEKRTDSNGRVYFVNHNTRITQWEDPRSQGQLNEKPLPEGWEMRFTVDGIPYFVDHNRRTTTYIDPRTGKSALDNGPQIAYVRDFKAKVQYFRFWCQQLAMPQHIKITVTRKTLFEDSFQQIMSFSPQDLRRRLWVIFPGEEGLDYGGVARVDDNMNTQNLVPFLQREWFFLLSHEVLNPMYCLFEYAGKDNYCLQINPASYINPDHLKYFRFIGRFIAMALFHGKFIDTGFSLPFYKRILNKPVGLKDLESIDPEFYNSLIWVKENNIEECDLEMYFSVDKEILGEIKSHDLKPNGGNILVTEENKEEYIRMVAEWRLSRGVEEQTQAFFEGFNEILPQQYLQYFDAKELEVLLCGMQEIDLNDWQRHAIYRHYARTSKQIMWFWQFVKEIDNEKRMRLLQFVTGTCRLPVGGFADLMGSNGPQKFCIEKVGKENWLPRSHTCFNRLDLPPYKSYEQLKEKLLFAIEETEGFGQE

SEQ ID NO: 829643 - protein, 360 aa, Homo sapiens
MPQHIKITVTRKTLFEDSFQQIMSFSPQDLRRRLWVIFPGEEGLDYGGVAREWFFLLSHEVLNPMYCLFEYAGKDNYCLQINPASYINPDHLKYFRFIGRFIAMALFHGKFIDTGFSLPFYKRILNKPVGLKDLESIDPEFYNSLIWVKENNIEECDLEMYFSVDKEILGEIKSHDLKPNGGNILVTEENKEEYIRMVAEWRLSRGVEEQTQAFFEGFNEILPQQYLQYFDAKELEVLLCGMQEIDLNDWQRHAIYRHYARTSKQIMWFWQFVKEIDNEKRMRLLQFVTGTCRLPVGGFADLMGSNGPQKFCIEKVGKENWLPRSHTCFNRLDLPPYKSYEQLKEKLLFAIEETEGFGQE

SEQ ID NO: 829644 - protein, 257 aa, Homo sapiens [sequence omitted]

SEQ ID NO: 829645 - protein, 862 aa, Homo sapiens; identical to SEQ ID NO: 829639

SEQ ID NO: 829646 - protein, 830 aa, Homo sapiens [sequence omitted]

SEQ ID NO: 829647 - protein, 475 aa, Homo sapiens [sequence omitted]

SEQ ID NO: 829648 - protein, 475 aa, Homo sapiens [sequence omitted]

SEQ ID NO: 829649 - protein, 862 aa, Homo sapiens; identical to SEQ ID NO: 829639

SEQ ID NO: 829650 - protein, 862 aa, Homo sapiens; identical to SEQ ID NO: 829639

SEQ ID NO: 829651 - protein, 820 aa, Homo sapiens
MSDSGSQLGSMGSLTMKSQLQITVISAKLKENKKNWFGPSPYVEVTVDGQSKKTEKCNNTNSPKWKQPLTVIVTPVSKLHFRVWSHQTLKSDVLLGTAALDIYETLKSNNMKLEEVVVTLQLGGDKEPTETIGDLSICLDGLQLESEVVTNGETTCSESASQNDDGSRSKDETRVSTNGSDDPEDAGAGENRRVSGNNSPSLSNGGFKPSRPPRPSRPPPPTPRRPASVNGSPSATSESDGSSTGSLPPTNTNTNTSEGATSGLIIPLTISGGSGPRPLNPVTQAPLPPGWEQRVDQHGRVYYVDHVEKRTTWDRPEPLPPGWERRVDNMGRIYYVDHFTRTTTWQRPTLESVRNYEQWQLQRSQLQGAMQQFNQRFIYGNQDLFATSQSKEFDPLGPLPPGWEKRTDSNGRVYFVNHNTRITQWEDPRSQGQLNEKPLPEGWEMRFTVDGIPYFVDHNRRTTTYIDPRTGKSALDNGPQIAYVRDFKAKVQYFRFWCQQLAMPQHIKITVTRKTLFEDSFQQIMSFSPQDLRRRLWVIFPGEEGLDYGGVAREWFFLLSHEVLNPMYCLFEYAGKDNYCLQINPASYINPDHLKYFRFIGRFIAMALFHGKFIDTGFSLPFYKRILNKPVGLKDLESIDPEFYNSLIWVKENNIEECDLEMYFSVDKEILGEIKSHDLKPNGGNILVTEENKEEYIRMVAEWRLSRGVEEQTQAFFEGFNEILPQQYLQYFDAKELEVLLCGMQEIDLNDWQRHAIYRHYARTSKQIMWFWQFVKEIDNEKRMRLLQFVTGTCRLPVGGFADLMVLIAWTCHHTRAMSN

SEQ ID NO: 829652 - protein, 357 aa, Homo sapiens
PCNPSSRRKTLFEDFFQQIMSFSPQDLRRRLWVIFPGEEGLDYGGVAREWFFLLSHEVLNPMYCLFEYAGKDNYCLQINPASYINPDHLKYFRFIGRFIAMALFHGKFIDTGFSLPFYKRILNKPVGLKDLESIDPEFYNSLIWVKENNIEECDLEMYFSVDKEILGEIKSHDLKPNGGNILVTEENKEEYIRMVAEWRLSRGVEEQTQAFFEGFNEILPQQYLQYFDAKELEVLLCGMQEIDLNDWQRHAIYRHYARTSKQIMWFWQFVKEIDNEKRMRLLQFVTGTCRLPVGGFADLMGSNGPQKFCIEKVGKENWLPRSHTCFNRLDLPPYKSYEQLKEKLLFAIEETEGFGQE

SEQ ID NO: 829653 - protein, 164 aa, Homo sapiens [sequence omitted]

SEQ ID NO: 829654 - protein, 698 aa, Homo sapiens
MSDSGSQLGSMGSLTMKSQLQITVISAKLKENKKNWFGPSPYVEVTVDGQSKKTEKCNNTNSPKWKQPLTVIVTPVSKLHFRVWSHQTLKSDVLLGTAALDIYETLKSNNMKLEEVVVTLQLGGDKEPTETIGDLSICLDGLQLESEVVTNGETTCSESASQNDDGSRSKDETRVSTNGSDDPEDAGAGENRRVSGNNSPSLSNGGFKPSRPPRPSRPPPPTPRRPASVNGSPSATSESDGSSTGSLPPTNTNTNTSEGATSGLIIPLTISGGSGPRPLNPVTQAPLPPGWEQRVDQHGRVYYVDHVEKRTTWDRPEPLPPGWERRVDNMGRIYYVDHFTRTTTWQRPTLESVRNYEQWQLQRSQLQGAMQQFNQRFIYGNQDLFATSQSKEFDPLGPLPPGWEKRTDSNGRVYFVNHNTRITQWEDPRSQGQLNEKPLPEGWEMRFTVDGIPYFVDHNRRTTTYIDPRTGKSALDNGPQIAYVRDFKAKVQYFRFWCQQLAMPQHIKITVTRKTLFEDSFQQIMSFSPQDLRRRLWVIFPGEEGLDYGGVAREWFFLLSHEVLNPMYCLFEYAGKDNYCLQINPASYINPDHLKYFRFIGRFIAMALFHGKFIDTGFSLPFYKRILNKPVGLKDLESIDPEFYNSLIWVKENNIEECDLEMYFSVDKEILGEIKSHDLKPNGGNILVTEENKEEYIR

SEQ ID NO: 829655 - protein, 565 aa, Homo sapiens
MSDSGSQLGSMGSLTMKSQLQITVISAKLKENKKNWFGPSPYVEVTVDGQSKKTEKCNNTNSPKWKQPLTVIVTPVSKLHFRVWSHQTLKSDVLLGTAALDIYETLKSNNMKLEEVVVTLQLGGDKEPTETIGDLSICLDGLQLESEVVTNGETTCSESASQNDDGSRSKDETRVSTNGSDDPEDAGAGENRRVSGNNSPSLSNGGFKPSRPPRPSRPPPPTPRRPASVNGSPSATSESDGSSTGSLPPTNTNTNTSEGATSGLIIPLTISGGSGPRPLNPVTQAPLPPGWEQRVDQHGRVYYVDHVEKRTTWDRPEPLPPGWERRVDNMGRIYYVDHFTRTTTWQRPTLESVRNYEQWQLQRSQLQGAMQQFNQRFIYGNQDLFATSQSKEFDPLGPLPPGWEKRTDSNGRVYFVNHNTRITQWEDPRSQGQLNEKPLPEGWEMRFTVDGIPYFVDHNRRTTTYIDPRTGKSALDNGPQIAYVRDFKAKVQYFRFWCQQLAMPQHIKITVTRKTLFEDSFQQIMSFSPQDLRRRLWVIFPGEEGLDYGGVARMKKVLSGVTVIR

SEQ ID NO: 829656 - protein, 74 aa, Homo sapiens
ERQDPGFKISEVFLDSVLPPPPLKLLGLLPSGQAHWGSASHLSGSPGLLSFLLPKCVPASALILPYCLVSEPLS

SEQ ID NO: 829657 - protein, 338 aa, Homo sapiens [sequence omitted]

SEQ ID NO: 829658 - protein, 262 aa, Homo sapiens
MSGKEIKKKKHLFGLRIRVPPVPPNVAFKAEKEPEGTSHEFKIKGRKASKPISDSREVSNGIEKKGKKKSVGRPPGPYTRKMIQKTAEPLLDKESISENPTLDLPCSIGRTEGTAHSSNTSDVDFTGASSAKETTSSSISRHYGLSDSRKRTRTGRSWPAAIPHLRRRRGRLPRRALQTQNSEIVKDDEGKEDYQFDELNTEILNNLADQELQLNHLKNSITSYFGAAGRIACGEKYRVLARRVTLDGKVQYLVEWEGATAS

SEQ ID NO: 829659 - protein, 376 aa, Homo sapiens
MRDSTGAGNSLVHKRSPLRRNQKTPTSLTKLSLQDGHKAKKPACKFEEGQDVLARWSDGLFYLGTIKKINILKQSCFIIFEDSSKSWVLWKDIQTEPLEVGKWSVGIKDYKTMFMSGKEIKKKKHLFGLRIRVPPVPPNVAFKAEKEPEGTSHEFKIKGRKASKPISDSREVSNGIEKKGKKKSVGRPPGPYTRKMIQKTAEPLLDKESISENPTLDLPCSIGRTEGTAHSSNTSDVDFTGASSAKETTSSSISRHYGLSDSRKRTRTGRSWPAAIPHLRRRRGRLPRRALQTQNSEIVKDDEGKEDYQFDELNTEILNNLADQELQLNHLKNSITSYFGAAGRIACGEKYRVLARRVTLDGKVQYLVEWEGATAS

SEQ ID NO: 829660 - protein, 475 aa, Homo sapiens
MRDSTGAGNSLVHKRSPLRRNQKTPTSLTKLSLQDGHKAKKPACKFEEGQDVLARWSDGLFYLGTIKKINILKQSCFIIFEDSSKSWVLWKDIQTGATGSGEMVCTICQEEYSEAPNEMVICDKCGQGYHQLCHTPHIDSSVIDSDEKWLCRQCVFATTTKRGGALKKGPNAKALQVMKQTLPYSVADLEWDAGHKTNVQQCYCYCGGPGDWYLKMLQCCKCKQWFHEACVQCLQKPMLFGDRFYTFICSVCSSGPEYLKRLPLQWVDIAHLCLYNLSVIHKKKYFDSELELMTYINENWDRLHPGELADTPKSERYEHVLEALNDYKTMFMSGKEIKKKKHLFGLRIRVPPVPPNVAFKAEKEPEGTSHEFKIKGRKASKPISDSREVSNGIEKKGKKKSVGRPPGPYTRKMIQKTAEPLLDKESISENPTLDLPCSIGRTEGTAHSSNTSDVDFTGASSAKETTSSSISRHYG

SEQ ID NO: 829661 - protein, 266 aa, Homo sapiens
MRDSTGAGNSLVHKRSPLRRNQKTPTSLTKLSLQDGHKAKKPACKFEEGQDVLARWSDGLFYLGTIKKINILKQSCFIIFEDSSKSWVLWKDIQTGATGSGEMVCTICQEEYSEAPNEMVICDKCGQGYHQLCHTPHIDSSVIDSDEKWLCRQCVFATTTKRGGALKKGPNAKALQVMKQTLPYSVADLEWDAGHKTNVQQCYCYCGGPGDWYLKMLQCCKCKQWFHEACVQCLQKPMLFGDRFYTFICSVCSSGPEYLKRLPLQW

SEQ ID NO: 829662 - protein, 282 aa, Homo sapiens
MRDSTGAGNSLVHKRSPLRRNQKTPTSLTKLSLQDGHKAKKPACKFEEGQDVLARWSDGLFYLGTIKKINILKQSCFIIFEDSSKSWVLWKDIQTGATGSGEMVCTICQEEYSEAPNEMVICDKCGQGYHQLCHTPHIDSSVIDSDEKWLCRQCVFATTTKRGGALKKGPNAKALQVMKQTLPYSVADLEWDAGHKTNVQQCYCYCGGPGDWYLKMLQCCKCKQWFHEACVQCLQKPMLFGDRFYTFICSVCSSGPEYLKRLPLQCWQTHQNLKDMSMFWRH

SEQ ID NO: 829663 - protein, 593 aa, Homo sapiens
MRDSTGAGNSLVHKRSPLRRNQKTPTSLTKLSLQDGHKAKKPACKFEEGQDVLARWSDGLFYLGTIKKINILKQSCFIIFEDSSKSWVLWKDIQTGATGSGEMVCTICQEEYSEAPNEMVICDKCGQGYHQLCHTPHIDSSVIDSDEKWLCRQCVFATTTKRGGALKKGPNAKALQVMKQTLPYSVADLEWDAGHKTNVQQCYCYCGGPGDWYLKMLQCCKCKQWFHEACVQCLQKPMLFGDRFYTFICSVCSSGPEYLKRLPLQWVDIAHLCLYNLSVIHKKKYFDSELELMTYINENWDRLHPGELADTPKSERYEHVLEALNDYKTMFMSGKEIKKKKHLFGLRIRVPPVPPNVAFKAEKEPEGTSHEFKIKGRKASKPISDSREVSNGIEKKGKKKSVGRPPGPYTRKMIQKTAEPLLDKESISENPTLDLPCSIGRTEGTAHSSNTSDVDFTGASSAKETTSSSISRHYGLSDSRKRTRTGRSWPAAIPHLRRRRGRLPRRALQTQNSEIVKDDEGKEDYQFDELNTEILNNLADQELQLNHLKNSITSYFGAAGRIACGEKYRVLARRVTLDGKVQYLVEWEGATAS

SEQ ID NO: 829664 - protein, 536 aa, Homo sapiens
MRDSTGAGNSLVHKRSPLRRNQKTPTSLTKLSLQDGHKAKKPACKFEEGQDVLARWSDGLFYLGTIKKINILKQSCFIIFEDSSKSWVLWKDIQTGATGSGEMVCTICQEEYSEAPNEMVICDKCGQGYHQLCHTPHIDSSVIDSDEKWLCRQCVFATTTKRGGALKKGPNAKALQVMKQTLPYSVADLEWDAGHKTNVQQCYCYCGGPGDWYLKMLQCCKCKQWFHEACVQCLQKPMLFGDRFYTFICSVCSSGPEYLKRLPLQWVDIAHLCLYNLSVIHKKKYFDSELELMTYINENWDRLHPGELADTPKSERYEHVLEALNDYKTMEVSNGIEKKGKKKSVGRPPGPYTRKMIQKTAEPLLDKESISENPTLDLPCSIGRTEGTAHSSNTSDVDFTGASSAKETTSSSISRHYGLSDSRKRTRTGRSWPAAIPHLRRRRGRLPRRALQTQNSEIVKDDEGKEDYQFDELNTEILNNLADQELQLNHLKNSITSYFGAAGRIACGEKYRVLARRVTLDGKVQYLVEWEGATAS

SEQ ID NO: 829665 - protein, 626 aa, Homo sapiens
MRDSTGAGNSLVHKRSPLRRNQKTPTSLTKLSLQDGHKAKKPACKFEEGQDVLARWSDGLFYLGTIKKINILKQSCFIIFEDSSKSWVLWKDIQTGATGSGEMVCTICQEEYSEAPNEMVICDKCGQGYHQLCHTPHIDSSVIDSDEKWLCRQCVFATTTKRGGALKKGPNAKALQVMKQTLPYSVADLEWDAGHKTNVQQCYCYCGGPGDWYLKMLQCCKCKQWFHEACVQCLQKPMLFGDRFYTFICSVCSSGPEYLKRLPLQWVDIAHLCLYNLSVIHKKKYFDSELELMTYINENWDRLHPGEFWGQISLVWISGPAFSSSCVLLPVDSGNLEKEELADTPKSERYEHVLEALNDYKTMFMSGKEIKKKKHLFGLRIRVPPVPPNVAFKAEKEPEGTSHEFKIKGRKASKPISDSREVSNGIEKKGKKKSVGRPPGPYTRKMIQKTAEPLLDKESISENPTLDLPCSIGRTEGTAHSSNTSDVDFTGASSAKETTSSSISRHYGLSDSRKRTRTGRSWPAAIPHLRRRRGRLPRRALQTQNSEIVKDDEGKEDYQFDELNTEILNNLADQELQLNHLKNSITSYFGAAGRIACGEKYRVLARRVTLDGKVQYLVEWEGATAS

SEQ ID NO: 829666 - protein, 491 aa, Homo sapiens
MVCTICQEEYSEAPNEMVICDKCGQGYHQLCHTPHIDSSVIDSDEKWLCRQCVFATTTKRGGALKKGPNAKALQVMKQTLPYSVADLEWDAGHKTNVQQCYCYCGGPGDWYLKMLQCCKCKQWFHEACVQCLQKPMLFGDRFYTFICSVCSSGPEYLKRLPLQWVDIAHLCLYNLSVIHKKKYFDSELELMTYINENWDRLHPGELADTPKSERYEHVLEALNDYKTMFMSGKEIKKKKHLFGLRIRVPPVPPNVAFKAEKEPEGTSHEFKIKGRKASKPISDSREVSNGIEKKGKKKSVGRPPGPYTRKMIQKTAEPLLDKESISENPTLDLPCSIGRTEGTAHSSNTSDVDFTGASSAKETTSSSISRHYGLSDSRKRTRTGRSWPAAIPHLRRRRGRLPRRALQTQNSEIVKDDEGKEDYQFDELNTEILNNLADQELQLNHLKNSITSYFGAAGRIACGEKYRVLARRVTLDGKVQYLVEWEGATAS

SEQ ID NO: 829667 - protein, 491 aa, Homo sapiens; identical to SEQ ID NO: 829666

SEQ ID NO: 829668 - protein, 357 aa, Homo sapiens
LFFFFLRFYTFICSVCSSGPEYLKRLPLQWVDIAHLCLYNLSVIHKKKYFDSELELMTYINENWDRLHPGELADTPKSERYEHVLEALNDYKTMFMSGKEIKKKKHLFGLRIRVPPVPPNVAFKAEKEPEGTSHEFKIKGRKASKPISDSREVSNGIEKKGKKKSVGRPPGPYTRKMIQKTAEPLLDKESISENPTLDLPCSIGRTEGTAHSSNTSDVDFTGASSAKETTSSSISRHYGLSDSRKRTRTGRSWPAAIPHLRRRRGRLPRRALQTQNSEIVKDDEGKEDYQFDELNTEILNNLADQELQLNHLKNSITSYFGAAGRIACGEKYRVLARRVTLDGKVQYLVEWEGATAS

SEQ ID NO: 829669 - protein, 508 aa, Homo sapiens
MRDSTGAGNSLVHKRSPLRRNQKTPTSLTKLSLQDGHKAKKPACKFEEGQDVLARWSDGLFYLGTIKKINILKQSCFIIFEDSSKSWVLWKDIQTGATGSGEMVCTICQEEYSEAPNEMVICDKCGQGYHQLCHTPHIDSSVIDSDEKWLCRQCVFATTTKRGGALKKGPNAKALQVMKQTLPYSVADLEWDAGHKTNVQQCYCYCGGPGDWYLKMLQCCKCKQWFHEACVQCLQKPMLFGDRFYTFICSVCSSGPEYLKRLPLQWVDIAHLCLYNLSVIHKKKYFDSELELMTYINENWDRLHPGEFWGQISLVWISGPAFSSSCVLLPVDSGNLEKEELADTPKSERYEHVLEALNDYKTMFMSGKEIKKKKHLFGLRIRVPPVPPNVAFKAEKEPEGTSHEFKIKGRKASKPISDSREVSNGIEKKGKKKSVGRPPGPYTRKMIQKTAEPLLDKESISENPTLDLPCSIGRTEGTAHSSNTSDVDFTGASSAKETTSSSISRHYG

SEQ ID NO: 829670 - protein, 509 aa, Homo sapiens
DKLDIDFCVPGFPWRCGRRSLCDLYEEEEEEDVKMAELQMLLEEEIPGGRRALFDSYTNLERVADYCENNYIQSADKQRALEETKAYTTQSLASVAYLINTLANNVLQMLDIQASQLRRMESSINHISQTVDIHKEKVARREIGILTTNKNTSRTHKIIAPANLERPVRYIRKPIDYTILDDIGHGVKVSTQNMKMGGLPRTTPPTQKPPSPPMSGKGTLGRHSPYRTLEPVRPPVVPNDYVPSPTRNMAPSQQSPVRTASVNQRNRTYSSSGSSGGSHPSSRSSSRENSGSGSVGVPIAVPTPSPPSVFPGHPVQFYSMNRPASRHTPPTIGGSLPYRRPPSITSQTSLQNQMNGGPFYSQNPVSLAPPPPSILQVTPQLPLMGFVARVQENISDTPPPPPPVEEPVFDESPPPPPPPEDYEEEEAAVVEYSDPYAEEDPPWAPRSYLEKVVAIYDYTKDKEDELSFQEGAIIYVIKKNDDGWYEGVMNGVTGLFPGNYVESIMHYSE

SEQ ID NO: 829671 - protein, 132 aa, Homo sapiens
CEASTALMSFTQNNDDRLNVIPRKKPSHSIHNSLIPTIVIVAIYDYTKDKEDELSFQEGAIIYVIKKNDDGWYEGVMNGVTVNNGSFLKGIFLVFCIVINCHNLFQVRTWSPRWVLFSIRITILNHSSFLLF

SEQ ID NO: 829672 - protein, 438 aa, Homo sapiens
MAELQMLLEEEIPGGRRALFDSYTNLERVADYCENNYIQSADKQRALEETKAYTTQSLASVAYLINTLANNVLQMLDIQASQLRRMESSINHISQTVDIHKEKVARREIGILTTNKNTSRTHKIIAPANLERPVRYIRKPIDYTILDDIGHGVKVSTQNMKMGGLPRTTPPTQKPPSPPMSGKGTLGRHSPYRTLEPVRPPVVPNDYVPSPTRNMAPSQQSPVRTASVNQRNRTYSSSGSSGGSHPSSRSSSRENSGSGSVGVPIAVPTPSPPSVFPGHPVQFYSMNRPASRHTPPTIGGSLPYRRPPSITSQTSLQNQMNGGPFYSQNPERARTNIRHHGYCGHVSDTPPPPPPVEEPVFDESPPPPPPPEDYEEEEAAVVEYSDPYAEEDPPWAPRSYLEKVVAIYDYTKDKEDELSFQEGAIIYVIKKNDDHDMS

SEQ ID NO: 829673 - protein, 452 aa, Homo sapiens
MAELQMLLEEEIPGGRRALFDSYTNLERVADYCENNYIQSADKQRALEETKAYTTQSLASVAYLINTLANNVLQMLDIQASQLRRMESSINHISQTVDIHKEKVARREIGILTTNKNTSRTHKIIAPANLERPVRYIRKPIDYTILDDIGHGVKVSTQNMKMGGLPRTTPPTQKPPSPPMSGKGTLGRHSPYRTLEPVRPPVVPNDYVPSPTRNMAPSQQSPVRTASVNQRNRTYSSSGSSGGSHPSSRSSSRENSGSGSVGVPIAVPTPSPPSVFPGHPVQFYSMNRPASRHTPPTIGGSLPYRRPPSITSQTSLQNQMNGGPFYSQNPVSLAPPPPSILQVTPQLPLMGFVARVQENISDTPPPPPPVEEPVFDESPPPPPPPEDYEEEEAAVVEYSDPYAEEDPPWAPRSYLEKVVAIYDYTKDKEDELSFQEGAIIYVIKKNDDHDMS

SEQ ID NO: 829674 - protein, 484 aa, Homo sapiens
MAELQMLLEEEIPGGRRALFDSYTNLERVADYCENNYIQSADKQRALEETKAYTTQSLASVAYLINTLANNVLQMLDIQASQLRRMESSINHISQTVDIHKEKVARREIGILTTNKNTSRTHKIIAPANLERPVRYIRKPIDYTILDDIGHGVKVSTQNMKMGGLPRTTPPTQKPPSPPMSGKGTLGRHSPYRTLEPVRPPVVPNDYVPSPTRNMAPSQQSPVRTASVNQRNRTYSSSGSSGGSHPSSRSSSRENSGSGSVGVPIAVPTPSPPSVFPAPAGSAGTPPLPATSASAPAPLVPATVPSSTAPDAAAGGAQTLADGFTSPTPPVVSSTPPTGHPVQFYSMNRPASRHTPPTIGGSLPYRRPPSITSQTSLQNQMNGGPFYSQNPVSDTPPPPPPVEEPVFDESPPPPPPPEDYEEEEAAVVEYSDPYAEEDPPWAPRSYLEKVVAIYDYTKDKEDELSFQEGAIIYVIKKNDDHDMS

SEQ ID NO: 829675 - protein, 409 aa, Homo sapiens
MAELQMLLEEEIPGGRRALFDSYTNLERVADYCENNYIQSADKQRALEETKAYTTQSLASVAYLINTLANNVLQMLDIQASQLRRMESSINHISQTVDIHKEKVARREIGILTTNKNTSRTHKIIAPANLERPVRYIRKPIDYTILDDIGHGVKWLLRFKVSTQNMKMGGLPRTTPPTQKPPSPPMSGKGTLGSSGSSGGSHPSSRSSSRENSGSGSVGVPIAVPTPSPPSVFPGHPVQFYSMNRPASRHTPPTIGGSLPYRRPPSITSQTSLQNQMNGGPFYSQNPVSLAPPPPSILQVTPQLPLMGFVARVQENISDTPPPPPPVEEPVFDESPPPPPPPEDYEEEEAAVVEYSDPYAEEDPPWAPRSYLEKVVAIYDYTKDKEDELSFQEGAIIYVIKKNDDHDMS

SEQ ID NO: 829676 - protein, 475 aa, Homo sapiens
MAELQMLLEEEIPGGRRALFDSYTNLERVADYCENNYIQSADKQRALEETKAYTTQSLASVAYLINTLANNVLQMLDIQASQLRRMESSINHISQTVDIHKEKVARREIGILTTNKNTSRTHKIIAPANLERPVRYIRKPIDYTILDDIGHGVKVSTQNMKMGGLPRTTPPTQKPPSPPMSGKGTLGRHSPYRTLEPVRPPVVPNDYVPSPTRNMAPSQQSPVRTASVNQRNRTYSSSGSSGGSHPSSRSSSRENSGSGSVGVPIAVPTPSPPSVFPGHPVQFYSMNRPASRHTPPTIGGSLPYRRPPSITSQTSLQNQMNGGPFYSQNPVSLAPPPPSILQVTPQLPLMGFVARVQENISDTPPPPPPVEEPVFDESPPPPPPPEDYEEEEAAVVEYSDPYAEEDPPWAPRSYLEKVVAIYDYTKDKEDELSFQEGAIIYVIKKNDDGWYEGVMNGVTGLFPGNYVESIMHYSE

SEQ ID NO: 829677 - protein, 475 aa, Homo sapiens; identical to SEQ ID NO: 829676

SEQ ID NO: 829678 - protein, 487 aa, Homo sapiens
  misc_feature (79)..(79): Xaa can be any naturally occurring amino acid
DKLDIDFCVPGFPWRCGRRSLCDLYEEEEEEDVKMAELQMLLEEEIPGGRRALFDSYTNLERVADYCENNYIQSADKQXALEETKAYTNLERVADYCENNYIQSADKQRALEETKAYTTQSLASVAYLINTLANNVLQMLDIQASQLRRMESSINHISQTVDIHKEKVARREIGILTTNKNTSRTHKIIAPANLERPVRYIRKPIDYTILDDIGHGVKVSTQNMKMGGLPRTTPPTQKPPSPPMSGKGTLGRHSPYRTLEPVRPPVVPNDYVPSPTRNMAPSQQSPVRTASVNQRNRTYSSSGSSGGSHPSSRSSSRENSGSGSVGVPIAVPTPSPPSVFPGHPVQFYSMNRPASRHTPPTIGGSLPYRRPPSITSQTSLQNQMNGGPFYSQNPVSDTPPPPPPVEEPVFDESPPPPPPPEDYEEEEAAVVEYSDPYAEEDPPWAPRSYLEKVVAIYDYTKDKEDELSFQEGAIIYVIKKNDDHDMS

SEQ ID NO: 829679 - protein, 367 aa, Homo sapiens
MAELQMLLEEEIPGGRRALFDSYTNLERVADYCENNYIQTVDIHKEKVARREIGILTTNKNTSRTHKIIAPANLERPVRYIRKPIDYTILDDIGHGVKVSTQNMKMGGLPRTTPPTQKPPSPPMSGKGTLGRHSPYRTLEPVRPPVVPNDYVPSPTRNMAPSQQSPVRTASVNQRNRTYSSSGSSGGSHPSSRSSSRENSGSGSVGVPIAVPTPSPPSVFPGHPVQFYSMNRPASRHTPPTIGGSLPYRRPPSITSQTSLQNQMNGGPFYSQNPVSDTPPPPPPVEEPVFDESPPPPPPPEDYEEEEAAVVEYSDPYAEEDPPWAPRSYLEKVVAIYDYTKDKEDELSFQEGAIIYVIKKNDDHDMS

SEQ ID NO: 829680 - protein, 549 aa, Homo sapiens
DKLDIDFCVPGFPWRCGRRSLCDLYEEEEEEDVKMAELQMLLEEEIPGGRRALFDSYTNLERVADYCENNYIQSADKQRALEETKAYTTQSLASVAYLINTLANNVLQMLDIQASQLRRMESSINHISQEIRGVDLESTFVTKFGNNCSLRLNETVDIHKEKVARREIGILTTNKNTSRTHKIIAPANLERPVRYIRKPIDYTILDDIGHGVKWLLRFKVSTQNMKMGGLPRTTPPTQKPPSPPMSGKGTLGRHSPYRTLEPVRPPVVPNDYVPSPTRNMAPSQQSPVRTASVNQRNRTYSSSGSSGGSHPSSRSSSRENSGSGSVGVPIAVPTPSPPSVFPAPAGSAGTPPLPATSASAPAPLVPATVPSSTAPDAAAGGAQTLADGFTSPTPPVVSSTPPTGHPVQFYSMNRPASRHTPPTIGGSLPYRRPPSITSQTSLQNQMNGGPFYSQNPVSDTPPPPPPVEEPVFDESPPPPPPPEDYEEEEAAVVEYSDPYAEEDPPWAPRSYLEKVVAIYDYTKDKEDELSFQEGAIIYVIKKNDDHDMS

SEQ ID NO: 829681 - protein, 505 aa, Homo sapiens
DKLDIDFCVPGFPWRCGRRSLCDLYEEEEEEDVKMAELQMLLEEEIPGGRRALFDSYTNLERVADYCENNYIQSADKQRALEETKAYTTQSLASVAYLINTLANNVLQMLDIQASQLRRMESSINHISQEIRGVDLESTFVTKFGNNCSLRLNETVDIHKEKVARREIGILTTNKNTSRTHKIIAPANLERPVRYIRKPIDYTILDDIGHGVKVSTQNMKMGGLPRTTPPTQKPPSPPMSGKGTLGRHSPYRTLEPVRPPVVPNDYVPSPTRNMAPSQQSPVRTASVNQRNRTYSSSGSSGGSHPSSRSSSRENSGSGSVGVPIAVPTPSPPSVFPGHPVQFYSMNRPASRHTPPTIGGSLPYRRPPSITSQTSLQNQMNGGPFYSQNPVSDTPPPPPPVEEPVFDESPPPPPPPEDYEEEEAAVVEYSDPYAEEDPPWAPRSYLEKVVAIYDYTKDKEDELSFQEGAIIYVIKKNDDGWYEGVMNGVTGLFPGNYVESIMHYSE

SEQ ID NO: 829682 - protein, 449 aa, Homo sapiens
MAELQMLLEEEIPGGRRALFDSYTNLERVADYCENNYIQSADKQRALEETKAYTTQSLASVAYLINTLANNVLQMLDIQASQLRRMESSINHISQTVDIHKEKVARREIGILTTNKNTSRTHKIIAPANLERPVRYIRKPIDYTILDDIGHGVKVSTQNMKMGGLPRTTPPTQKPPSPPMSGKGTLGRHSPYRTLEPVRPPVVPNDYVPSPTRNMAPSQQSPVRTASVNQRNRTYSSSGSSGGSHPSSRSSSRENSGSGSVGVPIAVPTPSPPSVFPGHPVQFYSMNRPASRHTPPTIGGSLPYRRPPSITSQTSLQNQMNGGPFYSQNPVSLAPPPPSILQVTPQLPLMGFVARVQENISDTPPPPPPVEEPVFDESPPPPPPPEDYEEEEAAVVEYSDPYAEEDPPWAPRSYLEKVVAIYDYTKDKEDELSFQEGAIIYVIKKNDDY

SEQ ID NO: 829683 - protein, 344 aa, Homo sapiens
MAELQMLLEEEIPGGRRALFDSYTNLERVADYCENNYIQSADKQRALEETKAYTTQSLASVAYLINTLANNVLQMLDIQASQLRRMESSINHISQTVDIHKEKVARREIGILTTNKNTSRTHKIIAPANLERPVRYIRKPIDYTILDDIGHGVKVSTQNMKMGGLPRTTPPTQKPPSPPMSGKGTLGRHSPYRTLEPVRPPVVPNDYVPSPTRNMAPSQQSPVRTASVNQRNRTYSSSGSSGGSHPSSRSSSRENSGSGSVGVPIAVPTPSPPSVFPGHPVQFYSMNRPASRHTPPTIGGSLPYRRPPSITSQTSLQNQMNGGPFYSQNPVQIHKLTALLKNQL

SEQ ID NO: 829684 - protein, 78 aa, Homo sapiens
ERACARPAGRRRGDRPRSPSARAPPPSPPPLSRAGAVSRSFRVTAAVAAAPPLPVLGFLGAAAAAPSATCMRRRRRRM

SEQ ID NO: 829685 - protein, 299 aa, Homo sapiens
MKMGGLPRTTPPTQKPPSPPMSGKGTLGSSGSSGGSHPSSRSSSRENSGSGSVGVPIAVPTPSPPSVFPAPAGSAGTPPLPATSASAPAPLVPATVPSSTAPDAAAGGAQTLADGFTSPTPPVVSSTPPTGHPVQFYSMNRPASRHTPPTIGGSLPYRRPPSITSQTSLQNQMNGGPFYSQNPVSDTPPPPPPVEEPVFDESPPPPPPPEDYEEEEAAVVEYSDPYAEEDPPWAPRSYLEKVVAIYDYTKDKEDELSFQEGAIIYVIKKNDDGWYEGVMNGVTGLFPGNYVESIMHYSE

SEQ ID NO: 829686 - protein, 423 aa, Homo sapiens
MAELQMLLEEEIPGGRRALFDSYTNLERVADYCENNYIQSADKQRALEETKAYTTQSLASVAYLINTLANNVLQMLDIQASQLRRMESSINHISQTVDIHKEKVARREIGILTTNKNTSRTHKIIAPANLERPVRYIRKPIDYTILDDIGHGVKVSTQNMKMGGLPRTTPPTQKPPSPPMSGKGTLGRHSPYRTLEPVRPPVVPNDYVPSPTRNMAPSQQSPVRTASVNQRNRTYSSSGSSGGSHPSSRSSSRENSGSGSVGVPIAVPTPSPPSVFPGHPVQFYSMNRPASRHTPPTIGGSLPYRRPPSITSQTSLQNQMNGGPFYSQNPVSDTPPPPPPVEEPVFDESPPPPPPPEDYEEEEAAVVEYSDPYAEEDPPWAPRSYLEKVVAIYDYTKDKEDELSFQEGAIIYVIKKNDDHDMS

SEQ ID NO: 829687 - protein, 423 aa, Homo sapiens; identical to SEQ ID NO: 829686

SEQ ID NO: 829688 - protein, 403 aa, Homo sapiens
MAELQMLLEEEIPGGRRALFDSYTNLERVADYCENNYIQSADKQRALEETKAYTTQSLASVAYLINTLANNVLQMLDIQASQLRRMESSINHISQTVDIHKEKVARREIGILTTNKNTSRTHKIIAPANLERPVRYIRKPIDYTILDDIGHGVKVSTQNMKMGGLPRTTPPTQKPPSPPMSGKGTLGSSGSSGGSHPSSRSSSRENSGSGSVGVPIAVPTPSPPSVFPGHPVQFYSMNRPASRHTPPTIGGSLPYRRPPSITSQTSLQNQMNGGPFYSQNPVSLAPPPPSILQVTPQLPLMGFVARVQENISDTPPPPPPVEEPVFDESPPPPPPPEDYEEEEAAVVEYSDPYAEEDPPWAPRSYLEKVVAIYDYTKDKEDELSFQEGAIIYVIKKNDDHDMS

SEQ ID NO: 829689 - protein, 475 aa, Homo sapiens; identical to SEQ ID NO: 829676

SEQ ID NO: 829690 - protein, 475 aa, Homo sapiens; identical to SEQ ID NO: 829676

SEQ ID NO: 829691 - protein, 286 aa, Homo sapiens
GTGVIECHPALVPMSVKGTLGRHSPYRTLEPVRPPVVPNDYVPSPTRNMAPSQQSPVRTASVNQRNRTYSSSGSSGGSHPSSRSSSRENSGSGSVGVPIAVPTPSPPSVFPGHPVQFYSMNRPASRHTPPTIGGSLPYRRPPSITSQTSLQNQMNGGPFYSQNPVSLAPPPPSILQVTPQLPLMGFVARVQENISDTPPPPPPVEEPVFDESPPPPPPPEDYEEEEAAVVEYSDPYAEEDPPWAPRSYLEKVVAIYDYTKDKEDELSFQEGAIIYVIKKNDDHDMS

SEQ ID NO: 829692 - protein, 513 aa, Homo sapiens
MAELQMLLEEEIPGGRRALFDSYTNLERVADYCENNYIQSADKQRALEETKAYTTQSLASVAYLINTLANNVLQMLDIQASQLRRMESSINHISQTVDIHKEKVARREIGILTTNKNTSRTHKIIAPANLERPVRYIRKPIDYTILDDIGHGVKWLLRFKVSTQNMKMGGLPRTTPPTQKPPSPPMSGKGTLGRHSPYRTLEPVRPPVVPNDYVPSPTRNMAPSQQSPVRTASVNQRNRTYSSSGSSGGSHPSSRSSSRENSGSGSVGVPIAVPTPSPPSVFPAPAGSAGTPPLPATSASAPAPLVPATVPSSTAPDAAAGGAQTLADGFTSPTPPVVSSTPPTGHPVQFYSMNRPASRHTPPTIGGSLPYRRPPSITSQTSLQNQMNGGPFYSQNPVSDTPPPPPPVEEPVFDESPPPPPPPEDYEEEEAAVVEYSDPYAEEDPPWAPRSYLEKVVAIYDYTKDKEDELSFQEGAIIYVIKKNDDGWYEGVMNGVTGLFPGNYVESIMHYSE

SEQ ID NO: 829693 - protein, 375 aa, Homo sapiens
  misc_feature (371)..(371): Xaa can be any naturally occurring amino acid
MAELQMLLEEEIPGGRRALFDSYTNLERVADYCENNYIQSADKQRALEETKAYTTQSLASVAYLINTLANNVLQMLDIQASQLRRMESSINHISQTVDIHKEKVARREIGILTTNKNTSRTHKIIAPANLERPVRYIRKPIDYTILDDIGHGVKVSTQNMKMGGLPRTTPPTQKPPSPPMSGKGTLGSSGSSGGSHPSSRSSSRENSGSGSVGVPIAVPTPSPPSVFPGHPVQFYSMNRPASRHTPPTIGGSLPYRRPPSITSQTSLQNQMNGGPFYSQNPVSDTPPPPPPVEEPVFDESPPPPPPPEDYEEEEAAVVEYSDPYAEEDPPWAPRSYLEKVVAIYDYTKDKEDELSFQEGAIIYVIKKNDDXRVKQ

SEQ ID NO: 829694 - protein, 139 aa, Homo sapiens
DKLDIDFSVPGFPWRCGRRSLCDLYEEEEEEDVKMAELQMLLEEEIPGGRRALFDSYTNLERVADYCENNYIQSADKQRALEETKAYTTQSLASVAYLINTLANNVLQMLDIQASQLRRMESSINHISQVRPQYFPICL

SEQ ID NO: 829695 - protein, 117 aa, Homo sapiens
ESARRTRPGRAAAPGGRAERNVVSLCCPVLASSEPPTSAFQSVGIIGVSHCTWHSLKTFWKKLKLSFSTLLILCFCWSAYHLMASKTNAKFLSDYAVLRDYLKLHSKARYTTNFEME

SEQ ID NO: 829696 - protein, 1804 aa, Homo sapiens
MTSLKRSQTERPLATDRASVVGTDGTPKVHTDDFYMRRFRSQNGSLGSSVMAPVGPPRSEGSHHITSTPGVPKMGVRARIADWPPRKENIKESSRSSQEIETSSCLDSLSSKSSPVSQGSSVSLNSNDSAMLKSIQNTLKNKTRPSENMDSRFLMPEAYPSSPRKALRRIRQRSNSDITISELDVDSFDECISPTYKTGPSLHREYGSTSSIDKQGTSGESFFDLLKGYKDDKSDRGPTPTKLSDFLITGGGKGSGFSLDVIDGPISQRENLRLFKEREKPLKRRSKSETGDSSIFRKLRNAKGEELGKSSDLEDNRSEDSVRPWTCPKCFAHYDVQSILFDLNEAIMNRHNVIKRRNTTTGASAAAVASLVSGPLSHSASFSSPMGSTEDLNSKGSLSMDQGDDKSNELVMSCPYFRNEIGGEGERKISLSKSNSGSFSGCESASFESTLSSHCTNAGVAVLEVPKENLVLHLDRVKRYIVEHVDLGAYYYRKFFYQKEHWNYFGADENLGPVAVSIRREKPDEMKENGSPYNYRIIFRTSELMTLRGSVLEDAIPSTAKHSTARGLPLKEVLEHVVPELNVQCLRLAFNTPKVTEQLMKLDEQGLNYQQKVGIMYCKAGQSTEEEMYNNESAGPAFEEFLQLLGERVRLKGFEKYRAQLDTKTDSTGTHSLYTTYKDYEIMFHVSTMLPYTPNNKQQLLRKRHIGNDIVTIVFQEPGAQPFSPKNIRSHFQHVFVIVRVHNPCSDSVCYSVAVTRSRDVPSFGPPIPKGVTFPKSNVFRDFLLAKVINAENAAHKSEKFRAMATRTRQEYLKDLAEKNVTNTPIDPSGKFPFISLASKKKEKSKPYPGAELSSMGAIVWAVRAEDYNKAMELDCLLGISNEFIVLIEQETKSVVFNCSCRDVIGWTSTDTSLKIFYERGECVSVGSFINIEEIKEIVKRLQFVSKGCESVEMTLRRNGLGQLGFHVNYEGIVADVEPYGYAWQAGLRQGSRLVEICKVAVATLSHEQMIDLLRTSVTVKVVIIPPHDDCTPRRSCSETYRMPVMEYKMNEGVSYEFKFPFRNNNKWQRNASKGPHSPQVPSQVQSPMTSRLNAGKGDGKMPPPERAANIPRSISSDGRPLERRLSPGSDIYVTVSSMALARSQCRNSPSNLSSSSDTGSVGGTYRQKSMPEGFGVSRRSPASIDRQNTQSDIGGSGKSTPSWQRSEDSIADQMAYSYRGPQDFNSFVLEQHEYTEPTCHLPAVSKVLPAFRESPSGRLMRQDPVVHLSPNKQGHSDSHYSSHSSSNTLSSNASSAHSDEKWYDGDRTESELNSYNYLQGTSADSGIDTTSYGPSHGSTASLGAATSSPRSGPGKEKVAPLWHSSSEVISMADRTLETESHGLDRKTESSLSLDIHSKSQAGSTPLTRENSTFSINDAASHTSTMSSRHSASPVVFTSARSSPKEELHPAAPSQLAPSFSSSSSSSSGPRSFYPRQGATSKYLIGWKKPEGTINSVGFMDTRKRHQSDGNEIAHTRLRASTRDLRASPKPTSKSTIEEDLKKLIDLESPTPESQKSFKFHALSSPQSPFPSTPTSRRALHRTLSDESIYNSQREHFFTSRASLLDQALPNDVLFSSTYPSLPKSLPLRRPSYTLGMKSLHGEFSASDSSLTDIQETRRQPMPDPGLMPLPDTAADLDWSNLVDAAKAYEVQRASFFAASDENHRPLSAASNSDQLEDQALAQMKPYSSSKDSSPTLASKVDQLEGMLKMLREDLKKEKEDKAHLQAEVQHLREDNLRLQEESQNASDKLKKFTEWVFNTIDMS

SEQ ID NO: 829697 - protein, 1783 aa, Homo sapiens
MTSLKRSQTERPLATDRASVVGTDGTPKVHTDDFYMRRFRSQNGSLGSSVMAPVGPPRSEGSHHITSTPGVPKMGVRARIADWPPRKENIKESSRSSQEIETSSCLDSLSSKSSPVSQGSSVSLNSNDSAMLKSIQNTLKNKTRPSENMDSRFLMPEAYPSSPRKALRRIRQRSNSDITISELDVDSFDECISPTYKTGPSLHREYGSTSSIDKQGTSGESFFDLLKGYKDDKSDRGPTPTKLSDFLITGGGKGSGFSLDVIDGPISQRENLRLFKEREKPLKRRSKSETGDSSIFRKLRNAKGEELGKSSDLEDNRSEDSVRPWTCPKCFAHYDVQSILFDLNEAIMNRHNVIKRRNTTTGASAAAVASLVSGPLSHSASFSSPMGSTEDLNSKGSLSMDQGDDKSNELVMSCPYFRNEIGGEGERKISLSKSNSGSFSGCESASFESTLSSHCTNAGVAVLEVPKENLVLHLDRVKRYIVEHVDLGAYYYRKFFYQKEHWNYFGADENLGPVAVSIRREKPDEMKENGSPYNYRIIFRTSELMTLRGSVLEDAIPSTAKHSTARGLPLKEVLEHVVPELNVQCLRLAFNTPKVTEQLMKLDEQGLNYQQKVGIMYCKAGQSTEEEMYNNESAGPAFEEFLQLLGERVRLKGFEKYRAQLDTKTDSTGTHSLYTTYKDYEIMFHVSTMLPYTPNNKQQLLRKRHIGNDIVTIVFQEPGAQPFSPKNIRSHFQHVFVIVRVHNPCSDSVCYSVAVTRSRDVPSFGPPIPKGVTFPKSNVFRDFLLAKVINAENAAHKSEKFRAMATRTRQEYLKDLAEKNVTNTPIDPSGKFPFISLASKKKEKSKPYPGAELSSMGAIVWAVRAEDYNKAMELDCLLGISNEFIVLIEQETKSVVFNCSCRDVIGWTSTDTSLKIFYERGECVSVGSFINIEEIKEIVKRLQFVSKGCESVEMTLRRNGLGQLGFHVNYEGIVADVEPYGYAWQAGLRQGSRLVEICKVAVATLSHEQMIDLLRTSVTVKVVIIPPHDDCTPRRSCSETYRMPVMEYKMNEGVSYEFKFPFRNNNKWQRNASKGPHSPQVPSQVQSPMTSRLNAGKGDGKMPPPERAANIPRSISSDGRPLERRLSPGSDIYVTVSSMALARSQCRNSPSNLSSSSDTGSVGGTYRQKSMPEGFGVSRRSPASIDRQNTQSDIGGSGKSTPSWQRSEDSIADQMEPTCHLPAVSKVLPAFRESPSGRLMRQDPVVHLSPNKQGHSDSHYSSHSSSNTLSSNASSAHSDEKWYDGDRTESELNSYNYLQGTSADSGIDTTSYGPSHGSTASLGAATSSPRSGPGKEKVAPLWHSSSEVISMADRTLETESHGLDRKTESSLSLDIHSKSQAGSTPLTRENSTFSINDAASHTSTMSSRHSASPVVFTSARSSPKEELHPAAPSQLAPSFSSSSSSSSGPRSFYPRQGATSKYLIGWKKPEGTINSVGFMDTRKRHQSDGNEIAHTRLRASTRDLRASPKPTSKSTIEEDLKKLIDLESPTPESQKSFKFHALSSPQSPFPSTPTSRRALHRTLSDESIYNSQREHFFTSRASLLDQALPNDVLFSSTYPSLPKSLPLRRPSYTLGMKSLHGEFSASDSSLTDIQETRRQPMPDPGLMPLPDTAADLDWSNLVDAAKAYEVQRASFFAASDENHRPLSAASNSDQLEDQALAQMKPYSSSKDSSPTLASKVDQLEGMLKMLREDLKKEKEDKAHLQAEVQHLREDNLRLQEESQNASDKLKKFTEWVFNTIDMS

SEQ ID NO: 829698 - protein, 1783 aa, Homo sapiens; identical to SEQ ID NO: 829697

SEQ ID NO: 829699 - protein, 1475 aa, Homo sapiens
MTSLKRSQTERPLATDRASVVGTDGTPKVHTDDFYMRRFRSQNGSLGSSVMAPVGPPRSEGSHHITSTPGVPKMGVRARIADWPPRKENIKESSRSSQEIETSSCLDSLSSKSSPVSQGSSVSLNSNDSAMLKSIQNTLKNKTRPSENMDSRFLMPEAYPSSPRKALRRIRQRSNSDITISELDVDSFDECISPTYKTGPSLHREYGSTSSIDKQGTSGESFFDLLKGYKDDKSDRGPTPTKLSDFLITGGGKGSGFSLDVIDGPISQRENLRLFKEREKPLKRRSKSETGDSSIFRKLRNAKGEELGKSSDLEDNRSEDSVRPWTCPKCFAHYDVQSILFDLNEAIMNRHNVIKRRNTTTGASAAAVASLVSGPLSHSASFSSPMGSTEDLNSKGSLSMDQGDDKSNELVMSCPYFRNEIGGEGERKISLSKSNSGSFSGCESASFESTLSSHCTNAGVAVLEVPKENLVLHLDRVKRYIVEHVDLGAYYYRKFFYQKEHWNYFGADENLGPVAVSIRREKPDEMKENGSPYNYRIIFRTSELMTLRGSVLEDAIPSTAKHSTARGLPLKEVLEHVVPELNVQCLRLAFNTPKVTEQLMKLDEQGLNYQQKVGIMYCKAGQSTEEEMYNNESAGPAFEEFLQLLGERVRLKGFEKYRAQLDTKTDSTGTHSLYTTYKDYEIMFHVSTMLPYTPNNKQQLLRKRHIGNDIVTIVFQEPGAQPFSPKNIRSHFQHVFVIVRVHNPCSDSVCYSVAVTRSRDVPSFGPPIPKGVTFPKSNVFRDFLLAKVINAENAAHKSEKFRAMATRTRQEYLKDLAEKNVTNTPIDPSGKFPFISLASKKKEKSKPYPGAELSSMGAIVWAVRAEDYNKAMELDCLLGISNEFIVLIEQETKSVVFNCSCRDVIGWTSTDTSLKIFYERGECVSVGSFINIEEIKEIVKRLQFVSKGCESVEMTLRRNGLGQLGFHVNYEGIVADVEPYGYAWQAGLRQGSRLVEICKVAVATLSHEQMIDLLRTSVTVKVVIIPPHDDCTPRRSCSETYRMPVMEYKMNEGVSYEFKFPFRNNNKWQRNASKGPHSPQVPSQVQSPMTSRLNAGKGDGKMPPPERAANIPRSISSDGRPLERRLSPGSDIYVTVSSMALARSQCRNSPSNLSSSSDTGSVGGTYRQKSMPEGFGVSRRSPASIDRQNTQSDIGGSGKSTPSWQRSEDSIADQMEPTCHLPAVSKVLPAFRESPSGRLMRQDPVVHLSPNKQGHSDSHYSSHSSSNTLSSNASSAHSDEKWYDGDRTESELNSYNYLQGTSADSGIDTTSYGPSHGSTASLGAATSSPRSGPGKEKVAPLWHSSSEVISMADRTLETESHGLDRKTESSLSLDIHSKSQAGSTPLTRENSTFSINDAASHTSTMSSRHSASPVVFTSARSSPKEELHPAAPSQLAPSFSSSSSSSSGPRSFYPRQGATSKYLIGWSVIRAMAMK

SEQ ID NO: 829700 - protein, 387 aa, Homo sapiens
RAASHTSTMSSRHSASPVVFTSARSSPKEELHPAAPSQLAPSFSSSSSSSSGPRSFYPRQGATSKYLIGWKKPEGTINSVGFMDTRKRHQSDGNEIAHTRLRASTRDLRASPKPTSKSTIEEDLKKLIDLESPTPESQKSFKFHALSSPQSPFPSTPTSRRALHRTLSDESIYNSQREHFFTSRASLLDQALPNDVLFSSTYPSLPKSLPLRRPSYTLGMKSLHGEFSASDSSLTDIQETRRQPMPDPGLMPLPDTAADLDWSNLVDAAKAYEVQRASFFAASDENHRPLSAASNSDQLEDQALAQMKPYSSSKDSSPTLASKVDQLEGMLKMLREDLKKEKEDKAHLQAEVQHLREDNLRLQEESQNASDKLKKFTEWVFNTIDMS

SEQ ID NO: 829701 - protein, 1741 aa, Homo sapiens
MTSLKRSQTERPLATDRASVVGTDGTPKVHTDDFYMRRFRSQNGSLGSSVMAPVGPPRSEGSHHITSTPGVPKMGVRARIADWPPRKENIKESSRSSQEIETSSCLDSLSSKSSPVSQGSSVSLNSNDSAMLKSIQNTLKNKTRPSENMDSRFLMPEAYPSSPRKALRRIRQRSNSDITISELDVDSFDECISPTYKTGPSLHREYGSTSSIDKQGTSGESFFDLLKGYKDDKSDRGPTPTKLSDFLITGGGKGSGFSLDVIDGPISQRENLRLFKEREKPLKRRSKSETGDSSIFRKLRNAKGEELGKSSDLEDNRSEDSVRPWTCPKCFAHYDVQSILFDLNEAIMNRHNVIKRRNTTTGASAAAVASLVSGPLSHSASFSSPMGSTEDLNSKGSLSMDQGDDKSNELVMSCPYFRNEIGGEGERKISLSKSNSGSFSGCESASFESTLSSHCTNAGVAVLEVPKENLVLHLDRVKRYIVEHVDLGAYYYRKFFYQKEHWNYFGADENLGPVAVSIRREKPDEMKENGSPYNYRIIFRTSELMTLRGSVLEDAIPSTAKHSTARGLPLKEVLEHVVPELNVQCLRLAFNTPKVTEQLMKLDEQGLNYQQKVGIMYCKAGQSTEEEMYNNESAGPAFEEFLQLLGERVRLKGFEKYRAQLDTKTDSTGTHSLYTTYKDYEIMFHVSTMLPYTPNNKQQLLRKRHIGNDIVTIVFQEPGAQPFSPKNIRSHFQHVFVIVRVHNPCSDSVCYSVAVTRSRDVPSFGPPIPKGVTFPKSNVFRDFLLAKVINAENAAHKSEKFRAMATRTRQEYLKDLAEKNVTNTPIDPSGKFPFISLASKKKEKSKPYPGAELSSMGAIVWAVRAEDYNKAMELDCLLGISNEFIVLIEQETKSVVFNCSCRDVIGWTSTDTSLKIFYERGECVSVGSFINIEEIKEIVKRLQFVSKGCESVEMTLRRNGLGQLGFHVNYEGIVADVEPYGYAWQAGLRQGSRLVEICKVAVATLSHEQMIDLLRTSVTVKVVIIPPHDDCTPRRSCSETYRMPVMEYKMNEGVSYEFKFPFRNNNKWQRNASKGPHSPQVPSQVQSPMTSRLNAGKGDGKMPPPERAANIPRSISSDGRPLERRLSPGSDIYVTVSSMALARSQCRNSPSNLSSSSDTGSVGGTYRQKSMPEGFGVSRRSPASIDRQNTQSDIGGSGKSTPSWQRSEDSIADQMEPTCHLPAVSKVLPAFRESPSGRLMRQDPVVHLSPNKQGHSDSHYSSHSSSNTLSSNASSAHSDEKWYDGDRTESELNSYNYLQGTSADSGIDTTSYGPSHGSTASLGAATSSPRSGPGKEKVAPLWHSSSEVISMADRTLETESHGLDRKTESSLSLDIHSKSQAGSTPLTRENSTFSINDAASHTSTMSSRHSASPVVFTSARSSPKEELHPAAPSQLAPSFSSSSSSSSGPRSFYPRQGATSKYLIGWKKPEGTINSVGFMDTRKRHQSDGNEIAHTRLRASTRDLRASPKPTSKSTIEEDLKKLIDLESPTPESQKSFKFHALSSPQSPFPSTPTSRRALHRTLSDESIYNSQREHFFTSRASLLDQALPNDVLFSSTYPSLPKSLPLRRPSYTLGMKSLHGEFSASDSSLTDIQETRRQPMPDPGLMPLPDTAADLDWSNLVDAAKAYEVQRASFFAASDENHRPLSAASNSDQLEDQALAQMKPYSRLVPVQGQYSAPCVTSATDCICGEKRWKPHGVAE

SEQ ID NO: 829702 - protein, 1589 aa, Homo sapiens
MTSLKRSQTERPLATDRASVVGTDGTPKVHTDDFYMRRFRSQNGSLGSSVMAPVGPPRSEGSHHITSTPGVPKMGVRARIADWPPRKENIKESSRSSQEIETSSCLDSLSSKSSPVSQGSSVSLNSNDSAMLKSIQNTLKNKTRPSENMDSRFLMPEAYPSSPRKALRRIRQRSNSDITISELDVDSFDECISPTYKTGPSLHREYGSTSSIDKQGTSGESFFDLLKGYKDDKSDRGPTPTKLSDFLITGGGKGSGFSLDVIDGPISQRENLRLFKEREKPLKRRSKSETGDSSIFRKLRNAKGEELGKSSDLEDNRSEDSVRPWTCPKCFAHYDVQSILFDLNEAIMNRHNVIKRRNTTTGASAAAVASLVSGPLSHSASFSSPMGSTEDLNSKGSLSMDQGDDKSNELVMSCPYFRNEIGGEGERKISLSKSNSGSFSGCESASFESTLSSHCTNAGVAVLEVPKENLVLHLDRVKRYIVEHVDLGAYYYRKFFYQKEHWNYFGADENLGPVAVSIRREKPDEMKENGSPYNYRIIFRTSELMTLRGSVLEDAIPSTAKHSTARGLPLKEVLEHVVPELNVQCLRLAFNTPKVTEQLMKLDEQGLNYQQKVGIMYCKAGQSTEEEMYNNESAGPAFEEFLQLLGERVRLKGFEKYRAQLDTKTDSTGTHSLYTTYKDYEIMFHVSTMLPYTPNNKQQLLRKRHIGNDIVTIVFQEPGAQPFSPKNIRSHFQHVFVIVRVHNPCSDSVCYSVAVTRSRDVPSFGPPIPKGVTFPKSNVFRDFLLAKVINAENAAHKSEKFRAMATRTRQEYLKDLAEKNVTNTPIDPSGKFPFISLASKKKEKSKPYPGAELSSMGAIVWAVRAEDYNKAMELDCLLGISNEFIVLIEQETKSVVFNCSCRDVIGWTSTDTSLKIFYERGECVSVGSFINIEEIKEIVKRLQFVSKGCESVEMTLRRNGLGQLGFHVNYEGIVADVEPYGYAWQAGLRQGSRLVEICKVAVATLSHEQMIDLLRTSVTVKVVIIPPHDDCTPRRSCSETYRMPVMEYKMNEGVSYEFKFPFRNNNKWQRNASKGPHSPQVPSQVQSPMTSRLNAGKGDGKMPPPERAANIPRSISSDGRPLERRLSPGSDIYVTVSSMALARSQCRNSPSNLSSSSDTGSVGGTYRQKSMPEGFGVSRRSPASIDRQNTQSDIGGSGKSTPSWQRSEDSIADQMEPTCHLPAVSKVLPAFRESPSGRLMRQDPVVHLSPNKQGHSDSHYSSHSSSNTLSSNASSAHSDEKWYDGDRTESELNSYNYLQGTSADSGIDTTSYGPSHGSTASLGAATSSPRSGPGKEKVAPLWHSSSEVISMADRTLETESHGLDRKTESSLSLDIHSKSQAGSTPLTRENSTFSINDAASHTSTMSSRHSASPVVFTSARSSPKEELHPAAPSQLAPSFSSSSSSSSGPRSFYPRQGATSKYLIGWKKPEGTINSVGFMDTRKRHQSDGNEIAHTRLRASTRDLRASPKPTSKSTIEEDLKKLIDLESPTPESQKSFKFHALSSPSSLIFLLGSFRTRSGKLPTPVMTSNLSSKGSLHIKSLPDNFKRD

SEQ ID NO: 829703 - protein, 764 aa, Homo sapiens
MTSLKRSQTERPLATDRASVVGTDGTPKVHTDDFYMRRFRSQNGSLGSSVMAPVGPPRSEGSHHITSTPGVPKMGVRARIADWPPRKENIKESSRSSQEIETSSCLDSLSSKSSPVSQGSSVSLNSNDSAMLKSIQNTLKNKTRPSENMDSRFLMPEAYPSSPRKALRRIRQRSNSDITISELDVDSFDECISPTYKTGPSLHREYGSTSSIDKQGTSGESFFDLLKGYKDDKSDRGPTPTKLSDFLITGGGKGSGFSLDVIDGPISQRENLRLFKEREKPLKRRSKSETGDSSIFRKLRNAKGEELGKSSDLEDNRSEDSVRPWTCPKCFAHYDVQSILFDLNEAIMNRHNVIKRRNTTTGASAAAVASLVSGPLSHSASFSSPMGSTEDLNSKGSLSMDQGDDKSNELVMSCPYFRNEIGGEGERKISLSKSNSGSFSGCESASFESTLSSHCTNAGVAVLEVPKENLVLHLDRVKRYIVEHVDLGAYYYRKFFYQKEHWNYFGADENLGPVAVSIRREKPDEMKENGSPYNYRIIFRTSELMTLRGSVLEDAIPSTAKHSTARGLPLKEVLEHVVPELNVQCLRLAFNTPKVTEQLMKLDEQGLNYQQKVGIMYCKAGQSTEEEMYNNESAGPAFEEFLQLLGERVRLKGFEKYRAQLDTKTDSTGTHSLYTTYKDYEIMFHVSTMLPYTPNNKQQLLRKRHIGNDIVTIVFQEPGAQPFSPKNIRSHFQHVFVIVRVHNPCSDSVCYSDLNYLIPVDRED

SEQ ID NO: 829704 - protein, 44 aa, Homo sapiens
LGMKSLHGKWSFSCSLDGPVDDGQCPQTWLPLMCSERGPVSMLR

SEQ ID NO: 829705 - protein, 106 aa, Homo sapiens [sequence omitted]

SEQ ID NO: 829706 - protein, 79 aa, Homo sapiens
TGMNGLDGFDGLDEMDGMDGWMDRMDGWMNAGKGDGKMPPPERAANIPRSISSDGRPLERRTSPGSDIKVTFLIPVTFL

SEQ ID NO: 829707 - protein, 1804 aa, Homo sapiens; identical to SEQ ID NO: 829696

SEQ ID NO: 829708 - protein, 1765 aa, Homo sapiens
MTSLKRSQTERPLATDRASVVGTDGTPKVHTDDFYMRRFRSQNGSLGSSVMAPVGPPRSEGSHHITSTPGVPKMGVRARIADWPPRKENIKESSRSSQEIETSSCLDSLSSKSSPVSQGSSVSLNSNDSAMLKSIQNTLKNKTRPSENMDSRFLMPEAYPSSPRKALRRIRQRSNSDITISELDVDSFDECISPTYKTGPSLHREYGSTSSIDKQGTSGESFFDLLKGYKDDKSDRGPTPTKLSDFLITGGGKGSGFSLDVIDGPISQRENLRLFKEREKPLKRRSKSETGDSSIFRKLRNAKGEELGKSSDLEDNRSEDSVRPWTCPKCFAHYDVQSILFDLNEAIMNRHNVIKRRNTTTGASAAAVASLVSGPLSHSASFSSPMGSTEDLNSKGSLSMDQGDDKSNELVMSCPYFRNEIGGEGERKISLSKSNSGSFSGCESASFESTLSSHCTNAGVAVLEVPKENLVLHLDRVKRYIVEHVDLGAYYYRKFFYQKEHWNYFGADENLGPVAVSIRREKPDEMKENGSPYNYRIIFRTSELMTLRGSVLEDAIPSTAKHSTARGLPLKEVLEHVVPELNVQCLRLAFNTPKVTEQLMKLDEQGLNYQQKVGIMYCKAGQSTEEEMYNNESAGPAFEEFLQLLGERVRLKGFEKYRAQLDTKTDSTGTHSLYTTYKDYEIMFHVSTMLPYTPNNKQQLLRKRHIGNDIVTIVFQEPGAQPFSPKNIRSHFQHVFVIVRVHNPCSDSVCYSVAVTRSRDVPSFGPPIPKGVTFPKSNVFRDFLLAKVINAENAAHKSEKFRAMATRTRQEYLKDLAEKNVTNTPIDPSGKFPFISLASKKKEKSKPYPGAELSSMGAIVWAVRAEDYNKAMELDCLLGISNEFIVLIEQETKSVVFNCSCRDVIGWTSTDTSLKIFYERGECVSVGSFINIEEIKEIVKRLQFVSKGCESVEMTLRRNGLGQLGFHVNYEGIVADVEPYGYAWQAGLRQGSRLVEICKVAVATLSHEQMIDLLRTSVTVKVVIIPPHDDCTPRRSCSETYRMPVMEYKMNEGVSYEFKFPFRNNNKWQRNASKGPHSPQVPSQVQSPMTSRLNAGKGDGKMPPPERAANIPRSISSDGRPLERRLSPGSDIYVTVSSMALARSQCRNSPSNLSSSSDTGSVGGTYRQKSMPEGFGVSRRSPASIDRQNTQSDIGGSGKSTPSWQRSEDSIADQMEPTCHLPAVSKVLPAFRESPSGRLMRQDPVVHLSPNKQGHSDSHYSSHSSSNTLSSNASSAHSDEKWYDGDRTESELNSYNYLQGTSADSGIDTTSYGPSHGSTASLGAATSSPRSGPGKEKVAPLWHSSSEVISMADRTLETESHGLDRNPLTRENSTFSINDAASHTSTMSSRHSASPVVFTSARSSPKEELHPAAPSQLAPSFSSSSSSSSGPRSFYPRQGATSKYLIGWKKPEGTINSVGFMDTRKRHQSDGNEIAHTRLRASTRDLRASPKPTSKSTIEEDLKKLIDLESPTPESQKSFKFHALSSPQSPFPSTPTSRRALHRTLSDESIYNSQREHFFTSRASLLDQALPNDVLFSSTYPSLPKSLPLRRPSYTLGMKSLHGEFSASDSSLTDIQETRRQPMPDPGLMPLPDTAADLDWSNLVDAAKAYEVQRASFFAASDENHRPLSAASNSDQLEDQALAQMKPYSSSKDSSPTLASKVDQLEGMLKMLREDLKKEKEDKAHLQAEVQHLREDNLRLQEESQNASDKLKKFTEWVFNTIDMS

SEQ ID NO: 829709 - protein, 544 aa, Homo sapiens [sequence omitted]

SEQ ID NO: 829710 - protein, 370 aa, Homo sapiens
MTSLKRSQTERPLATDRASVVGTDGTPKVHTDDFYMRRFRSQNGSLGSSVMAPVGPPRSEGSHHITSTPGVPKMGVRARIADWPPRKENIKESSRSSQEIETSSCLDSLSSKSSPVSQGSSVSLNSNDSAMLKSIQNTLKNKTRPSENMDSRFLMPEAYPSSPRKALRRIRQRSNSDITISELDVDSFDECISPTYKTGPSLHREYGSTSSIDKQGTSGESFFDLLKGYKDDKSDRGPTPTKLSDFLITGGGKGSGFSLDVIDGPISQRENLRLFKEREKPLKRRSKSETGDSSIFRKLRNAKGEELGKSSDLEDNRSEDSVRPWTCPKCFAHYDVQSILFDLNEAIMNRHNVIKRKKFTEWVFNTIDMS

SEQ ID NO: 829711 - protein, 117 aa, Homo sapiens; identical to SEQ ID NO: 829695

SEQ ID NO: 829712 - protein, 349 aa, Homo sapiens
MQEMGNGKANRLYEAYLPETFRRPQIDPAVEGFIRDKYEKKKYMDRSLDINAFRKEKDDKWKRGSEPVPEKKLEPVVFEKVKMPQKKEDPQLPRKSSPKSTAPVMDLLGLDAPVACSIANSKTSNTLEKDLDLLASVPSPSSSGSRKVVGSMPTAGSAGSVPENLNLFPEPGSKSEEIGKKQLSKDSILSLYGSQTPQMPTQAMFMAPAQMAYPTAYPSFPGVTPPNSIMGSMMPPPVGMVAQPGASGMVAPMAMPAGYMGGMQASMMGVPNGMMTTQQAGYMAGMAAMPQTVYGVQPAQQLQWNLTQMTQQMAGMNFYGANGMMNYGQSMSGGNGQAANQTLSPQMWK

SEQ ID NO: 829713 - protein, 429 aa, Homo sapiens
MTGKSVKDVDRYQAVLANLLLEEDNKFCADCQSKGPRWASWNIGVFICIRCAGIHRNLGVHISRVKSVNLDQWTQEQIQCMQEMGNGKANRLYEAYLPETFRRPQIDPAVEGFIRDKYEKKKYMDRSLDINAFRKEKDDKWKRGSEPVPEKKLEPVVFEKVKMPQKKEDPQLPRKSSPKSTAPVMDLLGLDAPVACSIANSKTSNTLEKDLDLLASVPSPSSSGSRKVVGSMPTAGSAGSVPENLNLFPEPGSKSEEIGKKQLSKDSILSLYGSQTPQMPTQAMFMAPAQMAYPTAYPSFPGVTPPNSIMGSMMPPPVGMVAQPGASGMVAPMAMPAGYMGGMQASMMGVPNGMMTTQQAGYMAGMAAMPQTVYGVQPAQQLQWNLTQMTQQMAGMNFYGANGMMNYGQSMSGGNGQAANQTLSPQMWK

SEQ ID NO: 829714 - protein, 345 aa, Homo sapiens
ADSRGPRRRGLGLSETFRRPQIDPAVEGFIRDKYEKKKYMDRSLDINAFRKEKDDKWKRGSEPVPEKKLEPVVFEKVKMPQKKEDPQLPRKSSPKSTAPVMDLLGLDAPVACSIANSKTSNTLEKDLDLLASVPSPSSSGSRKVVGSMPTAGSAGSVPENLNLFPEPGSKSEEIGKKQLSKDSILSLYGSQTPQMPTQAMFMAPAQMAYPTAYPSFPGVTPPNSIMGSMMPPPVGMVAQPGASGMVAPMAMPAGYMGGMQASMMGVPNGMMTTQQAGYMAGMAAMPQTVYGVQPAQQLQWNLTQMTQQMAGMNFYGANGMMNYGQSMSGGNGQAANQTLSPQMWK

SEQ ID NO: 829715 - protein, 429 aa, Homo sapiens; identical to SEQ ID NO: 829713

SEQ ID NO: 829716 - protein, 429 aa, Homo sapiens; identical to SEQ ID NO: 829713

SEQ ID NO: 829717 - protein, 117 aa, Homo sapiens
MTGKSVKDVDRYQAVLANLLLEEDNKFCADCQSKGPRWASWNIGVFICIRCAGIHRNLGVHISRVKSVNLDQWTQEQIQCMQEMGNGKANRLYEAYLPETFRRPQIDPYLFWSNLEG

SEQ ID NO: 829718 - protein, 429 aa, Homo sapiens; identical to SEQ ID NO: 829713

SEQ ID NO: 829719 - protein, 399 aa, Homo sapiens
MIFKGPRWASWNIGVFICIRCAGIHRNLGVHISRVKSVNLDQWTQEQIQCMQEMGNGKANRLYEAYLPETFRRPQIDPAVEGFIRDKYEKKKYMDRSLDINAFRKEKDDKWKRGSEPVPEKKLEPVVFEKVKMPQKKEDPQLPRKSSPKSTAPVMDLLGLDAPVACSIANSKTSNTLEKDLDLLASVPSPSSSGSRKVVGSMPTAGSAGSVPENLNLFPEPGSKSEEIGKKQLSKDSILSLYGSQTPQMPTQAMFMAPAQMAYPTAYPSFPGVTPPNSIMGSMMPPPVGMVAQPGASGMVAPMAMPAGYMGGMQASMMGVPNGMMTTQQAGYMAGMAAMPQTVYGVQPAQQLQWNLTQMTQQMAGMNFYGANGMMNYGQSMSGGNGQAANQTLSPQMWK

SEQ ID NO: 829720 - protein, 245 aa, Homo sapiens
MDLLGLDAPVACSIANSKTSNTLEKDLDLLASVPSPSSSGSRKVVGSMPTAGSAGSVPENLNLFPEPGSKSEEIGKKQLSKDSILSLYGSQTPQMPTQAMFMAPAQMAYPTAYPSFPGVTPPNSIMGSMMPPPVGMVAQPGASGMVAPMAMPAGYMGGMQASMMGVPNGMMTTQQAGYMAGMAAMPQTVYGVQPAQQLQWNLTQMTQQMAGMNFYGANGMMNYGQSMSGGNGQAANQTLSPQMWK

SEQ ID NO: 829721 - protein, 198 aa, Homo sapiens [sequence omitted]

SEQ ID NO: 829722 - protein, 429 aa, Homo sapiens; identical to SEQ ID NO: 829713

SEQ ID NO: 829723 - protein, 204 aa, Homo sapiens
MTGKSVKDVDRYQAVLANLLLEEDNKFCADCQSKGPRWASWNIGVFICIRCAGIHRNLGVHISRVKSVNLDQWTQEQIQCMQEMGNGKANRLYEAYLPETFRRPQIDPAVEGFIRDKYEKKKYMDRSLDINAFRKEKDDKWKRGSEPVPEKKLEPVVFEKVKMPQKKEDPQLPRKSSPKSTAPVMDLLGLGKSWTFQLPCSYKF

SEQ ID NO: 829724 - protein, 40 aa, Homo sapiens
MTQQMAGMNFYGANGMMNYGQSMSGGNGQAANQTLSPQMW

SEQ ID NO: 829725 - protein, 969 aa, Homo sapiens
MSDTVTVKDETATMKDLEAEVKDTTRVENLIKSENYGKILVEKNEHCIENNIDLQEKIQIQLTQSFEKEEKPSKDEAEKEKASDKLPRKMLSRDSSQEYTDSTGIDLHEFLVNTLKNNPRDRMMLLKLEQEILDFIGNNESPRKKFPPMTSYHRMLLHRVAAYFGLDHNVDQSGKSVIVNKTSNTRIPDQKFNEHIKDDKGEDFQKRYILKRDNSSFDKDDNQMRIRLKDDRRSKSIEEREEEYQRARDRIFSQDSLCSQENYIIDKRLQDEDASSTQQRRQIFRVNKDASGRSTNSHQSSTENELKYSEPRPWSSTDSDSSLRNLKPAVTKASSFSGISVLTRGDSSGSSKSIGRLSKTGQPFINPDGSPVVYNPPMTQQPVRSQVPGPPQPPLPAPPQQPAANHIFSQQDNLGSQFSHMSLARQPSADGSDPHAAMFQSTVVLQSPQQSGYIMTAAPPPHPPPPPPPPPPPPPLPPGQPVPTAGYPASGHPVSQPVLQQQGYIQQPSPQMPACYCAPGHYHSSQPQYRPVPSVHYNSHLNQPLPQPAQQTGYQVIPNQQQNYQGIVGVQQPQSQSLVSGQPNSIGNQIQGVVIPYTSVPTYQVSLPQGSQGIPHQTYQQPVMFPNQSNQGSMPTTGMPVYYSVIPPGQQNNLSSSVGYLQHPGSEQVQFPRTTSPCSSQQLQGHQCTAGPPPPPGGGMVMMQLSVPNNPQSCAHSPPQWKQNKYYCDHQRGQKCVEFSSVDNIVQHSPQLSSPIISPAQSPAPAQLSTLKTVRPSGPPLSIMPQFSRPFVPGQGDSRYPLLGQPLQYNPPAVLHGHIPNQQGQPGSRHGNRGRRQAKKAASTDLGAGETVVGKVLEITELPDGITRMEAEKLFGELFKIGAKIRWLRDPQSQPRRHPLCCGSGDNTANPERSKPSDLASTYTVLATFPSISAAQNALKKQINSVNKFKLRTSKKHYDFHILERASSQ

SEQ ID NO: 829726 - protein, 965 aa, Homo sapiens
MLSRDSSQEYTDSTGIDLHEFLVNTLKNNPRDRMMLLKLEQEILDFIGNNESPRKKFPPMTSYHRMLLHRVAAYFGLDHNVDQSGKSVIVNKTSNTRIPDQKFNEHIKDDKGEDFQKRYILKRDNSSFDKDDNQMRIRLKDDRRSKSIEEREEEYQRARDRIFSQDSLCSQENYIIDKRLQDEDASSTQQRRQIFRVNKDASGRSTNSHQSSTENELKYSEPRPWSSTDSDSSLRNLKPAVTKASSFSGISVLTRGDSSGSSKSIGRLSKTGSESSGSVGSSTGSLSHIQQPLPGTALSQSSHGAPVVYPTVSTHSSLSFDGGLNGQVASPSTSFFLLPLEAAGIPPGSILINPQTGQPFINPDGSPVVYNPPMTQQPVRSQVPGPPQPPLPAPPQQPAANHIFSQQDNLGSQFSHMSLARQPSADGSDPHAAMFQSTVVLQSPQQSGYIMTAAPPPHPPPPPPPPPPPPPLPPGQPVPTAGYPASGHPVSQPVLQQQGYIQQPSPQMPACYCAPGHYHSSQPQYRPVPSVHYNSHLNQPLPQPAQQTGYQVIPNQQQNYQGIVGVQQPQSQSLVSGQPNSIGNQIQGVVIPYTSVPTYQVSLPQGSQGIPHQTYQQPVMFPNQSNQGSMPTTGMPVYYSVIPPGQQNNLSSSVGYLQHPGSEQVQFPRTTSPCSSQQLQGHQCTAGPPPPPGGGMVMMQLSVPNNPQSCAHSPPQWKQNKYYCDHQRGQKCVEFSSVDNIVQHSPQLSSPIISPAQSPAPAQLSTLKTVRPSGPPLSIMPQFSRPFVPGQGDSRYPLLGQPLQYNPPAVLHGHIPNQQGQPGSRHGNRGRRQAKKAASTDLGAGETVVGKVLEITELPDGITRMEAEKLFGELFKIGAKIRWLRDPQSQPRRHPLCCGSGDNTANPERSKPSDLASTYTVLATFPSISAAQNALKKQINSVNKFKLRTSKKHYDFHILERASSQ

SEQ ID NO: 829727 - protein, 965 aa, Homo sapiens; identical to SEQ ID NO: 829726

SEQ ID NO: 829728 - protein, 480 aa, Homo sapiens
MGDKIWLPFPVLLLAALPPVLLPGAAGFTPSLDSDFTFTLPAGQKECFYQPMPLKASLEIEYQSYQVIPNQQQNYQGIVGVQQPQSQSLVSGQPNSIGNQIQGVVIPYTSVPTYQVSLPQGSQGIPHQTYQQPVMFPNQSNQGSMPTTGMPVYYSVIPPGQQNNLSSSVGYLQHPGSEQVQFPRTTSPCSSQQLQGHQCTAGPPPPPGGGMVMMQLSVPNNPQSCAHSPPQWKQNKYYCDHQRGQKCVEFSSVDNIVQHSPQLSSPIISPAQSPAPAQLSTLKTVRPSGPPLSIMPQFSRPFVPGQGDSRYPLLGQPLQYNPPAVLHGHIPNQQGQPGSRHGNRGRRQAKKAASTDLGAGETVVGKVLEITELPDGITRMEAEKLFGELFKIGAKIRWLRDPQSQPRRHPLCCGSGDNTANPERSKPSDLASTYTVLATFPSISAAQNALKKQINSVNKFKLRTSKKHYDFHILERASSQ

SEQ ID NO: 829729 - protein, 326 aa, Homo sapiens
KVGLQRGTRQLCSSVGYLQHPGSEQVQFPRTTSPCSSQQLQGHQCTAGPPPPPGGGMVMMQLSVPNNPQSCAHSPPQWKQNKYYCDHQRGQKCVEFSSVDNIVQHSPQLSSPIISPAQSPAPAQLSTLKTVRPSGPPLSIMPQFSRPFVPGQGDSRYPLLGQPLQYNPPAVLHGHIPNQQGQPGSRHGNRGRRQAKKAASTDLGAGETVVGKVLEITELPDGITRMEAEKLFGELFKIGAKIRWLRDPQSQPRRHPLCCGSGDNTANPERSKPSDLASTYTVLATFPSISAAQNALKKQINSVNKFKLRTSKKHYDFHILERASSQ

SEQ ID NO: 829730 - protein, 328 aa, Homo sapiens
MVLTLMPPCSSPLCSSVGYLQHPGSEQVQFPRTTSPCSSQQLQGHQCTAGPPPPPGGGMVMMQLSVPNNPQSCAHSPPQWKQNKYYCDHQRGQKCVEFSSVDNIVQHSPQLSSPIISPAQSPAPAQLSTLKTVRPSGPPLSIMPQFSRPFVPGQGDSRYPLLGQPLQYNPPAVLHGHIPNQQGQPGSRHGNRGRRQAKKAASTDLGAGETVVGKVLEITELPDGITRMEAEKLFGELFKIGAKIRWLRDPQSQPRRHPLCCGSGDNTANPERSKPSDLASTYTVLATFPSISAAQNALKKQINSVNKFKLRTSKKHYDFHILERASSQ

SEQ ID NO: 829731 - protein, 329 aa, Homo sapiens
LKISHSPGASETSLCSSVGYLQHPGSEQVQFPRTTSPCSSQQLQGHQCTAGPPPPPGGGMVMMQLSVPNNPQSCAHSPPQWKQNKYYCDHQRGQKCVEFSSVDNIVQHSPQLSSPIISPAQSPAPAQLSTLKTVRPSGPPLSIMPQFSRPFVPGQGDSRYPLLGQPLQYNPPAVLHGHIPNQQGQPGSRHGNRGRRQAKKAASTDLGAGETVVGKVLEITELPDGITRMEAEKLFGELFKIGAKIRWLRDPQSQPRRHPLCCGSGDNTANPERSKPSDLASTYTVLATFPSISAAQNALKKQINSVNKFKLRTSKKHYDFHILERASSQ

SEQ ID NO: 829732 - protein, 562 aa, Homo sapiens
MLSRDSSQEYTDSTGIDLHEFLVNTLKNNPRDRMMLLKLEQEILDFIGNNESPRKKFPPMTSYHRMLLHRVAAYFGLDHNVDQSGKSVIVNKTSNTRIPDQKFNEHIKDDKGEDFQKRYILKRDNSSFDKDDNQMRIRLKDDRRSKSIEEREEEYQRARDRIFSQDSLCSQENYIIDKRLQDEDASSTQQRRQIFRVNKDASGRSTNSHQSSTENELKYSEPRPWSSTDSDSSLRNLKPAVTKASSFSGISVLTRGDSSGSSKSIGRLSKTGSESSGSVGSSTGSLSHIQQPLPGTALSQSSHGAPVVYPTVSTHSSLSFDGGLNGQVASPSTSFFLLPLEAAGIPPGSILINPQTGQPFINPDGSPVVYNPPMTQQPVRSQVPGPPQPPLPAPPQQPAANHIFSQQDNLGSQFSHMSLARQPSADGSDPHAAMFQSTVVLQSPQQSGYIMTAAPPPHPPPPPPPPPPPPPLPPGQPVPTAGYPASGHPVSQPVLQQQGYIQQPSPQMPACYCAPGHYHSSQPQYRPVPSVHYNSHLNQPLPQPAQQTGYQVIPNQQKETKD

SEQ ID NO: 829733 - protein, 132 aa, Homo sapiens
AEAALAGTPNARLISWMCAVSSIEEQCRASVYRYYGKNISLTLYDEANTNTMKATERYDIFDPRQSIPVRESTVVTRTWDSSCQITDGSLQLTSWLTTVKKNLGLFYFIFVGHHNPKSKGRIRLQAPCRIRK

SEQ ID NO: 829734 - protein, 132 aa, Homo sapiens; identical to SEQ ID NO: 829733

SEQ ID NO: 829735 - protein, 965 aa, Homo sapiens; identical to SEQ ID NO: 829726

SEQ ID NO: 829736 - protein, 549 aa, Homo sapiens [sequence omitted]

SEQ ID NO: 829737 - protein, 670 aa, Homo sapiens
MLSRDSSQEYTDSTGIDLHEFLVNTLKNNPRDRMMLLKLEQEILDFIGNNESPRKKFPPMTSYHRMLLHRVAAYFGLDHNVDQSGKSVIVNKTSNTRIPDQKFNEHIKDDKGEDFQKRYILKRDNSSFDKDDNQMRIRLKDDRRSKSIEEREEEYQRARDRIFSQDSLCSQENYIIDKRLQDEDASSTQQRRQIFRVNKDASGRSTNSHQSSTENELKYSEPRPWSSTDSDSSLRNLKPAVTKASSFSGISVLTRGDSSGSSKSIGRLSKTGSESSGSVGSSTGSLSHIQQPLPGTALSQSSHGAPVVYPTVSTHSSLSFDGGLNGQVASPSTSFFLLPLEAAGIPPGSILINPQTGQPFINPDGSPVVYNPPMTQQPVRSQVPGPPQPPLPAPPQQPAANHIFSQQDNLGSQFSHMSLARQPSADGSDPHAAMFQSTVVLQSPQQSGYIMTAAPPPHPPPPPPPPPPPPPLPPGQPVPTAGYPASGHPVSQPVLQQQGYIQQPSPQMPACYCAPGHYHSSQPQYRPVPSVHYNSHLNQPLPQPAQQTGYQVIPNQQQNYQGIVGVQQPQSQSLVSGQPNSIGNQIQGVVIPYTSVPTYQVSLPQGSQGIPHQTYQQPVMFPNQSNQGSMPTTGMPVYYSVIPPGQQNNLSSSVGYLQHPGSEQVQFPRT

SEQ ID NO: 829738 - protein, 330 aa, Homo sapiens
MIPMEIGGTQKNTNKSSSVGYLQHPGSEQVQFPRTTSPCSSQQLQGHQCTAGPPPPPGGGMVMMQLSVPNNPQSCAHSPPQWKQNKYYCDHQRGQKCVEFSSVDNIVQHSPQLSSPIISPAQSPAPAQLSTLKTVRPSGPPLSIMPQFSRPFVPGQGDSRYPLLGQPLQYNPPAVLHGHIPNQQGQPGSRHGNRGRRQAKKAASTDLGAGETVVGKVLEITELPDGITRMEAEKLFGELFKIGAKIRWLRDPQSQPRRHPLCCGSGDNTANPERSKPSDLASTYTVLATFPSISAAQNALKKQINSVNKFKLRTSKKHYDFHILERASSQ

SEQ ID NO: 829739 - protein, 965 aa, Homo sapiens; identical to SEQ ID NO: 829726

SEQ ID NO: 829740 - protein, 565 aa, Homo sapiens
MLSRDSSQEYTDSTGIDLHEFLVNTLKNNPRDRMMLLKLEQEILDFIGNNESPRKKFPPMTSYHRMLLHRVAAYFGLDHNVDQSGKSVIVNKTSNTRIPDQKFNEHIKDDKGEDFQKRYILKRDNSSFDKDDNQMRIRLKDDRRSKSIEEREEEYQRARDRIFSQDSLCSQENYIIDKRLQDEDASSTQQRRQIFRVNKDASGRSTNSHQSSTENELKYSEPRPWSSTDSDSSLRNLKPAVTKASSFSGISVLTRGDSSGSSKSIGRLSKTGSESSGSVGSSTGSLSHIQQPLPGTALSQSSHGAPVVYPTVSTHSSLSFDGGLNGQVASPSTSFFLLPLEAAGIPPGSILINPQTGQPFINPDGSPVVYNPPMTQQPVRSQVPGPPQPPLPAPPQQPAANHIFSQQDNLGSQFSHMSLARQPSADGSDPHAAMFQSTVVLQSPQQSGYIMTAAPPPHPPPPPPPPPPPPPLPPGQPVPTAGYPASGHPVSQPVLQQQGYIQQPSPQMPACYCAPGHYHSSQPQYRPVPSVHYNSHLNQPLPQPAQQTGYQVVPRTGDGSSRYLR

SEQ ID NO: 829741 - protein, 132 aa, Homo sapiens; identical to SEQ ID NO: 829733

SEQ ID NO: 829742 - protein, 91 aa, Homo sapiens
MRMSDTVTVKDETATMKDLEAEVKDTTRVENLIKSENYGKILVEKNEHCIENNIDLQVNRNFSLATNTKYSVYIYVYFHTKLTSQNSKRVS

SEQ ID NO: 829743 - protein, 172 aa, Homo sapiens
MLAAGVGGQGERLAGRRRKMAVESRVTQEEIKKEPEKPIDREKTCPLLLRVFTTNNGRHHRMDEFSRGNVPSSELQIYTWMDATLKELTSLVKEVYPEARKKGTHFNFAIVFTDVKRPGYRVKEIGSTMSGRKGTDDSMTLQSQKFQIGDYLDIAITPPNRAPPPSGRMRPY

SEQ ID NO: 829744 - protein, 153 aa, Homo sapiens
MAVESRVTQEEIKKEPEKPIDREKTCPLLLRVFTTNNGRHHRMDEFSRGNVPSSELQIYTWMDATLKELTSLVKEVYPEARKKGTHFNFAIVFTDVKRPGYRVKEIGSTMSGRKGTDDSMTLQSQKFQIGDYLDIAITPPNRAPPPSGRMRPY

SEQ ID NO: 829745 - protein, 153 aa, Homo sapiens; identical to SEQ ID NO: 829744

SEQ ID NO: 829746 - protein, 115 aa, Homo sapiens
TPECKTTAREHCNRAASCLFTLEMDATLKELTSLVKEVYPEARKKGTHFNFAIVFTDVKRPGYRVKEIGSTMSGRKGTDDSMTLQSQKFQIGDYLDIAITPPNRAPPPSGRMRPY

SEQ ID NO: 829747 - protein, 172 aa, Homo sapiens; identical to SEQ ID NO: 829743

SEQ ID NO: 829748 - protein, 172 aa, Homo sapiens; identical to SEQ ID NO: 829743

SEQ ID NO: 829749 - protein, 172 aa, Homo sapiens; identical to SEQ ID NO: 829743

SEQ ID NO: 829750 - protein, 137 aa, Homo sapiens
TEALARIRLPSAVYLVYNTNNGRHHRMDEFSRGNVPSSELQIYTWMDATLKELTSLVKEVYPEARKKGTHFNFAIVFTDVKRPGYRVKEIGSTMSGRKGTDDSMTLQSQKFQIGDYLDIAITPPNRAPPPSGRMRPY

SEQ ID NO: 829751 - protein, 131 aa, Homo sapiens
MAEGVLMLAAGVGGQGERLAGRRRKMAVESRVTQEEIKKEPEKPIDREKTCPLLLRVFTTNNGRHHRMDEFSRGNVPSSELQIYTWMDATLKELTSLVKEVYPEARKKGTHFNFAIVFTDVKRPGYRQKGD

SEQ ID NO: 829752 - protein, 108 aa, Homo sapiens
RVINSKIIPQSPSDILAIMAEECSCSLQGSEVRASVSQAVGGRWRWSRALPRRKLRRSQRNRSTARRHAHCCYGSSPPITAATTEWTSSPGEMYRPASCRSTLGWMQL

SEQ ID NO: 829753 - protein, 152 aa, Homo sapiens
MLAAGVGGQGERLAGRRRKMAVESRVTQEEIKKEPEKPIDREKTCPLLLRVFTTNNGRHHRMDEFSQLTSLVKEVYPEARKKGTHFNFAIVFTDVKRPGYRVKEIGSTMSGRKGTDDSMTLQSQKFQIGDYLDIAITPPNRAPPPSGRMRPY

SEQ ID NO: 829754 - protein, 172 aa, Homo sapiens; identical to SEQ ID NO: 829743

SEQ ID NO: 829755 - protein, 102 aa, Homo sapiens
RVINSKIIPQSPSDIRPFGRGVLMLAAGVGGQGERLAGRRRKMAVESRVTQEEIKKEPEKPIDREKTCPLLLRVFTTNNGRHHRMDEFSRGNVPSSELQIYT

SEQ ID NO: 829756 - protein, 139 aa, Homo sapiens
MAEECSCSLQGSEVRASVSQAVGGRWRWSRALPRRKLRRSQRNRSTARRHAHCCYGSSPPITAATTEWTSSPGEMYRPASCRSTLGEEGGVASGTRAGNLEQQLIAFASVELFSLISISFLHLGPSDSAFRKLEVFVVR

SEQ ID NO: 829757 - protein, 96 aa, Homo sapiens
RVINSKIIPQSPSDIRPFGRGVLMLAAGVGGQGERLAGRRRKMAVESRVTQEEIKKEPEKPIDREKTCPLLLRVFTTNNGRHHRMDEFSPGTWNNS

SEQ ID NO: 829758 - protein, 172 aa, Homo sapiens; identical to SEQ ID NO: 829743

SEQ ID NO: 829759 - protein, 104 aa, Homo sapiens
MYRPASCRSTLEMDATLKELTSLVKEVYPEARKKGTHFNFAIVFTDVKRPGYRVKEIGSTMSGRKGTDDSMTLQSQKFQIGDYLDIAITPPNRAPPPSGRMRPY

SEQ ID NO: 829760 - protein, 172 aa, Homo sapiens; identical to SEQ ID NO: 829743

SEQ ID NO: 829761 - protein, 172 aa, Homo sapiens; identical to SEQ ID NO: 829743

SEQ ID NO: 829762 - protein, 172 aa, Homo sapiens; identical to SEQ ID NO: 829743

SEQ ID NO: 829763 - protein, 172 aa, Homo sapiens; identical to SEQ ID NO: 829743

SEQ ID NO: 829764 - protein, 172 aa, Homo sapiens; identical to SEQ ID NO: 829743

SEQ ID NO: 829765 - protein, 172 aa, Homo sapiens; identical to SEQ ID NO: 829743

SEQ ID NO: 829766 - protein, 137 aa, Homo sapiens
MAEGVLMLAAGVGGQGERLAGRRRKMAVESRVTQEEIKKEPEKPIDREKTCPLLLRVFTTNNGRHHRMDEFSRGNVPSSELQIYTWMDATLKELTSLVKEVYPEARKKGTHFNFAIVFTDVKRPGYRVKEIGSSPLS

SEQ ID NO: 829767 - protein, 443 aa, Homo sapiens
MGGPRAWALLCLGLLLPGGGAAWSIGAAPFSGRRNWCSYVVTRTISCHVQNGTYLQRVLQNCPWPMSCPGSSYRTVVRPTYKVMYKIVTAREWRCCPGHSGVSCEEVAGSSASLEPMWSGSTMRRMALRPTAFSGCLNCSKVSELTERLKVLEAKMTMLTVIEQPVPPTPATPEDPAPLWGPPPAQGSPGDGGLQDQVGAWGLPGPTGPKGDAGSRGPMGMRGPPGPQGPPGSPGRAGAVGTPGERGPPGPPGPPGPPGPPAPVGPPHARISQHGDPLLSNTFTETNNHWPQGPTGPPGPPGPMGPPGPPGPTGVPGSPGHIGPPGPTGPKGISGHPGEKGERGLRGEPGPQGSAGQRGEPGPKGDPGEKSHWGEGLHQLREALKILAERVLILETMIGLYEPELGSGAGPAGTGTPSLLRGKRGGHATNYRIVAPRSRDERG

SEQ ID NO: 829768 - protein, 462 aa, Homo sapiens
MGGPRAWALLCLGLLLPGGGAAWSIGAAPFSGRRNWCSYVVTRTISCHVQNGTYLQRVLQNCPWPMSCPGSSYRTVVRPTYKVMYKIVTAREWRCCPGHSGVSCEEVAGSSASLEPMWSGSTMRRMALRPTAFSGCLNCSKVSELTERLKVLEAKMTMLTVIEQPVPPTPATPEDPAPLWGPPPAQGSPGDGGLQGLPGAIESVRVPLLPRNDQVGAWGLPGPTGPKGDAGSRGPMGMRGPPGPQGPPGSPGRAGAVGTPGERGPPGPPGPPGPPGPPAPVGPPHARISQHGDPLLSNTFTETNNHWPQGPTGPPGPPGPMGPPGPPGPTGVPGSPGHIGPPGPTGPKGISGHPGEKGERGLRGEPGPQGSAGQRGEPGPKGDPGEKSHWAPSLQSFLQQQAQLELLARRVTLLEAIIWPEPELGSGAGPAGTGTPSLLRGKRGGHATNYRIVAPRSRDERG

SEQ ID NO: 829769 - protein, 417 aa, Homo sapiens
MGGPRAWALLCLGLLLPGGGAAWSIGAAPFSGRRNWCSYVVTRTISCHVQNGTYLQRVLQNCPWPMSCPGSSYRTVVRPTYKVMYKIVTAREWRCCPGHSGVSCEEGCLNCSKVSELTERLKVLEAKMTMLTVIEQPVPPTPATPEDPAPLWGPPPAQGSPGDGGLQDQVGAWGLPGPTGPKGDAGSRGPMGMRGPPGPQGPPGSPGRAGAVGTPGERGPPGPPGPPGPPGPPAPVGPPHARISQHGDPLLSNTFTETNNHWPQGPTGPPGPPGPMGPPGPPGPTGVPGSPGHIGPPGPTGPKGISGHPGEKGERGLRGEPGPQGSAGQRGEPGPKGDPGEKSHWAPSLQSFLQQQAQLELLARRVTLLEAIIWPEPELGSGAGPAGTGTPSLLRGKRGGHATNYRIVAPRSRDERG

SEQ ID NO: 829770 - protein, 232 aa, Homo sapiens
MGGPRAWALLCLGLLLPGGGAAWSIGAAPFSGRRNWCSYVVTRTISCHVQNGTYLQRVLQNCPWPMSCPGSSYRTVVRPTYKVMYKIVTAREWRCCPGHSGVSCEEVAGSSASLEPMWSGSTMRRMALRPTAFSGCLNCSKVSELTERLKVLEAKMTMLTVIEQPVPPTPATPEDPAPLWGPPPAQGSPGDGGLQDQVGAWGLPGPTGPKGDAGSRGPMGMRGPPGECPQCC

SEQ ID NO: 829771 - protein, 50 aa, Homo sapiens
ELVLLCGDPHHLMPCAEWHLPSASAAELPLAHELSGEQVNEVEKELMAFQ

SEQ ID NO: 829772 - protein, 445 aa, Homo sapiens
MGGPRAWALLCLGLLLPGGGAAWSIGAAPFSGRRNWCSYVVTRTISCHVQNGTYLQRVLQNCPWPMSCPGSSYRTVVRPTYKVMYKIVTAREWRCCPGHSGVSCEEVAGSSASLEPMWSGSTMRRMALRPTAFSGCLNCSKVSELTERLKVLEAKMTMLTVIEQPVPPTPATPEDPAPLWGPPPAQGSPGDGGLQDQVGAWGLPGPTGPKGDAGSRGPMGMRGPPGPQGPPGSPGRAGAVGTPGERGPPGPPGPPGPPGPPAPVGPPHARISQHGDPLLSNTFTETNNHWPQGPTGPPGPPGPMGPPGPPGPTGVPGSPGHIGPPGPTGPKGISGHPGEKGERGLRGEPGPQGSAGQRGEPGPKGDPGEKSHWAPSLQSFLQQQAQLELLARRVTLLEAIIWPEPELGSGAGPAGTGTPSLLRGKRGGHATNYRIVAPRSRDERG

SEQ ID NO: 829773 - protein, 468 aa, Homo sapiens
MGGPRAWALLCLGLLLPGGGAAWSIGAAPFSGRRNWCSYVVTRTISCHVQNGTYLQRVLQNCPWPMSCPGSSYRTVVRPTYKVMYKIVTAREWRCCPGHSGVSCEEVAGSSASLEPMWSGSTMRRMALRPTAFSETEGFLRGSLGPLALAPASSLPAGCLNCSKVSELTERLKVLEAKMTMLTVIEQPVPPTPATPEDPAPLWGPPPAQGSPGDGGLQDQVGAWGLPGPTGPKGDAGSRGPMGMRGPPGPQGPPGSPGRAGAVGTPGERGPPGPPGPPGPPGPPAPVGPPHARISQHGDPLLSNTFTETNNHWPQGPTGPPGPPGPMGPPGPPGPTGVPGSPGHIGPPGPTGPKGISGHPGEKGERGLRGEPGPQGSAGQRGEPGPKGDPGEKSHWAPSLQSFLQQQAQLELLARRVTLLEAIIWPEPELGSGAGPAGTGTPSLLRGKRGGHATNYRIVAPRSRDERG

SEQ ID NO: 829774 - protein, 368 aa, Homo sapiens
RPPAAELETGLRASGAAGGAGRQAGRTGWGRRPRGAARGGRLVQHGRPAGLGAALPRAPAPGRRRCVEHRGSSVLRTQMTMLTVIEQPVPPTPATPEDPAPLWGPPPAQGSPGDGGLQDQVGAWGLPGPTGPKGDAGSRGPMGMRGPPGPQGPPGSPGRAGAVGTPGERGPPGPPGPPGPPGPPAPVGPPHARISQHGDPLLSNTFTETNNHWPQGPTGPPGPPGPMGPPGPPGPTGVPGSPGHIGPPGPTGPKGISGHPGEKGERGLRGEPGPQGSAGQRGEPGPKGDPGEKSHWAPSLQSFLQQQAQLELLARRVTLLEAIIWPEPELGSGAGPAGTGTPSLLRGKRGGHATNYRIVAPRSRDERG

SEQ ID NO: 829775 - protein, 1401 aa, Homo sapiens
MASCASIDIEDATQHLRDILKLDRPAGGPSAESPRPSSAYNGDLNGLLVPDPLCSGDSTSANKTGLRTMPPINLQEKQVICLSGDDSSTCIGILAKEVEIVASSDSSISSKARGSNKVKIQPVAKYDWEQKYYYGNLIAVSNSFLAYAIRAANNGSAMVRVISVSTSERTLLKGFTGSVADLAFAHLNSPQLACLDEAGNLFVWRLALVNGKIQEEILVHIRQPEGTPLNHFRRIIWCPFIPEESEDCCEESSPTVALLHEDRAEVWDLDMLRSSHSTWPVDVSQIKQGFIVVKGHSTCLSEGALSPDGTVLATASHDGYVKFWQIYIEGQDEPRCLHEWKPHDGRPLSCLLFCDNHKKQDPDVPFWRFLITGADQNRELKMWCTVSWTCLQTIRFSPDIFSSVSVPPSLKVCLDLSAEYLILSDVQRKVLYVMELLQNQEEGHACFSSISEFLLTHPVLSFGIQVVSRCRLRHTEVLPAEEENDSLGADGTHGAGAMESAAGVLIKLFCVHTKALQDVQIRFQPQLNPDVVAPLPTHTAHEDFTFGESRPELGSEGLGSAAHGSQPDLRRIVELPAPADFLSLSSETKPKLMTPDAFMTPSASLQQITASPSSSSSGSSSSSSSSSSSLTAVSAMSSTSAVDPSLTRPPEELTLSPKLQLDGSLTMSSSGSLQASPRGLLPGLLPAPADKLTPKGPGQVPTATSALSLELQEVEPLGLPQASPSRTRSPDVISSASTALSQDIPEIASEALSRGFGSSAPEGLEPDSMASAASALHLLSPRPRPGPELGPQLGLDGGPGDGDRHNTPSLLEAALTQEASTPDSQVWPTAPDITRETCSTLAESPRNGLQEKHKSLAFHRPPYHLLQQRDSQDASAEQSDHDDEVASLASASGGFGTKVPAPRLPAKDWKTKGSPRTSPKLKRKSKKDDGDAAMGSRLTEHQVAEPPEDWPALIWQQQRELAELRHSQEELLQRLCTQLEGLQSTVTGHVERALETRHEQEQRRLERALAEGQQRGGQLQEQLTQQLSQALSSAVAGRLERSIRDEIKKTVPPCVSRSLEPMAGQLSNSVATKLTAVEGSMKENISKLLKSKNLTDAIARAAADTLQGPMQAAYREAFQSVVLPAFEKSCQAMFQQINDSFRLGTQEYLQQLESHMKSRKAREQEAREPVLAQLRGLVSTLQSATEQMAATVAGSVRAEVQHQLHVAVGSLQESILAQVQRIVKGEVSVALKEQQAAVTSSIMQAMRSAAGTPVPSAHLDCQAQQAHILQLLQQGHLNQAFQQALTAADLNLVLYVCETVDPAQVFGQPPCPLSQPVLLSLIQQLASDLGTRTDLKLSYLEEAVMHLDHSDPITRDHMGSVMAQVRQKLFQFLQAEPHNSLGKAARRLSLMLHGLVTPSLP

SEQ ID NO: 829776 - protein, 1436 aa, Homo sapiens
MASCASIDIEDATQHLRDILKLDRPAGGPSAESPRPSSAYNGDLNGLLVPDPLCSGDSTSANKTGLRTMPPINLQEKQVICLSGDDSSTCIGILAKEVEIVASSDSSISSKARGSNKVKIQPVAKYDWEQKYYYGNLIAVSNSFLAYAIRAANNGSAMVRVISVSTSERTLLKGFTGSVADLAFAHLNSPQLACLDEAGNLFVWRLALVNGKIQEEILVHIRQPEGTPLNHFRRIIWCPFIPEESEDCCEESSPTVALLHEDRAEVWDLDMLRSSHSTWPVDVSQIKQGFIVVKGHSTCLSEGALSPDGTVLATASHDGYVKFWQIYIEGQDEPRCLHEWKPHDGRPLSCLLFCDNHKKQDPDVPFWRFLITGADQNRELKMWCTVSWTCLQTIRFSPDIFSSVSVPPSLKVCLDLSAEYLILSDVQRKVLYVMELLQNQEEGHACFSSISEFLLTHPVLSFGIQVVSRCRLRHTEVLPAEEENDSLGADGTHGAGAMESAAGVLIKLFCVHTKALQDVQIRFQPQLNPDVVAPLPTHTAHEDFTFGESRPELGSEGLGSAAHGSQPDLRRIVELPAPADFLSLSSETKPKLMTPDAFMTPSASLQQITASPSSSSSGSSSSSSSSSSSLTAVSAMSSTSAVDPSLTRPPEELTLSPKLQLDGSLTMSSSGSLQASPRGLLPGLLPAPADKLTPKGPGQVPTATSALSLELQEVEPLGLPQASPSRTRSPDVISSASTALSQDIPEIASEALSRGFGSSAPEGLEPDSMASAASALHLLSPRPRPGPELGPQLGLDGGPGDGDRHNTPSLLEAALTQEASTPDSQVWPTAPDITRETCSTLAESPRNGLQEKHKSLAFHRPPYHLLQQRDSQDASAEQSDHDDEVASLASASGGFGTKVPAPRLPAKDWKTKGSPRTSPKLKRKSKKDDGDAAMGSRLTEHQVAEPPEDWPALIWQQQRELAELRHSQEELLQRLCTQLEGLQSTVTGHVERALETRHEQEHPETGSTTWHRDGGSILGLGRSTRPAPGPFLSYGAERRLERALAEGQQRGGQLQEQLTQQLSQALSSAVAGRLERSIRDEIKKTVPPCVSRSLEPMAGQLSNSVATKLTAVEGSMKENISKLLKSKNLTDAIARAAADTLQGPMQAAYREAFQSVVLPAFEKSCQAMFQQINDSFRLGTQEYLQQLESHMKSRKAREQEAREPVLAQLRGLVSTLQSATEQMAATVAGSVRAEVQHQLHVAVGSLQESILAQVQRIVKGEVSVALKEQQAAVTSSIMQAMRSAAGTPVPSAHLDCQAQQAHILQLLQQGHLNQAFQQALTAADLNLVLYVCETVDPAQVFGQPPCPLSQPVLLSLIQQLASDLGTRTDLKLSYLEEAVMHLDHSDPITRDHMGSVMAQVRQKLFQFLQAEPHNSLGKAARRLSLMLHGLVTPSLP

SEQ ID NO: 829777 - protein, 1364 aa, Homo sapiens
MASCASIDIEDATQHLRDILKLDRPAGGPSAESPRPSSAYNGDLNGLLVPDPLCSGDSTSANKTGLRTMPPINLQEKQVICLSGDDSSTCIGILAKEVEIVASSDSSISSKARGSNKVKIQPVAKYDWEQKYYYGNLIAVSNSFLAYAIRAANNGSAMVRVISVSTSERTLLKGFTGSVADLAFAHLNSPQLACLDEAGNLFVWRLALVNGKIQEEILVHIRQPEGTPLNHFRRIIWCPFIPEESEDCCEESSPTVALLHEDRAEVWDLDMLRSSHSTWPVDVSQIKQGFIVVKGHSTCLSEGALSPDGTVLATASHDGYVKFWQIYIEGQDEPRCLHEWKPHDGRPLSCLLFCDNHKKQDPDVPFWRFLITGADQNRELKMWCTVSWTCLQTIRFSPDIFSSVSVPPSLKVCLDLSAEYLILSDVQRKVLYVMELLQNQEEGHACFSSISEFLLTHPVLSFGIQVVSRCRLRHTEVLPAEEENDSLGADGTHGAGAMESAAGVLIKLFCVHTKALQDVQIRFQPQLNPDVVAPLPTHTAHEDFTFGESRPELGSEGLGSAAHGSQPDLRRIVELPAPADFLSLSSETKPKLMTPDAFMTPSASLQQITASPSSSSSGSSSSSSSSSSSLTAVSAMSSTSAVDPSLTRPPEELTLSPKLQLDGSLTMSSSGSLQASPRGLLPGLLPAPADKLTPKGPGQVPTATSALSLELQEVEPLGLPQASPSRTRSPDVISSASTALSQDIPEIASEALSRGFGSSAPEGLEPDSMASAASALHLLSPRPRPGPELGPQLGLDGGPGDGDRHNTPSLLEAALTQEASTPDSQVWPTAPDITRETCSTLAESPRNGLQEKHKSLAFHRPPYHLLQQRDSQDASAEQSDHDDEVASLASASGGFGTKVPAPRLPAKDWKTKGSPRTSPKLKRKSKKDDGDAAMGSRLTEHQVAEPPEDWPALIWQQQRELAELRHSQEELLQRLCTQLEGLQSTVTGHVERALETRHEQEQRRLERALAEGQQRGGQLQEQLTQQLSQALSSAVAGRLERSIRDEIKKTVPPCVSRSLEPMAGQLSNSVATKLTAVEGSMKENISKLLKSKNLTDAIARAAADTLQGPMQAAYREAFQSVVLPAFEKSCQAMFQQINDSFRLGTQEYLQQLESHMKSRKAREQEAREPVLAQLRGLVSTLQSATEQMAATVAGSVRAEVQHQLHVAVGSLQESILAQVQRIVKGEQQAHILQLLQQGHLNQAFQQALTAADLNLVLYVCETVDPAQVFGQPPCPLSQPVLLSLIQQLASDLGTRTDLKLSYLEEAVMHLDHSDPITRDHMGSVMAQVRQKLFQFLQAEPHNSLGKAARRLSLMLHGLVTPSLP

SEQ ID NO: 829778 - protein, 1349 aa, Homo sapiens
MASCASIDIEDATQHLRDILKLDRPAGGPSAESPRPSSAYNGDLNGLLVPDPLCSGDSTSANKTGLRTMPPINLQEKQVICLSGDDSSTCIGILAKEVEIVASSDSSISSKARGSNKVKIQPVAKYDWEQKYYYGNLIAVSNSFLAYAIRAANNGSAMVRVISVSTSERTLLKGFTGSVADLAFAHLNSPQLACLDEAGNLFVWRLALVNGKIQEEILVHIRQPEGTPLNHFRRIIWCPFIPEESEDCCEESSPTVALLHEDRAEVWDLDMLRSSHSTWPVDVSQIKQGFIVVKGHSTCLSEGALSPDGTVLATASHDGYVKFWQIYIEGQDEPRCLHEWKPHDGRPLSCLLFCDNHKKQDPDVPFWRFLITGADQNRELKMWCTVSWTCLQTIRFSPDIFSSVSVPPSLKVCLDLSAEYLILSDVQRKVLYVMELLQNQEEGHACFSSISEFLLTHPVLSFGIQVVSRCRLRHTEVLPAEEENDSLGADGTHGAGAMESAAGVLIKLFCVHTKALQDVQIRFQPQLNPDVVAPLPTHTAHEDFTFGESRPELGSEGLGSAAHGSQPDLRRIVELPAPADFLSLSSETKPKLMTPDAFMTPSASLQQITASPSSSSSGSSSSSSSSSSSLTAVSAMSSTSAVDPSLTRPPEELTLSPKLQLDGSLTMSSSGSLQASPRGLLPGLLPAPADKLTPKGPGQVPTATSALSLELQEVEPLGLPQASPSRTRSPDVISSASTALSQDIPEIASEALSRGFGSSAPEGLEPDSMASAASALHLLSPRPRPGPELGPQLGLDGGPGDGDRHNTPSLLEAALTQEASTPDSQVWPTAPDITRETCSTLAESPRNGLQEKHKSLAFHRPPYHLLQQRDSQDASAEQSDHDDEVASLASASGGFGTKVPAPRLPAKDWKTKGSPRTSPKLKRKSKKDDGDAAMGSRLTEHQVAEPPEDWPALIWQQQRELAELRHSQEELLQRLCTQLEGLQSTVTGHVERALETRHEQERVSRSLEPMAGQLSNSVATKLTAVEGSMKENISKLLKSKNLTDAIARAAADTLQGPMQAAYREAFQSVVLPAFEKSCQAMFQQINDSFRLGTQEYLQQLESHMKSRKAREQEAREPVLAQLRGLVSTLQSATEQMAATVAGSVRAEVQHQLHVAVGSLQESILAQVQRIVKGEVSVALKEQQAAVTSSIMQAMRSAAGTPVPSAHLDCQAQQAHILQLLQQGHLNQAFQQALTAADLNLVLYVCETVDPAQVFGQPPCPLSQPVLLSLIQQLASDLGTRTDLKLSYLEEAVMHLDHSDPITRDHMGSVMAQVRQKLFQFLQAEPHNSLGKAARRLSLMLHGLVTPSLP

SEQ ID NO: 829779 - protein, 505 aa, Homo sapiens
RDERIPSAGPKDWKTKGSPRTSPKLKRKSKKDDGDAAMGSRLTEHQVAEPPEDWPALIWQQQRELAELRHSQEELLQRLCTQLEGLQSTVTGHVERALETRHEQEQRRLERALAEGQQRGGQLQEQLTQQLSQALSSAVAGRLERSIRDEIKKTVPPCVSRSLEPMAGQLSNSVATKLTAVEGSMKENISKLLKSKNLTDAIARAAADTLQGPMQAAYREAFQSVVLPAFEKSCQAMFQQINDSFRLGTQEYLQQLESHMKSRKAREQEAREPVLAQLRGLVSTLQSATEQMAATVAGSVRAEVQHQLHVAVGSLQESILAQVQRIVKGEVSVALKEQQAAVTSSIMQAMRSAAGTPVPSAHLDCQAQQAHILQLLQQGHLNQAFQQALTAADLNLVLYVCETVDPAQVFGQPPCPLSQPVLLSLIQQLASDLGTRTDLKLSYLEEAVMHLDHSDPITRDHMGSVMAQVRQKLFQFLQAEPHNSLGKAARRLSLMLHGLVTPSLP

SEQ ID NO: 829780 - protein, 389 aa, Homo sapiens
MADGSRGQEQLTQQLSQALSSAVAGRLERSIRDEIKKTVPPCVSRSLEPMAGQLSNSVATKLTAVEGSMKENISKLLKSKNLTDAIARAAADTLQGPMQAAYREAFQSVVLPAFEKSCQAMFQQINDSFRLGTQEYLQQLESHMKSRKAREQEAREPVLAQLRGLVSTLQSATEQMAATVAGSVRAEVQHQLHVAVGSLQESILAQVQRIVKGEVSVALKEQQAAVTSSIMQAMRSAAGTPVPSAHLDCQAQQAHILQLLQQGHLNQAFQQALTAADLNLVLYVCETVDPAQVFGQPPCPLSQPVLLSLIQQLASDLGTRTDLKLSYLEEAVMHLDHSDPITRDHMGSVMAQVRQKLFQFLQAEPHNSLGKAARRLSLMLHGLVTPSLP

SEQ ID NO: 829781 - protein, 196 aa, Homo sapiens
  misc_feature (18)..(18): Xaa can be any naturally occurring amino acid
ADLNLVLYVCETVDPAQXFGQPPCPLSQPVLLSLSSIMQAMRSAAGTPVPSAHLDCQAQQAHILQLLQQGHLNQAFQQALTAADLNLVLYVCETVDPAQVFGQPPCPLSQPVLLSLIQQLASDLGTRTDLKLSYLEEAVMHLDHSDPITRDHMGSVMAQVRQKLFQFLQAEPHNSLGKAARRLSLMLHGLVTPSLP

SEQ ID NO: 829782 - protein, 1214 aa, Homo sapiens
MASCASIDIEDATQHLRDILKLDRPAGGPSAESPRPSSAYNGDLNGLLVPDPLCSGDSTSANKTGLRTMPPINLQEKQVICLSGDDSSTCIGILAKEVEIVASSDSSISSKARGSNKVKIQPVAKYDWEQKYYYGNLIAVSNSFLAYAIRAANNGSAMVRVISVSTSERTLLKGFTGSVADLAFAHLNSPQLACLDEAGNLFVWRLALVNGKIQEEILVHIRQPEGTPLNHFRRIIWCPFIPEESEDCCEESSPTVALLHEDRAEVWDLDMLRSSHSTWPVDVSQIKQGFIVVKGHSTCLSEGALSPDGTVLATASHDGYVKFWQIYIEGQDEPRCLHEWKPHDGRPLSCLLFCDNHKKQDPDVPFWRFLITGADQNRELKMWCTVSWTCLQTIRFSPDIFSSVSVPPSLKVCLDLSAEYLILSDVQRKVLYVMELLQNQEEGHACFSSISEFLLTHPVLSFGIQVVSRCRLRHTEVLPAEEENDSLGADGTHGAGAMESAAGVLIKLFCVHTKALQDVQIRFQPQLNPDVVAPLPTHTAHEDFTFGESRPELGSEGLGSAAHGSQPDLRRIVELPAPADFLSLSSETKPKLMTPDAFMTPSASLQQITASPSSSSSGSSSSSSSSSSSLTAVSAMSSTSAVDPSLTRPPEELTLSPKLQLDGSLTMSSSGSLQASPRGLLPGLLPAPADKLTPKGPGQVPTATSALSLELQEVEPLGLPQASPSRTRSPDVISSASTALSQDIPEIASEALSRGFGSSAPEGLEPDSMASAASALHLLSPRPRPGPELGPQLGLDGGPGDGDRHNTPSLLEAALTQEASTPDSQVWPTAPDITRETCSTLAESPRNGLQEKHKSLAFHRPPYHLLQQRDSQDASAEQSDHDDEVASLASASGGFGTKVPAPRLPAKDWKTKGSPRTSPKLKRKSKKDDGDAAMGSRLTEHQVAEPPEDWPALIWQQQRELAELRHSQEELLQRLCTQLEGLQSTVTGHVERALETRHEQEQRRLERALAEGQQRGGQLQEQLTQQLSQALSSAVAGRLERSIRDEIKKTVPPCVSRSLEPMAGQLSNSVATKLTAVEGSMKENISKLLKSKNLTDAIARAAADTLQGPMQAAYREAFQSVVLPAFEKSCQAMFQQINDSFRLGTQEYLQQLESHMKSRKAREQEAREPVLAQLRGLVSTLQSATEQMAATVAGSVRAEVQHQLHVAVGSCGVI

SEQ ID NO: 829783 - protein, 993 aa, Homo sapiens
NSWGGKDYKGASLILSDVQRKVLYVMELLQNQEEGHACFSSISEFLLTHPVLSFGIQVVSRCRLRHTEVLPAEEENDSLGADGTHGAGAMESAAGVLIKLFCVHTKALQDVQIRFQPQLNPDVVAPLPTHTAHEDFTFGESRPELGSEGLGSAAHGSQPDLRRIVELPAPADFLSLSSETKPKLMTPDAFMTPSASLQQITASPSSSSSGSSSSSSSSSSSLTAVSAMSSTSAVDPSLTRPPEELTLSPKLQLDGSLTMSSSGSLQASPRGLLPGLLPAPADKLTPKGPGQVPTATSALSLELQEVEPLGLPQASPSRTRSPDVISSASTALSQDIPEIASEALSRGFGSSAPEGLEPDSMASAASALHLLSPRPRPGPELGPQLGLDGGPGDGDRHNTPSLLEAALTQEASTPDSQVWPTAPDITRETCSTLAESPRNGLQEKHKSLAFHRPPYHLLQQRDSQDASAEQSDHDDEVASLASASGGFGTKVPAPRLPAKDWKTKGSPRTSPKLKRKSKKDDGDAAMGSRLTEHQVAEPPEDWPALIWQQQRELAELRHSQEELLQRLCTQLEGLQSTVTGHVERALETRHEQEQRRLERALAEGQQRGGQLQEQLTQQLSQALSSAVAGRLERSIRDEIKKTVPPCVSRSLEPMAGQLSNSVATKLTAVEGSMKENISKLLKSKNLTDAIARAAADTLQGPMQAAYREAFQSVVLPAFEKSCQAMFQQINDSFRLGTQEYLQQLESHMKSRKAREQEAREPVLAQLRGLVSTLQSATEQMAATVAGSVRAEVQHQLHVAVGSLQESILAQVQRIVKGEVSVALKEQQAAVTSSIMQAMRSAAGTPVPSAHLDCQAQQAHILQLLQQGHLNQAFQQALTAADLNLVLYVCETVDPAQVFGQPPCPLSQPVLLSLIQQLASDLGTRTDLKLSYLEEAVMHLDHSDPITRDHMGSVMAQVRQKLFQFLQAEPHNSLGKAARRLSLMLHGLVTPSLP

SEQ ID NO: 829784 - protein, 708 aa, Homo sapiens
GPDVSFVPTATSALSLELQEVEPLGLPQASPSRTRSPDVISSASTALSQDIPEIASEALSRGFGSSAPEGLEPDSMASAASALHLLSPRPRPGPELGPQLGLDGGPGDGDRHNTPSLLEAALTQEASTPDSQVWPTAPDITRETCSTLAESPRNGLQEKHKSLAFHRPPYHLLQQRDSQDASAEQSDHDDEVASLASASGGFGTKVPAPRLPAKDWKTKGSPRTSPKLKRKSKKDDGDAAMGSRLTEHQVAEPPEDWPALIWQQQRELAELRHSQEELLQRLCTQLEGLQSTVTGHVERALETRHEQEQRRLERALAEGQQRGGQLQEQLTQQLSQALSSAVAGRLERSIRDEIKKTVPPCVSRSLEPMAGQLSNSVATKLTAVEGSMKENISKLLKSKNLTDAIARAAADTLQGPMQAAYREAFQSVVLPAFEKSCQAMFQQINDSFRLGTQEYLQQLESHMKSRKAREQEAREPVLAQLRGLVSTLQSATEQMAATVAGSVRAEVQHQLHVAVGSLQESILAQVQRIVKGEVSVALKEQQAAVTSSIMQAMRSAAGTPVPSAHLDCQAQQAHILQLLQQGHLNQAFQQALTAADLNLVLYVCETVDPAQVFGQPPCPLSQPVLLSLIQQLASDLGTRTDLKLSYLEEAVMHLDHSDPITRDHMGSVMAQVRQKLFQFLQAEPHNSLGKAARRLSLMLHGLVTPSLP

SEQ ID NO: 829785 - protein, 1311 aa, Homo sapiens
MASCASIDIEDATQHLRDILKLDRPAGGPSAESPRPSSAYNGDLNGLLVPDPLCSGDSTSANKTGLRTMPPINLQEKQVICLSGDDSSTCIGILAKEVEIVASSDSSISSKARGSNKVKIQPVAKYDWEQKYYYGNLIAVSNSFLAYAIRAANNGSAMVRVISVSTSERTLLKGFTGSVADLAFAHLNSPQLACLDEAGNLFVWRLALVNGKIQEEILVHIRQPEGTPLNHFRRIIWCPFIPEESEDCCEESSPTVALLHEDRAEVWDLDMLRSSHSTWPVDVSQIKQGFIVVKGHSTCLSEGALSPDGTVLATASHDGYVKFWQIYIEGQDEPRCLHEWKPHDGRPLSCLLFCDNHKKQDPDVPFWRFLITGADQNRELKMWCTVSWTCLQTIRFSPDIFSSVSVPPSLKVCLDLSAEYLILSDVQRKVLYVMELLQNQEEGHACFSSISEFLLTHPVLSFGIQVVSRCRLRHTEVLPAEEENDSLGADGTHGAGAMESAAGVLIKLFCVHTKALQDVQIRFQPQLNPDVVAPLPTHTAHEDFTFGESRPELGSEGLGSAAHGSQPDLRRIVELPAPADFLSLSSETKPKLMTPDAFMTPSASLQQITASPSSSSSGSSSSSSSSSSSLTAVSAMSSTSAVDPSLTRPPEELTLSPKLQLDGSLTMSSSGSLQASPRGLLPGLLPAPADKLTPKGPGQVPTATSALSLELQEVEPLGLPQASPSRTRSPDVISSASTALSQDIPEIASEALSRGFGSSAPEGLEPDSMASAASALHLLSPRPRPGPELGPQLGLDGGPGDGDRHNTPSLLEAALTQEASTPDSQVWPTAPDITRETCSTLAESPRNGLQEKHKSLAFHRPPYHLLQQRDSQDASAEQSDHDDEVASLASASGGFGTKVPAPRLPAKDWKTKGSPRTSPKLKRKSKKDDGDAAMGSRLTEHQVAEPPEDWPALIWQQQRELAELRHSQEELLQRLCTQLEGLQSTVTGHVERALETRHEQEQRRLERALAEGQQRGGQLQEQLTQQLSQALSSAVAGRLERSIRDEIKKTVPPCVSRSLEPMAGQLSNSVATKLTAVEGSMKENISKLLKSKNLTDAIARAAADTLQGPMQAAYREAFQSVVLPAFEKSCQAMFQQINDSFRLGTQEYLQQLESHMKSRKAREQEAREPVLAQQQAHILQLLQQGHLNQAFQQALTAADLNLVLYVCETVDPAQVFGQPPCPLSQPVLLSLIQQLASDLGTRTDLKLSYLEEAVMHLDHSDPITRDHMGSVMAQVRQKLFQFLQAEPHNSLGKAARRLSLMLHGLVTPSLP

SEQ ID NO: 829786 - protein, 1338 aa, Homo sapiens
MASCASIDIEDATQHLRDILKLDRPAGGPSAESPRPSSAYNGDLNGLLVPDPLCSGDSTSANKTGLRTMPPINLQEKQVICLSGDDSSTCIGILAKEVEIVASSDSSISSKARGSNKVKIQPVAKYDWEQKYYYGNLIAVSNSFLAYAIRAANNGSAMVRVISVSTSERTLLKGFTGSVADLAFAHLNSPQLACLDEAGNLFVWRLALVNGKIQEEILVHIRQPEGTPLNHFRRIIWCPFIPEESEDCCEESSPTVALLHEDRAEVWDLDMLRSSHSTWPVDVSQIKQGFIVVKGHSTCLSEGALSPDGTVLATASHDGYVKFWQIYIEGQDEPRCLHEWKPHDGRPLSCLLFCDNHKKQDPDVPFWRFLITGADQNRELKMWCTVSWTCLQTIRFSPDIFSSVSVPPSLKVCLDLSAEYLILSDVQRKVLYVMELLQNQEEGHACFSSISEFLLTHPVLSFGIQVVSRCRLRHTEVLPAEEENDSLGADGTHGAGAMESAAGVLIKLFCVHTKALQDVQIRFQPQLNPDVVAPLPTHTAHEDFTFGESRPELGSEGLGSAAHGSQPDLRRIVELPAPADFLSLSSETKPKLMTPDAFMTPSASLQQITASPSSSSSGSSSSSSSSSSSLTAVSAMSSTSAVDPSLTRPPEELTLSPKLQLDGSLTMSSSGSLQASPRGLLPGLLPAPADKLTPKGPGQVPTATSALSLELQEVEPLGLPQASPSRTRSPDVISSASTALSQDIPEIASEALSRGFGSSAPEGLEPDSMASAASALHLLSPRPRPGPELGPQLGLDGGPGDGDRHNTPSLLEAALTQEASTPDSQVWPTAPDITRETCSTLAESPRNGLQEKHKSLAFHRPPYHLLQQRDSQDASAEQSDHDDEVASLASASGGFGTKVPAPRLPAKDWKTKGSPRTSPKLKRKSKKDDGDAAMGSRLTEHQVAEPPEDWPALIWQQQRELAELRHSQEELLQRLCTQLEGLQSTVTGHVERALETRHEQEQRRLERALAEGQQRGGQLQEQLTQQLSQALSSAVAGRLERSIRDEIKKTVPPCVSRSLEPMAGQLSNSVATKLTAVEGSMKENISKLLKSKNLTDAIARAAADTLQGPMQAAYREAFQSVVLPAFEKSCQAMFQQINDSFRLGTQEYLQQLESHMKSRKAREQEAREPVLAQLRGLVSTLQSATEQMAATVAGSVRAEVQHQLHVAVGSLQESILAQVQRIVKGEVSVALKEQQAAVTSSIMQAMRSAAGTPVPSAHLDCQAQQAHILQLLQQGHLNQAFQQALTAADLNLVLYVCETVDPAQVFGQPPCPLSQPVLLSLIQQLASDLGTRTDLKLR

SEQ ID NO: 829787 - protein, 270 aa, Homo sapiens
RFSTHPSKWHVQAVGPLPLDHEGSMKSRKAREQEAREPVLAQLRGLVSTLQSATEQMAATVAGSVRAEVQHQLHVAVGSLQESILAQVQRIVKGEVSVALKEQQAAVTSSIMQAMRSAAGTPVPSAHLDCQAQQAHILQLLQQGHLNQAFQQALTAADLNLVLYVCETVDPAQVFGQPPCPLSQPVLLSLIQQLASDLGTRTDLKLSYLEEAVMHLDHSDPITRDHMGSVMAQVRQKLFQFLQAEPHNSLGKAARRLSLMLHGLVTPSLP

SEQ ID NO: 829788 - protein, 1401 aa, Homo sapiens; identical to SEQ ID NO: 829775

SEQ ID NO: 829789 - protein, 952 aa, Homo sapiens
MASCASIDIEDATQHLRDILKLDRPAGGPSAESPRPSSAYNGDLNGLLVPDPLCSGDSTSANKTGLRTMPPINLQEKQVICLSGDDSSTCIGILAKEVEIVASSDSSISSKARGSNKVKIQPVAKYDWEQKYYYGNLIAVSNSFLAYAIRAANNGSAMVRVISVSTSERTLLKGFTGSVADLAFAHLNSPQLACLDEAGNLFVWRLALVNGKIQEEILVHIRQPEGTPLNHFRRIIWCPFIPEESEDCCEESSPTVALLHEDRAEVWDLDMLRSSHSTWPVDVSQIKQGFIVVKGHSTCLSEGALSPDGTVLATASHDGYVKFWQIYIEGQDEPRCLHEWKPHDGRPLSCLLFCDNHKKQDPDVPFWRFLITGADQNRELKMWCTVSWTCLQTIRFSPDIFSSVSVPPSLKVCLDLSAEYLILSDVQRKVLYVMELLQNQEEGHACFSSISEFLLTHPVLSFGIQVVSRCRLRHTEVLPAEEENDSLGADGTHGAGAMESAAGVLIKLFCVHTKALQDVQIRFQPQLNPDVVAPLPTHTAHEDFTFGESRPELGSEGLGSAAHGSQPDLRRIVELPAPADFLSLSSETKPKLMTPDAFMTPSASLQQITASPSSSSSGSSSSSSSSSSSLTAVSAMSSTSAVDPSLTRPPEELTLSPKLQLDGSLTMSSSGSLQASPRGLLPGLLPAPADKLTPKGPGQVPTATSALSLELQEVEPLGLPQASPSRTRSPDVISSASTALSQDIPEIASEALSRGFGSSAPEGLEPDSMASAASALHLLSPRPRPGPELGPQLGLDGGPGDGDRHNTPSLLEAALTQEASTPDSQVWPTAPDITRETCSTLAESPRNGLQEKHKSLAFHRPPYHLLQQRDSQDASAEQSDHDDEVASLASASGGFGTKVPAPRLPAKDWKTKGSPRTSPKLKRKSKKDDGGSALGSRLTEHQGENPLRTAQH

SEQ ID NO: 829790 - protein, 272 aa, Homo sapiens
MMIHGFQSSHRDFCFGPWKLTASKTHIMKSADVEKLADELHMPSLPEMMFGDNVLRIQHGSGFGIEFNATDALRCVNNYQGMLKVACAEEWQESRTEGEHSKEVIKPYDWTYTTDYKGTLLGESLKLKVVPTTDHIDTEKLKAREQIKFFEEVLLFEDELHDHGVSSLSVKIRVMPSSFFLLLRFFLRIDGVLIRMNDTRLYHEADKTYMLREYTSRESKISSLMHVPPSLFTEPNEISQYLPIKEAVCEKLIFPERIDPNPADSQKSTQVE

SEQ ID NO: 829791 - protein, 272 aa, Homo sapiens; identical to SEQ ID NO: 829790

SEQ ID NO: 829792 - protein, 178 aa, Homo sapiens
MMIHGFQSSHRDFCFGPWKLTASKTHIMKSADVEKLADELHMPSLPEMMFGDNVLRIQHGSGFGIEFNATDALRCVNNYQGMLKVACAEEWQESRTEGEHSKEVIKPYDWTYTTDYKGTLLGESLKLKVVPTTDHIDTEKLKAREQIKFFEEVLLFEDELHDHGVSSLSVKIPGGGHL

SEQ ID NO: 829793 - protein, 118 aa, Homo sapiens
WPVRGLLDPRSSRLSVKIRVMPSSFFLLLRFFLRIDGVLIRMNDTRLYHEADKTYMLREYTSRESKISSLMHVPPSLFTEPNEISQYLPIKEAVCEKLIFPERIDPNPADSQKSTQVE

SEQ ID NO: 829794 - protein, 1211 aa, Homo sapiens
AGVRGRRCRARSPRRPEGNHYQMRRKGRCHRGSAARHPSSPCSVKHSPTRETLTYAQAQRMVEIEIEGRLHRISIFDPLEIILEDDLTAQEMSECNSNKENSERPPVCLRTKRHKNNRVKKKNEALPSAHGTPASASALPEPKVRIVEYSPPSAPRRPPVYYKFIEKSAEELDNEVEYDMDEEDYAWLEIVNEKRKGDCVPAVSQSMFEFLMDRFEKESHCENQKQGEQQSLIDEDAVCCICMDGECQNSNVILFCDMCNLAVHQECYGVPYIPEGQWLCRHCLQSRARPADCVLCPNKGGAFKKTDDDRWGHVVCALWIPEVGFANTVFIEPIDGVRNIPPARWKLTCYLCKQKGVGACIQCHKANCYTAFHVTCAQKAGLYMKMEPVKELTGGGTTFSVRKTAYCDVHTPPGCTRRPLNIYGDVEMKNGVCRKESSVKTVRSTSKVRKKAKKAKKALAEPCAVLPTVCAPYIPPQRLNRIANQVAIQRKKQFVERAHSYWLLKRLSRNGAPLLRRLQSSLQSQRSSQQRENDEEMKAAKEKLKYWQRLRHDLERARLLIELLRKREKLKREQVKVEQVAMELRLTPLTVLLRSVLDQLQDKDPARIFAQPVSLKEVPDYLDHIKHPMDFATMRKRLEAQGYKNLHEFEEDFDLIIDNCMKYNARDTVFYRAAVRLRDQGGVVLRQARREVDSIGLEEASGMHLPERPAAAPRRPFSWEDVDRLLDPANRAHLGLEEQLRELLDMLDLTCAMKSSGSRSKRAKLLKKEIALLRNKLSQQHSQPLPTGPGLEGFEEDGAALGPEAGEEGDKSPPKLEPSDALPLPSNSETNSEPPTLKPVELNPEQSKLFKRVTFDNESHSACTQSALVSGRPPEPTRASSGDVPAAAASAVAEPASDVNRRTSVLFCKSKSVSPPKSAKNTETQPTSPQLGTKTFLSVVLPRLETLLQPRKRSRSTCGDSEVEEESPGKRLDAGLTNGFGGARSEQEPGGGLGRKATPRRRCASESSISSSNSPLCDSSFNAPKCGRGKPALVRRHTLEDRSELISCIENGNYAKAARIAAEVGQSSMWISTDAAASVLEPLKVVWAKCSGYPSYPALIIDPKMPRVPGHHNGVTIPAPPLDVLKIGEHMQTKSDEKLFLVLFFDNKRSWQWLPKSKMVPLGIDETIDKLKMMEGRNSSIRKAVRIAFDRAMNHLSRVHGEPTSDLSDID

SEQ ID NO: 829795 - protein, 741 aa, Homo sapiens
YTECLCFRLNRIANQVAIQRKKQFVERAHSYWLLKRLSRNGAPLLRRLQSSLQSQRSSQQRENDEEMKAAKEKLKYWQRLRHDLERARLLIELLRKREKLKREQVKVEQVAMELRLTPLTVLLRSVLDQLQDKDPARIFAQPVSLKEVPDYLDHIKHPMDFATMRKRLEAQGYKNLHEFEEDFDLIIDNCMKYNARDTVFYRAAVRLRDQGGVVLRQARREVDSIGLEEASGMHLPERPAAAPRRPFSWEDVDRLLDPANRAHLGLEEQLRELLDMLDLTCAMKSSGSRSKRAKLLKKEIALLRNKLSQQHSQPLPTGPGLEGFEEDGAALGPEAGEEGDKSPPKLEPSDALPLPSNSETNSEPPTLKPVELNPEQSKLFKRVTFDNESHSACTQSALVSGRPPEPTRASSGDVPAAAASAVAEPASDVNRRTSVLFCKSKSVSPPKSAKNTETQPTSPQLGTKTFLSVVLPRLETLLQPRKRSRSTCGDSEVEEESPGKRLDAGLTNGFGGARSEQEPGGGLGRKATPRRRCASESSISSSNSPLCDSSFNAPKCGRGKPALVRRHTLEDRSELISCIENGNYAKAARIAAEVGQSSMWISTDAAASVLEPLKVVWAKCSGYPSYPALIIDPKMPRVPGHHNGVTIPAPPLDVLKIGEHMQTKSDEKLFLVLFFDNKRSWQWLPKSKMVPLGIDETIDKLKMMEGRNSSIRKAVRIAFDRAMNHLSRVHGEPTSDLSDID

SEQ ID NO: 829796 - protein, 1058 aa, Homo sapiens
MRRKGRCHRGSAARHPSSPCSVKHSPTRETLTYAQAQRMVEIEIEGRLHRISIFDPLEIILEDDLTAQEMSECNSNKENSERPPVCLRTKRHKNNRVKKKNEALPSAHGTPASASALPEPKVRIVEYSPPSAPRRPPVYYKFIEKSAEELDNEVEYDMDEEDYAWLEIVNEKRKGDCVPAVSQSMFEFLMDRFEKESHCENQKQGEQQSLIDEDAVCCICMDGECQNSNVILFCDMCNLAVHQECYGVPYIPEGQWLCRHCLQSRARPADCVLCPNKGGAFKKTDDDRWGHVVCALWIPEVGFANTVFIEPIDGVRNIPPARWKLTCYLCKQKGVGACIQCHKANCYTAFHVTCAQKAGLYMKMEPVKELTGGGTTFSVRKTAYCDVHTPPGCTRRPLNIYGDVEMKNGVCRKESSVKTVRSTSKVRKKAKKAKKALAEPCAVLPTVCAPYIPPQRLNRIANQVAIQRKKQFVERAHSYWLLKRLSRNGAPLLRRLQSSLQSQRSSQQRENDEEMKAAKEKLKYWQRLRHDLERARLLIELLRKREKLKREQVKVEQVAMELRLTPLTVLLRSVLDQLQDKDPARIFAQPVSLKEVPDYLDHIKHPMDFATMRKRLEAQGYKNLHEFEEDFDLIIDNCMKYNARDTVFYRAAVRLRDQGGVVLRQARREVDSIGLEEASGMHLPERPAAAPRRPFSWEDVDRLLDPANRAHLGLEEQLRELLDMLDLTCAMKSSGSRSKRAKLLKKEIALLRNKLSQQHSQPLPTGPGLEGFEEDGAALGPEAGEEVLPRLETLLQPRKRSRSTCGDSEVEEESPGKRLDAGLTNGFGGARSEQEPGGGLGRKATPRRRCASESSISSSNSPLCDSSFNAPKCGRGKPALVRRHTLEDRSELISCIENGNYAKAARIAAEVGQSSMWISTDAAASVLEPLKVVWAKCSGYPSYPALIIDPKMPRVPGHHNGVTIPAPPLDVLKIGEHMQTKSDEKLFLVLFFDNKRSWQWLPKSKMVPLGIDETIDKLKMMEGRNSSIRKAVRIAFDRAMNHLSRVHGEPTSDLSDID

SEQ ID NO: 829797 - protein, 1189 aa, Homo sapiens
MRRKGRCHRGSAARHPSSPCSVKHSPTRETLTYAQAQRMVEIEIEGRLHRISIFDPLEIILEDDLTAQEMSECNSNKENSERPPVCLRTKRHKNNRVKKKNEALPSAHGTPASASALPEPKVRIVEYSPPSAPRRPPVYYKFIEKSAEELDNEVEYDMDEEDYAWLEIVNEKRKGDCVPAVSQSMFEFLMDRFEKESHCENQKQGEQQSLIDEDAVCCICMDGECQNSNVILFCDMCNLAVHQECYGVPYIPEGQWLCRHCLQSRARPADCVLCPNKGGAFKKTDDDRWGHVVCALWIPEVGFANTVFIEPIDGVRNIPPARWKLTCYLCKQKGVGACIQCHKANCYTAFHVTCAQKAGLYMKMEPVKELTGGGTTFSVRKTAYCDVHTPPGCTRRPLNIYGDVEMKNGVCRKESSVKTVRSTSKVRKKAKKAKKALAEPCAVLPTVCAPYIPPQRLNRIANQVAIQRKKQFVERAHSYWLLKRLSRNGAPLLRRLQSSLQSQRSSQQRENDEEMKAAKEKLKYWQRLRHDLERARLLIELLRKREKLKREQVKVEQVAMELRLTPLTVLLRSVLDQLQDKDPARIFAQPVSLKEVPDYLDHIKHPMDFATMRKRLEAQGYKNLHEFEEDFDLIIDNCMKYNARDTVFYRAAVRLRDQGGVVLRQARREVDSIGLEEASGMHLPERPAAAPRRPFSWEDVDRLLDPANRAHLGLEEQLRELLDMLDLTCAMKSSGSRSKRAKLLKKEIALLRNKLSQQHSQPLPTGPGLEGFEEDGAALGPEAGEEGDKSPPKLEPSDALPLPSNSETNSEPPTLKPVELNPEQSKLFKRVTFDNESHSACTQSALVSGRPPEPTRASSGDVPAAAASAVAEPASDVNRRTSVLFCKSKSVSPPKSAKNTETQPTSPQLGTKTFLSVVLPRLETLLQPRKRSRSTCGDSEVEEESPGKRLDAGLTNGFGGARSEQEPGGGLGRKATPRRRCASESSISSSNSPLCDSSFNAPKCGRGKPALVRRHTLEDRSELISCIENGNYAKAARIAAEVGQSSMWISTDAAASVLEPLKVVWAKCSGYPSYPALIIDPKMPRVPGHHNGVTIPAPPLDVLKIGEHMQTKSDEKLFLVLFFDNKRSWQWLPKSKMVPLGIDETIDKLKMMEGRNSSIRKAVRIAFDRAMNHLSRVHGEPTSDLSDID

SEQ ID NO: 829798 - protein, 1130 aa, Homo sapiens
AGVRGRRCRARSPRRPEGNHYQMRRKGRCHRGSAARHPSSPCSVKHSPTRETLTYAQAQRMVEIEIEGRLHRISIFDPLEIILEDDLTAQEMSECNSNKENSERPPVCLRTKRHKNNRVKKKNEALPSAHGTPASASALPEPKVRIVEYSPPSAPRRPPVYYKFIEKSAEELDNEVEYDMDEEDYAWLEIVNEKRKGDCVPAVSQSMFEFLMDRFEKESHCENQKQGEQQSLIDEDAVCCICMDGECQNSNVILFCDMCNLAVHQECYGVPYIPEGQWLCRHCLQSRARPADCVLCPNKGGAFKKTDDDRWGHVVCALWIPEVGFANTVFIEPIDGVRNIPPARWKLTCYLCKQKGVGACIQCHKANCYTAFHVTCAQKAGLYMKMEPVKELTGGGTTFSVRKTAYCDVHTPPGCTRRPLNIYGDVEMKNGVCRKESSVKTVRSTSKVRKKAKKAKKALAEPCAVLPTVCAPYIPPQRLNRIANQVAIQRKKQFVERAHSYWLLKRLSRNGAPLLRRLQSSLQSQRSSQQRENDEEMKAAKEKLKYWQRLRHDLERARLLIELLRKREKLKREQVKVEQVAMELRLTPLTVLLRSVLDQLQDKDPARIFAQPVSLKEVPDYLDHIKHPMDFATMRKRLEAQGYKNLHEFEEDFDLIIDNCMKYNARDTVFYRAAVRLRDQGGVVLRQARREVDSIGLEEASGMHLPERPAAAPRRPFSWEDVDRLLDPANRAHLGLEEQLRELLDMLDLTCAMKSSGSRSKRAKLLKKEIALLRNKLSQQHSQPLPTGPGLEGFEEDGAALGPEAGEEGDKSPPKLEPSDALPLPSNSETNSEPPTLKPVELNPEQSKLFKRVTFDNESHSACTQSALVSGRPPEPTRASSGDVPAAAASAVAEPASDVNRRTSVLFCKSKSVSPPKSAKNTETQPTSPQLGTKTFLSVVLPRLETLLQPRKRSRSTCGDSEVEEESPGKRLDAGLTNGFGGARSEQEPGGGLGRKATPRRRCASESSISSSNSPLCDSSFNAPKCGRGKPALVRRHTLEDRSELISCIENGNYAKAARIAAEVGQSSMWISTDAAASVLEPLKVVWAKCSGYPSYPALIIDPKMPRVPGHHKSDPHGLPDAGIPPFHHL

SEQ ID NO: 829799 - protein, 117 aa, Homo sapiens
METKKLIGKPLQPARPVRHLTSPPGAVFPFNFQNEYPCNTQCIQSGVSRCKTNGMQAFSQGLNEQQQQQSPVKKERIKYSRDFLLKLSSVSICRKKPDFLPDHPIVLQKPENNQSFK

SEQ ID NO: 829800 - protein, 117 aa, Homo sapiens; identical to SEQ ID NO: 829799

SEQ ID NO: 829801 - protein, 117 aa, Homo sapiens; identical to SEQ ID NO: 829799

SEQ ID NO: 829802 - protein, 108 aa, Homo sapiens
MEMQEHFHQRSLNEEKTKQKISKIKEKKKKLKITERRIIMLKDIIKVLSHHWKKRKKQSTLYDMDQYPVVNGKKHKKKQTTRLLKIELYKETRIEILKIMGPSWHMKV

SEQ ID NO: 829803 - protein, 110 aa, Homo sapiens
MAPKAKKEAPAPPKAEAKAKALKAKKAVLKGVHSHKKKKIRTSPTFRRPKTLRLRRQPKYPRKSAPRRNKLDHYAIIKFPLTTESAMKKIEDNNTLVFSLWDVKGQQAPD

SEQ ID NO: 829804 - protein, 110 aa, Homo sapiens; identical to SEQ ID NO: 829803

SEQ ID NO: 829805 - protein, 129 aa, Homo sapiens
GQTFGSGKLHASTGWSSMSPGLVVLRWAPAPPKAEAKAKALKAKKAVLKGVHSHKKKKIRTSPTFRRPKTLRLRRQPKYPRKSAPRRNKLDHYAIIKFPLTTESAMKKIEDNNTLVFSLWDVKGQQAPD

SEQ ID NO: 829806 - protein, 123 aa, Homo sapiens
MAFFSPSGRIRVLTLATSMSYSFFTACLIWCLLALKAKKAVLKGVHSHKKKKIRTSPTFRRPKTLRLRRQPKYPRKSAPRRNKLDHYAIIKFPLTTESAMKKIEDNNTLVFSLWDVKGQQAPD

SEQ ID NO: 829807 - protein, 110 aa, Homo sapiens; identical to SEQ ID NO: 829803

SEQ ID NO: 829808 - protein, 129 aa, Homo sapiens; identical to SEQ ID NO: 829805

SEQ ID NO: 829809 - protein, 146 aa, Homo sapiens
MAAALFVLLGFALLGTHGASGAAGTVFTTVEDLGSKILLTCSLNDSATEVTGHRWLKGGVVLKEDALPGQKTEFKVDSDDQWGEYSCVFLPEPMGTANIQLHGPPRVKAVKSSEHINEGETAMLVCKSESVPPVTDWAWYKITDSE

SEQ ID NO: 829810 - protein, 146 aa, Homo sapiens; identical to SEQ ID NO: 829809

SEQ ID NO: 829811 - protein, 146 aa, Homo sapiens; identical to SEQ ID NO: 829809

SEQ ID NO: 829812 - protein, 146 aa, Homo sapiens; identical to SEQ ID NO: 829809

SEQ ID NO: 829813 - protein, 146 aa, Homo sapiens; identical to SEQ ID NO: 829809

SEQ ID NO: 829814 - protein, 146 aa, Homo sapiens; identical to SEQ ID NO: 829809

SEQ ID NO: 829815 - protein, 146 aa, Homo sapiens; identical to SEQ ID NO: 829809

SEQ ID NO: 829816 - protein, 146 aa, Homo sapiens; identical to SEQ ID NO: 829809

SEQ ID NO: 829817 - protein, 146 aa, Homo sapiens; identical to SEQ ID NO: 829809

SEQ ID NO: 829818 - protein, 146 aa, Homo sapiens; identical to SEQ ID NO: 829809

SEQ ID NO: 829819 - protein, 146 aa, Homo sapiens; identical to SEQ ID NO: 829809

SEQ ID NO: 829820 - protein, 146 aa, Homo sapiens; identical to SEQ ID NO: 829809

SEQ ID NO: 829821 - protein, 146 aa, Homo sapiens; identical to SEQ ID NO: 829809

SEQ ID NO: 829822 - protein, 207 aa, Homo sapiens
MAAALFVLLGFALLGTHGASGAAGTVFTTVEDLGSKILLTCSLNDSATEVTGHRWLKGGVVLKEDALPGQKTEFKVDSDDQWGEYSCVFLPEPMGTANIQLHGESCSHGVPGTTDCREKLLAEAPGHPRALAPCSLEGNSPPAGGRGWGRACGSRLLSLTLLSGPPRVKAVKSSEHINEGETAMLVCKSESVPPVTDWAWYKITDSE

SEQ ID NO: 829823 - protein, 103 aa, Homo sapiens
MRACARVRRRGDRRPRRSPRPRDDAVRARARSAPPPLFIAGRGRRRQRLEVVGPARNRNHGGCAVRAAGIRAAGHPRSLRGCRHSLHYRRRPWLQDTPHLLLE

SEQ ID NO: 829824 - protein, 146 aa, Homo sapiens; identical to SEQ ID NO: 829809

SEQ ID NO: 829825 - protein, 146 aa, Homo sapiens; identical to SEQ ID NO: 829809

SEQ ID NO: 829826 - protein, 146 aa, Homo sapiens; identical to SEQ ID NO: 829809

SEQ ID NO: 829827 - protein, 103 aa, Homo sapiens; identical to SEQ ID NO: 829823

SEQ ID NO: 829828 - protein, 367 aa, Homo sapiens
  misc_feature (90)..(90): Xaa can be any naturally occurring amino acid
MAAALFVLLGFALLGTHGASGAAGTVFTTVEDLGSKILLTCSLNDSATEVTGHRWLKGGVVLKEDALPGQKTEFKVWTRDCTKLGAEYFXAVFPLAEPNEAAAHTIPVVLRGRSQGVKRHVAHVLVKESTKYRLECACTNRARLARGTLARVQDVSGVPIACYTLNLRALALTNKTLALEHTLEGTYKAALTIRTSGRRVAADAFAFLAYVSLRGVGPRGTTHDLALFGRNPCRPIVEEPRTPRAPCDPGSRHLGDPTHSRKCARSLHTRGPMRIRLLSPAGVARPGATRWGPAPFWDPVRPLGANSRLGRCGEVGVGSLVVQASFPLLCPILERRKRRPGIEPPACGPVLGGIEFDRTARGSLWLP

SEQ ID NO: 829829 - protein, 146 aa, Homo sapiens; identical to SEQ ID NO: 829809

SEQ ID NO: 829830 - protein, 146 aa, Homo sapiens; identical to SEQ ID NO: 829809

SEQ ID NO: 829831 - protein, 146 aa, Homo sapiens; identical to SEQ ID NO: 829809

SEQ ID NO: 829832 - protein, 146 aa, Homo sapiens; identical to SEQ ID NO: 829809

SEQ ID NO: 829833 - protein, 146 aa, Homo sapiens; identical to SEQ ID NO: 829809

SEQ ID NO: 829834 - protein, 146 aa, Homo sapiens; identical to SEQ ID NO: 829809

SEQ ID NO: 829835 - protein, 146 aa, Homo sapiens; identical to SEQ ID NO: 829809

SEQ ID NO: 829836 - protein, 114 aa, Homo sapiens
MRACARVRRRGDRRPRRSPRPRDDAVRARARSAPPPLFIAGRGRRRQRLEVVGPARNRNHGGCAVRAAGIRAAGHPRSLRGWASQSEGCEVVRTHQRGGDGHAGLQVRVRATCH

SEQ ID NO: 829837 - protein, 146 aa, Homo sapiens; identical to SEQ ID NO: 829809

SEQ ID NO: 829838 - protein, 123 aa, Homo sapiens
MAAALFVLLGFALLGTHGASGAAGTVFTTVEDLGSKILLTCSLNDSATEVTGHRWLKGGVVLKEDALPGQKTEFKVDSDDQWGEYSCVFLPEPMGTANIQLHGESCSHGVPGPHERLREQGSS

SEQ ID NO: 829839 - protein, 134 aa, Homo sapiens
MKQSDALPKKAGTVFTTVEDLGSKILLTCSLNDSATEVTGHRWLKGGVVLKEDALPGQKTEFKVDSDDQWGEYSCVFLPEPMGTANIQLHGPPRVKAVKSSEHINEGETAMLVCKSESVPPVTDWAWYKITDSE

SEQ ID NO: 829840 - protein, 134 aa, Homo sapiens; identical to SEQ ID NO: 829839

SEQ ID NO: 829841 - protein, 2277 aa, Homo sapiens
MFTYIKIITSGDSDNITHVWNEDDGQTLSPSSLAAQLLILENFEDALLNISANSPYIPYLACVRNVTDSLARGSPENLRLLQSTIRFKKSFLRNGSYEDYFPPVPEVLKSKLSQLRNLTELLCESETFSLIEKSCQLSDMSFGSLCEESEFDLQLLEAAELGTEIAASLLYHDNVISKKVRDLLTGDPSKINLNMDQFLEQALQMNYLENITQLIPIIEAMLHVNNSADASEKPGQLLEMFKNVEELKEDLRRTTGMSNRTIDKLLAIPIPDNRAEIISQVFWLHSCDTNITTPKLEDAMKEFCNLSLSERSRQSYLIGLTLLHYLNIYNFTYKVFFPRKDQKPVEKMMELFIRLKEILNQMASGTHPLLDKMRSLKQMHLPRSVPLTQAMYRSNRMNTPQGSFSTISQALCSQGITTEYLTAMLPSSQRPKGNHTKDFLTYKLTKEQIASKYGIPINSTPFCFSLYKDIINMPAGPVIWAFLKPMLLGRILYAPYNPVTKAIMEKSNVTLRQLAELREKSQEWMDKSPLFMNSFHLLNQAIPMLQNTLRNPFVQVFVKFSVGLDAVELLKQIDELDILRLKLENNIDIIDQLNTLSSLTVNISSCVLYDRIQAAKTIDEMEREAKRLYKSNELFGSVIFKLPSNRSWHRGYDSGNVFLPPVIKYTIRMSLKTAQTTRSLRTKIWAPGPHNSPSHNQIYGRAFIYLQDSIERAIIELQTGRNSQEIAVQVQAIPYPCFMKDNFLTSVSYSLPIVLMVAWVVFIAAFVKKLVYEKDLRLHEYMKMMGVNSCSHFFAWLIESVGFLLVTIVILIIILKFGNILPKTNGFILFLYFSDYSFSVIAMSYLISVFFNNTNIAALIGSLIYIIAFFPFIVLVTVENELSYVLKVFMSLLSPTAFSYASQYIARYEEQGIGLQWENMYTSPVQDDTTSFGWLCCLILADSFIYFLIAWYVRNVFPGTYGMAAPWYFPILPSYWKERFGCAEVKPEKSNGLMFTNIMMQNTNPSASPEYMFSSNIEPEPKDLTVGVALHGVTKIYGSKVAVDNLNLNFYEGHITSLLGPNGAGKTTTISMLTGLFGASAGTIFVYGKDIKTDLHTVRKNMGVCMQHDVLFSYLTTKEHLLLYGSIKVPHWTKKQLHEEVKRTLKDTGLYSHRHKRVGTLSGGMKRKLSISIALIGGSRVVILDEPSTGVDPCSRRSIWDVISKNKTARTIILSTHHLDEAEVLSDRIAFLEQGGLRCCGSPFYLKEAFGDGYHLTLTKKKSPNLNANAVCDTMAVTAMIQSHLPEAYLKEDIGGELVYVLPPFSTKVSGAYLSLLRALDNGMGDLNIGCYGISDTTVEEVFLNLTKESQKNSAMSLEHLTQKKIGNSNANGISTPDDLSVSSSNFTDRDDKILTRGERLDGFGLLLKKIMAILIKRFHHTRRNWKGLIAQVILPIVFVTTAMGLGTLRNSSNSYPEIQISPSLYGTSEQTAFYANYHPSTEALVSAMWDFPGIDNMCLNTSDLQCLNKDSLEKWNTSGEPITNFGVCSCSENVQECPKFNYSPPHRRTYSSQVIYNLTGQRVENYLISTANEFVQKRYGGWSFGLPLTKDLRFDITGVPANRTLAKVWYDPEGYHSLPAYLNSLNNFLLRVNMSKYDAARHGIIMYSHPYPGVQDQEQATISSLIDILVALSILMGYSVTTASFVTYVVREHQTKAKQLQHISGIGVTCYWVTNFIYDMVFYLVPVAFSIGIIAIFKLPAFYSENNLGAVSLLLLLFGYATFSWMYLLAGLFHETGMAFITYVCVNLFFGINSIVSLSVVYFLSKEKPNDPTLELISETLKRIFLIFPQFCFGYGLIELSQQQSVLDFLKAYGVEYPNETFEMNKLGAMFVALVSQGTMFFSLRLLINESLIKKLRLFFRKFNSSHVRETIDEDEDVRAERLRVESGAAEFDLVQLYCLTKTYQLIHKKIIAVNNISIGIPAGECFGLLGVNGAGKTTIFKMLTGDIIPSSGNILIRNKTGSLGHVDSHSSLVGYCPQEDALDDLVTVEEHLYFYARVHGIPEKDIKETVHKLLRRLHLMPFKDRATSMCSYGTKRKLSTALALIGKPSILLLDEPSSGMDPKSKRHLWKIISEEVQNKCSVILTSHSMEECEALCTRLAIMVNGKFQCIGSLQHIKSRFGRGFTVKVHLKNNKVTMETLTKFMQLHFPKTYLKDQHLSMLEYHVPVTAGGVANIFDLLETNKTALNITNFLVSQTTLEEVFINFAKDQKSYETADTSSQGSTISVDSQDDQMES

SEQ ID NO: 829842 - protein, 132 aa, Homo sapiens
GETWCPGEAPGGWSAAAAGAEAGGRGGEGRPERGAGARPAVMCPCPLHRGRGPPAVCACSAGRLGLRSSAAQLTAARLKALGDELHQRTMWRRRARSRRAPAPGALPTYWPWLCAAAQVAALAAWLLGRRNL

SEQ ID NO: 829843 - protein, 132 aa, Homo sapiens; identical to SEQ ID NO: 829842

SEQ ID NO: 829844 - protein, 132 aa, Homo sapiens; identical to SEQ ID NO: 829842

SEQ ID NO: 829845 - protein, 132 aa, Homo sapiens; identical to SEQ ID NO: 829842

SEQ ID NO: 829846 - protein, 198 aa, Homo sapiens
MADQRQRSLSTSGESLYHVLGLDKNATSDDIKKSYRKLALKYHPDKNPDNPEAADKFKEINNAHAILTDATKRNIYDKYGSLGLYVAEQFGEENVNTYFVLSSWWAKALFVFCGLLTCCYCCCCLCCCFNCCCGKCKPKAPEGEETEFYVSPEDLEAQLQSDEREATDTPIVIQPASATETTQLTADSHPSYHTDGFN

SEQ ID NO: 829847 - protein, 167 aa, Homo sapiens
MADQRQRSLSTSGESLYHVLGLDKNATSDDIKKSYRKLALKYHPDKNPDNPEAADKFKEINNAHAILTDATKRNIYDKYGSLGLYVAEQFGEENVNTYFVLSSWWAKALFVFCGLLTCCYCCCCLCCCFNCCCGKCKPKAPEGEETEFYVSPEDLEAQLQSDERGGH

SEQ ID NO: 829848 - protein, 167 aa, Homo sapiens; identical to SEQ ID NO: 829847

SEQ ID NO: 829849 - protein, 167 aa, Homo sapiens; identical to SEQ ID NO: 829847

SEQ ID NO: 829850 - protein, 167 aa, Homo sapiens; identical to SEQ ID NO: 829847

SEQ ID NO: 829851 - protein, 198 aa, Homo sapiens; identical to SEQ ID NO: 829846

SEQ ID NO: 829852 - protein, 167 aa, Homo sapiens; identical to SEQ ID NO: 829847

SEQ ID NO: 829853 - protein, 167 aa, Homo sapiens; identical to SEQ ID NO: 829847

SEQ ID NO: 829854 - protein, 167 aa, Homo sapiens; identical to SEQ ID NO: 829847

SEQ ID NO: 829855 - protein, 167 aa, Homo sapiens; identical to SEQ ID NO: 829847

SEQ ID NO: 829856 - protein, 213 aa, Homo sapiens
MRFCPFAERTRLVLKAKGIRHEVININLKNKPEWFFKKNPFGLVPVLENSQGQLIYESAITCEYLDEAYPGKKLLPDDPYEKACQKMILELFSKVPSLVGSFIRSQNKEDYAGLKEEFRKEFTKLEEVLTNKKTTFFGGNSISMIDYLIWPWFERLEAMKLNECVDHTPKLKLWMAAMKEDPTVSALLTSEKDWQGFLELYLQNSPEACDYGL

SEQ ID NO: 829857 - protein, 213 aa, Homo sapiens; identical to SEQ ID NO: 829856

SEQ ID NO: 829858 - protein, 308 aa, Homo sapiens
MSGESARSLGKGEACPPRRGGDLGDPRRHVRGCSGSPAARERPTGGERVGAAVGRGGGGIRGVSTPLWAVIAFASPRQEARPRGRSRRARIRIYSMRFCPFAERTRLVLKAKGIRHEVININLKNKPEWFFKKNPFGLVPVLENSQGQLIYESAITCEYLDEAYPGKKLLPDDPYEKACQKMILELFSKVPSLVGSFIRSQNKEDYAGLKEEFRKEFTKLEEVLTNKKTTFFGGNSISMIDYLIWPWFERLEAMKLNECVDHTPKLKLWMAAMKEDPTVSALLTSEKDWQGFLELYLQNSPEACDYGL

SEQ ID NO: 829859 - protein, 213 aa, Homo sapiens; identical to SEQ ID NO: 829856

SEQ ID NO: 829860 - protein, 213 aa, Homo sapiens; identical to SEQ ID NO: 829856

SEQ ID NO: 829861 - protein, 212 aa, Homo sapiens
PPGLKQSSHLSIRSSRDYRHEVININLKNKPEWFFKKNPFGLVPVLENSQGQLIYESAITCEYLDEAYPGKKLLPDDPYEKACQKMILELFSKVPSLVGSFIRSQNKEDYAGLKEEFRKEFTKLEEVLTNKKTTFFGGNSISMIDYLIWPWFERLEAMKLNECVDHTPKLKLWMAAMKEDPTVSALLTSEKDWQGFLELYLQNSPEACDYGL

SEQ ID NO: 829862 - protein, 195 aa, Homo sapiens
MRFCPFAERTRLVLKAKGIRHEVININLKNKPEWFFKKNPFGLVPVLDEAYPGKKLLPDDPYEKACQKMILELFSKVPSLVGSFIRSQNKEDYAGLKEEFRKEFTKLEEVLTNKKTTFFGGNSISMIDYLIWPWFERLEAMKLNECVDHTPKLKLWMAAMKEDPTVSALLTSEKDWQGFLELYLQNSPEACDYGL

SEQ ID NO: 829863 - protein, 175 aa, Homo sapiens
MRFCPFAERTRLVLKAKGIRHEVININLKNKPEWFFKKNPFGLVPVLENSQGQLIYESAITCEYLDEAYPGKKLLPDDPYEKACQKMILELFSKVPSLVGSFIRSQNKEDYAGLKEEFRKEFTKLEEVLTNKKTTFFGGNSISMIDYLIWPWFERLEAMKLNESKIFEYFVHNLG

SEQ ID NO: 829864 - protein, 175 aa, Homo sapiens; identical to SEQ ID NO: 829863

SEQ ID NO: 829865 - protein, 137 aa, Homo sapiens
PHQGRSRKQKMILELFSKVPSLVGSFIRSQNKEDYAGLKEEFRKEFTKLEEVLTNKKTTFFGGNSISMIDYLIWPWFERLEAMKLNECVDHTPKLKLWMAAMKEDPTVSALLTSEKDWQGFLELYLQNSPEACDYGL

SEQ ID NO: 829866 - protein, 180 aa, Homo sapiens
MRFCPFAERTRLVLKAKGIRHEVININLKNKPEWFFKKNPFGLVPVLENSQGQLIYESAITCEYLDEAYPGKKLLPDDPYEKACQKMILELFSKVLTNKKTTFFGGNSISMIDYLIWPWFERLEAMKLNECVDHTPKLKLWMAAMKEDPTVSALLTSEKDWQGFLELYLQNSPEACDYGL

SEQ ID NO: 829867 - protein, 226 aa, Homo sapiens
MSGESARSLGKGEACPPRRGGDLGDPRRHVRGCSGSPAARERPTGGERVGAAVGRGGGGIRGVSTPLWAVIAFASPRQEARPRGRSRRARIRIYSMRFCPFAERTRLVLKAKGIRHEVININLKNKPEWFFKKNPFGLVPVLENSQGQLIYESAITCEYLDEAYPGKKLLPDDPYEKACQKMILELFSKVPSLVGSFIRSQNKEDYAGLKEEFRKEFTKLEETNRF

SEQ ID NO: 829868 - protein, 119 aa, Homo sapiens
MRFCPFAERTRLVLKAKGIRHEVININLKNKPEWFFKKNPFGLVPVLENSQGQLIYESAITCEYLDEAYPGKKLLPDDPYEKACQKMILELFSKVPSLVGSFIRSQNKEDYASADRVGT

SEQ ID NO: 829869 - protein, 86 aa, Homo sapiens
MRFCPFAERTRLVLKAKGIRHEVININLKNKPEWFFKKNPFGLVPVLENSQGQLIYESAITCEYLDEAYPGKKLLPDQRIEWEPLD

SEQ ID NO: 829870 - protein, 213 aa, Homo sapiens; identical to SEQ ID NO: 829856

SEQ ID NO: 829871 - protein, 267 aa, Homo sapiens
MRSGWAHGESPTLSQYPLIWNIVSTAPATAAGLGFQREARPRGRSRRARIRIYSMRFCPFAERTRLVLKAKGIRHEVININLKNKPEWFFKKNPFGLVPVLENSQGQLIYESAITCEYLDEAYPGKKLLPDDPYEKACQKMILELFSKVPSLVGSFIRSQNKEDYAGLKEEFRKEFTKLEEVLTNKKTTFFGGNSISMIDYLIWPWFERLEAMKLNECVDHTPKLKLWMAAMKEDPTVSALLTSEKDWQGFLELYLQNSPEACDYGL

SEQ ID NO: 829872 - protein, 213 aa, Homo sapiens; identical to SEQ ID NO: 829856

SEQ ID NO: 829873 - protein, 278 aa, Homo sapiens
MSGESARSLGKGEACPPRRGGDLGDPRRHVRGCSGSPAARERPTGGEREARPRGRSRRARIRIYSMRFCPFAERTRLVLKAKGIRHEVININLKNKPEWFFKKNPFGLVPVLENSQGQLIYESAITCEYLDEAYPGKKLLPDDPYEKACQKMILELFSKVPSLVGSFIRSQNKEDYAGLKEEFRKEFTKLEEVLTNKKTTFFGGNSISMIDYLIWPWFERLEAMKLNECVDHTPKLKLWMAAMKEDPTVSALLTSEKDWQGFLELYLQNSPEACDYGL

SEQ ID NO: 829874 - protein, 213 aa, Homo sapiens; identical to SEQ ID NO: 829856

SEQ ID NO: 829875 - protein, 213 aa, Homo sapiens; identical to SEQ ID NO: 829856

SEQ ID NO: 829876 - protein, 213 aa, Homo sapiens; identical to SEQ ID NO: 829856

SEQ ID NO: 829877 - protein, 278 aa, Homo sapiens; identical to SEQ ID NO: 829873

SEQ ID NO: 829878 - protein, 113 aa, Homo sapiens
MRFCPFAERTRLVLKAKGIRHEVININLKNKPEWFFKKNPFGLVPVLENSQGQLIYESAITCEYLDEAYPGKKLLPDDPYEKACQKMILELFSKVPSLVGSFIRSQNKEDYAF

SEQ ID NO: 829879 - protein, 131 aa, Homo sapiens
MRFCPFAERTRLVLKAKGIRHEVININLKNKPEWFFKKNPFGLVPVLENSQGQLIYESAITCEYLDEAYPGKKLLPDDPYEKACQKMILELFSKVPSLVGSFIRSQNKEDYAGLKEEFRKEFTKLEETNRF

SEQ ID NO: 829880 - protein, 143 aa, Homo sapiens
LGEKHSRQSNSKYKYSQEIHRACSGGRSRKQGSWEGQKQDSSGLKEEFRKEFTKLEEVLTNKKTTFFGGNSISMIDYLIWPWFERLEAMKLNECVDHTPKLKLWMAAMKEDPTVSALLTSEKDWQGFLELYLQNSPEACDYGL

SEQ ID NO: 829881 - protein, 180 aa, Homo sapiens; identical to SEQ ID NO: 829866

SEQ ID NO: 829882 - protein, 235 aa, Homo sapiens
MALPVTALLLPLALLLHAARPSQFRVSPLDRTWNLGETVELKCQVLLSNPTSGCSWLFQPRGAAASPTFLLYLSQNKPKAAEGLDTQRFSGKRLGDTFVLTLSDFRRENEGYYFCSALSNSIMYFSHFVPVFLPAKPTTTPAPRPPTPAPTIASQPLSLRPEACRPAAGGAVHTRGLDFACDIYIWAPLAGTCGVLLLSLVITLYCNHRNRRRVCKCPRPVVKSGDKPSLSARYV

SEQ ID NO: 829883 - protein, 239 aa, Homo sapiens
MRNQAPGRPKGATFPPRRPTGSRAPPLAPELRAKQRPGERVMALPVTALLLPLALLLHAARPSQFRVSPLDRTWNLGETVELKCQVLLSNPTSGCSWLFQPRGAAASPTFLLYLSQNKPKAAEGLDTQRFSGKRLGDTFVLTLSDFRRENEGYYFCSALSNSIMYFSHFVPVFLPAKPTTTPAPRPPTPAPTIASQPLSLRPEACRPAAGGAGNRRRVCKCPRPVVKSGDKPSLSARYV

SEQ ID NO: 829884 - protein, 269 aa, Homo sapiens
MALPVTALLLPLALLLHAARPSQFRVSPLDRTWNLGETVELKCQVLLSNPTSGCSWLFQPRGAAASPTFLLYLSQNKPKAAEGLDTQRFSGKRLGDTFVLTLSDFRRENEGYYFCSALSNSIMYFSHFVPVFLPAKPTTTPAPRPPTPAPTIASQPLSLRPEACRPAAGGAVHTRGLDFACDIYIWAPLAGTCGVLLLSLVITLYCNHRTGRRVCKLSPACGQIGQTSPGLQATIRSYPCCQQSNYNYLQTCTIPLPLARNPTSFPYSI

SEQ ID NO: 829885 - protein, 108 aa, Homo sapiens
MDSLSPGVQDQPGQHGEPPSLQKFSQGTEDVFANVPGLWSNRETSPAFRRDTSNPVQQPLHYFKLRSFLLREQVLPFHFFQSSSLCIHSHDYYFSGGGVGKITFSLCV

SEQ ID NO: 829886 - protein, 262 aa, Homo sapiens
MRNQAPGRPKGATFPPRRPTGSRAPPLAPELRAKQRPGERVMALPVTALLLPLALLLHAARPSQFRVSPLDRTWNLGETVELKCQVLLSNPTSGCSWLFQPRGAAASPTFLLYLSQNKPKAAEGLDTQRFSGKRLGDTFVLTLSDFRRENEGYYFCSALSNSIMYFSHFVPVFLPAKPTTTPAPRPPTPAPTIASQPLSLRPEACRPAAGGAVHTRGLDFACDIYIWAPLAGTCGVLLLSLVITLYCNHSKSRGIAAGRSRP

SEQ ID NO: 829887 - protein, 526 aa, Homo sapiens
MSLVEAISLWNEGVLAADKKDWKGALDAFSAVQDPHSRICFNIGCMYTILKNMTEAEKAFTRSINRDKHLAVAYFQRGMLYYQTEKYDLAIKDLKEALIQLRGNQLIDYKILGLQFKLFACEVLYNIAFMYAKKEEWKKAEEQLALATSMKSEPRHSKIDKAMECVWKQKLYEPVVIPVGKLFRPNERQVAQLAKKDYLGKATVVASVVDQDSFSGFAPLQPQAAEPPPRPKTPEIFRALEGEAHRVLFGFVPETKEELQVMPGNIVFVLKKGNDNWATVMFNGQKGLVPCNYLEPVELRIHPQQQPQEESSPQSDIPAPPSSKAPGRPQLSPGQKQKEEPKEVKLSVPMPYTLKVHYKYTVVMKTQPGLPYSQVRDMVSKKLELRLEHTKLSYRPRDSNELVPLSEDSMKDAWGQVKNYCLTLWCENTVGDQGFPDEPKESEKADANNQTTEPQLKKGSQVEALFSYEATQPEDLEFQEGDIILVLSKVNEEWLEGECKGKVGIFPKVFVEDCATTDLESTRREV

SEQ ID NO: 829888 - protein, 526 aa, Homo sapiens; identical to SEQ ID NO: 829887

SEQ ID NO: 829889 - protein, 434 aa, Homo sapiens
MSLVEAISLWNEGVLAADKKDWKGALDAFSAVQDPHSRICFNIGCMYTILKNMTEAEKAFTRSINRDKHLAVAYFQRGMLYYQTEKYDLAIKDLKEALIQLRGNQLIDYKILGLQFKLFACEVLYNIAFMYAKKEEWKKAEEQLALATSMKSEPRHSKIDKAMECVWKQKLYEPVVIPVGKLFRPNERQVAQLAKKDYLGKATVVASVVDQDSFSGFAPLQPQAAEPPPRPKTPEIFRALEGEAHRVLFGFVPETKEELQVMPGNIVFVLKKGNDNWATVMFNGQKGLVPCNYLEPVELRIHPQQQPQEESSPQSDIPAPPSSKAPGRPQLSPGQKQKEEPKEVKLSVPMPYTLKVHYKYTVVMKTQPGLPYSQVRDMVSKKLELRLEHTKLSYRPRDSNELVPLSEDSMKDAWGQVKNYCLTLWCENTVQSFC

SEQ ID NO: 829890 - protein, 428 aa, Homo sapiens
MSLVEAISLWNEGVLAADKKDWKGALDAFSAVQDPHSRICFNIGCMYTILKNMTEAEKAFTRSINRDKHLAVAYFQRGMLYYQTEKYDLAIKDLKEALIQLRGNQLIDYKILGLQFKLFACEVLYNIAFMYAKKEEWKKAEEQLALATSMKSEPRHSKIDKAMECVWKQKLYEPVVIPVGKLFRPNERQVAQLAKKDYLGKATVVASVVDQDSFSGFAPLQPQAAEPPPRPKTPEIFRALEGEAHRVLFGFVPETKEELQVMPGNIVFVLKKGNDNWATVMFNGQKGLVPCNYLEPVELRIHPQQQPQEESSPQSDIPAPPSSKAPGRPQLSPGQKQKEEPKEVKLSVPMPYTLKVHYKYTVVMKTQPGLPYSQVRDMVSKKQKEEPKEVKLSVPMPYTLKVLASQLCSHCKHSSSCTFGALFCVIPQ

SEQ ID NO: 829891 - protein, 170 aa, Homo sapiens
MSLVEAISLWNEGVLAADKKDWKGALDAFSAVQDPHSRICFNIGCMYTILKNMTEAEKAFTRSINRDKHLAVAYFQRGMLYYQTEKYDLAIKDLKEALIQLRGNQLIDYKILGLQFKLFACEVLYNIAFMYAKKEEWKKLYIWCTFLCHTTIKKNLSSYKNKTPKSRPKE

SEQ ID NO: 829892 - protein, 526 aa, Homo sapiens; identical to SEQ ID NO: 829887

SEQ ID NO: 829893 - protein, 528 aa, Homo sapiens
MSLVEAISLWNEGVLAADKKDWKGALDAFSAVQDPHSRICFNIGCMYTILKNMTEAEKAFTRSINRDKHLAVAYFQRGMLYYQTEKYDLAIKDLKEALIQLRGNQLIDYKILGLQFKLFACEVLYNIAFMYAKKEEWKKAEEQLALATSMKSEPRHSKIDKAMECVWKQKLYEPVVIPVGKLFRPNERQVAQLAKKDYLGKATVVASVVDQDSFSGFAPLQPQAAEPPPRPKTPEIFRALEGEAHRVLFGFVPETKEELQVMPGNIVFVLKKGNDNWATVMFNGQKGLVPCNYLEPVELRIHPQQQPQEESSPQSDIPAPPSSKAPGRPQLSPGQKQKEEPKEVKLSVPMPYTLKVHYKYTVVMKTQPGLPYSQVRDMVSKKLELRLEHTKLSYRPRDSNELVPLSEDSMKDAWGQVKNYCLTLWCENTVGDQGFPDEPKESEKADANNQTTEPQLKKGSQVEALFSYEATQPEDLEFQEGDIILVLSKVNEEWLEGECKGKVGIFPLKFNLLDNDVSTQDDFLGHSG

SEQ ID NO: 829894 - protein, 105 aa, Homo sapiens
MSLVEAISLWNEGVLAADKKDWKGALDAFSAVQDPHSRICFNIGCMYTILKNMTEAEKAFTRSINRDKHLAVAYFQRGMLYYQTENKVFVEDCATTDLESTRREV

SEQ ID NO: 829895 - protein, 620 aa, Homo sapiens [sequence omitted]

SEQ ID NO: 829896 - protein, 620 aa, Homo sapiens [sequence omitted]

SEQ ID NO: 829897 - protein, 573 aa, Homo sapiens
MAPSPSLVQVYTSPAAVAVWEWQDGLGTWHPYSATVCSFIEQQFVQQKGQRFGLGSLAHSIPLGQADPSLAPYIIDLPSWTQFRQDTGTMRAVRRHLFPQHSAPGRGVVWEWLSDDGSWTAYEASVCDYLEQQVARGNQLVDLAPLGYNYTVNYTTHTQTNKTSSFCRSVRRQAGPPYPVTTIIAPPGHTGVACSCHQCLSGSRTGPVSGRYRHSMTNLPAYPVPQHPPHRTASVFGTHQAFAPYNKPSLSGARSAPRLNTTNAWGAAPPSLGSQPLYRSSLSHLGPQHLPPGSSTSGAVSASLPSGPSSSPGSVPATVPMQMPKPSRVQQALAEATPKPEPEPEQVIKNYTEELKVPPDEDCIICMEKLSAASGYSDVTDSKAIGSLAVGHLTKCSHAFHLLCLLAMYCNGNKDGSLQCPSCKTIYGEKTGTQPQGKMEVLRFQMSLPGHEDCGTILIVYSIPHGIQGPEHPNPGKPFTARGFPRQCYLPDNAQGRKVLELLKVAWKRRLIFTVGTSSTTGETDTVVWNEIHHKTEMDRNITGHGYPDPNYLQNVLAELAAQGVTEDCLEQQ

SEQ ID NO: 829898 - protein, 620 aa, Homo sapiens [sequence omitted]

SEQ ID NO: 829899 - protein, 832 aa, Homo sapiens
APGMRSGSLGSCDAEFHSGCLLLRVGATARALPRPSRSCSPSAVVPSAPSSCPPQPRCLGICVAESASLSDLPGFCCLWFVSRWELKQVIPPKELVSSSRRDSLCQLSREKRTRLADPAPRIVPSPGPPSRPPSACNFPSGSGTVLEWPVADTEPPASCICCPGSHCQLCQSHWGPQRSQDLPEALGNDPGTPGQRGLKLFGKAAGLLGKMAMAPSPSLVQVYTSPAAVAVWEWQDGLGTWHPYSATVCSFIEQQFVQQKGQRFGLGSLAHSIPLGQADPSLAPYIIDLPSWTQFRQDTGTMRAVRRHLFPQHSAPGRGVVWEWLSDDGSWTAYEASVCDYLEQQVARGNQLVDLAPLGYNYTVNYTTHTQTNKTSSFCRSVRRQAGPPYPVTTIIAPPGHTGVACSCHQCLSGSRTGPVSGRYRHSMTNLPAYPVPQHPPHRTASVFGTHQAFAPYNKPSLSGARSAPRLNTTNAWGAAPPSLGSQPLYRSSLSHLGPQHLPPGSSTSGAVSASLPSGPSSSPGSVPATVPMQMPKPSRVQQALAGMTSVLMSAIGLPVCLSRAPQPTSPPASRLASKSHGSVKRLRKMSVKEATPKPEPEPEQVIKNYTEELKVPPDEDCIICMEKLSAASGYSDVTDSKAIGSLAVGHLTKCSHAFHLLCLLAMYCNGNKDGSLQCPSCKTIYGEKTGTQPQGKMEVLRFQMSLPGHEDCGTILIVYSIPHGIQGPEHPNPGKPFTARGFPRQCYLPDNAQGRKVLELLKVAWKRRLIFTVGTSSTTGETDTVVWNEIHHKTEMDRNITGHGYPDPNYLQNVLAELAAQGVTEDCLEQQ

SEQ ID NO: 829900 - protein, 276 aa, Homo sapiens
MGLPWGQPHLGLQMLLLALNCLRPSLSLELVPYTPQITAWDLEGKVTATTFSLEQPRCVFDGLASASDTVWLVVAFSNASRGFQNPETLADIPASPQLLTDGHYMTLPLSPDQLPCGDPMAGSGGAPVLRVGHDHGCHQQPFCNAPLPGPGPYRVKFLLMDTRGSPRAETKWSDPITLHQGKTPGSIDTWPGRRSGSMIVITSILSSLAGLLLLAFLAASTMRFSSLWWPEEAPEQLRIGSFMGKRYMTHHIPPSEAATLPVGCKPGLDPLPSLSP

SEQ ID NO: 829901 - protein, 265 aa, Homo sapiens
MGLPWGQPHLGLQMLLLALNCLRPSLSLELVPYTPQITAWDLEGKVTATTFSLEQPRCVFDGLASASDTVWLVVAFSNASRGFQNPETLADIPASPQLLTDGHYMTLPLSPDQLPCGDPMAGSGGAPVLRVGHDHGCHQQPFCNAPLPGPGPYREDPRIHRHLARAAKWQHDRHYLHPLFSGRPPTLGLLGSLYHALLQPVVAGGGPGAAADRLLHGQALHDPPHPTQRGRHTAGGLQAWAGPPPQPQPLAWPLCMGLGEMGRRE

SEQ ID NO: 829902 - protein, 320 aa, Homo sapiens
MGLPWGQPHLGLQMLLLALNCLRPSLSLGEWGSWMDASSQTQGAGGPAGVIGPWAPAPLRLGEAAPGTPTPVSVAHLLSPVATELVPYTPQITAWDLEGKVTATTFSLEQPRCVFDGLASASDTVWLVVAFSNASRGFQNPETLADIPASPQLLTDGHYMTLPLSPDQLPCGDPMAGSGGAPVLRVGHDHGCHQQPFCNAPLPGPGPYREDPRIHRHLARAAKWQHDRHYLHPLFSGRPPTLGLLGSLYHALLQPVVAGGGPGAAADRLLHGQALHDPPHPTQRGRHTAGGLQAWAGPPPQPQPLAWPLCMGLGEMGRRE

SEQ ID NO: 829903 - protein, 172 aa, Homo sapiens
MTLPLSPDQLPCGDPMAGSGGAPVLRVGHDHGCHQQPFCNAPLPGPGPYRVKFLLMDTRGSPRAETKWSDPITLHQGKTPGSIDTWPGRRSGSMIVITSILSSLAGLLLLAFLAASTMRFSSLWWPEEAPEQLRIGSFMGKRYMTHHIPPSEAATLPVGCKPGLDPLPSLSP

SEQ ID NO: 829904 - protein, 218 aa, Homo sapiens [sequence omitted]

SEQ ID NO: 829905 - protein, 335 aa, Homo sapiens
MRLPGDCAAVSALLHPPWLLGLSRVPGRWDWGRLCPTELGALCLALSSPVPHTGLPVWAPLAFPPGSLDLFLPFLALWPPLQPVLLRTLLMYFSLLEATPKPEPEPEQVIKNYTEELKVPPDEDCIICMEKLSAASGYSDVTDSKAIGSLAVGHLTKCSHAFHLLCLLAMYCNGNKDGSLQCPSCKTIYGEKTGTQPQGKMEVLRFQMSLPGHEDCGTILIVYSIPHGIQGPEHPNPGKPFTARGFPRQCYLPDNAQGRKVLELLKVAWKRRLIFTVGTSSTTGETDTVVWNEIHHKTEMDRNITGHGYPDPNYLQNVLAELAAQGVTEDCLEQQ

SEQ ID NO: 829906 - protein, 785 aa, Homo sapiens
APGMRSGSLGSCDAEFHSGCLLLRVGATARALPRPSRSCSPSAVVPSAPSSCPPQPRCLGICVAESASLSDLPGFCCLWFVSRWELKQVIPPKELVSSSRRDSLCQLSREKRNFQLKTLSCTIPPARPPEGTPDLPEALGNDPGTPGQRGLKLFGKAAGLLGKMAMAPSPSLVQVYTSPAAVAVWEWQDGLGTWHPYSATVCSFIEQQFVQQKGQRFGLGSLAHSIPLGQADPSLAPYIIDLPSWTQFRQDTGTMRAVRRHLFPQHSAPGRGVVWEWLSDDGSWTAYEASVCDYLEQQVARGNQLVDLAPLGYNYTVNYTTHTQTNKTSSFCRSVRRQAGPPYPVTTIIAPPGHTGVACSCHQCLSGSRTGPVSGRYRHSMTNLPAYPVPQHPPHRTASVFGTHQAFAPYNKPSLSGARSAPRLNTTNAWGAAPPSLGSQPLYRSSLSHLGPQHLPPGSSTSGAVSASLPSGPSSSPGSVPATVPMQMPKPSRVQQALAGMTSVLMSAIGLPVCLSRAPQPTSPPASRLASKSHGSVKRLRKMSVKEATPKPEPEPEQVIKNYTEELKVPPDEDCIICMEKLSAASGYSDVTDSKAIGSLAVGHLTKCSHAFHLLCLLAMYCNGNKDGSLQCPSCKTIYGEKTGTQPQGKMEVLRFQMSLPGHEDCGTILIVYSIPHGIQGPEHPNPGKPFTARGFPRQCYLPDNAQGRKVLELLKVAWKRRLIFTVGTSSTTGETDTVVWNEIHHKTEMDRNITGHGYPDPNYLQNVLAELAAQGVTEDCLEQQ

SEQ ID NO: 829907 - protein, 620 aa, Homo sapiens [sequence omitted]

SEQ ID NO: 829908 - protein, 289 aa, Homo sapiens
MGLPWGQPHLGLQMLLLALNCLRPSLSLELVPYTPQITAWDLEGKVTATTFSLEQPRCVFDGLASASDTVWLVVAFSNASRGFQNPETLADIPASPQLLTDGHYMTLPLSPDQLPCGDPMAGSGGAPVLRVGHDHGCHQQPFCNAPLPGPGPYRVKFLLMDTRGSPRAETKWSDPITLHQGKTPGSIDTWPGRRSGSMIVITSILSSLAGLLLLAFLAASTMRFSSLWWPEEAPEQLRIGSFMGKRYMTHHIPPSEAATLPVGCKPGLDPSTSLLPLLGGTWPGCGLPL

SEQ ID NO: 829909 - protein, 331 aa, Homo sapiens
MGLPWGQPHLGLQMLLLALNCLRPSLSLGEWGSWMDASSQTQGAGGPAGVIGPWAPAPLRLGEAAPGTPTPVSVAHLLSPVATELVPYTPQITAWDLEGKVTATTFSLEQPRCVFDGLASASDTVWLVVAFSNASRGFQNPETLADIPASPQLLTDGHYMTLPLSPDQLPCGDPMAGSGGAPVLRVGHDHGCHQQPFCNAPLPGPGPYRVKFLLMDTRGSPRAETKWSDPITLHQGKTPGSIDTWPGRRSGSMIVITSILSSLAGLLLLAFLAASTMRFSSLWWPEEAPEQLRIGSFMGKRYMTHHIPPSEAATLPVGCKPGLDPLPSLSP

SEQ ID NO: 829910 - protein, 85 aa, Homo sapiens
WLGKTGNHNGRAADGVGEAGAGGRGEKRQETEKCKRGKSEKCPLPRSMPTALLASPPSFPATLHAHQALPVLQAQPLSLVTKSAH

SEQ ID NO: 829911 - protein, 588 aa, Homo sapiens
MPQLGGGGGGGGGGSGGGGGSSAGAAGGGDDLGANDELIPFQDEGGEEQEPSSDSASAQRDLDEVKSSLVNESENQSSSSDSEAERRPQPVRDTFQKPRDYFAEVRRPQDSAFFKGPPYPGYPFLMIPDLSSPYLSNGPLSPGGARTYLQMKWPLLDVPSSATVKDTRSPSPAHLSNKVPVVQHPHHMHPLTPLITYSNDHFSPGSPPTHLSPEIDPKTGIPRPPHPSELSPYYPLSPGAVGQIPHPLGWLVPQQGQPMYSLPPGGFRHPYPALAMNASMSSLVSSRFSPHMVAPAHPGLPTSGIPHPAIVSPIVKQEPAPPSLSPAVSVKSPVTVKKEEEKKPHVKKPLNAFMLYMKEMRAKVVAECTLKESAAINQILGRKWHNLSREEQAKYYELARKERQLHSQLYPTWSARDNYGKKKKRKREKQLSQTQSQQQVQEAEGALASKSKKPCVQYLPPEKPCDSPASSHGSMLDSPATPSAALASPAAPAATHSEQAQPLSLTTKPETRAQLALHSAAFLSAKAAASSSGQMGSQPPLLSRPLPLGSMPTALLASPPSFPATLHAHQALPVLQAQPLSLVTKSAH

SEQ ID NO: 829912 - protein, 588 aa, Homo sapiens; identical to SEQ ID NO: 829911

SEQ ID NO: 829913 - protein, 441 aa, Homo sapiens
MPQLGGGGGGGGGGSGGGGGSSAGAAGGGDDLGANDELIPFQDEGGEEQEPSSDSASAQRDLDEVKSSLVNESENQSSSSDSEAERRPQPVRDTFQKPRDYFAEVRRPQDSAFFKGPPYPGYPFLMIPDLSSPYLSNGPLSPGGARTYLQMKWPLLDVPSSATVKDTRSPSPAHLSNKVPVVQHPHHMHPLTPLITYSNDHFSPGSPPTHLSPEIDPKTGIPRPPHPSELSPYYPLSPGAVGQIPHPLGWLVPQQGQPMYSLPPGGFRHPYPALAMNASMSSLVSSRFSPHMVAPAHPGLPTSGIPHPAIVSPIVKQEPAPPSLSPAVSVKSPVTVKKEEEKKPHVKKPLNAFMLYMKEMRAKVVAECTLKESAAINQILGRKWHNLSREEQAKYYELARKERQLHSQLYPTWSARDNYVSAHSGQRTLRPQEQPLQEEEG

SEQ ID NO: 829914 - protein, 215 aa, Homo sapiens
MYGKSSTRAVLLLLGIQLTALWPIAAVEIYTSRVLEAVNGTDARLKCTFSSFAPVGDALTVTWNFRPLDGGPEQFVFYYHIDPFQPMSGRFKDRVSWDGNPERYDASILLWKLQFDDNGTYTCQVKNPPDVDGVIGEIRLSVVHTVRFSEIHFLALAIGSACALMIIIVIVVVLFQHYRKKRWAERAHKVVEIKSKEEERLNQEKKVSVYLEDTD

SEQ ID NO: 829915 - protein, 197 aa, Homo sapiens
MYGKSSTRAVLLLLGIQLTALWPIAAVEIYTSRVLEAVNGTDARWNFRPLDGGPEQFVFYYHIDPFQPMSGRFKDRVSWDGNPERYDASILLWKLQFDDNGTYTCQVKNPPDVDGVIGEIRLSVVHTVRFSEIHFLALAIGSACALMIIIVIVVVLFQHYRKKRWAERAHKVVEIKSKEEERLNQEKKVSVYLEDTD

SEQ ID NO: 829916 - protein, 215 aa, Homo sapiens; identical to SEQ ID NO: 829914

SEQ ID NO: 829917 - protein, 195 aa, Homo sapiens
MYGKSSTRAVLLLLGIQLTALWPIAAVEIYTSRVLEAVNGTDARLKCTFSSFAPVGDALTVTWNFRPLDGGPEQFVFYYHIDPFQPMSGRFKDRVSWDGNPERYDASILLWKLQFDDNGTYTCQVKNPPDVDGVIGEIRLSVVHTVRFSEIHFLALAIGSACALMIIIVIVVVLFQHYRKKRWAERAHKVVEIKS

SEQ ID NO: 829918 - protein, 169 aa, Homo sapiens
MYGKSSTRAVLLLLGIQLTALWPIAAVEIYTSRVLEAVNGTDARLKCTFSSFAPVGDALTVTWNFRPLDGGPEQFVFYYHIDPFQPMSGRFKDRVSWDGNPERYDASILLWKLQFDDNGTYTCQVKNPPDVDGVIGEIRLSVVHTDDHNSNCSGPLPALPEKAMGRKSS

SEQ ID NO: 829919 - protein, 215 aa, Homo sapiens; identical to SEQ ID NO: 829914

SEQ ID NO: 829920 - protein, 122 aa, Homo sapiens
TYESRTSVPPPTSPTAQTSPTAPRQPDSSPTSPTAPRLARQLPDQPDSSPTSPTAPRLARRCVRITDTGLSYLSTMSSLRSLYLRWCCQVQDFGLKHLLALGSLRLLSLAGCPLLTTTGLSG

SEQ ID NO: 829921 - protein, 122 aa, Homo sapiens
MSSLRSLYLRWCCQVQDFGLKHLLALGSLRLLSLAGCPLLTTTGLSGLVQLQELEELELTNCPGATPELFKYFSQHLPRCLVIELREAPAPVAGTRPDLGGGAGRRRAPSSRLALGGAPAPP

SEQ ID NO: 829922 - protein, 347 aa, Homo sapiens
NGLFWYFSACEKCVLAQVCKAWRRVLYQPKFWAGLTPVLHAKELYNVLPGGEKEFVNLQGFAARGFEGFCLVGVSDLDICEFIDNYALSKKGVKAMSLKRSTITDAGLEVMLEQMQGVVRLELSGCNDFTEAGLWSSLSARITSLSVSDCINVADDAIAAISQLLPNLAELSLQAYHVTDTALAYFTARQGHSTHTLRLLSCWEITNHGVVNVVHSLPNLTALSLSGCSKVTDDGVELVAENLRKLRSLDLSWCPRITDMALEYVACDLHRLEELVLDRVCTHHGHWPQLSVHHVVPPQPLPAMVLPGARLRAEAPPGPGEFAPPVSGRLPAAHHHRAVGLVEGILK

SEQ ID NO: 829923 - protein, 457 aa, Homo sapiens
NGLFWYFSACEKCVLAQVCKAWRRVLYQPKFWAGLTPVLHAKELYNVLPGGEKEFVNLQGFAARGFEGFCLVGVSDLDICEFIDNYALSKKGVKAMSLKRSTITDAGLEVMLEQMQGVVRLELSGCNDFTEAGLWSSLSARITSLSVSDCINVADDAIAAISQLLPNLAELSLQAYHVTDTALAYFTARQGHSTHTLRLLSCWEITNHGVVNVVHSLPNLTALSLSGCSKVTDDGVELVAENLRKLRSLDLSWCPRITDMALEYVACDLHRLEELVLDRCAPPGRAGRGWAGRGCTGRGGAGLHGAGGGGFRRGWGCGAAGSSPRSLGSGNRRTAARVGWTPVLPGCVRITDTGLSYLSTMSSLRSLYLRWCCQVQDFGLKHLLALGSLRLLSLAGCPLLTTTGLSGLVQLQELEELELTNCPGATPELFKYFSQHLPRCLVIELREAPAPVAGTRP

SEQ ID NO: 829924 - protein, 134 aa, Homo sapiens
PLATDEKILNGLFWYFSACEKCVLAQVCKAWRRVLYQPKFWAGLTPVLHAKELYNVLPGGEKEFVNLQGFAARGFEGFCLVGVSDLDICEFIDNYALSKKGVKAMSLKRSTITDAGLEVCTRLGGDRAGGQGRA

SEQ ID NO: 829925 - protein, 390 aa, Homo sapiens
NGLFWYFSACEKCVLAQVCKAWRRVLYQPKFWAGLTPVLHAKELYNVLPGGEKEFVNLQGFAARGFEGFCLVGVSDLDICEFIDNYALSKKGVKAMSLKRSTITDAGLEVMLEQMQGVVRLELSGCNDFTEAGLWSSLSARITSLSVSDCINVADDAIAAISQLLPNLAELSLQAYHVTDTALAYFTARQGHSTHTLRLLSCWEITNHGVVNVVHSLPNLTALSLSGCSKVTDDGVELVAENLRKLRSLDLSWCPRITDMALEYVACDLHRLEELVLDRCVRITDTGLSYLSTMSSLRSLYLRWCCQVQDFGLKHLLALGSLRLLSLAGCPLLTTTGLSGLVQLQELEELELTNCPGATPELFKYFSQHLPRCLVIELREAPAPVAGTRP

SEQ ID NO: 829926 - protein, 76 aa, Homo sapiens
LTNLEPRYPPRLARRCVRITDTGLSYLSTMSSLRSLYLRWCCQVQDFGLKHLLALGSLRLLSLAGCPLLTTTGLSG

SEQ ID NO: 829927 - protein, 503 aa, Homo sapiens
NGLFWYFSACEKCVLAQVCKAWRRVLYQPKFWAGLTPVLHAKELYNVLPGGEKEFVNLQGFAARGFEGFCLVGVSDLDICEFIDNYALSKKGVKAMSLKRSTITDAGLEVMLEQMQGVVRLELSGCNDFTEAGLWSSLSARITSLSVSDCINVADDAIAAISQLLPNLAELSLQAYHVTDTALAYFTARQGHSTHTLRLLSCWEITNHGVVNVVHSLPNLTALSLSGCSKVTDDGVELVAENLRKLRSLDLSWCPRITDMALEYVACDLHRLEELVLDRCAPPGRAGRGWAGRGCTGRGGAGLHGAGGGGFRRGWGCGAAGRALGAWGVGTAEPQHGLAGPPSFPVGGSEEGPAAAPGGAGRDSRQGHSQEDEGWPGPGDLKVGVPSGGNHRCVRITDTGLSYLSTMSSLRSLYLRWCCQVQDFGLKHLLALGSLRLLSLAGCPLLTTTGLSGLVQLQELEELELTNCPGATPELFKYFSQHLPRCLVIELREAPAPVAGTRP

SEQ ID NO: 829928 - protein, 379 aa, Homo sapiens
NGLFWYFSACEKCVLAQVCKAWRRVLYQPKFWAGLTPVLHAKELYNVLPGGEKEFVNLQGFAARGFEGFCLVGVSDLDICEFIDNYALSKKGVKAMSLKRSTITDAGLEVMLEQMQGVVRLELSGCNDFTEAGLWSSLSARITSLSVSDCINVADDAIAAISQLLPNLAELSLQAYHVTDTALAYFTARQGHSTHTLRLLSCWEITNHGVVNVVHSLPNLTALSLSGCSKVTDDGVELVAENLRKLRSLDLSWCPRITDMALEYVACDLHRLEELVLDRCAPPGRAGRGWAGRGCTGRGGAGLHGAGGGGFRRGWGCGAAGRALGAWGVGTAEPQHGLAGPPSFPGVYASRTLASAICPPCRPSAASTCDGAARCKTSG

SEQ ID NO: 829929 - protein, 77 aa, Homo sapiens
TLEDTLLADHYWLTHYWLTHYWTLNPWYLSTDAALENLILRLQQDVLSTAAVQAALPATSCVPHAKVPRAMSTPEVP

SEQ ID NO: 829930 - protein, 91 aa, Homo sapiens
YRGGYGGGLCTGLGGGFGGGFAGGDGLLVGSEKVTMQNLNDRLASYLDKGHLSFTPRDLPGIQSDTFPTLPVKVSTEEQVTASEFIRTKKG

SEQ ID NO: 829931 - protein, 77 aa, Homo sapiens; identical to SEQ ID NO: 829929

SEQ ID NO: 829932 - protein, 146 aa, Homo sapiens
PGRGAGEERSWFAQVRRLGPHGAVARLRVRGLPGAGRGLRLPAGARAARLGAALSLELAVSGARACAPGTRLPRGPVGGSLGRAYRAASPALAPRGSGVSANGAWVSEPPRSALEVGRSRAETGLLRGPREALLSALAPWREVSDV

SEQ ID NO: 829933 - protein, 588 aa, Homo sapiens
PGRGAGEERSWFAQVRRLGPHGAVARLRVRGLPGAGRGLRLPAGARAARLGAALSLELAVSGARACAPGTRLPRGPVGGSLGRAYRAASPALAPRGSGVSANGAWVSEPPRSALEVGRSRAETGLLRGPREALLSALALGEKCRTSEWNPVRHRCSFHSAGLCAFLSSRVNACVDVVLSGVKLLQALGLSPGNGKDHSILHSRNDLEEAFIHFMGKGAAAERFFSDKETFHDIAQVASEFPGAQHYVGGNAALIGQKFAANSDLKVLLCGPVGPKLHELLDDNVFVPPESLQEVDEFHLILEYQAGEEWGQLKAPHANRFIFSHDLSNGAMNMLEVFVSSLEEFQPDLVVLSGLHMMEGQSKELQRKRLLEVVTSISDIPTGIPVHLELASMTNRELMSSIVHQQVFPAVTSLGLNEQELLFLTQSASGPHSSLSSWNGVPDVGMVSDILFWILKEHGRSKSRASDLTRIHFHTLVYHILATVDGHWANQLAAVAAGARVAGTQACATETIDTSRVSLRAPQEFMTSHSEAGSRIVLNPNKPVVEWHREGISFHFTPVLVCKDPIRTVGLGDAISAEGLFYSEVHPHY

SEQ ID NO: 829934 - protein, 375 aa, Homo sapiens
MGKGAAAERFFSDKETFHDIAQVASEFPGAQHYVGGNAALIGQKFAANSDLKVLLCGPVGPKLHELLDDNVFVPPESLQEVDEFHLILEYQAGEEWGQLKAPHANRFIFSHDLSNGAMNMLEVFVSSLEEFQPDLVVLSGLHMMEGQSKELQRKRLLEVVTSISDIPTGIPVHLELASMTNRELMSSIVHQQVFPAVTSLGLNEQELLFLTQSASGPHSSLSSWNGVPDVGMVSDILFWILKEHGRSKSRASDLTRIHFHTLVYHILATVDGHWANQLAAVAAGARVAGTQACATETIDTSRVSLRAPQEFMTSHSEAGSRIVLNPNKPVVEWHREGISFHFTPVLVCKDPIRTVGLGDAISAEGLFYSEVHPHY

SEQ ID NO: 829935 - protein, 375 aa, Homo sapiens; identical to SEQ ID NO: 829934

SEQ ID NO: 829936 - protein, 258 aa, Homo sapiens
MNMLEVFVSSLEEFQPDLVVLSGLHMMEGQSKELQRKRLLEVVTSISDIPTGIPVHLELASMTNRELMSSIVHQQVFPAVTSLGLNEQELLFLTQSASGPHSSLSSWNGVPDVGMVSDILFWILKEHGRSKSRASDLTRIHFHTLVYHILATVDGHWANQLAAVAAGARVAGTQACATETIDTSRVSLRAPQEFMTSHSEAGSRIVLNPNKPVVEWHREGISFHFTPVLVCKDPIRTVGLGDAISAEGLFYSEVHPHY

SEQ ID NO: 829937 - protein, 506 aa, Homo sapiens
PEEERARKGVGSRRCGAWVPMALWRGSAYAGFLALAVGCVFLLEPELPGSALRSLWSSLCLGPAPAPPGPVSPEGRLAAAWDALIVRPVRRWRRVAVGVNACVDVVLSGVKLLQALGLSPGNGKDHSILHSRNDLEEAFIHFMGKGAAAERFFSDKETFHDIAQVASEFPGAQHYVGGNAALIGQKFAANSDLKVLLCGPVGPKLHELLDDNVFVPPESLQEVDEFHLILEYQAGEEWGQLKAPHANRFIFSHDLSNGAMNMLEVFVSSLEEFQPDLVVLSGLHMMEGQSKELQRKRLLEVVTSISDIPTGIPVHLELASMTNRELMSSIVHQQVFPAVTSLGLNEQELLFLTQSASGPHSSLSSWNGVPDVGMVSDILFWILKEHGRSKSRASDLTRIHFHTLVYHILATVDGHWANQLAAVAAGARVAGTQACATETIDTSRVSLRAPQEIVLNPNKPVVEWHREGISFHFTPVLVCKDPIRTVGLGDAISAEGLFYSEVHPHY

SEQ ID NO: 829938 - protein, 418 aa, Homo sapiens
PEEERARKGVGSRRCGAWVPMALWRGSAYAGFLALAVGCVFLLEPELPGSALRSLWSSLCLGPAPAPPGPVSPEGRLAAAWDALIVRPVRRWRRVAVGVNACVDVVLSGVKLLQALGLSPGNGKDHSILHSRNDLEEAFIHFMGKGAAAERFFSDKETFHDIAQVASEFPGAQHYVGGNAALIGQKFAANSDLKVLLCGPVGPKLHELLDDNVFVPPESLQEVDEFHLILEYQAEVFPAVTSLGLNEQELLFLTQSASGPHSSLSSWNGVPDVGMVSDILFWILKEHGRSKSRASDLTRIHFHTLVYHILATVDGHWANQLAAVAAGARVAGTQACATETIDTSRVSLRAPQEFMTSHSEAGSRIVLNPNKPVVEWHREGISFHFTPVLVCKDPIRTVGLGDAISAEGLFYSEVHPHY

SEQ ID NO: 829939 - protein, 378 aa, Homo sapiens
PEEERARKGVGSRRCGAWVPMALWRGSAYAGFLALAVGCVFLLEPELPGSALRSLWSSLCLGPAPAPPGPVSPEGRLAAAWDALIVRPVRRWRRVAVGVNACVDVVLSGVKLLQALGLSPGNGKDHSILHSRNDLEEAFIHFMGKGAAAERFFSDKETFHDIAQVASEFPGAQHYVGGNAALIGQKFAANSDLKQVFPAVTSLGLNEQELLFLTQSASGPHSSLSSWNGVPDVGMVSDILFWILKEHGRSKSRASDLTRIHFHTLVYHILATVDGHWANQLAAVAAGARVAGTQACATETIDTSRVSLRAPQEFMTSHSEAGSRIVLNPNKPVVEWHREGISFHFTPVLVCKDPIRTVGLGDAISAEGLFYSEVHPHY

SEQ ID NO: 829940 - protein, 322 aa, Homo sapiens
PGRGAGEERSWFAQVRRLGPHGAVARLRVRGLPGAGRGLRLPAGARAARLGAALSLELAVSGARACAPGTRLPRGPVGGSLGRAYRAASPALAPRGSGVLLCGPVGPKLHELLDDNVFVPPESLQEVDEFHLILEYQAEVFPAVTSLGLNEQELLFLTQSASGPHSSLSSWNGVPDVGMVSDILFWILKEHGRSKSRASDLTRIHFHTLVYHILATVDGHWANQLAAVAAGARVAGTQACATETIDTSRVSLRAPQEFMTSHSEAGSRIVLNPNKPVVEWHREGISFHFTPVLVCKDPIRTVGLGDAISAEGLFYSEVHPHY

SEQ ID NO: 829941 - protein, 517 aa, Homo sapiens
PEEERARKGVGSRRCGAWVPMALWRGSAYAGFLALAVGCVFLLEPELPGSALRSLWSSLCLGPAPAPPGPVSPEGRLAAAWDALIVRPVRRWRRVAVGVNACVDVVLSGVKLLQALGLSPGNGKDHSILHSRNDLEEAFIHFMGKGAAAERFFSDKETFHDIAQVASEFPGAQHYVGGNAALIGQKFAANSDLKVLLCGPVGPKLHELLDDNVFVPPESLQEVDEFHLILEYQAGEEWGQLKAPHANRFIFSHDLSNGAMNMLEVFVSSLEEFQPDLVVLSGLHMMEGQSKELQRKRLLEVVTSISDIPTGIPVHLELASMTNRELMSSIVHQQVFPAVTSLGLNEQELLFLTQSASGPHSSLSSWNGVPDVGMVSDILFWILKEHGRSKSRASDLTRIHFHTLVYHILATVDGHWANQLAAVAAGARVAGTQACATETIDTSRVSLRAPQEFMTSHSEAGSRIVLNPNKPVVEWHREGISFHFTPVLVCKDPIRTVGLGDAISAEGLFYSEVHPHY

SEQ ID NO: 829942 - protein, 223 aa, Homo sapiens
MAASCRVVTSISDIPTGIPVHLELASMTNRELMSSIVHQQVFPAVTSLGLNEQELLFLTQSASGPHSSLSSWNGVPDVGMVSDILFWILKEHGRSKSRASDLTRIHFHTLVYHILATVDGHWANQLAAVAAGARVAGTQACATETIDTSRVSLRAPQEFMTSHSEAGSRIVLNPNKPVVEWHREGISFHFTPVLVCKDPIRTVGLGDAISAEGLFYSEVHPHY

SEQ ID NO: 829943 - protein, 517 aa, Homo sapiens; identical to SEQ ID NO: 829941

SEQ ID NO: 829944 - protein, 375 aa, Homo sapiens; identical to SEQ ID NO: 829934

SEQ ID NO: 829945 - protein, 375 aa, Homo sapiens; identical to SEQ ID NO: 829934

SEQ ID NO: 829946 - protein, 513 aa, Homo sapiens
PGRGAGEERSWFAQVRRLGPHGAVARLRVRGLPGAGRGLRLPAGARAARLGAALSLELAVSGARACAPGTRLPRGPVGGSLGRAYRAASPALAPRGSGVSANGAWVSEPPRSALEVGRSRAETGLLRGPREALLSALAPWREVSDVCVEPGSSPLLFPLGWPLRLSLIPHYVGGNAALIGQKFAANSDLKVLLCGPVGPKLHELLDDNVFVPPESLQEVDEFHLILEYQAGEEWGQLKAPHANRFIFSHDLSNGAMNMLEVFVSSLEEFQPDLVVLSGLHMMEGQSKELQRKRLLEVVTSISDIPTGIPVHLELASMTNRELMSSIVHQQVFPAVTSLGLNEQELLFLTQSASGPHSSLSSWNGVPDVGMVSDILFWILKEHGRSKSRASDLTRIHFHTLVYHILATVDGHWANQLAAVAAGARVAGTQACATETIDTSRVSLRAPQEFMTSHSEAGSRIVLNPNKPVVEWHREGISFHFTPVLVCKDPIRTVGLGDAISAEGLFYSEVHPHY

SEQ ID NO: 829947 - protein, 517 aa, Homo sapiens; identical to SEQ ID NO: 829941

SEQ ID NO: 829948 - protein, 324 aa, Homo sapiens
EGAQSRVRPAEPRAPRPAPAPPPGRPRGGGMSRRPPAPELRAGLEPRAAPRGAKPSPPPPPNRGRTSGRRMQRPGEPAAARFGPPEGCADHRPHRYRSFMIEEILTEPPGPKGAAPAAAAAAAGELLKFGVQALLAARPFHSHLAVLKAEQAAVFKFPLAPLGCSGLSSALLAAGPGLPGAAGAPHLPLELQLRGKLEAAGPGEPGTKAKKGRRSRTVFTELQLMGLEKRFEKQKYLSTPDRIDLAESLGLSQLQVKTWYQNRRMKWKKIVLQGGGLESPTKPKGRPKKNSIPTSEQLTEQERAKDAEKPAEVPGEPSDRSRED

SEQ ID NO: 829949 - protein, 263 aa, Homo sapiens
LRPGELQDRTRTGSRRYSLPNLGNGNVEEGLHLRHRRRPAGRGGFALGGTGQARAPPRHVVRQSLEAEERGRSSPGSSFSFFAAVLKAEQAAVFKFPLAPLGCSGLSSALLAAGPGLPGAAGAPHLPLELQLRGKLEAAGPGEPGTKAKKGRRSRTVFTELQLMGLEKRFEKQKYLSTPDRIDLAESLGLSQLQVKTWYQNRRMKWKKIVLQGGGLESPTKPKGRPKKNSIPTSEQLTEQERAKDAEKPAEVPGEPSDRSRED

SEQ ID NO: 829950 - protein, 598 aa, Homo sapiens [sequence omitted]

SEQ ID NO: 829951 - protein, 309 aa, Homo sapiens
MDALTANGTTNIQTSVTGVTASKRKFIDDRRDQPFDKRLRFSVRQTESAYRYRDIVVRKQDGFTHILLSTKSSENNSLNPEVMREVQSALSTAAADDSKLVLLSAVGSVFCCGLDFIYFIRRLTDDRKRESTKMAEAIRNFVNTFIQFKKPIIVAVNGPAIGLGASILPLCDVVWANEKAWFQTPYTTFGQSPDGCSTVMFPKIMGGASANEMLLSGRKLTAQEACGKGLVSQVFWPGTFTQEVMVRIKELASCNPVVLEESKALVRCNMKMELEQANERECEVLKKIWGSAQGMDSMLKYLQRKIDEF

SEQ ID NO: 829952 - protein, 348 aa, Homo sapiens
MGQDGEQARIHPLVPQVPGPVTAAMATGLAVNGKVERIVDKRKNKKGKTEYLVRWKGYDSEDDTWEPEQHLVNCEEYIHDFNRRHTEKQKESTLTRTNRTSPNNARKQISRSTNSNFSKTSPKALVIGKDHESKNSQLFAASQKFRKNTAPSLSSRKNMDLAKSGIKILVPKSPVKSRTAVDGFQSESPEKLDPVEQGQEDTVAPEVAAEKPVGALLGPGAERARMGSRPRIHPLVPQVPGPVTAAMATGLAVNGKGTSPFMDALTANGTTNIQTSVTGVTASKRKFIDDRRDQPFDKRLRFSVRQTESAYRYRDIVVRKQDGFTHILLSTKSSENNSLNPEVRGALG

SEQ ID NO: 829953 - protein, 570 aa, Homo sapiens
MGQDGEQARIHPLVPQVPGPVTAAMATGLAVNGKVERIVDKRKNKKGKTEYLVRWKGYDSEDDTWEPEQHLVNCEEYIHDFNRRHTEKQKESTLTRTNRTSPNNARKQISRSTNSNFSKTSPKALVIGKDHESKNSQLFAASQKFRKNTAPSLSSRKNMDLAKSGIKILVPKSPVKSRTAVDGFQSESPEKLDPVEQGQEDTVAPEVAAEKPVGALLGPGAERARMGSRPRIHPLVPQVPGPVTAAMATGLAVNGKGTSPFMDALTANGTTNIQTSVTGVTASKRKFIDDRRDQPFDKRLRFSVRQTESAYRYRDIVVRKQDGFTHILLSTKSSENNSLNPEVMREVQSALSTAAADDSKLVLLSAVGSVFCCGLDFIYFIRRLTDDRKRESTKMAEAIRNFVNTFIQFKKPIIVAVNGPAIGLGASILPLCDVVWANEKAWFQTPYTTFGQSPDGCSTVMFPKIMGGASANEMLLSGRKLTAQEACGKGLVSQVFWPGTFTQEVMVRIKELASCNPVVLEESKALVRCNMKMELEQANERECEVLKKIWGSAQGMDSMLKYLQRKIDEF

SEQ ID NO: 829954 - protein, 544 aa, Homo sapiens
MASEELYEVERIVDKRKNKKGKTEYLVRWKGYDSEDDTWEPEQHLVNCEEYIHDFNRRHTEKQKESTLTRTNRTSPNNARKQISRSTNSNFSKTSPKALVIGKDHESKNSQLFAASQKFRKNTAPSLSSRKNMDLAKSGIKILVPKSPVKSRTAVDGFQSESPEKLDPVEQGQEDTVAPEVAAEKPVGALLGPGAERARMGSRPRIHPLVPQVPGPVTAAMATGLAVNGKGTSPFMDALTANGTTNIQTSVTGVTASKRKFIDDRRDQPFDKRLRFSVRQTESAYRYRDIVVRKQDGFTHILLSTKSSENNSLNPEVMREVQSALSTAAADDSKLVLLSAVGSVFCCGLDFIYFIRRLTDDRKRESTKMAEAIRNFVNTFIQFKKPIIVAVNGPAIGLGASILPLCDVVWANEKAWFQTPYTTFGQSPDGCSTVMFPKIMGGASANEMLLSGRKLTAQEACGKGLVSQVFWPGTFTQEVMVRIKELASCNPVVLEESKALVRCNMKMELEQANERECEVLKKIWGSAQGMDSMLKYLQRKIDEF

SEQ ID NO: 829955 - protein, 309 aa, Homo sapiens; identical to SEQ ID NO: 829951

SEQ ID NO: 829956 - protein, 110 aa, Homo sapiens
MFPKIMGGASANEMLLSGRKLTAQEACGKGLVSQVFWPGTFTQEVMVRIKELASCNPVVLEESKALVRCNMKMELEQANERECEVLKKIWGSAQGMDSMLKYLQRKIDEF

SEQ ID NO: 829957 - protein, 292 aa, Homo sapiens
MVREGQDGEQARIHPLVPQVPGPVTAAMATGLAVNGKVERIVDKRKNKKGKTEYLVRWKGYDSEDDTWEPEQHLVNCEEYIHDFNRRHTEKQKESTLTRTNRTSPNNARKQISRSTNSNFSKTSPKALVIGKDHESKNSQLFAASQKFRKNTAPSLSSRKNMDLAKSGIKILVPKSPVKSRTAVDGFQSESPEKLDPVEQGQEDTVAPEVAAEKPVGALLGPGAERARMGSRPRIHPLVPQVPGPVTAAMATGLAVNGKVKGLLTKGKIKKGRQSIWFGGKAMTARTTLGAL

SEQ ID NO: 829958 - protein, 333 aa, Homo sapiens
CACALPSHAANMAPVEHVVADAGAFLRHAALQDIGKNIYTIREVVTEIRDKATRRRLAVLPYELRFKEPLPEYVRLVTEFSKKTGDYPSLSATDIQVLALTYQLEAEFVGVSHLKQEPQKVKVSSSIQHPETPLHISGFHLPYKPKPPQETEKGHSACEPENLEFSSFMFWRNPLPNIDHELQELLIDRGEDVPSEEEEEEENGFEDRKDDSDDDGGGWITPSNIKQIQQELEQCDVPEDVRVGCLTTDFAMQNVLLQMGWRAAGTVRFGGPVLWVLVFRTRDEPVGPWADRSLRGGPFVSGRGPARVSGGPQELVGELRCHPPLRTCAAFAS

SEQ ID NO: 829959 - protein, 145 aa, Homo sapiens
MALCDCGSPSSNGPSLSYFQYSLPTPKGGKYAINPHLTEDQRFPQLRLSQKARQKTNVFAPDYIAGVSPFVENDISSRSATLQVRDSTLGAGRRRLNPNASRKKFVKCNCIKTERTTPWSQSSRKEFPKDNIFLINAAATSCAFN

SEQ ID NO: 829960 - protein, 423 aa, Homo sapiens
CACALPSHAANMAPVEHVVADAGAFLRHAALQDIGKNIYTIREVVTEIRDKATRRRLAVLPYELRFKEPLPEYVRLVTEFSKKTGDYPSLSATDIQVLALTYQLEAEFVGVSHLKQEPQKVKVSSSIQHPETPLHISGFHLPYKPKPPQETEKGHSACEPENLEFSSFMFWRNPLPNIDHELQELLIDRGEDVPSEEEEEEENGFEDRKDDSDDDGGGWITPSNIKQIQQELEQCDVPEDVRVGCLTTDFAMQNVLLQMGLHVLAVNGMLIREARSYILRCHGCFKTTSDMSRVFCSHCGNKTLKKVSVTVSDDGTLHMHFSRNPKVLNPRGLRYSLPTPKGGKYAINPHLTEDQRFPQLRLSQKARQKTNVFAPDYIAGVSPFVENDISSRSATLQVRDSTLGAGRRRLNPNASRKKFVKKR

SEQ ID NO: 829961 - protein, 459 aa, Homo sapiens
CACALPSHAANMAPVEHVVADAGAFLRHAALQDIGKNIYTIREVVTEIRDKATRRRLAVLPYELRFKEPLPEYVRLVTEFSKKTGDYPSLSATDIQVLALTYQLEAEFVGVSHLKQEPQKVKVSSSIQHPETPLHISGFHLPYKPKPPQETEKGHSACEPENLEFSSFMFWRNPLPNIDHELQELLIDRGEDVPSEEEEEEENGFEDRKDDSDDDGGGWITPSNIKQIQQELEQCDVPEDVRVGCLTTDFAMQNVLLQMGLHVLAVNGMLIREARSYILRCHGCFKTTSDMSRVFCSHCGNKTLKKVSVTVSDDGTLHMHFSRNPKVLNPRGLRYSLPTPKGGKYAINPHLTEDQRFPQLRLSQKARQKTNVFAPDYIAGVSPFVENDISSRSATLQVRDSTLGAGRRRLNPNASRKKFVKCNCIKTERTTPWSQSSRKEFPKDNIFLINAAATSCAFN

SEQ ID NO: 829962 - protein, 320 aa, Homo sapiens
REREMRERERERERERERERERERQHPETPLHISGFHLPYKPKPPQETEKGHSACEPENLEFSSFMFWRNPLPNIDHELQELLIDRGEDVPSEEEEEEENGFEDRKDDSDDDGGGWITPSNIKQIQQELEQCDVPEDVRVGCLTTDFAMQNVLLQMGLHVLAVNGMLIREARSYILRCHGCFKTTSDMSRVFCSHCGNKTLKKVSVTVSDDGTLHMHFSRNPKVLNPRGLRYSLPTPKGGKYAINPHLTEDQRFPQLRLSQKARQKTNVFAPDYIAGVSPFVENDISSRSATLQVRDSTLGAGRRRLNPNASRKKFVKKR

SEQ ID NO: 829963 - protein, 458 aa, Homo sapiens
  misc_feature (187)..(187): Xaa can be any naturally occurring amino acid
  misc_feature (189)..(190): Xaa can be any naturally occurring amino acid
  misc_feature (203)..(203): Xaa can be any naturally occurring amino acid
CACALPSHAANMAPVEHVVADAGAFLRHAALQDIGKNIYTIREVVTEIRDKATRRRLAVLPYELRFKEPLPEYVRLVTEFSKKTGDYPSLSATDIQVLALTYQLEAEFVGVSHLKQEPQKVKVSSSIQHPETPLHISGFHLPYKPKPPQETEKGHSACEPENLEFSSFMFWRNPLPNIDHELQELLXLXXKRGKGLEGKRGSXVREKGGKKGWKGGGNRGGGKQREKKKKKRGFGQKGEKPQEKDDSDDDGGGWITPSNIKQIQQELEQCDVPEDVRVGCLTTDFAMQNVLLQMGLHVLAVNGMLIREARSYILRCHGCFKTTSDMSRVFCSHCGNKTLKKVSVTVSDDGTLHMHFSRNPKVLNPRGLRYSLPTPKGGKYAINPHLTEDQRFPQLRLSQKARQKTNVFAPDYIAGVSPFVENDISSRSATLQVRDSTLGAGRRRLNPNASRKKFVKKR

SEQ ID NO: 829964 - protein, 109 aa, Homo sapiens [sequence omitted]

SEQ ID NO: 829965 - protein, 423 aa, Homo sapiens; identical to SEQ ID NO: 829960

SEQ ID NO: 829966 - protein, 466 aa, Homo sapiens
CACALPSHAANMAPVEHVVADAGAFLRHAALQDIGKNIYTIREVVTEIRDKATRRRLAVLPYELRFKEPLPEYVRLVTEFSKKTGDYPSLSATDIQVLALTYQLEAEFVGVSHLKQEPQKVKVSSSIQHPETPLHISGFHLPYKPKPPQETEKGHSACEPENLEFSSFMFWRNPLPNIDHELQELLIDRGEDVPSEEEEEEENGFEDRKDDSDDDGGGWITPSNIKQIQQELEQCDVPEDVRVGCLTTDFAMQNVLLQMGLHVLAVNGMLIREARSYILRCHGCFKTTSDMSRVFCSHCGNKTLKKVSVTVSDDGTLHMHFSRNPKVLNPRGLRYSLPTPKGGKYAINPHLTEDQRFPQLRLSQKARQKTNVFAPDYIAGVSPFVENDISSRSATLQVRDSTLGAGRRRLNPNASRKKFVKGERVRSNGGVARSPGPSRGVRPGKKGRGAHPVKGRDTCGGKNRQR

SEQ ID NO: 829967 - protein, 464 aa, Homo sapiens
RAHARSPLTQPTWLQWSTLWRMLGLSCGMRLCRYGELPPGRERSGLAAPPGVRGVARSVAWCGWVCAGAFCPQDIGKNIYTIREVVTEIRDKATRRRLAVLPYELRFKEPLPEYVRLVTEFSKKTGDYPSLSATDIQVLALTYQLEAEFVGVSHLKQEPQKVKVSSSIQHPETPLHISGFHLPYKPKPPQETEKGHSACEPENLEFSSFMFWRNPLPNIDHELQELLIDRGEDVPSEEEEEEENGFEDRKDDSDDDGGGWITPSNIKQIQQELEQCDVPEDVRVGCLTTDFAMQNVLLQMGLHVLAVNGMLIREARSYILRCHGCFKTTSDMSRVFCSHCGNKTLKKVSVTVSDDGTLHMHFSRNPKVLNPRGLRYSLPTPKGGKYAINPHLTEDQRFPQLRLSQKARQKTNVFAPDYIAGVSPFVENDISSRSATLQVRDSTLGAGRRRLNPNASRKKFVKKR

SEQ ID NO: 829968 - protein, 352 aa, Homo sapiens
CACALPSHAANMAPVEHVVADAGAFLRHAALQDIGKNIYTIREVVTEIRDKATRRRLAVLPYELRFKEPLPEYVRLVTEFSKKTGDYPSLSATDIQVLALTYQLEAEFVGVSHLKQEPQKVKVSSSIQHPETPLHISGFHLPYKPKPPQETEKGHSACEPENLEFSSFMFWRNPLPNIDHELQELLIDRGEDVPSEEEEEEENGFEDRKDDSDDDGGGWITPSNIKQIQQELEQCDVPEDVRVGCLTTDFAMQNVLLQMGLHVLAVNGMLIREARSYILRCHGCFKTTSDMSRVFCSHCGNKTLKKVSVTVSDDGTLHMHFSRNPKVLNPRGLRYSLPTPKGGKYAINPHGL

SEQ ID NO: 829969 - protein, 380 aa, Homo sapiens
RAHARSPLTQPTWLQWSTLWRMLGLSCGMRLCRTSGRTFTPSGRWSLRFGTRPHAGGSLSCPTSCGSRSPYRNTCGWVKVSSSIQHPETPLHISGFHLPYKPKPPQETEKGHSACEPENLEFSSFMFWRNPLPNIDHELQELLIDRGEDVPSEEEEEEENGFEDRKDDSDDDGGGWITPSNIKQIQQELEQCDVPEDVRVGCLTTDFAMQNVLLQMGLHVLAVNGMLIREARSYILRCHGCFKTTSDMSRVFCSHCGNKTLKKVSVTVSDDGTLHMHFSRNPKVLNPRGLRYSLPTPKGGKYAINPHLTEDQRFPQLRLSQKARQKTNVFAPDYIAGVSPFVENDISSRSATLQVRDSTLGAGRRRLNPNASRKKFVKKR

SEQ ID NO: 829970 - protein, 440 aa, Homo sapiens
RAHARSPLTQPTWLQWSTLWRMLGLSCGMRLCRYGELPPGRERSGLAAPPGVRGVARSVAWCGWVCAGAFCPQDIGKNIYTIREVVTEIRDKATRRRLAVLPYELRFKEPLPEYVRLVTEFSKKTGDYPSLSATDIQVLALTYQLEAEFVGVSHLKQEPQKPKPPQETEKGHSACEPENLEFSSFMFWRNPLPNIDHELQELLIDRGEDVPSEEEEEEENGFEDRKDDSDDDGGGWITPSNIKQIQQELEQCDVPEDVRVGCLTTDFAMQNVLLQMGLHVLAVNGMLIREARSYILRCHGCFKTTSDMSRVFCSHCGNKTLKKVSVTVSDDGTLHMHFSRNPKVLNPRGLRYSLPTPKGGKYAINPHLTEDQRFPQLRLSQKARQKTNVFAPDYIAGVSPFVENDISSRSATLQVRDSTLGAGRRRLNPNASRKKFVKKR

SEQ ID NO: 829971 - protein, 672 aa, Homo sapiens
MFSLSSTVQPQVTVPLSHLINAFHTPKNTSVSLSGVSVSQNQHRDVVPEHEAPSSEPSLNLRDLGLSELKIGQIDQLVENLLPGFCKGKNISSHWHTSHVSAQSFFENKYGNLDIFSTLRSSCLYRHHSRALQSICSDLQYWPVFIQSRGFKTLKSRTRRLQSTSERLAETQNIAPSFVKGFLLRDRGSDVESLDKLMKTKNIPEAHQDAFKTGFAEGFLKAQALTQKTNDSLRRTRLILFVLLLFGIYGLLKNPFLSVRFRTTTGLDSAVDPVQMKNVTFEHVKGVEEAKQELQEVVEFLKNPQKFTILGGKLPKGILLVGPPGTGKTLLARAVAGEADVPFYYASGSEFDEMFVGVGASRIRNLFREAKANAPCVIFIDELDSVGGKRIESPMHPYSRQTINQLLAEMDGFKPNEGVIIIGATNFPEALDNALIRPGRFDMQVTVPRPDVKGRTEILKWYLNKIKFDQSVDPEIIARGTVGFSGAELENLVNQAALKAAVDGKEMVTMKELEFSKDKILMGPERRSVEIDNKNKTITAYHESGHAIIAYYTKDAMPINKATIMPRGPTLGHVSLLPENDRWNETRAQLLAQMDVSMGGRVAEELIFGTDHITTGASSDFDNATKIAKRMVTKFGMSEKLGVMTYSDTGKLSPETQSAIEQEIRILLRDSI

SEQ ID NO: 829972 - protein, 729 aa, Homo sapiens
MFSLSSTVQPQVTVPLSHLINAFHTPKNTSVSLSGVSVSQNQHRDVVPEHEAPSSECMFSDFLTKLNIVSIGKGKIFEGYRSMFMEPAKRMKKSLDTTDNWHIRPEPFSLSIPPSLNLRDLGLSELKIGQIDQLVENLLPGFCKGKNISSHWHTSHVSAQSFFENKYGNLDIFSTLRSSCLYRHHSRALQSICSDLQYWPVFIQSRGFKTLKSRTRRLQSTSERLAETQNIAPSFVKGFLLRDRGSDVESLDKLMKTKNIPEAHQDAFKTGFAEGFLKAQALTQKTNDSLRRTRLILFVLLLFGIYGLLKNPFLSVRFRTTTGLDSAVDPVQMKNVTFEHVKGVEEAKQELQEVVEFLKNPQKFTILGGKLPKGILLVGPPGTGKTLLARAVAGEADVPFYYASGSEFDEMFVGVGASRIRNLFREAKANAPCVIFIDELDSVGGKRIESPMHPYSRQTINQLLAEMDGFKPNEGVIIIGATNFPEALDNALIRPGRFDMQVTVPRPDVKGRTEILKWYLNKIKFDQSVDPEIIARGTVGFSGAELENLVNQAALKAAVDGKEMVTMKELEFSKDKILMGPERRSVEIDNKNKTITAYHESGHAIIAYYTKDAMPINKATIMPRGPTLGHVSLLPENDRWNETRAQLLAQMDVSMGGRVAEELIFGTDHITTGASSDFDNATKIAKRMVTKFGMSEKLGVMTYSDTGKLSPETQSAIEQEIRILLRDSI

SEQ ID NO: 829973 - protein, 289 aa, Homo sapiens
MFSLSSTVQPQVTVPLSHLINAFHTPKNTSVSLSGVSVSQNQHRDVVPEHEAPSSEGFLLRDRGSDVESLDKLMKTKNIPEAHQDAFKTGFAEGFLKAQALTQKTNDSLRRTRLILFVLLLFGIYGLLKNPFLSVRFRTTTGLDSAVDPVQMKNVTFEHVKGVEEAKQELQEVVEFLKNPQKFTILGGKLPKDSLVGPQAGKNLLAELGGRTDVLYMRRKRSGDRLGGWEQPDQKTLSSQGDAHGVNNGDTQTGGEQKRPTGSLNGQRNTVRTHEVTQQSTQRPNRGKA

SEQ ID NO: 829974 - protein, 672 aa, Homo sapiens; identical to SEQ ID NO: 829971

SEQ ID NO: 829975 - protein, 672 aa, Homo sapiens; identical to SEQ ID NO: 829971

SEQ ID NO: 829976 - protein, 672 aa, Homo sapiens; identical to SEQ ID NO: 829971

SEQ ID NO: 829977 - protein, 672 aa, Homo sapiens; identical to SEQ ID NO: 829971

SEQ ID NO: 829978 - protein, 258 aa, Homo sapiens
MNIDDLSINSPSALQILPGSPYGRLDSATLTSAQGRQLKGLESEKTLALNKIKFDQSVDPEIIARGTVGFSGAELENLVNQAALKAAVDGKEMVTMKELEFSKDKILMGPERRSVEIDNKNKTITAYHESGHAIIAYYTKDAMPINKATIMPRGPTLGHVSLLPENDRWNETRAQLLAQMDVSMGGRVAEELIFGTDHITTGASSDFDNATKIAKRMVTKFGMSEKLGVMTYSDTGKLSPETQSAIEQEIRILLRDSI

SEQ ID NO: 829979 - protein, 729 aa, Homo sapiens; identical to SEQ ID NO: 829972

SEQ ID NO: 829980 - protein, 136 aa, Homo sapiens
MFSLSSTVQPQVTVPLSHLINAFHTPKNTSVSLSGVSVSQNQHRDVVPEHEAPSSECMFSDFLTKLNIVSIGKGKIFEGYRSMFMEPAKRMKKSLDTTDNWHIRPEPFSLSIPVHCGFLQMPIVYDLFCPSFLVTA

SEQ ID NO: 829981 - protein, 672 aa, Homo sapiens; identical to SEQ ID NO: 829971

SEQ ID NO: 829982 - protein, 672 aa, Homo sapiens; identical to SEQ ID NO: 829971

SEQ ID NO: 829983 - protein, 605 aa, Homo sapiens
MFSLSSTVQPQVTVPLSHLINAFHTPKNTSVSLSGVSVSQNQHRDVVPEHEAPSSEPSLNLRDLGLSELKIGQIDQLVENLLPGFCKGKNISSHWHTSHVSAQSFFENKYGNLDIFSTLRSSCLYRHHSRALQSICSDLQYWPVFIQSRGFKTLKSRTRRLQSTSERLAETQNIAPSFVKGFLLRDRGSDVESLDKLMKTKNIPEAHQDAFKTGFAEGFLKAQALTQKTNDSLRRTRLILFVLLLFGIYGLLKNPFLSVRFRTTTGLDSAVDPVQMKNVTFEHVKGVEEAKQELQEVVEFLKNPQKFTILGGKLPKGILLVGPPGTGKTLLARAVAGEADVPFYYASGSEFDEMFVGVGASRIRNLFREAKANAPCVIFIDELDSVGGKRIESPMHPYSRQTINQLLAEMDGFKPNEGVIIIGATNFPEALDNALIRPGRFDMQVTVPRPDVKGRTEILKWYLNKIKFDQSVDPEIIARGTVGFSGAELENLVNQAALKAAVDGKEMVTMKELEFSKDKILMGPERRSVEIDNKNKTITAYHESGHAIIAYYTKDAMPINKATIMPRGPTLGHLGVMTYSDTGKLSPETQSAIEQEIRILLRDSI

SEQ ID NO: 829984 - protein, 665 aa, Homo sapiens
MFSLSSTVQPQVTVPLSHLINAFHTPKNTSVSLSGVSVSQNQHRDVVPEHEAPSSEPSLNLRDLGLSELKIGQIDQLVENLLPGFCKGKNISSHWHTSHVSAQSFFENKYGNLDIFSTLRSSCLYRHHSRALQSICSDLQYWPVFIQSRGFKTLKSRTRRLQSTSERLAETQNIAPSFVKGFLLRDRGSDVESLDKLMKTKNIPEAHQDAFKTGFAEGFLKAQALTQKTNDSLRRTRLILFVLLLFGIYGLLKNPFLSVRFRTTTGLDSAVDPVQMKNVTFEHVKGVEEAKQELQEVVEFLKNPQKFTILGGKLPKGILLVGPPGTGKTLLARAVAGEADVPFYYASGSEFDEMFVGVGASRIRNLFREAKANAPCVIFIDELDSVGGKRIESPMHPYSRQTINQLLAEMDGFKPNEGVIIIGATNFPEALDNALIRPGRFDMQVTVPRPDVKGRTEILKWYLNKIKFDQSVDPEIIARGTVGFSGAELENLVNQAALKAAVDGKEMVTMKELEFSKDKILMGPERRSVEIDNKNKTITAYHESGHAIIAYYTKDAMPINKATIMPRGPTLGHVSLLPENDRWNETRAQLLAQMDVSMGGRVAEELIFGTDHITTGASSDFDNATKIAKRMVTKFGMSEKLGVMTYSDTGKLSPETQSAIEQEYK

SEQ ID NO: 829985 - protein, 508 aa, Homo sapiens
MFSLSSTVQPQVTVPLSHLINAFHTPKNTSVSLSGVSVSQNQHRDVVPEHEAPSSEPSLNLRDLGLSELKIGQIDQLVENLLPGFCKGKNISSHWHTSHVSAQSFFENKYGNLDIFSTLRSSCLYRHHSRALQSICSDLQYWPVFIQSRGFKTLKSRTRRLQSTSERLAETQNIAPSFVKGFLLRDRGSDVESLDKLMKTKNIPEAHQDAFKTGFAEGFLKAQALTQKTNDSLRRTRLILFVLLLFGIYGLLKNPFLSVRFRTTTGLDSAVDPVQMKNVTFEHVKGVEEAKQELQEVVEFLKNPQKFTILGGKLPKGILLVGPPGTGKTLLARAVAGEADVPFYYASGSEFDEMFVGVGASRIRNLFREAKANAPCVIFIDELDSVGGKRIESPMHPYSRQTINQLLAEMDGFKPNEGVIIIGATNFPEALDNALIRPGRFDMQVTVPRPDVKGRTEILKWTPYERAKHILKTHAKEHKNLAEALLTYETLDAKEIQIVLEGKKLEVR

SEQ ID NO: 829986 - protein, 418 aa, Homo sapiens
MQYHKLTEHFDEKPFSCEECGAKFAANSTLKNHLRLHTGDRPFMCKHCLMTFTQASALAYHTKKKHSEGKMYACQYCDAVFAQSIELSRHVRTHTGDKPYVCRDCGKGFRQANGLSIHLHTFHNIEDPYDCKKCRMSFPTLQDHRKHIHEVHSKEYHPCPTCGKIFSAPSMLERHMVTHVGGKPFSCGICNKAYQQLSGLWYHNRTHHPDVFAAQNHRSSKFSSLQCSSCDKTFPNTIEHKKHIKAEHADMKFHECDQCKELFPTPALLQVHVKCQHSGSQPFRCLYCAATFRFPGALQHHVTTEHFKQSETTFPCELCGELFTSQAQLDSHLESEHPKVMSTETQAAASQMAQVIQTPEPVAPTEQVITLEETQLAGSQVFVTLPDSQASQASSELVAVTVEDLLDGTVTLICGEAK

SEQ ID NO: 829987 - protein, 502 aa, Homo sapiens
CKACDKSFHFYCRLKVHMKRCRVAKSKQVQCKECSETKDSKKELDKHQLEAHGAGGEPDAPKKKKKRLPVTCDLCGREFAHASGMQYHKLTEHFDEKPFSCEECGAKFAANSTLKNHLRLHTGDRPFMCKHCLMTFTQASALAYHTKKKHSEGKMYACQYCDAVFAQSIELSRHVRTHTGDKPYVCRDCGKGFRQANGLSIHLHTFHNIEDPYDCKKCRMSFPTLQDHRKHIHEVHSKEYHPCPTCGKIFSAPSMLERHMVTHVGGKPFSCGICNKAYQQLSGLWYHNRTHHPDVFAAQNHRSSKFSSLQCSSCDKTFPNTIEHKKHIKAEHADMKFHECDQCKELFPTPALLQVHVKCQHSGSQPFRCLYCAATFRFPGALQHHVTTEHFKQSETTFPCELCGELFTSQAQLDSHLESEHPKVMSTETQAAASQMAQVIQTPEPVAPTEQVITLEETQLAGSQVFVTLPDSQASQASSELVAVTVEDLLDGTVTLICGEAK

SEQ ID NO: 829988 - protein, 463 aa, Homo sapiens
CKACDKSFHFYCRLKVHMKRCRVAKSKQVQCKECSETKDSKKELDKHQLEAHGAGGEPDAPKKKKKRLPVTCDLCGREFAHASGMQYHKLTEHFDEKPFSCEECGAKFAANSTLKNHLRLHTGDRPFMCKHCLMTFTQASALAYHTKKKHSEGKMYACQYCDAVFAQSIELSRHVRTHTGDKPYVCRDCGKGFRQANGLSIHLHTFHNIEDPYDCKKCRMSFPTLQDHRKHIHEVHSKEYHPCPTCGKIFSAPSMLERHMVTHVGGKPFSCGICNKAYQQLSGLWYHNRTHHPDVFAAQNHRSSKFSSLQCSSCDKTFPNTIEHKKHIKAEHADMKFHECDQCKELFPTPALLQVHVKCQHSGSQPFRCLYCAATFRFPGALQHHVTTEHFKQSETTFPCELCGELFTSQAQLDSHLESEHPKVMSTETQAAASQMAQFGGDPACRVAGVCDVARFSGISGQL

SEQ ID NO: 829989 - protein, 149 aa, Homo sapiens
MGPTSAPDTAALVAHPPSLLMPGWFFPSLLMPLDSGEAQGRGDRHWPLSPEFLGGTQPHSSASICLTRGPLCAHSTGQCGGSLEATALFQSPCQSRGTRCLGAGRAGTDVFWGHQKALVSPQIVTVRTQCCYGQDSFPYAASASDLGGP

SEQ ID NO: 829990 - protein, 439 aa, Homo sapiens [sequence omitted]

SEQ ID NO: 829991 - protein, 439 aa, Homo sapiens [sequence omitted]

SEQ ID NO: 829992 - protein, 185 aa, Homo sapiens [sequence omitted]

SEQ ID NO: 829993 - protein, 460 aa, Homo sapiens
MTVEQKFGLFSAEIKEADPLAASEASQPKPCPPEVTPHYIWIDFLVQRFEIAKYCSSDQVEIFSSLLQRSMSLNIGRAKGSMNRHVAAIGPRFKLLTLGLSLLHADVVPNATIRNVLREKIYSTAFDYFSCPPKFPTQGEKRLREDISIMIKFWTAMFSDKKYLTASQLVPPADIGDLLEQLVEENTGSLSGPAKDFYQREFDFFNKITNVSAIIKPYPKGDERKKACLSALSEVTVQPGCSLPSNPEAIVLDVDYKSGTPMQSAAKAPYLAKFKVKRCGVSELEKEGLRCRSDSEDECSTQEADGQKISWQAAIFKLGDDCRQDMLALQIIDLFKNIFQLVGLDLFVFPYRVVATAPGCGVIECIPDCTSRDQLGRQTDFGMYDYFTRQYGDESTLAFQQARYNFIRSMAAYSLLLFLLQIKDRHNGNIMLDKKGHIIHIGQPATAPPSSPFTPAPRGG

SEQ ID NO: 829994 - protein, 529 aa, Homo sapiens
MTVEQKFGLFSAEIKEADPLAASEASQPKPCPPEVTPHYIWIDFLVQRFEIAKYCSSDQVEIFSSLLQRSMSLNIGRAKGSMNRHVAAIGPRFKLLTLGLSLLHADVVPNATIRNVLREKIYSTAFDYFSCPPKFPTQGEKRLREDISIMIKFWTAMFSDKKYLTASQLVPPADIGDLLEQLVEENTGSLSGPAKDFYQREFDFFNKITNVSAIIKPYPKGDERKKACLSALSEVTVQPGCSLPSNPEAIVLDVDYKSGTPMQSAAKAPYLAKFKVKRCGVSELEKEGLRCRSDSEDECSTQEADGQKISWQAAIFKLGDDCRQDMLALQIIDLFKNIFQLVGLDLFVFPYRVVATAPGCGVIECIPDCTSRDQLGRQTDFGMYDYFTRQYGDESTLAFQQDFGFMFESSPGGNLGWEPDIKLTDEMVMIMGGKMEATPFKWFMEMCVRGYLAVRPYMDVVVSLVTIMLDTGLPCFRGQTIKFLKHRFSPNMTEREAANFIMKVIQSCFLSNRSRTYNMIQYYQNDIPY

SEQ ID NO: 829995 - protein, 439 aa, Homo sapiens [sequence omitted]

SEQ ID NO: 829996 - protein, 148 aa, Homo sapiens
RAGKRVHKVNLAPGQAPALTGSGLPHRLLTLGLSLLHADVVPNATIRNVLREKIYSTAFDYFRYSPKMCCAASRDGPAPPSAPSPQTPRKSLTGIHSCPVVLTNLLLQYPWPCGFKYLSALCMCPVYLELASQRDVGKFSLSSTDLGD

SEQ ID NO: 829997 - protein, 43 aa, Homo sapiens
  misc_feature (42)..(42): Xaa can be any naturally occurring amino acid
MTEREAANFIMKVIQSCFLSNRSRTVLIAQAGVQWRDLGSPXT

SEQ ID NO: 829998 - protein, 439 aa, Homo sapiens [sequence omitted]

SEQ ID NO: 829999 - protein, 290 aa, Homo sapiens
MIKFWTAMFSDKKYLTASQLVPPADIGDLLEQLVEENTGSLSGPAKDFYQREFDFFNKITNVSAIIKPYPKGDERKKACLSALSEVTVQPGCSLPSNPEAIVLDVDYKSGTPMQSAAKAPYLAKFKVKRCGVSELEKEGLRCRSDSEDECSTQEADGQKISWQAAIFKLGDDCRQDMLALQIIDLFKNIFQLVGLDLFVFPYRVVATAPGCGVIECIPDCTSRDQLGRQTDFGMYDYFTRQYGDESTLAFQQVARVATGRGKSCVLHPTPATHTQPLPTPCSPQSSFVKG

SEQ ID NO: 830000 - protein, 569 aa, Homo sapiens
MTVEQKFGLFSAEIKEADPLAASEASQPKPCPPEVTPHYIWIDFLVQRFEIAKYCSSDQVEIFSSLLQRSMSLNIGRAKGSMNRHVAAIGPRFKLLTLGLSLLHADVVPNATIRNVLREKIYSTAFDYFSCPPKFPTQGEKRLREDISIMIKFWTAMFSDKKYLTASQLVPPADIGDLLEQLVEENTGSLSGPAKDFYQREFDFFNKITNVSAIIKPYPKGDERKKACLSALSEVTVQPGCSLPSNPEAIVLDVDYKSGTPMQSAAKAPYLAKFKVKRCGVSELEKEGLRCRSDSEDECSTQEADGQKISWQAAIFKLGDDCRQDMLALQIIDLFKNIFQLVGLDLFVFPYRVVATAPGCGVIECIPDCTSRDQLGRQTDFGMYDYFTRQYGDESTLAFQQARYNFIRSMAAYSLLLFLLQIKDRHNGNIMLDKKGHIIHIDFGFMFESSPGGNLGWEPDIKLTDEMVMIMGGKMEATPFKWFMEMCVRGYLAVRPYMDVVVSLVTIMLDTGLPCFRGQTIKFLKHRFSPNMTEREAANFIMKVIQSCFLSNRSRTYNMIQYYQNDIPY

SEQ ID NO: 830001 - protein, 439 aa, Homo sapiens [sequence omitted]

SEQ ID NO: 830002 - protein, 371 aa, Homo sapiens
MTVEQKFGLFSAEIKEADPLAASEASQPKPCPPEVTPHYIWIDFLVQRFEIAKYCSSDQVEIFSSLLQRSMSLNIGRAKGSMNRHVAAIGPRFKLLTLGLSLLHADVVPNATIRNVLREKIYSTAFDYFSCPPKFPTQGEKRLREDISIMIKFWTAMFSDKKYLTASQLVPPADIGDLLEQLVEENTGSLSGPAKDFYQREFDFFNKITNVSAIIKPYPKGDERKKACLSALSEVTVQPGCSLPSNPEAIVLDVDYKSGTPMQSAAKAPYLAKFKVKRCGVSELEKEGLRCRSDSEDECSTQEADGQKISWQAAIFKLGDDCRQVSRVRPQVGLGTGLAAPQGSRPTRVQSHMQKCESFPSLTWFRCHGVN

SEQ ID NO: 830003 - protein, 660 aa, Homo sapiens
MEALMARGALTGPLRALCLLGCLLSHAAAAPSPIIKFPGDVAPKTDKELAVQYLNTFYGCPKESCNLFVLKDTLKKMQKFFGLPQTGDLDQNTIETMRKPRCGNPDVANYNFFPRKPKWDKNQITYRIIGYTPDLDPETVDDAFARAFQVWSDVTPLRFSRIHDGEADIMINFGRWEHGDGYPFDGKDGLLAHAFAPGTGVGGDSHFDDDELWTLGEGQVVRVKYGNADGEYCKFPFLFNGKEYNSCTDTGRSDGFLWCSTTYNFEKDGKYGFCPHEALFTMGGNAEGQPCKFPFRFQGTSYDSCTTEGRTDGYRWCGTTEDYDRDKKYGFCPETAMSTVGGNSEGAPCVFPFTFLGNKYESCTSAGRSDGKMWCATTANYDDDRKWGFCPDQGYSLFLVAAHEFGHAMGLEHSQDPGALMAPIYTYTKNFRLSQDDIKGIQELYGASPDIDLGTGPTPTLGPVTPEICKQDIVFDGIAQIRGEIFFFKDRFIWRTVTPRDKPMGPLLVATFWPELPEKIDAVYEAPQEEKAVFFAGNEYWIYSASTLERGYPKPLTSLGLPPDVQRVDAAFNWSKNKKTYIFAGDKFWRYNEVKKKMDPGFPKLIADAWNAIPDNLDAVVDLQGGGHSYFFKGAYYLKLENQSLKSVKFGSIKSDWLGC

SEQ ID NO: 830004 - protein, 67 aa, Homo sapiens
SDGFLWCSTTYNFEKDGKYGFCPQNGQRVGSAIPEHLLWLPQGELQPVCAEGHTKEDAEVLWTAPDR

SEQ ID NO: 830005 - protein, 584 aa, Homo sapiens
MQKFFGLPQTGDLDQNTIETMRKPRCGNPDVANYNFFPRKPKWDKNQITYRIIGYTPDLDPETVDDAFARAFQVWSDVTPLRFSRIHDGEADIMINFGRWEHGDGYPFDGKDGLLAHAFAPGTGVGGDSHFDDDELWTLGEGQVVRVKYGNADGEYCKFPFLFNGKEYNSCTDTGRSDGFLWCSTTYNFEKDGKYGFCPHEALFTMGGNAEGQPCKFPFRFQGTSYDSCTTEGRTDGYRWCGTTEDYDRDKKYGFCPETAMSTVGGNSEGAPCVFPFTFLGNKYESCTSAGRSDGKMWCATTANYDDDRKWGFCPDQGYSLFLVAAHEFGHAMGLEHSQDPGALMAPIYTYTKNFRLSQDDIKGIQELYGASPDIDLGTGPTPTLGPVTPEICKQDIVFDGIAQIRGEIFFFKDRFIWRTVTPRDKPMGPLLVATFWPELPEKIDAVYEAPQEEKAVFFAGNEYWIYSASTLERGYPKPLTSLGLPPDVQRVDAAFNWSKNKKTYIFAGDKFWRYNEVKKKMDPGFPKLIADAWNAIPDNLDAVVDLQGGGHSYFFKGAYYLKLENQSLKSVKFGSIKSDWLGC

SEQ ID NO: 830006 - protein, 584 aa, Homo sapiens; identical to SEQ ID NO: 830005

SEQ ID NO: 830007 - protein, 626 aa, Homo sapiens
QPGLGVQWGNARVAATSASWVQVILWPQSPEELGFTGTRRHAWLIFVFLVETGDLDQNTIETMRKPRCGNPDVANYNFFPRKPKWDKNQITYRIIGYTPDLDPETVDDAFARAFQVWSDVTPLRFSRIHDGEADIMINFGRWEHGDGYPFDGKDGLLAHAFAPGTGVGGDSHFDDDELWTLGEGQVVRVKYGNADGEYCKFPFLFNGKEYNSCTDTGRSDGFLWCSTTYNFEKDGKYGFCPHEALFTMGGNAEGQPCKFPFRFQGTSYDSCTTEGRTDGYRWCGTTEDYDRDKKYGFCPETAMSTVGGNSEGAPCVFPFTFLGNKYESCTSAGRSDGKMWCATTANYDDDRKWGFCPDQGYSLFLVAAHEFGHAMGLEHSQDPGALMAPIYTYTKNFRLSQDDIKGIQELYGASPDIDLGTGPTPTLGPVTPEICKQDIVFDGIAQIRGEIFFFKDRFIWRTVTPRDKPMGPLLVATFWPELPEKIDAVYEAPQEEKAVFFAGNEYWIYSASTLERGYPKPLTSLGLPPDVQRVDAAFNWSKNKKTYIFAGDKFWRYNEVKKKMDPGFPKLIADAWNAIPDNLDAVVDLQGGGHSYFFKGAYYLKLENQSLKSVKFGSIKSDWLGC

SEQ ID NO: 830008 - protein, 477 aa, Homo sapiens
AAIEGVQVLHCQLFVRFGGDIAGELDDGRRRGGEGQVVRVKYGNADGEYCKFPFLFNGKEYNSCTDTGRSDGFLWCSTTYNFEKDGKYGFCPHEALFTMGGNAEGQPCKFPFRFQGTSYDSCTTEGRTDGYRWCGTTEDYDRDKKYGFCPETAMSTVGGNSEGAPCVFPFTFLGNKYESCTSAGRSDGKMWCATTANYDDDRKWGFCPDQGYSLFLVAAHEFGHAMGLEHSQDPGALMAPIYTYTKNFRLSQDDIKGIQELYGASPDIDLGTGPTPTLGPVTPEICKQDIVFDGIAQIRGEIFFFKDRFIWRTVTPRDKPMGPLLVATFWPELPEKIDAVYEAPQEEKAVFFAGNEYWIYSASTLERGYPKPLTSLGLPPDVQRVDAAFNWSKNKKTYIFAGDKFWRYNEVKKKMDPGFPKLIADAWNAIPDNLDAVVDLQGGGHSYFFKGAYYLKLENQSLKSVKFGSIKSDWLGC

SEQ ID NO: 830009 - protein, 660 aa, Homo sapiens; identical to SEQ ID NO: 830003

SEQ ID NO: 830010 - protein, 660 aa, Homo sapiens; identical to SEQ ID NO: 830003

SEQ ID NO: 830011 - protein, 660 aa, Homo sapiens; identical to SEQ ID NO: 830003

SEQ ID NO: 830012 - protein, 660 aa, Homo sapiens; identical to SEQ ID NO: 830003

SEQ ID NO: 830013 - protein, 590 aa, Homo sapiens
MEALMARGALTGPLRALCLLGCLLSHAAAAPSPIIKFPGDVAPKTDKELAVQYLNTFYGCPKESCNLFVLKDTLKKMQKFFGLPQTGDLDQNTIETMRKPRCGNPDVANYNFFPRKPKWDKNQITYRIIGYTPDLDPETVDDAFARAFQVWSDVTPLRFSRIHDGEADIMINFGRWEHGDGYPFDGKDGLLAHAFAPGTGVGGDSHFDDDELWTLGEGQVVRVKYGNADGEYCKFPFLFNGKEYNSCTDTGRSDGFLWCSTTYNFEKDGKYGFCPHEALFTMGGNAEGQPCKFPFRFQGTSYDSCTTEGRTDGYRWCGTTEDYDRDKKYGFCPETAMSTVGGNSEGAPCVFPFTFLGNKYESCTSAGRSDGKMWCATTANYDDDRKWGFCPDQGYSLFLVAAHEFGHAMGLEHSQDPGALMAPIYTYTKNFRLSQDDIKGIQELYGASPDIDLGTGPTPTLGPVTPEICKQDIVFDGIAQIRGEIFFFKDRFIWRTVTPRDKPMGPLLVATFWPELPEKIDAVYEAPQEEKAVFFAGNEYWIYSASTLERGYPKPLTSLGLPPDVQRVDAAFNWSKNKKTYIFAGDKFWR

SEQ ID NO: 830014 - protein, 378 aa, Homo sapiens
MEALMARGALTGPLRALCLLGCLLSHAAAAPSPIIKFPGDVAPKTDKELAVQYLNTFYGCPKESCNLFVLKDTLKKMQKFFGLPQTGDLDQNTIETMRKPRCGNPDVANYNFFPRKPKWDKNQITYRIIGYTPDLDPETVDDAFARAFQVWSDVTPLRFSRIHDGEADIMINFGRWEHGDGYPFDGKDGLLAHAFAPGTGVGGDSHFDDDELWTLGEGQVVRVKYGNADGEYCKFPFLFNGKEYNSCTDTGRSDGFLWCSTTYNFEKDGKYGFCPHEALFTMGGNAEGQPCKFPFRFQGTSYDSCTTEGRTDGYRWCGTTEDYDRDKKYGFCPETAMSTVGGNSEGAPCVFPFTFLGNKYESCTSAGRSVPAAASCRS

SEQ ID NO: 830015 - protein, 201 aa, Homo sapiens
MEALMARGALTGPLRALCLLGCLLSHAAAAPSPIIKFPGDVAPKTDKELAVQYLNTFYGCPKESCNLFVLKDTLKKMQKFFGLPQTGDLDQNTIETMRKPRCGNPDVANYNFFPRKPKWDKNQITYRIIGYTPDLDPETVDDAFARAFQVWSDVTPLRFSRIHDGEADIMINFGRWEHGDGYPFDGKDGLLAHAFAPVHST

SEQ ID NO: 830016 - protein, 260 aa, Homo sapiens
KGKYEAWVLSWEHGDGYPFDGKDGLLAHAFAPGTGVGGDSHFDDDELWTLGEGQVVRVKYGNADGEYCKFPFLFNGKEYNSCTDTGRSDGFLWCSTTYNFEKDGKYGFCPHEALFTMGGNAEGQPCKFPFRFQGTSYDSCTTEGRTDGYRWCGTTEDYDRDKKYGFCPETAMSTVGGNSEGAPCVFPFTFLGNKYESCTSAGRSDGKMWCATTANYDDDRKWGFCPDQGYSLFLVAAHEFGHAMGLEHSQDPLAFHCWLP

SEQ ID NO: 830017 - protein, 139 aa, Homo sapiens
  misc_feature (108)..(109): Xaa can be any naturally occurring amino acid
  misc_feature (115)..(115): Xaa can be any naturally occurring amino acid
  misc_feature (125)..(126): Xaa can be any naturally occurring amino acid
  misc_feature (128)..(129): Xaa can be any naturally occurring amino acid
  misc_feature (137)..(137): Xaa can be any naturally occurring amino acid
MEALMARGALTGPLRALCLLGCLLSHAAAAPSPIIKFPGDVAPKTDKELAVQYLNTFYGCPKESCNLFVLKDTLKKMQKFFGLPQTGDLDQNTIETMRKRGWGKARRXXSRQLLXVKGQYLEKSXXEXXYDFVQHAXSL

SEQ ID NO: 830018 - protein, 245 aa, Homo sapiens
  misc_feature (226)..(226): Xaa can be any naturally occurring amino acid
  misc_feature (228)..(228): Xaa can be any naturally occurring amino acid
CRDPGQNTKKQTCYYFFKDDYFAKKNEERKQNKVEAKLRAKQEQEAKQKLEEDAIWGFKHTKGLAAAAPSPIIKFPGDVAPKTDKELAVQYLNTFYGCPKESCNLFVLKDTLKKMQKFFGLPQTGDLDQNTIETMRKPRCGNPDVANYNFFPRKPKWDKNQITYRIIGYTPDLDPETVDDAFARAFQVWSDVTPLRFSRIHDGEADIMINFGRWGSIGRMGNTPFXNXLREPGTSLGLHWPFRPQ

SEQ ID NO: 830019 - protein, 660 aa, Homo sapiens; identical to SEQ ID NO: 830003

SEQ ID NO: 830020 - protein, 698 aa, Homo sapiens
CRDPGQNTKKQTCYYFFKDDYFAKKNEERKQNKVEAKLRAKQEQEAKQKLEEDAIWGFKHTKGLAAAAPSPIIKFPGDVAPKTDKELAVQYLNTFYGCPKESCNLFVLKDTLKKMQKFFGLPQTGDLDQNTIETMRKPRCGNPDVANYNFFPRKPKWDKNQITYRIIGYTPDLDPETVDDAFARAFQVWSDVTPLRFSRIHDGEADIMINFGRWEHGDGYPFDGKDGLLAHAFAPGTGVGGDSHFDDDELWTLGEGQVVRVKYGNADGEYCKFPFLFNGKEYNSCTDTGRSDGFLWCSTTYNFEKDGKYGFCPHEALFTMGGNAEGQPCKFPFRFQGTSYDSCTTEGRTDGYRWCGTTEDYDRDKKYGFCPETAMSTVGGNSEGAPCVFPFTFLGNKYESCTSAGRSDGKMWCATTANYDDDRKWGFCPDQGYSLFLVAAHEFGHAMGLEHSQDPGALMAPIYTYTKNFRLSQDDIKGIQELYGASPDIDLGTGPTPTLGPVTPEICKQDIVFDGIAQIRGEIFFFKDRFIWRTVTPRDKPMGPLLVATFWPELPEKIDAVYEAPQEEKAVFFAGNEYWIYSASTLERGYPKPLTSLGLPPDVQRVDAAFNWSKNKKTYIFAGDKFWRYNEVKKKMDPGFPKLIADAWNAIPDNLDAVVDLQGGGHSYFFKGAYYLKLENQSLKSVKFGSIKSDWLGC

SEQ ID NO: 830021 - protein, 495 aa, Homo sapiens
KGKYEAWVLSWEHGDGYPFDGKDGLLAHAFAPGTGVGGDSHFDDDELWTLGEGQVVRVKYGNADGEYCKFPFLFNGKEYNSCTDTGRSDGFLWCSTTYNFEKDGKYGFCPHEALFTMGGNAEGQPCKFPFRFQGTSYDSCTTEGRTDGYRWCGTTEDYDRDKKYGFCPETAMSTVGGNSEGAPCVFPFTFLGNKYESCTSAGRSDGKMWCATTANYDDDRKWGFCPDQGYSLFLVAAHEFGHAMGLEHSQDPGALMAPIYTYTKNFRLSQDDIKGIQELYGASPDIDLGTGPTPTLGPVTPEICKQDIVFDGIAQIRGEIFFFKDRFIWRTVTPRDKPMGPLLVATFWPELPEKIDAVYEAPQEEKAVFFAGNEYWIYSASTLERGYPKPLTSLGLPPDVQRVDAAFNWSKNKKTYIFAGDKFWRYNEVKKKMDPGFPKLIADAWNAIPDNLDAVVDLQGGGHSYFFKGAYYLKLENQSLKSVKFGSIKSDWLGC

SEQ ID NO: 830022 - protein, 485 aa, Homo sapiens
MEALMARGALTGPLRALCLLGCLLSHAAAAPSPIIKFPGDVAPKTDKELAVQYLNTFYGCPKESCNLFVLKDTLKKMQKFFGLPQTGDLDQNTIETMRKPRCGNPDVANYNFFPRKPKWDKNQITYRIIGYTPDLDPETVDDAFARAFQVWSDVTPLRFSRIHDGEADIMINFGRWEHGDGYPFDGKDGLLAHAFAPGTGVGGDSHFDDDELWTLGEGQVVRVKYGNADGEYCKFPFLFNGKEYNSCTDTGRSDGFLWCSTTYNFEKDGKYGFCPHEALFTMGGNAEGQPCKFPFRFQGTSYDSCTTEGRTDGYRWCGTTEDYDRDKKYGFCPETAMSTVGGNSEGAPCVFPFTFLGNKYESCTSAGRSDGKMWCATTANYDDDRKWGFCPDQGYSLFLVAAHEFGHAMGLEHSQDPGALMAPIYTYTKNFRLSQDDIPDNLDAVVDLQGGGHSYFFKGAYYLKLENQSLKSVKFGSIKSDWLGC

SEQ ID NO: 830023 - protein, 660 aa, Homo sapiens; identical to SEQ ID NO: 830003

SEQ ID NO: 830024 - protein, 147 aa, Homo sapiens
RVVPITFHLHGFWFSCSVLPSFAGNEYWIYSASTLERGYPKPLTSLGLPPDVQRVDAAFNWSKNKKTYIFAGDKFWRYNEVKKKMDPGFPKLIADAWNAIPDNLDAVVDLQGGGHSYFFKGAYYLKLENQSLKSVKFGSIKSDWLGC

SEQ ID NO: 830025 - protein, 660 aa, Homo sapiens; identical to SEQ ID NO: 830003

SEQ ID NO: 830026 - protein, 642 aa, Homo sapiens
MEALMARGALTGPLRALCLLGCLLSHAAAAPSPIIKFPGDVAPKTDKELAVQYLNTFYGCPKESCNLFVLKDTLKKMQKFFGLPQTGDLDQNTIETMRKPRCGNPDVANYNFFPRKPKWDKNQITYRIIGYTPDLDPETVDDAFARAFQVWSDVTPLRFSRIHDGEADIMINFGRWEHGDGYPFDGKDGLLAHAFAPGTGVGGDSHFDDDELWTLGEGQVVRVKYGNADGEYCKFPFLFNGKEYNSCTDTGRSDGFLWCSTTYNFEKDGKYGFCPHEALFTMGGNAEGQPCKFPFRFQGTSYDSCTTEGRTDGYRWCGTTEDYDRDKKYGFCPETAMSTVGGNSEGAPCVFPFTFLGNKYESCTSAGRSDGKMWCATTANYDDDRKWGFCPDQGYSLFLVAAHEFGHAMGLEHSQDPGALMAPIYTYTKNFRLSQDDIKGIQELYGASPDIDLGTGPTPTLGPVTPEICKQDIVFDGIAQIRGEIFFFKDRFIWRTVTPRDKPMGPLLVATFWPELPEKIDAVYEAPQEEKAVFFAGNEYWIYSASTLERGYPKPLTSLGLPPDVQRVDAAFNWSKNKKTYIFAGDKFWRYNEVKKKMDPGFPKLIADAWNAIPDNLDAVVDLQGGGHSYFFKGAYYLKLEN

SEQ ID NO: 830027 - protein, 425 aa, Homo sapiens
MEALMARGALTGPLRALCLLGCLLSHAAAAPSPIIKFPGDVAPKTDKELAVQYLNTFYGCPKESCNLFVLKDTLKKMQKFFGLPQTGDLDQNTIETMRKPRCGNPDVANYNFFPRKPKWDKNQITYRIIGYTPDLDPETVDDAFARAFQVWSDVTPLRFSRIHDGEADIMINFGRWEHGDGYPFDGKDGLLAHAFAPGTGVGGDSHFDDDELWTLGEGQVVRVKYGNADGEYCKFPFLFNGKEYNSCTDTGRSDGFLWCSTTYNFEKDGKYGFCPHEALFTMGGNAEGQPCKFPFRFQGTSYDSCTTEGRTDGYRWCGTTEDYDRDKKYGFCPETAMSTVGGNSEGAPCVFPFTFLGNKYESCTSAGRSDGKMWCATTANYDDDRKWGFCPDQGYSLFLVAAHEFGHAMGLEHSQDPLAFHCWLP

SEQ ID NO: 830028 - protein, 284 aa, Homo sapiens
MEALMARGALTGPLRALCLLGCLLSHAAAAPSPIIKFPGDVAPKTDKELAVQYLNTFYGCPKESCNLFVLKDTLKKMQKFFGLPQTGDLDQNTIETMRKPRCGNPDVANYNFFPRKPKWDKNQITYRIIGYTPDLDPETVDDAFARAFQVWSDVTPLRFSRIHDGEADIMINFGRWEHGDGYPFDGKDGLLAHAFAPGTGVGGDSHFDDDELWTLGEGQVVRVKYGNADGEYCKFPFLFNGKEYNSCTDTGRSDGLRLSTAVEASSSFFLSLGSLHSSFSIWVV

SEQ ID NO: 830029 - protein, 117 aa, Homo sapiens
GRALRVDVEARSSRRPGKRGGERKKEEKSGGGRVGGWGREGRARVRPPPPAPLCQLPPSPAGYIWRLPSLVSAASRLPQAVAGGCASGALNIQRDCQDLRRRRRRRGLGRGGRTMSR

SEQ ID NO: 830030 - protein, 204 aa, Homo sapiens
  misc_feature (182)..(182): Xaa can be any naturally occurring amino acid
  misc_feature (189)..(189): Xaa can be any naturally occurring amino acid
  misc_feature (197)..(197): Xaa can be any naturally occurring amino acid
MERIPSAQPPPACLPKAPGLEHGDLPGMYPAHMYQVYKSRRGIKRSEDSKETYKLPHRLIEKKRRDRINECIAQLKDLLPEHLKLTTLGHLEKAVVLELTLKHVKALTNLIDQQQQKIIALQSGLQAGELSGRNVETGQEMFCSGFQTCAREVLQYLAKHENTRDLKSSQLVTHLPPGLTCXRDLQEAXNHFQGRIXENPFSPR

SEQ ID NO: 830031 - protein, 412 aa, Homo sapiens
MERIPSAQPPPACLPKAPGLEHGDLPGMYPAHMYQVYKSRRGIKRSEDSKETYKLPHRLIEKKRRDRINECIAQLKDLLPEHLKLTTLGHLEKAVVLELTLKHVKALTNLIDQQQQKIIALQSGLQAGELSGRNVETGQEMFCSGFQTCAREVLQYLAKHENTRDLKSSQLVTHLHRVVSELLQGGTSRKPSDPAPKVMDFKEKPSSPAKGSEGPGKNCVPVIQRTFAHSSGEQSGSDTDTDSGYGGESEKGDLRSEQPCFKSDHGRRFTMGERIGAIKQESEEPPTKKNRMQLSDDEGHFTSSDLISSPFLGPHPHQPPFCLPFYLIPPSATAYLPMLEKCWYPTSVPVLYPGLNASAAALSSFMNPDKISAPLLMPQRLPSPLPAHPSVDSSVLLQALKPIPPLNLETKD

SEQ ID NO: 830032 - protein, 408 aa, Homo sapiens
  misc_feature (7)..(7): Xaa can be any naturally occurring amino acid
  misc_feature (11)..(11): Xaa can be any naturally occurring amino acid
SQWSLVXHAVXDIVDHASRRPSRMYPAHMYQVYKSRRGIKRSEDSKETYKLPHRLIEKKRRDRINECIAQLKDLLPEHLKLTTLGHLEKAVVLELTLKHVKALTNLIDQQQQKIIALQSGLQAGELSGRNVETGQEMFCSGFQTCAREVLQYLAKHENTRDLKSSQLVTHLHRVVSELLQGGTSRKPSDPAPKVMDFKEKPSSPAKGSEGPGKNCVPVIQRTFAHSSGEQSGSDTDTDSGYGGESEKGDLRSEQPCFKSDHGRRFTMGERIGAIKQESEEPPTKKNRMQLSDDEGHFTSSDLISSPFLGPHPHQPPFCLPFYLIPPSATAYLPMLEKCWYPTSVPVLYPGLNASAAALSSFMNPDKISAPLLMPQRLPSPLPAHPSVDSSVLLQALKPIPPLNLETKD

SEQ ID NO: 830033 - protein, 502 aa, Homo sapiens
MERIPSAQPPPACLPKAPGLEHGDLPGMYPAHMYQVYKSRRGIKRSEDSKVSKCTPRDPALSPSRALSFQEKFSRFEVGEGMQGVGSVPLLSDLEKKGQTMVLGATLLLCSSAGLLLRGWEDRLLISFPKLPTASPCVLQETYKLPHRLIEKKRRDRINECIAQLKDLLPEHLKLTTLGHLEKAVVLELTLKHVKALTNLIDQQQQKIIALQSGLQAGELSGRNVETGQEMFCSGFQTCAREVLQYLAKHENTRDLKSSQLVTHLHRVVSELLQGGTSRKPSDPAPKVMDFKEKPSSPAKGSEGPGKNCVPVIQRTFAHSSGEQSGSDTDTDSGYGGESEKGDLRSEQPCFKSDHGRRFTMGERIGAIKQESEEPPTKKNRMQLSDDEGHFTSSDLISSPFLGPHPHQPPFCLPFYLIPPSATAYLPMLEKCWYPTSVPVLYPGLNASAAALSSFMNPDKISAPLLMPQRLPSPLPAHPSVDSSVLLQALKPIPPLNLETKD

SEQ ID NO: 830034 - protein, 412 aa, Homo sapiens; identical to SEQ ID NO: 830031

SEQ ID NO: 830035 - protein, 272 aa, Homo sapiens
MFCSGFQTCAREVLQYLAKHENTRDLKSSQLVTHLHRVVSELLQGGTSRKPSDPAPKVMDFKEKPSSPAKGSEGPGKNCVPVIQRTFAHSSGEQSGSDTDTDSGYGGESEKGDLRSEQPCFKSDHGRRFTMGERIGAIKQESEEPPTKKNRMQLSDDEGHFTSSDLISSPFLGPHPHQPPFCLPFYLIPPSATAYLPMLEKCWYPTSVPVLYPGLNASAAALSSFMNPDKISAPLLMPQRLPSPLPAHPSVDSSVLLQALKPIPPLNLETKD

SEQ ID NO: 830036 - protein, 412 aa, Homo sapiens; identical to SEQ ID NO: 830031

SEQ ID NO: 830037 - protein, 408 aa, Homo sapiens
MERIPSAQPPPACLPKAPGLEHGDLPGMYPAHMYQVYKSRRGIKRSEDSKETYKLPHRLIEKKRRDRINECIAQLKDLLPEHLKLTTLGHLEKAVVLELTLKHVKALTNLIDQQQQKIIALQSGLQAGELSGRNVETGQEMFCSGFQTCAREVLQYLAKHENTRDLKSSQLVTHLHRVVSELLQGGTSRKPSDPAPKVMDFKEKPSSPAKGSEGPGKNCVPVIQRTFAHSSGEQSGSDTDTDSGYGGESEKGDLRSEQPCFKSDHGRRFTMGERIGAIKQESEEPPTKKNRMQLSDDEGHFTSSDLISSPFLGPHPHQPPFCLPFYLIPPSATAYLPMLEKCWYPTSVPVLYPGLNASAAALSSFMNPDKISAPLLMPQRLPSPLPAHPSDTLFLYISSLLSKVPSSI

SEQ ID NO: 830038 - protein, 592 aa, Homo sapiens
MERIPSAQPPPACLPKAPGLEHGDLPGMYPAHMYQVYKSRRGIKRSEDSKETYKLPHRLIEKKRRDRINECIAQLKDLLPEHLKLTTLGHLEKAVVLELTLKHVKALTNLIDQQQQKIIALQSGLQAGELSGRNVETGQEMFCSGFQTCAREVLQYLAKHENTRDLKSSQLVTHLHRVVSELLQGGTSRKPSDPAPKVMDFKEKPSSPAKGSEGPGKNCVPVIQRTFAHSSGEQSGSDTDTDSGYGGESEKGDLRSEQPCFKSDHGRRFTMGERIGAIKQESEEPPTKKNRMQLSDDEGHFTSSDLISSPFLGPHPHTHTNRHRHTSLTLSLSPLPPLDVNVENKRDTHTHTRLMMTADVATTKELGAHVRAHEKNHDDSGAREDRPTTPNSAATTATHHALLTNSKRSTRNHAAASYKTSQQTEKHTQPPTSHPLLTNVNAQRGTTLTKTNRHTTPHPHNTQTKRWRMRTSTPSAANSHTTAGHPQQQQTKRDNPTRTIRGDNTKSEQQRTHHYTRTPTNQTTPTHKRDRTETRRTCHTHCTPRTRGGQHERKNTHTTNNPTTTQKASQQTTTGREARQPIKRGQTTLDPH

SEQ ID NO: 830039 - protein, 130 aa, Homo sapiens
MERIPSAQPPPACLPKAPGLEHGDLPGMYPAHMYQVYKSRRGIKRSEDSKETYKLPHRLIEKKRRDRINECIAQLKDLLPEHLKLTTLGHLEKAVVLELTLKHVKALTNLIDQQQQKIIALQSGLQAGEC

SEQ ID NO: 830040 - protein, 164 aa, Homo sapiens
MERIPSAQPPPACLPKAPGLEHGDLPGMYPAHMYQVYKSRRGIKRSEDSKVSKCTPRDPALSPSRALSFQEKFSRFEVGEGMQGVGSVPLLSDLEKKGQTMVLGATLLLCSSAGLLLRGWEDRLLISFPKRPPPPRASCRRPTNCRTGSSRKRDVTGLTSASPS

SEQ ID NO: 830041 - protein, 412 aa, Homo sapiens; identical to SEQ ID NO: 830031

SEQ ID NO: 830042 - protein, 169 aa, Homo sapiens
RPPLTRSLPPPRPPHFSFTWLARRRQTAQGAHTASLCAESEPEAAGTPGHARPQLKLHLKAEDSSSPGDFKELRLRGTSAERPPKPSPGQSSSRRSASADRSAQWPRLAAPWSGSPARNHPPSPGVFWLTHANEARTTWTSPSWLQHQLAFLFRSLTSGDFQDSLVFLT

SEQ ID NO: 830043 - protein, 412 aa, Homo sapiens; identical to SEQ ID NO: 830031

SEQ ID NO: 830044 - protein, 412 aa, Homo sapiens; identical to SEQ ID NO: 830031

SEQ ID NO: 830045 - protein, 412 aa, Homo sapiens; identical to SEQ ID NO: 830031

SEQ ID NO: 830046 - protein, 272 aa, Homo sapiens; identical to SEQ ID NO: 830035

SEQ ID NO: 830047 - protein, 412 aa, Homo sapiens; identical to SEQ ID NO: 830031

SEQ ID NO: 830048 - protein, 412 aa, Homo sapiens; identical to SEQ ID NO: 830031

SEQ ID NO: 830049 - protein, 147 aa, Homo sapiens
MERIPSAQPPPACLPKAPGLEHGDLPGMYPAHMYQVYKSRRGIKRSEDSKETYKLPHRLIEKKRRDRINECIAQLKDLLPEHLKLTTLGHLEKAVVLELTLKHVKALTNLIDHSAAAFQNALCLIADRVLTFSFPVFILVLSRCLYL

SEQ ID NO: 830050 - protein, 164 aa, Homo sapiens; identical to SEQ ID NO: 830040

SEQ ID NO: 830051 - protein, 117 aa, Homo sapiens
AAGTPGHARPQLKLHLKAEDSSSPGDFKELRLRGTSAERPPKPSPGQSSSRRSASADRSAQWPRLAAPWSGSPARNHPPPACPKHRDWSTETYQGKLALLGPSSLNCSPMLCATLNL

SEQ ID NO: 830052 - protein, 708 aa, Homo sapiens
MNYPSPPPTPTHRHPTDTLKIEILTVEPSNVTVFGDGAFKKVNEDKMKSYGWTPIPYEWFPLKEIRTQTHRKVRPCEDTGGRWPSTSQRDLQALEETNTADTLILDFKKCEKINFCSLNYPICDDFAMEALVNLYGFWYWESGVLVELIPKNVELALELDNGKRPEEVFVRKSIDCLEEIVGRHMDVEGDSGEDLENRRAVEKASVILEVYICHLESNIGRNMNVKGVSGEELKQMRNILLETEEKGNAYYNVANSQIVFCGKWMNLQSDELECLAEISKQCIKDMAWFLLAAESKMQEEREKFKKELLSQKQPEPEDSENSQSIHIAKIQHVLEGTSKLLQDNHFLKQLGICDLWIQSAILAATSRSQDRDGGYTYGNAAGWYRREQRDKNEGSLLDFLRFYKMGQKSYLAVNMCSSRRGKNDPEDDGEGKGATIATTGPEGSGLRSQGRLLLRAEGGGLPHWWAQKTGLPPLLGGKMENEAEEDYSGALKSNGICLYTFQTCLGSITLLSDFFGIGMFILCLSHQWCILEANNLSSFTGSCWRRILPQGETLSMPVPDLNDIEMDLGLRVDTEVGQDFGAVGMEWMCFVSEKDMNFEGPDGRILGVELYALQMYKVKVLTPSTKNVTIFGDGAFKKVIKIKCRYTYEPYIQYEWCLCKRLGQTQREDHVMTLEKEGHLQTEEGGLRRDKPCGHLNLGHLAFRSVGK

SEQ ID NO: 830053 - protein, 211 aa, Homo sapiens
LPQSGTFLSQIAIRVCLFSFQIPGTSSVVQRKWKPLQPVSQPRGPGQPTKSRMSAVAAEIKQIRARRKTARMLMVVLLVFAICYLPISILNVLKRVFGMFAHTEDRETVYAWFTFSHWLVYANSAANPIIYNFLSGKFREEFKAAFSCCCLGVHHRQEDRLTRGRTSTESRKSLTTQISNFDNISKLSEQVVLTSISTLPAANGAGPLQNW

SEQ ID NO: 830054 - protein, 444 aa, Homo sapiens
MSGTKLEDSPPCRNWSSASELNETQEPFLNPTDYDDEEFLRYLWREYLHPKEYEWVLIAGYIIVFVVALIGNVLVCVAVWKNHHMRTVTNYFIVNLSLADVLVTITCLPATLVVDITETWFFGQSLCKVIPYLQTVSVSVSVLTLSCIALDRWYAICHPLMFKSTAKRARNSIVIIWIVSCIIMIPQAIVMECSTVFPGLANKTTLFTVCDERWGGEIYPKMYHICFFLVTYMAPLCLMVLAYLQIFRKLWCRQIPGTSSVVQRKWKPLQPVSQPRGPGQPTKSRMSAVAAEIKQIRARRKTARMLMVVLLVFAICYLPISILNVLKRVFGMFAHTEDRETVYAWFTFSHWLVYANSAANPIIYNFLSGKFREEFKAAFSCCCLGVHHRQEDRLTRGRTSTESRKSLTTQISNFDNISKLSEQVVLTSISTLPAANGAGPLQNW

SEQ ID NO: 830055 - protein, 288 aa, Homo sapiens
MGESSEDIDQMFSTLLGEMDLLTQSLGVDTLPPPDPNPPRAEFNYSVGFKDLNESLNALEDQDLDALMADLVADISEAEQRTIQAQKESLQNQHHSASLQASIFSGAASLGYGTNVAATGISQYEDDLPPPPADPVLDLPLPPPPPEPLSQEEEEAQAKADKIKLALEKLKEAKVKKLVVKVHMNDNSTKSLMVDERQLARDVLDNLFEKTHCDCNVDWCLYEIYPELQIERFFEDHENVVEVLSDWTRDTENKILFLEKEFRRSPSISSISAVMTQEPLTSGSWEYG

SEQ ID NO: 830056 - protein, 342 aa, Homo sapiens
MGESSEDIDQMFSTLLGEMDLLTQSLGVDTLPPPDPNPPRAEFNYSVGFKDLNESLNALEDQDLDALMADLVADISEAEQRTIQAQKESLQNQHHSASLQASIFSGAASLGYGTNVAATGISQYEDDLPPPPADPVLDLPLPPPPPEPLSQEEEEAQAKADKIKLALEKLKEAKVKKLVVKVHMNDNSTKSLMVDERQLARDVLDNLFEKTHCDCNVDWCLYEIYPELQIERFFEDHENVVEVLSDWTRDTENKILFLEKEEKYAVFKNPQNFYLDNRGKKESKETNEKMNAKNKESLLEESFCGTSIIVPELEGALYLKEDGKKSWKRRYFLLRASGIYYV

SEQ ID NO: 830057 - protein, 209 aa, Homo sapiens
MGESSEDIDQMFSTLLGEMDLLTQSLGVDTLPPPDPNPPRAEFNYSVGFKDLNESLNALEDQDLDALMADLVADISEAEQRTIQAQKESLQNQHHSASLQASIFSGAASLGYGTNVAATGISQYEDDLPPPPADPVLDLPLPPPPPEPLSQLVVKVHMNDNSTKSLMVDERQLARDVLDNLFEKTHCDCNVDWCLYEIYPELQIEFLLG

SEQ ID NO: 830058 - protein, 427 aa, Homo sapiens
MGESSEDIDQMFSTLLGEMDLLTQSLGVDTLPPPDPNPPRAEFNYSVGFKDLNESLNALEDQDLDALMADLVADISEAEQRTIQAQKESLQNQHHSASLQASIFSGAASLGYGTNVAATGISQYEDDLPPPPADPVLDLPLPPPPPEPLSQEEEEAQAKADKIKLALEKLKEAKVKKLVVKVHMNDNSTKSLMVDERQLARDVLDNLFEKTHCDCNVDWCLYEIYPELQIERFFEDHENVVEVLSDWTRDTENKILFLEKEFKKESQYIKYLCCDDTRTLNQWVMGIRIAKYGKTLYDNYQRAVAKAGLASRWTNLGTVNAAAPAQPSTGPKTGTTQPNGQIPQATHSVSAVLQEAQRHAETSKDKKPALGNHHDPAVPRAPHAPKSSLPPPPPVRRSSDTSGSPATPLKAKGTGGGGLPAPPDDFL

SEQ ID NO: 830059 - protein, 315 aa, Homo sapiens
MPGLSCRFYQHKFPEVEDVVMVNVRSIAEMGAYVSLLEYNNIEGMILLSELSRRRIRSINKLIRIGRNECVVVIRVDKEKGYIDLSKRRVSPEEAIKCEDKFTKSKTVYSILRHVAEVLEYTKDEQLESLFQRTAWVFDDKYKRPGYGAYDAFKHAVSDPSILDSLDLNEDEREVLINNINRRLTPQAVKIRADIEVACYGYEGIDAVKEALRAGLNCSTENMPIKINLIAPPRYVMTTTTLERTEGLSVLSQAMAVIKEKIEEKRGVFNVQMEPKVVTDTDETELARQMERLERENAEVDGDDDAEEMEAKAED

SEQ ID NO: 830060 - protein, 315 aa, Homo sapiens; identical to SEQ ID NO: 830059

SEQ ID NO: 830061 - protein, 315 aa, Homo sapiens; identical to SEQ ID NO: 830059

SEQ ID NO: 830062 - protein, 315 aa, Homo sapiens; identical to SEQ ID NO: 830059

SEQ ID NO: 830063 - protein, 302 aa, Homo sapiens
MPGLSCRFYQHKFPEVEDVVMVNVRSIAEMGAYVSLLEYNNIEGMILLSELSRRRIRSINKLIRIGRNECVVVIRVDKEKGYIDLSKRRVSPEEAIKCEDKFTKSKTVYSILRHVAEVLEYTKDEQLESLFQRTAWVFDDKYKRPGYGAYDAFKHAVSDPSILDSLDLNEDEREVLINNINRRLTPQAVKIRADIEVACYGYEGIDAVKEALRAGLNCSTENMPIKINLIAPPRYVMTTTTLERTEGLSVLSQAMAVIKEKIEEKRGVFNVQMEPKVVTDTDETELARQMERLERENAEVDS

SEQ ID NO: 830064 - protein, 229 aa, Homo sapiens
GVVYRGWHTQTVKTTFTKSKTVYSILRHVAEVLEYTKDEQLESLFQRTAWVFDDKYKRPGYGAYDAFKHAVSDPSILDSLDLNEDEREVLINNINRRLTPQAVKIRADIEVACYGYEGIDAVKEALRAGLNCSTENMPIKINLIAPPRYVMTTTTLERTEGLSVLSQAMAVIKEKIEEKRGVFNVQMEPKVVTDTDETELARQMERLERENAEVDGDDDAEEMEAKAED

SEQ ID NO: 830065 - protein, 303 aa, Homo sapiens
MPGLSCRFYQHKFPEVEDVVMVNVRSIAEMGAYVSLLEYNNIEGMILLSELSRRRIRSINKLIRIGRNECVVVIRVDKEKGYIDLSKRRVSPEEAIKCEDKFTKSKTVYSILRHVAEVLEYTKDEQLESLFQRTAWVFDDKYKRPGYGAYDAFKHAVSDPSILDSLDLNEDEREVLINNINRRLTPQAVKIRADIEVACYGYEGIDAVKEALRAGLNCSTENMPIKINLIAPPRYVMTTTTLERTEGLSVLSQAMAVIKEKIEEKRGVFNVQMEPKVVTDTDETELARQMERLERENAEVDWL

SEQ ID NO: 830066 - protein, 196 aa, Homo sapiens
MPGLSCRFYQHKFPEVEDVVMVNVRSIAEMGAYVSLLEYNNIEGMILLSELSRRRIRSINKLIRIGRNECVVVIRVDKEKGYIDLSKRRVSPEEAIKCEDKFTKSKTVYSILRHVAEVLEYTKDEQLESLFQRTAWVFDDKYKRPGYGAYDAFKHAVSDPSILDSLDLNEDEREVLINNINRRLTPQAVKIRAERA

SEQ ID NO: 830067 - protein, 315 aa, Homo sapiens; identical to SEQ ID NO: 830059

SEQ ID NO: 830068 - protein, 315 aa, Homo sapiens; identical to SEQ ID NO: 830059

SEQ ID NO: 830069 - protein, 315 aa, Homo sapiens; identical to SEQ ID NO: 830059

SEQ ID NO: 830070 - protein, 315 aa, Homo sapiens; identical to SEQ ID NO: 830059

SEQ ID NO: 830071 - protein, 294 aa, Homo sapiens
MPGLSCRFYQHKFPEVEDVVMVNVRSIAEMGAYVSLLEYNNIEGMILLSELSRRRIRSINKLIRIGRNECVVVIRVDKEKGYIDLSKRRVSPEEAIKCEDKFTKSKTVYSILRHVAEVLEYTKDEQLESLFQRTAWVFDDKYKRPGYGAYDAFKHAVSDPSILDSLDLNEDEREVLINNINRRLTPQAVKIRADIEVACYGYEGIDAVKEALRAGLNCSTENMPIKINLIAPPRYVMTTTTLERTEGLSVLSQAMAVIKEKIEEKRGVFNVQMEPKVVTDTDETAYSGSSRSPH

SEQ ID NO: 830072 - protein, 216 aa, Homo sapiens
MRLSALLALASKVTLPPHYRYGMSPPGSVADKRKNPPWIRRRPVVVEPISDEDWYLFCGDTVEILEGKDAGKQGKVVQVIRQRNWVVVGGLNTHYRYIGKTMDYRGTMIPSEAPLLHRQVKLVDPMDRKPTEIEWRFTEAGERVRVSTRSGRIIPKPEFPRADGIVPETWIDGPKDTSVEDALERTYVPCLKTLQEEVMEAMGIKETRKYKKVYWY

SEQ ID NO: 830073 - protein, 216 aa, Homo sapiens; identical to SEQ ID NO: 830072

SEQ ID NO: 830074 - protein, 152 aa, Homo sapiens
TPRKSTGVAGEGTLRAHVLKIRSAAESGGHYRYIGKTMDYRGTMIPSEAPLLHRQVKLVDPMDRKPTEIEWRFTEAGERVRVSTRSGRIIPKPEFPRADGIVPETWIDGPKDTSVEDALERTYVPCLKTLQEEVMEAMGIKETRKYKKVYWY

SEQ ID NO: 830075 - protein, 216 aa, Homo sapiens; identical to SEQ ID NO: 830072

SEQ ID NO: 830076 - protein, 216 aa, Homo sapiens; identical to SEQ ID NO: 830072

SEQ ID NO: 830077 - protein, 154 aa, Homo sapiens
MRLSALLALASKVTLPPHYRYGMSPPGSVADKRKNPPWIRRRPVVVEPISDEDWYLFCGDTVEILEGKDAGKQGKVVQVIRQRNWVVVGGLNTHYRYIGKTMDYRGTMIPSEAPLLHRQVKLVDPMDRKPTEIEWRFTEAGERMAPKTHQWKML

SEQ ID NO: 830078 - protein, 1125 aa, Homo sapiens
MSKTLKKKKHWLSKVQECAVSWAGPPGDFGAEIRGGAERGEFPYLGRLREEPGGGTCCVVSGKAPSPGDVLLEVNGTPVSGLTNRDTLAVIRHFREPIRLKTVKPGKVINKDLRHYLSLQFQKGSIDHKLQQVIRDNLYLRTIPCTTRAPRDGEVPGVDYNFISVEQFKALEESGALLESGTYDGNFYGTPKPPAEPSPFQPDPVDQVLFDNEFDAESQRKRTTSVSKMERMDSSLPEEEEDEDKEAINGSGNAENRERHSESSDWMKTVPSYNQTNSSMDFRNYMMRDETLEPLPKNWEMAYTDTGMIYFIDHNTKTTTWLDPRLCKKAKAPEDCEDGELPYGWEKIEDPQYGTYYVDHLNQKTQFENPVEEAKRKKQLGQVEIGSSKPDMEKSHFTRDPSQLKGVLVRASLKKSTMGFGFTIIGGDRPDEFLQVKNVLKDGPAAQDGKIAPGDVIVDINGNCVLGHTHADVVQMFQLVPVNQYVNLTLCRGYPLPDDSEDPVVDIVAATPVINGQSLTKGETCMNPQDFKPGAMVLEQNGKSGHTLTGDGLNGPSDASEQRVSMASSGSSQPELVTIPLIKGPKGFGFAIADSPTGQKVKMILDSQWCQGLQKGDIIKEIYHQNVQNLTHLQVVEVLKQFPVGADVPLLILRGGPPSPTKTAKMKTDKKENAGSLEAINEPIPQPMPFPPSIIRSGSPKLDPSEVYLKSKTLYEDKPPNTKDLDVFLRKQESGFGFRVLGGDGPDQSIYIGAIIPLGAAEKDGRLRAADELMCIDGIPVKGKSHKQVLDLMTTAARNGHVLLTVRRKIFYGEKQPEDDSSQAFISTQNGSPRLNRAEVPARPAPQEPYDVVLQRKENEGFGFVILTSKNKPPPGVIPHKIGRVIEGSPADRCGKLKVGDHISAVNGQSIVELSHDNIVQLIKDAGVTVTLTVIAEEEHHGPPSGTNSARQSPALQHRPMGQSQANHIPGDRSALEGEIGKDVSTSYRHSWSDHKHLAQPDTAVISVVGSRHNQNLGCYPVELERGPRGFGFSLRGGKEYNMGLFILRLAEDGPAIKDGRIHVGDQIVEINGEPTQGITHTRAIELIQAGGNKVLLLLRPGTGLIPDHGLAPSGLCSYVKPEQH

SEQ ID NO: 830079 - protein, 1125 aa, Homo sapiens; identical to SEQ ID NO: 830078

SEQ ID NO: 830080 - protein, 1481 aa, Homo sapiens
MSKTLKKKKHWLSKVQECAVSWAGPPGDFGAEIRGGAERGEFPYLGRLREEPGGGTCCVVSGKAPSPGDVLLEVNGTPVSGLTNRDTLAVIRHFREPIRLKTVKPGKVINKDLRHYLSLQFQKGSIDHKLQQVIRDNLYLRTIPCTTRAPRDGEVPGVDYNFISVEQFKALEESGALLESGTYDGNFYGTPKPPAEPSPFQPDPVDQVLFDNEFDAESQRKRTTSVSKMERMDSSLPEEEEDEDKEAINGSGNAENRERHSESSDWMKTVPSYNQTNSSMDFRNYMMRDETLEPLPKNWEMAYTDTGMIYFIDHNTKTTTWLDPRLCKKAKAPEDCEDGELPYGWEKIEDPQYGTYYVDHLNQKTQFENPVEEAKRKKQLGQVEIGSSKPDMEKSHFTRDPSQLKGVLVRASLKKSTMGFGFTIIGGDRPDEFLQVKNVLKDGPAAQDGKIAPGDVIVDINGNCVLGHTHADVVQMFQLVPVNQYVNLTLCRGYPLPDDSEDPVVDIVAATPVINGQSLTKGETCMNPQDFKPGAMVLEQNGKSGHTLTGDGLNGPSDASEQRVSMASSGSSQPELVTIPLIKGPKGFGFAIADSPTGQKVKMILDSQWCQGLQKGDIIKEIYHQNVQNLTHLQVVEVLKQFPVGADVPLLILRGGPPSPTKTAKMKTDKKENAGSLEAINEPIPQPMPFPPSIIRSGSPKLDPSEVYLKSKTLYEDKPPNTKDLDVFLRKQESGFGFRVLGGDGPDQSIYIGAIIPLGAAEKDGRLRAADELMCIDGIPVKGKSHKQVLDLMTTAARNGHVLLTVRRKIFYGEKQPEDDSSQAFISTQNGSPRLNRAEVPARPAPQEPYDVVLQRKENEGFGFVILTSKNKPPPGVIPHKIGRVIEGSPADRCGKLKVGDHISAVNGQSIVELSHDNIVQLIKDAGVTVTLTVIAEEEHHGPPSGTNSARQSPALQHRPMGQSQANHIPGDRSALEGEIGKDVSTSYRHSWSDHKHLAQPDTAVISVVGSRHNQNLGCYPVELERGPRGFGFSLRGGKEYNMGLFILRLAEDGPAIKDGRIHVGDQIVEINGEPTQGITHTRAIELIQAGGNKVLLLLRPGTGLIPDHGDWDINNPSSSNVIYDEQSPLPPSSHFASIFEESHVPVIEESLRVQICEKAEELKDIVPEKKSTLNENQPEIKHQSLLQKNVSKRDPPSSHGHSNKKNLLKVENGVTRRGRSVSPKKPASQHSEEHLDKIPSPLKNNPKRRPRDQSLSPSKGENKSCQVSTRAGSGQDQCRKSRGRSASPKKQQKIEGSKAPSNAEAKLLEGKSRRIAGYTGSNAEQIPDGKEKSDVIRKDAKQNQLEKSRTRSPEKKIKRMVEKSLPSKMTNKTTSKEVSENEKGKKVTTGETSSSNDKIGENVQLSEKRLKQEPEEKVVSNKTEDHKGKELEAADKNKETGRFKPESSSPVKKTLITPGPWKVPSGNKVTGTIGMAEKRQ

SEQ ID NO: 830081 - protein, 121 aa, Homo sapiens [sequence omitted]

SEQ ID NO: 830082 - protein, 1150 aa, Homo sapiens
MSKTLKKKKHWLSKVQECAVSWAGPPGDFGAEIRGGAERGEFPYLGRLREEPGGGTCCVVSGKAPSPGDVLLEVNGTPVSGLTNRDTLAVIRHFREPIRLKTVKPGKVINKDLRHYLSLQFQKGSIDHKLQQVIRDNLYLRTIPCTTRAPRDGEVPGVDYNFISVEQFKALEESGALLESGTYDGNFYGTPKPPAEPSPFQPDPVDQVLFDNEFDAESQRKRTTSVSKMERMDSSLPEEEEDEDKEAINGSGNAENRERHSESSDWMKTVPSYNQTNSSMDFRNYMMRDETLEPLPKNWEMAYTDTGMIYFIDHNTKTTTWLDPRLCKKAKAPEDCEDGELPYGWEKIEDPQYGTYYVDFTLVAQAGVQWHDLGSLQPPPPGFNHLNQKTQFENPVEEAKRKKQLGQVEIGSSKPDMEKSHFTRDPSQLKGVLVRASLKKSTMGFGFTIIGGDRPDEFLQVKNVLKDGPAAQDGKIAPGDVIVDINGNCVLGHTHADVVQMFQLVPVNQYVNLTLCRGYPLPDDSEDPVVDIVAATPVINGQSLTKGETCMNPQDFKPGAMVLEQNGKSGHTLTGDGLNGPSDASEQRVSMASSGSSQPELVTIPLIKGPKGFGFAIADSPTGQKVKMILDSQWCQGLQKGDIIKEIYHQNVQNLTHLQVVEVLKQFPVGADVPLLILRGGPPSPTKTAKMKTDKKENAGSLEAINEPIPQPMPFPPSIIRSGSPKLDPSEVYLKSKTLYEDKPPNTKDLDVFLRKQESGFGFRVLGGDGPDQSIYIGAIIPLGAAEKDGRLRAADELMCIDGIPVKGKSHKQVLDLMTTAARNGHVLLTVRRKIFYGEKQPEDDSSQAFISTQNGSPRLNRAEVPARPAPQEPYDVVLQRKENEGFGFVILTSKNKPPPGVIPHKIGRVIEGSPADRCGKLKVGDHISAVNGQSIVELSHDNIVQLIKDAGVTVTLTVIAEEEHHGPPSGTNSARQSPALQHRPMGQSQANHIPGDRSALEGEIGKDVSTSYRHSWSDHKHLAQPDTAVISVVGSRHNQNLGCYPVELERGPRGFGFSLRGGKEYNMGLFILRLAEDGPAIKDGRIHVGDQIVEINGEPTQGITHTRAIELIQAGGNKVLLLLRPGTGLIPDHGLAPSGLCSYVKPEQH

SEQ ID NO: 830083 - protein, 1481 aa, Homo sapiens; identical to SEQ ID NO: 830080

SEQ ID NO: 830084 - protein, 560 aa, Homo sapiens
PRLARQDTNIQNLQELNNKQTKHNKKTTTKNLINSKHRPMGQSQANHIPGDRSALEGEIGKDVSTSYRHSWSDHKHLAQPDTAVISVVGSRHNQNLGCYPVELERGPRGFGFSLRGGKEYNMGLFILRLAEDGPAIKDGRIHVGDQIVEINGEPTQGITHTRAIELIQAGGNKVLLLLRPGTGLIPDHGDWDINNPSSSNVIYDEQSPLPPSSHFASIFEESHVPVIEESLRVQICEKAEELKDIVPEKKSTLNENQPEIKHQSLLQKNVSKRDPPSSHGHSNKKNLLKVENGVTRRGRSVSPKKPASQHSEEHLDKIPSPLKNNPKRRPRDQSLSPSKGENKSCQVSTRAGSGQDQCRKSRGRSASPKKQQKIEGSKAPSNAEAKLLEGKSRRIAGYTGSNAEQIPDGKEKSDVIRKDAKQNQLEKSRTRSPEKKIKRMVEKSLPSKMTNKTTSKEVSENEKGKKVTTGETSSSNDKIGENVQLSEKRLKQEPEEKVVSNKTEDHKGKELEAADKNKETGRFKPESSSPVKKTLITPGPWKVPSGNKVTGTIGMAEKRQ

SEQ ID NO: 830085 - protein, 122 aa, Homo sapiens [sequence omitted]

SEQ ID NO: 830086 - protein, 203 aa, Homo sapiens
MANLGCWMLVLFVATWSDLGLCKKRPKPGGWNTGGSRYPGQGSPGGNRYPPQGGGGWGQPHGGGWGQPHGGGWGQPHGGGWGQPHGGGWGQGGGTHSQWNKPSKPKTNMKHMAGAAAAGAVVGGLGGYVLGSAMSRPIIHFGSDYEDRYYRENMHRYPNQVYYRPMDEYSNQNNFVHDCVNITIKQHTVTTTTKGGELHRDRR

SEQ ID NO: 830087 - protein, 203 aa, Homo sapiens; identical to SEQ ID NO: 830086

SEQ ID NO: 830088 - protein, 203 aa, Homo sapiens; identical to SEQ ID NO: 830086

SEQ ID NO: 830089 - protein, 203 aa, Homo sapiens; identical to SEQ ID NO: 830086

SEQ ID NO: 830090 - protein, 203 aa, Homo sapiens; identical to SEQ ID NO: 830086

SEQ ID NO: 830091 - protein, 120 aa, Homo sapiens
MRTVTIVKTCTVTPTKCTTGPWMSTATRTTLCTTASISQSSSTRSPQPPRGENFTETDVKMMERVVEQMCITQYERGISGLLPERIEHGPLLLSTCDPPDLFPHLPDSGMRKVFLFSPSF

SEQ ID NO: 830092 - protein, 120 aa, Homo sapiens; identical to SEQ ID NO: 830091

SEQ ID NO: 830093 - protein, 256 aa, Homo sapiens
MANLGCWMLVLFVATWSDLGLCKKRPKPGGWNTGGSRYPGQGSPGGNRYPPQGGGGWGQPHGGGWGQPHGGGWGQPHGGGWGQPHGGGWGQGGGTHSQWNKPSKPKTNMKHMAGAAAAGAVVGGLGGYVLGSAMSRPIIHFGSDYEDRYYRENMHRYPNQVYYRPMDEYSNQNNFVHDCVNITTPRGENFTETDVKMMERVVEQMCITQYERGISGLLPERIEHGPLLLSTCDPPDLFPHLPDSGMRKVFLFSPSF

SEQ ID NO: 830094 - protein, 110 aa, Homo sapiens
MVVAGGSLMVVAGGSPMVVAGDSLTGAVVGGLGGYVLGSAMSRPIIHFGSDYEDRYYRENMHRYPNQVYYRPMDEYSNQNNFVHDCVNITIKQHTVTTTTKGGELHRDRR

SEQ ID NO: 830095 - protein, 234 aa, Homo sapiens
MANLGCWMLVLFVATWSDLGLCKKRPKPGGWNTGGSRYPGQGSPGGNRYPPQGGGGWGQPHGGGWGQPHGGGWGQPHGGGWGQPHGGGWGQGGGTHSQWNKPSKPKTNMISAVTMRTVTIVKTCTVTPTKCTTGPWMSTATRTTLCTTASISQSSSTRSPQPPRGENFTETDVKMMERVVEQMCITQYERGISGLLPERIEHGPLLLSTCDPPDLFPHLPDSGMRKVFLFSPSF

SEQ ID NO: 830096 - protein, 120 aa, Homo sapiens
PKQVSVQGADWTEYRYKLETTGFYDATVSVSENIYRIQKLSSTGSYTPTQREGTRCDQQTVVKMMETADVLSDRCVSSQSKKEVHRRGSDYPDVGLAGMVLFSSPPVILLISFLIFLIVG

SEQ ID NO: 830097 - protein, 203 aa, Homo sapiens; identical to SEQ ID NO: 830086

SEQ ID NO: 830098 - protein, 203 aa, Homo sapiens; identical to SEQ ID NO: 830086

SEQ ID NO: 830099 - protein, 203 aa, Homo sapiens; identical to SEQ ID NO: 830086

SEQ ID NO: 830100 - protein, 203 aa, Homo sapiens; identical to SEQ ID NO: 830086

SEQ ID NO: 830101 - protein, 195 aa, Homo sapiens
MANLGCWMLVLFVATWSDLGLCKKRPKPGGWNTGGSRYPGQGSPGGNRYPPQGGGGWGQPHGGGWGQPHGGGWGQPHGGGWGQGGGTHSQWNKPSKPKTNMKHMAGAAAAGAVVGGLGGYVLGSAMSRPIIHFGSDYEDRYYRENMHRYPNQVYYRPMDEYSNQNNFVHDCVNITIKQHTVTTTTKGGELHRDRR

SEQ ID NO: 830102 - protein, 120 aa, Homo sapiens; identical to SEQ ID NO: 830091

SEQ ID NO: 830103 - protein, 203 aa, Homo sapiens; identical to SEQ ID NO: 830086

SEQ ID NO: 830104 - protein, 185 aa, Homo sapiens
MANLGCWMLVLFVATWSDLGLCKKRPKPGGWNTGGSRYPGQGSPGGNRYPPQGGGGWGQPHGGGWGQPHGGGWGQPHGGGWGQPHGGGWGQGGGTHSQWNKPSKPKTNMKHMAGAAAAGAVVGGLGGYVLGSAMSRPIIHFGSDYEDRYYRGNQNNFVHDCVNITIKQHTVTTTTKGGELHRDRR

SEQ ID NO: 830105 - protein, 69 aa, Homo sapiens
  misc_feature (16)..(16): Xaa can be any naturally occurring amino acid
  misc_feature (32)..(32): Xaa can be any naturally occurring amino acid
  misc_feature (35)..(35): Xaa can be any naturally occurring amino acid
  misc_feature (40)..(40): Xaa can be any naturally occurring amino acid
  misc_feature (53)..(53): Xaa can be any naturally occurring amino acid
  misc_feature (57)..(57): Xaa can be any naturally occurring amino acid
IECQGDSSMASHDRQXPRNKVFYPQIYSLAYXEMXLQSSXLWGKLHSIEDSLXFDFXHFRETQDIKRYM

SEQ ID NO: 830106 - protein, 132 aa, Homo sapiens
MAEEGIAAGGVMDVNTALQEVLKTALIHDGLARGIREAAKALDKRQAHLCVQASNCDEPMYVKLVEALLAEHQINLIKVDDNKKLGEWVGLCKIDREGNPRKVVGCSCVVVKDYGKESQAKDVIEEYFKCKK

SEQ ID NO: 830107 - protein, 86 aa, Homo sapiens
  misc_feature (3)..(4): Xaa can be any naturally occurring amino acid
SDXXAFILENNSVASTFFHETEAGKKQKSTKSSPSCHGVLACEDMGRLGAGGEAGQHWARGSVVVKDYGKESQAKDVIEEYFKCKK

SEQ ID NO: 830108 - protein, 132 aa, Homo sapiens; identical to SEQ ID NO: 830106

SEQ ID NO: 830109 - protein, 132 aa, Homo sapiens; identical to SEQ ID NO: 830106

SEQ ID NO: 830110 - protein, 132 aa, Homo sapiens; identical to SEQ ID NO: 830106

SEQ ID NO: 830111 - protein, 202 aa, Homo sapiens
MDPGRGGQKPRSHPGEERAARQGGQRNKDEAAAGARENAAEPTQRAQGGNRDEEDGGTARRKEGGAGETENTEGSSAEDKEGGTHGRETGGAAGRKERSRKRAGGGREAGDDMRGGGRATRERERGSRADEQGSRRRTSAAPGRRQAHRSSRGGGERIGEGTGKGRAGNLTNDEGTKQSRGKEEGEAGGEATRGERRGKQAT

SEQ ID NO: 830112 - protein, 132 aa, Homo sapiens; identical to SEQ ID NO: 830106

SEQ ID NO: 830113 - protein, 132 aa, Homo sapiens; identical to SEQ ID NO: 830106

SEQ ID NO: 830114 - protein, 132 aa, Homo sapiens; identical to SEQ ID NO: 830106

SEQ ID NO: 830115 - protein, 132 aa, Homo sapiens; identical to SEQ ID NO: 830106

SEQ ID NO: 830116 - protein, 132 aa, Homo sapiens; identical to SEQ ID NO: 830106

SEQ ID NO: 830117 - protein, 80 aa, Homo sapiens
MYVKLVEALCAEHQINLIKVDDNKKLGEWVGLCKIDREGKPRKVVGCSCVVVKDYGKESQAKDVIEEYFKCKNEDTNFRA

SEQ ID NO: 830118 - protein, 158 aa, Homo sapiens; identical to SEQ ID NO: 775677

SEQ ID NO: 830119 - protein, 158 aa, Homo sapiens; identical to SEQ ID NO: 775677

SEQ ID NO: 830120 - protein, 158 aa, Homo sapiens; identical to SEQ ID NO: 775677

SEQ ID NO: 830121 - protein, 158 aa, Homo sapiens; identical to SEQ ID NO: 775677

SEQ ID NO: 830122 - protein, 158 aa, Homo sapiens; identical to SEQ ID NO: 775677

SEQ ID NO: 830123 - protein, 158 aa, Homo sapiens; identical to SEQ ID NO: 775677

SEQ ID NO: 830124 - protein, 158 aa, Homo sapiens; identical to SEQ ID NO: 775677

SEQ ID NO: 830125 - protein, 158 aa, Homo sapiens; identical to SEQ ID NO: 775677

SEQ ID NO: 830126 - protein, 158 aa, Homo sapiens; identical to SEQ ID NO: 775677

SEQ ID NO: 830127 - protein, 158 aa, Homo sapiens; identical to SEQ ID NO: 775677

SEQ ID NO: 830128 - protein, 75 aa, Homo sapiens
NPPNTPIRSGAGVNRTRRMAEEGIAAGGVMDVNTALQEVLKTALIHDGLARGIREAAQSLRQAAKPIFVCACIQL

SEQ ID NO: 830129 - protein, 103 aa, Homo sapiens
ASLLLLNSRPSTLDKRQPILCVLASNCDEPMYVKLVEALCAEHQINLIKVDDNKKLGEWVGLCKIDREGKPRKVVGCSCVVVKDYGKESQAKDVIEEYFKCKK

SEQ ID NO: 830130 - protein, 81 aa, Homo sapiens
AGRVERLREDDQKGEALCAEHQINLIKVDDNKKLGEWVGLCKIDREGKPRKVVGCSCVVVKDYGKESQAKDVIEEYFKCKK

SEQ ID NO: 830131 - protein, 87 aa, Homo sapiens
MYVKLVEALCAEHQINLIKVDDNKKLGEWVGLCKIDREGKPRKVVGCSCVVVKDYGKESQAKDVIEEYFKCKNGRLCKNGRLCENGR

SEQ ID NO: 830132 - protein, 82 aa, Homo sapiens
MYVKLVEALCAEHQINLIKVDDNKKLGEWVGLCKIDREGKPRKVVGCSCVVVKDYRKEPHYEPPKVPHDAPHHEPPKEPHDE

SEQ ID NO: 830133 - protein, 158 aa, Homo sapiens; identical to SEQ ID NO: 775677

SEQ ID NO: 830134 - protein, 158 aa, Homo sapiens; identical to SEQ ID NO: 775677

SEQ ID NO: 830135 - protein, 158 aa, Homo sapiens; identical to SEQ ID NO: 775677

SEQ ID NO: 830136 - protein, 158 aa, Homo sapiens; identical to SEQ ID NO: 775677

SEQ ID NO: 830137 - protein, 158 aa, Homo sapiens; identical to SEQ ID NO: 775677

SEQ ID NO: 830138 - protein, 158 aa, Homo sapiens; identical to SEQ ID NO: 775677

SEQ ID NO: 830139 - protein, 158 aa, Homo sapiens; identical to SEQ ID NO: 775677

SEQ ID NO: 830140 - protein, 132 aa, Homo sapiens; identical to SEQ ID NO: 830106

SEQ ID NO: 830141 - protein, 132 aa, Homo sapiens; identical to SEQ ID NO: 830106

SEQ ID NO: 830142 - protein, 132 aa, Homo sapiens; identical to SEQ ID NO: 830106

SEQ ID NO: 830143 - protein, 132 aa, Homo sapiens; identical to SEQ ID NO: 830106

SEQ ID NO: 830144 - protein, 132 aa, Homo sapiens; identical to SEQ ID NO: 830106

SEQ ID NO: 830145 - protein, 132 aa, Homo sapiens; identical to SEQ ID NO: 830106

SEQ ID NO: 830146 - protein, 132 aa, Homo sapiens; identical to SEQ ID NO: 830106

SEQ ID NO: 830147 - protein, 913 aa, Homo sapiens [sequence omitted]

SEQ ID NO: 830148 - protein, 913 aa, Homo sapiens [sequence omitted]

SEQ ID NO: 830149 - protein, 758 aa, Homo sapiens
DSSGAYGCPSPHPGYLSDSHFIPDQNEDFLTKVESLHEQHSGLKQSEAESCYINIARTLDFYGVELHSGRDLHNLDLMIGIASAGVAVYRKYICTSFYPWVNILKISFKRKKFFIHQRQKQAESREHIVAFNMLNYRSCKNLWKSCVEHHTFFQAKKLLPQEKNVLSQYWTMGSRNTKKSVNNQYCKKVIGGMVWNPAMRRSLSVEHLETKSLPSRSPPITPNWRSPRLRHEIRKPRHSSADNLANEMTYITETEDVFYTYKGSLAPQDSDSEVSQNRSPHQESLSENNPAQSYLTQKSSSSVSPSSNAPGSCSPDGVDQQLLDDFHRVTKGGSTEDASQYYCDKNDNGDSYLVLIRITPDEDGKFGFNLKGGVDQKMPLVVSRINPESPADTCIPKLNEGDQIVLINGRDISEHTHDQVVMFIKASRESHSRELALVIRRRAVRSFADFKSEDELNQLFPEAIFPMCPEGGDTLEGSMAQLKKGLESGTVLIQFEQLYRKKPGLAITFAKLPQNLDKNRYKDVLPYDTTRVLLQGNEDYINASYVNMEIPAANLVNKYIATQGPLPHTCAQFWQVVWDQKLSLIVMLTTLTERGRTKCHQYWPDPPDVMNHGGFHIQCQSEDCTIAYVSREMLVTNTQTGEEHTVTHLQYVAWPDHGVPDDSSDFLEFVNYVRSLRVDSEPVLVHCSAGIGRTGVLVTMETAMCLTERNLPIYPLDIVRKMRDQRAMMVQTSSQYKFVCEAILRVYEEGLVQMLDPS

SEQ ID NO: 830150 - protein, 626 aa, Homo sapiens
MLNYRSCKNLWKSCVEHHTFFQAKKLLPQEKNVLSQYWTMGSRNTKKSVNNQYCKKVIGGMVWNPAMRRSLSVEHLETKSLPSRSPPITPNWRSPRLRHEIRKPRHSSADNLANEMTYITETEDVFYTYKGSLAPQDSDSEVSQNRSPHQESLSENNPAQSYLTQKSSSSVSPSSNAPGSCSPDGVDQQLLDDFHRVTKGGSTEDASQYYCDKNDNGDSYLVLIRITPDEDGKFGFNLKGGVDQKMPLVVSRINPESPADTCIPKLNEGDQIVLINGRDISEHTHDQVVMFIKASRESHSRELALVIRRRAVRSFADFKSEDELNQLFPEAIFPMCPEGGDTLEGSMAQLKKGLESGTVLIQFEQLYRKKPGLAITFAKLPQNLDKNRYKDVLPYDTTRVLLQGNEDYINASYVNMEIPAANLVNKYIATQGPLPHTCAQFWQVVWDQKLSLIVMLTTLTERGRTKCHQYWPDPPDVMNHGGFHIQCQSEDCTIAYVSREMLVTNTQTGEEHTVTHLQYVAWPDHGVPDDSSDFLEFVNYVRSLRVDSEPVLVHCSAGIGRTGVLVTMETAMCLTERNLPIYPLDIVRKMRDQRAMMVQTSSQYKFVCEAILRVYEEGLVQMLDPS

SEQ ID NO: 830151 - protein, 522 aa, Homo sapiens
WDEQPEKQPPPPLLGGRPLPAGGKPLCAGSSEEAGPPEGLGTPICSRSLSENNPAQSYLTQKSSSSVSPSSNAPGSCSPDGVDQQLLDDFHRVTKGGSTEDASQYYCDKNDNGDSYLVLIRITPDEDGKFGFNLKGGVDQKMPLVVSRINPESPADTCIPKLNEGDQIVLINGRDISEHTHDQVVMFIKASRESHSRELALVIRRRAVRSFADFKSEDELNQLFPEAIFPMCPEGGDTLEGSMAQLKKGLESGTVLIQFEQLYRKKPGLAITFAKLPQNLDKNRYKDVLPYDTTRVLLQGNEDYINASYVNMEIPAANLVNKYIATQGPLPHTCAQFWQVVWDQKLSLIVMLTTLTERGRTKCHQYWPDPPDVMNHGGFHIQCQSEDCTIAYVSREMLVTNTQTGEEHTVTHLQYVAWPDHGVPDDSSDFLEFVNYVRSLRVDSEPVLVHCSAGIGRTGVLVTMETAMCLTERNLPIYPLDIVRKMRDQRAMMVQTSSQYKFVCEAILRVYEEGLVQMLDPS

SEQ ID NO: 830152 - protein, 374 aa, Homo sapiens
NWDRVGMLIGRKLNTENQNLIGGEKNIHSSDEPGCDTGVYESEEDFYIIGLIDGLRRRAVRSFADFKSEDELNQLFPEAIFPMCPEGGDTLEGSMAQLKKGLESGTVLIQFEQLYRKKPGLAITFAKLPQNLDKNRYKDVLPYDTTRVLLQGNEDYINASYVNMEIPAANLVNKYIATQGPLPHTCAQFWQVVWDQKLSLIVMLTTLTERGRTKCHQYWPDPPDVMNHGGFHIQCQSEDCTIAYVSREMLVTNTQTGEEHTVTHLQYVAWPDHGVPDDSSDFLEFVNYVRSLRVDSEPVLVHCSAGIGRTGVLVTMETAMCLTERNLPIYPLDIVRKMRDQRAMMVQTSSQYKFVCEAILRVYEEGLVQMLDPS

SEQ ID NO: 830153 - protein, 211 aa, Homo sapiens
MEIPAANLVNKYIATQGPLPHTCAQFWQVVWDQKLSLIVMLTTLTERGRTKCHQYWPDPPDVMNHGGFHIQCQSEDCTIAYVSREMLVTNTQTGEEHTVTHLQYVAWPDHGVPDDSSDFLEFVNYVRSLRVDSEPVLVHCSAGIGRTGVLVTMETAMCLTERNLPIYPLDIVRKMRDQRAMMVQTSSQYKFVCEAILRVYEEGLVQMLDPS

SEQ ID NO: 830154 - protein, 262 aa, Homo sapiens
DSSGAYGCPSPHPGYLSDSHFIPDQNEDFLTKVESLHEQHSGLKQSEAESCYINIARTLDFYGVELHSGRDLHNLDLMIGIASAGVAVYRKYICTSFYPWVNILKISFKRKKFFIHQRQKQAESREHIVAFNMLNYRSCKNLWKSCVEHHTFFQAKKLLPQEKNVLSQYWTMGSRNTKKSVNNQYCKKVIGGMVWNPAMRRSLSVEHLETKSLPSRSPPITPNWYVLLFFFFVLPNSRHFISFKNKNSTYKLLKIDDLQFAF

SEQ ID NO: 830155 - protein, 758 aa, Homo sapiens; identical to SEQ ID NO: 830149

SEQ ID NO: 830156 - protein, 758 aa, Homo sapiens; identical to SEQ ID NO: 830149

SEQ ID NO: 830157 - protein, 713 aa, Homo sapiens
DSSGAYGCPSPHPGYLSDSHFIPDQNEDFLTKVESLHEQHSGLKQSEAESCYINIARTLDFYGVELHSGRDLHNLDLMIGIASAGVAVYRKYICTSFYPWVNILKISFKRKKFFIHQRQKQAESREHIVAFNMLNYRSCKNLWKSCVEHHTFFQAKKLLPQEKNVLSQYWTMGSRNTKKRSPRLRHEIRKPRHSSADNLANEMTYITETEDVFYTYKGSLAPQDSDSEVSQNRSPHQESLSENNPAQSYLTQKSSSSVSPSSNAPGSCSPDGVDQQLLDDFHRVTKGGSTEDASQYYCDKNDNGDSYLVLIRITPDEDGKFGFNLKGGVDQKMPLVVSRINPESPADTCIPKLNEGDQIVLINGRDISEHTHDQVVMFIKASRESHSRELALVIRRRAVRSFADFKSEDELNQLFPEAIFPMCPEGGDTLEGSMAQLKKGLESGTVLIQFEQLYRKKPGLAITFAKLPQNLDKNRYKDVLPYDTTRVLLQGNEDYINASYVNMEIPAANLVNKYIATQGPLPHTCAQFWQVVWDQKLSLIVMLTTLTERGRTKCHQYWPDPPDVMNHGGFHIQCQSEDCTIAYVSREMLVTNTQTGEEHTVTHLQYVAWPDHGVPDDSSDFLEFVNYVRSLRVDSEPVLVHCSAGIGRTGVLVTMETAMCLTERNLPIYPLDIVRKMRDQRAMMVQTSSQYKFVCEAILRVYEEGLVQMLDPS

SEQ ID NO: 830158 - protein, 114 aa, Homo sapiens
AGYSAIVMTSRLRALGGRINNIRTSELPKEKTRSEVICSIHFLDGVVQTFKVTKQDTGQVLLDMVHNHLGVTEKEYFGLQHDDDSVDSPRWLEASKPIRKQLKGWCDLFISVEH

SEQ ID NO: 830159 - protein, 490 aa, Homo sapiens
GQHTGGTSRSWTPRSAWPLRLHLLSSSQRRMVHQKGLSPQLPQCMLQRSLILQLSECPPQRSPPPQLLQCPPQRSPPPQLLQCPPQRSPPPQLLQCPPQRSPPPQLLQCPPQRSPPPQLLQCPPQRSPPPQLLQCPPQRSPPPQLLQCPPQRSPPPQLLQCPPQRSPPPQLLQCPPQRSPPPQLLQCPPQRSPPPQLLQCPPQRSLPSQLLQCPPQRNPPPQLLQCPPPEESASPAAAVPTPAESASFAAVVATLEEPTSPAASVPTPAAMVATLEEFTSPAASVPTSEEPASLAAAVSNPEEPTSPAAAVPTLEEPTSSAAAVLTPEELSSPAASVPTPEEPASPAAAVSNLEEPASPAAAVPTPEVAAIPAASVPTPEVPAIPAAAVPPMEEVSPIGVPFLGVSAHTDSVPISEEGTPVLEEASSTGMWIKEDLDSLVFGIKEVTSTVLHGKVPLAATAGLNSDEVIVHFDSGKGLKSKVRFAGLTWW

SEQ ID NO: 830160 - protein, 794 aa, Homo sapiens
GDCSQTEGNGEECIERVTFSFAFNHELTDVTSGPEVEVLYESNLLTDEIHLESGNVTVNQENNSLTSMGNVVTCELSVEKVCDEDGEAKELDYQATLLEDQAPAHFHRNFPEQVFQDLQRKSPESEILSLHLLVEELRLNPDGVETVNDTKPELNVASSEGGEMERRDSDSFLNIFPEKQVTKAGNTEPVLEEWIPVLQRPSRTAAVPTVKDALDAALPSPEEGTSIAAVPAPEGTAVVAALVPFPHEDILVASIVSLEEEDVTAAAVSAPERATVPAVTVSVPEGTAAVAAVSSPEETAPAVAAAITQEGMSAVAGFSPEWAALAITVPITEEDGTPEGPVTPATTVHAPEEPDTAAVRVSTPEEPASPAAAVPTPEEPTSPAAAVPTPEEPTSPAAAVPPPEEPTSPAAAVPTPEEPTSPAAAVPTPEEPTSPAAAVPTPEEPTSPAAAVPTPEEPTSPAAAVPTPEEPTSPAAAVPTPEEPASPAAAVPTPEEPASPAAAVPTPEEPAFPAPAVPTPEESASAAVAVPTPEESASPAAAVPTPAESASFAAVVATLEEPTSPAASVPTPAAMVATLEEFTSPAASVPTSEEPASLAAAVSNPEEPTSPAAAVPTLEEPTSSAAAVLTPEELSSPAASVPTPEEPASPAAAVSNLEEPASPAAAVPTPEVAAIPAASVPTPEVPAIPAAAVPPMEEVSPIGVPFLGVSAHTDSVPISEEGTPVLEEASSTGMWIKEDLDSLVFGIKEVTSTVLHGKVPLAATAGLNSDEVIVHFDSGKGLKSKVRFAGLTWW

SEQ ID NO: 830161 - protein, 121 aa, Homo sapiens
MPSDRPFKQRRSFADRCKEVQQIRDQHPSKIPVIIERYKGEKQLPVLDKTKFLVPDHVNMSELVKIIRRRLQLNPTQAFFLLVNQHSMVSVSTPIADIYEQEKDEDGFLYMVYASQETFGF

SEQ ID NO: 830162 - protein, 121 aa, Homo sapiens; identical to SEQ ID NO: 830161

SEQ ID NO: 830163 - protein, 121 aa, Homo sapiens; identical to SEQ ID NO: 830161

SEQ ID NO: 830164 - protein, 121 aa, Homo sapiens; identical to SEQ ID NO: 830161

SEQ ID NO: 830165 - protein, 123 aa, Homo sapiens
MRFFSSPCGKAAVDPADRCKEVQQIRDQHPSKIPVIIERYKGEKQLPVLDKTKFLVPDHVNMSELVKIIRRRLQLNPTQAFFLLVNQHSMVSVSTPIADIYEQEKDEDGFLYMVYASQETFGF

SEQ ID NO: 830166 - protein, 87 aa, Homo sapiens
SGRLRGCRAASRSNSLVSTFTMEKRGFYESLAKVKPGNFKVQTVSPREPASKVTEQALLRPQSKNGPQEKDCDLVDLDDASLPVSDV

SEQ ID NO: 830167 - protein, 404 aa, Homo sapiens
MPYVDRQNRICGFLDIEENENSGKFLRRYFILDTREDSFVWYMDNPQNLPSGSSRVGAIKLTYISKVSDATKLRPKAEFCFVMNAGMRKYFLQANDQQDLVEWVNVLNKAIKITVPKQSDSQPNSDNLSRHGECGKKQVSYRTDIVGGVPIITPTQKEEVNECGESIDRNNLKRSQSHLPYFTPKPPQDSAVIKAGYCVKQGAVMKNWKRRYFQLDENTIGYFKSELEKEPLRVIPLKEVHKVQECKQSDIMMRDNLFEIVTTSRTFYVQADSPEEMHSWIKAVSGAIVAQRGPGRSASSEHPPGPSESKHAFRPTNAAAATSHSTASRSNSLVSTFTMEKRGFYESLAKVKPGNFKVQTVSPREPASKVTEQALLRPQSKNGPQEKDCDLVDLDDASLPVSDV

SEQ ID NO: 830168 - protein, 334 aa, Homo sapiens
MPYVDRQNRICGFLDIEENENSGKFLRRYFILDTREDSFVWYMDNPQNLPSGSSRVGAIKLTYISKVSDATKLRPKAEFCFVMNAGMRKYFLQANDQQDLVEWVNVLNKAIKITVPKQSDSQPNSDNLSRHGECGKKQVSYRTDIVGGVPIITPTQKEEVNECGESIDRNNLKRSQSHLPYFTPKPPQDSAVIKAGYCVKQGAVMKNWKRRYFQLDENTIGYFKSELEKEPLRVIPLKEVHKVQECKQSDIMMRDNLFEIVTTSRTFYVQADSPEEMHSWIKAVSGAIVAQRGPGRSASSMRQARRLSNPCIQRYTSRAGECSTYVGSHANVPS

SEQ ID NO: 830169 - protein, 334 aa, Homo sapiens; identical to SEQ ID NO: 830168

SEQ ID NO: 830170 - protein, 404 aa, Homo sapiens; identical to SEQ ID NO: 830167

SEQ ID NO: 830171 - protein, 404 aa, Homo sapiens; identical to SEQ ID NO: 830167

SEQ ID NO: 830172 - protein, 404 aa, Homo sapiens; identical to SEQ ID NO: 830167

SEQ ID NO: 830173 - protein, 200 aa, Homo sapiens [sequence omitted]

SEQ ID NO: 830174 - protein, 200 aa, Homo sapiens [sequence omitted]

SEQ ID NO: 830175 - protein, 87 aa, Homo sapiens; identical to SEQ ID NO: 830166

SEQ ID NO: 830176 - protein, 404 aa, Homo sapiens; identical to SEQ ID NO: 830167

SEQ ID NO: 830177 - protein, 334 aa, Homo sapiens; identical to SEQ ID NO: 830168

SEQ ID NO: 830178 - protein, 404 aa, Homo sapiens; identical to SEQ ID NO: 830167

SEQ ID NO: 830179 - protein, 404 aa, Homo sapiens; identical to SEQ ID NO: 830167

SEQ ID NO: 830180 - protein, 393 aa, Homo sapiens
MPYVDRQNRICGFLDIEENENSGKFLRRYFILDTREDSFVWYMDNPQNLPSGSSRVGAIKLTYISKVSDATKLRPKAEFCFVMNAGMRKYFLQANDQQDLVEWVNVLNKAIKITVPKQSDSQPNSDNLSRHGECGKKQVSYRTDIVGGVPIITPTQKEEVNECGESIDRNNLKRSQSHLPYFTPKPPQDSAVIKAGYCVKQGAVMKNWKRRYFQLDENTIGYFKSELEKEPLRVIPLKEVHKVQECKQSDIMMRDNLFEIVTTSRTFYVQADSPEEMHSWIKAVSGAIVAQRGPGRSASSMRQARRLSNPCIQRYTSRAGECSTSIPPVLQNPNTLSVLPTQPPPPHIPQPLAATLWSQPLPWRSEDFTSLLPRSSQGTSRSRLSLQENQLPK

SEQ ID NO: 830181 - protein, 404 aa, Homo sapiens; identical to SEQ ID NO: 830167

SEQ ID NO: 830182 - protein, 356 aa, Homo sapiens
MPYVDRQNRICGFLDIEENENSGKFLRRYFILDTREDSFVWYMDNPQNLPSGSSRVGAIKLTYISKVPKQSDSQPNSDNLSRHGECGKKQVSYRTDIVGGVPIITPTQKEEVNECGESIDRNNLKRSQSHLPYFTPKPPQDSAVIKAGYCVKQGAVMKNWKRRYFQLDENTIGYFKSELEKEPLRVIPLKEVHKVQECKQSDIMMRDNLFEIVTTSRTFYVQADSPEEMHSWIKAVSGAIVAQRGPGRSASSEHPPGPSESKHAFRPTNAAAATSHSTASRSNSLVSTFTMEKRGFYESLAKVKPGNFKVQTVSPREPASKVTEQALLRPQSKNGPQEKDCDLVDLDDASLPVSDV

SEQ ID NO: 830183 - protein, 404 aa, Homo sapiens; identical to SEQ ID NO: 830167

SEQ ID NO: 830184 - protein, 334 aa, Homo sapiens; identical to SEQ ID NO: 830168

SEQ ID NO: 830185 - protein, 578 aa, Homo sapiens
MAEESRKPSAPSPPDQTPEEDLVIVKVEEDHGWDQESSLHESNPLGQEVFRLRFRQLRYQETLGPREALIQLRALCHQWLRPDLNTKEQILELLVLEQFLTILPEELQTLVKEHQLENGEEVVTLLEDLERQIDILGRPVSARVHGHRVLWEEVVHSASAPEPPNTQLQSEATQHKSPVPQESQERAMSTSQSPTRSQKGSSGDQEMTATLLTAGFQTLEKIEDMAVSLIREEWLLDPSQKDLCRDNRPENFRNMFSLGGETRSENRELASKQVISTGIQPHGETAAKCNGDVIRGLEHEEARDLLGRLERQRGNPTQERRHKCDECGKSFAQSSGLVRHWRIHTGEKPYQCNVCGKAFSYRSALLSHQDIHNKVKRYHCKECGKAFSQNTGLILHQRIHTGEKPYQCNQCGKAFSQSAGLILHQRIHSGERPYECNECGKAFSHSSHLIGHQRIHTGEKPYECDECGKTFRRSSHLIGHQRSHTGEKPYKCNECGRAFSQKSGLIEHQRIHTGERPYKCKECGKAFNGNTGLIQHLRIHTGEKPYQCNECGKAFIQRSSLIRHQRIHSGEKSESISV

SEQ ID NO: 830186 - protein, 578 aa, Homo sapiens; identical to SEQ ID NO: 830185

SEQ ID NO: 830187 - protein, 350 aa, Homo sapiens
RASVSVSNQRLLNNLPSFPIFCGPTTLGDPRLGGAPPGLSRSFRLPPLPAAMAELGLNEHHQNEVINYMRFARSKRGLRLKTVDSCFQDLKESRLVEDTFTIDEVSEVLNGLQAVVHSEVESELINTAYTNVLLLRQLFAQAEKWYLKLQTDISELENRELLEQVAEFEKAEITSSNKKPILDVTKPKLAPLNEGGTAELLNKEILRLQEENEKLKSRLKTIEIQATNALDEKSKLEKALQDLQLDQGNQKDFIKAQDLSNLENTVAALKSEFQKTLNDKTENQKSLEENLATAKHDLLRVQEQLHMAEKELEKKFQQTAAYRNMKEILTKKNDQIKDLRKRLAQYEPED

SEQ ID NO: 830188 - protein, 350 aa, Homo sapiens; identical to SEQ ID NO: 830187

SEQ ID NO: 830189 - protein, 345 aa, Homo sapiens
RASVSVSNQRLLNNLPSFPIFCGPTTLGDPRLGGAPPGLSRSFRLPPLPAAMAELGLNEHHQNEVINYMRFARSKRGLRLKTVDSCFQDLKESRLVEDTFTIDEVSEVLNGLQAVVHSEVESELINTAYTNVLLLRQLFAQAEKWYLKLQTDISELENRELLEQVAEFEKAEITSSNKKPILDVTKPKLAPLNEGGTAELLNKEILRLQEENEKLKSRLKTIEIQATNALDEKSKLEKALQDLQLDQGNQKDFIKAQDLSNLENTVAALKSEFQKTLNDKTENQKSLEENLATAKHDLLRVQEQLHMAEKELEKKFQQTAAYRNMKEILTKKNDQIKDLRKRLAQ

SEQ ID NO: 830190 - protein, 260 aa, Homo sapiens
RASVSVSNQRLLNNLPSFPIFCGPTTLGDPRLGGAPPGLSRSFRLPPLPAAMAELGLNEHHQNEVINYMRFARSKRGLRLKTVDSCFQDLKESRLVEDTFTIDEVSEVLNGLQAVVHSEVESELINTAYTNVLLLRQLFAQAEKWYLKLQTDISELENRELLEQVAEFEKAEITSSNKKPILDVTKPKLAPLNEGGTAELLNKEILRLQEENEKLKSRLKTIEIQATNALDEKSKLEKALQDLQLDQGNQKDFIKARLSN

SEQ ID NO: 830191 - protein, 159 aa, Homo sapiens
RASVSVSNQRLLNNLPSFPIFCGPTTLGDPRLGGAPPGLSRSFRLPPLPAAMAELGLNEHHQNEVINYMRFARSKRGLRLKTVDSCFQDLKESRLVEDTFTIDEVSEVLNGLQAVVHSEVESELINTAYTNVLLLRQLFAQAEKWYLKLQTDISELENR

SEQ ID NO: 830192 - protein, 159 aa, Homo sapiens; identical to SEQ ID NO: 830191

SEQ ID NO: 830193 - protein, 117 aa, Homo sapiens
LVHCNLCLPGSSNSPASASPVTGIIGACQHAWLIFIFLVETRFHHVGQAGLEHLNSGYLPASASQCAGITSVSHCAWPRNTLCSMLPTRTASLLSYPKTKRIVTQQAQNTPFCLQPL

SEQ ID NO: 830194 - protein, 110 aa, Homo sapiens
MARHFLQQRISYCNDYYNNNQCAMNHNQYYQSILIINNHNGYSNKTRNSPLSLLSPRGYPRHPSDIRPASSHMTKTSPHLNHIPNFSLIKRKPSPHSFNLIHHGRQFEVD

SEQ ID NO: 830195 - protein, 33 aa, Homo sapiens
MIACATQKLSPHRGGHEHSANTYLPTEDRSKKR

SEQ ID NO: 830196 - protein, 3677 aa, Homo sapiens
MEDEREDVQKKTFTKWVNAQFSKFGKQHIENLFSDLQDGRRLLDLLEGLTGQKLPKEKGSTRVHALNNVNKALRVLQNNNVDLVNIGSTDIVDGNHKLTLGLIWNIILHWQVKNVMKNIMAGLQQTNSEKILLSWVRQSTRNYPQVNVINFTTSWSDGLALNALIHSHRPDLFDWNSVVCQQSATQRLEHAFNIARYQLGIEKLLDPEDVDTTYPDKKSILMYITSLFQVLPQQVSIEAIQEVEMLPRPPKVTKEEHFQLHHQMHYSQQITVSLAQGYERTSSPKPRFKSYAYTQAAYVTTSDPTRSPFPSQHLEAPEDKSFGSSLMESEVNLDRYQTALEEVLSWLLSAEDTLQAQGEISNDVEVVKDQFHTHEGYMMDLTAHQGRVGNILQLGSKLIGTGKLSEDEETEVQEQMNLLNSRWECLRVASMEKQSNLHRVLMDLQNQKLKELNDWLTKTEERTRKMEEEPLGPDLEDLKRQVQQHKVLQEDLEQEQVRVNSLTHMVVVVDESSGDHATAALEEQLKVLGDRWANICRWTEDRWVLLQDILLKWQRLTEEQCLFSAWLSEKEDAVNKIHTTGFKDQNEMLSSLQKLAVLKADLEKKKQSMGKLYSLKQDLLSTLKNKSVTQKTEAWLDNFARCWDNLVQKLEKSTAQISQAVTTTQPSLTQTTVMETVTTVTTREQILVKHAQEELPPPPPQKKRQITVDSEIRKRLDVDITELHSWITRSEAVLQSPEFAIFRKEGNFSDLKEKVNAIEREKAEKFRKLQDASRSAQALVEQMVNEGVNADSIKQASEQLNSRWIEFCQLLSERLNWLEYQNNIIAFYNQLQQLEQMTTTAENWLKIQPTTPSEPTAIKSQLKICKDEVNRLSGLQPQIERLKIQSIALKEKGQGPMFLDADFVAFTNHFKQVFSDVQAREKELQTIFDTLPPMRYQETMSAIRTWVQQSETKLSIPQLSVTDYEIMEQRLGELQALQSSLQEQQSGLYYLSTTVKEMSKKAPSEISRKYQSEFEEIEGRWKKLSSQLVEHCQKLEEQMNKLRKIQNHIQTLKKWMAEVDVFLKEEWPALGDSEILKKQLKQCRLLVSDIQTIQPSLNSVNEGGQKIKNEAEPEFASRLETELKELNTQWDHMCQQVYARKEALKGGLEKTVSLQKDLSEMHEWMTQAEEEYLERDFEYKTPDELQKAVEEMKRAKEEAQQKEAKVKLLTESVNSVIAQAPPVAQEALKKELETLTTNYQWLCTRLNGKCKTLEEVWACWHELLSYLEKANKWLNEVEFKLKTTENIPGGAEEISEVLDSLENLMRHSEDNPNQIRILAQTLTDGGVMDELINEELETFNSRWRELHEEAVRRQKLLEQSIQSAQETEKSLHLIQESLTFIDKQLAAYIADKVDAAQMPQEAQKIQSDLTSHEISLEEMKKHNQGKEAAQRVLSQIDVAQKKLQDVSMKFRLFQKPANFEQRLQESKMILDEVKMHLPALETKSVEQEVVQSQLNHCVNLYKSLSEVKSEVEMVIKTGRQIVQKKQTENPKELDERVTALKLHYNELGAKVTERKQQLEKCLKLSRKMRKEMNVLTEWLAATDMELTKRSAVEGMPSNLDSEVAWGKATQKEIEKQKVHLKSITEVGEALKTVLGKKETLVEDKLSLLNSNWIAVTSRAEEWLNLLLEYQKHMETFDQNVDHITKWIIQADTLLDESEKKKPQQKEDVLKRLKAELNDIRPKVDSTRDQAANLMANRGDHCRKLVEPQISELNHRFAAISHRIKTGKASIPLKELEQFNSDIQKLLEPLEAEIQQGVNLKEEDFNKDMNEDNEGTVKELLQRGDNLQQRITDERKREEIKIKQQLLQTKHNALKDLRSQRRKKALEISHQWYQYKRQADDLLKCLDDIEKKLASLPEPRDERKIKEIDRELQKKKEELNAVRRQAEGLSEDGAAMAVEPTQIQLSKRWREIESKFAQFRRLNFAQIHTVREETMMVMTEDMPLEISYVPSTYLTEITHVSQALLEVEQLLNAPDLCAKDFEDLFKQEESLKNIKDSLQQSSGRIDIIHSKKTAALQSATPVERVKLQEALSQLDFQWEKVNKMYKDRQGRFDRSVEKWRRFHYDIKIFNQWLTEAEQFLRKTQIPENWEHAKYKWYLKELQDGIGQRQTVVRTLNATGEEIIQQSSKTDASILQEKLGSLNLRWQEVCKQLSDRKKRLEEQKNILSEFQRDLNEFVLWLEEADNIASIPLEPGKEQQLKEKLEQVKLLVEELPLRQGILKQLNETGGPVLVSAPISPEEQDKLENKLKQTNLQWIKVSRALPEKQGEIEAQIKDLGQLEKKLEDLEEQLNHLLLWLSPIRNQLEIYNQPNQEGPFDVQETEIAVQAKQPDVEEILSKGQHLYKEKPATQPVKRKLEDLSSEWKAVNRLLQELRAKQPDLAPGLTTIGASPTQTVTLVTQPVVTKETAISKLEMPSSLMLEVPALADFNRAWTELTDWLSLLDQVIKSQRVMVGDLEDINEMIIKQKATMQDLEQRRPQLEELITAAQNLKNKTSNQEARTIITDRIERIQNQWDEVQEHLQNRRQQLNEMLKDSTQWLEAKEEAEQVLGQARAKLESWKEGPYTVDAIQKKITETKQLAKDLRQWQTNVDVANDLALKLLRDYSADDTRKVHMITENINASWRSIHKRVSEREAALEETHRLLQQFPLDLEKFLAWLTEAETTANVLQDATRKERLLEDSKGVKELMKQWQDLQGEIEAHTDVYHNLDENSQKILRSLEGSDDAVLLQRRLDNMNFKWSELRKKSLNIRSHLEASSDQWKRLHLSLQELLVWLQLKDDELSRQAPIGGDFPAVQKQNDVHRAFKRELKTKEPVIMSTLETVRIFLTEQPLEGLEKLYQEPRELPPEERAQNVTRLLRKQAEEVNTEWEKLNLHSADWQRKIDETLERLQELQEATDELDLKLRQAEVIKGSWQPVGDLLIDSLQDHLEKVKALRGEIAPLKENVSHVNDLARQLTTLGIQLSPYNLSTLEDLNTRWKLLQVAVEDRVRQLHEAHRDFGPASQHFLSTSVQGPWERAISPNKVPYYINHETQTTCWDHPKMTELYQSLADLNNVRFSAYRTAMKLRRLQKALCLDLLSLSAACDALDQHNLKQNDQPMDILQIINCLTTIYDRLEQEHNNLVNVPLCVDMCLNWLLNVYDTGRTGRIRVLSFKTGIISLCKAHLEDKYRYLFKQVASSTGFCDQRRLGLLLHDSIQIPRQLGEVASFGGSNIEPSVRSCFQFANNKPEIEAALFLDWMRLEPQSMVWLPVLHRVAAAETAKHQAKCNICKECPIIGFRYRSLKHFNYDICQSCFFSGRVAKGHKMHYPMVEYCTPTTSGEDVRDFAKVLKNKFRTKRYFAKHPRMGYLPVQTVLEGDNMETPVTLINFWPVDSAPASSPQLSHDDTHSRIEHYASRLAEMENSNGSYLNDSISPNESIDDEHLLIQHYCQSLNQDSPLSQPRSPAQILISLESEERGELERILADLEEENRNLQAEYDRLKQQHEHKGLSPLPSPPEMMPTSPQSPRDAELIAEAKLLRQHKGRLEARMQILEDHNKQLESQLHRLRQLLEQPQAEAKVNGTTVSSPSTSLQRSDSSQPMLLRVVGSQTSDSMGEEDLLSPPQDTSTGLEEVMEQLNNSFPSSRGRNTPGKPMREDTM

SEQ ID NO: 830197 - protein, 3681 aa, Homo sapiens
MSEVSSDEREDVQKKTFTKWVNAQFSKFGKQHIENLFSDLQDGRRLLDLLEGLTGQKLPKEKGSTRVHALNNVNKALRVLQNNNVDLVNIGSTDIVDGNHKLTLGLIWNIILHWQVKNVMKNIMAGLQQTNSEKILLSWVRQSTRNYPQVNVINFTTSWSDGLALNALIHSHRPDLFDWNSVVCQQSATQRLEHAFNIARYQLGIEKLLDPEDVDTTYPDKKSILMYITSLFQVLPQQVSIEAIQEVEMLPRPPKVTKEEHFQLHHQMHYSQQITVSLAQGYERTSSPKPRFKSYAYTQAAYVTTSDPTRSPFPSQHLEAPEDKSFGSSLMESEVNLDRYQTALEEVLSWLLSAEDTLQAQGEISNDVEVVKDQFHTHEGYMMDLTAHQGRVGNILQLGSKLIGTGKLSEDEETEVQEQMNLLNSRWECLRVASMEKQSNLHRVLMDLQNQKLKELNDWLTKTEERTRKMEEEPLGPDLEDLKRQVQQHKVLQEDLEQEQVRVNSLTHMVVVVDESSGDHATAALEEQLKVLGDRWANICRWTEDRWVLLQDILLKWQRLTEEQCLFSAWLSEKEDAVNKIHTTGFKDQNEMLSSLQKLAVLKADLEKKKQSMGKLYSLKQDLLSTLKNKSVTQKTEAWLDNFARCWDNLVQKLEKSTAQISQAVTTTQPSLTQTTVMETVTTVTTREQILVKHAQEELPPPPPQKKRQITVDSEIRKRLDVDITELHSWITRSEAVLQSPEFAIFRKEGNFSDLKEKVNAIEREKAEKFRKLQDASRSAQALVEQMVNEGVNADSIKQASEQLNSRWIEFCQLLSERLNWLEYQNNIIAFYNQLQQLEQMTTTAENWLKIQPTTPSEPTAIKSQLKICKDEVNRLSGLQPQIERLKIQSIALKEKGQGPMFLDADFVAFTNHFKQVFSDVQAREKELQTIFDTLPPMRYQETMSAIRTWVQQSETKLSIPQLSVTDYEIMEQRLGELQALQSSLQEQQSGLYYLSTTVKEMSKKAPSEISRKYQSEFEEIEGRWKKLSSQLVEHCQKLEEQMNKLRKIQNHIQTLKKWMAEVDVFLKEEWPALGDSEILKKQLKQCRLLVSDIQTIQPSLNSVNEGGQKIKNEAEPEFASRLETELKELNTQWDHMCQQVYARKEALKGGLEKTVSLQKDLSEMHEWMTQAEEEYLERDFEYKTPDELQKAVEEMKRAKEEAQQKEAKVKLLTESVNSVIAQAPPVAQEALKKELETLTTNYQWLCTRLNGKCKTLEEVWACWHELLSYLEKANKWLNEVEFKLKTTENIPGGAEEISEVLDSLENLMRHSEDNPNQIRILAQTLTDGGVMDELINEELETFNSRWRELHEEAVRRQKLLEQSIQSAQETEKSLHLIQESLTFIDKQLAAYIADKVDAAQMPQEAQKIQSDLTSHEISLEEMKKHNQGKEAAQRVLSQIDVAQKKLQDVSMKFRLFQKPANFEQRLQESKMILDEVKMHLPALETKSVEQEVVQSQLNHCVNLYKSLSEVKSEVEMVIKTGRQIVQKKQTENPKELDERVTALKLHYNELGAKVTERKQQLEKCLKLSRKMRKEMNVLTEWLAATDMELTKRSAVEGMPSNLDSEVAWGKATQKEIEKQKVHLKSITEVGEALKTVLGKKETLVEDKLSLLNSNWIAVTSRAEEWLNLLLEYQKHMETFDQNVDHITKWIIQADTLLDESEKKKPQQKEDVLKRLKAELNDIRPKVDSTRDQAANLMANRGDHCRKLVEPQISELNHRFAAISHRIKTGKASIPLKELEQFNSDIQKLLEPLEAEIQQGVNLKEEDFNKDMNEDNEGTVKELLQRGDNLQQRITDERKREEIKIKQQLLQTKHNALKDLRSQRRKKALEISHQWYQYKRQADDLLKCLDDIEKKLASLPEPRDERKIKEIDRELQKKKEELNAVRRQAEGLSEDGAAMAVEPTQIQLSKRWREIESKFAQFRRLNFAQIHTVREETMMVMTEDMPLEISYVPSTYLTEITHVSQALLEVEQLLNAPDLCAKDFEDLFKQEESLKNIKDSLQQSSGRIDIIHSKKTAALQSATPVERVKLQEALSQLDFQWEKVNKMYKDRQGRFDRSVEKWRRFHYDIKIFNQWLTEAEQFLRKTQIPENWEHAKYKWYLKELQDGIGQRQTVVRTLNATGEEIIQQSSKTDASILQEKLGSLNLRWQEVCKQLSDRKKRLEEQKNILSEFQRDLNEFVLWLEEADNIASIPLEPGKEQQLKEKLEQVKLLVEELPLRQGILKQLNETGGPVLVSAPISPEEQDKLENKLKQTNLQWIKVSRALPEKQGEIEAQIKDLGQLEKKLEDLEEQLNHLLLWLSPIRNQLEIYNQPNQEGPFDVQETEIAVQAKQPDVEEILSKGQHLYKEKPATQPVKRKLEDLSSEWKAVNRLLQELRAKQPDLAPGLTTIGASPTQTVTLVTQPVVTKETAISKLEMPSSLMLEVPALADFNRAWTELTDWLSLLDQVIKSQRVMVGDLEDINEMIIKQKATMQDLEQRRPQLEELITAAQNLKNKTSNQEARTIITDRIERIQNQWDEVQEHLQNRRQQLNEMLKDSTQWLEAKEEAEQVLGQARAKLESWKEGPYTVDAIQKKITETKQLAKDLRQWQTNVDVANDLALKLLRDYSADDTRKVHMITENINASWRSIHKRVSEREAALEETHRLLQQFPLDLEKFLAWLTEAETTANVLQDATRKERLLEDSKGVKELMKQWQDLQGEIEAHTDVYHNLDENSQKILRSLEGSDDAVLLQRRLDNMNFKWSELRKKSLNIRSHLEASSDQWKRLHLSLQELLVWLQLKDDELSRQAPIGGDFPAVQKQNDVHRAFKRELKTKEPVIMSTLETVRIFLTEQPLEGLEKLYQEPRELPPEERAQNVTRLLRKQAEEVNTEWEKLNLHSADWQRKIDETLERLQELQEATDELDLKLRQAEVIKGSWQPVGDLLIDSLQDHLEKVKALRGEIAPLKENVSHVNDLARQLTTLGIQLSPYNLSTLEDLNTRWKLLQVAVEDRVRQLHEAHRDFGPASQHFLSTSVQGPWERAISPNKVPYYINHETQTTCWDHPKMTELYQSLADLNNVRFSAYRTAMKLRRLQKALCLDLLSLSAACDALDQHNLKQNDQPMDILQIINCLTTIYDRLEQEHNNLVNVPLCVDMCLNWLLNVYDTGRTGRIRVLSFKTGIISLCKAHLEDKYRYLFKQVASSTGFCDQRRLGLLLHDSIQIPRQLGEVASFGGSNIEPSVRSCFQFANNKPEIEAALFLDWMRLEPQSMVWLPVLHRVAAAETAKHQAKCNICKECPIIGFRYRSLKHFNYDICQSCFFSGRVAKGHKMHYPMVEYCTPTTSGEDVRDFAKVLKNKFRTKRYFAKHPRMGYLPVQTVLEGDNMETPVTLINFWPVDSAPASSPQLSHDDTHSRIEHYASRLAEMENSNGSYLNDSISPNESIDDEHLLIQHYCQSLNQDSPLSQPRSPAQILISLESEERGELERILADLEEENRNLQAEYDRLKQQHEHKGLSPLPSPPEMMPTSPQSPRDAELIAEAKLLRQHKGRLEARMQILEDHNKQLESQLHRLRQLLEQPQAEAKVNGTTVSSPSTSLQRSDSSQPMLLRVVGSQTSDSMGEEDLLSPPQDTSTGLEEVMEQLNNSFPSSRGRNTPGKPMREDTM

SEQ ID NO: 830198 - protein, 3690 aa, Homo sapiens
SLTHRVTSSSPSSTHDEREDVQKKTFTKWVNAQFSKFGKQHIENLFSDLQDGRRLLDLLEGLTGQKLPKEKGSTRVHALNNVNKALRVLQNNNVDLVNIGSTDIVDGNHKLTLGLIWNIILHWQVKNVMKNIMAGLQQTNSEKILLSWVRQSTRNYPQVNVINFTTSWSDGLALNALIHSHRPDLFDWNSVVCQQSATQRLEHAFNIARYQLGIEKLLDPEDVDTTYPDKKSILMYITSLFQVLPQQVSIEAIQEVEMLPRPPKVTKEEHFQLHHQMHYSQQITVSLAQGYERTSSPKPRFKSYAYTQAAYVTTSDPTRSPFPSQHLEAPEDKSFGSSLMESEVNLDRYQTALEEVLSWLLSAEDTLQAQGEISNDVEVVKDQFHTHEGYMMDLTAHQGRVGNILQLGSKLIGTGKLSEDEETEVQEQMNLLNSRWECLRVASMEKQSNLHRVLMDLQNQKLKELNDWLTKTEERTRKMEEEPLGPDLEDLKRQVQQHKVLQEDLEQEQVRVNSLTHMVVVVDESSGDHATAALEEQLKVLGDRWANICRWTEDRWVLLQDILLKWQRLTEEQCLFSAWLSEKEDAVNKIHTTGFKDQNEMLSSLQKLAVLKADLEKKKQSMGKLYSLKQDLLSTLKNKSVTQKTEAWLDNFARCWDNLVQKLEKSTAQISQAVTTTQPSLTQTTVMETVTTVTTREQILVKHAQEELPPPPPQKKRQITVDSEIRKRLDVDITELHSWITRSEAVLQSPEFAIFRKEGNFSDLKEKVNAIEREKAEKFRKLQDASRSAQALVEQMVNEGVNADSIKQASEQLNSRWIEFCQLLSERLNWLEYQNNIIAFYNQLQQLEQMTTTAENWLKIQPTTPSEPTAIKSQLKICKDEVNRLSGLQPQIERLKIQSIALKEKGQGPMFLDADFVAFTNHFKQVFSDVQAREKELQTIFDTLPPMRYQETMSAIRTWVQQSETKLSIPQLSVTDYEIMEQRLGELQALQSSLQEQQSGLYYLSTTVKEMSKKAPSEISRKYQSEFEEIEGRWKKLSSQLVEHCQKLEEQMNKLRKIQNHIQTLKKWMAEVDVFLKEEWPALGDSEILKKQLKQCRLLVSDIQTIQPSLNSVNEGGQKIKNEAEPEFASRLETELKELNTQWDHMCQQVYARKEALKGGLEKTVSLQKDLSEMHEWMTQAEEEYLERDFEYKTPDELQKAVEEMKRAKEEAQQKEAKVKLLTESVNSVIAQAPPVAQEALKKELETLTTNYQWLCTRLNGKCKTLEEVWACWHELLSYLEKANKWLNEVEFKLKTTENIPGGAEEISEVLDSLENLMRHSEDNPNQIRILAQTLTDGGVMDELINEELETFNSRWRELHEEAVRRQKLLEQSIQSAQETEKSLHLIQESLTFIDKQLAAYIADKVDAAQMPQEAQKIQSDLTSHEISLEEMKKHNQGKEAAQRVLSQIDVAQKKLQDVSMKFRLFQKPANFEQRLQESKMILDEVKMHLPALETKSVEQEVVQSQLNHCVNLYKSLSEVKSEVEMVIKTGRQIVQKKQTENPKELDERVTALKLHYNELGAKVTERKQQLEKCLKLSRKMRKEMNVLTEWLAATDMELTKRSAVEGMPSNLDSEVAWGKATQKEIEKQKVHLKSITEVGEALKTVLGKKETLVEDKLSLLNSNWIAVTSRAEEWLNLLLEYQKHMETFDQNVDHITKWIIQADTLLDESEKKKPQQKEDVLKRLKAELNDIRPKVDSTRDQAANLMANRGDHCRKLVEPQISELNHRFAAISHRIKTGKASIPLKELEQFNSDIQKLLEPLEAEIQQGVNLKEEDFNKDMNEDNEGTVKELLQRGDNLQQRITDERKREEIKIKQQLLQTKHNALKDLRSQRRKKALEISHQWYQYKRQADDLLKCLDDIEKKLASLPEPRDERKIKEIDRELQKKKEELNAVRRQAEGLSEDGAAMAVEPTQIQLSKRWREIESKFAQFRRLNFAQIHTVREETMMVMTEDMPLEISYVPSTYLTEITHVSQALLEVEQLLNAPDLCAKDFEDLFKQEESLKNIKDSLQQSSGRIDIIHSKKTAALQSATPVERVKLQEALSQLDFQWEKVNKMYKDRQGRFDRSVEKWRRFHYDIKIFNQWLTEAEQFLRKTQIPENWEHAKYKWYLKELQDGIGQRQTVVRTLNATGEEIIQQSSKTDASILQEKLGSLNLRWQEVCKQLSDRKKRLEEQKNILSEFQRDLNEFVLWLEEADNIASIPLEPGKEQQLKEKLEQVKLLVEELPLRQGILKQLNETGGPVLVSAPISPEEQDKLENKLKQTNLQWIKVSRALPEKQGEIEAQIKDLGQLEKKLEDLEEQLNHLLLWLSPIRNQLEIYNQPNQEGPFDVQETEIAVQAKQPDVEEILSKGQHLYKEKPATQPVKRKLEDLSSEWKAVNRLLQELRAKQPDLAPGLTTIGASPTQTVTLVTQPVVTKETAISKLEMPSSLMLEVPALADFNRAWTELTDWLSLLDQVIKSQRVMVGDLEDINEMIIKQKATMQDLEQRRPQLEELITAAQNLKNKTSNQEARTIITDRIERIQNQWDEVQEHLQNRRQQLNEMLKDSTQWLEAKEEAEQVLGQARAKLESWKEGPYTVDAIQKKITETKQLAKDLRQWQTNVDVANDLALKLLRDYSADDTRKVHMITENINASWRSIHKRVSEREAALEETHRLLQQFPLDLEKFLAWLTEAETTANVLQDATRKERLLEDSKGVKELMKQWQDLQGEIEAHTDVYHNLDENSQKILRSLEGSDDAVLLQRRLDNMNFKWSELRKKSLNIRSHLEASSDQWKRLHLSLQELLVWLQLKDDELSRQAPIGGDFPAVQKQNDVHRAFKRELKTKEPVIMSTLETVRIFLTEQPLEGLEKLYQEPRELPPEERAQNVTRLLRKQAEEVNTEWEKLNLHSADWQRKIDETLERLQELQEATDELDLKLRQAEVIKGSWQPVGDLLIDSLQDHLEKVKALRGEIAPLKENVSHVNDLARQLTTLGIQLSPYNLSTLEDLNTRWKLLQVAVEDRVRQLHEAHRDFGPASQHFLSTSVQGPWERAISPNKVPYYINHETQTTCWDHPKMTELYQSLADLNNVRFSAYRTAMKLRRLQKALCLDLLSLSAACDALDQHNLKQNDQPMDILQIINCLTTIYDRLEQEHNNLVNVPLCVDMCLNWLLNVYDTGRTGRIRVLSFKTGIISLCKAHLEDKYRYLFKQVASSTGFCDQRRLGLLLHDSIQIPRQLGEVASFGGSNIEPSVRSCFQFANNKPEIEAALFLDWMRLEPQSMVWLPVLHRVAAAETAKHQAKCNICKECPIIGFRYRSLKHFNYDICQSCFFSGRVAKGHKMHYPMVEYCTPTTSGEDVRDFAKVLKNKFRTKRYFAKHPRMGYLPVQTVLEGDNMETPVTLINFWPVDSAPASSPQLSHDDTHSRIEHYASRLAEMENSNGSYLNDSISPNESIDDEHLLIQHYCQSLNQDSPLSQPRSPAQILISLESEERGELERILADLEEENRNLQAEYDRLKQQHEHKGLSPLPSPPEMMPTSPQSPRDAELIAEAKLLRQHKGRLEARMQILEDHNKQLESQLHRLRQLLEQPQAEAKVNGTTVSSPSTSLQRSDSSQPMLLRVVGSQTSDSMGEEDLLSPPQDTSTGLEEVMEQLNNSFPSSRGRNTPGKPMREDTM

SEQ ID NO: 830199 - protein, 2344 aa, Homo sapiens
MTEIILLIFFPAYFLNAVRRQKLLEQSIQSAQETEKSLHLIQESLTFIDKQLAAYIADKVDAAQMPQEAQKIQSDLTSHEISLEEMKKHNQGKEAAQRVLSQIDVAQKKLQDVSMKFRLFQKPANFEQRLQESKMILDEVKMHLPALETKSVEQEVVQSQLNHCVNLYKSLSEVKSEVEMVIKTGRQIVQKKQTENPKELDERVTALKLHYNELGAKVTERKQQLEKCLKLSRKMRKEMNVLTEWLAATDMELTKRSAVEGMPSNLDSEVAWGKATQKEIEKQKVHLKSITEVGEALKTVLGKKETLVEDKLSLLNSNWIAVTSRAEEWLNLLLEYQKHMETFDQNVDHITKWIIQADTLLDESEKKKPQQKEDVLKRLKAELNDIRPKVDSTRDQAANLMANRGDHCRKLVEPQISELNHRFAAISHRIKTGKASIPLKELEQFNSDIQKLLEPLEAEIQQGVNLKEEDFNKDMNEDNEGTVKELLQRGDNLQQRITDERKREEIKIKQQLLQTKHNALKDLRSQRRKKALEISHQWYQYKRQADDLLKCLDDIEKKLASLPEPRDERKIKEIDRELQKKKEELNAVRRQAEGLSEDGAAMAVEPTQIQLSKRWREIESKFAQFRRLNFAQIHTVREETMMVMTEDMPLEISYVPSTYLTEITHVSQALLEVEQLLNAPDLCAKDFEDLFKQEESLKNIKDSLQQSSGRIDIIHSKKTAALQSATPVERVKLQEALSQLDFQWEKVNKMYKDRQGRFDRSVEKWRRFHYDIKIFNQWLTEAEQFLRKTQIPENWEHAKYKWYLKELQDGIGQRQTVVRTLNATGEEIIQQSSKTDASILQEKLGSLNLRWQEVCKQLSDRKKRLEEQKNILSEFQRDLNEFVLWLEEADNIASIPLEPGKEQQLKEKLEQVKLLVEELPLRQGILKQLNETGGPVLVSAPISPEEQDKLENKLKQTNLQWIKVSRALPEKQGEIEAQIKDLGQLEKKLEDLEEQLNHLLLWLSPIRNQLEIYNQPNQEGPFDVQETEIAVQAKQPDVEEILSKGQHLYKEKPATQPVKRKLEDLSSEWKAVNRLLQELRAKQPDLAPGLTTIGASPTQTVTLVTQPVVTKETAISKLEMPSSLMLEVPALADFNRAWTELTDWLSLLDQVIKSQRVMVGDLEDINEMIIKQKATMQDLEQRRPQLEELITAAQNLKNKTSNQEARTIITDRIERIQNQWDEVQEHLQNRRQQLNEMLKDSTQWLEAKEEAEQVLGQARAKLESWKEGPYTVDAIQKKITETKQLAKDLRQWQTNVDVANDLALKLLRDYSADDTRKVHMITENINASWRSIHKRVSEREAALEETHRLLQQFPLDLEKFLAWLTEAETTANVLQDATRKERLLEDSKGVKELMKQWQDLQGEIEAHTDVYHNLDENSQKILRSLEGSDDAVLLQRRLDNMNFKWSELRKKSLNIRSHLEASSDQWKRLHLSLQELLVWLQLKDDELSRQAPIGGDFPAVQKQNDVHRAFKRELKTKEPVIMSTLETVRIFLTEQPLEGLEKLYQEPRELPPEERAQNVTRLLRKQAEEVNTEWEKLNLHSADWQRKIDETLERLQELQEATDELDLKLRQAEVIKGSWQPVGDLLIDSLQDHLEKVKALRGEIAPLKENVSHVNDLARQLTTLGIQLSPYNLSTLEDLNTRWKLLQVAVEDRVRQLHEAHRDFGPASQHFLSTSVQGPWERAISPNKVPYYINHETQTTCWDHPKMTELYQSLADLNNVRFSAYRTAMKLRRLQKALCLDLLSLSAACDALDQHNLKQNDQPMDILQIINCLTTIYDRLEQEHNNLVNVPLCVDMCLNWLLNVYDTGRTGRIRVLSFKTGIISLCKAHLEDKYRYLFKQVASSTGFCDQRRLGLLLHDSIQIPRQLGEVASFGGSNIEPSVRSCFQFANNKPEIEAALFLDWMRLEPQSMVWLPVLHRVAAAETAKHQAKCNICKECPIIGFRYRSLKHFNYDICQSCFFSGRVAKGHKMHYPMVEYCTPTTSGEDVRDFAKVLKNKFRTKRYFAKHPRMGYLPVQTVLEGDNMETPVTLINFWPVDSAPASSPQLSHDDTHSRIEHYASRLAEMENSNGSYLNDSISPNESIDDEHLLIQHYCQSLNQDSPLSQPRSPAQILISLESEERGELERILADLEEENRNLQAEYDRLKQQHEHKGLSPLPSPPEMMPTSPQSPRDAELIAEAKLLRQHKGRLEARMQILEDHNKQLESQLHRLRQLLEQPQAEAKVNGTTVSSPSTSLQRSDSSQPMLLRVVGSQTSDSMGEEDLLSPPQDTSTGLEEVMEQLNNSFPSSRGRNTPGKPMREDTM

SEQ ID NO: 830200 - protein, 1230 aa, Homo sapiens
MPSSLMLEVPALADFNRAWTELTDWLSLLDQVIKSQRVMVGDLEDINEMIIKQKATMQDLEQRRPQLEELITAAQNLKNKTSNQEARTIITDRIERIQNQWDEVQEHLQNRRQQLNEMLKDSTQWLEAKEEAEQVLGQARAKLESWKEGPYTVDAIQKKITETKQLAKDLRQWQTNVDVANDLALKLLRDYSADDTRKVHMITENINASWRSIHKRVSEREAALEETHRLLQQFPLDLEKFLAWLTEAETTANVLQDATRKERLLEDSKGVKELMKQWQDLQGEIEAHTDVYHNLDENSQKILRSLEGSDDAVLLQRRLDNMNFKWSELRKKSLNIRSHLEASSDQWKRLHLSLQELLVWLQLKDDELSRQAPIGGDFPAVQKQNDVHRAFKRELKTKEPVIMSTLETVRIFLTEQPLEGLEKLYQEPRELPPEERAQNVTRLLRKQAEEVNTEWEKLNLHSADWQRKIDETLERLQELQEATDELDLKLRQAEVIKGSWQPVGDLLIDSLQDHLEKVKALRGEIAPLKENVSHVNDLARQLTTLGIQLSPYNLSTLEDLNTRWKLLQVAVEDRVRQLHEAHRDFGPASQHFLSTSVQGPWERAISPNKVPYYINHETQTTCWDHPKMTELYQSLADLNNVRFSAYRTAMKLRRLQKALCLDLLSLSAACDALDQHNLKQNDQPMDILQIINCLTTIYDRLEQEHNNLVNVPLCVDMCLNWLLNVYDTGRTGRIRVLSFKTGIISLCKAHLEDKYRYLFKQVASSTGFCDQRRLGLLLHDSIQIPRQLGEVASFGGSNIEPSVRSCFQFANNKPEIEAALFLDWMRLEPQSMVWLPVLHRVAAAETAKHQAKCNICKECPIIGFRYRSLKHFNYDICQSCFFSGRVAKGHKMHYPMVEYCTPTTSGEDVRDFAKVLKNKFRTKRYFAKHPRMGYLPVQTVLEGDNMETPASSPQLSHDDTHSRIEHYASRLAEMENSNGSYLNDSISPNESIDDEHLLIQHYCQSLNQDSPLSQPRSPAQILISLESEERGELERILADLEEENRNLQAEYDRLKQQHEHKGLSPLPSPPEMMPTSPQSPRDAELIAEAKLLRQHKGRLEARMQILEDHNKQLESQLHRLRQLLEQPQAEAKVNGTTVSSPSTSLQRSDSSQPMLLRVVGSQTSDSMGEEDLLSPPQDTSTGLEEVMEQLNNSFPSSRGHNVGSLFHMADDLGRAMESLVSVMTDEEGAE

SEQ ID NO: 830201 - protein, 1225 aa, Homo sapiens
MPSSLMLEVPALADFNRAWTELTDWLSLLDQVIKSQRVMVGDLEDINEMIIKQKATMQDLEQRRPQLEELITAAQNLKNKTSNQEARTIITDRIERIQNQWDEVQEHLQNRRQQLNEMLKDSTQWLEAKEEAEQVLGQARAKLESWKEGPYTVDAIQKKITETKQLAKDLRQWQTNVDVANDLALKLLRDYSADDTRKVHMITENINASWRSIHKRVSEREAALEETHRLLQQFPLDLEKFLAWLTEAETTANVLQDATRKERLLEDSKGVKELMKQWQDLQGEIEAHTDVYHNLDENSQKILRSLEGSDDAVLLQRRLDNMNFKWSELRKKSLNIRSHLEASSDQWKRLHLSLQELLVWLQLKDDELSRQAPIGGDFPAVQKQNDVHRAFKRELKTKEPVIMSTLETVRIFLTEQPLEGLEKLYQEPRELPPEERAQNVTRLLRKQAEEVNTEWEKLNLHSADWQRKIDETLERLQELQEATDELDLKLRQAEVIKGSWQPVGDLLIDSLQDHLEKVKALRGEIAPLKENVSHVNDLARQLTTLGIQLSPYNLSTLEDLNTRWKLLQVAVEDRVRQLHEAHRDFGPASQHFLSTSVQGPWERAISPNKVPYYINHETQTTCWDHPKMTELYQSLADLNNVRFSAYRTAMKLRRLQKALCLDLLSLSAACDALDQHNLKQNDQPMDILQIINCLTTIYDRLEQEHNNLVNVPLCVDMCLNWLLNVYDTGRTGRIRVLSFKTGIISLCKAHLEDKYRYLFKQVASSTGFCDQRRLGLLLHDSIQIPRQLGEVASFGGSNIEPSVRSCFQFANNKPEIEAALFLDWMRLEPQSMVWLPVLHRVAAAETAKHQAKCNICKECPIIGFRYRSLKHFNYDICQSCFFSGRVAKGHKMHYPMVEYCTPTTSGEDVRDFAKVLKNKFRTKRYFAKHPRMGYLPVQTVLEGDNMETPVTLINFWPVDSAPASSPQLSHDDTHSRIEHYASRLAEMENSNGSYLNDSISPNESIDDEHLLIQHYCQSLNQDSPLSQPRSPAQILISLESEERGELERILADLEEENRNLQAEYDRLKQQHEHKGLSPLPSPPEMMPTSPQSPRDAELIAEAKLLRQHKGRLEARMQILEDHNKQLESQLHRLRQLLEQPQAEAKVNGTTVSSPSTSLQRSDSSQPMLLRVVGSQTSDSMGEEDLLSPPQDTSTGLEEVMEQLNNSFPSSRGRNTPGKPMREDTM

SEQ ID NO: 830202 - protein, 1133 aa, Homo sapiens
MPSSLMLEVPALADFNRAWTELTDWLSLLDQVIKSQRVMVGDLEDINEMIIKQKATMQDLEQRRPQLEELITAAQNLKNKTSNQEARTIITDRIERIQNQWDEVQEHLQNRRQQLNEMLKDSTQWLEAKEEAEQVLGQARAKLESWKEGPYTVDAIQKKITETKQLAKDLRQWQTNVDVANDLALKLLRDYSADDTRKVHMITENINASWRSIHKRVSEREAALEETHRLLQQFPLDLEKFLAWLTEAETTANVLQDATRKERLLEDSKGVKELMKQWQDLQGEIEAHTDVYHNLDENSQKILRSLEGSDDAVLLQRRLDNMNFKWSELRKKSLNIRSHLEASSDQWKRLHLSLQELLVWLQLKDDELSRQAPIGGDFPAVQKQNDVHRAFKRELKTKEPVIMSTLETVRIFLTEQPLEGLEKLYQEPRELPPEERAQNVTRLLRKQAEEVNTEWEKLNLHSADWQRKIDETLERLQELQEATDELDLKLRQAEVIKGSWQPVGDLLIDSLQDHLEKVKALRGEIAPLKENVSHVNDLARQLTTLGIQLSPYNLSTLEDLNTRWKLLQVAVEDRVRQLHEAHRDFGPASQHFLSTSVQGPWERAISPNKVPYYINHETQTTCWDHPKMTELYQSLADLNNVRFSAYRTAMKLRRLQKALCLDLLSLSAACDALDQHNLKQNDQPMDILQIINCLTTIYDRLEQEHNNLVNVPLCVDMCLNWLLNVYDTGRTGRIRVLSFKTGIISLCKAHLEDKYRYLFKQVASSTGFCDQRRLGLLLHDSIQIPRQLGEVASFGGSNIEPSVRSCFQFANNKPEIEAALFLDWMRLEPQSMVWLPVLHRVAAAETAKHQAKCNICKECPIIGFRYRSLKHFNYDICQSCFFSGRVAKGHKMHYPMVEYCTPTTSGEDVRDFAKVLKNKFRTKRYFAKHPRMGYLPVQTVLEGDNMETNLQAEYDRLKQQHEHKGLSPLPSPPEMMPTSPQSPRDAELIAEAKLLRQHKGRLEARMQILEDHNKQLESQLHRLRQLLEQPQAEAKVNGTTVSSPSTSLQRSDSSQPMLLRVVGSQTSDSMGEEDLLSPPQDTSTGLEEVMEQLNNSFPSSRGHNVGSLFHMADDLGRAMESLVSVMTDEEGAE

SEQ ID NO: 830203 - protein, 678 aa, Homo sapiens
LRSAFSCELGRRRRRRSTFGEPGGSGKLTPPLVPTLDRGALAAMREQLKGHETQTTCWDHPKMTELYQSLADLNNVRFSAYRTAMKLRRLQKALCLDLLSLSAACDALDQHNLKQNDQPMDILQIINCLTTIYDRLEQEHNNLVNVPLCVDMCLNWLLNVYDTGRTGRIRVLSFKTGIISLCKAHLEDKYRYLFKQVASSTGFCDQRRLGLLLHDSIQIPRQLGEVASFGGSNIEPSVRSCFQFANNKPEIEAALFLDWMRLEPQSMVWLPVLHRVAAAETAKHQAKCNICKECPIIGFRYRSLKHFNYDICQSCFFSGRVAKGHKMHYPMVEYCTPTTSGEDVRDFAKVLKNKFRTKRYFAKHPRMGYLPVQTVLEGDNMETPVTLINFWPVDSAPASSPQLSHDDTHSRIEHYASRLAEMENSNGSYLNDSISPNESIDDEHLLIQHYCQSLNQDSPLSQPRSPAQILISLESEERGELERILADLEEENRNLQAEYDRLKQQHEHKGLSPLPSPPEMMPTSPQSPRDAELIAEAKLLRQHKGRLEARMQILEDHNKQLESQLHRLRQLLEQPQAEAKVNGTTVSSPSTSLQRSDSSQPMLLRVVGSQTSDSMGEEDLLSPPQDTSTGLEEVMEQLNNSFPSSRGHNVGSLFHMADDLGRAMESLVSVMTDEEGAE

SEQ ID NO: 830204 - protein, 647 aa, Homo sapiens
LRSAFSCELGRRRRRRSTFGEPGGSGKLTPPLVPTLDRGALAAMREQLKGHETQTTCWDHPKMTELYQSLADLNNVRFSAYRTAMKLRRLQKALCLDLLSLSAACDALDQHNLKQNDQPMDILQIINCLTTIYDRLEQEHNNLVNVPLCVDMCLNWLLNVYDTGRTGRIRVLSFKTGIISLCKAHLEDKYRYLFKQVASSTGFCDQRRLGLLLHDSIQIPRQLGEVASFGGSNIEPSVRSCFQFANNKPEIEAALFLDWMRLEPQSMVWLPVLHRVAAAETAKHQAKCNICKECPIIGFRYRSLKHFNYDICQSCFFSGRVAKGHKMHYPMVEYCTPTTSGEDVRDFAKVLKNKFRTKRYFAKHPRMGYLPVQTVLEGDNMETPASSPQLSHDDTHSRIEHYASRLAEMENSNGSYLNDSISPNESIDDEHLLIQHYCQSLNQDSPLSQPRSPAQILISLESEERGELERILADLEEENRNLQAEYDRLKQQHEHKGLSPLPSPPEMMPTSPQSPRDAELIAEAKLLRQHKGRLEARMQILEDHNKQLESQLHRLRQLLEQPQAEAKVNGTTVSSPSTSLQRSDSSQPMLLRVVGSQTSDSMGEEDLLSPPQDTSTGLEEVMEQLNNSFPSSRGRNTPGKPMREDTM

SEQ ID NO: 830205 - protein, 383 aa, Homo sapiens
LRSAFSCELGRRRRRRSTFGEPGGSGKLTPPLVPTLDRGALAAMREQLKGHETQTTCWDHPKMTELYQSLADLNNVRFSAYRTAMKLRRLQKALCLDLLSLSAACDALDQHNLKQNDQPMDILQIINCLTTIYDRLEQEHNNLVNVPLCVDMCLNWLLNVYDTGRTGRIRVLSFKTGIISLCKAHLEDKYRYLFKQVASSTGFCDQRRLGLLLHDSIQIPRQLGEVASFGGSNIEPSVRSCFQFANNKPEIEAALFLDWMRLEPQSMVWLPVLHRVAAAETAKHQAKCNICKECPIIGFRYRSLKHFNYDICQSCFFSGRVAKGHKMHYPMVEYCTPTTSGEDVRDFAKVLKNKFRTKRYFAKHPRMGYLPVQTVLEGDNMET

SEQ ID NO: 830206 - protein, 3685 aa, Homo sapiens
MLWWEEVEDCYEREDVQKKTFTKWVNAQFSKFGKQHIENLFSDLQDGRRLLDLLEGLTGQKLPKEKGSTRVHALNNVNKALRVLQNNNVDLVNIGSTDIVDGNHKLTLGLIWNIILHWQVKNVMKNIMAGLQQTNSEKILLSWVRQSTRNYPQVNVINFTTSWSDGLALNALIHSHRPDLFDWNSVVCQQSATQRLEHAFNIARYQLGIEKLLDPEDVDTTYPDKKSILMYITSLFQVLPQQVSIEAIQEVEMLPRPPKVTKEEHFQLHHQMHYSQQITVSLAQGYERTSSPKPRFKSYAYTQAAYVTTSDPTRSPFPSQHLEAPEDKSFGSSLMESEVNLDRYQTALEEVLSWLLSAEDTLQAQGEISNDVEVVKDQFHTHEGYMMDLTAHQGRVGNILQLGSKLIGTGKLSEDEETEVQEQMNLLNSRWECLRVASMEKQSNLHRVLMDLQNQKLKELNDWLTKTEERTRKMEEEPLGPDLEDLKRQVQQHKVLQEDLEQEQVRVNSLTHMVVVVDESSGDHATAALEEQLKVLGDRWANICRWTEDRWVLLQDILLKWQRLTEEQCLFSAWLSEKEDAVNKIHTTGFKDQNEMLSSLQKLAVLKADLEKKKQSMGKLYSLKQDLLSTLKNKSVTQKTEAWLDNFARCWDNLVQKLEKSTAQISQAVTTTQPSLTQTTVMETVTTVTTREQILVKHAQEELPPPPPQKKRQITVDSEIRKRLDVDITELHSWITRSEAVLQSPEFAIFRKEGNFSDLKEKVNAIEREKAEKFRKLQDASRSAQALVEQMVNEGVNADSIKQASEQLNSRWIEFCQLLSERLNWLEYQNNIIAFYNQLQQLEQMTTTAENWLKIQPTTPSEPTAIKSQLKICKDEVNRLSGLQPQIERLKIQSIALKEKGQGPMFLDADFVAFTNHFKQVFSDVQAREKELQTIFDTLPPMRYQETMSAIRTWVQQSETKLSIPQLSVTDYEIMEQRLGELQALQSSLQEQQSGLYYLSTTVKEMSKKAPSEISRKYQSEFEEIEGRWKKLSSQLVEHCQKLEEQMNKLRKIQNHIQTLKKWMAEVDVFLKEEWPALGDSEILKKQLKQCRLLVSDIQTIQPSLNSVNEGGQKIKNEAEPEFASRLETELKELNTQWDHMCQQVYARKEALKGGLEKTVSLQKDLSEMHEWMTQAEEEYLERDFEYKTPDELQKAVEEMKRAKEEAQQKEAKVKLLTESVNSVIAQAPPVAQEALKKELETLTTNYQWLCTRLNGKCKTLEEVWACWHELLSYLEKANKWLNEVEFKLKTTENIPGGAEEISEVLDSLENLMRHSEDNPNQIRILAQTLTDGGVMDELINEELETFNSRWRELHEEAVRRQKLLEQSIQSAQETEKSLHLIQESLTFIDKQLAAYIADKVDAAQMPQEAQKIQSDLTSHEISLEEMKKHNQGKEAAQRVLSQIDVAQKKLQDVSMKFRLFQKPANFEQRLQESKMILDEVKMHLPALETKSVEQEVVQSQLNHCVNLYKSLSEVKSEVEMVIKTGRQIVQKKQTENPKELDERVTALKLHYNELGAKVTERKQQLEKCLKLSRKMRKEMNVLTEWLAATDMELTKRSAVEGMPSNLDSEVAWGKATQKEIEKQKVHLKSITEVGEALKTVLGKKETLVEDKLSLLNSNWIAVTSRAEEWLNLLLEYQKHMETFDQNVDHITKWIIQADTLLDESEKKKPQQKEDVLKRLKAELNDIRPKVDSTRDQAANLMANRGDHCRKLVEPQISELNHRFAAISHRIKTGKASIPLKELEQFNSDIQKLLEPLEAEIQQGVNLKEEDFNKDMNEDNEGTVKELLQRGDNLQQRITDERKREEIKIKQQLLQTKHNALKDLRSQRRKKALEISHQWYQYKRQADDLLKCLDDIEKKLASLPEPRDERKIKEIDRELQKKKEELNAVRRQAEGLSEDGAAMAVEPTQIQLSKRWREIESKFAQFRRLNFAQIHTVREETMMVMTEDMPLEISYVPSTYLTEITHVSQALLEVEQLLNAPDLCAKDFEDLFKQEESLKNIKDSLQQSSGRIDIIHSKKTAALQSATPVERVKLQEALSQLDFQWEKVNKMYKDRQGRFDRSVEKWRRFHYDIKIFNQWLTEAEQFLRKTQIPENWEHAKYKWYLKELQDGIGQRQTVVRTLNATGEEIIQQSSKTDASILQEKLGSLNLRWQEVCKQLSDRKKRLEEQKNILSEFQRDLNEFVLWLEEADNIASIPLEPGKEQQLKEKLEQVKLLVEELPLRQGILKQLNETGGPVLVSAPISPEEQDKLENKLKQTNLQWIKVSRALPEKQGEIEAQIKDLGQLEKKLEDLEEQLNHLLLWLSPIRNQLEIYNQPNQEGPFDVQETEIAVQAKQPDVEEILSKGQHLYKEKPATQPVKRKLEDLSSEWKAVNRLLQELRAKQPDLAPGLTTIGASPTQTVTLVTQPVVTKETAISKLEMPSSLMLEVPALADFNRAWTELTDWLSLLDQVIKSQRVMVGDLEDINEMIIKQKATMQDLEQRRPQLEELITAAQNLKNKTSNQEARTIITDRIERIQNQWDEVQEHLQNRRQQLNEMLKDSTQWLEAKEEAEQVLGQARAKLESWKEGPYTVDAIQKKITETKQLAKDLRQWQTNVDVANDLALKLLRDYSADDTRKVHMITENINASWRSIHKRVSEREAALEETHRLLQQFPLDLEKFLAWLTEAETTANVLQDATRKERLLEDSKGVKELMKQWQDLQGEIEAHTDVYHNLDENSQKILRSLEGSDDAVLLQRRLDNMNFKWSELRKKSLNIRSHLEASSDQWKRLHLSLQELLVWLQLKDDELSRQAPIGGDFPAVQKQNDVHRAFKRELKTKEPVIMSTLETVRIFLTEQPLEGLEKLYQEPRELPPEERAQNVTRLLRKQAEEVNTEWEKLNLHSADWQRKIDETLERLQELQEATDELDLKLRQAEVIKGSWQPVGDLLIDSLQDHLEKVKALRGEIAPLKENVSHVNDLARQLTTLGIQLSPYNLSTLEDLNTRWKLLQVAVEDRVRQLHEAHRDFGPASQHFLSTSVQGPWERAISPNKVPYYINHETQTTCWDHPKMTELYQSLADLNNVRFSAYRTAMKLRRLQKALCLDLLSLSAACDALDQHNLKQNDQPMDILQIINCLTTIYDRLEQEHNNLVNVPLCVDMCLNWLLNVYDTGRTGRIRVLSFKTGIISLCKAHLEDKYRYLFKQVASSTGFCDQRRLGLLLHDSIQIPRQLGEVASFGGSNIEPSVRSCFQFANNKPEIEAALFLDWMRLEPQSMVWLPVLHRVAAAETAKHQAKCNICKECPIIGFRYRSLKHFNYDICQSCFFSGRVAKGHKMHYPMVEYCTPTTSGEDVRDFAKVLKNKFRTKRYFAKHPRMGYLPVQTVLEGDNMETPVTLINFWPVDSAPASSPQLSHDDTHSRIEHYASRLAEMENSNGSYLNDSISPNESIDDEHLLIQHYCQSLNQDSPLSQPRSPAQILISLESEERGELERILADLEEENRNLQAEYDRLKQQHEHKGLSPLPSPPEMMPTSPQSPRDAELIAEAKLLRQHKGRLEARMQILEDHNKQLESQLHRLRQLLEQPQAEAKVNGTTVSSPSTSLQRSDSSQPMLLRVVGSQTSDSMGEEDLLSPPQDTSTGLEEVMEQLNNSFPSSRGRNTPGKPMREDTM

SEQ ID NO: 830207 - protein, 1230 aa, Homo sapiens; identical to SEQ ID NO: 830200

SEQ ID NO: 830208 - protein, 1230 aa, Homo sapiens; identical to SEQ ID NO: 830200

SEQ ID NO: 830209 - protein, 2400 aa, Homo sapiens
MEDEREDVQKKTFTKWVNAQFSKFGKQHIENLFSDLQDGRRLLDLLEGLTGQKLPKEKGSTRVHALNNVNKALRVLQNNNVDLVNIGSTDIVDGNHKLTLGLIWNIILHWQVKNVMKNIMAGLQQTNSEKILLSWVRQSTRNYPQVNVINFTTSWSDGLALNALIHSHRPDLFDWNSVVCQQSATQRLEHAFNIARYQLGIEKLLDPEDVDTTYPDKKSILMYITSLFQVLPQQVSIEAIQEVEMLPRPPKVTKEEHFQLHHQMHYSQQITVSLAQGYERTSSPKPRFKSYAYTQAAYVTTSDPTRSPFPSQHLEAPEDKSFGSSLMESEVNLDRYQTALEEVLSWLLSAEDTLQAQGEISNDVEVVKDQFHTHEGYMMDLTAHQGRVGNILQLGSKLIGTGKLSEDEETEVQEQMNLLNSRWECLRVASMEKQSNLHRVLMDLQNQKLKELNDWLTKTEERTRKMEEEPLGPDLEDLKRQVQQHKVLQEDLEQEQVRVNSLTHMVVVVDESSGDHATAALEEQLKVLGDRWANICRWTEDRWVLLQDILLKWQRLTEEQCLFSAWLSEKEDAVNKIHTTGFKDQNEMLSSLQKLAVLKADLEKKKQSMGKLYSLKQDLLSTLKNKSVTQKTEAWLDNFARCWDNLVQKLEKSTAQISQAVTTTQPSLTQTTVMETVTTVTTREQILVKHAQEELPPPPPQKKRQITVDSEIRKRLDVDITELHSWITRSEAVLQSPEFAIFRKEGNFSDLKEKVNAIEREKAEKFRKLQDASRSAQALVEQMVNEGVNADSIKQASEQLNSRWIEFCQLLSERLNWLEYQNNIIAFYNQLQQLEQMTTTAENWLKIQPTTPSEPTAIKSQLKICKDEVNRLSGLQPQIERLKIQSIALKEKGQGPMFLDADFVAFTNHFKQVFSDVQAREKELQTIFDTLPPMRYQETMSAIRTWVQQSETKLSIPQLSVTDYEIMEQRLGELQALQSSLQEQQSGLYYLSTTVKEMSKKAPSEISRKYQSEFEEIEGRWKKLSSQLVEHCQKLEEQMNKLRKIQNHIQTLKKWMAEVDVFLKEEWPALGDSEILKKQLKQCRLLVSDIQTIQPSLNSVNEGGQKIKNEAEPEFASRLETELKELNTQWDHMCQQVYARKEALKGGLEKTVSLQKDLSEMHEWMTQAEEEYLERDFEYKTPDELQKAVEEMKRAKEEAQQKEAKVKLLTESVNSVIAQAPPVAQEALKKELETLTTNYQWLCTRLNGKCKTLEEVWACWHELLSYLEKANKWLNEVEFKLKTTENIPGGAEEISEVLDSLENLMRHSEDNPNQIRILAQTLTDGGVMDELINEELETFNSRWRELHEEAVRRQKLLEQSIQSAQETEKSLHLIQESLTFIDKQLAAYIADKVDAAQMPQEAQKIQSDLTSHEISLEEMKKHNQGKEAAQRVLSQIDVAQKKLQDVSMKFRLFQKPANFEQRLQESKMILDEVKMHLPALETKSVEQEVVQSQLNHCVNLYKSLSEVKSEVEMVIKTGRQIVQKKQTENPKELDERVTALKLHYNELGAKVTERKQQLEKCLKLSRKMRKEMNVLTEWLAATDMELTKRSAVEGMPSNLDSEVAWGKATQKEIEKQKVHLKSITEVGEALKTVLGKKETLVEDKLSLLNSNWIAVTSRAEEWLNLLLEYQKHMETFDQNVDHITKWIIQADTLLDESEKKKPQQKEDVLKRLKAELNDIRPKVDSTRDQAANLMANRGDHCRKLVEPQISELNHRFAAISHRIKTGKASIPLKELEQFNSDIQKLLEPLEAEIQQGVNLKEEDFNKDMNEDNEGTVKELLQRGDNLQQRITDERKREEIKIKQQLLQTKHNALKDLRSQRRKKALEISHQWYQYKRQADDLLKCLDDIEKKLASLPEPRDERKIKEIDRELQKKKEELNAVRRQAEGLSEDGAAMAVEPTQIQLSKRWREIESKFAQFRRLNFAQIHTVREETMMVMTEDMPLEISYVPSTYLTEITHVSQALLEVEQLLNAPDLCAKDFEDLFKQEESLKNIKDSLQQSSGRIDIIHSKKTAALQSATPVERVKLQEALSQLDFQWEKVNKMYKDRQGRFDRSVEKWRRFHYDIKIFNQWLTEAEQFLRKTQIPENWEHAKYKWYLKELQDGIGQRQTVVRTLNATGEEIIQQSSKTDASILQEKLGSLNLRWQEVCKQLSDRKKRLEEQKNILSEFQRDLNEFVLWLEEADNIASIPLEPGKEQQLKEKLEQVKLLVEELPLRQGILKQLNETGGPVLVSAPISPEEQDKLENKLKQTNLQWIKVSRALPEKQGEIEAQIKDLGQLEKKLEDLEEQLNHLLLWLSPIRNQLEIYNQPNQEGPFDVQETEIAVQAKQPDVEEILSKGQHLYKEKPATQPVKLLLRLLLW

SEQ ID NO: 830210 - protein, 2400 aa, Homo sapiens; identical to SEQ ID NO: 830209

SEQ ID NO: 830211 - protein, 2400 aa, Homo sapiens; identical to SEQ ID NO: 830209

SEQ ID NO: 830212 - protein, 33 aa, Homo sapiens
MVWLPVLHRVAAAETAKHQAKCNICKECPIIGF

SEQ ID NO: 830213 - protein, 3685 aa, Homo sapiens; identical to SEQ ID NO: 830206

SEQ ID NO: 830214 - protein, 3562 aa, Homo sapiens
MKNIMAGLQQTNSEKILLSWVRQSTRNYPQVNVINFTTSWSDGLALNALIHSHRPDLFDWNSVVCQQSATQRLEHAFNIARYQLGIEKLLDPEDVDTTYPDKKSILMYITSLFQVLPQQVSIEAIQEVEMLPRPPKVTKEEHFQLHHQMHYSQQITVSLAQGYERTSSPKPRFKSYAYTQAAYVTTSDPTRSPFPSQHLEAPEDKSFGSSLMESEVNLDRYQTALEEVLSWLLSAEDTLQAQGEISNDVEVVKDQFHTHEGYMMDLTAHQGRVGNILQLGSKLIGTGKLSEDEETEVQEQMNLLNSRWECLRVASMEKQSNLHRVLMDLQNQKLKELNDWLTKTEERTRKMEEEPLGPDLEDLKRQVQQHKVLQEDLEQEQVRVNSLTHMVVVVDESSGDHATAALEEQLKVLGDRWANICRWTEDRWVLLQDILLKWQRLTEEQCLFSAWLSEKEDAVNKIHTTGFKDQNEMLSSLQKLAVLKADLEKKKQSMGKLYSLKQDLLSTLKNKSVTQKTEAWLDNFARCWDNLVQKLEKSTAQISQAVTTTQPSLTQTTVMETVTTVTTREQILVKHAQEELPPPPPQKKRQITVDSEIRKRLDVDITELHSWITRSEAVLQSPEFAIFRKEGNFSDLKEKVNAIEREKAEKFRKLQDASRSAQALVEQMVNEGVNADSIKQASEQLNSRWIEFCQLLSERLNWLEYQNNIIAFYNQLQQLEQMTTTAENWLKIQPTTPSEPTAIKSQLKICKDEVNRLSGLQPQIERLKIQSIALKEKGQGPMFLDADFVAFTNHFKQVFSDVQAREKELQTIFDTLPPMRYQETMSAIRTWVQQSETKLSIPQLSVTDYEIMEQRLGELQALQSSLQEQQSGLYYLSTTVKEMSKKAPSEISRKYQSEFEEIEGRWKKLSSQLVEHCQKLEEQMNKLRKIQNHIQTLKKWMAEVDVFLKEEWPALGDSEILKKQLKQCRLLVSDIQTIQPSLNSVNEGGQKIKNEAEPEFASRLETELKELNTQWDHMCQQVYARKEALKGGLEKTVSLQKDLSEMHEWMTQAEEEYLERDFEYKTPDELQKAVEEMKRAKEEAQQKEAKVKLLTESVNSVIAQAPPVAQEALKKELETLTTNYQWLCTRLNGKCKTLEEVWACWHELLSYLEKANKWLNEVEFKLKTTENIPGGAEEISEVLDSLENLMRHSEDNPNQIRILAQTLTDGGVMDELINEELETFNSRWRELHEEAVRRQKLLEQSIQSAQETEKSLHLIQESLTFIDKQLAAYIADKVDAAQMPQEAQKIQSDLTSHEISLEEMKKHNQGKEAAQRVLSQIDVAQKKLQDVSMKFRLFQKPANFEQRLQESKMILDEVKMHLPALETKSVEQEVVQSQLNHCVNLYKSLSEVKSEVEMVIKTGRQIVQKKQTENPKELDERVTALKLHYNELGAKVTERKQQLEKCLKLSRKMRKEMNVLTEWLAATDMELTKRSAVEGMPSNLDSEVAWGKATQKEIEKQKVHLKSITEVGEALKTVLGKKETLVEDKLSLLNSNWIAVTSRAEEWLNLLLEYQKHMETFDQNVDHITKWIIQADTLLDESEKKKPQQKEDVLKRLKAELNDIRPKVDSTRDQAANLMANRGDHCRKLVEPQISELNHRFAAISHRIKTGKASIPLKELEQFNSDIQKLLEPLEAEIQQGVNLKEEDFNKDMNEDNEGTVKELLQRGDNLQQRITDERKREEIKIKQQLLQTKHNALKDLRSQRRKKALEISHQWYQYKRQADDLLKCLDDIEKKLASLPEPRDERKIKEIDRELQKKKEELNAVRRQAEGLSEDGAAMAVEPTQIQLSKRWREIESKFAQFRRLNFAQIHTVREETMMVMTEDMPLEISYVPSTYLTEITHVSQALLEVEQLLNAPDLCAKDFEDLFKQEESLKNIKDSLQQSSGRIDIIHSKKTAALQSATPVERVKLQEALSQLDFQWEKVNKMYKDRQGRFDRSVEKWRRFHYDIKIFNQWLTEAEQFLRKTQIPENWEHAKYKWYLKELQDGIGQRQTVVRTLNATGEEIIQQSSKTDASILQEKLGSLNLRWQEVCKQLSDRKKRLEEQKNILSEFQRDLNEFVLWLEEADNIASIPLEPGKEQQLKEKLEQVKLLVEELPLRQGILKQLNETGGPVLVSAPISPEEQDKLENKLKQTNLQWIKVSRALPEKQGEIEAQIKDLGQLEKKLEDLEEQLNHLLLWLSPIRNQLEIYNQPNQEGPFDVQETEIAVQAKQPDVEEILSKGQHLYKEKPATQPVKRKLEDLSSEWKAVNRLLQELRAKQPDLAPGLTTIGASPTQTVTLVTQPVVTKETAISKLEMPSSLMLEVPALADFNRAWTELTDWLSLLDQVIKSQRVMVGDLEDINEMIIKQKATMQDLEQRRPQLEELITAAQNLKNKTSNQEARTIITDRIERIQNQWDEVQEHLQNRRQQLNEMLKDSTQWLEAKEEAEQVLGQARAKLESWKEGPYTVDAIQKKITETKQLAKDLRQWQTNVDVANDLALKLLRDYSADDTRKVHMITENINASWRSIHKRVSEREAALEETHRLLQQFPLDLEKFLAWLTEAETTANVLQDATRKERLLEDSKGVKELMKQWQDLQGEIEAHTDVYHNLDENSQKILRSLEGSDDAVLLQRRLDNMNFKWSELRKKSLNIRSHLEASSDQWKRLHLSLQELLVWLQLKDDELSRQAPIGGDFPAVQKQNDVHRAFKRELKTKEPVIMSTLETVRIFLTEQPLEGLEKLYQEPRELPPEERAQNVTRLLRKQAEEVNTEWEKLNLHSADWQRKIDETLERLQELQEATDELDLKLRQAEVIKGSWQPVGDLLIDSLQDHLEKVKALRGEIAPLKENVSHVNDLARQLTTLGIQLSPYNLSTLEDLNTRWKLLQVAVEDRVRQLHEAHRDFGPASQHFLSTSVQGPWERAISPNKVPYYINHETQTTCWDHPKMTELYQSLADLNNVRFSAYRTAMKLRRLQKALCLDLLSLSAACDALDQHNLKQNDQPMDILQIINCLTTIYDRLEQEHNNLVNVPLCVDMCLNWLLNVYDTGRTGRIRVLSFKTGIISLCKAHLEDKYRYLFKQVASSTGFCDQRRLGLLLHDSIQIPRQLGEVASFGGSNIEPSVRSCFQFANNKPEIEAALFLDWMRLEPQSMVWLPVLHRVAAAETAKHQAKCNICKECPIIGFRYRSLKHFNYDICQSCFFSGRVAKGHKMHYPMVEYCTPTTSGEDVRDFAKVLKNKFRTKRYFAKHPRMGYLPVQTVLEGDNMETPVTLINFWPVDSAPASSPQLSHDDTHSRIEHYASRLAEMENSNGSYLNDSISPNESIDDEHLLIQHYCQSLNQDSPLSQPRSPAQILISLESEERGELERILADLEEENRNLQAEYDRLKQQHEHKGLSPLPSPPEMMPTSPQSPRDAELIAEAKLLRQHKGRLEARMQILEDHNKQLESQLHRLRQLLEQPQAEAKVNGTTVSSPSTSLQRSDSSQPMLLRVVGSQTSDSMGEEDLLSPPQDTSTGLEEVMEQLNNSFPSSRGRNTPGKPMREDTM

SEQ ID NO: 830215 - protein, 2341 aa, Homo sapiens
MSARKLRNLSYKKAVRRQKLLEQSIQSAQETEKSLHLIQESLTFIDKQLAAYIADKVDAAQMPQEAQKIQSDLTSHEISLEEMKKHNQGKEAAQRVLSQIDVAQKKLQDVSMKFRLFQKPANFEQRLQESKMILDEVKMHLPALETKSVEQEVVQSQLNHCVNLYKSLSEVKSEVEMVIKTGRQIVQKKQTENPKELDERVTALKLHYNELGAKVTERKQQLEKCLKLSRKMRKEMNVLTEWLAATDMELTKRSAVEGMPSNLDSEVAWGKATQKEIEKQKVHLKSITEVGEALKTVLGKKETLVEDKLSLLNSNWIAVTSRAEEWLNLLLEYQKHMETFDQNVDHITKWIIQADTLLDESEKKKPQQKEDVLKRLKAELNDIRPKVDSTRDQAANLMANRGDHCRKLVEPQISELNHRFAAISHRIKTGKASIPLKELEQFNSDIQKLLEPLEAEIQQGVNLKEEDFNKDMNEDNEGTVKELLQRGDNLQQRITDERKREEIKIKQQLLQTKHNALKDLRSQRRKKALEISHQWYQYKRQADDLLKCLDDIEKKLASLPEPRDERKIKEIDRELQKKKEELNAVRRQAEGLSEDGAAMAVEPTQIQLSKRWREIESKFAQFRRLNFAQIHTVREETMMVMTEDMPLEISYVPSTYLTEITHVSQALLEVEQLLNAPDLCAKDFEDLFKQEESLKNIKDSLQQSSGRIDIIHSKKTAALQSATPVERVKLQEALSQLDFQWEKVNKMYKDRQGRFDRSVEKWRRFHYDIKIFNQWLTEAEQFLRKTQIPENWEHAKYKWYLKELQDGIGQRQTVVRTLNATGEEIIQQSSKTDASILQEKLGSLNLRWQEVCKQLSDRKKRLEEQKNILSEFQRDLNEFVLWLEEADNIASIPLEPGKEQQLKEKLEQVKLLVEELPLRQGILKQLNETGGPVLVSAPISPEEQDKLENKLKQTNLQWIKVSRALPEKQGEIEAQIKDLGQLEKKLEDLEEQLNHLLLWLSPIRNQLEIYNQPNQEGPFDVQETEIAVQAKQPDVEEILSKGQHLYKEKPATQPVKRKLEDLSSEWKAVNRLLQELRAKQPDLAPGLTTIGASPTQTVTLVTQPVVTKETAISKLEMPSSLMLEVPALADFNRAWTELTDWLSLLDQVIKSQRVMVGDLEDINEMIIKQKATMQDLEQRRPQLEELITAAQNLKNKTSNQEARTIITDRIERIQNQWDEVQEHLQNRRQQLNEMLKDSTQWLEAKEEAEQVLGQARAKLESWKEGPYTVDAIQKKITETKQLAKDLRQWQTNVDVANDLALKLLRDYSADDTRKVHMITENINASWRSIHKRVSEREAALEETHRLLQQFPLDLEKFLAWLTEAETTANVLQDATRKERLLEDSKGVKELMKQWQDLQGEIEAHTDVYHNLDENSQKILRSLEGSDDAVLLQRRLDNMNFKWSELRKKSLNIRSHLEASSDQWKRLHLSLQELLVWLQLKDDELSRQAPIGGDFPAVQKQNDVHRAFKRELKTKEPVIMSTLETVRIFLTEQPLEGLEKLYQEPRELPPEERAQNVTRLLRKQAEEVNTEWEKLNLHSADWQRKIDETLERLQELQEATDELDLKLRQAEVIKGSWQPVGDLLIDSLQDHLEKVKALRGEIAPLKENVSHVNDLARQLTTLGIQLSPYNLSTLEDLNTRWKLLQVAVEDRVRQLHEAHRDFGPASQHFLSTSVQGPWERAISPNKVPYYINHETQTTCWDHPKMTELYQSLADLNNVRFSAYRTAMKLRRLQKALCLDLLSLSAACDALDQHNLKQNDQPMDILQIINCLTTIYDRLEQEHNNLVNVPLCVDMCLNWLLNVYDTGRTGRIRVLSFKTGIISLCKAHLEDKYRYLFKQVASSTGFCDQRRLGLLLHDSIQIPRQLGEVASFGGSNIEPSVRSCFQFANNKPEIEAALFLDWMRLEPQSMVWLPVLHRVAAAETAKHQAKCNICKECPIIGFRYRSLKHFNYDICQSCFFSGRVAKGHKMHYPMVEYCTPTTSGEDVRDFAKVLKNKFRTKRYFAKHPRMGYLPVQTVLEGDNMETPVTLINFWPVDSAPASSPQLSHDDTHSRIEHYASRLAEMENSNGSYLNDSISPNESIDDEHLLIQHYCQSLNQDSPLSQPRSPAQILISLESEERGELERILADLEEENRNLQAEYDRLKQQHEHKGLSPLPSPPEMMPTSPQSPRDAELIAEAKLLRQHKGRLEARMQILEDHNKQLESQLHRLRQLLEQPQAEAKVNGTTVSSPSTSLQRSDSSQPMLLRVVGSQTSDSMGEEDLLSPPQDTSTGLEEVMEQLNNSFPSSRGRNTPGKPMREDTM

SEQ ID NO: 830216 - protein, 665 aa, Homo sapiens
LRSAFSCELGRRRRRRSTFGEPGGSGKLTPPLVPTLDRGALAAMREQLKGHETQTTCWDHPKMTELYQSLADLNNVRFSAYRTAMKLRRLQKALCLDLLSLSAACDALDQHNLKQNDQPMDILQIINCLTTIYDRLEQEHNNLVNVPLCVDMCLNWLLNVYDTGRTGRIRVLSFKTGIISLCKAHLEDKYRYLFKQVASSTGFCDQRRLGLLLHDSIQIPRQLGEVASFGGSNIEPSVRSCFQFANNKPEIEAALFLDWMRLEPQSMVWLPVLHRVAAAETAKHQAKCNICKECPIIGFRYRSLKHFNYDICQSCFFSGRVAKGHKMHYPMVEYCTPTTSGEDVRDFAKVLKNKFRTKRYFAKHPRMGYLPVQTVLEGDNMETPASSPQLSHDDTHSRIEHYASRLAEMENSNGSYLNDSISPNESIDDEHLLIQHYCQSLNQDSPLSQPRSPAQILISLESEERGELERILADLEEENRNLQAEYDRLKQQHEHKGLSPLPSPPEMMPTSPQSPRDAELIAEAKLLRQHKGRLEARMQILEDHNKQLESQLHRLRQLLEQPQAEAKVNGTTVSSPSTSLQRSDSSQPMLLRVVGSQTSDSMGEEDLLSPPQDTSTGLEEVMEQLNNSFPSSRGHNVGSLFHMADDLGRAMESLVSVMTDEEGAE

SEQ ID NO: 830217 - protein, 1243 aa, Homo sapiens
MPSSLMLEVPALADFNRAWTELTDWLSLLDQVIKSQRVMVGDLEDINEMIIKQKATMQDLEQRRPQLEELITAAQNLKNKTSNQEARTIITDRIERIQNQWDEVQEHLQNRRQQLNEMLKDSTQWLEAKEEAEQVLGQARAKLESWKEGPYTVDAIQKKITETKQLAKDLRQWQTNVDVANDLALKLLRDYSADDTRKVHMITENINASWRSIHKRVSEREAALEETHRLLQQFPLDLEKFLAWLTEAETTANVLQDATRKERLLEDSKGVKELMKQWQDLQGEIEAHTDVYHNLDENSQKILRSLEGSDDAVLLQRRLDNMNFKWSELRKKSLNIRSHLEASSDQWKRLHLSLQELLVWLQLKDDELSRQAPIGGDFPAVQKQNDVHRAFKRELKTKEPVIMSTLETVRIFLTEQPLEGLEKLYQEPRELPPEERAQNVTRLLRKQAEEVNTEWEKLNLHSADWQRKIDETLERLQELQEATDELDLKLRQAEVIKGSWQPVGDLLIDSLQDHLEKVKALRGEIAPLKENVSHVNDLARQLTTLGIQLSPYNLSTLEDLNTRWKLLQVAVEDRVRQLHEAHRDFGPASQHFLSTSVQGPWERAISPNKVPYYINHETQTTCWDHPKMTELYQSLADLNNVRFSAYRTAMKLRRLQKALCLDLLSLSAACDALDQHNLKQNDQPMDILQIINCLTTIYDRLEQEHNNLVNVPLCVDMCLNWLLNVYDTGRTGRIRVLSFKTGIISLCKAHLEDKYRYLFKQVASSTGFCDQRRLGLLLHDSIQIPRQLGEVASFGGSNIEPSVRSCFQFANNKPEIEAALFLDWMRLEPQSMVWLPVLHRVAAAETAKHQAKCNICKECPIIGFRYRSLKHFNYDICQSCFFSGRVAKGHKMHYPMVEYCTPTTSGEDVRDFAKVLKNKFRTKRYFAKHPRMGYLPVQTVLEGDNMETPVTLINFWPVDSAPASSPQLSHDDTHSRIEHYASRLAEMENSNGSYLNDSISPNESIDDEHLLIQHYCQSLNQDSPLSQPRSPAQILISLESEERGELERILADLEEENRNLQAEYDRLKQQHEHKGLSPLPSPPEMMPTSPQSPRDAELIAEAKLLRQHKGRLEARMQILEDHNKQLESQLHRLRQLLEQPQAEAKVNGTTVSSPSTSLQRSDSSQPMLLRVVGSQTSDSMGEEDLLSPPQDTSTGLEEVMEQLNNSFPSSRGHNVGSLFHMADDLGRAMESLVSVMTDEEGAE

SEQ ID NO: 830218 - protein, 1105 aa, Homo sapiens
MPSSLMLEVPALADFNRAWTELTDWLSLLDQVIKSQRVMVGDLEDINEMIIKQKATMQDLEQRRPQLEELITAAQNLKNKTSNQEARTIITDRIERIQNQWDEVQEHLQNRRQQLNEMLKDSTQWLEAKEEAEQVLGQARAKLESWKEGPYTVDAIQKKITETKQLAKDLRQWQTNVDVANDLALKLLRDYSADDTRKVHMITENINASWRSIHKRVSEREAALEETHRLLQQFPLDLEKFLAWLTEAETTANVLQDATRKERLLEDSKGVKELMKQWQDLQGEIEAHTDVYHNLDENSQKILRSLEGSDDAVLLQRRLDNMNFKWSELRKKSLNIRSHLEASSDQWKRLHLSLQELLVWLQLKDDELSRQAPIGGDFPAVQKQNDVHRAFKRELKTKEPVIMSTLETVRIFLTEQPLEGLEKLYQEPRELPPEERAQNVTRLLRKQAEEVNTEWEKLNLHSADWQRKIDETLERLQELQEATDELDLKLRQAEVIKGSWQPVGDLLIDSLQDHLEKVKALRGEIAPLKENVSHVNDLARQLTTLGIQLSPYNLSTLEDLNTRWKLLQVAVEDRVRQLHEAHRDFGPASQHFLSTSVQGPWERAISPNKVPYYINHETQTTCWDHPKMTELYQSLADLNNVRFSAYRTAMKLRRLQKALCLDLLSLSAACDALDQHNLKQNDQPMDILQIINCLTTIYDRLEQEHNNLVNVPLCVDMCLNWLLNVYDTGRTGRIRVLSFKTGIISLCKAHLEDKYRYLFKQVASSTGFCDQRRLGLLLHDSIQIPRQLGEVASFGGSNIEPSVRSCFQFANNKPEIEAALFLDWMRLEPQSMVWLPVLHRVAAAETAKHQAKCNICKECPIIGFRYRSLKHFNYDICQSCFFSGRVAKGHKMHYPMVEYCTPTTSGEDVRDFAKVLKNKFRTKRYFAKHPRMGYLPVQNLQAEYDRLKQQHEHKGLSPLPSPPEMMPTSPQSPRDAELIAEAKLLRQHKGRLEARMQILEDHNKQLESQLHRLRQLLEQPQAEAKVNGTTVSSPSTSLQRSDSSQPMLLRVVGSQTSDSMGEEDLLSPPQDTSTGLEEVMEQLNNSFPSSRGRNTPGKPMREDTM

SEQ ID NO: 830219 - protein, 976 aa, Homo sapiens
GFLRIAMQQDQCCSARFKLKMLHRKTYHVKDLQGEIEAHTDVYHNLDENSQKILRSLEGSDDAVLLQRRLDNMNFKWSELRKKSLNIRSHLEASSDQWKRLHLSLQELLVWLQLKDDELSRQAPIGGDFPAVQKQNDVHRAFKRELKTKEPVIMSTLETVRIFLTEQPLEGLEKLYQEPRELPPEERAQNVTRLLRKQAEEVNTEWEKLNLHSADWQRKIDETLERLQELQEATDELDLKLRQAEVIKGSWQPVGDLLIDSLQDHLEKVKALRGEIAPLKENVSHVNDLARQLTTLGIQLSPYNLSTLEDLNTRWKLLQVAVEDRVRQLHEAHRDFGPASQHFLSTSVQGPWERAISPNKVPYYINHETQTTCWDHPKMTELYQSLADLNNVRFSAYRTAMKLRRLQKALCLDLLSLSAACDALDQHNLKQNDQPMDILQIINCLTTIYDRLEQEHNNLVNVPLCVDMCLNWLLNVYDTGRTGRIRVLSFKTGIISLCKAHLEDKYRYLFKQVASSTGFCDQRRLGLLLHDSIQIPRQLGEVASFGGSNIEPSVRSCFQFANNKPEIEAALFLDWMRLEPQSMVWLPVLHRVAAAETAKHQAKCNICKECPIIGFRYRSLKHFNYDICQSCFFSGRVAKGHKMHYPMVEYCTPTTSGEDVRDFAKVLKNKFRTKRYFAKHPRMGYLPVQTVLEGDNMETPVTLINFWPVDSAPASSPQLSHDDTHSRIEHYASRLAEMENSNGSYLNDSISPNESIDDEHLLIQHYCQSLNQDSPLSQPRSPAQILISLESEERGELERILADLEEENRNLQAEYDRLKQQHEHKGLSPLPSPPEMMPTSPQSPRDAELIAEAKLLRQHKGRLEARMQILEDHNKQLESQLHRLRQLLEQPQAEAKVNGTTVSSPSTSLQRSDSSQPMLLRVVGSQTSDSMGEEDLLSPPQDTSTGLEEVMEQLNNSFPSSRGRNTPGKPMREDTM

SEQ ID NO: 830220 - protein, 660 aa, Homo sapiens
LRSAFSCELGRRRRRRSTFGEPGGSGKLTPPLVPTLDRGALAAMREQLKGHETQTTCWDHPKMTELYQSLADLNNVRFSAYRTAMKLRRLQKALCLDLLSLSAACDALDQHNLKQNDQPMDILQIINCLTTIYDRLEQEHNNLVNVPLCVDMCLNWLLNVYDTGRTGRIRVLSFKTGIISLCKAHLEDKYRYLFKQVASSTGFCDQRRLGLLLHDSIQIPRQLGEVASFGGSNIEPSVRSCFQFANNKPEIEAALFLDWMRLEPQSMVWLPVLHRVAAAETAKHQAKCNICKECPIIGFRYRSLKHFNYDICQSCFFSGRVAKGHKMHYPMVEYCTPTTSGEDVRDFAKVLKNKFRTKRYFAKHPRMGYLPVQTVLEGDNMETPVTLINFWPVDSAPASSPQLSHDDTHSRIEHYASRLAEMENSNGSYLNDSISPNESIDDEHLLIQHYCQSLNQDSPLSQPRSPAQILISLESEERGELERILADLEEENRNLQAEYDRLKQQHEHKGLSPLPSPPEMMPTSPQSPRDAELIAEAKLLRQHKGRLEARMQILEDHNKQLESQLHRLRQLLEQPQAEAKVNGTTVSSPSTSLQRSDSSQPMLLRVVGSQTSDSMGEEDLLSPPQDTSTGLEEVMEQLNNSFPSSRGRNTPGKPMREDTM

SEQ ID NO: 830221 - protein, 3685 aa, Homo sapiens; identical to SEQ ID NO: 830206

SEQ ID NO: 830222 - protein, 1230 aa, Homo sapiens; identical to SEQ ID NO: 830200

SEQ ID NO: 830223 - protein, 1342 aa, Homo sapiens
SSVPFLIGYNHSRTIDVKETEIAVQAKQPDVEEILSKGQHLYKEKPATQPVKRKLEDLSSEWKAVNRLLQELRAKQPDLAPGLTTIGASPTQTVTLVTQPVVTKETAISKLEMPSSLMLEVPALADFNRAWTELTDWLSLLDQVIKSQRVMVGDLEDINEMIIKQKATMQDLEQRRPQLEELITAAQNLKNKTSNQEARTIITDRIERIQNQWDEVQEHLQNRRQQLNEMLKDSTQWLEAKEEAEQVLGQARAKLESWKEGPYTVDAIQKKITETKQLAKDLRQWQTNVDVANDLALKLLRDYSADDTRKVHMITENINASWRSIHKRVSEREAALEETHRLLQQFPLDLEKFLAWLTEAETTANVLQDATRKERLLEDSKGVKELMKQWQDLQGEIEAHTDVYHNLDENSQKILRSLEGSDDAVLLQRRLDNMNFKWSELRKKSLNIRSHLEASSDQWKRLHLSLQELLVWLQLKDDELSRQAPIGGDFPAVQKQNDVHRAFKRELKTKEPVIMSTLETVRIFLTEQPLEGLEKLYQEPRELPPEERAQNVTRLLRKQAEEVNTEWEKLNLHSADWQRKIDETLERLQELQEATDELDLKLRQAEVIKGSWQPVGDLLIDSLQDHLEKVKALRGEIAPLKENVSHVNDLARQLTTLGIQLSPYNLSTLEDLNTRWKLLQVAVEDRVRQLHEAHRDFGPASQHFLSTSVQGPWERAISPNKVPYYINHETQTTCWDHPKMTELYQSLADLNNVRFSAYRTAMKLRRLQKALCLDLLSLSAACDALDQHNLKQNDQPMDILQIINCLTTIYDRLEQEHNNLVNVPLCVDMCLNWLLNVYDTGRTGRIRVLSFKTGIISLCKAHLEDKYRYLFKQVASSTGFCDQRRLGLLLHDSIQIPRQLGEVASFGGSNIEPSVRSCFQFANNKPEIEAALFLDWMRLEPQSMVWLPVLHRVAAAETAKHQAKCNICKECPIIGFRYRSLKHFNYDICQSCFFSGRVAKGHKMHYPMVEYCTPTTSGEDVRDFAKVLKNKFRTKRYFAKHPRMGYLPVQTVLEGDNMETPASSPQLSHDDTHSRIEHYASRLAEMENSNGSYLNDSISPNESIDDEHLLIQHYCQSLNQDSPLSQPRSPAQILISLESEERGELERILADLEEENRNLQAEYDRLKQQHEHKGLSPLPSPPEMMPTSPQSPRDAELIAEAKLLRQHKGRLEARMQILEDHNKQLESQLHRLRQLLEQPQAEAKVNGTTVSSPSTSLQRSDSSQPMLLRVVGSQTSDSMGEEDLLSPPQDTSTGLEEVMEQLNNSFPSSRGHNVGSLFHMADDLGRAMESLVSVMTDEEGAE

SEQ ID NO: 830224 - protein, 2400 aa, Homo sapiens; identical to SEQ ID NO: 830209

SEQ ID NO: 830225 - protein, 1217 aa, Homo sapiens
MEDEREDVQKKTFTKWVNAQFSKFGKQHIENLFSDLQDGRRLLDLLEGLTGQKLPKEKGSTRVHALNNVNKALRVLQNNNVDLVNIGSTDIVDGNHKLTLGLIWNIILHWQVKNVMKNIMAGLQQTNSEKILLSWVRQSTRNYPQVNVINFTTSWSDGLALNALIHSHRPDLFDWNSVVCQQSATQRLEHAFNIARYQLGIEKLLDPEDVDTTYPDKKSILMYITSLFQVLPQQVSIEAIQEVEMLPRPPKVTKEEHFQLHHQMHYSQQITVSLAQGYERTSSPKPRFKSYAYTQAAYVTTSDPTRSPFPSQHLEAPEDKSFGSSLMESEVNLDRYQTALEEVLSWLLSAEDTLQAQGEISNDVEVVKDQFHTHEGYMMDLTAHQGRVGNILQLGSKLIGTGKLSEDEETEVQEQMNLLNSRWECLRVASMEKQSNLHRVLMDLQNQKLKELNDWLTKTEERTRKMEEEPLGPDLEDLKRQVQQHKVLQEDLEQEQVRVNSLTHMVVVVDESSGDHATAALEEQLKVLGDRWANICRWTEDRWVLLQDILLKWQRLTEEQCLFSAWLSEKEDAVNKIHTTGFKDQNEMLSSLQKLAVLKADLEKKKQSMGKLYSLKQDLLSTLKNKSVTQKTEAWLDNFARCWDNLVQKLEKSTAQISQAVTTTQPSLTQTTVMETVTTVTTREQILVKHAQEELPPPPPQKKRQITVDSEIRKRLDVDITELHSWITRSEAVLQSPEFAIFRKEGNFSDLKEKVNAIEREKAEKFRKLQDASRSAQALVEQMVNEGVNADSIKQASEQLNSRWIEFCQLLSERLNWLEYQNNIIAFYNQLQQLEQMTTTAENWLKIQPTTPSEPTAIKSQLKICKDEVNRLSGLQPQIERLKIQSIALKEKGQGPMFLDADFVAFTNHFKQVFSDVQAREKELQTIFDTLPPMRYQETMSAIRTWVQQSETKLSIPQLSVTDYEIMEQRLGELQALQSSLQEQQSGLYYLSTTVKEMSKKAPSEISRKYQSEFEEIEGRWKKLSSQLVEHCQKLEEQMNKLRKIQNHIQTLKKWMAEVDVFLKEEWPALGDSEILKKQLKQCRLLVSDIQTIQPSLNSVNEGGQKIKNEAEPEFASRLETELKELNTQWDHMCQQVYARKEALKGGLEKTVSLQKDLSEMHEWMTQAEEEYLERDFEYKTPDELQKAVEEMKVKKKKEKLSKTKEINGKRKKCNNA

SEQ ID NO: 830226 - protein, 55 aa, Homo sapiens
MAVEPTQIQLSKRWREIESKFAQFRRLNFAQIVSCYWQTHVCVCNYYSINRGLLI

SEQ ID NO: 830227 - protein, 391 aa, Homo sapiens
MSGPVPSRARVYTDVNTHRPREYWDYESHVVEWGNQDDYQLVRKLGRGKYSEVFEAINITNNEKVVVKILKPVKKKKIKREIKILENLRGGPNIITLADIVKDPVSRTPALVFEHVNNTDFKQLYQTLTDYDIRFYMYEILKALDYCHSMGIMHRDVKPHNVMIDHEHRKLRLIDWGLAEFYHPGQEYNVRVASRYFKGPELLVDYQMYDYSLDMWSLGCMLASMIFRKEPFFHGHDNYDQLVRIAKVLGTEDLYDYIDKYNIELDPRFNDILGRHSRKRWERFVHSENQHLVSPEALDFLDKLLRYDHQSRLTAREAMEHPYFYTVVKDQARMGSSSMPGGSTPVSSANMMSGISSVPTPSPLGPLAGSPVIAAANPLGMPVPAAAGAQQ

SEQ ID NO: 830228 - protein, 391 aa, Homo sapiens; identical to SEQ ID NO: 830227

SEQ ID NO: 830229 - protein, 391 aa, Homo sapiens; identical to SEQ ID NO: 830227

SEQ ID NO: 830230 - protein, 391 aa, Homo sapiens; identical to SEQ ID NO: 830227

SEQ ID NO: 830231 - protein, 391 aa, Homo sapiens; identical to SEQ ID NO: 830227

SEQ ID NO: 830232 - protein, 391 aa, Homo sapiens; identical to SEQ ID NO: 830227

SEQ ID NO: 830233 - protein, 397 aa, Homo sapiens
SLALVPAAGGRAVCLLLHRRHIVCVSRGESGRRRCRFHHRNQDDYQLVRKLGRGKYSEVFEAINITNNEKVVVKILKPVKKKKIKREIKILENLRGGPNIITLADIVKDPVSRTPALVFEHVNNTDFKQLYQTLTDYDIRFYMYEILKALDYCHSMGIMHRDVKPHNVMIDHEHRKLRLIDWGLAEFYHPGQEYNVRVASRYFKGPELLVDYQMYDYSLDMWSLGCMLASMIFRKEPFFHGHDNYDQLVRIAKVLGTEDLYDYIDKYNIELDPRFNDILGRHSRKRWERFVHSENQHLVSPEALDFLDKLLRYDHQSRLTAREAMEHPYFYTVVKDQARMGSSSMPGGSTPVSSANMMSGISSVPTPSPLGPLAGSPVIAAANPLGMPVPAAAGAQQ

SEQ ID NO: 830234 - protein, 255 aa, Homo sapiens
MYEILKALDYCHSMGIMHRDVKPHNVMIDHEHRKLRLIDWGLAEFYHPGQEYNVRVASRYFKGPELLVDYQMYDYSLDMWSLGCMLASMIFRKEPFFHGHDNYDQLVRIAKVLGTEDLYDYIDKYNIELDPRFNDILGRHSRKRWERFVHSENQHLVSPEALDFLDKLLRYDHQSRLTAREAMEHPYFYTVVKDQARMGSSSMPGGSTPVSSANMMSGISSVPTPSPLGPLAGSPVIAAANPLGMPVPAAAGAQQ

SEQ ID NO: 830235 - protein, 255 aa, Homo sapiens; identical to SEQ ID NO: 830234

SEQ ID NO: 830236 - protein, 255 aa, Homo sapiens; identical to SEQ ID NO: 830234

SEQ ID NO: 830237 - protein, 265 aa, Homo sapiens
WDSLKGTFMSINSKGPHNCPVIQVTVTSWSNKKLTLPSPSCGRSLRLIDWGLAEFYHPGQEYNVRVASRYFKGPELLVDYQMYDYSLDMWSLGCMLASMIFRKEPFFHGHDNYDQLVRIAKVLGTEDLYDYIDKYNIELDPRFNDILGRHSRKRWERFVHSENQHLVSPEALDFLDKLLRYDHQSRLTAREAMEHPYFYTVVKDQARMGSSSMPGGSTPVSSANMMSGISSVPTPSPLGPLAGSPVIAAANPLGMPVPAAAGAQQ

SEQ ID NO: 830238 - protein, 137 aa, Homo sapiens
MKCWASVPTWPISHALFWSCRHSRKRWERFVHSENQHLVSPEALDFLDKLLRYDHQSRLTAREAMEHPYFYTVVKDQARMGSSSMPGGSTPVSSANMMSGISSVPTPSPLGPLAGSPVIAAANPLGMPVPAAAGAQQ

SEQ ID NO: 830239 - protein, 373 aa, Homo sapiens
MSGPVPSRARVYTDVNTHRPREYWDYESHVVEWGNQDDYQLVRKLGRGKYSEVFEAINITNNEKVVVKILKPVKKKKIKREIKILENLRGGPNIITLADIVKDPVSRTPALVFEHVNNTDFKQLYQTLTDYDIRFYMYEILKALDYCHSMGIMHRDVKPHNVMIDHEHRKLRLIDWGLAEFYHPGQEYNVRVASRYFKGPELLVDYQMYDYSLDMWSLGCMLASMIFRKEPFFHGHDNYDQLVRIAKVLGTEDLYDYIDKYNIELDPRFNDILGRHSRKRWERFVHSENQHLVSPEALDFLDKLLRYDHQSRLTAREAMEHPYFYTVVKDQARMGSSSMPGGSTPVSSANMMSEPQFEGQRDIHHAAVRLGQL

SEQ ID NO: 830240 - protein, 391 aa, Homo sapiens; identical to SEQ ID NO: 830227

SEQ ID NO: 830241 - protein, 391 aa, Homo sapiens; identical to SEQ ID NO: 830227

SEQ ID NO: 830242 - protein, 391 aa, Homo sapiens; identical to SEQ ID NO: 830227

SEQ ID NO: 830243 - protein, 391 aa, Homo sapiens; identical to SEQ ID NO: 830227

SEQ ID NO: 830244 - protein, 391 aa, Homo sapiens; identical to SEQ ID NO: 830227

SEQ ID NO: 830245 - protein, 391 aa, Homo sapiens; identical to SEQ ID NO: 830227

SEQ ID NO: 830246 - protein, 391 aa, Homo sapiens; identical to SEQ ID NO: 830227

SEQ ID NO: 830247 - protein, 391 aa, Homo sapiens; identical to SEQ ID NO: 830227

SEQ ID NO: 830248 - protein, 74 aa, Homo sapiens
PRSGPCGWRPSRVSPPPSPPYCLCEQRGERPPPLPLPPQFEENRSETRSYPQLLLNTVTARSPNIKSSFVRQPV

SEQ ID NO: 830249 - protein, 246 aa, Homo sapiens
KVRYSWREGLSAEIDLSLVVLPPRDEPPADGALKRAEELKTQANDYFKAKDYENAIKFYSQAIELNPSNAIYYGNRSLAYLRTECYGYALGDATRAIELDKKYIKGYYRRAASNMALGKFRAALRDYETVVKVKPHDKDAKMKYQECNKIVKQKAFERAIAGDEHKRSVVDSLDIESMTIEDEYSGPKLEDGKVTISFMKELMQWYKDQKKLHRKCAYQILVQVKEVLSKLSTLVETTLKEVRVVG

SEQ ID NO: 830250 - protein, 499 aa, Homo sapiens
MAMAEGERTECAEPPRDEPPADGALKRAEELKTQANDYFKAKDYENAIKFYSQAIELNPSNAIYYGNRSLAYLRTECYGYALGDATRAIELDKKYIKGYYRRAASNMALGKFRAALRDYETVVKVKPHDKDAKMKYQECNKIVKQKAFERAIAGDEHKRSVVDSLDIESMTIEDEYSGPKLEDGKVTISFMKELMQWYKDQKKLHRKCAYQILVQVKEVLSKLSTLVETTLKETEKITVCGDTHGQFYDLLNIFELNGLPSETNPYIFNGDFVDRGSFSVEVILTLFGFKLLYPDHFHLLRGNHETDNMNQIYGFEGEVKAKYTAQMYELFSEVFEWLPLAQCINGKVLIMHGGLFSEDGVTLDDIRKIERNRQPPDSGPMCDLLWSDPQPQNGRSISKRGVSCQFGPDVTKAFLEENNLDYIIRSHEVKAEGYEVAHGGRCVTVFSAPNYCDQMGNKASYIHLQGSDLRPQFHQFTAVPHPNVKPMAYANTLLQLGMM

SEQ ID NO: 830251 - protein, 499 aa, Homo sapiens; identical to SEQ ID NO: 830250

SEQ ID NO: 830252 - protein, 486 aa, Homo sapiens
MAMAEGERTECAEPPRDEPPADGALKRAEELKTQANDYFKAKDYENAIKFYSQAIELNPSNAIYYGNRSLAYLRTECYGYALGDATRAIELDKKYIKGYYRRAASNMALGKFRAALRDYETVVKVKPHDKDAKMKYQECNKIVKQKAFERAIAGDEHKRSVVDSLDIESMTIEDEYSGPKLEDGKVTISFMKELMQWYKDQKKLHRKCAYQILVQVKEVLSKLSTLVETTLKETEKITVCGDTHGQFYDLLNIFELNGLPSETNPYIFNGDFVDRGSFSVEVILTLFGFKLLYPDHFHLLRGNHETDNMNQIYGFEGEVKAKYTAQMYELFSEVFEWLPLAQCINGKVLIMHGGLFSEDGVTLDDIRKIERNRQPPDSGPMCDLLWSDPQPQNGRSISKRGVSCQFGPDVTKAFLEENNLDYIIRSHEVKAEGYEVAHGGRCVTVFSAPNYCDQMGNKASYIHLQGSDLRPQFHQFTAVGRPSSGS

SEQ ID NO: 830253 - protein, 499 aa, Homo sapiens; identical to SEQ ID NO: 830250

SEQ ID NO: 830254 - protein, 468 aa, Homo sapiens
MAEGERTECAEPPRDEPPADGALKRAEELKTQANDYFKAKDYENAIKFYSQAIELNPSNAIYYGNRSLAYLRTECYGYALGDATRAIELDKKYIKGYYRRAASNMALGKFRAALRDYETVVKVKPHDKDAKMKYQECNKIVKQKAFERAIAGDEHKRSVVDSLDIESMTIEDEYSGPKLEDGKVTISFMKELMQWYKDQKKLHRKCAYQILVQVKEVLSKLSTLVETTLKETEKITVCGDTHGQFYDLLNIFELNGLPSETNPYIFNGDFVDRGSFSVEVILTLFGFKLLYPDHFHLLRGNHETDNMNQIYGFEGEVKAKYTAQMYELFSEVFEWLPLAQCINGKVLIMHGGLFSEDGVTLDDIRKIERNRQPPDSGPMCDLLWSDPQPQNGRSISKRGVSCQFGPDVTKAFLEENNLDYIIRSHEVKAEGYEVAHGGRCVTVFSAPNYCLPPSFAWLLPHSSNRAPP

SEQ ID NO: 830255 - protein, 387 aa, Homo sapiens
MAMAEGERTECAEPPRDEPPADGALKRAEELKTQANDYFKAKDYENAIKFYSQAIELNPSNAIYYGNRSLAYLRTECYGYALGDATRAIELDKKYIKGYYRRAASNMALGKFRAALRDYETVVKVKPHDKDAKMKYQECNKIVKQKAFERAIAGDEHKRSVVDSLDIESMTIEDEYSGPKLEDGKVTISFMKELMQWYKDQKKLHRKCAYQILVQVKEVLSKLSTLVETTLKETEKITVCGDTHGQFYDLLNIFELNGLPSETNPYIFNGDFVDRGSFSVEVILTLFGFKLLYPDHFHLLRGNHETDNMNQIYGFEGEVKAKYTAQMYELFSEVFEWLPLAQCINGKVLIMHGGLFSEDGVTLDDIRKIERNRQPPDSAPSPAILCL

SEQ ID NO: 830256 - protein, 348 aa, Homo sapiens
MAMAEGERTECAEPPRDEPPADGALKRAEELKTQANDYFKAKDYENAIKFYSQAIELNPSNAIYYGNRSLAYLRTECYGYALGDATRAIELDKKYIKGYYRRAASNMALGKFRAALRDYETVVKVKPHDKDAKMKYQECNKIVKQKAFERAIAGDEHKRSVVDSLDIESMTIEDEYSGPKLEDGKVTISFMKELMQWYKDQKKLHRKCAYQILVQVKEVLSKLSTLVETTLKETEKITVCGDTHGQFYDLLNIFELNGLPSETNPYIFNGDFVDRGSFSVEVILTLFGFKLLRVCSLDREEGGGAAGAGGTAWAFCGEAVLGVGWGRVAALPPSFAWLLPHSSNRAPP

SEQ ID NO: 830257 - protein, 302 aa, Homo sapiens
MAMAEGERTECAEPPRDEPPADGALKRAEELKTQANDYFKAKDYENAIKFYSQAIELNPSNAIYYGNRSLAYLRTECYGYALGDATRAIELDKKYIKGYYRRAASNMALGKFRAALRDYETVVKVKPHDKDAKMKYQECNKIVKQKAFERAIAGDEHKRSVVDSLDIESMTIEDEYSGPKLEDGKVTISFMKELMQWYKDQKKLHRKCAYQILVQVKEVLSKLSTLVETTLKETEKITVCGDTHGQFYDLLNIFELNGLPSETNPYIFNGDFVDRGSFSVEVILTLFGFKLLPPPQLFYVCN

SEQ ID NO: 830258 - protein, 154 aa, Homo sapiens
MAMAEGERTECAEPPRDEPPADGALKRAEELKTQANDYFKAKDYENAIKFYSQAIELNPSNAIYYGNRSLAYLRTECYGYALGDATRAIELDKKYIKGYYRRAASNMALGKFRAALRDYETVVKVKPHDKDAKMKYQDLIPTSSPWPMPTRCCS

SEQ ID NO: 830259 - protein, 263 aa, Homo sapiens
MAMAEGERTECAEPPRDEPPADGALKRAEELKTQANDYFKAKDYENAIKFYSQAIELNPSNAIYYGNRSLAYLRTECYGYALGDATRAIELDKKYIKGYYRRAASNMALGKFRAALRDYETVVKVKPHDKDAKMKYQECNKIVKQKAFERAIAGDEHKRSVVDSLDIESMTIEDEYSGPKLEDGKVTISFMKELMQWYKDQKKLHRKCAYQILVQVKEVLSKLSTLVETTLKETEKITVCGDTHGQFYDPAPLICMAPPPLKQ

SEQ ID NO: 830260 - protein, 250 aa, Homo sapiens
MAMAEGERTECAEPPRDEPPADGALKRAEELKTQANDYFKAKDYENAIKFYSQAIELNPSNAIYYGNRSLAYLRTECYGYALGDATRAIELDKKYIKGYYRRAASNMALGKFRAALRDYETVVKVKPHDKDAKMKYQECNKIVKQKAFERAIAGDEHKRSVVDSLDIESMMPSAGAGGGARRRRGRGRRGCRSSSWGLPRTLLGRRRVPSAGGAVSVGHAQLRSEADMSAAGLLARARASWSAAAPSTTR

SEQ ID NO: 830261 - protein, 499 aa, Homo sapiens; identical to SEQ ID NO: 830250

SEQ ID NO: 830262 - protein, 90 aa, Homo sapiens
  misc_feature (3)..(4): Xaa can be any naturally occurring amino acid
  misc_feature (13)..(13): Xaa can be any naturally occurring amino acid
FPXXHFDEVTVRXHLAYTLPGVTKAFLEENNLDYIIRSHEVKAEGYEVAHGGRCVTVFSAPNYCWYVFAFPAQGLYQATGFCLGFCFAFL

SEQ ID NO: 830263 - protein, 499 aa, Homo sapiens; identical to SEQ ID NO: 830250

SEQ ID NO: 830264 - protein, 499 aa, Homo sapiens; identical to SEQ ID NO: 830250

SEQ ID NO: 830265 - protein, 499 aa, Homo sapiens; identical to SEQ ID NO: 830250

SEQ ID NO: 830266 - protein, 477 aa, Homo sapiens
MAMAEGERTECAEPPRDEPPADGALKRAEELKTQANDYFKAKDYENAIKFYSQAIELNPSNAIYYGNRSLAYLRTECYGYALGDATRAIELDKKYIKGYYRRAASNMALGKFRAALRDYETVVKVKPHDKDAKMKYQECNKIVKQKAFERAIAGDEHKRSVVDSLDIESMTIEDEYSGPKLEDGKVTISFMKELMQWYKDQKKLHRKCAYQTEKITVCGDTHGQFYDLLNIFELNGLPSETNPYIFNGDFVDRGSFSVEVILTLFGFKLLYPDHFHLLRGNHETDNMNQIYGFEGEVKAKYTAQMYELFSEVFEWLPLAQCINGKVLIMHGGLFSEDGVTLDDIRKIERNRQPPDSGPMCDLLWSDPQPQNGRSISKRGVSCQFGPDVTKAFLEENNLDYIIRSHEVKAEGYEVAHGGRCVTVFSAPNYCDQMGNKASYIHLQGSDLRPQFHQFTAVPHPNVKPMAYANTLLQLGMM

SEQ ID NO: 830267 - protein, 337 aa, Homo sapiens
LPLSLTPHPCAFPPEYPIFSPGLLVFVCVPCLCLLHDSSWSTVNSYPSPHLCPLPTSLSRPVPLRWPLFFQTEKITVCGDTHGQFYDLLNIFELNGLPSETNPYIFNGDFVDRGSFSVEVILTLFGFKLLYPDHFHLLRGNHETDNMNQIYGFEGEVKAKYTAQMYELFSEVFEWLPLAQCINGKVLIMHGGLFSEDGVTLDDIRKIERNRQPPDSGPMCDLLWSDPQPQNGRSISKRGVSCQFGPDVTKAFLEENNLDYIIRSHEVKAEGYEVAHGGRCVTVFSAPNYCDQMGNKASYIHLQGSDLRPQFHQFTAVPHPNVKPMAYANTLLQLGMM

SEQ ID NO: 830268 - protein, 275 aa, Homo sapiens
GAESGLARGSAPWTERKEVEQLGLGAQPGHSVGRPSSETNPYIFNGDFVDRGSFSVEVILTLFGFKLLYPDHFHLLRGNHETDNMNQIYGFEGEVKAKYTAQMYELFSEVFEWLPLAQCINGKVLIMHGGLFSEDGVTLDDIRKIERNRQPPDSGPMCDLLWSDPQPQNGRSISKRGVSCQFGPDVTKAFLEENNLDYIIRSHEVKAEGYEVAHGGRCVTVFSAPNYCDQMGNKASYIHLQGSDLRPQFHQFTAVPHPNVKPMAYANTLLQLGMM

SEQ ID NO: 830269 - protein, 94 aa, Homo sapiens
YQRRVAITAGAFRCLIAAIMGRMHAPGKGLSQSALPYRRSVPTWLKLTSDDVKEQIYKLAKKGLTPSQIGVILRDSHGVAQVRFVTGNKILRNS

SEQ ID NO: 830270 - protein, 94 aa, Homo sapiens; identical to SEQ ID NO: 830269

SEQ ID NO: 830271 - protein, 97 aa, Homo sapiens
NSRPRRREKTTEGAFRCLIAAIMGRMHAPGKGLSQSALPYRRSVPTWLKLTSDDVKEQIYKLAKKGLTPSQIGVILRDSHGVAQVRFVTGNKILRNS

SEQ ID NO: 830272 - protein, 186 aa, Homo sapiens
VCKVLLNMKYQLPIQVVFWIAFSSFASAAKPGPGTASVSLPCSLSVMTRVYRYLLHRTVKLHVVLIFLDLDRFGILSSGCEQEVLDFLNFAEAWRARRAGLWRGPGPFSPTYHPRDTHRKGLSQSALPYRRSVPTWLKLTSDDVKEQIYKLAKKGLTPSQIGVILRDSHGVAQVRFVTGNKILRNS

SEQ ID NO: 830273 - protein, 106 aa, Homo sapiens
MRGKEIIMWTKPTTPRAKERYTTPQPTRSGAHKNQHKAKRKEGTNEREGGRKQQTEGARRGAGRGGGEAKRETEAGRTARHEHKTNEGTQIFSTGDGQTNKNDNGG

SEQ ID NO: 830274 - protein, 138 aa, Homo sapiens
  misc_feature (72)..(72): Xaa can be any naturally occurring amino acid
MGGGAPKKPPGGPLPPPFLGKGPPGAKKTDRRGSQKPGERGNKAAWGSWRNPIGARGQTGDHPQVNGPANKXGGACQTAFCGGEFWVHNKRVYEIQVALSIRDPSQHYLLRHAICTSVHIRRSHRTLLCSKSTLSTAS

SEQ ID NO: 830275 - protein, 96 aa, Homo sapiens
VSTQSAHYGRGLSLPDRRHHGSHACSRVSSGHQAGLLGGGWEEDRECGQRAEGMMFWAALALAATSPRDCFSPQEGPVPVGFTLSTQRPHLVEVDI

SEQ ID NO: 830276 - protein, 40 aa, Homo sapiens
MPEGHKHLCGGTQRVLGRNNSRGTKAEKRDTPRRTNPRRG

SEQ ID NO: 830277 - protein, 70 aa, Homo sapiens
MVTRAHKGVFPKGNPRAIDHRGLGILPPFIKRARGGNTEGSWTNSQKGVLGGHIRDPFTGECPRELDIIY

SEQ ID NO: 830278 - protein, 110 aa, Homo sapiens
MGRMHAPGKGLSQSALPYRRSVPTWLKLTSDDVKEQIYKLAKKGLTPSQIVLLLSPSLECSGAISAHCNLHLLDSSDSPASASRIGVILRDSHGVAQVRFVTGNKILRNS

SEQ ID NO: 830279 - protein, 84 aa, Homo sapiens
  misc_feature (2)..(2): Xaa can be any naturally occurring amino acid
  misc_feature (7)..(7): Xaa can be any naturally occurring amino acid
PXAEFAXAIMGRMHAPGKGLSQSALPYRRSVPTWLKLTSDDVKEQIYKLAKKGLTPSQIGVILRDSHGVAQVRFVTGNKILRNS

SEQ ID NO: 830280 - protein, 96 aa, Homo sapiens
  misc_feature (3)..(3): Xaa can be any naturally occurring amino acid
PSXRCERRQRGPPFRCLIAAIMGRMHAPGKGLSQSALPYRRSVPTWLKLTSDDVKEQIYKLAKKGLTPSQIGVILRDSHGVAQVRFVTGNKILRNS

SEQ ID NO: 830281 - protein, 88 aa, Homo sapiens
THASGPTRRIAAIMGRMHAPGKGLSQSALPYRRSVPTWLKLTSDDVKEQIYKLAKKGLTPSQIGVILRDSHGVAQVRFVTGNKILRNS

SEQ ID NO: 830282 - protein, 84 aa, Homo sapiens; identical to SEQ ID NO: 830279
  misc_feature (2)..(2): Xaa can be any naturally occurring amino acid
  misc_feature (7)..(7): Xaa can be any naturally occurring amino acid

SEQ ID NO: 830283 - protein, 96 aa, Homo sapiens; identical to SEQ ID NO: 830280
  misc_feature (3)..(3): Xaa can be any naturally occurring amino acid

SEQ ID NO: 830284 - protein, 125 aa, Homo sapiens
MALRACSSHSGKWVSIITWSHQIFPKIQTIQSDSPFLGSSLTLKSVCYFKKSKLGPQEEVLPPRKLSGRPCRLRRSSQVTESAIETGRSPNGPLKPGSPSQSRSQFCEQPETLRRGYGRYLEQAR

SEQ ID NO: 830285 - protein, 97 aa, Homo sapiens; identical to SEQ ID NO: 830271

SEQ ID NO: 830286 - protein, 58 aa, Homo sapiens
MEERTRAEEGRRNENSRKEMRARERGREVGRPEEGEEGEEGEQEKEEGGRRRSEQSGE

SEQ ID NO: 830287 - protein, 79 aa, Homo sapiens
GIRHEGACMAPRKGLSQSALPYRRSVPTWLKLTSDDVKEQIYKLAKKGLTPSQIGVILRDSHGVAQVRFVTGNKILRNS

SEQ ID NO: 830288 - protein, 88 aa, Homo sapiens; identical to SEQ ID NO: 830281

SEQ ID NO: 830289 - protein, 79 aa, Homo sapiens; identical to SEQ ID NO: 830287

SEQ ID NO: 830290 - protein, 699 aa, Homo sapiens
GGWSSWAEWSPCSNRCGRGWQKRTRTCTNPAPLNGGAFCEGQAFQKTACTTICPVDGAWTEWSKWSACSTECAHWRSRECMAPPPQNGGRDCSGTLLDSKNCTDGLCMQNKKTLSDPNSHLLEASGDAALYAGLVVAIFVVVAILMAVGVVVYRRNCRDFDTDITDSSAALTGGFHPVNFKTARPSNPQLLHPSVPPDLTASAGIYRGPVYALQDSTDKIPMTNSPLLDPLPSLKVKVYSSSTTGSGPGLADGADLLGVLPPGTYPSDFARDTHFLHLRSASLGSQQLLGLPRDPGSSVSGTFGCLGGRLSIPGTGVSLLVPNGAIPQGKFYEMYLLINKAESTLPLSEGTQTVLSPSVTCGPTGLLLCRPVILTMPHCAEVSARDWIFQLKTQAHQGHWEEVVTLDEETLNTPCYCQLEPRACHILLDQLGTYVFTGESYSRSAVKRLQLAVFAPALCTSLEYSLRVYCLEDTPVALKEVLELERTLGGYLVEEPKPLMFKDSYHNLRLSLHDLPHAHWRSKLLAKYQEIPFYHIWSGSQKALHCTFTLERHSLASTELTCKICVRQVEGEGQIFQLHTTLAETPAGSLDTLCSAPGSTVTTQLGPYAFKIPLSIRQKICNSLDAPNSRGNDWRMLAQKLSMDRYLNYFATKASPTGVILDLWEALQQDDGDLNSLASALEEMGKSEMLVAVATDGDC

SEQ ID NO: 830291 - protein, 699 aa, Homo sapiens; identical to SEQ ID NO: 830290

SEQ ID NO: 830292 - protein, 699 aa, Homo sapiens; identical to SEQ ID NO: 830290

SEQ ID NO: 830293 - protein, 137 aa, Homo sapiens [sequence omitted]

SEQ ID NO: 830294 - protein, 67 aa, Homo sapiens
HIWSGSQKALHCTFTLERHSLASTELTCKICVRQVEGEGQIFQLHTTLAEVREVGATYSSCTPHWRR

SEQ ID NO: 830295 - protein, 699 aa, Homo sapiens; identical to SEQ ID NO: 830290

SEQ ID NO: 830296 - protein, 699 aa, Homo sapiens; identical to SEQ ID NO: 830290

SEQ ID NO: 830297 - protein, 137 aa, Homo sapiens [sequence omitted]

SEQ ID NO: 830298 - protein, 163 aa, Homo sapiens
GGTSACSWCLSDEARLATCGPLRAPLLLLAILAVALAVSPAAGSSPGKPPRLVGGPMDASVEEEGVRRALDFAVGEYNKASNDMYHSRALQVVRARKQIVAGVNYFLDVELGRTTCTKTQPNLDNCPFHDQPHLKRKAFCSFQIYAVPWQGTMTLSKSTCQDA

SEQ ID NO: 830299 - protein, 66 aa, Homo sapiens
RPPTTTKFAAASTLGRTTCTKTQPNLDNCPFHDQPHLKRKAFCSFQIYAVPWQGTMTLSKSTCQDA

SEQ ID NO: 830300 - protein, 146 aa, Homo sapiens
MAGPLRAPLLLLAILAVALAVSPAAGSSPGKPPRLVGGPMDASVEEEGVRRALDFAVGEYNKASNDMYHSRALQVVRARKQIVAGVNYFLDVELGRTTCTKTQPNLDNCPFHDQPHLKRKAFCSFQIYAVPWQGTMTLSKSTCQDA

SEQ ID NO: 830301 - protein, 146 aa, Homo sapiens; identical to SEQ ID NO: 830300

SEQ ID NO: 830302 - protein, 146 aa, Homo sapiens; identical to SEQ ID NO: 830300

SEQ ID NO: 830303 - protein, 141 aa, Homo sapiens
RPRWGGAAKAGRDKTAVPAAGSSPGKPPRLVGGPMDASVEEEGVRRALDFAVGEYNKASNDMYHSRALQVVRARKQIVAGVNYFLDVELGRTTCTKTQPNLDNCPFHDQPHLKRKAFCSFQIYAVPWQGTMTLSKSTCQDA

SEQ ID NO: 830304 - protein, 135 aa, Homo sapiens
MYSVCVYLMKTWWSLLIYTWESIPLLPPFLGTAAREGVRRALDFAVGEYNKASNDMYHSRALQVVRARKQIVAGVNYFLDVELGRTTCTKTQPNLDNCPFHDQPHLKRKAFCSFQIYAVPWQGTMTLSKSTCQDA

SEQ ID NO: 830305 - protein, 146 aa, Homo sapiens; identical to SEQ ID NO: 830300

SEQ ID NO: 830306 - protein, 146 aa, Homo sapiens; identical to SEQ ID NO: 830300

SEQ ID NO: 830307 - protein, 146 aa, Homo sapiens; identical to SEQ ID NO: 830300

SEQ ID NO: 830308 - protein, 146 aa, Homo sapiens; identical to SEQ ID NO: 830300

SEQ ID NO: 830309 - protein, 146 aa, Homo sapiens; identical to SEQ ID NO: 830300

SEQ ID NO: 830310 - protein, 146 aa, Homo sapiens; identical to SEQ ID NO: 830300

SEQ ID NO: 830311 - protein, 146 aa, Homo sapiens; identical to SEQ ID NO: 830300

SEQ ID NO: 830312 - protein, 127 aa, Homo sapiens
MAGPLRAPLLLLAILAVALAVSPAAGSSPGKPPRLVGGPMDASVEEEGVRRALDFAVGEYNKASNDMYHSRALQVVRARKQIVAGVNYFLDVELGRTTCTKTQPNLDNCPFHDQPHLKRSKSTCQDA

SEQ ID NO: 830313 - protein, 92 aa, Homo sapiens
MAGPLRAPLLLLAILAVALAVSPAAGSSPGKPPRLVGGPMDASVEEEVKNVINHLPERLLHFPSVGGDPWFAHWLVGQTPPKQTEGLVVKPH

SEQ ID NO: 830314 - protein, 146 aa, Homo sapiens; identical to SEQ ID NO: 830300

SEQ ID NO: 830315 - protein, 141 aa, Homo sapiens; identical to SEQ ID NO: 830303

SEQ ID NO: 830316 - protein, 146 aa, Homo sapiens; identical to SEQ ID NO: 830300

SEQ ID NO: 830317 - protein, 146 aa, Homo sapiens; identical to SEQ ID NO: 830300

SEQ ID NO: 830318 - protein, 146 aa, Homo sapiens; identical to SEQ ID NO: 830300

SEQ ID NO: 830319 - protein, 174 aa, Homo sapiens
RPRWGGAAKAGRDKTAVAGLAGLTASPRYRSGSSLSSSSLSPAPHSPRPAPAAGSSPGKPPRLVGGPMDASVEEEGVRRALDFAVGEYNKASNDMYHSRALQVVRARKQIVAGVNYFLDVELGRTTCTKTQPNLDNCPFHDQPHLKRKAFCSFQIYAVPWQGTMTLSKSTCQDA

SEQ ID NO: 830320 - protein, 174 aa, Homo sapiens; identical to SEQ ID NO: 830319

SEQ ID NO: 830321 - protein, 146 aa, Homo sapiens; identical to SEQ ID NO: 830300

SEQ ID NO: 830322 - protein, 146 aa, Homo sapiens; identical to SEQ ID NO: 830300

SEQ ID NO: 830323 - protein, 146 aa, Homo sapiens; identical to SEQ ID NO: 830300

SEQ ID NO: 830324 - protein, 75 aa, Homo sapiens
AGRGGVGRRRPEGIKPQSPASRGSRPRLGIAAGPLYLAPASRLRPTPRVPRPSRPWPGPCAPRCSCWPSWPWPWP

SEQ ID NO: 830325 - protein, 146 aa, Homo sapiens; identical to SEQ ID NO: 830300

SEQ ID NO: 830326 - protein, 887 aa, Homo sapiens
GRRRGGALRTQARRSAAPGAAEGAGLAAVVSVAVAVAEFGGWREIQVLTRLVPSATMGELFRSEEMTLAQLFLQSEAAYCCVSELGELGKVQFRDLNPDVNVFQRKFVNEVRRCEEMDRKLRFVEKEIRKANIPIMDTGENPEVPFPRDMIDLEANFEKIENELKEINTNQEALKRNFLELTELKFILRKTQQFFDEMADPDLLEESSSLLEPSEMGRGTPLRLGFVAGVINRERIPTFERMLWRVCRGNVFLRQAEIENPLEDPVTGDYVHKSVFIIFFQGDQLKNRVKKICEGFRASLYPCPETPQERKEMASGVNTRIDDLQMVLNQTEDHRQRVLQAAAKNIRVWFIKVRKMKAIYHTLNLCNIDVTQKCLIAEVWCPVTDLDSIQFALRRGTEHSGSTVPSILNRMQTNQTPPTYNKTNKFTYGFQNIVDAYGIGTYREINPAPYTIITFPFLFAVMFGDFGHGILMTLFAVWMVLRESRILSQKNENEMFSTVFSGRYIILLMGVFSMYTGLIYNDCFSKSLNIFGSSWSVRPMFTYNWTEETLRGNPVLQLNPALPGVFGGPYPFGIDPIWNIATNKLTFLNSFKMKMSVILGIIHMLFGVSLSLFNHIYFKKPLNIYFGFIPEIIFMTSLFGYLVILIFYKWTAYDAHTSENAPSLLIHFINMFLFSYPESGYSMLYSGQKGIQCFLVVVALLCVPWMLLFKPLVLRRQYLRRKHLGTLNFGGIRVGNGPTEEDAEIIQHDQLSTHSEDADEFDFGDTMVHQAIHTIEYCLGCISNTASYLRLWALSLAHAQLSEVLWTMVIHIGLSVKSLAGGLVLFFFFTAFATLTVAILLIMEGLSAFLHALRLHWVEFQNKFYSGTGFKFLPFSFEHIREGKFEE

SEQ ID NO: 830327 - protein, 894 aa, Homo sapiens
GRRRGGALRTQARRSAAPGAAEGAGLAAVVSVAVAVAEFGGWREIQVLTRLVPSATMGELFRSEEMTLAQLFLQSEAAYCCVSELGELGKVQFRDLNPDVNVFQRKFVNEVRRCEEMDRKLRFVEKEIRKANIPIMDTGENPEVPFPRDMIDLEANFEKIENELKEINTNQEALKRNFLELTELKFILRKTQQFFDEAELHHQQMADPDLLEESSSLLEPSEMGRGTPLRLGFVAGVINRERIPTFERMLWRVCRGNVFLRQAEIENPLEDPVTGDYVHKSVFIIFFQGDQLKNRVKKICEGFRASLYPCPETPQERKEMASGVNTRIDDLQMVLNQTEDHRQRVLQAAAKNIRVWFIKVRKMKAIYHTLNLCNIDVTQKCLIAEVWCPVTDLDSIQFALRRGTEHSGSTVPSILNRMQTNQTPPTYNKTNKFTYGFQNIVDAYGIGTYREINPAPYTIITFPFLFAVMFGDFGHGILMTLFAVWMVLRESRILSQKNENEMFSTVFSGRYIILLMGVFSMYTGLIYNDCFSKSLNIFGSSWSVRPMFTYNWTEETLRGNPVLQLNPALPGVFGGPYPFGIDPIWNIATNKLTFLNSFKMKMSVILGIIHMLFGVSLSLFNHIYFKKPLNIYFGFIPEIIFMTSLFGYLVILIFYKWTAYDAHTSENAPSLLIHFINMFLFSYPESGYSMLYSGQKGIQCFLVVVALLCVPWMLLFKPLVLRRQYLRRKHLGTLNFGGIRVGNGPTEEDAEIIQHDQLSTHSEDADEFDFGDTMVHQAIHTIEYCLGCISNTASYLRLWALSLAHAQLSEVLWTMVIHIGLSVKSLAGGLVLFFFFTAFATLTVAILLIMEGLSAFLHALRLHWVEFQNKFYSGTGFKFLPFSFEHIREGKFEE

SEQ ID NO: 830328 - protein, 887 aa, Homo sapiens; identical to SEQ ID NO: 830326

SEQ ID NO: 830329 - protein, 532 aa, Homo sapiens
MKAIYHTLNLCNIDVTQKCLIAEVWCPVTDLDSIQFALRRGTEHSGSTVPSILNRMQTNQTPPTYNKTNKFTYGFQNIVDAYGIGTYREINPAPYTIITFPFLFAVMFGDFGHGILMTLFAVWMVLRESRILSQKNENEMFSTVFSGRYIILLMGVFSMYTGLIYNDCFSKSLNIFGSSWSVRPMFTYNWTEETLRGNPVLQLNPALPGVFGGPYPFGIDPIWNIATNKLTFLNSFKMKMSVILGIIHMLFGVSLSLFNHIYFKKPLNIYFGFIPEIIFMTSLFGYLVILIFYKWTAYDAHTSENAPSLLIHFINMFLFSYPESGYSMLYSGQKGIQCFLVVVALLCVPWMLLFKPLVLRRQYLRRKHLGTLNFGGIRVGNGPTEEDAEIIQHDQLSTHSEDADEFDFGDTMVHQAIHTIEYCLGCISNTASYLRLWALSLAHAQLSEVLWTMVIHIGLSVKSLAGGLVLFFFFTAFATLTVAILLIMEGLSAFLHALRLHWVEFQNKFYSGTGFKFLPFSFEHIREGKFEE

SEQ ID NO: 830330 - protein, 101 aa, Homo sapiens
PPRLARQPNCLPHSQTTTLTVPLPHGQTATRTVPLPHSQTTFFTAFATLTVAILLIMEGLSAFLHALRLHWVEFQNKFYSGTGFKFLPFSFEHIREGKFEE

SEQ ID NO: 830331 - protein, 121 aa, Homo sapiens [sequence omitted]

SEQ ID NO: 830332 - protein, 121 aa, Homo sapiens [sequence omitted]

SEQ ID NO: 830333 - protein, 857 aa, Homo sapiens
GRRRGGALRTQARRSAAPGAAEGAGLAAVVSVAVAVAEFGGWREIQVLTRLVPSATMGELFRSEEMTLAQLFLQSEAAYCCVSELGELGKVQFRDLNPDVNVFQRKFVNEVRRCEEMDRKLRFVEKEIRKANIPIMDTGENPEVPFPRDMIDLEANFEKIENELKEINTNQEALKRNFLELTELKFILRKTQQFFDEMADPDLLEESSSLLEPSEMGRGTPLRLGFVAGVINRERIPTFERMLWRVCRGNVFLRQAEIENPLEDPVTGDYVHKSVFIIFFQGDQLKNRVKKICEGFRASLYPCPETPQERKEMASGVNTRIDDLQMVLNQTEDHRQRVLQAAAKNIRVWFIKVRKMKAIYHTLNLCNIDVTQKCLIAEVWCPVTDLDSIQFALRRGTEHSGSTVPSILNRMQTNQTPPTYNKTNKFTYGFQNIVDAYGIGTYREINPAPYTIITFPFLFAVMFGDFGHGILMTLFAVWMVLRESRILSQKNENEMFSTVFSGRYIILLMGVFSMYTGLIYNDCFSKSLNIFGSSWSVRPMFTYNWTEETLRGNPVLQLNPALPGVFGGPYPFGIDPIWNIATNKLTFLNSFKMKMSVILGIIHMLFGVSLSLFNHIYFKKPLNIYFGFIPEIIFMTSLFGYLVILIFYKWTAYDAHTSENAPSLLIHFINMFLFSYPESGYSMLYSGQKGIQCFLVVVALLCVPWMLLFKPLVLRRQYLRRKHLGTLNFGGIRVGNGPTEEDAEIIQHDQLSTHSEDADEFDFGDTMVHQAIHTIEYCLGCISNTASYLRLWALSLAHAQLSEVLWTMVIHIGLSVKSLAGGLVLFFFFTAFATLTVAILLIMEGLSAFLHALRLHW

SEQ ID NO: 830334 - protein, 734 aa, Homo sapiens
GRRRGGALRTQARRSAAPGAAEGAGLAAVVSVAVAVAEFGGWREIQVLTRLVPSATMGELFRSEEMTLAQLFLQSEAAYCCVSELGELGKVQFRDLNPDVNVFQRKFVNEVRRCEEMDRKLRFVEKEIRKANIPIMDTGENPEVPFPRDMIDLEANFEKIENELKEINTNQEALKRNFLELTELKFILRKTQQFFDEMADPDLLEESSSLLEPSEMGRGTPLRLGFVAGVINRERIPTFERMLWRVCRGNVFLRQAEIENPLEDPVTGDYVHKSVFIIFFQGDQLKNRVKKICEGFRASLYPCPETPQERKEMASGVNTRIDDLQMVLNQTEDHRQRVLQAAAKNIRVWFIKVRKMKAIYHTLNLCNIDVTQKCLIAEVWCPVTDLDSIQFALRRGTEHSGSTVPSILNRMQTNQTPPTYNKTNKFTYGFQNIVDAYGIGTYREINPAPYTIITFPFLFAVMFGDFGHGILMTLFAVWMVLRESRILSQKNENEMFSTVFSGRYIILLMGVFSMYTGLIYNDCFSKSLNIFGSSWSVRPMFTYNWTEETLRGNPVLQLNPALPGVFGGPYPFGIDPIWNIATNKLTFLNSFKMKMSVILGIIHMLFGVSLSLFNHIYFKKPLNIYFGFIPEIIFMTSLFGYLVILIFYKWTAYDAHTSENAPSLLIHFINMFLFSYPESGYSMLYSGQKGIQCFLVVVALLCVPWMLLFKPLVLRRQYLRRKHLVGVFLLLKVT

SEQ ID NO: 830335 - protein, 502 aa, Homo sapiens
GRRRGGALRTQARRSAAPGAAEGAGLAAVVSVAVAVAEFGGWREIQVLTRLVPSATMGELFRSEEMTLAQLFLQSEAAYCCVSELGELGKVQFRDLNPDVNVFQRKFVNEVRRCEEMDRKLRFVEKEIRKANIPIMDTGENPEVPFPRDMIDLEANFEKIENELKEINTNQEALKRNFLELTELKFILRKTQQFFDEMADPDLLEESSSLLEPSEMGRGTPLRLGFVAGVINRERIPTFERMLWRVCRGNVFLRQAEIENPLEDPVTGDYVHKSVFIIFFQGDQLKNRVKKICEGFRASLYPCPETPQERKEMASGVNTRIDDLQMVLNQTEDHRQRVLQAAAKNIRVWFIKVRKMKAIYHTLNLCNIDVTQKCLIAEVWCPVTDLDSIQFALRRGTEHSGSTVPSILNRMQTNQTPPTYNKTNKFTYGFQNIVDAYGIGTYREINPAPYTIITFPFLFAVMFGDFGHGILMTLFAVWMVLRESRILSQKNENEVMFKLHLH

SEQ ID NO: 830336 - protein, 121 aa, Homo sapiens [sequence omitted]

SEQ ID NO: 830337 - protein, 222 aa, Homo sapiens
GRRRGGALRTQARRSAAPGAAEGAGLAAVVSVAVAVAEFGGWREIQVLTRLVPSATMGELFRSEEMTLAQLFLQSEAAYCCVSELGELGKVQFRDLNPDVNVFQRKFVNEVRRCEEMDRKLRFVEKEIRKANIPIMDTGENPEVPFPRDMIDLEANFEKIENELKEINTNQEALKRNFLELTELKFILRKTQQFFDEVRLLFLLVFEQLILYSHKWAIFLFQ

SEQ ID NO: 830338 - protein, 887 aa, Homo sapiens; identical to SEQ ID NO: 830326

SEQ ID NO: 830339 - protein, 887 aa, Homo sapiens; identical to SEQ ID NO: 830326

SEQ ID NO: 830340 - protein, 833 aa, Homo sapiens
GRRRGGALRTQARRSAAPGAAEGAGLAAVVSVAVAVAEFGGWREIQVLTRLVPSATMGELFRSEEMTLAQLFLQSEAAYCCVSELGELGKVQFRDLNPDVNVFQRKFVNEVRRCEEMDRKLRFVEKEIRKANIPIMDTGENPEVPFPRDMIDLEANFEKIENELKEINTNQEALKRNFLELTELKFILRKTQQFFDEMADPDLLEESSSLLEPSEMGRGTPLRLGFVAGVINRERIPTFERMLWRVCRGNVFLRQAEIENPLEDPVTGDYVHKSVFIIFFQGDQLKNRVKKICEGFRASLYPCPETPQERKEMASGVNTRIDDLQMVLNQTEDHRQRVLQAAAKNIRVWFIKVRKMKAIYHTLNLCNIDVTQKCLIAEVWCPVTDLDSIQFALRRGTEHSGSTVPSILNRMQTNQTPPTYNKTNKFTYGFQNIVDAYGIGTYREINPAPYTIITFPFLFAVMFGDFGHGILMTLFAVWMVLRESRILSQKNENEMFSTVFSGRYIILLMGVFSMYTGLIYNDCFSKSLNIFGSSWSVRPMFTYNWTEETLRGNPVLQLNPALPGVFGGPYPFGIDPIWNIATNKLTFLNSFKMKMSVILGIIHMLFGVSLSLFNHIYFKKPLNIYFGFIPEIIFMTSLFGYLVILIFYKWTAYDAHTSENAPSLLIHFINMFLFSYPESGYSMLYSGQKGIQCFLVVVALLCVPWMLLFKPLVLRRQYLRRKHLGTLNFGGIRVGNGPTEEDAEIIQHDQLSTHSEDADEFDFGDTMVHQAIHTIEYCLGCISNTASYLRLWALSLAHARLSSRINSTAGPVSSSYPSPSSIFGKGSLKSESL

SEQ ID NO: 830341 - protein, 474 aa, Homo sapiens
GRRRGGALRTQARRSAAPGAAEGAGLAAVVSVAVAVAEFGGWREIQVLTRLVPSATMGELFRSEEMTLAQLFLQSEAAYCCVSELGELGKVQFRDLNPDVNVFQRKFVNEVRRCEEMDRKLRFVEKEIRKANIPIMDTGENPEVPFPRDMIDLEANFEKIENELKEINTNQEALKRNFLELTELKFILRKTQQFFDEMADPDLLEESSSLLEPSEMGRGTPLRLGFVAGVINRERIPTFERMLWRVCRGNVFLRQAEIENPLEDPVTGDYVHKSVFIIFFQGDQLKNRVKKICEGFRASLYPCPETPQERKEMASGVNTRIDDLQMVLNQTEDHRQRVLQAAAKNIRVWFIKVRKMKAIYHTLNLCNIDVTQKCLIAEVWCPVTDLDSIQFALRRGTEHSGSTVPSILNRMQTNQTPPTYNKTNKFTYGFQNIVDAYGIGTYREINPAPYTIITFPFLFAVMFGLRRVQGITLE

SEQ ID NO: 830342 - protein, 689 aa, Homo sapiens
MAVVSAVRWLGLRSRLGQPLTGRRAGLCEQARSCRFYSGSATLSKVEGTDVTGIEEVVIPKKKTWDKVAVLQALASTVNRDTTAVPYVFQDDPYLMPASSLESRSFLLAKKSGENVAKFIINSYPKYFQKDIAEPHIPCLMPEYFEPQIKDISEAALKERIELRKVKASVDMFDQLLQAGTTVSLETTNSLLDLLCYYGDQEPSTDYHFQQTGQSEALEEENDETSRRKAGHQFGVTWRAKNNAERIFSLMPEKNEHSYCTMIRGMVKHRAYEQALNLYTELLNNRLHADVYTFNALIEATVCAINEKFEEKWSKILELLRHMVAQKVKPNLQTFNTILKCLRRFHVFARSPALQVLREMKAIGIEPSLATYHHIIRLFDQPGDPLKRSSFIIYDIMNELMGKRFSPKDPDDDKFFQSAMSICSSLRDLELAYQVHGLLKTGDNWKFIGPDQHRNFYYSKFFDLICLMEQIDVTLKWYEDLIPSAYFPHSQTMIHLLQALDVANRLEVIPKIWKDSKEYGHTFRSDLREEILMLMARDKHPPELQVAFADCAADIKSAYESQPIRQTAQDWPATSLNCIAILFLRAGRTQEAWKMLGLFRKHNKIPRSELLNELMDSAKVSNSPSQAIEVVELASAFSLPICEGLTQRVMSDFAINQEQKEALSNLTALTSDSDTDSSSDSDSDTSEGK

SEQ ID NO: 830343 - protein, 387 aa, Homo sapiens
MAVVSAVRWLGLRSRLGQPLTGRRAGLCEQARSCRFYSGSATLSKVEGTDVTGIEEVVIPKKKTWDKVAVLQALASTVNRDTTAVPYVFQDDPYLMPASSLESRSFLLAKKSGENVAKFIINSYPKYFQKDIAEPHIPCLMPEYFEPQIKDISEAALKERIELRKVKASVDMFDQLLQAGTTVSLETTNSLLDLLCYYGDQEPSTDYHFQQTGQSEALEEENDETSRRKAGHQFGVTWRAKNNAERIFSLMPEKNEHSYCTMIRGMVKHRAYEQALNLYTELLNNRLHADVYTFNALIEATVCAINEKFEEKWSKILELLRHMVAQKVKPNLQTFNTILKCLRRFHVFARSPALQVLREMKAIGIGEDAPLSSLRTETVPARGFRAT

SEQ ID NO: 830344 - protein, 387 aa, Homo sapiens; identical to SEQ ID NO: 830343

SEQ ID NO: 830345 - protein, 276 aa, Homo sapiens
MAVVSAVRWLGLRSRLGQPLTGRRAGLCEQARSCRFYSGSATLSKVEGTDVTGIEEVVIPKKKTWDKVAVLQALASTVNRDTTAVPYVFQDDPYLMPASSLESRSFLLAKKSGENVAKFIINSYPKYFQKDIAEPHIPCLMPEYFEPQIKDISEAALKERIELRKVKASVDMFDQLLQAGTTVSLETTNSLLDLLCYYGDQEPSTDYHFQQTGQSEALEEENDETSRRKAGHQFGVTWRAKNNAERIFSLMPEKNEHSYCTMIRGMVKLMYTHLMH

SEQ ID NO: 830346 - protein, 607 aa, Homo sapiens
MAVVSAVRWLGLRSRLGQPLTGRRAGLCEQARSCRFYSGSATLSKVEGTDVTGIEEVVIPKKKTWDKVAVLQALASTVNRDTTAVPYVFQDDPYLMPASSLESRSFLLAKKSGENVAKFIINSYPKYFQKDIAEPHIPCLMPEYFEPQIKDISEAALKERIELRKVKASVDMFDQLLQAGTTVSLETTNSLLDLLCYYGDQEPSTDYHFQQTGQSEALEEENDETSRRKAGHQFGVTWRAKNNAERIFSLMPEKNEHSYCTMIRGMVKHRAYEQALNLYTELLNNRLHADVYTFNALIEATVCAINEKFEEKWSKILELLRHMVAQKVKPNLQTFNTILKCLRRFHVFARSPALQVLREMKAIGIEPSLATYHHIIRLFDQPGDPLKRSSFIIYDIMNELMGKRFSPKDPDDDKFFQSAMSICSSLRDLELAYQVHGLLKTGDNWKFIGPDQHRNFYYSKFFDLICLMEQIDVTLKWYEDLIPSAYFPHSQTMIHLLQALDVANRLEVIPKIWKDSKEYGHTFRSDLREEILMLMARDKHPPELQVAFADCAADIKSAYESQPIRQTAQDWPATSLNCIAILFLRAGRTQEAWKMLGLFRKHNKIPR

SEQ ID NO: 830347 - protein, 387 aa, Homo sapiens; identical to SEQ ID NO: 830343

SEQ ID NO: 830348 - protein, 66 aa, Homo sapiens
IGSQAHSAQQVLDNSADLAKRFRKLGAPVVMVRVGWSDTFAEALKQEVDRPSPANLSLVIRISLHT

SEQ ID NO: 830349 - protein, 689 aa, Homo sapiens; identical to SEQ ID NO: 830342

SEQ ID NO: 830350 - protein, 672 aa, Homo sapiens
MAVVSAVRWLGLRSRLGQPLTGRRAGLCEQARSCRFYSGSATLSKVEGTDVTGIEEVVIPKKKTWDKVAVLQALASTVNRDTTAVPYVFQDDPYLMPASSLESRSFLLAKKSGENVAKFIINSYPKYFQKDIAEPHIPCLMPEYFEPQIKDISEAALKERIELRKVKASVDMFDQLLQAGTTVSLETTNSLLDLLCYYGDQEPSTDYHFQQTGQSEALEEENDETSRRKAGHQFGVTWRAKNNAERIFSLMPEKNEHSYCTMIRGMVKHRAYEQALNLYTELLNNRLHADVYTFNALIEATVCAINEKFEEKWSKILELLRHMVAQKVKPNLQTFNTILKCLRRFHVFARSPALQVLREMKAIGIGDPLKRSSFIIYDIMNELMGKRFSPKDPDDDKFFQSAMSICSSLRDLELAYQVHGLLKTGDNWKFIGPDQHRNFYYSKFFDLICLMEQIDVTLKWYEDLIPSAYFPHSQTMIHLLQALDVANRLEVIPKIWKDSKEYGHTFRSDLREEILMLMARDKHPPELQVAFADCAADIKSAYESQPIRQTAQDWPATSLNCIAILFLRAGRTQEAWKMLGLFRKHNKIPRSELLNELMDSAKVSNSPSQAIEVVELASAFSLPICEGLTQRVMSDFAINQEQKEALSNLTALTSDSDTDSSSDSDSDTSEGK

SEQ ID NO: 830351 - protein, 276 aa, Homo sapiens; identical to SEQ ID NO: 830345

SEQ ID NO: 830352 - protein, 367 aa, Homo sapiens [sequence omitted]

SEQ ID NO: 830353 - protein, 689 aa, Homo sapiens; identical to SEQ ID NO: 830342

SEQ ID NO: 830354 - protein, 594 aa, Homo sapiens
MPASSLESRSFLLAKKSGENVAKFIINSYPKYFQKDIAEPHIPCLMPEYFEPQIKDISEAALKERIELRKVKASVDMFDQLLQAGTTVSLETTNSLLDLLCYYGDQEPSTDYHFQQTGQSEALEEENDETSRRKAGHQFGVTWRAKNNAERIFSLMPEKNEHSYCTMIRGMVKHRAYEQALNLYTELLNNRLHADVYTFNALIEATVCAINEKFEEKWSKILELLRHMVAQKVKPNLQTFNTILKCLRRFHVFARSPALQVLREMKAIGIEPSLATYHHIIRLFDQPGDPLKRSSFIIYDIMNELMGKRFSPKDPDDDKFFQSAMSICSSLRDLELAYQVHGLLKTGDNWKFIGPDQHRNFYYSKFFDLICLMEQIDVTLKWYEDLIPSAYFPHSQTMIHLLQALDVANRLEVIPKIWKDSKEYGHTFRSDLREEILMLMARDKHPPELQVAFADCAADIKSAYESQPIRQTAQDWPATSLNCIAILFLRAGRTQEAWKMLGLFRKHNKIPRSELLNELMDSAKVSNSPSQAIEVVELASAFSLPICEGLTQRVMSDFAINQEQKEALSNLTALTSDSDTDSSSDSDSDTSEGK

SEQ ID NO: 830355 - protein, 595 aa, Homo sapiens
MAVVSAVRWLGLRSRLGQPLTGRRAGLCEQARSCRFYSGSATLSKVEGTDVTGIEEVVIPKKKTWDKVAVLQALASTVNRDTTAVPYVFQDDPYLMPASSLESRSFLLAKKSGENVAKFIINSYPKYFQKDIAEPHIPCLMPEYFEPQIKDISEAALKERIELRKVKASVDMFDQLLQAGTTVSLETTNSLLDLLCYYGDQEPSTDYHFQQTGQSEALEEENDETSRRKAGHQFGVTWRAKNNAERIFSLMPEKNEHSYCTMIRGMVKHRAYEQALNLYTELLNNRLHADVYTFNALIEATVCAINEKFEEKWSKILELLRHMVAQKVKPNLQTFNTILKCLRRFHVFARSPALQVLREMKAIGIEPSLATYHHIIRLFDQPGDPLKRSSFIIYDIMNELMGKRFSPKDPDDDKFFQSAMSICSSLRDLELAYQVHGLLKTGDNWKFIGPDQHRNFYYSKFFDLICLMEQIDVTLKWYEDLIPSAYFPHSQTMIHLLQALDVANRLEVIPKIWKDSKEYGHTFRSDLREEILMLMARDKHPPELQVAFADCAADIKSAYESQPIRQTAQDWPATSLNCIAILFLRAGRTQEACWK

SEQ ID NO: 830356 - protein, 279 aa, Homo sapiens
MAVVSAVRWLGLRSRLGQPLTGRRAGLCEQARSCRFYSGSATLSKVEGTDVTGIEEVVIPKKKTWDKVAVLQALASTVNRDTTAVPYVFQDDPYLMPASSLESRSFLLAKKSGENVAKFIINSYPKYFQKDIAEPHIPCLMPEYFEPQIKDISEAALKERIELRKVKASVDMFDQLLQAGTTVSLETTNSLLDLLCYYGDQEPSTDYHFQQTGQSEALEEENDETSRRKAGHQFGVTWRAKNNAERIFSLMPEKNEHSYCTMIRGMVKPEPTVLSLLWG

SEQ ID NO: 830357 - protein, 111 aa, Homo sapiens
HHYQPKKWPDERKIDGQERMLGFSFLLLAQDLLELKHKAGDTSQSSSEELTGIIKIEPTTYPGANSIAPSIIIVSSHVLSPSMNLNNVNVISDRKDHLLSLPVFPAYLLRR

SEQ ID NO: 830358 - protein, 519 aa, Homo sapiens
GGGGGGTWGGERFARFGPSPDSPPPPPYSRGIFLTLSILRTRDLPSGAMSEGVDLIDIYADEEFNQDPEFNNTDQIDLYDDVLTATSQPSDDRSSSTEPPPPVRQEPSPKPNNKTPAILYTYSGLRNRRAAVYVGSFSWWTTDQQLIQVIRSIGVYDVVELKFAENRANGQSKGYAEVVVASENSVHKLLELLPGKVLNGEKVDVRPATRQNLSQFEAQARKRECVRVPRGGIPPRAHSRDSSDSADGRATPSENLVPSSARVDKPPSVLPYFNRPPSALPLMGLPPPPIPPPPPLSSSFGVPPPPPGIHYQHLMPPPPRLPPHLAVPPPGAIPPALHLNPAFFPPPNATVGPPPDTYMKASAPYNHHGSRDSGPPPSTVSEAEFEDIMKRNRAISSSAISKAVSGASAGDYSDAIETLLTAIAVIKQSRVANDERCRVLISSLKDCLHGIEAKSYSVGASGSSSRKRHRSRERSPSRSRESSRRHRDLLHNEDRHDDYFQERNREHERHRDRERDRHH

SEQ ID NO: 830359 - protein, 371 aa, Homo sapiens
MSFALSIFTKSGREFLFSSLGCLQISFIFNFSFLRYAEVVVASENSVHKLLELLPGKVLNGEKVDVRPATRQNLSQFEAQARKRIPPRAHSRDSSDSADGRATPSENLVPSSARVDKPPSVLPYFNRPPSALPLMGLPPPPIPPPPPLSSSFGVPPPPPGIHYQHLMPPPPRLPPHLAVPPPGAIPPALHLNPAFFPPPNATVGPPPDTYMKASAPYNHHGSRDSGPPPSTVSEAEFEDIMKRNRAISSSAISKAVSGASAGDYSDAIETLLTAIAVIKQSRVANDERCRVLISSLKDCLHGIEAKSYSVGASGSSSRKRHRSRERSPSRSRESSRRHRDLLHNEDRHDDYFQERNREHERHRDRERDRHH

SEQ ID NO: 830360 - protein, 532 aa, Homo sapiens
GGGGGGTWGGERFARFGPSPDSPPPPPYSRGIFLTLSILRTRDLPSGAMSEGVDLIDIYADEEFNQDPEFNNTDQIDLYDDVLTATSQPSDDRSSSTEPPPPVRQEPSPKPNNKTPAILYTYSGLRNRRAAVYVGSFSWVGLISERELPEDVLVPKKAMIEWTTDQQLIQVIRSIGVYDVVELKFAENRANGQSKGYAEVVVASENSVHKLLELLPGKVLNGEKVDVRPATRQNLSQFEAQARKRIPPRAHSRDSSDSADGRATPSENLVPSSARVDKPPSVLPYFNRPPSALPLMGLPPPPIPPPPPLSSSFGVPPPPPGIHYQHLMPPPPRLPPHLAVPPPGAIPPALHLNPAFFPPPNATVGPPPDTYMKASAPYNHHGSRDSGPPPSTVSEAEFEDIMKRNRAISSSAISKAVSGASAGDYSDAIETLLTAIAVIKQSRVANDERCRVLISSLKDCLHGIEAKSYSVGASGSSSRKRHRSRERSPSRSRESSRRHRDLLHNEDRHDDYFQERNREHERHRDRERDRHH

SEQ ID NO: 830361 - protein, 337 aa, Homo sapiens
GGGGGGTWGGERFARFGPSPDSPPPPPYSRGIFLTLSILRTRDLPSGAMSEGVDLIDIYADEEFNQDPEFNNTDQIDLYDDVLTATSQPYFNRPPSALPLMGLPPPPIPPPPPLSSSFGVPPPPPGIHYQHLMPPPPRLPPHLAVPPPGAIPPALHLNPAFFPPPNATVGPPPDTYMKASAPYNHHGSRDSGPPPSTVSEAEFEDIMKRNRAISSSAISKAVSGASAGDYSDAIETLLTAIAVIKQSRVANDERCRVLISSLKDCLHGIEAKSYSVGASGSSSRKRHRSRERSPSRSRESSRRHRDLLHNEDRHDDYFQERNREHERHRDRERDRHH

SEQ ID NO: 830362 - protein, 251 aa, Homo sapiens
  misc_feature (29)..(29): Xaa can be any naturally occurring amino acid
KKGTGSMRDTGIENGTGTTEKGVWLEANXVFNGLASPPPGIHYQHLMPPPPRLPPHLAVPPPGAIPPALHLNPAFFPPPNATVGPPPDTYMKASAPYNHHGSRDSGPPPSTVSEAEFEDIMKRNRAISSSAISKAVSGASAGDYSDAIETLLTAIAVIKQSRVANDERCRVLISSLKDCLHGIEAKSYSVGASGSSSRKRHRSRERSPSRSRESSRRHRDLLHNEDRHDDYFQERNREHERHRDRERDRHH

SEQ ID NO: 830363 - protein, 510 aa, Homo sapiens
GGGGGGTWGGERFARFGPSPDSPPPPPYSRGIFLTLSILRTRDLPSGAMSEGVDLIDIYADEEFNQDPEFNNTDQIDLYDDVLTATSQPSDDRSSSTEPPPPVRQEPSPKPNNKTPAILYTYSGLRNRRAAVYVGSFSWWTTDQQLIQVIRSIGVYDVVELKFAENRANGQSKGYAEVVVASENSVHKLLELLPGKVLNGEKVDVRPATRQNLSQFEAQARKRIPPRAHSRDSSDSADGRATPSENLVPSSARVDKPPSVLPYFNRPPSALPLMGLPPPPIPPPPPLSSSFGVPPPPPGIHYQHLMPPPPRLPPHLAVPPPGAIPPALHLNPAFFPPPNATVGPPPDTYMKASAPYNHHGSRDSGPPPSTVSEAEFEDIMKRNRAISSSAISKAVSGASAGDYSDAIETLLTAIAVIKQSRVANDERCRVLISSLKDCLHGIEAKSYSVGASGSSSRKRHRSRERSPSRSRESSRRHRDLLHNEDRHDDYFQERNREHERHRDRERDRHH

SEQ ID NO: 830364 - protein, 510 aa, Homo sapiens; identical to SEQ ID NO: 830363

SEQ ID NO: 830365 - protein, 510 aa, Homo sapiens; identical to SEQ ID NO: 830363

SEQ ID NO: 830366 - protein, 510 aa, Homo sapiens; identical to SEQ ID NO: 830363

SEQ ID NO: 830367 - protein, 418 aa, Homo sapiens
GGGGGGTWGGERFARFGPSPDSPPPPPYSRGIFLTLSILRTRDLPSGAMSEGVDLIDIYADEEFNQDPEFNNTDQIDLYDDVLTATSQPSDDRSSSTEPPPPVRQEPSPKPNNKTPAILYTYSGLRNRRAAVYVGSFSWWTTDQQLIQVIRSIGVYDVVELKFAENRANGQSKGYAEVVVASENSVHKLLELLPGKVLNGEKVDVRPATRQNLSQFEAQARKRIPPRAHSRDSSDSADGRATPSENLVPSSARVDKPPSVLPYFNRPPSALPLMGLPPPPIPPPPPLSSSFGVPPPPPGIHYQHLMPPPPRLPPHLAVPPPGAIPPALHLNPAFFPPPNATVGPPPDTYMKASAPYNHHGSRDSGPPPSTVSEAEFEDIMKRNRAISSSAISKAVSGASAGNSVLTFAAFSLTFTFFS

SEQ ID NO: 830368 - protein, 373 aa, Homo sapiens
GGGGGGTWGGERFARFGPSPDSPPPPPYSRGIFLTLSILRTRDLPSGAMSEGVDLIDIYADEEFNQDPEFNNTDQIDLYDDVLTATSQPSDDRSSSTEPPPPVRQEPSPKPNNKTPAILYTYSGLRNRRAAVYVGSFSWWTTDQQLIQVIRSIGVYDVVELKFAENRANGQSKGYAEVVVASENSVHKLLELLPGKVLNGEKVDVRPATRQNLSQFEAQARKRECVRVPRGGIPPRAHSRDSSDSADGRATPSENLVPSSARVDKPPSVLPYFNRPPSALPLMGLPPPPIPPPPPLSSSFGVPPPPPGIHYQHLMPPPPRLPPHLAVPPPGAIPPALHLNPAFFPPPNATVGPPPDTYMKASGRAAVNLVVVG

SEQ ID NO: 830369 - protein, 510 aa, Homo sapiens; identical to SEQ ID NO: 830363

SEQ ID NO: 830370 - protein, 497 aa, Homo sapiens
GGRARRAGGIFLTLSILRTRDLPSGAMSEGVDLIDIYADEEFNQDPEFNNTDQIDLYDDVLTATSQPSDDRSSSTEPPPPVRQEPSPKPNNKTPAILYTYSGLRNRRAAVYVGSFSWWTTDQQLIQVIRSIGVYDVVELKFAENRANGQSKGYAEVVVASENSVHKLLELLPGKVLNGEKVDVRPATRQNLSQFEAQARKRECVRVPRGGIPPRAHSRDSSDSADGRATPSENLVPSSARVDKPPSVLPYFNRPPSALPLMGLPPPPIPPPPPLSSSFGVPPPPPGIHYQHLMPPPPRLPPHLAVPPPGAIPPALHLNPAFFPPPNATVGPPPDTYMKASAPYNHHGSRDSGPPPSTVSEAEFEDIMKRNRAISSSAISKAVSGASAGDYSDAIETLLTAIAVIKQSRVANDERCRVLISSLKDCLHGIEAKSYSVGASGSSSRKRHRSRERSPSRSRESSRRHRDLLHNEDRHDDYFQERNREHERHRDRERDRHH

SEQ ID NO: 830371 - protein, 394 aa, Homo sapiens
MTEAAALNHLLLFARSHLPSPTTRPLQFCIPTVACVIDELPFMWAASPGYAEVVVASENSVHKLLELLPGKVLNGEKVDVRPATRQNLSQFEAQARKRECVRVPRGGIPPRAHSRDSSDSADGRATPSENLVPSSARVDKPPSVLPYFNRPPSALPLMGLPPPPIPPPPPLSSSFGVPPPPPGIHYQHLMPPPPRLPPHLAVPPPGAIPPALHLNPAFFPPPNATVGPPPDTYMKASAPYNHHGSRDSGPPPSTVSEAEFEDIMKRNRAISSSAISKAVSGASAGDYSDAIETLLTAIAVIKQSRVANDERCRVLISSLKDCLHGIEAKSYSVGASGSSSRKRHRSRERSPSRSRESSRRHRDLLHNEDRHDDYFQERNREHERHRDRERDRHH

SEQ ID NO: 830372 - protein, 443 aa, Homo sapiens
GGGGGGTWGGERFARFGPSPDSPPPPPYSRGIFLTLSILRTRDLPSGAMSEGVDLIDIYADEEFNQDPEFNNTDQIDLYDDVLTATSQPSDDRSSSTEPPPPVRQEPSPKPNNKTPAILYTYSGLRNRRAAVYVGSFSWWTTDQQLIQVIRSIGVYDVVELKFAENRANGQSKGYAEVVVASENSVHKLLELLPGKVLNGEKVDVRPATRQNLSQFEAQARKRIPPRAHSRDSSDSADGRATPSENLVPSSARVDKPPSVLPYFNRPPSALPLMVGPPPDTYMKASAPYNHHGSRDSGPPPSTVSEAEFEDIMKRNRAISSSAISKAVSGASAGDYSDAIETLLTAIAVIKQSRVANDERCRVLISSLKDCLHGIEAKSYSVGASGSSSRKRHRSRERSPSRSRESSRRHRDLLHNEDRHDDYFQERNREHERHRDRERDRHH

SEQ ID NO: 830373 - protein, 156 aa, Homo sapiens
MVFSLYSRDSGPPPSTVSEAEFEDIMKRNRAISSSAISKAVSGASAGDYSDAIETLLTAIAVIKQSRVANDERCRVLISSLKDCLHGIEAKSYSVGASGSSSRKRHRSRERSPSRSRESSRRHRDLLHNEDRHDDYFQERNREHERHRDRERDRHH

SEQ ID NO: 830374 - protein, 510 aa, Homo sapiens; identical to SEQ ID NO: 830363

SEQ ID NO: 830375 - protein, 111 aa, Homo sapiens; identical to SEQ ID NO: 830357

SEQ ID NO: 830376 - protein, 418 aa, Homo sapiens; identical to SEQ ID NO: 830367

SEQ ID NO: 830377 - protein, 113 aa, Homo sapiens
GGGGGGTWGGERFARFGPSPDSPPPPPYSRGIFLTLSILRTRDLPSGAMSEGVDLIDIYADEEFNQDPEFNNTDQIDLYDDVLTATSQPSDDRSSSTEPPRRIPDDHDEFRHD

SEQ ID NO: 830378 - protein, 838 aa, Homo sapiens
GTRRARSQRAAGADGRRGGRRQGRSVYSCSGAVSWRRLGRLLSPGSAAAAKAAAPALSLSLSRLWLQVKGKQARMDIYDTQTLGVVVFGGFMVVSAIGIFLVSTFSMKETSYEEALANQRKEMAKTHHQKVEKKKKEKTVEKKGKTKKKEEKPNGKIPDHDPAPNVTVLLREPVRAPAVAVAPTPVQPPIIVAPVATVPAMPQEKLASSPKDKKKKEKKVAKVEPAVSSVVNSIQVLTSKAAILETAPKEGRNTDVAQSPEAPKQEAPAKKKSGSKKKGEPGPPDADGPLYLPYKTLVSTVGSMVFNEGEAQRLIEILSEKAGIIQDTWHKATQKGDPVAILKRQLEEKEKLLATEQEDAAVAKSKLRELNKEMAAEKAKAAAGEAKVKKQLVAREQEITAVQARMQASYREHVKEVQQLQGKIRTLQEQLENGPNTQLARLQQENSILRDALNQATSQVESKQNAELAKLRQELSKVSKELVEKSEAVRQDEQQRKALEAKAAAFEKQVLQLQASHRESEEALQKRLDEVSRELCHTQSSHASLRADAEKAQEQQQQMAELHSKLQSSEAEVRSKCEELSGLHGQLQEARAENSQLTERIRSIEALLEAGQARDAQDVQASQAEADQQQTRLKELESQVSGLEKEAIELREAVEQQKVKNNDLREKNWKAMEALATAEQACKEKLHSLTQAKEESEKQLCLIEAQTMEALLALLPELSVLAQQNYTEWLQDLKEKGPTLLKHPPAPAEPSSDLASKLREAEETQSTLQAECDQYRSILAETEGMLRDLQKSVEEEEQVWRAKVGAAEEELQKSRVTVKHLEEIVEKLKGELESSDQR

SEQ ID NO: 830379 - protein, 304 aa, Homo sapiens
ILLLLFRRTWTVETFLRMVQCRSWRAAVASRCPSSILGPSPVQPPIIVAPVATVPAMPQEKLASSPKDKKKKEKKVAKVEPAVSSVVNSIQVLTSKAAILETAPKEVPMVVVPPVGAKGNTPATGTTQGKKAEGTQNQSKKAEGAPNQGRKAEGTPNQGKKTEGTPNQGKKAEGTPNQGKKAEGTPNQGKKAEGAQNQGKKVDTTPNQGKKVEGAPTQGRKAEGAQNQAKKVEGAQNQGKKAEGAQNQGKKGEGAQNQGKKAEGAQNQGKKAEGAQNQGKKAEGAQNQGKKAEGAQNQGKKAEG

SEQ ID NO: 830380 - protein, 764 aa, Homo sapiens
MDIYDTQTLGVVVFGGFMVVSAIGIFLVSTFSMKETSYEEALANQRKEMAKTHHQKVEKKKKEKTVEKKGKTKKKEEKPNGKIPDHDPAPNVTVLLREPVRAPAVAVAPTPVQPPIIVAPVATVPAMPQEKLASSPKDKKKKEKKVAKVEPAVSSVVNSIQVLTSKAAILETAPKEGRNTDVAQSPEAPKQEAPAKKKSGSKKKGEPGPPDADGPLYLPYKTLVSTVGSMVFNEGEAQRLIEILSEKAGIIQDTWHKATQKGDPVAILKRQLEEKEKLLATEQEDAAVAKSKLRELNKEMAAEKAKAAAGEAKVKKQLVAREQEITAVQARMQASYREHVKEVQQLQGKIRTLQEQLENGPNTQLARLQQENSILRDALNQATSQVESKQNAELAKLRQELSKVSKELVEKSEAVRQDEQQRKALEAKAAAFEKQVLQLQASHRESEEALQKRLDEVSRELCHTQSSHASLRADAEKAQEQQQQMAELHSKLQSSEAEVRSKCEELSGLHGQLQEARAENSQLTERIRSIEALLEAGQARDAQDVQASQAEADQQQTRLKELESQVSGLEKEAIELREAVEQQKVKNNDLREKNWKAMEALATAEQACKEKLHSLTQAKEESEKQLCLIEAQTMEALLALLPELSVLAQQNYTEWLQDLKEKGPTLLKHPPAPAEPSSDLASKLREAEETQSTLQAECDQYRSILAETEGMLRDLQKSVEEEEQVWRAKVGAAEEELQKSRVTVKHLEEIVEKLKGELESSDQR

SEQ ID NO: 830381 - protein, 770 aa, Homo sapiens
MLSWLLSTPGLGCSYLNSRGAQNQGKKAEGAQNQGKKAEGAQNQGKKVEGAQNQGKKAEGAQNQGKKAEGAQNQGKKAEGAQNQGQKGEGAQNQGKKTEGAQGKKAERSPNQGKKGEGAPIQGKKADSVANQGTKVEGITNQGKKAEGSPSEGKKAEGSPNQGKKADAAANQGKKTESASVQGRNTDVAQSPEAPKQEAPAKKKSGSKKKGEPGPPDADGPLYLPYKTLVSTVGSMVFNEGEAQRLIEILSEKAGIIQDTWHKATQKGDPVAILKRQLEEKEKLLATEQEDAAVAKSKLRELNKEMAAEKAKAAAGEAKVKKQLVAREQEITAVQARMQASYREHVKEVQQLQGKIRTLQEQLENGPNTQLARLQQENSILRDALNQATSQVESKQNAELAKLRQELSKVSKELVEKSEAVRQDEQQRKALEAKAAAFEKQVLQLQASHRESEEALQKRLDEVSRELCHTQSSHASLRADAEKAQEQQQQMAELHSKLQSSEAEVRSKCEELSGLHGQLQEARAENSQLTERIRSIEALLEAGQARDAQDVQASQAEADQQQTRLKELESQVSGLEKEAIELREAVEQQKVKNNDLREKNWKAMEALATAEQACKEKLHSLTQAKEESEKQLCLIEAQTMEALLALLPELSVLAQQNYTEWLQDLKEKGPTLLKHPPAPAEPSSDLASKLREAEETQSTLQAECDQYRSILAETEGMLRDLQKSVEEEEQVWRAKVGAAEEELQKSRVTVKHLEEIVEKLKGELESSDQR

SEQ ID NO: 830382 - protein, 785 aa, Homo sapiens
MLSWLLSTPGLGCSYLNSRGAQNQGKKAEGAQNQGKKAEGAQNQGKKVEGAQNQGKKAEGAQNQGKKAEGAQNQGKKAEGAQNQGQKGEGAQNQGKKTEGAQGKKAERSPNQGKKGEGAPIQGKKADSVANQGTKVEGITNQGKKAEGSPSEGKKAEGSPNQGKKADAAANQGKKTESASVQGRNTDVAQSPEAPKQEAPAKKKSGSKKKGEPGPPDADGPLYLPYKTLVSTVGSMVFNEGEAQRLIEILSEKAGIIQDTWHKATQKGDPVAILKRQLEEKEKLLATEQEDAAVAKSKLRELNKEMAAEKAKAAAGEAKVKKQLVAREQEITAVQARMQASYREHVKEVQQLQGKIRTLQEQLENGPNTQLARLQQENSILRDALNQATSQVESKQNAELAKLRQELSKVSKELVEKSEAVRQDEQQRKALEAKAAAFEKQVLQLQASHRESEEALQKRLDEVSRELCHTQSSHASLRADAEKAQEQQQQMAELHSKLQSSEAEVRSKCEELSGLHGQLQEARAENSQLTERIRSIEALLEAGQARDAQDVQASQAEADQQQTRLKELESQVSGLEKEAIELREAVEQQKVKNNDLREKNWKAMEALATAEQACKEKLHSLTQAKEESEKQLCLIEAQTMEALLALLPELSVLAQQNYTEWLQDLKEKGPTLLKHPPAPAEPSSDLASKLREAEETQSTLQAECDQYRSILAETEGMLRDLQKSVEEEEQVWRAKVGAAEEELQKSRVTVKHLEEIVEKLKGELESSDQVCALLRELFLLSREPL

SEQ ID NO: 830383 - protein, 785 aa, Homo sapiens; identical to SEQ ID NO: 830382

SEQ ID NO: 830384 - protein, 770 aa, Homo sapiens; identical to SEQ ID NO: 830381

SEQ ID NO: 830385 - protein, 770 aa, Homo sapiens; identical to SEQ ID NO: 830381

SEQ ID NO: 830386 - protein, 770 aa, Homo sapiens; identical to SEQ ID NO: 830381

SEQ ID NO: 830387 - protein, 343 aa, Homo sapiens
MDIYDTQTLGVVVFGGFMVVSAIGIFLVSTFSMKETSYEEALANQRKEMAKTHHQKVEKKKKEKTVEKKGKTKKKEEKPNGKIPDHDPAPNVTVLLREPVRAPAVAVAPTPVQPPIIVAPVATVPAMPQEKLASSPKDKKKKEKKVAKVEPAVSSVVNSIQVLTSKAAILETAPKEGRNTDVAQSPEAPKQEAPAKKKSGSKKKGEPGPPDADGPLYLPYKTLVSTVGSMVFNEGEAQRLIEILSEKAGIIQDTWHKATQKGDPVAILKRQLEEKEKLLATEQEDAAVAKSKLRELNKEMAAEKAKAAAGEAKVKKQLVAREQEIPGHSEASRRDCREAKRRT

SEQ ID NO: 830388 - protein, 435 aa, Homo sapiens
MDIYDTQTLGVVVFGGFMVVSAIGIFLVSTFSMKETSYEEALANQRKEMAKTHHQKVEKKKKEKTVEKKGKTKKKEEKPNGKIPDHDPAPNVTVLLREPVRAPAVAVAPTPVQPPIIVAPVATVPAMPQEKLASSPKDKKKKEKKVAKVEPAVSSVVNSIQVLTSKAAILETAPKEGRNTDVAQSPEAPKQEAPAKKKSGSKKKGEPGPPDADGPLYLPYKTLVSTVGSMVFNEGEAQRLIEILSEKAGIIQDTWHKATQKGDPVAILKRQLEEKEKLLATEQEDAAVAKSKLRELNKEMAAEKAKAAAGEAKVKKQLVAREQEKVREHTSHLEAELEKHMAAASAECQNYAKEVAGLRQLLLESQSQLDAAKSEAQKQSDELALVRQQLSEMKSHVEDGDIAGAPASSPEAPPAEQDPVQLKTQLEWTEAILGG

SEQ ID NO: 830389 - protein, 129 aa, Homo sapiens
MPYTFLTNKPTNLHSVIQAQLPVAPREAMRDKSLRATEVDLPEPQFVNEPVSHLINTILGAAPGHRRVTPKPWLTLTAPWVCGRPGALGSVCQCNRLVFFQWGGAGSGWDRAASSQRLWGRLEATAPHP

SEQ ID NO: 830390 - protein, 770 aa, Homo sapiens; identical to SEQ ID NO: 830381

SEQ ID NO: 830391 - protein, 785 aa, Homo sapiens; identical to SEQ ID NO: 830382

SEQ ID NO: 830392 - protein, 129 aa, Homo sapiens; identical to SEQ ID NO: 830389

SEQ ID NO: 830393 - protein, 374 aa, Homo sapiens
MDIYDTQTLGVVVFGGFMVVSAIGIFLVSTFSMKETSYEEALANQRKEMAKTHHQKVEKKKKEKTVEKKGKTKKKEEKPNGKIPDHDPAPNVTVLLREPVRAPAVAVAPTPVQPPIIVAPVATVPAMPQEKLASSPKDKKKKEKKVAKVEPAVSSVVNSIQVLTSKAAILETAPKEVPMVVVPPVGAKGNTPATGTTQGKKAEGTQNQSKKAEGAPNQGRKAEGTPNQGKKTEGTPNQGKKAEGTPNQGKKAEGTPNQGKKAEGAQNQGKKVDTTPNQGKKVEGAPTQGRKAEGAQNQAKKVEGAQNQGKKAEGAQNQGKKGEGAQNQGKKAEGAQNQGKKAEGAQNQGKKAEGAQNQGKKAEGAQNQGKKAEG

SEQ ID NO: 830394 - protein, 200 aa, Homo sapiens
MLSWLLSTPGLGCSYLNSRGAQNQGKKAEGAQNQGKKAEGAQNQGKKVEGAQNQGKKAEGAQNQGKKAEGAQNQGKKAEGAQNQGQKGEGAQNQGKKTEGAQGKKAERSPNQGKKGEGAPIQGKKADSVANQGTKVEGITNQGKKAEGSPSEGKKAEQGKKGEGAQNQGKKAEGAQNQGKKAVGPTGGHSPSPLDVANQN

SEQ ID NO: 830395 - protein, 164 aa, Homo sapiens
PSKEEASPKVPGLGGSSSHYLYILCHAKEKKHAPITLRRSRRSLTILKLSQSGCDPHPCAGSFVNFGHSFFTFLKAPEPTNKWPGPLLNQIVSCKATCPPSFNLTCHVGFGLIPPPIQGGMEMSGLMCQVITARERVGPGSQFSKAVGPTGGHSPSPLDVANQN

SEQ ID NO: 830396 - protein, 770 aa, Homo sapiens; identical to SEQ ID NO: 830381

SEQ ID NO: 830397 - protein, 764 aa, Homo sapiens; identical to SEQ ID NO: 830380

SEQ ID NO: 830398 - protein, 495 aa, Homo sapiens
GNTADVADIYIRVDLYERVDEASITQAITPARRGSRDDPSTLVALLMQDITGEHVRHASPWYREASLRDRYSMCMAELHILHEQLCEWTASLAWRLARLQQENSILRDALNQATSQVESKQNAELAKLRQELSKVSKELVEKSEAVRQDEQQRKALEAKAAAFEKQVLQLQASHRESEEALQKRLDEVSRELCHTQSSHASLRADAEKAQEQQQQMAELHSKLQSSEAEVRSKCEELSGLHGQLQEARAENSQLTERIRSIEALLEAGQARDAQDVQASQAEADQQQTRLKELESQVSGLEKEAIELREAVEQQKVKNNDLREKNWKAMEALATAEQACKEKLHSLTQAKEESEKQLCLIEAQTMEALLALLPELSVLAQQNYTEWLQDLKEKGPTLLKHPPAPAEPSSDLASKLREAEETQSTLQAECDQYRSILAETEGMLRDLQKSVEEEEQVWRAKVGAAEEELQKSRVTVKHLEEIVEKLKGELESSDQR

SEQ ID NO: 830399 - protein, 770 aa, Homo sapiens; identical to SEQ ID NO: 830381

SEQ ID NO: 830400 - protein, 200 aa, Homo sapiens
LEFDGFSLAIELREAVEQQKVKNNDLREKNWKAMEALATAEQACKEKLHSLTQAKEESEKQLCLIEAQTMEALLALLPELSVLAQQNYTEWLQDLKEKGPTLLKHPPAPAEPSSDLASKLREAEETQSTLQAECDQYRSILAETEGMLRDLQKSVEEEEQVWRAKVGAAEEELQKSRVTVKHLEEIVEKLKGELESSDQR

SEQ ID NO: 830401 - protein, 770 aa, Homo sapiens; identical to SEQ ID NO: 830381

SEQ ID NO: 830402 - protein, 129 aa, Homo sapiens; identical to SEQ ID NO: 830389

SEQ ID NO: 830403 - protein, 770 aa, Homo sapiens; identical to SEQ ID NO: 830381

SEQ ID NO: 830404 - protein, 770 aa, Homo sapiens; identical to SEQ ID NO: 830381

SEQ ID NO: 830405 - protein, 129 aa, Homo sapiens; identical to SEQ ID NO: 830389

SEQ ID NO: 830406 - protein, 188 aa, Homo sapiens
  misc_feature (143)..(144): Xaa can be any naturally occurring amino acid
MLSWLLSTPGLGCSYLNSRGAQNQGKKAEGAQNQGKKAEGAQNQGKKVEGAQNQGKKAEGAQNQGKKAEGAQNQGKKAEGAQNQGQKGEGAQNQGKKTEGAQGKKAERSPNQGKKGEGVKTVRPRPRGQRVSQQPCYATSPPXXGVLKTNLLPFLTLIPTTDPWIAGNGSQVGSWHKFCNLQNKTFFL

SEQ ID NO: 830407 - protein, 37 aa, Homo sapiens
MVGVRLAVHLQTHPFLFQVRQQLSEMKSHVEDGDIAG

SEQ ID NO: 830408 - protein, 152 aa, Homo sapiens
MPPKFKRHLNDDDVTGSVKSERRNLLEDDSDEEEDFFLRGPSGPRFGPRNDKIKHVQNQVDEVIDVMQENITKVIERGERLDELQDKSESLSDNATAFSNRSKQLRRQMWWRGCKNKSPSWALGCLLIPFCLVDLFNFFISPWKNNPAPLEI

SEQ ID NO: 830409 - protein, 80 aa, Homo sapiens
PPSADRLDERRRCCGAAADAGSAPTVSPSQLLTSASYSFPRPPSTASPGELPGVPREPQVVTILLRSKRYFASKKYASQV

SEQ ID NO: 830410 - protein, 80 aa, Homo sapiens; identical to SEQ ID NO: 830409

SEQ ID NO: 830411 - protein, 101 aa, Homo sapiens
MPPKFKRHLNDDDVTGSVKSERRNLLEDDSDEEEDFFLRGPSGPRFGPRNDKIKHVQNQVRQGQWGGEIQRTAVCSTYQDFICIIESTLQGSWKFTYIRLD

SEQ ID NO: 830412 - protein, 141 aa, Homo sapiens
MPPKFKRHLNDDDVTGSVKSERRNLLEDDSDEEEDFFLRGPSGPRFGPRNDKIKHVQNQVDEVIDVMQENITKVIERGERLDELQDKSESLSDNATAFSNRSKQLRRQMWWRGCKIKAIMALVAAILLLVIIILIVMKYRT

SEQ ID NO: 830413 - protein, 141 aa, Homo sapiens; identical to SEQ ID NO: 830412

SEQ ID NO: 830414 - protein, 80 aa, Homo sapiens; identical to SEQ ID NO: 830409

SEQ ID NO: 830415 - protein, 80 aa, Homo sapiens; identical to SEQ ID NO: 830409

SEQ ID NO: 830416 - protein, 577 aa, Homo sapiens
MDVTKKNKRDGTEVTERIVTETVTTRLTSLPPKGGTSNGYAKTASLGGGSRLEKQSLTHGSSGYINSTGSTRGHASTSSYRRAHSPASTLPNSPGSTFERKTHVTRHAYEGSSSGNSSPEYPRKEFASSSTRGRSQTRESEIRVRLQSASPSTRWTELDDVKRLLKGSRSASVSPTRNSSNTLPIPKKGTVETKIVTASSQSVSGTYDAMILDANLPSHVWSSTLPAGSSMGTYHNNMTTQSSSLLNTNAYSAGSVFGVPNNMASCSPTLHPGLSTSSSVFGMQNNLAPSLTTLSHGTTTTSTAYGVKKNMPQSPAAVNTGVSTSAACTTSVQSDDLLHKDCKFLILEKDNTPAKKEMELLIMTKDSGKVFTASPASIAATSFSEDTLKKEKQAAYNADSGLKAEANGDLKTVSTKGKTTTADIHSYGSSGGGGSGGGGGVGGAGGGPWGPAPAWCPCGSCCSWWKWLLGLLLTWLLLLGLLFGLIALAEEVRKLKARVDELERIRRSILPYGDSMDRIEKDRLQGMAPAAGADLDKIGLHSDSQEELWMFVRKKLMMEQENGNLRGSPGPKGIAMD

SEQ ID NO: 830417 - protein, 295 aa, Homo sapiens
YSQRDVPLAIGGVQMHHSDFTAYGVKKNMPQSPAAVNTGVSTSAACTTSVQSDDLLHKDCKFLILEKDNTPAKKEMELLIMTKDSGKVFTASPASIAATSFSEDTLKKEKQAAYNADSGLKAEANGDLKTVSTKGKTTTADIHSYGSSGGGGSGGGGGVGGAGGGPWGPAPAWCPCGSCCSWWKWLLGLLLTWLLLLGLLFGLIALAEEVRKLKARVDELERIRRSILPYGDSMDRIEKDRLQGMAPAAGADLDKIGLHSDSQEELWMFVRKKLMMEQENGNLRGSPGPKGIAMD

SEQ ID NO: 830418 - protein, 600 aa, Homo sapiens
MDVTKKNKRDGTEVTERIVTETVTTRLTSLPPKGGTSNGYAKTASLGGGSRLEKQSLTHGSSGYINSTGSTRGHASTSSYRRAHSPASTLPNSPGSTFERKTHVTRHAYEGSSSGNSSPEYPRKEFDIKGTISHIELAVISLCSWHYRNASSSTRGRSQTRESEIRVRLQSASPSTRWTELDDVKRLLKGSRSASVSPTRNSSNTLPIPKKGTVETKIVTASSQSVSGTYDAMILDANLPSHVWSSTLPAGSSMGTYHNNMTTQSSSLLNTNAYSAGSVFGVPNNMASCSPTLHPGLSTSSSVFGMQNNLAPSLTTLSHGTTTTSTAYGVKKNMPQSPAAVNTGVSTSAACTTSVQSDDLLHKDCKFLILEKDNTPAKKEMELLIMTKDSGKVFTASPASIAATSFSEDTLKKEKQAAYNADSGLKAEANGDLKTVSTKGKTTTADIHSYGSSGGGGSGGGGGVGGAGGGPWGPAPAWCPCGSCCSWWKWLLGLLLTWLLLLGLLFGLIALAEEVRKLKARVDELERIRRSILPYGDSMDRIEKDRLQGMAPAAGADLDKIGLHSDSQEELWMFVRKKLMMEQENGNLRGSPGPKGIAMD

SEQ ID NO: 830419 - protein, 327 aa, Homo sapiens
MQKIKSLMTRQGLKSPQESLSDLGAIESLRVPGKEEFRELREQPSDPQAEQELINSIEQVYFSVDSFDIVKYELEKLPPVLNLQELEAYRDKLKQQQAAVSKKVADLILEKQPAYVKELERVTSLQTGLQLAAVICTNGRRHLNIAKEGFTQASLGLLANQRKRQLLIGLLKSLRTIKTLQRTDVRLSEMLEEEDYPGAIQLCLECQKAASTFKHYSCISELNSKLQDTLEQIEEQLDVALSKICKNFDINHYTKVQQAYRLLGKTQTAMDQLHMHFTQAIHNTVFQVVLGYVELCAGNTDTKFQKLQYKDLCTVCSDLITIHISLL

SEQ ID NO: 830420 - protein, 95 aa, Homo sapiens
TVEAFGSNSPSGIKTKEDLNEEQEDLSELNSKLQDTLEQIEEQLDVALSKICKNFDINHYTKCKHIWVCDMHRDFGQYEDPRPEDTCTTVEKDPV

SEQ ID NO: 830421 - protein, 775 aa, Homo sapiens
MLEEEDYPGAIQLCLECQKAASTFKHYSCISELNSKLQDTLEQIEEQLDVALSKICKNFDINHYTKVQQAYRLLGKTQTAMDQLHMHFTQAIHNTVFQVVLGYVELCAGNTDTKFQKLQYKDLCTHVTPDSYIPCLADLCKALWEVMLSYYRTMEWHEKHDNEDTASASEGSNMIGTEETNFDRGYIKKKLEHGLTRIWQDVQLKVKTYLLGTDLSIFKYDDFIFVLDIISRLMQVGEEFCGSKSEVLQESIRKQSVNYFKNYHRTRLDELRMFLENETWELCPVKSNFSILQLHEFKFMEQSRSPSVSPSKQPVSTSSKTVTLFEQYCSGGNPFEIQANHKDEETEDVLASNGYESDEQEKSAYQEYDSDSDVPEELKRDYVDEQTGDGPVKSVSRETLKSRKKSDYSLNKVNAPILTNTTLNVIRLVGKYMQMMNILKPIAFDVIHFMSQLFDYYLYAIYTFFGRNDSLESTGLGLSSSRLRTTLNRIQESLIDLEVSADPTATLTAAEERKEKVPSPHLSHLVVLTSGDTLYGLAERVVATESLVFLAEQFEFLQPHLDAVMPAVKKPFLQQFYSQTVSTASELRKPIYWIVAGKALDYEQMLLLMANVKWDVKEIMSQHNIYVDALLKEFEQFNRRLNEVSKRVRIPLPVSNILWEHCIRLANRTIVEGYANVKKCSNEGRALMQLDFQQFLMKLEKLTDIRPIPDKEFVETYIKAYYLTENDMERWIKEHREYSTKQLTNLVNVCLGSHINKKARQKLLAAIDDIDRPKR

SEQ ID NO: 830422 - protein, 682 aa, Homo sapiens
MQKIKSLMTRQGLKSPQESLSDLGAIESLRVPGKEEFRELREQPSDPQAEQELINSIEQVYFSVDSFDIVKYELEKLPPVLNLQELEAYRDKLKQQQAAVSKKVADLILEKQPAYVKELERVTSLQTGLQLAAVICTNGRRHLNIAKEGFTQASLGLLANQRKRQLLIGLLKSLRTIKTLQRTDVRLSEMLEEEDYPGAIQLCLECQKAASTFKHYSCISELNSKLQDTLEQIEEQLDVALSKICKNFDINHYTKVQQAYRLLGKTQTAMDQLHMHFTQAIHNTVFQVVLGYVELCAGNTDTKFQKLQYKDLCTHVTPDSYIPCLADLCKALWEVMLSYYRTMEWHEKHDNEDTASASEGSNMIGTEETNFDRGYIKKKLEHGLTRIWQDVQLKVKTYLLGTDLSIFKYDDFIFVLDIISRLMQVGEEFCGSKSEVLQESIRKQSVNYFKNYHRTRLDELRMFLENETWELCPVKSNFSILQLHEFKFMEQSRSPSVSPSKQPVSTSSKTVTLFEQYCSGGNPFEIQANHKDEETEDVLASNGYESDEQEKSAYQEYDSDSDVPEELKRDYVDEQTGDGPVKSVSRETLKSRKKSDYSLNKVNAPILTNTTLNVIRLVDGVSLCCLGWSTVAHLHSLQAPPPGFKPFSCLSLPRSWDYRRPPPRPANFLYFLLFSRDGVSPC

SEQ ID NO: 830423 - protein, 79 aa, Homo sapiens
  misc_feature (9)..(9): Xaa can be any naturally occurring amino acid
QAGTTLRVXAIADPRCRYETYIKAYYLTENDMERWIKEHREYSTKQLTNLVNVCLGSHINKKARQKLLAAIDDIDRPKR

SEQ ID NO: 830424 - protein, 74 aa, Homo sapiens
  misc_feature (10)..(10): Xaa can be any naturally occurring amino acid
  misc_feature (12)..(12): Xaa can be any naturally occurring amino acid
  misc_feature (29)..(29): Xaa can be any naturally occurring amino acid
  misc_feature (45)..(45): Xaa can be any naturally occurring amino acid
RTSFLKKCSXTXPFQHTFESQQSGTRCTXQSPVGLKIFAMLKLSXARKAVAGSGAESSVRAAAGQEPLATPSGS

SEQ ID NO: 830425 - protein, 867 aa, Homo sapiens
MLEEEDYPGAIQLCLECQKAASTFKHYSCISELNSKLQDTLEQIEEQLDVALSKICKNFDINHYTKVQQAYRLLGKTQTAMDQLHMHFTQAIHNTVFQVVLGYVELCAGNTDTKFQKLQYKDLCTHVTPDSYIPCLADLCKALWEVMLSYYRTMEWHEKHDNEDTASASEGSNMIGTEETNFDRGYIKKKLEHGLTRIWQDVQLKVKTYLLGTDLSIFKYDDFIFVLDIISRLMQVGEEFCGSKSEVLQESIRKQSVNYFKNYHRTRLDELRMFLENETWELCPVKSNFSILQLHEFKFMEQSRSPSVSPSKQPVSTSSKTVTLFEQYCSGGNPFEIQANHKDEETEDVLASNGYESDEQEKSAYQEYDSDSDVPEELKRDYVDEQTGDGPVKSVSRETLKSRKKSDYSLNKVNAPILTNTTLNVIRLVGKYMQMMNILKPIAFDVIHFMSQLFDYYLYAIYTFFGRNDSLESTGLGLSSSRLRTTLNRIQESLIDLDMFDMKSKNVHKLISKAFVAWHQNTKKGKLVMRRFLMSISSDESKTEKFEVQMSFPDHKLDCITPVDYMAVYTESVVLSWMVLKSLAHPASWEVSADPTATLTAAEERKEKVPSPHLSHLVVLTSGDTLYGLAERVVATESLVFLAEQFEFLQPHLDAVMPAVKKPFLQQFYSQTVSTASELRKPIYWIVAGKALDYEQMLLLMANVKWDVKEIMSQHNIYVDALLKEFEQFNRRLNEVSKRVRIPLPVSNILWEHCIRLANRTIVEGYANVKKCSNEGRALMQLDFQQFLMKLEKLTDIRPIPDKEFVETYIKAYYLTENDMERWIKEHREYSTKQLTNLVNVCLGSHINKKARQKLLAAIDDIDRPKR

SEQ ID NO: 830426 - protein, 964 aa, Homo sapiens
MQKIKSLMTRQGLKSPQESLSDLGAIESLRVPGKEEFRELREQPSDPQAEQELINSIEQVYFSVDSFDIVKYELEKLPPVLNLQELEAYRDKLKQQQAAVSKKVADLILEKQPAYVKELERVTSLQTGLQLAAVICTNGRRHLNIAKEGFTQASLGLLANQRKRQLLIGLLKSLRTIKTLQRTDVRLSEMLEEEDYPGAIQLCLECQKAASTFKHYSCISELNSKLQDTLEQIEEQLDVALSKICKNFDINHYTKVQQAYRLLGKTQTAMDQLHMHFTQAIHNTVFQVVLGYVELCAGNTDTKFQKLQYKDLCTHVTPDSYIPCLADLCKALWEVMLSYYRTMEWHEKHDNEDTASASEGSNMIGTEETNFDRGYIKKKLEHGLTRIWQDVQLKVKTYLLGTDLSIFKYDDFIFVLDIISRLMQVGEEFCGSKSEVLQESIRKQSVNYFKNYHRTRLDELRMFLENETWELCPVKSNFSILQLHEFKFMEQSRSPSVSPSKQPVSTSSKTVTLFEQYCSGGNPFEIQANHKDEETEDVLASNGYESDEQEKSAYQEYDSDSDVPEELKRDYVDEQTGDGPVKSVSRETLKSRKKSDYSLNKVNAPILTNTTLNVIRLVGKYMQMMNILKPIAFDVIHFMSQLFDYYLYAIYTFFGRNDSLESTGLGLSSSRLRTTLNRIQESLIDLEVSADPTATLTAAEERKEKVPSPHLSHLVVLTSGDTLYGLAERVVATESLVFLAEQFEFLQPHLDAVMPAVKKPFLQQFYSQTVSTASELRKPIYWIVAGKALDYEQMLLLMANVKWDVKEIMSQHNIYVDALLKEFEQFNRRLNEVSKRVRIPLPVSNILWEHCIRLANRTIVEGYANVKKCSNEGRALMQLDFQQFLMKLEKLTDIRPIPDKEFVETYIKAYYLTENDMERWIKEHREYSTKQLTNLVNVCLGSHINKKARQKLLAAIDDIDRPKR

SEQ ID NO: 830427 - protein, 775 aa, Homo sapiens; identical to SEQ ID NO: 830421

SEQ ID NO: 830428 - protein, 682 aa, Homo sapiens; identical to SEQ ID NO: 830422

SEQ ID NO: 830429 - protein, 181 aa, Homo sapiens; identical to SEQ ID NO: 780359

SEQ ID NO: 830430 - protein, 181 aa, Homo sapiens; identical to SEQ ID NO: 780359

SEQ ID NO: 830431 - protein, 181 aa, Homo sapiens; identical to SEQ ID NO: 780359

SEQ ID NO: 830432 - protein, 181 aa, Homo sapiens; identical to SEQ ID NO: 780359

SEQ ID NO: 830433 - protein, 181 aa, Homo sapiens; identical to SEQ ID NO: 780359

SEQ ID NO: 830434 - protein, 284 aa, Homo sapiens
VPVAASGATVEWNVTGCVTPEEWVPWACMPVCLNVCRLVDASRDAGAGYSAVVQDVLCCDCMLCCSLIAVNSDQVFHTRDQAKTRLPLPLLGPHCPQKAAAVIMGNIFGNLLKSLIGKKEMRILMVGLDAAGKTTILYKLKLGEIVTTIPTIGFNVETVEYKNISFTVWDVGGQDKIRPLWRHYFQNTQGLIFVVDSNDRERVNEAREELMRMLAEDELRDAVLLVFANKQDLPNAMNAAEITDKLGLHSLRHRNWYIQATCATSGDGLYEGLDWLANQLKNKK

SEQ ID NO: 830435 - protein, 266 aa, Homo sapiens
MYHIFTCVLFPSIELLPCIVRIFIVVYLAFPKRLDAFRLQELDFVSSSTMPMQTDQVFHTRDQAKTRLPLPLLGPHCPQKAAAVIMGNIFGNLLKSLIGKKEMRILMVGLDAAGKTTILYKLKLGEIVTTIPTIGFNVETVEYKNISFTVWDVGGQDKIRPLWRHYFQNTQGLIFVVDSNDRERVNEAREELMRMLAEDELRDAVLLVFANKQDLPNAMNAAEITDKLGLHSLRHRNWYIQATCATSGDGLYEGLDWLANQLKNKK

SEQ ID NO: 830436 - protein, 217 aa, Homo sapiens
MPMQTDQVFHTRDQAKTRLPLPLLGPHCPQKAAAVIMGNIFGNLLKSLIGKKEMRILMVGLDAAGKTTILYKLKLGEIVTTIPTIGFNVETVEYKNISFTVWDVGGQDKIRPLWRHYFQNTQGLIFVVDSNDRERVNEAREELMRMLAEDELRDAVLLVFANKQDLPNAMNAAEITDKLGLHSLRHRNWYIQATCATSGDGLYEGLDWLANQLKNKK

SEQ ID NO: 830437 - protein, 224 aa, Homo sapiens
  misc_feature (4)..(4): Xaa can be any naturally occurring amino acid
  misc_feature (9)..(9): Xaa can be any naturally occurring amino acid
  misc_feature (12)..(12): Xaa can be any naturally occurring amino acid
SASXSSRFXKSXDQVFHTRDQAKTRLPLPLLGPHCPQKAAAVIMGNIFGNLLKSLIGKKEMRILMVGLDAAGKTTILYKLKLGEIVTTIPTIGFNVETVEYKNISFTVWDVGGQDKIRPLWRHYFQNTQGLIFVVDSNDRERVNEAREELMRMLAEDELRDAVLLVFANKQDLPNAMNAAEITDKLGLHSLRHRNWYIQATCATSGDGLYEGLDWLANQLKNKK

SEQ ID NO: 830438 - protein, 169 aa, Homo sapiens
MDPLSQFGTLVGLDAAGKTTILYKLKLGEIVTTIPTIGFNVETVEYKNISFTVWDVGGQDKIRPLWRHYFQNTQGLIFVVDSNDRERVNEAREELMRMLAEDELRDAVLLVFANKQDLPNAMNAAEITDKLGLHSLRHRNWYIQATCATSGDGLYEGLDWLANQLKNKK

SEQ ID NO: 830439 - protein, 181 aa, Homo sapiens; identical to SEQ ID NO: 780359

SEQ ID NO: 830440 - protein, 176 aa, Homo sapiens
MDNSELIRNVTLGGHLHHGKVRENFQLLGTGFLFCTCSCLSPESRFNVETVEYKNISFTVWDVGGQDKIRPLWRHYFQNTQGLIFVVDSNDRERVNEAREELMRMLAEDELRDAVLLVFANKQDLPNAMNAAEITDKLGLHSLRHRNWYIQATCATSGDGLYEGLDWLANQLKNKK

SEQ ID NO: 830441 - protein, 181 aa, Homo sapiens; identical to SEQ ID NO: 780359

SEQ ID NO: 830442 - protein, 181 aa, Homo sapiens; identical to SEQ ID NO: 780359

SEQ ID NO: 830443 - protein, 181 aa, Homo sapiens; identical to SEQ ID NO: 780359

SEQ ID NO: 830444 - protein, 181 aa, Homo sapiens; identical to SEQ ID NO: 780359

SEQ ID NO: 830445 - protein, 150 aa, Homo sapiens
MSHSNLLDLKQKVVTVSWGGPSLSLTSGFREVEWGILFVWQWLLSSWHLSPFPVPTSPSTPCLPFLCHPLPVLHGNCTGLSVFACMCAPVYTCIERYICGGRGERGGGGVKLRACSQDTAHWSLSSAPSVLVRLREEGGRALVKPDCPSL

SEQ ID NO: 830446 - protein, 181 aa, Homo sapiens; identical to SEQ ID NO: 780359

SEQ ID NO: 830447 - protein, 181 aa, Homo sapiens; identical to SEQ ID NO: 780359

SEQ ID NO: 830448 - protein, 181 aa, Homo sapiens; identical to SEQ ID NO: 780359

SEQ ID NO: 830449 - protein, 181 aa, Homo sapiens; identical to SEQ ID NO: 780359

SEQ ID NO: 830450 - protein, 181 aa, Homo sapiens; identical to SEQ ID NO: 780359

SEQ ID NO: 830451 - protein, 181 aa, Homo sapiens; identical to SEQ ID NO: 780359

SEQ ID NO: 830452 - protein, 181 aa, Homo sapiens; identical to SEQ ID NO: 780359

SEQ ID NO: 830453 - protein, 266 aa, Homo sapiens; identical to SEQ ID NO: 830435

SEQ ID NO: 830454 - protein, 181 aa, Homo sapiens; identical to SEQ ID NO: 780359

SEQ ID NO: 830455 - protein, 165 aa, Homo sapiens
  misc_feature (6)..(6): Xaa can be any naturally occurring amino acid
MTRDSXLGLDAAGKTTILYKLKLGEIVTTIPTIGFNVETVEYKNISFTVWDVGGQDKIRPLWRHYFQNTQGLIFVVDSNDRERVNEAREELMRMLAEDELRDAVLLVFANKQDLPNAMNAAEITDKLGLHSLRHRNWYIQATCATSGDGLYEGLDWLANQLKNKK

SEQ ID NO: 830456 - protein, 139 aa, Homo sapiens
LPVFFPKGFNVETVEYKNISFTVWDVGGQDKIRPLWRHYFQNTQGLIFVVDSNDRERVNEAREELMRMLAEDELRDAVLLVFANKQDLPNAMNAAEITDKLGLHSLRHRNWYIQATCATSGDGLYEGLDWLANQLKNKK

SEQ ID NO: 830457 - protein, 165 aa, Homo sapiens
VQILVVGGGHLLGRLAAIVAKQVLLGRKVVVVRCEGINISGNFYRNKLKYLAFLRKPVQIWVLGGGKEGGSRGVGQAANDRERVNEAREELMRMLAEDELRDAVLLVFANKQDLPNAMNAAEITDKLGLHSLRHRNWYIQATCATSGDGLYEGLDWLANQLKNKK

SEQ ID NO: 830458 - protein, 181 aa, Homo sapiens; identical to SEQ ID NO: 780359

SEQ ID NO: 830459 - protein, 262 aa, Homo sapiens
VQILVVGGGHLLGRLAAIVAKQVLLGRKVVVVRCEGINISGNFYRNKLKYLAFLRKPVQIWVLGGGKEGGSRGVGQAALGIMSTCPARALPPLPPLLFPVHLYDQSLIAVLMMSHSNLLDLKQKVVTVSWGGPSLSLTSGFREVEWGILFVWQWLLSSWHLSPFPVPTSPSTPCLPFLCHPLPVLHGNCTGLSVFACMCAPVYTCIERYICGGRGERGGGGVKLRACSQDTAHWSLSSAPSVLVRLREEGGRALVKPDCPSL

SEQ ID NO: 830460 - protein, 167 aa, Homo sapiens
MGNIFGNLLKSLIGKKEMRILMVGLDAAGKTTILYKLKLGEIVTTIPTIVVAVLLASESFPCPHKPFYSLFAFPLPPSPCFTWKLHGPLCVCVHVCACIYMYREIYLWGPGGAGRGWSEAQGLQPGHCPLEPVICPFRVGEIKGRRWEGISQAGLPQSLTGYPPLCR

SEQ ID NO: 830461 - protein, 181 aa, Homo sapiens; identical to SEQ ID NO: 780359

SEQ ID NO: 830462 - protein, 86 aa, Homo sapiens
DIQELMVTSEELTEDNLMKKSASKPGQTVRKQHAEAVPENKSTLDNLAEGLQLSKSAFDLFLGHKPCYDTGTKIKANGGRRIGAMV

SEQ ID NO: 830463 - protein, 320 aa, Homo sapiens
MSVGFIGAGQLAYALARGFTAAGILSAHKIIASSPEMNLPTVSALRKMGVNLTRSNKETVKHSDVLFLAVKPHIIPFILDEIGADVQARHIVVSCAAGVTISSVEKKLMAFQPAPKVIRCMTNTPVVVQEGATVYATGTHALVEDGQLLEQLMSSVGFCTEVEEDLIDAVTGLSGSGPAYAFMALDALADGGVKMGLPRRLAIQLGAQALLGAAKMLLDSEQHPCQLKDNVCSPGGATIHALHFLESGGFRSLLINAVEASCIRTRELQSMADQEKISPAALKKTLLDRVKLESPTVSTLTPSSPGKLLTRSLALGGKKD

SEQ ID NO: 830464 - protein, 320 aa, Homo sapiens; identical to SEQ ID NO: 830463

SEQ ID NO: 830465 - protein, 320 aa, Homo sapiens; identical to SEQ ID NO: 830463

SEQ ID NO: 830466 - protein, 273 aa, Homo sapiens [sequence omitted]

SEQ ID NO: 830467 - protein, 284 aa, Homo sapiens
MNLPTVSALRKMGVNLTRSNKETVKHSDVLFLAVKPHIIPFILDEIGADVQARHIVVSCAAGVTISSVEKKLMAFQPAPKVIRCMTNTPVVVQEGATVYATGTHALVEDGQLLEQLMSSVGFCTEVEEDLIDAVTGLSGSGPAYAFMALDALADGGVKMGLPRRLAIQLGAQALLGAAKMLLDSEQHPCQLKDNVCSPGGATIHALHFLESGGFRSLLINAVEASCIRTRELQSMADQEKISPAALKKTLLDRVKLESPTVSTLTPSSPGKLLTRSLALGGKKD

SEQ ID NO: 830468 - protein, 284 aa, Homo sapiens
MLWRGASRPQKMGVNLTRSNKETVKHSDVLFLAVKPHIIPFILDEIGADVQARHIVVSCAAGVTISSVEKKLMAFQPAPKVIRCMTNTPVVVQEGATVYATGTHALVEDGQLLEQLMSSVGFCTEVEEDLIDAVTGLSGSGPAYAFMALDALADGGVKMGLPRRLAIQLGAQALLGAAKMLLDSEQHPCQLKDNVCSPGGATIHALHFLESGGFRSLLINAVEASCIRTRELQSMADQEKISPAALKKTLLDRVKLESPTVSTLTPSSPGKLLTRSLALGGKKD

SEQ ID NO: 830469 - protein, 175 aa, Homo sapiens
MSVGFIGAGQLAYALARGFTAAGILSAHKIIASSPEMNLPTVSALRKMGVNLTRSNKETVKHSDVLFLAVKPHIIPFILDEIGADVQARHIVVSCAAGVTISSVEKKLMAFQPAPKVIRCMTNTPVVVQEGATVYATGTHALVEDGQLLEQLMSSVGFCTEVEEDLQLKPEAGLV

SEQ ID NO: 830470 - protein, 315 aa, Homo sapiens
MGVNLTRSNKETVKHSDVLFLAVKPHIIPFILDEIGADVQARHIVVSCAAGVTISSVEKVPISALMPLVLRGGLTHEWQLMGGCWWEPCPGHSFGSLPHPEKLMAFQPAPKVIRCMTNTPVVVQEGATVYATGTHALVEDGQLLEQLMSSVGFCTEVEEDLIDAVTGLSGSGPAYAFMALDALADGGVKMGLPRRLAIQLGAQALLGAAKMLLDSEQHPCQLKDNVCSPGGATIHALHFLESGGFRSLLINAVEASCIRTRELQSMADQEKISPAALKKTLLDRVKLESPTVSTLTPSSPGKLLTRSLALGGKKD

SEQ ID NO: 830471 - protein, 320 aa, Homo sapiens; identical to SEQ ID NO: 830463

SEQ ID NO: 830472 - protein, 273 aa, Homo sapiens [sequence omitted]

SEQ ID NO: 830473 - protein, 284 aa, Homo sapiens; identical to SEQ ID NO: 830467

SEQ ID NO: 830474 - protein, 289 aa, Homo sapiens
MSVGFIGAGQLAYALARGFTAAGILSAHKIIASSPEMNLPTVSALRKMGVNLTRSNKETVKHSDVLFLAVKPHIIPFILDEIGADVQARHIVVSCAAGVTISSVEKKLMAFQPAPKVIRCMTNTPVVVQEGATVYATGTHALVEDGQLLEQLMSSVGFCTEVEEDLIDAVTGLSGSGPAYGAAKMLLDSEQHPCQLKDNVCSPGGATIHALHFLESGGFRSLLINAVEASCIRTRELQSMADQEKISPAALKKTLLDRVKLESPTVSTLTPSSPGKLLTRSLALGGKKD

SEQ ID NO: 830475 - protein, 142 aa, Homo sapiens
MSVGFIGAGQLAYALARGFTAAGILSAHKIIASSPEMNLPTVSALRKMGVNLTRSNKETVKHSDVLFLAVKPHIIPFILDEIGADVQARHIVVSCAAGVTISSVEKKLMAFQPAPKVIRCMTNTNPHGWRLKVWPQGGQKGG

SEQ ID NO: 830476 - protein, 66 aa, Homo sapiens
IRGTRQSNEETGGCVGHLWGQEQRFNDEEEIEDGARRIPQASDTELCIDHVTSSYPEQLLSRMPYH

SEQ ID NO: 830477 - protein, 56 aa, Homo sapiens
MKLLKSFGEDEIEMKVVSLLDSTSSMVSAFTFLSSPQWSGVNGERGLLLKSDWTVN

SEQ ID NO: 830478 - protein, 688 aa, Homo sapiens
MTDALLPAAPQPLEKENDGYFRKGCNPLAQTGRSKLQNQRAALNQQILKAVRMRTGAENLLKVATNSKVREQVRLELSFVNSDLQMLKEELEGLNISVGVYQNTEEAFTIPLIPLGLKETKDVDFAVVLKDFILEHYSEDGYLYEDEIADLMDLRQACRTPSRDEAGVELLMTYFIQLGFVESRFFPPTRQMGLLFTWYDSLTGVPVSQQNLLLEKASVLFNTGALYTQIGTRCDRQTQAGLESAIDAFQRAAGVLNYLKDTFTHTPSYDMSPAMLSVLVKMMLAQAQESVFEKISLPGIRNEFFMLVKVAQEAAKVGEVYQQLHAAMSQAPVKENIPYSWASLACVKAHHYAALAHYFTAILLIDHQVKPGTDLDHQEKCLSQLYDHMPEGLTPLATLKNDQQRRQLGKSHLRRAMAHHEESVREASLCKKLRSIEVLQKVLCAAQERSRLTYAQHQEEDDLLNLIDAPSVVAKTEQEVDIILPQFSKLTVTDFFQKLGPLSVFSANKRWTPPRSIRFTAEEGDLGFTLRGNAPVQVHFLDPYCSASVAGAREGDYIVSIQLVDCKWLTLSEVMKLLKSFGEDEIEMKVVSLLDSTSSMHNKSATYSVGMQKTYSMICLAIDDDDKTDKTKKISKKLSFLSWGTNKEQTEVSQHLVPPIGRGCTASGQEEAALPFQPSQLRQFLVLM

SEQ ID NO: 830479 - protein, 114 aa, Homo sapiens
MKLLKSFGEDEIEMKVVSLLDSTSSMHNKSATYSVGMQKTYSMICLAIDDDDKTDKTKKISKKLSFLSWGTNKEQTEVSQHLVPPIGRGCTASGQEEAALPFQPSQLRQFLVLM

SEQ ID NO: 830480 - protein, 152 aa, Homo sapiens
MTDALLPAAPQPLEKENDGYFRKGCNPLAQTGRSKLQNQRAALNQQILKAVRMRTGAENLLKVATNSKVREQVRLELSFVNSDLQMLKEELEGLNISVGVYQNTEEAFTIPLIPLGLKETKDVDFAVVLKVGLKVIAVFPLKVMAKVLGLQA

SEQ ID NO: 830481 - protein, 688 aa, Homo sapiens; identical to SEQ ID NO: 830478

SEQ ID NO: 830482 - protein, 114 aa, Homo sapiens; identical to SEQ ID NO: 830479

SEQ ID NO: 830483 - protein, 276 aa, Homo sapiens
MTDALLPAAPQPLEKENDGYFRKGCNPLAQTGRSKLQNQRAALNQQILKAVRMRTGAENLLKVATNSKVREQVRLELSFVNSDLQMLKEELEGLNISVGVYQNTEEAFTIPLIPLGLKETKDVDFAVVLKDFILEHYSEDGYLYEDEIADLMDLRQACRTPSRDEAGVELLMTYFIQLGFVESRFFPPTRQMGLLFTWYDSLTGVPVSQQNLLLEKASVLFNTGALYTQIGTRCDRQTQAGLESAIDAFQRAAGMSPPGLTRRSLGPTRWHQGTPH

SEQ ID NO: 830484 - protein, 115 aa, Homo sapiens
MPATPSLKVVHELPACTLCAGPLEDAVTIPCGHTFCRLCLPALSQMGAQSSGKILLCPLCQEEEQAETPMAPVPLGPLGETYCEEHGEKIYFFCENDAEFLLSSECRTTDGFGCA

SEQ ID NO: 830485 - protein, 457 aa, Homo sapiens
MPATPSLKVVHELPACTLCAGPLEDAVTIPCGHTFCRLCLPALSQMGAQSSGKILLCPLCQEEEQAETPMAPVPLGPLGETYCEEHGEKIYFFCENDAEFLCVFCREGPTHQAHTVGFLDEAIQPYRDRLRSRLEALSTERDEIEDVKCQEDQKLQVLLTQIESKKHQVETAFERLQQELEQQRCLLLARLRELEQQIWKERDEYITKVSEEVTRLGAQVKELEEKCQQPASELLQDVRVNQSRCEMKTFVSPEAISPDLVKKIRDFHRKILTLPEMMRMFSENLAHHLEIDSDRQPEPGSLGRQEVSEVHPAEEDLPDSPLRFDGLPAVLGFPGFSSGRHRWQVDLQLGDGGGCTVGVAGEGVRRKGEMGLSAEDGVWAVIISHQQCWASTSPGTDLPLSEIPRGVRVALDYEAGQVTLHNAQTQEPIFTFTASFSGKVFPFFAVWKKGSCLTLKG

SEQ ID NO: 830486 - protein, 585 aa, Homo sapiens
MPATPSLKVVHELPACTLCAGPLEDAVTIPCGHTFCRLCLPALSQMGAQSSGKILLCPLCQEEEQAETPMAPVPLGPLGETYCEEHGEKIYFFCENDAEFLCVFCREGPTHQAHTVGFLDEAIQPYRDRLRSRLEALSTERDEIEDVKCQEDQKLQVLLTQIESKKHQVETAFERLQQELEQQRCLLLARLRELEQQIWKERDEYITKVSEEVTRLGAQVKELEEKCQQPASELLQDVRVNQSRCEMKTFVSPEAISPDLVKKIRDFHRKILTLPEMMRMFSGKGEGATVFPSPISCPPVFHPSPSFSALEDLARDIFPPQSLPLVISIYSGALFPEHLLHSLRTGAGLRVQEGEDPSPPLDHSRSRVFCPHLHIVLKSPCPWGCLEEVISHRSLFLFLLPSENLAHHLEIDSGVITLDPQTASRSLVLSEDRKSVRYTRQKKSLPDSPLRFDGLPAVLGFPGFSSGRHRWQVDLQLGDGGGCTVGVAGEGVRRKGEMGLSAEDGVWAVIISHQQCWASTSPGTDLPLSEIPRGVRVALDYEAGQVTLHNAQTQEPIFTFTASFSGKVFPFFAVWKKGSCLTLKG

SEQ ID NO: 830487 - protein, 324 aa, Homo sapiens [sequence omitted]

SEQ ID NO: 830488 - protein, 465 aa, Homo sapiens [sequence omitted]

SEQ ID NO: 830489 - protein, 465 aa, Homo sapiens [sequence omitted]

SEQ ID NO: 830490 - protein, 332 aa, Homo sapiens
MPATPSLKVVHELPACTLCAGPLEDAVTIPCGHTFCRLCLPALSQMGAQSSGKILLCPLCQEEEQAETPMAPVPLGPLGETYCEEHGEKIYFFCENDAEFLCVFCREGPTHQAHTVGFLDEAIQPYRDRLRSRLEALSTERDEIEDVKCQEDQKLQVLLTQIESKKHQVETAFERLQQELEQQRCLLLARLRELEQQIWKERDEYITKVSEEVTRLGAQVKELEEKCQQPASELLQDVRVNQSRCEMKTFVSPEAISPDLVKKIRDFHRKILTLPEMMRMFSENLAHHLEIDSGVITLDPQTASRSLVLSEDRNLRVQNHRRLRLCLGQQPT

SEQ ID NO: 830491 - protein, 170 aa, Homo sapiens
MPATPSLKVVHELPACTLCAGPLEDAVTIPCGHTFCRLCLPALSQMGAQSSGKILLCPLCQEEEQAETPMAPVPLGPLGETYCEEHGEKIYFFCENDAEFLCVFCREGPTHQAHTVGFLDEAIQPYRDRLRSRLEALSTERDEIEDVKCQEDQKLQVLLQCAARGLPVPA

SEQ ID NO: 830492 - protein, 122 aa, Homo sapiens
MFPVFLGEPVSPQTLAATLAELDVTLQLLEDKFLQNKAFLTGPHISLADLVAITELMHPVGAGCQVFEGRPKLATWRQRVEAAVGEDLFQEAHEVILKAKDFPPADPTIKQKLMPWVLAMIR

SEQ ID NO: 830493 - protein, 122 aa, Homo sapiens; identical to SEQ ID NO: 830492

SEQ ID NO: 830494 - protein, 70 aa, Homo sapiens
SLLTPSGFRSGRSVPTMGLELYLDLLSQPCRAVYIFAKKNDIPFELRIVDLIKGRSSLGFGEPKSQEGDR

SEQ ID NO: 830495 - protein, 256 aa, Homo sapiens
SLLTPSGFRSGRSVPTMGLELYLDLLSQPCRAVYIFAKKNDIPFELRIVDLIKGQHLSDAFAQVNPLKKVPALKDGDFTLTESVAILLYLTRKYKVPDYWYPQDLQARARVDEYLAWQHTTLRRSCLRALWHKVMFPVFLGEPVSPQTLAATLAELDVTLQLLEDKFLQNKAFLTGPHISLADLVAITELMHPVGAGCQVFEGRPKLATWRQRVEAAVGEDLFQEAHEVILKAKDFPPADPTIKQKLMPWVLAMIR

SEQ ID NO: 830496 - protein, 122 aa, Homo sapiens; identical to SEQ ID NO: 830492

SEQ ID NO: 830497 - protein, 242 aa, Homo sapiens
SLLTPSGFRSGRSVPTMGLELYLDLLSQPCRAVYIFAKKNDIPFELRIVDLIKDGVSLCRPGWSAVAGSQLTATSAARNLVLCLLFLLGRSALKRCLCPGEPPQEGASLEGRGLHLDGEVMFPVFLGEPVSPQTLAATLAELDVTLQLLEDKFLQNKAFLTGPHISLADLVAITELMHPVGAGCQVFEGRPKLATWRQRVEAAVGEDLFQEAHEVILKAKDFPPADPTIKQKLMPWVLAMIR

SEQ ID NO: 830498 - protein, 121 aa, Homo sapiens
SLLTPSGFRSGRSVPTMGLELYLDLLSQPCRAVYIFAKKNDIPFELRIVDLIKGQHLSDAFAQVNPLKKVPALKDGDFTLTESPWVLAAKSSKADPSWPHGGSAWRQQWGRTSSRRPMRSF

SEQ ID NO: 830499 - protein, 198 aa, Homo sapiens
SLLTPSGFRSGRSVPTMGLELYLDLLSQPCRAVYIFAKKNDIPFELRIVDLIKGQHLSDAFAQVNPLKKVPALKDGDFTLTESVAILLYLTRKYKVPDYWYPQDLQARARVDEYLAWQHTTLRRSCLRALWHKVMFPVFLGEPVSPQTLAATLAELDVTLQLLEDKFLQNKAFLTGPHISLADLVAITELMHVSAVGR

SEQ ID NO: 830500 - protein, 256 aa, Homo sapiens; identical to SEQ ID NO: 830495

SEQ ID NO: 830501 - protein, 122 aa, Homo sapiens; identical to SEQ ID NO: 830492

SEQ ID NO: 830502 - protein, 83 aa, Homo sapiens
SLLTPSGFRSGRSVPTMGLELYLDLLSQPCRAVYIFAKKNDIPFELRIVDLIKGQHLSDAFAQVNPLKKVPALKDGDFTLTER

SEQ ID NO: 830503 - protein, 122 aa, Homo sapiens; identical to SEQ ID NO: 830492

SEQ ID NO: 830504 - protein, 182 aa, Homo sapiens
WTAVSSVHAPVPIVGDLDLTDRKPEGYPQDLQARARVDEYLAWQHTTLRRSCLRALWHKVMFPVFLGEPVSPQTLAATLAELDVTLQLLEDKFLQNKAFLTGPHISLADLVAITELMHPVGAGCQVFEGRPKLATWRQRVEAAVGEDLFQEAHEVILKAKDFPPADPTIKQKLMPWVLAMIR

SEQ ID NO: 830505 - protein, 122 aa, Homo sapiens; identical to SEQ ID NO: 830492

SEQ ID NO: 830506 - protein, 359 aa, Homo sapiens
MTLESMMACCLSDEVKESKRINAEIEKQLRRDKRDARRELKLLLLGTGESGKSTFIKQMRIIHGAGYSEEDKRGFTKLVYQNIFTAMQAMIRAMETLKILYKYEQNKANALLIREVDVEKVTTFEHQYVSAIKTLWEDPGIQECYDRRREYQLSDSAKYYLTDVDRIATLGYLPTQQDVLRVRVPTTGIIEYPFDLENIIFRMVDVGGQRSERRKWIHCFENVTSIMFLVALSEYDQVLVESDNENRMEESKALFRTIITYPWFQNSSVILFLNKKDLLEDKILYSHLVDYFPEFDGPQRDAQAAREFILKMFVDLNPDSDKIIYSHFTCATDTENIRFVFAAVKDTILQLNLKEYNLV

SEQ ID NO: 830507 - protein, 157 aa, Homo sapiens
MVDVGGQRSERRKWIHCFENVTSIMFLVALSEYDQVLVESDNENRMEESKALFRTIITYPWFQNSSVILFLNKKDLLEDKILYSHLVDYFPEFDGPQRDAQAAREFILKMFVDLNPDSDKIIYSHFTCATDTENIRFVFAAVKDTILQLNLKEYNLV

SEQ ID NO: 830508 - protein, 157 aa, Homo sapiens; identical to SEQ ID NO: 830507

SEQ ID NO: 830509 - protein, 121 aa, Homo sapiens
MDRLCCLRPPPHRDPARLLLASTDDKRNSPKIRPLQPAVPACLPATVRPALASSSAGLSAGFWGQKSGEPRGRVRGDQVRAATFLVISPMGRRGWRDTPPRLPHTTSVSPGSVLFLCQVST

SEQ ID NO: 830510 - protein, 231 aa, Homo sapiens
MTLESMMACCLSDEVKESKRINAEIEKQLRRDKRDARRELKLLLLGTGESGKSTFIKQMRIIHGAGYSEEDKRGFTKLVYQNIFTAMQAMIRAMETLKILYKYEQNKANALLIREVDVEKVTTFEHQYVSAIKTLWEDPGIQECYDRRREYQLSDSAKYYLTDVDRIATLGYLPTQQDVLRVRVPTTGIIEYPFDLENIIFRWAWLCAPVVPATQEAEAGGSLKPRRLRLK

SEQ ID NO: 830511 - protein, 134 aa, Homo sapiens
EAWAVTVVPWGYSGIGTAAHLGREGSCGPSGMQWAGGRAGWAVGLTRSSPGSDKGAHESLALGRLGHSLTLCPPPGPQRDAQAAREFILKMFVDLNPDSDKIIYSHFTCATDTENIRFVFAAVKDTILQLNLKE

SEQ ID NO: 830512 - protein, 387 aa, Homo sapiens
MTLESMMACCLSDEVKESKRINAEIEKQLRRDKRDARRELKLLLLGTGESGKSTFIKQMRIIHGAGYSEEDKRGFTKLVYQNIFTAMQAMIRAMETLKILYKYEQNKANALLIREVDVEKVTTFEHQYVSAIKTLWEDPGIQECYDRRREYQLSDSAKYYLTDVDRIATLGYLPTQQDVLRVRVPTTGIIEYPFDLENIIFRMVDVGGQRSERRKWIHCFENVTSIMFLVALSEYDQVLVESDNENRMEESKALFRTIITYPWFQNSSVILFLNKKDLLEDKILYSHLVDYFPEFDGPQRDAQAAREFILKMFVDLNPDSDKIIYSHFTCATDTENIRFVFAAVKDTILQLNLKEYNLLSGDVHLSLRTLRAPSHLLSTAKAAFFWP

SEQ ID NO: 830513 - protein, 141 aa, Homo sapiens
MVDVGGQRSERRKWIHCFENVTSIMFLVALSEYDQVLVESDNEPWFQNSSVILFLNKKDLLEDKILYSHLVDYFPEFDGPQRDAQAAREFILKMFVDLNPDSDKIIYSHFTCATDTENIRFVFAAVKDTILQLNLKEYNLV

SEQ ID NO: 830514 - protein, 85 aa, Homo sapiens
LGSEAGFALLSHPEASFFCARCLPKRVGARSPPWRVLGPGGALGEQMGPPLAGPLQLFPAAEPSGGPVLVASLRAQIAQGDLAVA

SEQ ID NO: 830515 - protein, 199 aa, Homo sapiens
MTLESMMACCLSDEVKESKRINAEIEKQLRRDKRDARRELKLLLLGTGESGKSTFIKQMRIIHGAGYSEEDKRGFTKLVYQNIFTAMQAMIRAMETLKILYKYEQNKANALLIREVDVEKVTTFEHQYVSAIKTLWEDPGIQECYDRRREYQLSDSAKYYLTDVDRIATMDTTPSNRDGTAEEGGPRTGSRPACHTPHP

SEQ ID NO: 830516 - protein, 54 aa, Homo sapiens
VGFSFFRLSSPQASTLLDDMVLPRRWGCWGLTEETGVAGRFGYSSAVPTFGLCL

SEQ ID NO: 830517 - protein, 249 aa, Homo sapiens
DRLSLLSPRLECNGMILAHCKLRLPGFKRFSCLSLPSSWDYRHVPPRQVHFVFSVETGFHRAGQAGLELLTSSVPPTSAFPKCWDYRRDDQAWPTLSSFRGLNKFAFLPKFFAHPISQFQRVECNVGCPILLAMKYLAYSSLPGADTMLYFYFYEQEASLAVCNICRQKFHWVLYQISHLYRGVIVDNFLLHPDGRFTWTIFFLSWVKQNSLVDFFFGTESRSVALLPRLECSGAMSKGQLIVIYITQT

SEQ ID NO: 830518 - protein, 208 aa, Homo sapiens
MPEAAVKSTANKYQVFFFGTHETAFLGPKDLFPYEESKEKFGKPNKRKGFSEGLWEIENNPTVKASGYQSSQKKSCVEEPEPEPEAAEGDGDKKGNAEGSSDEEGKLVIDEPAKEKNEKGALKRRAGDLLEDSPKRPKEAENPEGEEKEAATLEVERPLPMEVEKNSTPSEPGSGRGPPQEEEEEEDEEEEATKEDAEAPGIRDHESL

SEQ ID NO: 830519 - protein, 231 aa, Homo sapiens
MPEAAVKSTANKYQVFFFGTHETAFLGPKDLFPYEESKEKFGKPNKRKGFSEGLWEIENNPTVKASGYQPPPSCTEPCLPGQWVYPGANPTESSQKKSCVEEPEPEPEAAEGDGDKKGNAEGSSDEEGKLVIDEPAKEKNEKGALKRRAGDLLEDSPKRPKEAENPEGEEKEAATLEVERPLPMEVEKNSTPSEPGSGRGPPQEEEEEEDEEEEATKEDAEAPGIRDHESL

SEQ ID NO: 830520 - protein, 132 aa, Homo sapiens
TTARYEAGVLIGRGGDKKGNAEGSSDEEGKLVIDEPAKEKNEKGALKRRAGDLLEDSPKRPKEAENPEGEEKEAATLEVERPLPMEVEKNSTPSEPGSGRGPPQEEEEEEDEEEEATKEDAEAPGIRDHESL

SEQ ID NO: 830521 - protein, 207 aa, Homo sapiens
MPEAAVKSTANKYQVFFFGTHETAFLGPKDLFPYEESKEKFGKPNKRKGFSEGLWEIENNPTVKASGYQSSQKKSCVEEPEPEPEAAEGDGDKKGNAEGSSDEEGKLVIDEPAKEKNEKGALKRRAGDLLEDSPKRPKEAENPEGEEKEAATLEVERPLPMEVEKNSTPSEPGSGRGPPQEEEEEEDEEEEATKEDAEAPGIRDHER

SEQ ID NO: 830522 - protein, 208 aa, Homo sapiens; identical to SEQ ID NO: 830518

SEQ ID NO: 830523 - protein, 208 aa, Homo sapiens; identical to SEQ ID NO: 830518

SEQ ID NO: 830524 - protein, 208 aa, Homo sapiens; identical to SEQ ID NO: 830518

SEQ ID NO: 830525 - protein, 208 aa, Homo sapiens; identical to SEQ ID NO: 830518

SEQ ID NO: 830526 - protein, 208 aa, Homo sapiens; identical to SEQ ID NO: 830518

SEQ ID NO: 830527 - protein, 208 aa, Homo sapiens; identical to SEQ ID NO: 830518

SEQ ID NO: 830528 - protein, 208 aa, Homo sapiens; identical to SEQ ID NO: 830518

SEQ ID NO: 830529 - protein, 208 aa, Homo sapiens; identical to SEQ ID NO: 830518

SEQ ID NO: 830530 - protein, 208 aa, Homo sapiens; identical to SEQ ID NO: 830518

SEQ ID NO: 830531 - protein, 208 aa, Homo sapiens; identical to SEQ ID NO: 830518

SEQ ID NO: 830532 - protein, 208 aa, Homo sapiens; identical to SEQ ID NO: 830518

SEQ ID NO: 830533 - protein, 208 aa, Homo sapiens; identical to SEQ ID NO: 830518

SEQ ID NO: 830534 - protein, 208 aa, Homo sapiens; identical to SEQ ID NO: 830518

SEQ ID NO: 830535 - protein, 208 aa, Homo sapiens; identical to SEQ ID NO: 830518

SEQ ID NO: 830536 - protein, 208 aa, Homo sapiens; identical to SEQ ID NO: 830518

SEQ ID NO: 830537 - protein, 121 aa, Homo sapiens
MPEAAVKSTANKYQVFFFGTHETAFLGPKDLFPYEESKEKFGKPNKRKGFSEGLWEIENNPTVKASGYQSSQKKSCVEEPEPEPEAAEGDGDKKGNAEGSSDEEGNVFNKRKLQKKNFKDP

SEQ ID NO: 830538 - protein, 345 aa, Homo sapiens
EEEWGPGGGWRKRPRAEEGAIEFQTQTTARARTHRAGALPRSAPAPSVRRAGGDAVAAPELGPGATIEAGAARGPERSGAATAARANLGSRFPARRGARGARSPAMSRSNRQKEYKCGDLVFAKMKGYPHWPARIDEMPEAAVKSTANKYQVFFFGTHETAFLGPKDLFPYEESKEKFGKPNKRKGFSEGLWEIENNPTVKASGYQSSQKKSCVEEPEPEPEAAEGDGDKKGNAEGSSDEEGKLVIDEPAKEKNEKGALKRRAGDLLEDSPKRPKEAENPEGEEKEAATLEVERPLPMEVEKNSTPSEPGSGRGPPQEEEEEEDEEEEATKEDAEAPGIRDHESL

SEQ ID NO: 830539 - protein, 105 aa, Homo sapiens
MKRKRLPRKMLRPQASEIMRACSHQCFKRSPHPVPAAVWVLLGKLAMACKLGTPFPPQPALLFYSLFPLQAQPMEIDLDGAGHLALTSRSPYSYDLSQSHVFSLE

SEQ ID NO: 830540 - protein, 169 aa, Homo sapiens
KKLLFILDNLIKLFSHPPQLLALNPHLFLPSSQKKSCVEEPEPEPEAAEGDGDKKGNAEGSSDEEGKLVIDEPAKEKNEKGALKRRAGDLLEDSPKRPKEAENPEGEEKEAATLEVERPLPMEVEKNSTPSEPGSGRGPPQEEEEEEDEEEEATKEDAEAPGIRDHESL

SEQ ID NO: 830541 - protein, 105 aa, Homo sapiens; identical to SEQ ID NO: 830539

SEQ ID NO: 830542 - protein, 208 aa, Homo sapiens; identical to SEQ ID NO: 830518

SEQ ID NO: 830543 - protein, 186 aa, Homo sapiens
MPEAAVKSTANKYQVFFFGTHETAFLGPKDLFPYEESKEKFGKPNKRKGFSEGLWEIENNPTVKASGYQSSQKKSCVEEPEPEPEAAEGDGDKKGNAEGSSDEEGKLVIDEPAKEKNEKGALKRRAGDLLEDSPKRPKEAENPEGEEKEAATLEVERPLPMESPWRLTWMGQATWLSPLGPHTPMI

SEQ ID NO: 830544 - protein, 208 aa, Homo sapiens; identical to SEQ ID NO: 830518

SEQ ID NO: 830545 - protein, 208 aa, Homo sapiens; identical to SEQ ID NO: 830518

SEQ ID NO: 830546 - protein, 208 aa, Homo sapiens; identical to SEQ ID NO: 830518

SEQ ID NO: 830547 - protein, 208 aa, Homo sapiens; identical to SEQ ID NO: 830518

SEQ ID NO: 830548 - protein, 174 aa, Homo sapiens
MPEAAVKSTANKYQVFFFGTHETAFLGPKDLFPYEESKEKFGKPNKRKGFSEGLWEIENNPTVKASGYQSSQKKSCVEEPEPEPEAAEGDGDKKGNAEGSSDEEGKLVIDEPAKEKNEKGALKRRAGDLLEDSPKRPKEAENPEGEEKEAATGSTGGRPPSELLSPATPIIPAA

SEQ ID NO: 830549 - protein, 208 aa, Homo sapiens; identical to SEQ ID NO: 830518

SEQ ID NO: 830550 - protein, 128 aa, Homo sapiens
MPEAAVKSTANKYQVFFFGTHETAFLGPKDLFPYEESKEKFGKPNKRKGFSEGLWEIENNPTVKASGYQSSQKKSCVEEPEPEPEAAEGDGDKKGNAEGSSDEEGKLVIDETTPIFPFADPKSFGSCS

SEQ ID NO: 830551 - protein, 208 aa, Homo sapiens; identical to SEQ ID NO: 830518

SEQ ID NO: 830552 - protein, 208 aa, Homo sapiens; identical to SEQ ID NO: 830518

SEQ ID NO: 830553 - protein, 236 aa, Homo sapiens
MPEAAVKSTANKYQVFFFGTHETAFLGPKDLFPYEESKEKFGKPNKRKGFSEGLWEIENNPTVKASGYQSSQKKSCVEEPEPEPEAAEGDGDKKGNAEGSSDEEGKLVIDEPAKEKNEKGALKRRAGDLLEDSPKRPKEAENPEGEEKEAATLEVERPLPMEVEKNSTPSEPGSGRGPPQEEEEEEDEEEEATKEDAEAPGIRDHERLPFYLGLDDFLFVAGALMFLPVSFLIHIP

SEQ ID NO: 830554 - protein, 93 aa, Homo sapiens
RLGTRLGGWIDEMPEAAVKSTANKYQVFFFGTHETAFLGPKDLFPYEESKEKFGKPNKRKGFSEGLWEIENNPTVKASGYQSSQKKSCVEEQK

SEQ ID NO: 830555 - protein, 436 aa, Homo sapiens
MEPDDFDSEDKEILSWDINDVKLPQNVKKTDWFQEWPDSYAKHIYSSEDKNAQRHLSSWAMRNTNNHNSRILKKSCLGVVVCGRDCLAEEGRKIYLRPAICDKARQKQQRKRCPNCDGPLKLIPCRGHGGFPVTNFWRHDGRFIFFQSKGEHDHPKPETKLEAEARRAMKKVNTAPSSVSLSLKGSTETRSLPGETQSQGSLPLTWSFQEGVQLPGSYSGHLIANTPQQNSLNDCFSFSKSYGLGGITDLTDQTSTVDPMKLYEKRKLSSSRTYSSGDLLPPSASGVYSDHGDLQAWSKNAALGRNHLADNCYSNYPFPLTSWPCSFSPSQNSSEPFYQQLPLEPPAAKTGCPPLWPNPAGNLYEEKVHVDFNSYVQSPAYHSPQEDPFLFTYASHPHQQYSLPSKSSKWDFEEEMTYLGLDHCNNDMLLNLCPLR

SEQ ID NO: 830556 - protein, 240 aa, Homo sapiens
MAMASVKLLAGVLRKPDAWIGLWGVLRGTPSSYKLCTSWNRYLYFSSTKLRAPNYKTLFYNIFSLRLPGLLLSPECIFPFSVRLKSNIRSTKSTKKSLQKVDEEDSDEESHHDEMSEQEEELEDDPTVVKNYKDLEKAVQSFRYDVVLKTGLDIGRNKVEDAFYKGELRLNEEKLWKKSRTVKVGDTLDLLIGEDKEAGTETVMRILLKKVFEEKTESEKYRVVLRRWKSLKLPKKRMSK

SEQ ID NO: 830557 - protein, 240 aa, Homo sapiens; identical to SEQ ID NO: 830556

SEQ ID NO: 830558 - protein, 190 aa, Homo sapiens
GAHRPPPPAPGHQAPPWTRTSCEGSVRTLAEPNRAESCPSRPFAMVDELVLLLHALLMRHRALSIENSQLMEQLRLLVCERASLLRQVRPPSCPVPFPETFNGESSRLPEFIVQTASYMLVNENRFCNDAMKVAFLISLLTGEAEEWVVPYIEMDSPILGDYRAFLDEMKQCFGWDDDEDDDDEEEEDDY

SEQ ID NO: 830559 - protein, 190 aa, Homo sapiens; identical to SEQ ID NO: 830558

SEQ ID NO: 830560 - protein, 142 aa, Homo sapiens
SLALSPSLECSGAISAHCKLGRSSFLTAFGHWSQGYRPTVPASAGLGGGAQPQREELGRVDLSASKPTLAPQSVPPWLRGLSPERDLRGRSVLGSEEGVMLRSASRLCPNRTGLSLTPSPAAQLGFPQKRRASSSPGSRLLS

SEQ ID NO: 830561 - protein, 404 aa, Homo sapiens
MLEICLKLVGCKSKKGLSSSSSCYLEEALQRPVASDFEPQGLSEAARWNSKENLLAGPSENDPNLFVALYDFVASGDNTLSITKGEKLRVLGYNHNGEWCEAQTKNGQGWVPSNYITPVNSLEKHSWYHGPVSRNAAEYLLSSGINGSFLVRESESSPGQRSISLRYEGRVYHYRINTASDGKLYVSSESRFNTLAELVHHHSTVADGLITTLHYPAPKRNKPTVYGVSPNYDKWEMERTDITMKHKLGGGQYGEVYEGVWKKYSLAGDQPSSTAFIPLISTRVSLRKTRQPPERIASGAITKGVVLDSTEALCLAISRNSEQMASHSAVLEAGKNLYTFCVSYVDSIQQMRNKFAFREAINKLENNLRELQICPATAGSGPAATQDFSKLLSSVKEISDIVQR

SEQ ID NO: 830562 - protein, 1130 aa, Homo sapiens
MLEICLKLVGCKSKKGLSSSSSCYLEEALQRPVASDFEPQGLSEAARWNSKENLLAGPSENDPNLFVALYDFVASGDNTLSITKGEKLRVLGYNHNGEWCEAQTKNGQGWVPSNYITPVNSLEKHSWYHGPVSRNAAEYLLSSGINGSFLVRESESSPGQRSISLRYEGRVYHYRINTASDGKLYVSSESRFNTLAELVHHHSTVADGLITTLHYPAPKRNKPTVYGVSPNYDKWEMERTDITMKHKLGGGQYGEVYEGVWKKYSLTVAVKTLKEDTMEVEEFLKEAAVMKEIKHPNLVQLLGVCTREPPFYIITEFMTYGNLLDYLRECNRQEVNAVVLLYMATQISSAMEYLEKKNFIHRDLAARNCLVGENHLVKVADFGLSRLMTGDTYTAHAGAKFPIKWTAPESLAYNKFSIKSDVWAFGVLLWEIATYGMSPYPGIDLSQVYELLEKDYRMERPEGCPEKVYELMRACWQWNPSDRPSFAEIHQAFETMFQESSISDEVEKELGKQGVRGAVSTLLQAPELPTKTRTSRRAAEHRDTTDVPEMPHSKGQGESDPLDHEPAVSPLLPRKERGPPEGGLNEDERLLPKDKKTNLFSALIKKKKKTAPTPPKRSSSFREMDGQPERRGAGEEEGRDISNGALAFTPLDTADPAKSPKPSNGAGVPNGALRESGGSGFRSPHLWKKSSTLTSSRLATGEEEGGGSSSKRFLRSCSASCVPHGAKDTEWRSVTLPRDLQSTGRQFDSSTFGGHKSEKPALPRKRAGENRSDQVTRGTVTPPPRLVKKNEEAADEVFKDIMESSPGSSPPNLTPKPLRRQVTVAPASGLPHKEEAGKGSALGTPAAAEPVTPTSKAGSGAPGGTSKGPAEESRVRRHKHSSESPGRDKGKLSRLKPAPPPPPAASAGKAGGKPSQSPSQEAAGEAVLGAKTKATSLVDAVNSDAAKPSQPGEGLKKPVLPATPKPQSAKPSGTPISPAPVPSTLPSASSALAGDQPSSTAFIPLISTRVSLRKTRQPPERIASGAITKGVVLDSTEALCLAISRNSEQMASHSAVLEAGKNLYTFCVSYVDSIQQMRNKFAFREAINKLENNLRELQICPATAGSGPAATQDFSKLLSSVKEISDIVQR

SEQ ID NO: 830563 - protein, 1190 aa, Homo sapiens
MLEICLKLVGCKSKKGLSSSSSCYLEEALQRPVASDFEPQGLSEAARWNSKENLLAGPSENDPNLFVALYDFVASGDNTLSITKGEKLRVLGYNHNGEWCEAQTKNGQGWVPSNYITPVNSLEKHSWYHGPVSRNAAEYLLSSGINGSFLVRESESSPGQRSISLRYEGRVYHYRINTASDGKLYVSSESRFNTLAELVHHHSTVADGLITTLHYPAPKRNKPTVYGVSPNYDKWEMERTDITMKHKLGGGQYGEVYEGVWKKYSLTVAVKTLKEDTMEVEEFLKEAAVMKEIKHPNLVQLLGVCTREPPFYIITEFMTYGNLLDYLRECNRQEVNAVVLLYMATQISSAMEYLEKKNFIHRDLAARNCLVGENHLVKVADFGLSRLMTGDTYTAHAGAKFPIKWTAPESLAYNKFSIKSDVWAFGVLLWEIATYGMSPYPGIDLSQVYELLEKDYRMERPEGCPEKVYELMRACWQWNPSDRPSFAEIHQAFETMFQESSISDEVEKELGKQGVRGAVSTLLQAPELPTKTRTSRRAAEHRDTTDVPEMPHSKGQGESDPLDHEPAVSPLLPRKERGPPEGGLNEDERLLPKDKKTNLFSALIKKKKKTAPTPPKRSSSFREMDGQPERRGAGEEEGRDISNGALAFTPLDTADPAKSPKPSNGAGVPNGALRESGGSGFRSPHLWKKSSTLTSSRLATGEEEGGGSSSKRFLRSCSASCVPHGAKDTEWRSVTLPRDLQSTGRQFDSSTFGGHKSEKPALPRKRAGENRSDQVTRGTVTPPPRLVKKNEEAADEVFKDIMESSPGSSPPNLTPKPLRRQVTVAPASGLPHKEEAGKGSALGTPAAAEPVTPTSKAGSGAPGGTSKGPAEESRVRRHKHSSESPGRDKGKLSRLKPAPPPPPAASAGKAGGKPSQSPSQEAAGEAVLGAKTKATSLVDAVNSDAAKPSQPGEGLKKPVLPATPKPQSAKPSGTPISPAPVPSTLPSASSALAGDQPSSTAFIPLISTRVSLRKTRQPPERIASGAITKGVVLDSTEALCLAISRNSEQMASHSAVLEAGKNLYTFCVSYVDSIQQMRNKFAFREAINKLENNLRELQICPATAGSGPAATQDFSKLLSSVKHSGRHAELAEEMTFFPKEERVFSDKGCKTVFTKLDYYYDDCTVMIGSRSHCLELEKNNTQSFHTSTPV

SEQ ID NO: 830564 - protein, 156 aa, Homo sapiens
IRHGRRGQRGKMELVQVLKRGLQQITGHGGLRGYLRVFFRTNDAKVGTLVGEDKYGNKYYEDNKQFFGRHRWVVYTTEMNGKNTFWDVDGSMVPPEWHRWLHSMTDDPPTTKPLTARKFIWTNHKFNVTGTPEQYVPYSTTRKKIQEWIPPSTPYK

SEQ ID NO: 830565 - protein, 156 aa, Homo sapiens; identical to SEQ ID NO: 830564

SEQ ID NO: 830566 - protein, 74 aa, Homo sapiens
IRHGRRGQRGKMELVQVLKRGLQQITGHGGLRGYLRVFFRTNDAKVGTLVGEDKYGNKYYEDNKQFFGIVGFTV

SEQ ID NO: 830567 - protein, 156 aa, Homo sapiens; identical to SEQ ID NO: 830564

SEQ ID NO: 830568 - protein, 180 aa, Homo sapiens
IRHGRRGQRGKMELVQVLKRGLQQITGHGGLRGYLRVFFRTNDAKVGTLVGEDKYGNKYYEDNKQFFDEETEAKEVSLPKRLNHVINGRTWGRHRWVVYTTEMNGKNTFWDVDGSMVPPEWHRWLHSMTDDPPTTKPLTARKFIWTNHKFNVTGTPEQYVPYSTTRKKIQEWIPPSTPYK

SEQ ID NO: 830569 - protein, 147 aa, Homo sapiens
HSVSKYRHNGGTREAGPSKANWSYYRSLNVSTNDAKVGTLVGEDKYGNKYYEDNKQFFGRHRWVVYTTEMNGKNTFWDVDGSMVPPEWHRWLHSMTDDPPTTKPLTARKFIWTNHKFNVTGTPEQYVPYSTTRKKIQEWIPPSTPYK

SEQ ID NO: 830570 - protein, 69 aa, Homo sapiens
SVPLEFATEWHRWLHSMTDDPPTTKPLTARKFIWTNHKFNVTGTPEQYVPYSTTRKKIQEWIPPSTPYK

SEQ ID NO: 830571 - protein, 156 aa, Homo sapiens; identical to SEQ ID NO: 830564

SEQ ID NO: 830572 - protein, 82 aa, Homo sapiens
RSREANLGPAGLARIDPYGFERPEDFDDAAYEKFFSSYLVTLTRRAIKWSRLLQGGGVPRSRTANIHQEPLGRQLPLPPWKD

SEQ ID NO: 830573 - protein, 120 aa, Homo sapiens
MVNTLIILRATKCNREFLSHPWPPSPIEMTAGDCPSVPLRSRSPRLVLQFALRAGEVRGKSCGCDLEVGYSGEWYFAAVVERPQAVGFLQSWVYTHLSVMAGGDCCESILELVQKAAVCW

SEQ ID NO: 830574 - protein, 365 aa, Homo sapiens
MVKWAWGRFCSQSGLCSVERERRAEFLKEYMYQFWWRWTKFWVSLIFDLRRELVRVESVAGTRGPRRPLVQLTRCPSSRPSVKRYVRKGVPLEHRARVWMVLSGAQAQMDQNPGYYHQLLQGERNPRLEDAIRTDLNRTFPDNVKFRKTTDPCLQRTLYNVLLAYGHHNQGVGYCQGMNFIAGYLILITNNEEESFWLLDALVGRILPDYYSPAMLGLKTDQEVLGELVRAKLPAVGALMERLGVLWTLLVSRWFICLFVDILPVETVLRIWDCLFNEGSKIIFRVALTLIKQHQELILEATSVPDICDKFKQITKGSFVMECHTFMQVCGAARGSVPSQGAPPHLQPGGCSDHPEGAQDGHQWA

SEQ ID NO: 830575 - protein, 357 aa, Homo sapiens
PGAGRRTWDPLASLGARLPPRMQPAERSRVPRIDPYGFERPEDFDDAAYEKFFSSYLVTLTRRAIKWSRLLQGGGVPRSRTVKRYVRKGVPLEHRARVWMVLSGAQAQMDQNPGYYHQLLQGERNPRLEDAIRTDLNRTFPDNVKFRKTTDPCLQRTLYNVLLAYGHHNQGVGYCQGMNFIAGYLILITNNEEESFWLLDALVGRILPDYYSPAMLGLKTDQEVLGELVRAKLPAVGALMERLGVLWTLLVSRWFICLFVDILPVETVLRIWDCLFNEGSKIIFRVALTLIKQHQELILEATSVPDICDKFKQITKGSFVMECHTFMQKIFSEPGSLSMATVAKLRESCRARLLAQG

SEQ ID NO: 830576 - protein, 164 aa, Homo sapiens [sequence omitted]

SEQ ID NO: 830577 - protein, 365 aa, Homo sapiens
PGAGRRTWDPLASLGARLPPRMQPAERSRVPRIDPYGFERPEDFDDAAYEKFFSSYLVTLTRRAIKWSRLLQGGGVPRSRTVKRYVRKGVPLEHRARVWMVLSGAQAQMDQNPGYYHQLLQGERNPRLEDAIRTDLNRTFPDNVKFRKTTDPCLQRTLYNVLLAYGHHNQGVGYCQGMNFIAGYLILITNNEEESFWLLDALVGRILPDYYSPAMLGLKTDQEVLGELVRAKLPAVGALMERLGVLWTLLVSRWFICLFVDILPVETVLRIWDCLFNEGSKIIFRVALTLIKQHQELILEATSVPDICDKFKQITKGSFVMECHTFMQVCGAARGSVPSQGAPPHLQPGGCSDHPEGAQDGHQWA

SEQ ID NO: 830578 - protein, 269 aa, Homo sapiens
RGSPVLVVLPSILIFLHISLIITFTATELIIFYIFFETTLIPTLAIITRGGNQPERLNASTTNTVLVVLPVLVVLAYGHHNQGVGYCQGMNFIAGYLILITNNEEESFWLLDALVGRILPDYYSPAMLGLKTDQEVLGELVRAKLPAVGALMERLGVLWTLLVSRWFICLFVDILPVETVLRIWDCLFNEGSKIIFRVALTLIKQHQELILEATSVPDICDKFKQITKGSFVMECHTFMQKIFSEPGSLSMATVAKLRESCRARLLAQG

SEQ ID NO: 830579 - protein, 357 aa, Homo sapiens; identical to SEQ ID NO: 830575

SEQ ID NO: 830580 - protein, 106 aa, Homo sapiens [sequence omitted]

SEQ ID NO: 830581 - protein, 755 aa, Homo sapiens
  misc_feature (3)..(3): Xaa can be any naturally occurring amino acid
PPXDTLREDDEGGHAPPQPSRKRSGSFRYLPLVHRKRVATRQVPARKKRPKRLRTGNMVRSGNKAAVVLCMDVGFTMSNSIPGIESPFEQAKKVITMFVQRQVFAENKDEIALVLFGTDGTDNPLSGGDQYQNITVHRHLMLPDFDLLEDIESKIQPGSQQADFLDALIVSMDVIQHETIGKKFEKRHIEIFTDLSSRFSKSQLDIIIHSLKKCDISLQFFLPFSLGKEDGSGDRGDGPFRLGGHGPSFPLKGITEQQKEGLEIVKMVMISLEGEDGLDEIYSFSESLRKLCVFKKIERHSIHWPCRLTIGSNLSIRIAAYKSILQERVKKTWTVVDAKTLKKEDIQKETVYCLNDDDETEVLKEDIIQGFRYGSDIVPFSKVDEEQMKYKSEGKCFSVLGFCKSSQVQRRFFMGNQVLKVFAARDDEAAAVALSSLIHALDDLDMVAIVRYAYDKRANPQVGVAFPHIKHNYECLVYVQLPFMEDLRQYMFSSLKNSKKYAPTEAQLNAVDALIDSMSLAKKDEKTDTLEDLFPTTKIPNPRFQRLFQCLLHRALHPREPLPPIQQHIWNMLNPPAEVTTKSQIPLSKIKTLFPLIEAKKKDQVTAQEIFQDNHEDGPTAKKLKTEQGGAHFSVSSLAEGSVTSVGSVNPAENFRVLVKQKKASFEEASNQLINHIEQFLDTNETPYFMKSIDCIRAFREEAIKFSEEQRFNNFLKALQEKVEIKQLNHFWEIVVQDGITLITQRGSLWKFCHS

SEQ ID NO: 830582 - protein, 751 aa, Homo sapiens
MLRVPGHGFPAPFRPSRKRSGSFRYLPLVHRKRVATRQVPARKKRPKRLRTGNMVRSGNKAAVVLCMDVGFTMSNSIPGIESPFEQAKKVITMFVQRQVFAENKDEIALVLFGTDGTDNPLSGGDQYQNITVHRHLMLPDFDLLEDIESKIQPGSQQADFLDALIVSMDVIQHETIGKKFEKRHIEIFTDLSSRFSKSQLDIIIHSLKKCDISLQFFLPFSLGKEDGSGDRGDGPFRLGGHGPSFPLKGITEQQKEGLEIVKMVMISLEGEDGLDEIYSFSESLRKLCVFKKIERHSIHWPCRLTIGSNLSIRIAAYKSILQERVKKTWTVVDAKTLKKEDIQKETVYCLNDDDETEVLKEDIIQGFRYGSDIVPFSKVDEEQMKYKSEGKCFSVLGFCKSSQVQRRFFMGNQVLKVFAARDDEAAAVALSSLIHALDDLDMVAIVRYAYDKRANPQVGVAFPHIKHNYECLVYVQLPFMEDLRQYMFSSLKNSKKYAPTEAQLNAVDALIDSMSLAKKDEKTDTLEDLFPTTKIPNPRFQRLFQCLLHRALHPREPLPPIQQHIWNMLNPPAEVTTKSQIPLSKIKTLFPLIEAKKKDQVTAQEIFQDNHEDGPTAKKLKTEQGGAHFSVSSLAEGSVTSVGSVNPAENFRVLVKQKKASFEEASNQLINHIEQFLDTNETPYFMKSIDCIRAFREEAIKFSEEQRFNNFLKALQEKVEIKQLNHFWEIVVQDGITLITQRGSLWKFCHS

SEQ ID NO: 830583 - protein, 751 aa, Homo sapiens; identical to SEQ ID NO: 830582

SEQ ID NO: 830584 - protein, 751 aa, Homo sapiens; identical to SEQ ID NO: 830582

SEQ ID NO: 830585 - protein, 751 aa, Homo sapiens; identical to SEQ ID NO: 830582

SEQ ID NO: 830586 - protein, 751 aa, Homo sapiens; identical to SEQ ID NO: 830582

SEQ ID NO: 830587 - protein, 698 aa, Homo sapiens
MVRSGNKAAVVLCMDVGFTMSNSIPGIESPFEQAKKVITMFVQRQVFAENKDEIALVLFGTDGTDNPLSGGDQYQNITVHRHLMLPDFDLLEDIESKIQPGSQQADFLDALIVSMDVIQHETIGKKFEKRHIEIFTDLSSRFSKSQLDIIIHSLKKCDISLQFFLPFSLGKEDGSGDRGDGPFRLGGHGPSFPLKGITEQQKEGLEIVKMVMISLEGEDGLDEIYSFSESLRKLCVFKKIERHSIHWPCRLTIGSNLSIRIAAYKSILQERVKKTWTVVDAKTLKKEDIQKETVYCLNDDDETEVLKEDIIQGFRYGSDIVPFSKVDEEQMKYKSEGKCFSVLGFCKSSQVQRRFFMGNQVLKVFAARDDEAAAVALSSLIHALDDLDMVAIVRYAYDKRANPQVGVAFPHIKHNYECLVYVQLPFMEDLRQYMFSSLKNSKKYAPTEAQLNAVDALIDSMSLAKKDEKTDTLEDLFPTTKIPNPRFQRLFQCLLHRALHPREPLPPIQQHIWNMLNPPAEVTTKSQIPLSKIKTLFPLIEAKKKDQVTAQEIFQDNHEDGPTAKKLKTEQGGAHFSVSSLAEGSVTSVGSVNPAENFRVLVKQKKASFEEASNQLINHIEQFLDTNETPYFMKSIDCIRAFREEAIKFSEEQRFNNFLKALQEKVEIKQLNHFWEIVVQDGITLITQRGSLWKFCHS

SEQ ID NO: 830588 - protein, 762 aa, Homo sapiens
EPTGGKLGEQVLDLFNLNYILFGGVHSEEKEELVTKSNSLLSLKQGEGKGVEDIKGVSGGEPPKEVRSGNKAAVVLCMDVGFTMSNSIPGIESPFEQAKKVITMFVQRQVFAENKDEIALVLFGTDGTDNPLSGGDQYQNITVHRHLMLPDFDLLEDIESKIQPGSQQADFLDALIVSMDVIQHETIGKKFEKRHIEIFTDLSSRFSKSQLDIIIHSLKKCDISLQFFLPFSLGKEDGSGDRGDGPFRLGGHGPSFPLKGITEQQKEGLEIVKMVMISLEGEDGLDEIYSFSESLRKLCVFKKIERHSIHWPCRLTIGSNLSIRIAAYKSILQERVKKTWTVVDAKTLKKEDIQKETVYCLNDDDETEVLKEDIIQGFRYGSDIVPFSKVDEEQMKYKSEGKCFSVLGFCKSSQVQRRFFMGNQVLKVFAARDDEAAAVALSSLIHALDDLDMVAIVRYAYDKRANPQVGVAFPHIKHNYECLVYVQLPFMEDLRQYMFSSLKNSKKYAPTEAQLNAVDALIDSMSLAKKDEKTDTLEDLFPTTKIPNPRFQRLFQCLLHRALHPREPLPPIQQHIWNMLNPPAEVTTKSQIPLSKIKTLFPLIEAKKKDQVTAQEIFQDNHEDGPTAKKLKTEQGGAHFSVSSLAEGSVTSVGSVNPAENFRVLVKQKKASFEEASNQLINHIEQFLDTNETPYFMKSIDCIRAFREEAIKFSEEQRFNNFLKALQEKVEIKQLNHFWEIVVQDGITLITQRGSLWKFCHS

SEQ ID NO: 830589 - protein, 615 aa, Homo sapiens
QTMRRTLKKEDIQNETVYCLNDDDETEVLKEDIIQGFSALGKKFEKRHIEIFTDLSSRFSKSQLDIIIHSLKKCDISLQFFLPFSLGKEDGSGDRGDGPFRLGGHGPSFPLKGITEQQKEGLEIVKMVMISLEGEDGLDEIYSFSESLRKLCVFKKIERHSIHWPCRLTIGSNLSIRIAAYKSILQERVKKTWTVVDAKTLKKEDIQKETVYCLNDDDETEVLKEDIIQGFRYGSDIVPFSKVDEEQMKYKSEGKCFSVLGFCKSSQVQRRFFMGNQVLKVFAARDDEAAAVALSSLIHALDDLDMVAIVRYAYDKRANPQVGVAFPHIKHNYECLVYVQLPFMEDLRQYMFSSLKNSKKYAPTEAQLNAVDALIDSMSLAKKDEKTDTLEDLFPTTKIPNPRFQRLFQCLLHRALHPREPLPPIQQHIWNMLNPPAEVTTKSQIPLSKIKTLFPLIEAKKKDQVTAQEIFQDNHEDGPTAKKLKTEQGGAHFSVSSLAEGSVTSVGSVNPAENFRVLVKQKKASFEEASNQLINHIEQFLDTNETPYFMKSIDCIRAFREEAIKFSEEQRFNNFLKALQEKVEIKQLNHFWEIVVQDGITLITQRGSLWKFCHS

SEQ ID NO: 830590 - protein, 484 aa, Homo sapiens
SSTENSHWRIYSFSESLRKLCVFKKIERHSIHWPCRLTIGSNLSIRIAAYKSILQERVKKTWTVVDAKTLKKEDIQKETVYCLNDDDETEVLKEDIIQGFRYGSDIVPFSKVDEEQMKYKSEGKCFSVLGFCKSSQVQRRFFMGNQVLKVFAARDDEAAAVALSSLIHALDDLDMVAIVRYAYDKRANPQVGVAFPHIKHNYECLVYVQLPFMEDLRQYMFSSLKNSKKYAPTEAQLNAVDALIDSMSLAKKDEKTDTLEDLFPTTKIPNPRFQRLFQCLLHRALHPREPLPPIQQHIWNMLNPPAEVTTKSQIPLSKIKTLFPLIEAKKKDQVTAQEIFQDNHEDGPTAKKLKTEQGGAHFSVSSLAEGSVTSVGSVNPAENFRVLVKQKKASFEEASNQLINHIEQFLDTNETPYFMKSIDCIRAFREEAIKFSEEQRFNNFLKALQEKVEIKQLNHFWEIVVQDGITLITQRGSLWKFCHS

SEQ ID NO: 830591 - protein, 365 aa, Homo sapiens
VNPAPRCSLFGICKSSQVQRRFFMGNQVLKVFAARDDEAAAVALSSLIHALDDLDMVAIVRYAYDKRANPQVGVAFPHIKHNYECLVYVQLPFMEDLRQYMFSSLKNSKKYAPTEAQLNAVDALIDSMSLAKKDEKTDTLEDLFPTTKIPNPRFQRLFQCLLHRALHPREPLPPIQQHIWNMLNPPAEVTTKSQIPLSKIKTLFPLIEAKKKDQVTAQEIFQDNHEDGPTAKKLKTEQGGAHFSVSSLAEGSVTSVGSVNPAENFRVLVKQKKASFEEASNQLINHIEQFLDTNETPYFMKSIDCIRAFREEAIKFSEEQRFNNFLKALQEKVEIKQLNHFWEIVVQDGITLITQRGSLWKFCHS

SEQ ID NO: 830592 - protein, 751 aa, Homo sapiens; identical to SEQ ID NO: 830582

SEQ ID NO: 830593 - protein, 705 aa, Homo sapiens
MLRVPGHGFPAPFRPSRKRSGSFRYLPLVHRKRVATRQVPARKKRPKRLRTGNMVRSGNKAAVVLCMDVGFTMSNSIPGIESPFEQAKKVITMFVQRQVFAENKDEIALVLFGTDGTDNPLSGGDQYQNITVHRHLMLPDFDLLEDIESKIQPGSQQADFLDALIVSMDVIQHETIGKKFEKRHIEIFTDLSSRFSKSQLDIIIHSLKKCDISLQFFLPFSLGKEDGSGDRGDGPFRLGGHGPSFPLKGITEQQKEGLEIVKMVMISLEGEDGLDEIYSFSESLRKLCVFKKIERHSIHWPCRLTIGSNLSIRIAAYKSILQERVKKTWTVVDAKTLKKEDIQKETVYCLNDDDETEVLKEDIIQGFRYGSDIVPFSKVDEEQMKYKSEGKCFSVLGFCKSSQVQRRFFMGNQVLKVFAARDDEAAAVALSSLIHALDDLDMVAIVRYAYDKRANPQVGVAFPHIKHNYECLVYVQLPFMEDLRQYMFSSLKNSKKYAPTEAQLNAVDALIDSMSLAKKDEKTDTLEDLFPTTKIPNPRFQRLFQCLLHRALHPREPLPPIQQHIWNMLNPPAEVTTKSQIPLSKIKTLFPLIEAKKKDQVTAQEIFQDNHEDGPTAKKLKTEQGGAHFSVSSLAEGSVTSVGSVNPAENFRVLVKQKKASFEEASNQLINHIEQVIVIFWLVYYFFCGLTDLCILHTCFEVSGK

SEQ ID NO: 830594 - protein, 751 aa, Homo sapiens; identical to SEQ ID NO: 830582

SEQ ID NO: 830595 - protein, 537 aa, Homo sapiens
MLRVPGHGFPAPFRPSRKRSGSFRYLPLVHRKRVATRQVPARKKRPKRLRTGNMVRSGNKAAVVLCMDVGFTMSNSIPGIESPFEQAKKVITMFVQRQVFAENKDEIALVLFGTDGTDNPLSGGDQYQNITVHRHLMLPDFDLLEDIESKIQPGSQQADFLDALIVSMDVIQHETIGKKFEKRHIEIFTDLSSRFSKSQLDIIIHSLKKCDISLQFFLPFSLGKEDGSGDRGDGPFRLGGHGPSFPLKGITEQQKEGLEIVKMVMISLEGEDGLDEIYSFSESLRKLCVFKKIERHSIHWPCRLTIGSNLSIRIAAYKSILQERVKKTWTVVDAKTLKKEDIQKETVYCLNDDDETEVLKEDIIQGFRYGSDIVPFSKVDEEQMKYKSEGKCFSVLGFCKSSQVQRRFFMGNQVLKVFAARDDEAAAVALSSLIHALDDLDMVAIVRYAYDKRANPQVGVAFPHIKHNYECLVYVQLPFMEDLRQYMFSSLKNSKKYAPTEAQLNAVDALIDSMSLAKKDEKTDTLEDLFLFRRAAL

SEQ ID NO: 830596 - protein, 107 aa, Homo sapiens
  misc_feature (16)..(16): Xaa can be any naturally occurring amino acid
PAAATLPPYGHSISRXSGYFASNQLINHIEQFLDTNETPYFMKSIDCIRAFREEAIKFSEEQRFNNFLKALQEKVEIKQLNHFWEIVVQDGITLITQRGSLWKFCHS

SEQ ID NO: 830597 - protein, 375 aa, Homo sapiens
MLRVPGHGFPAPFRPSRKRSGSFRYLPLVHRKRVATRQVPARKKRPKRLRTGNMVRSGNKAAVVLCMDVGFTMSNSIPGIESPFEQAKKVITMFVQRQVFAENKDEIALVLFGTDGTDNPLSGGDQYQNITVHRHLMLPDFDLLEDIESKIQPGSQQADFLDALIVSMDVIQHETIGKKFEKRHIEIFTDLSSRFSKSQLDIIIHSLKKCDISLQFFLPFSLGKEDGSGDRGDGPFRLGGHGPSFPLKGITEQQKEGLEIVKMVMISLEGEDGLDEIYSFSESLRKLCVFKKIERHSIHWPCRLTIGSNLSIRIAAYKSILQERVKKTWTVVDAKTLKKEDIQKETVYCLNDDDETEVLKEDIIQGMSVRVFTVA

SEQ ID NO: 830598 - protein, 345 aa, Homo sapiens
MLRVPGHGFPAPFRPSRKRSGSFRYLPLVHRKRVATRQVPARKKRPKRLRTGNMVRSGNKAAVVLCMDVGFTMSNSIPGIESPFEQAKKVITMFVQRQVFAENKDEIALVLFGTDGTDNPLSGGDQYQNITVHRHLMLPDFDLLEDIESKIQPGSQQADFLDALIVSMDVIQHETIGKKFEKRHIEIFTDLSSRFSKSQLDIIIHSLKKCDISLQFFLPFSLGKEDGSGDRGDGPFRLGGHGPSFPLKGITEQQKEGLEIVKMVMISLEGEDGLDEIYSFSESLRKLCVFKKIERHSIHWPCRLTIGSNLSIRIAAYKSILQERVKKTWTVVDAKTLKKKEGLFQ

SEQ ID NO: 830599 - protein, 751 aa, Homo sapiens; identical to SEQ ID NO: 830582

SEQ ID NO: 830600 - protein, 728 aa, Homo sapiens
YPQRRTCQRDFATRQVPARKKRPKRLRTGNMVRSGNKAAVVLCMDVGFTMSNSIPGIESPFEQAKKVITMFVQRQVFAENKDEIALVLFGTDGTDNPLSGGDQYQNITVHRHLMLPDFDLLEDIESKIQPGSQQADFLDALIVSMDVIQHETIGKKFEKRHIEIFTDLSSRFSKSQLDIIIHSLKKCDISLQFFLPFSLGKEDGSGDRGDGPFRLGGHGPSFPLKGITEQQKEGLEIVKMVMISLEGEDGLDEIYSFSESLRKLCVFKKIERHSIHWPCRLTIGSNLSIRIAAYKSILQERVKKTWTVVDAKTLKKEDIQKETVYCLNDDDETEVLKEDIIQGFRYGSDIVPFSKVDEEQMKYKSEGKCFSVLGFCKSSQVQRRFFMGNQVLKVFAARDDEAAAVALSSLIHALDDLDMVAIVRYAYDKRANPQVGVAFPHIKHNYECLVYVQLPFMEDLRQYMFSSLKNSKKYAPTEAQLNAVDALIDSMSLAKKDEKTDTLEDLFPTTKIPNPRFQRLFQCLLHRALHPREPLPPIQQHIWNMLNPPAEVTTKSQIPLSKIKTLFPLIEAKKKDQVTAQEIFQDNHEDGPTAKKLKTEQGGAHFSVSSLAEGSVTSVGSVNPAENFRVLVKQKKASFEEASNQLINHIEQFLDTNETPYFMKSIDCIRAFREEAIKFSEEQRFNNFLKALQEKVEIKQLNHFWEIVVQDGITLITQRGSLWKFCHS

SEQ ID NO: 830601 - protein, 751 aa, Homo sapiens; identical to SEQ ID NO: 830582

SEQ ID NO: 830602 - protein, 751 aa, Homo sapiens; identical to SEQ ID NO: 830582

SEQ ID NO: 830603 - protein, 715 aa, Homo sapiens
GEDLNLRLGTKAWVSGNMVRSGNKAAVVLCMDVGFTMSNSIPGIESPFEQAKKVITMFVQRQVFAENKDEIALVLFGTDGTDNPLSGGDQYQNITVHRHLMLPDFDLLEDIESKIQPGSQQADFLDALIVSMDVIQHETIGKKFEKRHIEIFTDLSSRFSKSQLDIIIHSLKKCDISLQFFLPFSLGKEDGSGDRGDGPFRLGGHGPSFPLKGITEQQKEGLEIVKMVMISLEGEDGLDEIYSFSESLRKLCVFKKIERHSIHWPCRLTIGSNLSIRIAAYKSILQERVKKTWTVVDAKTLKKEDIQKETVYCLNDDDETEVLKEDIIQGFRYGSDIVPFSKVDEEQMKYKSEGKCFSVLGFCKSSQVQRRFFMGNQVLKVFAARDDEAAAVALSSLIHALDDLDMVAIVRYAYDKRANPQVGVAFPHIKHNYECLVYVQLPFMEDLRQYMFSSLKNSKKYAPTEAQLNAVDALIDSMSLAKKDEKTDTLEDLFPTTKIPNPRFQRLFQCLLHRALHPREPLPPIQQHIWNMLNPPAEVTTKSQIPLSKIKTLFPLIEAKKKDQVTAQEIFQDNHEDGPTAKKLKTEQGGAHFSVSSLAEGSVTSVGSVNPAENFRVLVKQKKASFEEASNQLINHIEQFLDTNETPYFMKSIDCIRAFREEAIKFSEEQRFNNFLKALQEKVEIKQLNHFWEIVVQDGITLITQRGSLWKFCHS

SEQ ID NO: 830604 - protein, 646 aa, Homo sapiens
MLRVPGHGFPAPFRPSRKRSGSFRYLPLVHRKRVATRQVPARKKRPKRLRTGNMVRSGNKAAVVLCMDVGFTMSNSIPGIESPFEQAKKVITMFVQRQVFAENKDEIALVLFGTDGTDNPLSGGDQYQNITVHRHLMLPDFDLLEDIESKIQPGSQQADFLDALIVSMDVIQHETIGKKFEKRHIEIFTDLSSRFSKSQLDIIIHSLKKCDISLQFFLPFSLGKEDGSGDRGDGPFRLGGHGPSFPLKGITEQQKEGLEIVKMVMISLEGEDGLDEIYSFSESLRKLCVFKKIERHSIHWPCRLTIGSNLSIRIAAYKSILQERVKKTWTVVDAKTLKKEDIQKETVYCLNDDDETEVLKEDIIQGFRYGSDIVPFSKVDEEQMKYKSEGKCFSVLGFCKSSQVQRRFFMGNQVLKVFAARDDEAAAVALSSLIHALDDLDMVAIVRYAYDKRANPQVGVAFPHIKHNYECLVYVQLPFMEDLRQYMFSSLKNSKKYAPTEAQLNAVDALIDSMSLAKKDEKTDTLEDLFPTTKIPNPRFQRLFQCLLHRALHPREPLPPIQQHIWNMLNPPAEVTTKSQIPLSKIKTLFPLIEAKKKDQVTAQEIFQDNHEDGPTAKKLKTEQGGAHFSVSSLAEGSVTSRVTSS

SEQ ID NO: 830605 - protein, 360 aa, Homo sapiens
MLRVPGHGFPAPFRPSRKRSGSFRYLPLVHRKRVATRQVPARKKRPKRLRTGNMVRSGNKAAVVLCMDVGFTMSNSIPGIESPFEQAKKVITMFVQRQVFAENKDEIALVLFGTDGTDNPLSGGDQYQNITVHRHLMLPDFDLLEDIESKIQPGSQQADFLDALIVSMDVIQHETIGKKFEKRHIEIFTDLSSRFSKSQLDIIIHSLKKCDISLQFFLPFSLGKEDGSGDRGDGPFRLGGHGPSFPLKGITEQQKEGLEIVKMVMISLEGEDGLDEIYSFSESLRKLCVFKKIERHSIHWPCRLTIGSNLSIRIAAYKSILQERVKKTWTVVDAKTLKKEDIQKETVYCLNDDDETESSR

SEQ ID NO: 830606 - protein, 751 aa, Homo sapiens; identical to SEQ ID NO: 830582

SEQ ID NO: 830607 - protein, 751 aa, Homo sapiens; identical to SEQ ID NO: 830582

SEQ ID NO: 830608 - protein, 751 aa, Homo sapiens; identical to SEQ ID NO: 830582

SEQ ID NO: 830609 - protein, 751 aa, Homo sapiens; identical to SEQ ID NO: 830582

SEQ ID NO: 830610 - protein, 751 aa, Homo sapiens; identical to SEQ ID NO: 830582

SEQ ID NO: 830611 - protein, 72 aa, Homo sapiens
YPQRRTCQRDFATRQVPARKKRPKRLRTGNMVRSGNKAAVVLCMDVGFTMSNSIPGIESPFEQAKKPRKRIK

SEQ ID NO: 830612 - protein, 540 aa, Homo sapiens
MLRVPGHGFPAPFRPSRKRSGSFRYLPLVHRKRVATRQVPARKKRPKRLRTGNMVRSGNKAAVVLCMDVGFTMSNSIPGIESPFEQAKKVITMFVQRQVFAENKDEIALVLFGTDGTDNPLSGGDQYQNITVHRHLMLPDFDLLEDIESKIQPGSQQADFLDALIVSMDVIQHETIGKKFEKRHIEIFTDLSSRFSKSQLDIIIHSLKKCDISLQFFLPFSLGKEDGSGDRGDGPFRLGGHGPSFPLKGITEQQKEGLEIVKMVMISLEGEDGLDEIYSFSESLRKLCVFKKIERHSIHWPCRLTIGSNLSIRIAAYKSILQERVKKTWTVVDAKTLKKEDIQKETVYCLNDDDETEVLKEDIIQGFRYGSDIVPFSKVDEEQMKYKSEGKCFSVLGFCKSSQVQRRFFMGNQVLKVFAARDDEAAAVALSSLIHALDDLDMVAIVRYAYDKRANPQVGVAFPHIKHNYECLVYVQLPFMEDLRQYMFSSLKNSKKYAPTEAQLNAVDALIDSMSLAKKDEKTDTLEDLFLTFPGASPPS

SEQ ID NO: 830613 - protein, 267 aa, Homo sapiens
TGAGLRARPEEGGAAGLVREVTTGFGESIMAARTGHTALRRVVSGCRPKSATAAGAQAPVRNGRYLASCGILMSRTLPLHTSILPKEICARTFFKITAPLINKRKEYSERRILGYSMQEMYDVVSGVEDYKHFVPWCKKSDVISKRSGYCKTRLEIGFPPVLERYTSVVTLVKPHLVKASCTDGRLFNHLETIWRFSPGLPGYPRTCTLDFSISFEFRSLLHSQLATLFFDEVVKQMVAAFERRACKLYGPETNIPRELMLHEVHHT

SEQ ID NO: 830614 - protein, 170 aa, Homo sapiens
RQADGNVYGQRVSATCNPEGKKGRVRLRRRPVHWLEETGAGLRARPEEGGAAGLVREVTTGFGESIMAARTGHTALRRVVSGCRPKSATAAGAQAPVRNGRYINSGGAETRVVFDFGCRVGGPEGFGGEAEPDSVHFRVFRGEGFFLRLASEGLKSGAHHLGPKAVFVAR

SEQ ID NO: 830615 - protein, 267 aa, Homo sapiens; identical to SEQ ID NO: 830613

SEQ ID NO: 830616 - protein, 259 aa, Homo sapiens
TGAGLRARPEEGGAAGLVREVTTGFGESIMAARTGHTALRRSATAAGAQAPVRNGRYLASCGILMSRTLPLHTSILPKEICARTFFKITAPLINKRKEYSERRILGYSMQEMYDVVSGVEDYKHFVPWCKKSDVISKRSGYCKTRLEIGFPPVLERYTSVVTLVKPHLVKASCTDGRLFNHLETIWRFSPGLPGYPRTCTLDFSISFEFRSLLHSQLATLFFDEVVKQMVAAFERRACKLYGPETNIPRELMLHEVHHT

SEQ ID NO: 830617 - protein, 602 aa, Homo sapiens
SGSFHLRRPGRHLAVDVVPSQQITPAALPDPRRPVSPPAPSSQWFLLQLPWAPRPVVQPVEPRLCPSPLGGPSARADTHSAGEGEASRGWCGTCRPQQRRRAKPRAGQTKEAARVGRHGRRRRSAAMAGRGGSALLALCGALAACGWLLGAEAQEPGAPAAGMRRRRRLQQEDGISFEYHRYPELREALVSVWLQCTAISRIYTVGRSFEGRELLVIELSDNPGVHEPGEPEFKYIGNMHGNEAVGRELLIFLAQYLCNEYQKGNETIVNLIHSTRIHIMPSLNPDGFEKAASQPGELKDWFVGRSNAQGIDLNRNFPDLDRIVYVNEKEGGPNNHLLKNMKKIVDQNTKLAPETKAVIHWIMDIPFVLSANLHGGDLVANYPYDETRSGSAHEYSSSPDDAIFQSLARAYSSFNPAMSDPNRPPCRKNDDDSSFVDGTTNGGAWYSVPGGMQDFNYLSSNCFEITVELSCEKFPPEETLKTYWEDNKNSLISYLEQIHRGVKGFVRDLQGNPIANATISVEGIDHDVTSAKDGDYWRLLIPGNYKLTASAPGYLAITKKVAVPYSPAAGVDFELESFSERKEEEKEELMEWWKMMSETLNF

SEQ ID NO: 830618 - protein, 104 aa, Homo sapiens
MGVSGEEASETEGEDKPAGWVQVSWLRPYPLPGLTYSYGKHDGGTMKIQQENTQFLYPKAFPVLVSQLGQHSLNKAKFHLCAALRGCYTTLYHPGIIYNAEFFE

SEQ ID NO: 830619 - protein, 97 aa, Homo sapiens
LSGLPLLLPVPLLLPVPRSAHEYSSSPDDAIFQSLARAYSSFNPAMSDPNYCRFLYYIGLVLAFLLALSKITHASIPVPVSSPSKSPRSKGTSIKHA

SEQ ID NO: 830620 - protein, 602 aa, Homo sapiens; identical to SEQ ID NO: 830617

SEQ ID NO: 830621 - protein, 421 aa, Homo sapiens
SGSFHLRRPGRHLAVDVVPSQQITPAALPDPRRPVSPPAPSSQWFLLQLPWAPRPVVQPVEPRLCPSPLGGPSARADTHSAGEGEASRGWCGTCRPQQRRRAKPRAGQTKEAARVGRHGRRRRSAAMAGRGGSALLALCGALAACGWLLGAEAQEPGAPAAGMRRRRRLQQEDGISFEYHRYPELREALVSVWLQCTAISRIYTVGRSFEGRELLVIELSDNPGVHEPGEPEFKYIGNMHGNEAVGRELLIFLAQYLCNEYQKGNETIVNLIHSTRIHIMPSLNPDGFEKAASQPGELKDWFVGRSNAQGIDLNRNFPDLDRIVYVNEKEGGPNNHLLKNMKKIVDQNTKFLLCFLPISMEETLWPIIHMMRRGVVVLTNTAPPQMTPFSKAWPGHTLLSTRPCLTPIGHHVARMMMTAAL

SEQ ID NO: 830622 - protein, 583 aa, Homo sapiens
SGSFHLRRPGRHLAVDVVPSQQITPAALPDPRRPVSPPAPSSQWFLLQLPWAPRPVVQPVEPRLCPSPLGGPSARADTHSAGEGEASRGWCGTCRPQQRRRAKPRAGQAGRGGSALLALCGALAACGWLLGAEAQEPGAPAAGMRRRRRLQQEDGISFEYHRYPELREALVSVWLQCTAISRIYTVGRSFEGRELLVIELSDNPGVHEPGEPEFKYIGNMHGNEAVGRELLIFLAQYLCNEYQKGNETIVNLIHSTRIHIMPSLNPDGFEKAASQPGELKDWFVGRSNAQGIDLNRNFPDLDRIVYVNEKEGGPNNHLLKNMKKIVDQNTKLAPETKAVIHWIMDIPFVLSANLHGGDLVANYPYDETRSGSAHEYSSSPDDAIFQSLARAYSSFNPAMSDPNRPPCRKNDDDSSFVDGTTNGGAWYSVPGGMQDFNYLSSNCFEITVELSCEKFPPEETLKTYWEDNKNSLISYLEQIHRGVKGFVRDLQGNPIANATISVEGIDHDVTSAKDGDYWRLLIPGNYKLTASAPGYLAITKKVAVPYSPAAGVDFELESFSERKEEEKEELMEWWKMMSETLNF

SEQ ID NO: 830623 - protein, 602 aa, Homo sapiens; identical to SEQ ID NO: 830617

SEQ ID NO: 830624 - protein, 358 aa, Homo sapiens
IFISDRNICRAETRKTFLRENFEHIQHIVIDEAQNFRTEDGDWYEKAASQPGELKDWFVGRSNAQGIDLNRNFPDLDRIVYVNEKEGGPNNHLLKNMKKIVDQNTKLAPETKAVIHWIMDIPFVLSANLHGGDLVANYPYDETRSGSAHEYSSSPDDAIFQSLARAYSSFNPAMSDPNRPPCRKNDDDSSFVDGTTNGGAWYSVPGGMQDFNYLSSNCFEITVELSCEKFPPEETLKTYWEDNKNSLISYLEQIHRGVKGFVRDLQGNPIANATISVEGIDHDVTSAKDGDYWRLLIPGNYKLTASAPGYLAITKKVAVPYSPAAGVDFELESFSERKEEEKEELMEWWKMMSETLNF

SEQ ID NO: 830625 - protein, 230 aa, Homo sapiens
MSLVKSKRQLNPRGAIHSSAHEYSSSPDDAIFQSLARAYSSFNPAMSDPNRPPCRKNDDDSSFVDGTTNGGAWYSVPGGMQDFNYLSSNCFEITVELSCEKFPPEETLKTYWEDNKNSLISYLEQIHRGVKGFVRDLQGNPIANATISVEGIDHDVTSAKDGDYWRLLIPGNYKLTASAPGYLAITKKVAVPYSPAAGVDFELESFSERKEEEKEELMEWWKMMSETLNF

SEQ ID NO: 830626 - protein, 398 aa, Homo sapiens
  misc_feature (392)..(392): Xaa can be any naturally occurring amino acid
SGSFHLRRPGRHLAVDVVPSQQITPAALPDPRRPVSPPAPSSQWFLLQLPWAPRPVVQPVEPRLCPSPLGGPSARADTHSAGEGEASRGWCGTCRPQQRRRAKPRAGQTKEAARVGRHGRRRRSAAMAGRGGSALLALCGALAACGWLLGAEAQEPGAPAAGMRRRRRLQQEDGISFEYHRYPELREALVSVWLQCTAISRIYTVGRSFEGRELLVIELSDNPGVHEPGEPEFKYIGNMHGNEAVGRELLIFLAQYLCNEYQKGNETIVNLIHSTRIHIMPSLNPDGFEKAASQPGELKDWFVGRSNAQGIDLNRNFPDLDRIVYVNEKEGGPNNHLLKNMKKIVDQNTKLAPETKAVIHWIMDIPFVLSANLHGGDLVANYPYDETRSDAXDTGLPR

SEQ ID NO: 830627 - protein, 295 aa, Homo sapiens
SGSFHLRRPGRHLAVDVVPSQQITPAALPDPRRPVSPPAPSSQWFLLQLPWAPRPVVQPVEPRLCPSPLGGPSARADTHSAGEGEASRGWCGTCRPQQRRRAKPRAGQTKEAARVGRHGRRRRSAAMAGRGGSALLALCGALAACGWLLGAEAQEPGAPAAGMRRRRRLQQEDGISFEYHRYPELREALVSVWLQCTAISRIYTVGRSFEGRELLVIELSDNPGVHEPGEPEFKYIGNMHGNEAVGRELLIFLAQYLCNEYQKGNETIVNLIHSTRIHIMPSCDPMGLESGVFAC

SEQ ID NO: 830628 - protein, 602 aa, Homo sapiens; identical to SEQ ID NO: 830617

SEQ ID NO: 830629 - protein, 581 aa, Homo sapiens
SGSFHLRRPGRHLAVDVVPSQQITPAALPDPRRPVSPPAPSSQWFLLQLPWAPRPVVQPVEPRLCPSPLGGPSARADTHSAGEGEASRGWCGTCRPQQRRRAKPRAGQTKEAARVGRHGRRRRSAAMAGRGGSALLALCGALAACGWLLGAEAQEPGAPAAGMRRRRRLQQEDGISFEYHRYPELREALVSVWLQCTAISRIYTVGRSFEGRELLVIELSDNPGVHEPGEPEFKYIGNMHGNEAVGRELLIFLAQYLCNEYQKGNETIVNLIHSTRIHIMPSLNPDGFEKAASQPGELKDWFVGRSNAQGIDLNRNFPDLDRIVYVNEKEGGPNNHLLKNMKKIVDQNTKLAPETKAVIHWIMDIPFVLSANLHGGDLVANYPYDETRSGSAHEYSSSPDDAIFQSLARAYSSFNPAMSDPNRPPCRKNDDDSSFVDGTTNGGAWYSVPGGMQDFNYLSSNCFEITVELSCEKFPPEETLKTYWVRDLQGNPIANATISVEGIDHDVTSAKDGDYWRLLIPGNYKLTASAPGYLAITKKVAVPYSPAAGVDFELESFSERKEEEKEELMEWWKMMSETLNF

SEQ ID NO: 830630 - protein, 440 aa, Homo sapiens
MRRRRRLQQEDGISFEYHRYPELREALVSVWLQCTAISRIYTVGRSFEGRELLVIELSDNPGVHEPGEPEFKYIGNMHGNEAVGRELLIFLAQYLCNEYQKGNETIVNLIHSTRIHIMPSLNPDGFEKAASQPGELKDWFVGRSNAQGIDLNRNFPDLDRIVYVNEKEGGPNNHLLKNMKKIVDQNTKLAPETKAVIHWIMDIPFVLSANLHGGDLVANYPYDETRSGSAHEYSSSPDDAIFQSLARAYSSFNPAMSDPNRPPCRKNDDDSSFVDGTTNGGAWYSVPGGMQDFNYLSSNCFEITVELSCEKFPPEETLKTYWEDNKNSLISYLEQIHRGVKGFVRDLQGNPIANATISVEGIDHDVTSAKDGDYWRLLIPGNYKLTASAPGYLAITKKVAVPYSPAAGVDFELESFSERKEEEKEELMEWWKMMSETLNF

SEQ ID NO: 830631 - protein, 341 aa, Homo sapiens
VILDDPLLSEIQILLSDSASYLNPDGFEKAASQPGELKDWFVGRSNAQGIDLNRNFPDLDRIVYVNEKEGGPNNHLLKNMKKIVDQNTKLAPETKAVIHWIMDIPFVLSANLHGGDLVANYPYDETRSGSAHEYSSSPDDAIFQSLARAYSSFNPAMSDPNRPPCRKNDDDSSFVDGTTNGGAWYSVPGGMQDFNYLSSNCFEITVELSCEKFPPEETLKTYWEDNKNSLISYLEQIHRGVKGFVRDLQGNPIANATISVEGIDHDVTSAKDGDYWRLLIPGNYKLTASAPGYLAITKKVAVPYSPAAGVDFELESFSERKEEEKEELMEWWKMMSETLNF

SEQ ID NO: 830632 - protein, 287 aa, Homo sapiens
GEGDEGGRGEGEERGGRGGDAEGTTRDGGGRRRRLQQEDGISFEYHRYPELREALVSVWLQCTAISRIYTVGRSFEGRELLVIELSDNPGVHEPGEPEFKYIGNMHGNEAVGRELLIFLAQYLCNEYQKGNETIVNLIHSTRIHIMPSLNPDGFEKAASQPGELKDWFVGRSNAQGIDLNRNFPDLDRIVYVNEKEGGPNNHLLKNMKKIVDQNTKFLLCFLPISMEETLWPIIHMMRRGVVVLTNTAPPQMTPFSKAWPGHTLLSTRPCLTPIGHHVARMMMTAAL

SEQ ID NO: 830633 - protein, 255 aa, Homo sapiens
SGSFHLRRPGRHLAVDVVPSQQITPAALPDPRRPVSPPAPSSQWFLLQLPWAPRPVVQPVEPRLCPSPLGGPSARADTHSAGEGEASRGWCGTCRPQQRRRAKPRAGQTKEAARVGRHGRRRRSAAMAGRGGSALLALCGALAACGWLLGAEAQEPGAPAAGMRRRRRLQQEDGISFEYHRYPELREALVSVWLQCTAISRIYTVGRSFEGRELLVIELSDNPGVHEPDCKLYEVGTLIPAPSSCLAHSGLEYTL

SEQ ID NO: 830634 - protein, 469 aa, Homo sapiens
PSAEAPAERPRMEREPSASEAAPAAAALFAWGANSYGQLGLGHKEDVLLPQQLNDFCKPRSVRRITGGGGHSAVVTDGGDLFVCGLNKDGQLGLGHTEDIPYFTPCKSLFGCPIQQVACGWDFTIMLTENGQVLSCGSNSFGQLGVPHGPRRCVVPQAIELHKEKVVCIAAGLRHAVAATASGIVFQWGTGLASCGRRLCPGQTLPLFFTAKEPSRVTGLENSKAMCVLAGSDHSASLTDAGEVYVWGSNKHGQLANEAAFLPVPQKIEAHCFQNEKVTAIWSGWTHLVAQTETGKMFTWGRADYGQLGRKLETYEGWKLEKQDSFLPCSRPPNSMPSSPHCLTGATEVSCGSEHNLAIIGGVCYSWGWNEHGMCGDGTEANVWAPKPVQALLSSSGLLVGCGAGHSLALCQLPAHPALVQDPKVTYLSPDAIEDTESQKAMDKERNWKERQSETSTQSQSDWSRNGGL

SEQ ID NO: 830635 - protein, 365 aa, Homo sapiens
PSAEAPAERPRMEREPSASEAAPAAAALFAWGANSYGQLGLGHKEDVLLPQQLNDFCKPRSVRRITGGGGHSAVVTDGGDLFVCGLNKDGQLGLGHTEDIPYFTPCKSLFGCPIQQVACGWDFTIMLTENGQVLSCGSNSFGQLGVPHGPRRCVVPQAIELHKEKVVCIAAGLRHAVAATASGIVFQWGTGLASCGRRLCPGQTLPLFFTAKEPSRVTGLENSKAMCVLAGSDHSASLTDAGEVYVWGSNKHGQLANEAAFLPVPQKIEAHCFQNEKVTAIWSGWTHLVAQTETGKMFTWGRADYGQLGRKLETYEGWKLEKQDSFLPCSRPPNSMPSSPHCLTGATETSFRWHLLGKSSLMSRS

SEQ ID NO: 830636 - protein, 133 aa, Homo sapiens
ISVRCDLLLLVFCHDCEASPTTWNCGVCYSWGWNEHGMCGDGTEANVWAPKPVQALLSSSGLLVGCGAGHSLALCQLPAHPALVQDPKVTYLSPDAIEDTESQKAMDKERNWKERQSETSTQSQSDWSRNGGL

SEQ ID NO: 830637 - protein, 122 aa, Homo sapiens
MIPTPEVVLPNGIGGVCYSWGWNEHGMCGDGTEANVWAPKPVQALLSSSGLLVGCGAGHSLALCQLPAHPALVQDPKVTYLSPDAIEDTESQKAMDKERNWKERQSETSTQSQSDWSRNGGL

SEQ ID NO: 830638 - protein, 444 aa, Homo sapiens
MIEDNKENKDHSLERGRASLIFSLKNEVGGLIKALKIFQEKHVNLLHIESRKSKRRNSEFEIFVDCDINREQLNDIFHLLKSHTNVLSVNLPDNFTLKEDGMETVPWFPKKISDLDHCANRVLMYGSELDADHPGFKDNVYRKRRKYFADLAMNYKHGDPIPKVEFTEEEIKTWGTVFQELNKLYPTHACREYLKNLPLLSKYCGYREDNIPQLEDVSNFLKERTGFSIRPVAGYLSPRDFLSGLAFRVFHCTQYVRHSSDPFYTPEPDTCHELLGHVPLLAEPSFAQFSQEIGLASLGASEEAVQKLATCYFFTVEFGLCKQDGQLRVFGAGLLSSISELKHALSGHAKVKPFDPKITCKQECLITTFQDVYFVSESFEDAKEKMREFTKTIKRPFGVKYNPYTRSIQILKDTKSITSAMNELQHDLDVVSDALAKVSRKPSI

SEQ ID NO: 830639 - protein, 344 aa, Homo sapiens
MLTENGQVLSCGSNSFGQLGVPHGPRRCVVPQAIELHKEKVVCIAAGLRHAVAATASGIVFQWGTGLASCGRRLCPGQTLPLFFTAKEPSRVTGLENSKAMCVLAGSDHSASLTDAGEVYVWGSNKHGQLANEAAFLPVPQKIEAHCFQNEKVTAIWSGWTHLVAQTETGKMFTWGRADYGQLGRKLETYEGWKLEKQDSFLPCSRPPNSMPSSPHCLTGATEVSCGSEHNLAIIGGVCYSWGWNEHGMCGDGTEANVWAPKPVQALLSSSGLLVGCGAGHSLALCQLPAHPALVQDPKVTYLSPDAIEDTESQKAMDKERNWKERQSETSTQSQSDWSRNGGL

SEQ ID NO: 830640 - protein, 875 aa, Homo sapiens
MIEDNKENKDHSLERGRASLIFSLKNEVGGLIKALKIFQEKHVNLLHIESRKSKRRNSEFEIFVDCDINREQLNDIFHLLKSHTNVLSVNLPDNFTLKEDGMETVPWFPKKISDLDHCANRVLMYGSELDADHPGFKDNVYRKRRKYFADLAMNYKHGDPIPKVEFTEEEIKTWGTVFQELNKLYPTHACREYLKNLPLLSKYCGYREDNIPQLEDVSNFLKERTGFSIRPVAGYLSPRDFLSGLAFRVFHCTQYVRHSSDPFYTPEPDTCHELLGHVPLLAEPSFAQFSQEIGLASLGASEEAVQKLATCYFFTVEFGLCKQDGQLRVFGAGLLSSISELKHALSGHAKVKPFDPKITCKQECLITTFQDVYFVSESFEDAKEKMREFTKTIKRPFGVKYNPYTRSIQILKDTKSITSAMNELQHDLDVVSDALAKGANSYGQLGLGHKEDVLLPQQLNDFCKPRSVRRITGGGGHSAVVTDGGDLFVCGLNKDGQLGLGHTEDIPYFTPCKSLFGCPIQQVACGWDFTIMLTENGQVLSCGSNSFGQLGVPHGPRRCVVPQAIELHKEKVVCIAAGLRHAVAATASGIVFQWGTGLASCGRRLCPGQTLPLFFTAKEPSRVTGLENSKAMCVLAGSDHSASLTDAGEVYVWGSNKHGQLANEAAFLPVPQKIEAHCFQNEKVTAIWSGWTHLVAQTETGKMFTWGRADYGQLGRKLETYEGWKLEKQDSFLPCSRPPNSMPSSPHCLTGATEVSCGSEHNLAIIGGVCYSWGWNEHGMCGDGTEANVWAPKPVQALLSSSGLLVGCGAGHSLALCQLPAHPALVQDPKVTYLSPDAIEDTESQKAMDKERNWKERQSETSTQSQSDWSRNGGL

SEQ ID NO: 830641 - protein, 541 aa, Homo sapiens
DSLIFVFKHALSGHAKVKPFDPKITCKQECLITTFQDVYFVSESFEDAKEKMREFTKTIKRPFGVKYNPYTRSIQILKDTKSITSAMNELQHDLDVVSDALAKGANSYGQLGLGHKEDVLLPQQLNDFCKPRSVRRITGGGGHSAVVTDGGDLFVCGLNKDGQLGLGHTEDIPYFTPCKSLFGCPIQQVACGWDFTIMLTENGQVLSCGSNSFGQLGVPHGPRRCVVPQAIELHKEKVVCIAAGLRHAVAATASGIVFQWGTGLASCGRRLCPGQTLPLFFTAKEPSRVTGLENSKAMCVLAGSDHSASLTDAGEVYVWGSNKHGQLANEAAFLPVPQKIEAHCFQNEKVTAIWSGWTHLVAQTETGKMFTWGRADYGQLGRKLETYEGWKLEKQDSFLPCSRPPNSMPSSPHCLTGATEVSCGSEHNLAIIGGVCYSWGWNEHGMCGDGTEANVWAPKPVQALLSSSGLLVGCGAGHSLALCQLPAHPALVQDPKVTYLSPDAIEDTESQKAMDKERNWKERQSETSTQSQSDWSRNGGL

SEQ ID NO: 830642 - protein, 278 aa, Homo sapiens
PSAEAPAERPRMEREPSASEAAPAAAALFAWGANSYGQLGLGHKEDVLLPQQLNDFCKPRSVRRITGGGGHSAVVTDGGDLFVCGLNKDGQLGLGHTEDIPYFTPCKSLFGCPIQQVACGWDFTIMLTENGQVLSCGSNSFGQLGVPHGPRRCVVPQAIELHKEKVVCIAAGLRHAVAATASGIVFQWGTGLASCGRRLCPGQTLPLFFTAKEPSRVTDAGEVYVWGSNKHGQLANEAAFLPVPQKIEAHCFQNEKVTAIWSGWTHLVAQTGLLWLRA

SEQ ID NO: 830643 - protein, 901 aa, Homo sapiens
MIEDNKENKDHSLERGRASLIFSLKNEVGGLIKALKIFQEKHVNLLHIESRKSKRRNSEFEIFVDCDINREQLNDIFHLLKSHTNVLSVNLPDNFTLKEDGMETVPWFPKKISDLDHCANRVLMYGSELDADHPGFKDNVYRKRRKYFADLAMNYKHGDPIPKVEFTEEEIKTWGTVFQELNKLYPTHACREYLKNLPLLSKYCGYREDNIPQLEDVSNFLKERTGFSIRPVAGYLSPRDFLSGLAFRVFHCTQYVRHSSDPFYTPEPDTCHELLGHVPLLAEPSFAQFSQEIGLASLGASEEAVQKLATCYFFTVEFGLCKQDGQLRVFGAGLLSSISELKHALSGHAKVKPFDPKITCKQECLITTFQDVYFVSESFEDAKEKMREFTKTIKRPFGVKYNPYTRSIQILKDTKSITSAMNELQHDLDVVSDALAKGANSYGQLGLGHKEDVLLPQQLNDFCKPRSVRRITGGGGHSAVVTDGGDLFVCGLNKDGQLGLGHTEDIPYFTPCKSLFGCPIQQVACGWDFTIMLTENGQVLSCGSNSFGQLGVPHGPRRCVVPQAIELHKEKVVCIAAGLRHAVAATGQHYWLWQLRLRCFVSPLVEWRKERGASGIVFQWGTGLASCGRRLCPGQTLPLFFTAKEPSRVTGLENSKAMCVLAGSDHSASLTDAGEVYVWGSNKHGQLANEAAFLPVPQKIEAHCFQNEKVTAIWSGWTHLVAQTETGKMFTWGRADYGQLGRKLETYEGWKLEKQDSFLPCSRPPNSMPSSPHCLTGATEVSCGSEHNLAIIGGVCYSWGWNEHGMCGDGTEANVWAPKPVQALLSSSGLLVGCGAGHSLALCQLPAHPALVQDPKVTYLSPDAIEDTESQKAMDKERNWKERQSETSTQSQSDWSRNGGL

SEQ ID NO: 830644 - protein, 237 aa, Homo sapiens
MLTENGQVLSCGSNSFGQLGVPHGPRRCVVPQAIELHKEKVVCIAAGLRHAVAATASGIVFQWGTGLASCGRRLCPGQTLPLFFTAKEPSRVTGLENSKAMCVLAGSDHSASLTDAGEVYVWGSNKHGQLANEAAFLPVPQKIEAHCFQNEKVTAIWSGWTHLVAQTETGKMFTWGRADYGQLGRKLETYEGWKLEKQDSFLPCSRPPNSMPSSPHCLTGATEVSCGSEHNLAIIGT

SEQ ID NO: 830645 - protein, 239 aa, Homo sapiens
PSAEAPAERPRMEREPSASEAAPAAAALFAWGANSYGQLGLGHKEDVLLPQQLNDFCKPRSVRRITGGGGHSAVVTDGGDLFVCGLNKDGQLGLGHTEDIPYFTPCKSLFGCPIQQVACGWDFTIMLTENGQVLSCGSNSFGQLGVPHGPRRCVVPQAIELHKEKVVCIAAGLRHAVAATASGIVFQWGTGLASCGRRLCPGQTLPLFFTAKEPSRVTASRVTGKMLLSLVLYLFFVRK

SEQ ID NO: 830646 - protein, 299 aa, Homo sapiens
PSAEAPAERPRMEREPSASEAAPAAAALFAWGANSYGQLGLGHKEDVLLPQQLNDFCKPRSVRRITGGGGHSAVVTDGGDLFVCGLNKDGQLGLGHTEDIPYFTPCKSLFGCPIQQVACGWDFTIMLTENGQVLSCGSNSFGQLGVPHGPRRCVVPQAIELHKEKVVCIAAGLRHAVAATASGIVFQWGTGLASCGRRLCPGQTLPLFFTAKEPSRVTGLENSKAMCVLAGSDHSASLTDAGEVYVWGSNKHGQLANEAAFLPVPQKIEAHCFQNEKVTAIWSGWTHLVAQTGLLWLRA

SEQ ID NO: 830647 - protein, 265 aa, Homo sapiens
PSAEAPAERPRMEREPSASEAAPAAAALFAWGANSYGQLGLGHKEDVLLPQQLNDFCKPRSVRRITGGGGHSAVVTDGGDLFVCGLNKDGQLGLGHTEDIPYFTPCKSLFGCPIQQVACGWDFTIMLTENGQVLSCGSNSFGQLGVPHGPRRCVVPQAIELHKEKVVCIAAGLRHAVAATASGIVFQWGTGLASCGRRLCPGQTLPLFFTAKEPSRVTDAGEVYVWGSNKHGQLANEAAFLPVPSSSALAPSVLAPAPGRGLRPR

SEQ ID NO: 830648 - protein, 121 aa, Homo sapiens
MLTENGQVLSCGSNSFGQLGVPHGPRRCVVPQAIELHKEKVVCIAAGLRHAVAATASGIVFQWGTGLASCGRRLCPGQTLPLFFTAKEPSRVTGLENSKAMCVLAGSDHSASLTGRYQLFH

SEQ ID NO: 830649 - protein, 444 aa, Homo sapiens; identical to SEQ ID NO: 830638

SEQ ID NO: 830650 - protein, 444 aa, Homo sapiens; identical to SEQ ID NO: 830638

SEQ ID NO: 830651 - protein, 344 aa, Homo sapiens; identical to SEQ ID NO: 830639

SEQ ID NO: 830652 - protein, 244 aa, Homo sapiens
MCVLAGSDHSASLTDAGEVYVWGSNKHGQLANEAAFLPVPQKIEAHCFQNEKVTAIWSGWTHLVAQTETGKMFTWGRADYGQLGRKLETYEGWKLEKQDSFLPCSRPPNSMPSSPHCLTGATEVSCGSEHNLAIIGGVCYSWGWNEHGMCGDGTEANVWAPKPVQALLSSSGLLVGCGAGHSLALCQLPAHPALVQDPKVTYLSPDAIEDTESQKAMDKERNWKERQSETSTQSQSDWSRNGGL

SEQ ID NO: 830653 - protein, 349 aa, Homo sapiens
MGNWGLVTQRISHILPPANPSLAVPSNRWPVAGILRLCSQLHKEKVVCIAAGLRHAVAATASGIVFQWGTGLASCGRRLCPGQTLPLFFTAKEPSRVTGLENSKAMCVLAGSDHSASLTDAGEVYVWGSNKHGQLANEAAFLPVPQKIEAHCFQNEKVTAIWSGWTHLVAQTETGKMFTWGRADYGQLGRKLETYEGWKLEKQDSFLPCSRPPNSMPSSPHCLTGATEVSCGSEHNLAIIGGVCYSWGWNEHGMCGDGTEANVWAPKPVQALLSSSGLLVGCGAGHSLALCQLPAHPALVQDPKVTYLSPDAIEDTESQKAMDKERNWKERQSETSTQSQSDWSRNGGL

SEQ ID NO: 830654 - protein, 376 aa, Homo sapiens
SGRPRPAELPRSPAASPRLVSLPTMEGVAVVTAGSVGAAKTEGAAALPPPPPPPVSPPALTPAPAAGEEGPAPLSETGAPGCSGSRPPELEPERSLGRFRGRFEDEDEELEEEEELEEEEEEEEEDMSHFSLRLEGGRQDSEDEEERLINLSELTPYILCSICKGYLIDATTITECLHTFCKSCIVRHFYYSNRCPKCNIVVHQTQPLYNIRLDRQLQDIVYKLVINLEEREKKQMHDFYKERGLEVPKPAVPQPVPSSKGRSKKVLESVFRIPPELDMSLLLEFIGANEGTGHFKPLEKKFVRVSGEATIGHVEKFLRRKMGLDPACQVDIICGDHLLEQYQTLREIRRAIGDAAMQDGLLVLHYGLVVSPLKIT

SEQ ID NO: 830655 - protein, 383 aa, Homo sapiens
SGRPRPAELPRSPAASPRLVSLPTMEGVAVVTAGSVGAAKTEGAAALPPPPPPPVSPPALTPAPAAGEEGPAPLSETGAPGCSGSRPPELEPERSLGRFRGRFEDEDEELEEEEELEEEEEEEEEDMSHFSLRLEGGRQDSEDEEERLINLSELTPYILCSICKGYLIDATTITECLHTFCKSCIVRHFYYSNRCPKCNIVVHQTQPLYNIRLDRQLQDIVYKLVINLEEICVLSFFGEKKQMHDFYKERGLEVPKPAVPQPVPSSKGRSKKVLESVFRIPPELDMSLLLEFIGANEGTGHFKPLEKKFVRVSGEATIGHVEKFLRRKMGLDPACQVDIICGDHLLEQYQTLREIRRAIGDAAMQDGLLVLHYGLVVSPLKIT

SEQ ID NO: 830656 - protein, 224 aa, Homo sapiens
SGRPRPAELPRSPAASPRLVSLPTMEGVAVVTAGSVGAAKTEGAAALPPPPPPPVSPPALTPAPAAGEEGPAPLSETGAPGCSGSRPPELEPERSLGRFRGRFEDEDEELEEEEELEEEEEEEEEDMSHFSLRLEGGRQDSEDEEERLINLSELTPYILCSICKGYLIDATTITECLHTFCKSCIVRHFYYSNRCPKCNIVVHQTQPLYNISCSTASPFKQRKI

SEQ ID NO: 830657 - protein, 287 aa, Homo sapiens
SGRPRPAELPRSPAASPRLVSLPTMEGVAVVTAGSVGAAKTEGAAALPPPPPPPVSPPALTPAPAAGEEGPAPLSETGAPGCSGSRPPELEPERSLGRFRGRFEDEDEELEEEEELEEEEEEEEEDMSHFSLRLEGGRQDSEDEEERLINLSELTPYILCSICKGYLIDATTITECLHTFCKSCIVRHFYYSNRCPKCNIVVHQTQPLYNIRLDRQLQDIVYKLVINLEEREKKQMHDFYKERGLEVPKPAVPQPVPSSKGRSKKVLESVFRIPPELDMSLLLEFIG

SEQ ID NO: 830658 - protein, 376 aa, Homo sapiens; identical to SEQ ID NO: 830654

SEQ ID NO: 830659 - protein, 189 aa, Homo sapiens
MEGVAVVTAGSVGAAKTEGAAALPPPPPPPVSPPALTPAPAAGEEGPAPLSETGAPGCSGSRPPELEPERSLGRFRGRFEDEDEELEEEEELEEEEEEEEEDMSHFSLRLEGGRQDSEDEEERLINLSELTPYILCSICKGYLIDATTITECLHTFCKSCIVRHFYYSNRCPKCNIVVHQTQPLYNIRC

SEQ ID NO: 830660 - protein, 188 aa, Homo sapiens
MEGVAVVTAGSVGAAKTEGAAALPPPPPPPVSPPALTPAPAAGEEGPAPLSETGAPGCSGSRPPELEPERSLGRFRGRFEDEDEELEEEEELEEEEEEEEEDMSHFSLRLEGGRQDSEDEEERLINLSELTPYILCSICKGYLIDATTITECLHTFCKSCIVRHFYYSNRCPKCNIVVHQTQPLYNIR

SEQ ID NO: 830661 - protein, 196 aa, Homo sapiens
AAAVAELPVLDARGQRVPFGALFRERRAVVVFVRHFLCYICKEYVEDLAKIPRSFLQEANVTLIVIGQSSYHHIEPFCKLTGYSHEIYVDPEREIYKRLGMKRGEEIASSGQSPHIKSNLLSGSLQSLWRAVTGPLFDFQGDPAQQGGTLILGPGNNIHFIHRDRNRLDHKPINSVLQLVGVQHVNFTNRPSVIHV

SEQ ID NO: 830662 - protein, 196 aa, Homo sapiens; identical to SEQ ID NO: 830661

SEQ ID NO: 830663 - protein, 106 aa, Homo sapiens
AAASQLGRGRERARARPASHAPGARAAGPGPAGVAFARVTHGEVQGSFGARGCCFTNLPFLPFWLSAFPVLHLQGIRRGSGQNPQEFLTRSKCHPYSDWTVILPSY

SEQ ID NO: 830664 - protein, 152 aa, Homo sapiens
AAAVAELPVLDARGQRVPFGALFRERRAVVVFVRHFLCYICKEYVEDLAKIPRSFLQEANVTLIVIGQSSYHHIEPFCKLTGYSHEIYVDPEREIYKRLGMKRGEEIASSGNNIHFIHRDRNRLDHKPINSVLQLVGVQHVNFTNRPSVIHV

SEQ ID NO: 830665 - protein, 179 aa, Homo sapiens
GPRPPRVMAAPAPVTRQHFLCYICKEYVEDLAKIPRSFLQEANVTLIVIGQSSYHHIEPFCKLTGYSHEIYVDPEREIYKRLGMKRGEEIASSGQSPHIKSNLLSGSLQSLWRAVTGPLFDFQGDPAQQGGTLILGPGNNIHFIHRDRNRLDHKPINSVLQLVGVQHVNFTNRPSVIHV

SEQ ID NO: 830666 - protein, 109 aa, Homo sapiens
MSLNPPIFLKRSEENSSKFVETKQSQTTSIASEDPLQNLCLASQEVLQKAQQSGRSKCLKCGGSRMFYCYTCYVPVENVPIEQIPLVKFSLYHLGQSMVSSASKITCIG

SEQ ID NO: 830667 - protein, 66 aa, Homo sapiens
  misc_feature (8)..(8): Xaa can be any naturally occurring amino acid
MGTVYFNXPGLLQVELKTRKTCFWRHQKGKPDTFLSTIEAIYYFLVDYHTDILKEKYRGGLVGLKG

SEQ ID NO: 830668 - protein, 190 aa, Homo sapiens
MSLNPPIFLKRSEENSSKFVETKQSQTTSIASEDPLQNLCLASQEVLQKAQQSGRSKCLKCGGSRMFYCYTCYVPVENVPIEQIPLVKLPLKIDIIKHPNETDGKSTAIHAKLLAPEFVNIYTYPCIPEYEEKDHEVALIFPGPQSISIKDISFHLQKRIQNNVRGKNDDPDKPSFKRKRTEEQEFCDCE

SEQ ID NO: 830669 - protein, 190 aa, Homo sapiens; identical to SEQ ID NO: 830668

SEQ ID NO: 830670 - protein, 190 aa, Homo sapiens; identical to SEQ ID NO: 830668

SEQ ID NO: 830671 - protein, 190 aa, Homo sapiens; identical to SEQ ID NO: 830668

SEQ ID NO: 830672 - protein, 125 aa, Homo sapiens
MFYCYTCYVPVENVPIEQIPLVKLPLKIDIIKHPNETDGKSTAIHAKLLAPEFVNIYTYPCIPEYEEKDHEVALIFPGPQSISIKDISFHLQKRIQNNVRGKNDDPDKPSFKRKRTEEQEFCDCE

SEQ ID NO: 830673 - protein, 190 aa, Homo sapiens; identical to SEQ ID NO: 830668

SEQ ID NO: 830674 - protein, 172 aa, Homo sapiens
MSLNPPIFLKRSEENSSKFVETKQSQTTSIASEDPLQNLCLASQEVLQKAQQSGRSKCLKCGGSRMFYCYTCYVPVENVPIEQIPLVKLPLKIDIIKHPNETDGKSTAIHAKLLAPEFVNIYTYPCIPEYEEKDHEGWTHFAGTQYLNKEFLFICKGVPYGGEMYLEPFKQN

SEQ ID NO: 830675 - protein, 190 aa, Homo sapiens; identical to SEQ ID NO: 830668

SEQ ID NO: 830676 - protein, 190 aa, Homo sapiens; identical to SEQ ID NO: 830668

SEQ ID NO: 830677 - protein, 112 aa, Homo sapiens
MSLNPPIFLKRSEENSSKFVETKQSQTTSIASEDPLQNLCLASQEVLQKAQQSGRSKCLKCGGSRMFYCYTCYVPVENVPIEQIPLVKMGPSSCRKTSSGILLILHYASIED

SEQ ID NO: 830678 - protein, 190 aa, Homo sapiens; identical to SEQ ID NO: 830668

SEQ ID NO: 830679 - protein, 481 aa, Homo sapiens
MGNVNRQGQHCRDFIMVSQALRLLCLLLGLQGCLAAGGVAKASGGETRDMPWKPGPHRVFVTQEEAHGVLHRRRRANAFLEELRPGSLERECKEEQCSFEEAREIFKDAERTKLFWISYSDGDQCASSPCQNGGSCKDQLQSYICFCLPAFEGRNCETHKDDQLICVNENGGCEQYCSDHTGTKRSCRCHEGYSLLADGVSCTPTVEYPCGKIPILEKRNASKPQGRIVGGKVCPKGECPWQVLLLVNGAQLCGGTLINTIWVVSAAHCFDKIKNWRNLIAVLGEHDLSEHDGDEQSRRVAQVIIPSTYVPGTTNHDIALLRLHQPVVLTDHVVPLCLPERTFSERTLAFVRFSLVSGWGQLLDRGATALELMVLNVPRLMTQDCLQQSRKVGDSPNITEYMFCAGYSDGSKDSCKGDSGGPHATHYRGTWYLTGIVSWGQGCATVGHFGVYTRVSQYIEWLQKLMRSEPRPGVLLRAPFP

SEQ ID NO: 830680 - protein, 227 aa, Homo sapiens
MVLLLVNGAQLCGGTLINTIWVVSAAHCFEEHDLSEHDGDEQSRRVAQVIIPSTYVPGTTNHDIALLRLHQPVVLTDHVVPLCLPERTFSERTLAFVRFSLVSGWGQLLDRGATALELMVLNVPRLMTQDCLQQSRKVGDSPNITEYMFCAGYSDGSKDSCKGDSGGPHATHYRGTWYLTGIVSWGQGCATVGHFGVYTRVSQYIEWLQKLMRSEPRPGVLLRAPFP

SEQ ID NO: 830681 - protein, 459 aa, Homo sapiens
MGNVNRQGQHCRDFIMVSQALRLLCLLLGLQGCLAAVFVTQEEAHGVLHRRRRANAFLEELRPGSLERECKEEQCSFEEAREIFKDAERTKLFWISYSDGDQCASSPCQNGGSCKDQLQSYICFCLPAFEGRNCETHKDDQLICVNENGGCEQYCSDHTGTKRSCRCHEGYSLLADGVSCTPTVEYPCGKIPILEKRNASKPQGRIVGGKVCPKGECPWQVLLLVNGAQLCGGTLINTIWVVSAAHCFDKIKNWRNLIAVLGEHDLSEHDGDEQSRRVAQVIIPSTYVPGTTNHDIALLRLHQPVVLTDHVVPLCLPERTFSERTLAFVRFSLVSGWGQLLDRGATALELMVLNVPRLMTQDCLQQSRKVGDSPNITEYMFCAGYSDGSKDSCKGDSGGPHATHYRGTWYLTGIVSWGQGCATVGHFGVYTRVSQYIEWLQKLMRSEPRPGVLLRAPFP

SEQ ID NO: 830682 - protein, 505 aa, Homo sapiens
PGPRRLLLAGIDPQPHVYAAAPAAPFGPASARAPERALGISPRKQRGQAGKDGRRGWLTREHGREDTQPGPRAAPLPSSRTGGNLRCPRRVGRGAVSEALGGARGGRFTELHFPVFVTQEEAHGVLHRRRRANAFLEELRPGSLERECKEEQCSFEEAREIFKDAERTGEWMITTSPACNPSQLTDTSPPTDGDQCASSPCQNGGSCKDQLQSYICFCLPAFEGRNCETLEYPCGKIPILEKRNASKPQGRIVGGKVCPKGECPWQVLLLVNGAQLCGGTLINTIWVVSAAHCFDKIKNWRNLIAVLGEHDLSEHDGDEQSRRVAQVIIPSTYVPGTTNHDIALLRLHQPVVLTDHVVPLCLPERTFSERTLAFVRFSLVSGWGQLLDRGATALELMVLNVPRLMTQDCLQQSRKVGDSPNITEYMFCAGYSDGSKDSCKGDSGGPHATHYRGTWYLTGIVSWGQGCATVGHFGVYTRVSQYIEWLQKLMRSEPRPGVLLRAPFP

SEQ ID NO: 830683 - protein, 2193 aa, Homo sapiens
QLRERGFISARFRNWQAYMQYCVLCDKEFLGHRIVRHAQKHYKDGIYSCPICAKNFNSKETFVPHVTLHVKQSSKERLAAMKPLRRLGRPPKITTTNENQKTNTVAKQEQRPIKKNSLYSTDFIVFNDNDGSDDENDDKDKSYEPEVIPVQKPVPVNEFNCPVTFCKKGFKYFKNLIAHVKGHKDNEDAKRFLEMQSKKVICQYCRRHFVSVTHLNDHLQMHCGSKPYICIQMKCKAGFNSYAELLTHRKEHQVFRAKCMFPKCGRIFSEAYLLYDHEAQHYNTYTCKFTGCGKVYRSQGELEKHLDDHSTPPEKVLPPEAQLNSSGDSIQPSEVNQNTAENIEKERSMLPSENNIENSLLADRSDAWDKSKAESAVTKQDQISASELRQANGPLSNGLENPATTPLLQSSEVAVSIKVSLNQGIEDNFGKQENSTVEGSGEALVTDLHTPVEDTCNDLCHPGFQERKEQDCFNDAHVTQNSLVNSETLKIGDLTPQNLERQVNNLMTFSVQNQAAFQNNLPTSKFECGDNVKTSSNLYNLPLKTLESIAFVPPQSDLSNSLGTPSVPPKAPVQKFSCQVEGCTRTYNSSQSIGKHMKTAHPDQYAAFKMQRKSKKGQKANNFVYFLPSPVNSSNPFFTSQTKANGNPACSAQLQHVSPPIFPAHLASVSTPLLSSMESVINPNITSQDKNEQGGMLCSQMENLPSTALPAQMEDLTKTVLPLNIDSGSDPFLPLPAESSSMSLFPSPADSGTNSVFSQLENNTNHYSSQIEGNTNSSFLKGGNGENAVFPSQVNVANNFSSTNAQQSAPEKVKKDRGRGPNGKERKPKHNKRAKWPAIIRDGKFICSRCYRAFTNPRSLGGHLSKRSYCKPLDGAEIAQELLQSNGQPSLLASMILSTNAVNLQQPQQSTFNPEACFKDPSFLQLLAENRSPAFLPNTFPRSGVTNFNTSVSQEGSEIIKQALETAGIPSTFEGAEMLSHVSTGCVSDASQVNATVMPNPTVPPLLHTVCHPNTLLTNQNRTSNSKTSSIEECSSLPVFPTNDLLLKTVENGLCSSSFPNSGGPSQNFTSNSSRVSVISGPQNTRSSHLNKKGNSASKRRKKVAPPLIAPNASQNLVTSDLTTMGLIAKSVEIPTTNLHSNVIPTCEPQSLVENLTQKLNNVNNQLFMTDVKENFKTSLESHTVLAPLTLKTENGDSQMMALNSCTTSINSDLQISEDNVIQNFEKTLEIIKTAMNSQILEVKSGSQGAGETSQNAQINYNIQLPSVNTVQNNKLPDSSPFSSFISVMPTKSNIPQSEVSHKEDQIQEILEGLQKLKLENDLSTPASQCVLINTSVTLTPTPVKSTADITVIQPVSEMINIQFNDKVNKPFVCQNQGCNYSAMTKDALFKHYGKIHQYTPEMILEIKKNQLKFAPFKCVVPTCTKTFTRNSNLRAHCQLVHHFTTEEMVKLKIKRPYGRKSQSENVPASRSTQVKKQLAMTEENKKESQPALELRAETQNTHSNVAVIPEKQLVEKKSPDKTESSLQVITVTSEQCNTNALTNTQTKGRKIRRHKKEKEEKKRKKPVSQSLEFPTRYSPYRPYRCVHQGCFAAFTIQQNLILHYQAVHKSDLPAFSAEVEEESEAGKESEETETKQTLKEFRCQVSDCSRIFQAITGLIQHYMKLHEMTPEEIESMTASVDVGKFPCDQLECKSSFTTYLNYVVHLEADHGIGLRASKTEEDGVYKCDCEGCDRIYATRSNLLRHIFNKHNDKHKAHLIRPRRLTPGQENMSSKANQEKSKSKHRGTKHSRCGKEGIKMPKTKRKKKNNLENKNAKIVQIEENKPYSLKRGKHVYSIKARNDALSECTSRFVTQYPCMIKGCTSVVTSESNIIRHYKCHKLSKAFTSQHRNLLIVFKRCCNSQVKETSEQEGAKNDVKDSDTCVSESNDNSRTTATVSQKEVEKNEKDEMDELTELFITKLINEDSTSVETQANTSSNVSNDFQEDNLCQSERQKASNLKRVNKEKNVSQNKKRKVEKAEPASAAELSSVRKEEETAVAIQTIEEHPASFDWSSFKPMGFEVSFLKFLEESAVKQKKNTDKDHPNTGNKKGSHSNSRKNIDKTAVTSGNHVCPCKESETFVQFANPSQLQCSDNVKIVLDKNLKDCTELVLKQLQEMKPTVSLKKLEVHSNDPDMSVMKDISIGKATGRGQY

SEQ ID NO: 830684 - protein, 1647 aa, Homo sapiens
MIPTGRCTGTPSVPPKAPVQKFSCQVEGCTRTYNSSQSIGKHMKTAHPDQYAAFKMQRKSKKGQKANNLNTPNNGKFVYFLPSPVNSSNPFFTSQTKANGNPACSAQLQHVSPPIFPAHLASVSTPLLSSMESVINPNITSQDKNEQGGMLCSQMENLPSTALPAQMEDLTKTVLPLNIDSGSDPFLPLPAESSSMSLFPSPADSGTNSVFSQLENNTNHYSSQIEGNTNSSFLKGGNGENAVFPSQVNVANNFSSTNAQQSAPEKVKKDRGRGPNGKERKPKHNKRAKWPAIIRDGKFICSRCYRAFTNPRSLGGHLSKRSYCKPLDGAEIAQELLQSNGQPSLLASMILSTNAVNLQQPQQSTFNPEACFKDPSFLQLLAENRSPAFLPNTFPRSGVTNFNTSVSQEGSEIIKQALETAGIPSTFEGAEMLSHVSTGCVSDASQVNATVMPNPTVPPLLHTVCHPNTLLTNQNRTSNSKTSSIEECSSLPVFPTNDLLLKTVENGLCSSSFPNSGGPSQNFTSNSSRVSVISGPQNTRSSHLNKKGNSASKRRKKVAPPLIAPNASQNLVTSDLTTMGLIAKSVEIPTTNLHSNVIPTCEPQSLVENLTQKLNNVNNQLFMTDVKENFKTSLESHTVLAPLTLKTENGDSQMMALNSCTTSINSDLQISEDNVIQNFEKTLEIIKTAMNSQILEVKSGSQGAGETSQNAQINYNIQLPSVNTVQNNKLPDSSPFSSFISVMPTKSNIPQSEVSHKEDQIQEILEGLQKLKLENDLSTPASQCVLINTSVTLTPTPVKSTADITVIQPVSEMINIQFNDKVNKPFVCQNQGCNYSAMTKDALFKHYGKIHQYTPEMILEIKKNQLKFAPFKCVVPTCTKTFTRNSNLRAHCQLVHHFTTEEMVKLKIKRPYGRKSQSENVPASRSTQVKKQLAMTEENKKESQPALELRAETQNTHSNVAVIPEKQLVEKKSPDKTESSLQVITVTSEQCNTNALTNTQTKGRKIRRHKKEKEEKKRKKPVSQSLEFPTRYSPYRPYRCVHQGCFAAFTIQQNLILHYQAVHKSDLPAFSAEVEEESEAGKESEETETKQTLKEFRCQVSDCSRIFQAITGLIQHYMKLHEMTPEEIESMTASVDVGKFPCDQLECKSSFTTYLNYVVHLEADHGIGLRASKTEEDGVYKCDCEGCDRIYATRSNLLRHIFNKHNDKHKAHLIRPRRLTPGQENMSSKANQEKSKSKHRGTKHSRCGKEGIKMPKTKRKKKNNLENKNAKIVQIEENKPYSLKRGKHVYSIKARNDALSECTSRFVTQYPCMIKGCTSVVTSESNIIRHYKCHKLSKAFTSQHRNLLIVFKRCCNSQVKETSEQEGAKNDVKDSDTCVSESNDNSRTTATVSQKEVEKNEKDEMDELTELFITKLINEDSTSVETQANTSSNVSNDFQEDNLCQSERQKASNLKRVNKEKNVSQNKKRKVEKAEPASAAELSSVRKEEETAVAIQTIEEHPASFDWSSFKPMGFEVSFLKFLEESAVKQKKNTDKDHPNTGNKKGSHSNSRKNIDKTAVTSGNHVCPCKESETFVQFANPSQLQCSDNVKIVLDKNLKDCTELVLKQLQEMKPTVSLKKLEVHSNDPDMSVMKDISIGKATGRGQY

SEQ ID NO: 830685 - protein, 608 aa, Homo sapiens
PTLEYPPPTPRIQQNLILHYQAVHKSDLPAFSAEVEEESEAGKESEETETKQTLKEFRCQVSDCSRIFQAITGLIQHYMKLHEMTPEEIESMTASVDVGKFPCDQLECKSSFTTYLNYVVHLEADHGIGLRASKTEEDGVYKCDCEGCDRIYATRSNLLRHIFNKHNDKHKAHLIRPRRLTPGQENMSSKANQEKSKSKHRGTKHSRCGKEGIKMPKTKRKKKNNLENKNAKIVQIEENKPYSLKRGKHVYSIKARNDALSECTSRFVTQYPCMIKGCTSVVTSESNIIRHYKCHKLSKAFTSQHRNLLIVFKRCCNSQVKETSEQEGAKNDVKDSDTCVSESNDNSRTTATVSQKEVEKNEKDEMDELTELFITKLINEDSTSVETQANTSSNVSNDFQEDNLCQSERQKASNLKRVNKEKNVSQNKKRKVEKAEPASAAELSSVRKEEETAVAIQTIEEHPASFDWSSFKPMGFEVSFLKFLEESAVKQKKNTDKDHPNTGNKKGSHSNSRKNIDKTAVTSGNHVCPCKESETFVQFANPSQLQCSDNVKIVLDKNLKDCTELVLKQLQEMKPTVSLKKLEVHSNDPDMSVMKDISIGKATGRGQY

SEQ ID NO: 830686 - protein, 641 aa, Homo sapiens
VELRRRRLRRGAAAPGRAAPGAGATAAGEPGTGRGSGHRLLSAAVPDTPRICREMENFRRSFTFIGEVEEESEAGKESEETETKQTLKEFRCQVSDCSRIFQAITGLIQHYMKLHEMTPEEIESMTASVDVGKFPCDQLECKSSFTTYLNYVVHLEADHGIGLRASKTEEDGVYKCDCEGCDRIYATRSNLLRHIFNKHNDKHKAHLIRPRRLTPGQENMSSKANQEKSKSKHRGTKHSRCGKEGIKMPKTKRKKKNNLENKNAKIVQIEENKPYSLKRGKHVYSIKARNDALSECTSRFVTQYPCMIKGCTSVVTSESNIIRHYKCHKLSKAFTSQHRNLLIVFKRCCNSQVKETSEQEGAKNDVKDSDTCVSESNDNSRTTATVSQKEVEKNEKDEMDELTELFITKLINEDSTSVETQANTSSNVSNDFQEDNLCQSERQKASNLKRVNKEKNVSQNKKRKVEKAEPASAAELSSVRKEEETAVAIQTIEEHPASFDWSSFKPMGFEVSFLKFLEESAVKQKKNTDKDHPNTGNKKGSHSNSRKNIDKTAVTSGNHVCPCKESETFVQFANPSQLQCSDNVKIVLDKNLKDCTELVLKQLQEMKPTVSLKKLEVHSNDPDMSVMKDISIGKATGRGQY

SEQ ID NO: 830687 - protein, 2201 aa, Homo sapiens
QLRERGFISARFRNWQAYMQYCVLCDKEFLGHRIVRHAQKHYKDGIYSCPICAKNFNSKETFVPHVTLHVKQSSKERLAAMKPLRRLGRPPKITTTNENQKTNTVAKQEQRPIKKNSLYSTDFIVFNDNDGSDDENDDKDKSYEPEVIPVQKPVPVNEFNCPVTFCKKGFKYFKNLIAHVKGHKDNEDAKRFLEMQSKKVICQYCRRHFVSVTHLNDHLQMHCGSKPYICIQMKCKAGFNSYAELLTHRKEHQVFRAKCMFPKCGRIFSEAYLLYDHEAQHYNTYTCKFTGCGKVYRSQGELEKHLDDHSTPPEKVLPPEAQLNSSGDSIQPSEVNQNTAENIEKERSMLPSENNIENSLLADRSDAWDKSKAESAVTKQDQISASELRQANGPLSNGLENPATTPLLQSSEVAVSIKVSLNQGIEDNFGKQENSTVEGSGEALVTDLHTPVEDTCNDLCHPGFQERKEQDCFNDAHVTQNSLVNSETLKIGDLTPQNLERQVNNLMTFSVQNQAAFQNNLPTSKFECGDNVKTSSNLYNLPLKTLESIAFVPPQSDLSNSLGTPSVPPKAPVQKFSCQVEGCTRTYNSSQSIGKHMKTAHPDQYAAFKMQRKSKKGQKANNLNTPNNGKFVYFLPSPVNSSNPFFTSQTKANGNPACSAQLQHVSPPIFPAHLASVSTPLLSSMESVINPNITSQDKNEQGGMLCSQMENLPSTALPAQMEDLTKTVLPLNIDSGSDPFLPLPAESSSMSLFPSPADSGTNSVFSQLENNTNHYSSQIEGNTNSSFLKGGNGENAVFPSQVNVANNFSSTNAQQSAPEKVKKDRGRGPNGKERKPKHNKRAKWPAIIRDGKFICSRCYRAFTNPRSLGGHLSKRSYCKPLDGAEIAQELLQSNGQPSLLASMILSTNAVNLQQPQQSTFNPEACFKDPSFLQLLAENRSPAFLPNTFPRSGVTNFNTSVSQEGSEIIKQALETAGIPSTFEGAEMLSHVSTGCVSDASQVNATVMPNPTVPPLLHTVCHPNTLLTNQNRTSNSKTSSIEECSSLPVFPTNDLLLKTVENGLCSSSFPNSGGPSQNFTSNSSRVSVISGPQNTRSSHLNKKGNSASKRRKKVAPPLIAPNASQNLVTSDLTTMGLIAKSVEIPTTNLHSNVIPTCEPQSLVENLTQKLNNVNNQLFMTDVKENFKTSLESHTVLAPLTLKTENGDSQMMALNSCTTSINSDLQISEDNVIQNFEKTLEIIKTAMNSQILEVKSGSQGAGETSQNAQINYNIQLPSVNTVQNNKLPDSSPFSSFISVMPTKSNIPQSEVSHKEDQIQEILEGLQKLKLENDLSTPASQCVLINTSVTLTPTPVKSTADITVIQPVSEMINIQFNDKVNKPFVCQNQGCNYSAMTKDALFKHYGKIHQYTPEMILEIKKNQLKFAPFKCVVPTCTKTFTRNSNLRAHCQLVHHFTTEEMVKLKIKRPYGRKSQSENVPASRSTQVKKQLAMTEENKKESQPALELRAETQNTHSNVAVIPEKQLVEKKSPDKTESSLQVITVTSEQCNTNALTNTQTKGRKIRRHKKEKEEKKRKKPVSQSLEFPTRYSPYRPYRCVHQGCFAAFTIQQNLILHYQAVHKSDLPAFSAEVEEESEAGKESEETETKQTLKEFRCQVSDCSRIFQAITGLIQHYMKLHEMTPEEIESMTASVDVGKFPCDQLECKSSFTTYLNYVVHLEADHGIGLRASKTEEDGVYKCDCEGCDRIYATRSNLLRHIFNKHNDKHKAHLIRPRRLTPGQENMSSKANQEKSKSKHRGTKHSRCGKEGIKMPKTKRKKKNNLENKNAKIVQIEENKPYSLKRGKHVYSIKARNDALSECTSRFVTQYPCMIKGCTSVVTSESNIIRHYKCHKLSKAFTSQHRNLLIVFKRCCNSQVKETSEQEGAKNDVKDSDTCVSESNDNSRTTATVSQKEVEKNEKDEMDELTELFITKLINEDSTSVETQANTSSNVSNDFQEDNLCQSERQKASNLKRVNKEKNVSQNKKRKVEKAEPASAAELSSVRKEEETAVAIQTIEEHPASFDWSSFKPMGFEVSFLKFLEESAVKQKKNTDKDHPNTGNKKGSHSNSRKNIDKTAVTSGNHVCPCKESETFVQFANPSQLQCSDNVKIVLDKNLKDCTELVLKQLQEMKPTVSLKKLEVHSNDPDMSVMKDISIGKATGRGQY

SEQ ID NO: 830688 - protein, 1853 aa, Homo sapiens
MLPSENNIENSLLADRSDAWDKSKAESAVTKQDQISASELRQANGPLSNGLENPATTPLLQSSEVAVSIKVSLNQGIEDNFGKQENSTVEGSGEALVTDLHTPVEDTCNDLCHPGFQERKEQDCFNDAHVTQNSLVNSETLKIGDLTPQNLERQVNNLMTFSVQNQAAFQNNLPTSKFECGDNVKTSSNLYNLPLKTLESIAFVPPQSDLSNSLGTPSVPPKAPVQKFSCQVEGCTRTYNSSQSIGKHMKTAHPDQYAAFKMQRKSKKGQKANNLNTPNNGKFVYFLPSPVNSSNPFFTSQTKANGNPACSAQLQHVSPPIFPAHLASVSTPLLSSMESVINPNITSQDKNEQGGMLCSQMENLPSTALPAQMEDLTKTVLPLNIDSGSDPFLPLPAESSSMSLFPSPADSGTNSVFSQLENNTNHYSSQIEGNTNSSFLKGGNGENAVFPSQVNVANNFSSTNAQQSAPEKVKKDRGRGPNGKERKPKHNKRAKWPAIIRDGKFICSRCYRAFTNPRSLGGHLSKRSYCKPLDGAEIAQELLQSNGQPSLLASMILSTNAVNLQQPQQSTFNPEACFKDPSFLQLLAENRSPAFLPNTFPRSGVTNFNTSVSQEGSEIIKQALETAGIPSTFEGAEMLSHVSTGCVSDASQVNATVMPNPTVPPLLHTVCHPNTLLTNQNRTSNSKTSSIEECSSLPVFPTNDLLLKTVENGLCSSSFPNSGGPSQNFTSNSSRVSVISGPQNTRSSHLNKKGNSASKRRKKVAPPLIAPNASQNLVTSDLTTMGLIAKSVEIPTTNLHSNVIPTCEPQSLVENLTQKLNNVNNQLFMTDVKENFKTSLESHTVLAPLTLKTENGDSQMMALNSCTTSINSDLQISEDNVIQNFEKTLEIIKTAMNSQILEVKSGSQGAGETSQNAQINYNIQLPSVNTVQNNKLPDSSPFSSFISVMPTKSNIPQSEVSHKEDQIQEILEGLQKLKLENDLSTPASQCVLINTSVTLTPTPVKSTADITVIQPVSEMINIQFNDKVNKPFVCQNQGCNYSAMTKDALFKHYGKIHQYTPEMILEIKKNQLKFAPFKCVVPTCTKTFTRNSNLRAHCQLVHHFTTEEMVKLKIKRPYGRKSQSENVPASRSTQVKKQLAMTEENKKESQPALELRAETQNTHSNVAVIPEKQLVEKKSPDKTESSLQVITVTSEQCNTNALTNTQTKGRKIRRHKKEKEEKKRKKPVSQSLEFPTRYSPYRPYRCVHQGCFAAFTIQQNLILHYQAVHKSDLPAFSAEVEEESEAGKESEETETKQTLKEFRCQVSDCSRIFQAITGLIQHYMKLHEMTPEEIESMTASVDVGKFPCDQLECKSSFTTYLNYVVHLEADHGIGLRASKTEEDGVYKCDCEGCDRIYATRSNLLRHIFNKHNDKHKAHLIRPRRLTPGQENMSSKANQEKSKSKHRGTKHSRCGKEGIKMPKTKRKKKNNLENKNAKIVQIEENKPYSLKRGKHVYSIKARNDALSECTSRFVTQYPCMIKGCTSVVTSESNIIRHYKCHKLSKAFTSQHRNLLIVFKRCCNSQVKETSEQEGAKNDVKDSDTCVSESNDNSRTTATVSQKEVEKNEKDEMDELTELFITKLINEDSTSVETQANTSSNVSNDFQEDNLCQSERQKASNLKRVNKEKNVSQNKKRKVEKAEPASAAELSSVRKEEETAVAIQTIEEHPASFDWSSFKPMGFEVSFLKFLEESAVKQKKNTDKDHPNTGNKKGSHSNSRKNIDKTAVTSGNHVCPCKESETFVQFANPSQLQCSDNVKIVLDKNLKDCTELVLKQLQEMKPTVSLKKLEVHSNDPDMSVMKDISIGKATGRGQY

SEQ ID NO: 830689 - protein, 2201 aa, Homo sapiens; identical to SEQ ID NO: 830687

SEQ ID NO: 830690 - protein, 883 aa, Homo sapiens
MQCLQKLKLENDLSTPASQCVLINTSVTLTPTPVKSTADITVIQPVSEMINIQFNDKVNKPFVCQNQGCNYSAMTKDALFKHYGKIHQYTPEMILEIKKNQLKFAPFKCVVPTCTKTFTRNSNLRAHCQLVHHFTTEEMVKLKIKRPYGRKSQSENVPASRSTQVKKQLAMTEENKKESQPALELRAETQNTHSNVAVIPEKQLVEKKSPDKTESSLQVITVTSEQCNTNALTNTQTKGRKIRRHKKEKEEKKRKKPVSQSLEFPTRYSPYRPYRCVHQGCFAAFTIQQNLILHYQAVHKSDLPAFSAEVEEESEAGKESEETETKQTLKEFRCQVSDCSRIFQAITGLIQHYMKLHEMTPEEIESMTASVDVGKFPCDQLECKSSFTTYLNYVVHLEADHGIGLRASKTEEDGVYKCDCEGCDRIYATRSNLLRHIFNKHNDKHKAHLIRPRRLTPGQENMSSKANQEKSKSKHRGTKHSRCGKEGIKMPKTKRKKKNNLENKNAKIVQIEENKPYSLKRGKHVYSIKARNDALSECTSRFVTQYPCMIKGCTSVVTSESNIIRHYKCHKLSKAFTSQHRNLLIVFKRCCNSQVKETSEQEGAKNDVKDSDTCVSESNDNSRTTATVSQKEVEKNEKDEMDELTELFITKLINEDSTSVETQANTSSNVSNDFQEDNLCQSERQKASNLKRVNKEKNVSQNKKRKVEKAEPASAAELSSVRKEEETAVAIQTIEEHPASFDWSSFKPMGFEVSFLKFLEESAVKQKKNTDKDHPNTGNKKGSHSNSRKNIDKTAVTSGNHVCPCKESETFVQFANPSQLQCSDNVKIVLDKNLKDCTELVLKQLQEMKPTVSLKKLEVHSNDPDMSVMKDISIGKATGRGQY

SEQ ID NO: 830691 - protein, 119 aa, Homo sapiens
MAARAVRFDRNLCAAGRKAQDSLSVRYAGLPDRSEMAEVEETLKRLQSQKGVQGIIVVNTEGIPIKSTMDNPTTTQYASLMHSFILKARSTVRLDIDPQNDLTFLRIRSKKNEIMVAPR

SEQ ID NO: 830692 - protein, 92 aa, Homo sapiens
ARAARAARVAEVEETLKRLQSQKGVQGIIVVNTEGIPIKSTMDNPTTTQYASLMHSFILKARSTVRLDIDPQNDLTFLRIRSKKNEIMVAPR

SEQ ID NO: 830693 - protein, 101 aa, Homo sapiens
EVNPAYLPLLTLVLFSGRAEVEETLKRLQSQKGVQGIIVVNTEGIPIKSTMDNPTTTQYASLMHSFILKARSTVRLDIDPQNDLTFLRIRSKKNEIMVAPR

SEQ ID NO: 830694 - protein, 99 aa, Homo sapiens
LGRGGVYLAESGSVGKAEVEETLKRLQSQKGVQGIIVVNTEGIPIKSTMDNPTTTQYASLMHSFILKARSTVRLDIDPQNDLTFLRIRSKKNEIMVAPR

SEQ ID NO: 830695 - protein, 137 aa, Homo sapiens
MMGEGWAAALQPRVLGPWCAMATLPTFPGSSVCGRLCQALYVSCISSASSQLCEAEVEETLKRLQSQKGVQGIIVVNTEGIPIKSTMDNPTTTQYASLMHSFILKARSTVRLDIDPQNDLTFLRIRSKKNEIMVAPR

SEQ ID NO: 830696 - protein, 97 aa, Homo sapiens
SARPVGPDRSEMARAEVEETLKRLQSQKGVQGIIVVNTEGIPIKSTMDNPTTTQYASLMHSFILKARSTVRLDIDPQNDLTFLRIRSKKNEIMVAPR

SEQ ID NO: 830697 - protein, 119 aa, Homo sapiens; identical to SEQ ID NO: 830691

SEQ ID NO: 830698 - protein, 119 aa, Homo sapiens; identical to SEQ ID NO: 830691

SEQ ID NO: 830699 - protein, 47 aa, Homo sapiens
MAEVEETLKRLQSQKGVQGIIVVNTEGGWEPLGHCGDRSRPPAQGCP

SEQ ID NO: 830700 - protein, 119 aa, Homo sapiens; identical to SEQ ID NO: 830691

SEQ ID NO: 830701 - protein, 69 aa, Homo sapiens
MATLPTFPGSSVCGRLCQALYVSCISSASSQLCEVDTIFSPILLYISVIQRPEKPSALPQEIVEMDLNP

SEQ ID NO: 830702 - protein, 99 aa, Homo sapiens; identical to SEQ ID NO: 830694

SEQ ID NO: 830703 - protein, 116 aa, Homo sapiens
MRQSPSLLVTTGGPLIDESLCKQDMRTWPAGKQTSRHGDNTGTHLGDLLCVRANPLIPVGRADNSMGTTTLPSRSNLTGPWRETLLPAVRAVNRWYNTAHMHTLIEIGLPNCTRHF

SEQ ID NO: 830704 - protein, 110 aa, Homo sapiens
ETESCTVAQAGDSGVILAHCSLHLSNSSDSPASASQVAGIIGARHPAWLIFVFLVKMGFCNIGQAGLKLLTSTELPPSGFQSVGIRGLSYWARANLETFFSFLVPQFSQM

SEQ ID NO: 830705 - protein, 100 aa, Homo sapiens
GYCRIRLYMSRIIGRKCAEVEETLKRLQSQKGVQGIIVVNTEGIPIKSTMDNPTTTQYASLMHSFILKARSTVRLDIDPQNDLTFLRIRSKKNEIMVAPR

SEQ ID NO: 830706 - protein, 104 aa, Homo sapiens
MAEVEETLKRLQSQKGVQGIIVVNTEVCRSLWPGAVAHACNPSTLEGRGGWIMRHSHQEHHGQPHHHPVCQPHAQLHPEGTEHRAVGHRPPERSHLPSNSLQEK

SEQ ID NO: 830707 - protein, 119 aa, Homo sapiens; identical to SEQ ID NO: 830691

SEQ ID NO: 830708 - protein, 252 aa, Homo sapiens
MKLHELSQFKLGLLQHFYFSNEDIMERINRLASLFYVFSNAVWNQFIDHFFQVICLHLSGHDFHHLLPDLADLLVLSIRGLPYLIVAFFSKTNTEQTKQVTIGSLDINVSFNHCLPFFDHGTHFVTGKIHAMEVSQAVFTLNIFSNQLEFSKCNFIILQISKTHFKHTTLETIRCNFGSLGPGDERLSNISYIEHSRCFHIIPIFLRKWINHFLLGSLFAAFRKALVLANHHGAWQVEAAVYCDHATAFQLG

SEQ ID NO: 830709 - protein, 203 aa, Homo sapiens
MISIIFFRIWLVLSIKVFRISQDLLVLSIRGLPYLIVAFFSKTNTEQTKQVTIGSLDINVSFNHCLPFFDHGTHFVTGKIHAMEVSQAVFTLNIFSNQLEFSKCNFIILQISKTHFKHTTLETIRCNFGSLGPGDERLSNISYIEHSRCFHIIPIFLRKWINHFLLGSLFAAFRKALVLANHHGAWQVEAAVYCDHATAFQLG

SEQ ID NO: 830710 - protein, 89 aa, Homo sapiens
HLVEHWRIHTGQKPYKCSECDKVFNRNSNLARHQRIHTGEKPHKCNECGKAFRECSGLTTHLVIHTGEKPYKCNECGKNFRHKFSLTNH

SEQ ID NO: 830711 - protein, 121 aa, Homo sapiens
KPYKCNECGKVFSLLSYLARHQIIHSTEKPYKCNECGRAFHKRPGLMAHLLIHTGEKPYKCNECDKVFGRKLYLTNHQRIHTGERPYKCNACGKVFNQNPHLSRHRKIHAGENSLRTLQME

SEQ ID NO: 830712 - protein, 957 aa, Homo sapiens
MSLVSQNSRRRRRRVAKATAHNSSWGEMQAPNAPGLPADVPGSDVPQGPSDSQILQGLCASEGPSTSVLPTSAEGPSTFVPPTISEASSASGQPTISEGPGTSVLPTPSEGLSTSGPPTISKGLCTSVTLAASEGRNTSRPPTSSEEPSTSVPPTASEVPSTSLPPTPGEGTSTSVPPTAYEGPSTSVVPTPDEGPSTSVLPTPGEGPGTSVPLAATEGLSTSVQATPDEGPSTSVPPTATEGLSTPVPPTRDEGPSTSVPATPGEGPSTSVLPAASDGQSISLVPTRGKGSSTSVPPTATEGLSTSVQPTAGEGSSTSVPPTPGGGLSTSVPPTATEELSTSVPPTPGEGPSTSVLPIPGEGLSTSVPPTASDGSDTSVPPTPGEGASTLVQPTAPDGPGSSVLPNPGEGPSTLFSSSASVDRNPSKCSLVLPSPRVTKASVDSDSEGPKGAEGPIEFEVLRDCESPNSISIMGLNTSRVAITLKPQDPMEQNVAELLQFLLVKDQSKYPIRESEMREYIVKEYRNQFPEILRRAAAHLECIFRFELRELDPEAHTYILLNKLGPVPFEGLEESPNGPKMGLLMMILGQIFLNGNQAKEAEIWEMLWRMGVQRERRLSIFGNPKRLLSVEFVWQRYLDYRPVTDCKPVEYEFFWGPRSHLETTKMKILKFMAKIYNKDPMDWPEKYNEALEEDAARAFAEGWQALPHFRRPFFEEAAAEVPSPDSEVSSYSSKYAPHSWPESRLESKARKLVQLFLLMDSTKLPIPKKGILYYIGRECSKVFPDLLNRAARTLNHVYGTELVVLDPRNHSYTLYNRREMEETEEIVDSPNRPGNNFLMQVLSFIFIMGNHARESAVWAFLRGLGVQAGRKHVITCRYLSQRYIDSLRVPDSDPVQYEFVWGPRARLETSKMKALRYVARIHRKEPQDWPQQYREAMEDEANRADVGHRQIFVHNFR

SEQ ID NO: 830713 - protein, 279 aa, Homo sapiens
VDLKKPELKIPHTVNFYLRVEPGVMLGIWHTVPSCRGEDAKGKDCCWYEAALRDGNPIIVYLHGSAEHRAASHRLKLVKVLSDGGFHVLSVDYRGFGDSTGKPTEEGLTTDAICVYEWTKARSGITPVCLWGHSLGTGVATNAAKVLEEKGCPVDAIVLEAPFTNMWVASINYPLLKIYRNIPGFLRTLMDALRKDKIIFPNDENVKFLSSPLLILHGEDDRTVPLEYGKKLYEIARNAYRNKERVKMVIFPPGFQHNLLCKSPTLLITVRDFLSKQWS

SEQ ID NO: 830714 - protein, 189 aa, Homo sapiens
VAAWWDMVDRNLRHTVPSCRGEDAKGKDCCWYEAALRDGNPIIVYLHGSAEHRAASHRLKLVKVLSDGGFHVLSVDYRGFGDSTGKPTEEGLTTDAICVYEWTKARSGITPVCLWGHSLGTGVATNAAKVLEEKGCPVDAIVLEAPFTNMWVASINYPLLKIYRNIPGFLRTLMDALRKDKIIFPNDEK

SEQ ID NO: 830715 - protein, 167 aa, Homo sapiens
VAAWWDMVDRNLRHTVPSCRGEDAKGKDCCWYEAALRDGNPIIVYLHGSAEHRAASHRLKLVKVLSDGGFHVLSVDYRGFGDSTGKPTEEGLTTDAICVYEWTKARSGITPVCLWGHSLGTGVATNAAKVLEEKGCPVDAIVLEAPFTNMWVASINYPLLKVSAQMA

SEQ ID NO: 830716 - protein, 263 aa, Homo sapiens
VAAWWDMVDRNLRHTVPSCRGEDAKGKDCCWYEAALRDGNPIIVYLHGSAEHRAASHRLKLVKVLSDGGFHVLSVDYRGFGDSTGKPTEEGLTTDAICVYEWTKARSGITPVCLWGHSLGTGVATNAAKVLEEKGCPVDAIVLEAPFTNMWVASINYPLLKIYRNIPGFLRTLMDALRKDKIIFPNDENVKFLSSPLLILHGEDDRTVPLEYGKKLYEIARNAYRNKERVKMVIFPPGFQHNLLCKSPTLLITVRDFLSKQWS

SEQ ID NO: 830717 - protein, 67 aa, Homo sapiens
GQGRGVDVKTLGTSSVKTGQPSPSAGASVSPHHSALVQRFPAIDTYQRHKAEEEQMCHVISHNRKSA

SEQ ID NO: 830718 - protein, 1078 aa, Homo sapiens
MAPRKRGGRGISFIFCCFRNNDHPEITYRLRNDSNFALQTMEPALPMPPVEELDVMFSELVDELDLTDKHREAMFALPAEKKWQIYCSKKKDQEENKGATSWPEFYIDQLNSMAARKSLLALEKEEEEERSKTIESLKTALRTKPMRFVTRFIDLDGLSCILNFLKTMDYETSESRIHTSLIGCIKALMNNSQGRAHVLAHSESINVIAQSLSTENIKTKVAVLEILGAVCLVPGGHKKVLQAMLHYQKYASERTRFQTLINDLDKSTGRYRDEVSLKTAIMSFINAVLSQGAGVESLDFRLHLRYEFLMLGIQPVIDKLREHENSTLDRHLDFFEMLRNEDELEFAKRFELVHIDTKSATQMFELTRKRLTHSEAYPHFMSILHHCLQMPYKRSGNTVQYWLLLDRIIQQIVIQNDKGQDPDSTPLENFNIKNVVRMLVNENEVKQWKEQAEKMRKEHNELQQKLEKKERECDAKTQEKEEMMQTLNKMKEKLEKETTEHKQVKQQVADLTAQLHELSRRAVCASIPGGPSPGAPGGPFPSSVPGSLLPPPPPPPLPGGMLPPPPPPLPPGGPPPPPGPPPLGAIMPPPGAPMGLALKKKSIPQPTNALKSFNWSKLPENKLEGTVWTEIDDTKVFKILDLEDLERTFSAYQRQQDFFVNSNSKQKEADAIDDTLSSKLKVKELSVIDGRRAQNCNILLSRLKLSNDEIKRAILTMDEQEDLPKDMLEQLLKFVPEKSDIDLLEEHKHELDRMAKADRFLFEMSRINHYQQRLQSLYFKKKFAERVAEVKPKVEAIRSGSEEVFRSGALKQLLEVVLAFGNYMNKGQRGNAYGFKISSLNKIADTKSSIDKNITLLHYLITIVENKYPSVLNLNEELRDIPQAAKVNMTELDKEISTLRSGLKAVETELEYQKSQPPQPGDKFVSVVSQFITVASFSFSDVEDLLAEAKDLFTKAVKHFGEEAGKIQPDEFFGIFDQFLQAVSEAKQENENMRKKKEEEERRARMEAQLKEQRERERKMRKAKENSEESGEFDDLVSALRSGEVFDKDLSKLKRNRKRITNQMTDSSRERPITKLNF

SEQ ID NO: 830719 - protein, 539 aa, Homo sapiens
MAPRKRGGRGISFIFCCFRNNDHPEITYRLRNDSNFALQTMEPALPMPPVEELDVMFSELVKSIPQPTNALKSFNWSKLPENKLEGTVWTEIDDTKVFKILDLEDLERTFSAYQRQQDFFVNSNSKQKEADAIDDTLSSKLKVKELSVIDGRRAQNCNILLSRLKLSNDEIKRAILTMDEQEDLPKDMLEQLLKFVPEKSDIDLLEEHKHELDRMAKADRFLFEMSRINHYQQRLQSLYFKKKFAERVAEVKPKVEAIRSGSEEVFRSGALKQLLEVVLAFGNYMNKGQRGNAYGFKISSLNKIADTKSSIDKNITLLHYLITIVENKYPSVLNLNEELRDIPQAAKVNMTELDKEISTLRSGLKAVETELEYQKSQPPQPGDKFVSVVSQFITVASFSFSDVEDLLAEAKDLFTKAVKHFGEEAGKIQPDEFFGIFDQFLQAVSEAKQENENMRKKKEEEERRARMEAQLKEQRERERKMRKAKENSEESGEFDDLVSALRSGEVFDKDLSKLKRNRKRITNQMTDSSRERPITKLNF

SEQ ID NO: 830720 - protein, 1068 aa, Homo sapiens
MAPRKRGGRGISFIFCCFRNNDHPEITYRLRNDSNFALQTMEPALPMPPVEELDVMFSELVDELDLTDKHREAMFALPAEKKWQIYCSKKKDQEENKGATSWPEFYIDQLNSMAARKSLLALEKEEEEERSKTIESLKTALRTKPMRFVTRFIDLDGLSCILNFLKTMDYETSESRIHTSLIGCIKALMNNSQGRAHVLAHSESINVIAQSLSTENIKTKVAVLEILGAVCLVPGGHKKVLQAMLHYQKYASERTRFQTLINDLDKSTGRYRDEVSLKTAIMSFINAVLSQGAGVESLDFRLHLRYEFLMLGIQPVIDKLREHENSTLDRHLDFFEMLRNEDELEFAKRFELVHIDTKSATQMFELTRKRLTHSEAYPHFMSILHHCLQMPYKRSGNTVQYWLLLDRIIQQIVIQNDKGQDPDSTPLENFNIKNVVRMLVNENEVKQWKEQAEKMRKEHNELQQKLEKKERECDAKTQEKEEMMQTLNKMKEKLEKETTEHKQVKQQVADLTAQLHELSRRAVCASIPGGPSPGAPGGPFPSSVPGSLLPPPPPPPLPGGMLPPPPPPLPPGGPPPPPGPPPLGAIMPPPGAPMGLALKKKSIPQPTNALKSFNWSKLPENKLEGTVWTEIDDTKVFKILDLEDLERTFSAYQRQQKEADAIDDTLSSKLKVKELSVIDGRRAQNCNILLSRLKLSNDEIKRAILTMDEQEDLPKDMLEQLLKFVPEKSDIDLLEEHKHELDRMAKADRFLFEMSRINHYQQRLQSLYFKKKFAERVAEVKPKVEAIRSGSEEVFRSGALKQLLEVVLAFGNYMNKGQRGNAYGFKISSLNKIADTKSSIDKNITLLHYLITIVENKYPSVLNLNEELRDIPQAAKVNMTELDKEISTLRSGLKAVETELEYQKSQPPQPGDKFVSVVSQFITVASFSFSDVEDLLAEAKDLFTKAVKHFGEEAGKIQPDEFFGIFDQFLQAVSEAKQENENMRKKKEEEERRARMEAQLKEQRERERKMRKAKENSEESGEFDDLVSALRSGEVFDKDLSKLKRNRKRITNQMTDSSRERPITKLNF

SEQ ID NO: 830721 - protein, 238 aa, Homo sapiens
RLAFCSLLVPLRNITLLHYLITIVENKYPSVLNLNEELRDIPQAAKVNMTELDKEISTLRSGLKAVETELEYQKSQPPQPGDKFVSVVSQFITVASFSFSDVEDLLAEAKDLFTKAVKHFGEEAGKIQPDEFFGIFDQFLQAVSEAKQENENMRKKKEEEERRARMEAQLKEQRERERKMRKAKENSEESGEFDDLVSALRSGEVFDKDLSKLKRNRKRITNQMTDSSRERPITKLNF

SEQ ID NO: 830722 - protein, 1078 aa, Homo sapiens; identical to SEQ ID NO: 830718

SEQ ID NO: 830723 - protein, 1078 aa, Homo sapiens; identical to SEQ ID NO: 830718

SEQ ID NO: 830724 - protein, 1080 aa, Homo sapiens
MAPRKRGGRGISFIFCCFRNNDHPEITYRLRNDSNFALQTMEPALPMPPVEELDVMFSELVDELDLTDKHREAMFALPAEKKWQIYCSKKKDQEENKGATSWPEFYIDQLNSMAARKSLLALEKEEEEERSKTIESLKTALRTKPMRFVTRFIDLDGLSCILNFLKTMDYETSESRIHTSLIGCIKALMNNSQGRAHVLAHSESINVIAQSLSTENIKTKVAVLEILGAVCLVPGGHKKVLQAMLHYQKYASERTRFQTLINDLDKSTGRYRDEVSLKTAIMSFINAVLSQGAGVESLDFRLHLRYEFLMLGIQPVIDKLREHENSTLDRHLDFFEMLRNEDELEFAKRFELVHIDTKSATQMFELTRKRLTHSEAYPHFMSILHHCLQMPYKRSGNTVQYWLLLDRIIQQIVIQNDKGQDPDSTPLENFNIKNVVRMLVNENEVKQWKEQAEKMRKEHNELQQKLEKKERECDAKTQEKEEMMQTLNKMKEKLEKETTEHKQVKQQVADLTAQLHELSRRAVCASIPGGPSPGAPGGPFPSSVPGSLLPPPPPPPLPGGMLPPPPPPLPPGGPPPPPGPPPLGAIMPPPGAPMGLALKKKSIPQPTNALKSFNWSKLPENKLEGTVWTEIDDTKVFKILDLEDLERTFSAYQRQQKEADAIDDTLSSKLKVKELSVIDGRRAQNCNILLSRLKLSNDEIKRAILTMDEQEDLPKDMLEQLLKFVPEKSDIDLLEEHKHELDRMAKADRFLFEMSRINHYQQRLQSLYFKKKFAERVAEVKPKVEAIRSGSEEVFRSGALKQLLEVVLAFGNYMNKGQRGNAYGFKISSLNKIADTKSSIDKNITLLHYLITIVENKYPSVLNLNEELRDIPQAAKVNMTELDKEISTLRSGLKAVETELEYQKSQPPQPGDKFVSVVSQFITVASFSFSDVEDLLAEAKDLFTKAVKHFGEEAGKIQPDEFFGIFDQFLQAVSEAKQENENMRKKKEEEERRARMEAQLKEQRERERKMRKAKENSEESGEFDDLVSALRSGEVFDKDLSKLKRNRKRITNQMSSLAFLINFFKLCQKPNKKRKYEKEN

SEQ ID NO: 830725 - protein, 1078 aa, Homo sapiens; identical to SEQ ID NO: 830718

SEQ ID NO: 830726 - protein, 1044 aa, Homo sapiens
MAPRKRGGRGISFIFCCFRNNDHPEITYRLRNDSNFALQTMEPALPMPPVEELDVMFSELVDELDLTDKHREAMFALPAEKKWQIYCSKKKRKSLLALEKEEEEERSKTIESLKTALRTKPMRFVTRFIDLDGLSCILNFLKTMDYETSESRIHTSLIGCIKALMNNSQGRAHVLAHSESINVIAQSLSTENIKTKVAVLEILGAVCLVPGGHKKVLQAMLHYQKYASERTRFQTLINDLDKSTGRYRDEVSLKTAIMSFINAVLSQGAGVESLDFRLHLRYEFLMLGIQPVIDKLREHENSTLDRHLDFFEMLRNEDELEFAKRFELVHIDTKSATQMFELTRKRLTHSEAYPHFMSILHHCLQMPYKRSGNTVQYWLLLDRIIQQIVIQNDKGQDPDSTPLENFNIKNVVRMLVNENEVKQWKEQAEKMRKEHNELQQKLEKKERECDAKTQEKEEMMQTLNKMKEKLEKETTEHKQVKQQVADLTAQLHELSRRAVCASIPGGPSPGAPGGPFPSSVPGSLLPPPPPPPLPGGMLPPPPPPLPPGGPPPPPGPPPLGAIMPPPGAPMGLALKKKSIPQPTNALKSFNWSKLPENKLEGTVWTEIDDTKVFKILDLEDLERTFSAYQRQQKEADAIDDTLSSKLKVKELSVIDGRRAQNCNILLSRLKLSNDEIKRAILTMDEQEDLPKDMLEQLLKFVPEKSDIDLLEEHKHELDRMAKADRFLFEMSRINHYQQRLQSLYFKKKFAERVAEVKPKVEAIRSGSEEVFRSGALKQLLEVVLAFGNYMNKGQRGNAYGFKISSLNKIADTKSSIDKNITLLHYLITIVENKYPSVLNLNEELRDIPQAAKVNMTELDKEISTLRSGLKAVETELEYQKSQPPQPGDKFVSVVSQFITVASFSFSDVEDLLAEAKDLFTKAVKHFGEEAGKIQPDEFFGIFDQFLQAVSEAKQENENMRKKKEEEERRARMEAQLKEQRERERKMRKAKENSEESGEFDDLVSALRSGEVFDKDLSKLKRNRKRITNQMTDSSRERPITKLNF

SEQ ID NO: 830727 - protein, 190 aa, Homo sapiens [sequence omitted]

SEQ ID NO: 830728 - protein, 402 aa, Homo sapiens
MAPRKRGGRGISFIFCCFRNNDHPEITYRLRNDSNFALQTMEPALPMPPVEELDVMFSELVDELDLTDKHREAMFALPAEKKWQIYCSKKKDQEENKGATSWPEFYIDQLNSMAARKSLLALEKEEEEERSKTIESLKTALRTKPMRFVTRFIDLDGLSCILNFLKTMDYETSESRIHTSLIGCIKALMNNSQGRAHVLAHSESINVIAQSLSTENIKTKVAVLEILGAVCLVPGGHKKVLQAMLHYQKYASERTRFQTLINDLDKSTGRYRDEVSLKTAIMSFINAVLSQGAGVESLDFRLHLRYEFLMLGIQPVIDKLREHENSTLDRHLDFFEMLRNEDELEFAKRFELVHIDTKSATQMFELTRKRLTHSEAYPHFMSILHHCLQMPCKCVRDSHVCF

SEQ ID NO: 830729 - protein, 345 aa, Homo sapiens
MPRIDADLKLDFKDVLLRPKRSSLKSRAEVDLERTFTFRNSKQTYSGIPIIVANMDTVGTFEMAAVMSQHSMFTAIHKHYSLDDWKLFATNHPECLQNVAVSSGSGQNDLEKMTSILEAVPQVKFICLDVANGYSEHFVEFVKLVRAKFPEHTIMAGNVVTGEMVEELILSGADIIKVGVGPGSVCTTRTKTGVGYPQLSAVIECADSAHGLKGHIISDGGCTCPGDVAKAFGAGADFVMLGGMFSGHTECAGEVIERNGRKLKLFYGMSSDTAMNKHAGGVAEYRASEGKTVEVPYKGDVENTILDILGGLRSTCTYVGAAKLKELSRRATFIRVTQQHNTVFS

SEQ ID NO: 830730 - protein, 123 aa, Homo sapiens
  misc_feature (87)..(87): Xaa can be any naturally occurring amino acid
MTSILEAVPQVKFICLDVANGYSEHFVEFVKLVRAKFPEHTIMAGNVVTGEMVEELILPSKLKLRTHSQSHHNPLSRTSNSTPTNSXLMTSSKPRYLALPPTINLLGELSVLVHVLLIYHSPL

SEQ ID NO: 830731 - protein, 299 aa, Homo sapiens
MPRIDADLKLDFKDVLLRPKRSSLKSRAEVDLERTFTFRNSKQTYSGIPIIVANMDTVGTFEMAAVMSQHSMFTAIHKHYSLDDWKLFATNHPECLQNVAVSSGSGQNDLEKMTSILEAVPQVKFICLDVANGYSEHFVEFVKLVRAKFPEHTIMAGNVVTGEMVEELILSGADIIKVGVGPGSVCTTRTKTGVGYPQLSAVIECADSAHGLKGHIISDGGCTCPGDVAKAFGAGADFVMLGGMFSGHTECAGDVENTILDILGGLRSTCTYVGAAKLKELSRRATFIRVTQQHNTVFS

SEQ ID NO: 830732 - protein, 346 aa, Homo sapiens
MPRIDADLKLDFKDVLLRPKRSSLKSRAEVDLERTFTFRNSKQTYSGIPIIVANMDTVGTFEMAAVMSQHSMFTAIHKHYSLDDWKLFATNHPECLQNVAVSSGSGQNDLEKMTSILEAVPQVKFICLDVANGYSEHFVEFVKLVRAKFPEHTIMAGNVVTGEMVEELILSGADIIKVGVGPGSVCTTRTKTGVGYPQLSAVIECADSAHGLKGHIISDGGCTCPGDVAKAFGAGADFVMLGGMFSGHTECAGEVIERNGRKLKLFYGMSSDTAMNGGMLCPLFCLLLPGGFGALPPAFSGPRRKAPIGPTSEPCCPELITSLFKPTLAPFSFSLSLSLSLFFFLF

SEQ ID NO: 830733 - protein, 211 aa, Homo sapiens
MPRIDADLKLDFKDVLLRPKRSSLKSRAEVDLERTFTFRNSKQTYSGIPIIVANMDTVGTFEMAAVMSQHSMFTAIHKHYSLDDWKLFATNHPECLQNVAVSSGSGQNDLEKMTSILEAVPQVKFICLDVANGYSEHFVEFVKLVRAKFPEHTIMEERIKNCSSWAQWLTTVIPALWEAEAGGSPEVRNLRPAWPTWRNRVSTKNTKISQP

SEQ ID NO: 830734 - protein, 345 aa, Homo sapiens; identical to SEQ ID NO: 830729

SEQ ID NO: 830735 - protein, 195 aa, Homo sapiens
MGLGSERCNIEGSTLDQTTTAVVGELGPVGLLGAVVGLNPQSLGHLGGGDSLAELPLMMSCPCFFLCEDGGCTCPGDVAKAFGAGADFVMLGGMFSGHTECAGEVIERNGRKLKLFYGMSSDTAMNKHAGGVAEYRASEGKTVEVPYKGDVENTILDILGGLRSTCTYVGAAKLKELSRRATFIRVTQQHNTVFS

SEQ ID NO: 830736 - protein, 317 aa, Homo sapiens
MPRIDADLKLDFKDVLLRPKRSSLKSRAEVDLERTFTFRNSKQTYSGIPIIVANMDTVGTFEMAAVMSQHSMFTAIHKHYSLDDWKLFATNHPECLQNVAVSSGSGQNDLEKMTSILEAVPQVKFICLDVANGYSEHFVEFVKLVRAKFPEHTIMAGNVVTGEMVEELILSGADIIKVGVGPGSVCTTRTKTGVGYPQLSAVIECADSAHGLKGHIISDGGCTCPGDVAKAFGAGADFVMLGGMFSGHTECAGEVIERNGRKLKLLPPAFSGPRRKAPIGPTSEPCCPELITSLFKPTLAPFSFSLSLSLSLFFFLF

SEQ ID NO: 830737 - protein, 569 aa, Homo sapiens
LEVESGGSEGSGPVQVPEGILPPSEPSFFSSLFRRYPEIRSPASKERIRMSQDNDTLMRDILGHELAAMRLQKLEQQRRLFEKKQRQKRQELLMVQANPDASPWLWRSCLREERLLGDRGLGNPFLRKKVSEAHLPSGIHSALGTVSCGGDGRGERGLPTPRTEAVFRNLGLQSPFLSWLPDNSDAELEEVSVENGSVSPPPFKQSPRIRRKGWQAHQRPGTRAEGESDSQDMGDAHKSPNMGPNPGMDGDCVYENLAFQKEEDLEKKREASESTGTNSSAAHNEELSKALKGEGGTDSDHMRHEASLAIRSPCPGLEEDMEAYVLRPALPGTMMQCYLTRDKHGVDKGLFPLYYLYLETSDSLQRFLLAGRKRRRSKTSNYLISLDPTHLSRDGDNFVGKVRSNVFSTKFTIFDNGVNPDREHLTRNTARIRQELGAVCYEPNVLGYLGPRKMTVILPGTNSQNQRINVQPLNEQESLLSRYQRGDKQGLLLLHNKTPSWDKENGVYTLNFHGRVTRASVKNFQIVDPKHQEHLVLQFGRVGPDTFTMDFCFPFSPLQAFSICLSSFN

SEQ ID NO: 830738 - protein, 536 aa, Homo sapiens
LEVESGGSEGSGPVQVPEGILPPSEPSFFSSLFRRYPEIRSPASKERIRMSQDNDTLMRDILGHELAAMRLQKLEQQRRLFEKKQRQKRQELLMVQANPDASPWLWRSCLREERLLGDRGLGNPFLRKKVSEAHLPSGIHSALGTVSCGGDGRGERGLPTPRTEAVFRNLGLQSPFLSWLPDNSDAELEEVSVENGSVSPPPFKQSPRIRRKGWQAHQRPGTRAEGESDSQDMGDAHKSPNMGPNPGMDGDCVYENLAFQKEEDLEKKREASESTGTNSSAAHNEELSKALKGEGGTDSDHMRHEASLAIRSPCPGLEEDMEAYVLRPALPGTMMQCYLTRDKHGVDKGLFPLYYLYLETSDSLQRFLLAGRKRRRSKTSNYLISLDPTHLSRDGDNFVGKVRSNVFSTKFTIFDNGVNPDREHLTRNTARIRQELGAVCYEQESLLSRYQRGDKQGLLLLHNKTPSWDKENGVYTLNFHGRVTRASVKNFQIVDPKHQEHLVLQFGRVGPDTFTMDFCFPFSPLQAFSICLSSFN

SEQ ID NO: 830739 - protein, 530 aa, Homo sapiens
GLSWATEVPCALSPWACVSLSILGHELAAMRLQKLEQQRRLFEKKQRQKRQELLMVQANPDASPWLWRSCLREERLLGDRGLGNPFLRKKVSEAHLPSGIHSALGTVSCGGDGRGERGLPTPRTEAVFRNLGLQSPFLSWLPDNSDAELEEVSVENGSVSPPPFKQSPRIRRKGWQAHQRPGTRAEGESDSQDMGDAHKSPNMGPNPGMDGDCVYENLAFQKEEDLEKKREASESTGTNSSAAHNEELSKALKGEGGTDSDHMRHEASLAIRSPCPGLEEDMEAYVLRPALPGTMMQCYLTRDKHGVDKGLFPLYYLYLETSDSLQRFLLAGRKRRRSKTSNYLISLDPTHLSRDGDNFVGKVRSNVFSTKFTIFDNGVNPDREHLTRNTARIRQELGAVCYEPNVLGYLGPRKMTVILPGTNSQNQRINVQPLNEQESLLSRYQRGDKQGLLLLHNKTPSWDKENGVYTLNFHGRVTRASVKNFQIVDPKHQEHLVLQFGRVGPDTFTMDFCFPFSPLQAFSICLSSFN

SEQ ID NO: 830740 - protein, 580 aa, Homo sapiens
LEVESGGSEGSGPVQVPEGILPPSEPSFFSSLFRRYPEIRSPASKERIRMSQDNDTLMRDILGHELAAMRLQKLEQQRRLFEKKQRQKRQELLMVQANPDASPWLWRSCLREERLLGDRGLGNPFLRKKVSEAHLPSGIHSALGTVSCGGDGRGERGLPTPRTEAVFRNLGLQSPFLSWLPDNSDAELEEVSVENGSVSPPPFKQSPRIRRKGWQAHQRPGTRAEGESDSQDMGDAHKSPNMGPNPGMDGDCVYENLAFQKEEDLEKKREASESTGTNSSAAHNEELSKALKGEGGTDSDHMRHEASLAIRSPCPGLEEDMEAYVLRPALPGTMMQCYLTRDKHGVDKGLFPLYYLYLETSDSLQRFLLAGRKRRRSKTSNYLISLDPTHLSRDGDNFVGKVRSNVFSTKFTIFDNGVNPDREHLTRNTARIRQELGAVCYEPNVLGYLGPRKMTVILPGTNSQNQRINVQPLNEQESLLSRYQRGDKQGLLLLHNKTPSWDKENGVYTLNFHGRVTRASVKNFQIVDPKHRELLETSLAGPEEHLVLQFGRVGPDTFTMDFCFPFSPLQAFSICLSSFN

SEQ ID NO: 830741 - protein, 547 aa, Homo sapiens
GTRKETTTGKEALHKTRMSLKWTSVFLLIQLSCYFSSGSCGKVLVWPTEYSHWINMKTILEELVQRGHEVTVLTSSASTLVNASKSSAIKLEVYPTSLTKNDLEDSLLKILDRWIYGVSKNTFWSYFSQLQELCWEYYDYSNKLCKDAVLNKKLMMKLQESKFDVILADALNPCGELLAELFNIPFLYSLRFSVGYTFEKNGGGFLFPPSYVPVVMSELSDQMIFMERIKNMIHMLYFDFWFQIYDLKKWDQFYSEVLGRPTTLFETMGKAEMWLIRTYWDFEFPRPFLPNVDFVGGLHCKPAKPLPKEMEEFVQSSGENGIVVFSLGSMISNMSEESANMIASALAQIPQKVLWRFDGKKPNTLGSNTRLYKWLPQNDLLGHPKTKAFITHGGTNGIYEAIYHGIPMVGIPLFADQHDNIAHMKAKGAALSVDIRTMSSRDLLNALKSVINDPVYKENIMKLSRIHHDQPVKPLDRAVFWIEFVMRHKGAKHLRVAAHNLTWIQYHSLDVIAFLLACVATMIFMITKCCLFCFRKLAKTGKKKKRD

SEQ ID NO: 830742 - protein, 547 aa, Homo sapiens; identical to SEQ ID NO: 830741

SEQ ID NO: 830743 - protein, 105 aa, Homo sapiens
MSLTDSLNNHRYSYKENIMKLSRIHHDQPVKPLDRAVFWIEFVMRHKGAKHLRVAAHNLTWIQYHSLDVIAFLLACVATMIFMITKCCLFCFRKLAKTGKKKKRD

SEQ ID NO: 830744 - protein, 223 aa, Homo sapiens
GTEAVAGRSWASGLRRSGRVSSAQWRHRCFTRCLSGDAAASSSAVKTLGASRTGFYLNEDKNLGRARLLTPVIPALWEAEVGGSPEVRSSRPAWPTCETSSLLKIQKLARRGGRISNMRALENDFFNSPPRKTVRFGGTVTEVLLKYKKGETNDFELLKNQLLDPDIKDDQIINWLLEFRSSVMYLTKDFEQLISIILRLPWLNRSQTVVEEYLAFLGNLVSA

SEQ ID NO: 830745 - protein, 106 aa, Homo sapiens
MRALENDFFNSPPRKTVRFGGTVTEVLLKYKKGETNDFELLKNQLLDPDIKDDQIINWLLEFRSSVMYLTKDFEQLISIILRLPWLNRSQTVVEEYLAFLGNLVSA

SEQ ID NO: 830746 - protein, 106 aa, Homo sapiens; identical to SEQ ID NO: 830745

SEQ ID NO: 830747 - protein, 106 aa, Homo sapiens; identical to SEQ ID NO: 830745

SEQ ID NO: 830748 - protein, 72 aa, Homo sapiens
GTEAVAGRSWASGRGAAVALVRPNGGTAASHVVCREMRPLRPLQSRRWARRGLGKIQAASFCASGTKAQDRA

SEQ ID NO: 830749 - protein, 72 aa, Homo sapiens; identical to SEQ ID NO: 830748

SEQ ID NO: 830750 - protein, 72 aa, Homo sapiens; identical to SEQ ID NO: 830748

SEQ ID NO: 830751 - protein, 72 aa, Homo sapiens; identical to SEQ ID NO: 830748

SEQ ID NO: 830752 - protein, 147 aa, Homo sapiens
LPAAGPAGLPPLRTSPCSGVTFAGRPRLGQESGQGVAARRRRALPRHPPLASERGPRTHTPAPLWQACLVGWVKPQCVHTERRGAVERGSGLAEEDADQAPATQGNSELPRAALRVSEENRGDGRNMGEGGLFPVHTHMHAATGRDS

SEQ ID NO: 830753 - protein, 83 aa, Homo sapiens
VGGLGAVTVSHPGVHTERRGAVERGSGLAEEDADQAPATQGNSELPRAALRVSEENRGDGRNMGEGGLFPVHTHMHAATGRDS

SEQ ID NO: 830754 - protein, 147 aa, Homo sapiens; identical to SEQ ID NO: 830752

SEQ ID NO: 830755 - protein, 89 aa, Homo sapiens
LPAAGPAGLPPLRTSPCSGVHTERRGAVERGSGLAEEDADQAPATQGNSELPRAALRVSEENRGDGRNMGEGGLFPVHTHMHAATGRDS

SEQ ID NO: 830756 - protein, 462 aa, Homo sapiens
MDTSSVGGLELTDQTPVLLGSTAMATSLTNVGNSFSGPANPLVSRSNKFQNSSVEDDDDVVFIEPVQPPPPSVPVVADQRTITFTSSKNEELQGNDSKITPSSKELASQKGSVSETIVIDDEEDMETNQGQEKNSSNFIERRPPETKNRTNDVDFSTSSFSRSKTKTGVGPFNPGRMNVAGDVFQNGESATHHNPDSWISQSASFPRNQKQPGVDSLSPVASLPKQIFQPSVQQQPTKPVKVTCANCKKPLQKGQTAYQRKGSAHLFCSTTCLSSFSHKPAPKKLCVMCKKDITTMKGTIVAQVDSSESFQEFCSTSCLSLYEDKQNPTKGALNKSRCTICGKLTEIRHEVSFKNMTHKLCSDHCFNRYRMANGLIMNCCEQCGEYLPSKGAGNNVLVIDGQQKRFCCQSCVSEYKQVGSHPSFLKEVRDHMQDSFLMQPEVSRNVNGVQGLNIFEHCYYCH

SEQ ID NO: 830757 - protein, 1377 aa, Homo sapiens
MDTSSVGGLELTDQTPVLLGSTAMATSLTNVGNSFSGPANPLVSRSNKFQNSSVEDDDDVVFIEPVQPPPPSVPVVADQRTITFTSSKNEELQGNDSKITPSSKELASQKGSVSETIVIDDEEDMETNQGQEKNSSNFIERRPPETKNRTNDVDFSTSSFSRSKVNAGMGNSGITTEPDSEIQIANVTTLETGVSSVNDGQLENTDGRDMNLMITHVTSLQNTNLGDVSNGLQSSNFGVNIQTYTPSLTSQTKTGVGPFNPGRMNVAGDVFQNGESATHHNPDSWISQSASFPRNQKQPGVDSLSPVASLPKQIFQPSVQQQPTKPVKVTCANCKKPLQKGQTAYQRKGSAHLFCSTTCLSSFSHKPAPKKLCVMCKKDITTMKGTIVAQVDSSESFQEFCSTSCLSLYEDKQNPTKGALNKSRCTICGKLTEIRHEVSFKNMTHKLCSDHCFNRYRMANGLIMNCCEQCGEYLPSKGAGNNVLVIDGQQKRFCCQSCVSEYKQVGSHPSFLKEVRDHMQDSFLMQPEKYGKLTTCTGCRTQCRFFDMTQCIGPNGYMEPYCSTACMNSHKTKYAKSQSLGIICHFCKRNSLPQYQATMPDGKLYNFCNSSCVAKFQALSMQSSPNGQFVAPSDIQLKCNYCKNSFCSKPEILEWENKVHQFCSKTCSDDYKKLHCIVTYCEYCQEEKTLHETVNFSGVKRPFCSEGCKLLYKQDFARRLGLRCVTCNYCSQLCKKGATKELDGVVRDFCSEDCCKKFQDWYYKAARCDCCKSQGTLKERVQWRGEMKHFCDQHCLLRFYCQQNEPNMTTQKGPENLHYDQGCQTSRTKMTGSAPPPSPTPNKEMKNKAVLCKPLTMTKATYCKPHMQTKSCQTDDTWRTEYVPVPIPVPVYIPVPMHMYSQNIPVPTTVPVPVPVPVFLPAPLDSSEKIPAAIEELKSKVSSDALDTELLTMTDMMSEDEGKTETTNINSVIIETDIIGSDLLKNSDPETQSSMPDVPYEPDLDIEIDFPRAAEELDMENEFLLPPVFGEEYEEQPRPRSKKKGAKRKAVSGYQSHDDSSDNSECSFPFKYTYGVNAWKHWVKTRQLDEDLLVLDELKSSKSVKLKEDLLSHTTAELNYGLAHFVNEIRRPNGENYAPDSIYYLCLGIQEYLCGSNRKDNIFIDPGYQTFEQELNKILRSWQPSILPDGSIFSRVEEDYLWRIKQLGSHSPVALLNTLFYFNTKYFGLKTVEQHLRLSFGTVFRHWKKNPLTMENKACLRYQVSSLCGTDNEDKITTGKRKHEDDEPVFEQIENTANPSRCPVKMFECYLSKSPQNLNQRMDVFYLQPECSSSTDSPVWYTSTSLDRNTLENMLVRVLLVKDIYDKDNYELDEDTD

SEQ ID NO: 830758 - protein, 1377 aa, Homo sapiens; identical to SEQ ID NO: 830757

SEQ ID NO: 830759 - protein, 1282 aa, Homo sapiens
MDTSSVGGLELTDQTPVLLGSTAMATSLTNVGNSFSGPANPLVSRSNKFQNSSVEDDDDVVFIEPVQPPPPSVPVVADQRTITFTSSKNEELQGNDSKITPSSKELASQKGSVSETIVIDDEEDMETNQGQEKNSSNFIERRPPETKNRTNDVDFSTSSFSRSKVNAGMGNSGITTEPDSEIQIANVTTLETGVSSVNDGQLENTDGRDMNLMITHVTSLQNTNLGDVSNGLQSSNFGVNIQTYTPSLTSQTKTGVGPFNPGRMNVAGDVFQNGESATHHNPDSWISQSASFPRNQKQPGVDSLSPVASLPKQIFQPSVQQQPTKPVKVTCANCKKPLQKGQTAYQRKGSAHLFCSTTCLSSFSHKPAPKKLCVMCKKDITTMKGTIVAQVDSSESFQEFCSTSCLSLYEDKQNPTKGALNKSRCTICGKLTEIRHEVSFKNMTHKLCSDHCFNRYRMANGLIMNCCEQCGEYLPSKGAGNNVLVIDGQQKRFCCQSCVSEYKQVGSHPSFLKEVRDHMQDSFLMQPEKYGKLTTCTGCRTQCRFFDMTQCIGPNGYMEPYCSTACMNSHKTKYAKSQSLGIICHFCKRNSLPQYQATMPDGKLYNFCNSSCVAKFQALSMQSSPNGQFVAPSDIQLKCNYCKNSFCSKPEILEWENKVHQFCSKTCSDDYKKLHCIVTYCEYCQEEKTLHETVNFSGVKRPFCSEGCKLLYKQDFARRLGLRCVTCNYCSQLCKKGATKELDGVVRDFCSEDCCKKFQDWYYKAARCDCCKSQGTLKERVQWRGEMKHFCDQHCLLRFYCQQNEPNMTTQKGPENLHYDQGCQTSRTKMTGSAPPPSPTPNKEMKNKAVLCKPLTMTKATYCKPHMQTKSCQTDDTWRTEYVPVPIPVPVYIPVPMHMYSQNIPVPTTVPVPVPVPVFLPAPLDSSEKIPAAIEELKSKVSSDALDTELLTMTDMMSEDEGKTETTNINSVIIETDIIGSDLLKNSDPETQSSMPDVPYEPDLDIEIDFPRAAEELDMENEFLLPPVFGEEYEEQPRPRSKKKGAKRKAVSGYQSHDDSSDNSECSFPFKYTYGVNAWKHWVKTRQLDEDLLVLDELKSSKSVKLKEDLLSHTTAELNYGLAHFVNEIRRPNGENYAPDSIYYLCLGIQEYLCGSNRKDNIFIDPGYQTFEQELNKILRSWQPSILPDGSIFSRVEEDYLWRIKQLGSHSPVALLNTLFYFNTKYFGLKTVEQHLRLSFGTVFRHWKKNPLTMENKACLRYQVSSLCGTDNEGLFHFYFLR

SEQ ID NO: 830760 - protein, 1335 aa, Homo sapiens
WYGRKSFGWSFRGAAARTGTKNRLQPCLVHPWQKVRRKTPPLFFGMDTSSVGGLELTDQTPVLLGSTAMATSLTNVGNSFSGPANPLVSRSNKFQNSSVEDDDDVVFIEPVQPPPPSVPVVADQRTITFTSSKNEELQGNDSKITPSSKELASQKGSVSETIVIDDEEDMETNQGQEKNSSNFIERRPPETKNRTNDVDFSTSSFSRSKTKTGVGPFNPGRMNVAGDVFQNGESATHHNPDSWISQSASFPRNQKQPGVDSLSPVASLPKQIFQPSVQQQPTKPVKVTCANCKKPLQKGQTAYQRKGSAHLFCSTTCLSSFSHKPAPKKLCVMCKKDITTMKGTIVAQVDSSESFQEFCSTSCLSLYEDKQNPTKGALNKSRCTICGKLTEIRHEVSFKNMTHKLCSDHCFNRYRMANGLIMNCCEQCGEYLPSKGAGNNVLVIDGQQKRFCCQSCVSEYKQVGSHPSFLKEVRDHMQDSFLMQPEKYGKLTTCTGCRTQCRFFDMTQCIGPNGYMEPYCSTACMNSHKTKYAKSQSLGIICHFCKRNSLPQYQATMPDGKLYNFCNSSCVAKFQALSMQSSPNGQFVAPSDIQLKCNYCKNSFCSKPEILEWENKVHQFCSKTCSDDYKKLHCIVTYCEYCQEEKTLHETVNFSGVKRPFCSEGCKLLYKQDFARRLGLRCVTCNYCSQLCKKGATKELDGVVRDFCSEDCCKKFQDWYYKAARCDCCKSQGTLKERVQWRGEMKHFCDQHCLLRFYCQQNEPNMTTQKGPENLHYDQGCQTSRTKMTGSAPPPSPTPNKEMKNKAVLCKPLTMTKATYCKPHMQTKSCQTDDTWRTEYVPVPIPVPVYIPVPMHMYSQNIPVPTTVPVPVPVPVFLPAPLDSSEKIPAAIEELKSKVSSDALDTELLTMTDMMSEDEGKTETTNINSVIIETDIIGSDLLKNSDPETQSSMPDVPYEPDLDIEIDFPRAAEELDMENEFLLPPVFGEEYEEQPRPRSKKKGAKRKAVSGYQSHDDSSDNSECSFPFKYTYGVNAWKHWVKTRQLDEDLLVLDELKSSKSVKLKEDLLSHTTAELNYGLAHFVNEIRRPNGENYAPDSIYYLCLGIQEYLCGSNRKDNIFIDPGYQTFEQELNKILRSWQPSILPDGSIFSRVEEDYLWRIKQLGSHSPVALLNTLFYFNTKYFGLKTVEQHLRLSFGTVFRHWKKNPLTMENKACLRYQVSSLCGTDNEDKITTGKRKHEDDEPVFEQIENTANPSRCPVKMFECYLSKSPQNLNQRMDVFYLQPECSSSTDSPVWYTSTSLDRNTLENMLVRVLLVKDIYDKDNYELDEDTD

SEQ ID NO: 830761 - protein, 383 aa, Homo sapiens [sequence omitted]

SEQ ID NO: 830762 - protein, 124 aa, Homo sapiens
MENKACLRYQVSSLCGTDNEDKITTGKRKHEDDEPVFEQIENTANPSRCPVKMFECYLSKSPQNLNQRMDVFYLQPECSSSTDSPVWYTSTSLDRNTLENMLVRVLLVKDIYDKDNYELDEDTD

SEQ ID NO: 830763 - protein, 1274 aa, Homo sapiens
MDTSSVGGLELTDQTPVLLGSTAMATSLTNVGNSFSGPANPLVSRSNKFQNSSVEDDDDVVFIEPVQPPPPSVPVVADQRTITFTSSKNEELQGNDSKITPSSKELASQKGSVSETIVIDDEEDMETNQGQEKNSSNFIERRPPETKNRTNDVDFSTSSFSRSKVNAGMGNSGITTEPDSEIQIANVTTLETGVSSVNDGQLENTDGRDMNLMITHVTSLQNTNLGDVSNGLQSSNFGVNIQTYTPSLTSQTKTGVGPFNPGRMNVAGDVFQNGESATHHNPDSWISQSASFPRNQKQPGVDSLSPVASLPKQIFQPSVQQQPTKPVKVTCANCKKPLQKGQTAYQRKGSAHLFCSTTCLSSFSHKPAPKKLCVMCKKDITTMKGTIVAQVDSSESFQEFCSTSCLSLYEDKQNPTKGALNKSRCTICGKLTEIRHEVSFKNMTHKLCSDHCFNRYRMANGLIMNCCEQCGEYLPSKGAGNNVLVIDGQQKRFCCQSCVSEYKQVGSHPSFLKEVRDHMQDSFLMQPEKYGKLTTCTGCRTQCRFFDMTQCIGPNGYMEPYCSTACMNSHKTKYAKSQSLGIICHFCKRNSLPQYQATMPDGKLYNFCNSSCVAKFQALSMQSSPNGQFVAPSDIQLKCNYCKNSFCSKPEILEWENKVHQFCSKTCSDDYKKLHCIVTYCEYCQEEKTLHETVNFSGVKRPFCSEGCKLLYKQDFARRLGLRCVTCNYCSQLCKKGATKELDGVVRDFCSEDCCKKFQDWYYKAARCDCCKSQGTLKERVQWRGEMKHFCDQHCLLRFYCQQNEPNMTTQKGPENLHYDQGCQTSRTKMTGSAPPPSPTPNKEMKNKAVLCKPLTMTKATYCKPHMQTKSCQTDDTWRTEYVPVPIPVPVYIPVPMHMYSQNIPVPTTVPVPVPVPVFLPAPLDSSEKIPAAIEELKSKVSSDALDTELLTMTDMMSEDEGKTETTNINSVIIETDIIGSDLLKNSDPETQSSMPDVPYEPDLDIEIDFPRAAEELDMENEFLLPPVFGEEYEEQPRPRSKKKGAKRKAVSGYQSHDDSSDNSECSFPFKYTYGVNAWKHWVKTRQLDEDLLVLDELKSSKSVKLKEDLLSHTTAELNYGLAHFVNEIRRPNGENYAPDSIYYLCLGIQEYLCGSNRKDNIFIDPGYQTFEQELNKILRSWQPSILPDGSIFSRVEEDYLWRIKQLGSHSPVALLNTLFYFNTKYFGLKTVEQHLRLSFGTVFRHWKKNPLTMENKACLRYQVSSLCGTDNEG

SEQ ID NO: 830764 - protein, 1305 aa, Homo sapiens
MDTSSVGGLELTDQTPVLLGSTAMATSLTNVGNSFSGPANPLVSRSNKFQNSSVEDDDDVVFIEPVQPPPPSVPVVADQRTITFTSSKNEELQGNDSKITPSSKELASQKGSVSETIVIDDEEDMETNQGQEKNSSNFIERRPPETKNRTNDVDFSTSSFSRSKVNAGMGNSGITTEPDSEIQIANVTTLETGVSSVNDGQLENTDGRDMNLMITHVTSLQNTNLGDVSNGLQSSNFGVNIQTYTPSLTSQTKTGVGPFNPGRMNVAGDVFQNGESATHHNPDSWISQSASFPRNQKQPGVDSLSPVASLPKQIFQPSVQQQPTKPVKVTCANCKKPLQKGQTAYQRKGSAHLFCSTTCLSSFSHKPAPKKLCVMCKKDITTMKGTIVAQVDSSESFQEFCSTSCLSLYEDKQNPTKGALNKSRCTICGKLTEIRHEVSFKNMTHKLCSDHCFNRYRMANGLIMNCCEQCGEYLPSKGAGNNVLVIDGQQKRFCCQSCVSEYKQVGSHPSFLKEVRDHMQDSFLMQPEKYGKLTTCTGCRTQCRFFDMTQCIGPNGYMEPYCSTACMNSHKTKYAKSQSLGIICHFCKRNSLPQYQATMPDGKLYNFCNSSCVAKFQALSMQSSPNGQFVAPSDIQLKCNYCKNSFCSKPEILEWENKVHQFCSKTCSDDYKKLHCIVTYCEYCQEEKTLHETVNFSGVKRPFCSEGCKLLYKQDFARRLGLRCVTCNYCSQLCKKGATKELDGVVRDFCSEDCCKKFQDWYYKAARCDCCKSQGTLKERVQWRGEMKHFCDQHCLLRFYCQQNEPNMTTQKGPENLHYDQGCQTSRTKMTGSAPPPSPTPNKEMKNKAVLCKPLTMTKATYCKPHMQTKSCQTDDTWRTEYVPVPIPVPVYIPVPMHMYSQNIPVPTTVPVPVPVPVFLPAPLDSSEKIPAAIEELKSKVSSDALDTELLTMTDMMSEDEGKTETTNINSVIIETDIIGSDLLKNSDPETQSSMPDVPYEPDLDIEIDFPRAAEELDMENEFLLPPVFGEEYEEQPRPRSKKKGAKRKAVSGYQSHDDSSDNSECSFPFKYTYGVNAWKHWVKTRQLDEDLLVLDELKSSKSVKLKEDLLSHTTAELNYGLAHFVNEIRRPNGENYAPDSIYYLCLGIQEYLCGSNRKDNIFIDPGYQTFEQELNKILRSWQPSILPDGSIFSRVEEDYLWRIKQLGSHSPVALLNTLFYFNTKYFGLKTVEQHLRLSFGTVFRHWKKNPLTMENKACLRYQVSSLCGTDNEVEINYTGQMSVKCLNALSVTDLNKGGCFICQC

SEQ ID NO: 830765 - protein, 1154 aa, Homo sapiens
MDTSSVGGLELTDQTPVLLGSTAMATSLTNVGNSFSGPANPLVSRSNKFQNSSVEDDDDVVFIEPVQPPPPSVPVVADQRTITFTSSKNEELQGNDSKITPSSKELASQKGSVSETIVIDDEEDMETNQGQEKNSSNFIERRPPETKNRTNDVDFSTSSFSRSKVNAGMGNSGITTEPDSEIQIANVTTLETGVSSVNDGQLENTDGRDMNLMITHVTSLQNTNLGDVSNGLQSSNFGVNIQTYTPSLTSQTKTGVGPFNPGRMNVAGDVFQNGESATHHNPDSWISQSASFPRNQKQPGVDSLSPVASLPKQIFQPSVQQQPTKPVKVTCANCKKPLQKGQTAYQRKGSAHLFCSTTCLSSFSHKPAPKKLCVMCKKDITTMKGTIVAQVDSSESFQEFCSTSCLSLYEDKQNPTKGALNKSRCTICGKLTEIRHEVSFKNMTHKLCSDHCFNRYRMANGLIMNCCEQCGEYLPSKGAGNNVLVIDGQQKRFCCQSCVSEYKQVGSHPSFLKEVRDHMQDSFLMQPEKYGKLTTCTGCRTQCRFFDMTQCIGPNGYMEPYCSTACMNSHKTKYAKSQSLGIICHFCKRNSLPQYQATMPDGKLYNFCNSSCVAKFQALSMQSSPNGQFVAPSDIQLKCNYCKNSFCSKPEILEWENKVHQFCSKTCSDDYKKLHCIVTYCEYCQEEKTLHETVNFSGVKRPFCSEGCKLLYKQDFARRLGLRCVTCNYCSQLCKKGATKELDGVVRDFCSEDCCKKFQDWYYKAARCDCCKSQGTLKERVQWRGEMKHFCDQHCLLRFYCQQNEPNMTTQKGPENLHYDQGCQTSRTKMTGSAPPPSPTPNKEMKNKAVLCKPLTMTKATYCKPHMQTKSCQTDDTWRTEYVPVPIPVPVYIPVPMHMYSQNIPVPTTVPVPVPVPVFLPAPLDSSEKIPAAIEELKSKVSSDALDTELLTMTDMMSEDEGKTETTNINSVIIETDIIGSDLLKNSDPETQSSMPDVPYEPDLDIEIDFPRAAEELDMENEFLLPPVFGEEYEEQPRPRSKKKGAKRKAVSGYQSHDDSSDNSECSFPFKYTYGVNAWKHWVKTRQLDEDLLVLDELKSSKSVKLKEDLLSHTTAELNYGLAHFVNEIRRPNGENYAPDSIYYLCLGIQEKFA

SEQ ID NO: 830766 - protein, 974 aa, Homo sapiens
MDTSSVGGLELTDQTPVLLGSTAMATSLTNVGNSFSGPANPLVSRSNKFQNSSVEDDDDVVFIEPVQPPPPSVPVVADQRTITFTSSKNEELQGNDSKITPSSKELASQKGSVSETIVIDDEEDMETNQGQEKNSSNFIERRPPETKNRTNDVDFSTSSFSRSKVNAGMGNSGITTEPDSEIQIANVTTLETGVSSVNDGQLENTDGRDMNLMITHVTSLQNTNLGDVSNGLQSSNFGVNIQTYTPSLTSQTKTGVGPFNPGRMNVAGDVFQNGESATHHNPDSWISQSASFPRNQKQPGVDSLSPVASLPKQIFQPSVQQQPTKPVKVTCANCKKPLQKGQTAYQRKGSAHLFCSTTCLSSFSHKPAPKKLCVMCKKDITTMKGTIVAQVDSSESFQEFCSTSCLSLYEDKQNPTKGALNKSRCTICGKLTEIRHEVSFKNMTHKLCSDHCFNRYRMANGLIMNCCEQCGEYLPSKGAGNNVLVIDGQQKRFCCQSCVSEYKQVGSHPSFLKEVRDHMQDSFLMQPEKYGKLTTCTGCRTQCRFFDMTQCIGPNGYMEPYCSTACMNSHKTKYAKSQSLGIICHFCKRNSLPQYQATMPDGKLYNFCNSSCVAKFQALSMQSSPNGQFVAPSDIQLKCNYCKNSFCSKPEILEWENKVHQFCSKTCSDDYKKLHCIVTYCEYCQEEKTLHETVNFSGVKRPFCSEGCKLLYKQDFARRLGLRCVTCNYCSQLCKKGATKELDGVVRDFCSEDCCKKFQDWYYKAARCDCCKSQGTLKERVQWRGEMKHFCDQHCLLRFYCQQNEPNMTTQKGPENLHYDQGCQTSRTKMTGSAPPPSPTPNKEMKNKAVLCKPLTMTKATYCKPHMQTKSCQTDDTWRTEYVPVPIPVPVYIPVPMHMYSQNIPVPTTVPVPVPVPVFLPAPLDSSEKIPAAIEELKSKVSSDALDTELLTMTDMMSEDEGKTETTNINSELH

SEQ ID NO: 830767 - protein, 252 aa, Homo sapiens
MDTSSVGGLELTDQTPVLLGSTAMATSLTNVGNSFSGPANPLVSRSNKFQNSSVEDDDDVVFIEPVQPPPPSVPVVADQRTITFTSSKNEELQGNDSKITPSSKELASQKGSVSETIVIDDEEDMETNQGQEKNSSNFIERRPPETKNRTNDVDFSTSSFSRSKVNAGMGNSGITTEPDSEIQIANVTTLETGVSSVNDGQLENTDGRDPRIRIMMSCRFSILKNVSCHIHSTRIKRSYSILVCEVKDGVYV

SEQ ID NO: 830768 - protein, 159 aa, Homo sapiens
QICTFSFLGLGIICHFCKRNSLPQYQATMPDGKLYNFCNSSCVAKFQALSMQSSPNGQFVAPSDIQLKCNYCKNSFCSKPEILEWENKVHQFCSKTCSDDYKKLHCIVTYCEYCQEEKTLHETVNFSGVKRPFCSEGKNYYTNRILQRLELNERGPLES

SEQ ID NO: 830769 - protein, 1377 aa, Homo sapiens; identical to SEQ ID NO: 830757

SEQ ID NO: 830770 - protein, 757 aa, Homo sapiens
MQSSPNGQFVAPSDIQLKCNYCKNSFCSKPEILEWENKVHQFCSKTCSDDYKKLHCIVTYCEYCQEEKTLHETVNFSGVKRPFCSEGCKLLYKQDFARRLGLRCVTCNYCSQLCKKGATKELDGVVRDFCSEDCCKKFQDWYYKAARCDCCKSQGTLKERVQWRGEMKHFCDQHCLLRFYCQQNEPNMTTQKGPENLHYDQGCQTSRTKMTGSAPPPSPTPNKEMKNKAVLCKPLTMTKATYCKPHMQTKSCQTDDTWRTEYVPVPIPVPVYIPVPMHMYSQNIPVPTTVPVPVPVPVFLPAPLDSSEKIPAAIEELKSKVSSDALDTELLTMTDMMSEDEGKTETTNINSVIIETDIIGSDLLKNSDPETQSSMPDVPYEPDLDIEIDFPRAAEELDMENEFLLPPVFGEEYEEQPRPRSKKKGAKRKAVSGYQSHDDSSDNSECSFPFKYTYGVNAWKHWVKTRQLDEDLLVLDELKSSKSVKLKEDLLSHTTAELNYGLAHFVNEIRRPNGENYAPDSIYYLCLGIQEYLCGSNRKDNIFIDPGYQTFEQELNKILRSWQPSILPDGSIFSRVEEDYLWRIKQLGSHSPVALLNTLFYFNTKYFGLKTVEQHLRLSFGTVFRHWKKNPLTMENKACLRYQVSSLCGTDNEDKITTGKRKHEDDEPVFEQIENTANPSRCPVKMFECYLSKSPQNLNQRMDVFYLQPECSSSTDSPVWYTSTSLDRNTLENMLVRVLLVKDIYDKDNYELDEDTD

SEQ ID NO: 830771 - protein, 1290 aa, Homo sapiens
MDTSSVGGLELTDQTPVLLGSTAMATSLTNVGNSFSGPANPLVSRSNKFQNSSVEDDDDVVFIEPVQPPPPSVPVVADQRTITFTSSKNEELQGNDSKITPSSKELASQKGSVSETIVIDDEEDMETNQGQEKNSSNFIERRPPETKNRTNDVDFSTSSFSRSKTKTGVGPFNPGRMNVAGDVFQNGESATHHNPDSWISQSASFPRNQKQPGVDSLSPVASLPKQIFQPSVQQQPTKPVKVTCANCKKPLQKGQTAYQRKGSAHLFCSTTCLSSFSHKPAPKKLCVMCKKDITTMKGTIVAQVDSSESFQEFCSTSCLSLYEDKQNPTKGALNKSRCTICGKLTEIRHEVSFKNMTHKLCSDHCFNRYRMANGLIMNCCEQCGEYLPSKGAGNNVLVIDGQQKRFCCQSCVSEYKQVGSHPSFLKEVRDHMQDSFLMQPEKYGKLTTCTGCRTQCRFFDMTQCIGPNGYMEPYCSTACMNSHKTKYAKSQSLGIICHFCKRNSLPQYQATMPDGKLYNFCNSSCVAKFQALSMQSSPNGQFVAPSDIQLKCNYCKNSFCSKPEILEWENKVHQFCSKTCSDDYKKLHCIVTYCEYCQEEKTLHETVNFSGVKRPFCSEGCKLLYKQDFARRLGLRCVTCNYCSQLCKKGATKELDGVVRDFCSEDCCKKFQDWYYKAARCDCCKSQGTLKERVQWRGEMKHFCDQHCLLRFYCQQNEPNMTTQKGPENLHYDQGCQTSRTKMTGSAPPPSPTPNKEMKNKAVLCKPLTMTKATYCKPHMQTKSCQTDDTWRTEYVPVPIPVPVYIPVPMHMYSQNIPVPTTVPVPVPVPVFLPAPLDSSEKIPAAIEELKSKVSSDALDTELLTMTDMMSEDEGKTETTNINSVIIETDIIGSDLLKNSDPETQSSMPDVPYEPDLDIEIDFPRAAEELDMENEFLLPPVFGEEYEEQPRPRSKKKGAKRKAVSGYQSHDDSSDNSECSFPFKYTYGVNAWKHWVKTRQLDEDLLVLDELKSSKSVKLKEDLLSHTTAELNYGLAHFVNEIRRPNGENYAPDSIYYLCLGIQEYLCGSNRKDNIFIDPGYQTFEQELNKILRSWQPSILPDGSIFSRVEEDYLWRIKQLGSHSPVALLNTLFYFNTKYFGLKTVEQHLRLSFGTVFRHWKKNPLTMENKACLRYQVSSLCGTDNEDKITTGKRKHEDDEPVFEQIENTANPSRCPVKMFECYLSKSPQNLNQRMDVFYLQPECSSSTDSPVWYTSTSLDRNTLENMLVRVLLVKDIYDKDNYELDEDTD

SEQ ID NO: 830772 - protein, 893 aa, Homo sapiens
MTEFCNHSEDQNNLHLKKYGKLTTCTGCRTQCRFFDMTQCIGPNGYMEPYCSTACMNSHKTKYAKSQSLGIICHFCKRNSLPQYQATMPDGKLYNFCNSSCVAKFQGITQRFKPVHKAMLHELIHANNSALFQALSMQSSPNGQFVAPSDIQLKCNYCKNSFCSKPEILEWENKVHQFCSKTCSDDYKKLHCIVTYCEYCQEEKTLHETVNFSGVKRPFCSEGCKLLYKQDFARRLGLRCVTCNYCSQLCKKGATKELDGVVRDFCSEDCCKKFQDWYYKAARCDCCKSQGTLKERVQWRGEMKHFCDQHCLLRFYCQQNEPNMTTQKGPENLHYDQGCQTSRTKMTGSAPPPSPTPNKEMKNKAVLCKPLTMTKATYCKPHMQTKSCQTDDTWRTEYVPVPIPVPVYIPVPMHMYSQNIPVPTTVPVPVPVPVFLPAPLDSSEKIPAAIEELKSKVSSDALDTELLTMTDMMSEDEGKTETTNINSVIIETDIIGSDLLKNSDPETQSSMPDVPYEPDLDIEIDFPRAAEELDMENEFLLPPVFGEEYEEQPRPRSKKKGAKRKAVSGYQSHDDSSDNSECSFPFKYTYGVNAWKHWVKTRQLDEDLLVLDELKSSKSVKLKEDLLSHTTAELNYGLAHFVNEIRRPNGENYAPDSIYYLCLGIQEYLCGSNRKDNIFIDPGYQTFEQELNKILRSWQPSILPDGSIFSRVEEDYLWRIKQLGSHSPVALLNTLFYFNTKYFGLKTVEQHLRLSFGTVFRHWKKNPLTMENKACLRYQVSSLCGTDNEDKITTGKRKHEDDEPVFEQIENTANPSRCPVKMFECYLSKSPQNLNQRMDVFYLQPECSSSTDSPVWYTSTSLDRNTLENMLVRVLLVKDIYDKDNYELDEDTD

SEQ ID NO: 830773 - protein, 693 aa, Homo sapiens
LSLDVSPATCDLLGVKRPFCSEGCKLLYKQDFARRLGLRCVTCNYCSQLCKKGATKELDGVVRDFCSEDCCKKFQDWYYKAARCDCCKSQGTLKERVQWRGEMKHFCDQHCLLRFYCQQNEPNMTTQKGPENLHYDQGCQTSRTKMTGSAPPPSPTPNKEMKNKAVLCKPLTMTKATYCKPHMQTKSCQTDDTWRTEYVPVPIPVPVYIPVPMHMYSQNIPVPTTVPVPVPVPVFLPAPLDSSEKIPAAIEELKSKVSSDALDTELLTMTDMMSEDEGKTETTNINSVIIETDIIGSDLLKNSDPETQSSMPDVPYEPDLDIEIDFPRAAEELDMENEFLLPPVFGEEYEEQPRPRSKKKGAKRKAVSGYQSHDDSSDNSECSFPFKYTYGVNAWKHWVKTRQLDEDLLVLDELKSSKSVKLKEDLLSHTTAELNYGLAHFVNEIRRPNGENYAPDSIYYLCLGIQEYLCGSNRKDNIFIDPGYQTFEQELNKILRSWQPSILPDGSIFSRVEEDYLWRIKQLGSHSPVALLNTLFYFNTKYFGLKTVEQHLRLSFGTVFRHWKKNPLTMENKACLRYQVSSLCGTDNEDKITTGKRKHEDDEPVFEQIENTANPSRCPVKMFECYLSKSPQNLNQRMDVFYLQPECSSSTDSPVWYTSTSLDRNTLENMLVRVLLVKDIYDKDNYELDEDTD

SEQ ID NO: 830774 - protein, 1377 aa, Homo sapiens; identical to SEQ ID NO: 830757

SEQ ID NO: 830775 - protein, 1057 aa, Homo sapiens
MDTSSVGGLELTDQTPVLLGSTAMATSLTNVGNSFSGPANPLVSRSNKFQNSSVEDDDDVVFIEPVQPPPPSVPVVADQRTITFTSSKNEELQGNDSKITPSSKELASQKGSVSETIVIDDEEDMETNQGQEKNSSNFIERRPPETKNRTNDVDFSTSSFSRSKVNAGMGNSGITTEPDSEIQIANVTTLETGVSSVNDGQLENTDGRDMNLMITHVTSLQNTNLGDVSNGLQSSNFGVNIQTYTPSLTSQTKTGVGPFNPGRMNVAGDVFQNGESATHHNPDSWISQSASFPRNQKQPGVDSLSPVASLPKQIFQPSVQQQPTKPVKVTCANCKKPLQKGQTAYQRKGSAHLFCSTTCLSSFSHKPAPKKLCVMCKKDITTMKGTIVAQVDSSESFQEFCSTSCLSLYEDKQNPTKGALNKSRCTICGKLTEIRHEVSFKNMTHKLCSDHCFNRYRMANGLIMNCCEQCGEYLPSKGAGNNVLVIDGQQKRFCCQSCVSEYKQVGSHPSFLKEVRDHMQDSFLMQPEKYGKLTTCTGCRTQCRFFDMTQCIGPNGYMEPYCSTACMNSHKTKYAKSQSLGIICHFCKRNSLPQYQATMPDGKLYNFCNSSCVAKFQALSMQSSPNGQFVAPSDIQLKCNYCKNSFCSKPEILEWENKVHQFCSKTCSDDYKKLHCIVTYCEYCQEEKTLHETVNFSGVKRPFCSEGCKLLYKQDFARRLGLRCVTCNYCSQLCKKGATKELDGVVRDFCSEDCCKKFQDWYYKAARCDCCKSQGTLKERVQWRGEMKHFCDQHCLLRFYCQQNEPNMTTQKGPENLHYDQGCQTSRTKMTGSAPPPSPTPNKEMKNKAVLCKPLTMTKATYCKPHMQTKSCQTDDTWRTEYVPVPIPVPVYIPVPMHMYSQNIPVPTTVPVPVPVPVFLPAPLDSSEKIPAAIEELKSKVSSDALDTELLTMTDMMSEDEGKTETTNINSVIIETDIIGSDLLKNSDPETQSSMPDVPYEPDLDIEIDFPRAAEELDMENEFLLPPVFGEEYEEQPRPRSKKKVHSLNSLYNNISL

SEQ ID NO: 830776 - protein, 804 aa, Homo sapiens
MDTSSVGGLELTDQTPVLLGSTAMATSLTNVGNSFSGPANPLVSRSNKFQNSSVEDDDDVVFIEPVQPPPPSVPVVADQRTITFTSSKNEELQGNDSKITPSSKELASQKGSVSETIVIDDEEDMETNQGQEKNSSNFIERRPPETKNRTNDVDFSTSSFSRSKVNAGMGNSGITTEPDSEIQIANVTTLETGVSSVNDGQLENTDGRDMNLMITHVTSLQNTNLGDVSNGLQSSNFGVNIQTYTPSLTSQTKTGVGPFNPGRMNVAGDVFQNGESATHHNPDSWISQSASFPRNQKQPGVDSLSPVASLPKQIFQPSVQQQPTKPVKVTCANCKKPLQKGQTAYQRKGSAHLFCSTTCLSSFSHKPAPKKLCVMCKKDITTMKGTIVAQVDSSESFQEFCSTSCLSLYEDKQNPTKGALNKSRCTICGKLTEIRHEVSFKNMTHKLCSDHCFNRYRMANGLIMNCCEQCGEYLPSKGAGNNVLVIDGQQKRFCCQSCVSEYKQVGSHPSFLKEVRDHMQDSFLMQPEKYGKLTTCTGCRTQCRFFDMTQCIGPNGYMEPYCSTACMNSHKTKYAKSQSLGIICHFCKRNSLPQYQATMPDGKLYNFCNSSCVAKFQALSMQSSPNGQFVAPSDIQLKCNYCKNSFCSKPEILEWENKVHQFCSKTCSDDYKKLHCIVTYCEYCQEEKTLHETVNFSGVKRPFCSEGCKLLYKQDFARRLGLRCVTCNYCSQLCKKGATKELDGVVRDFCSEDCCKKFQDWYYKASNSFITAATLTSLKKRCSCYHYKSGNSFILKMYTLKAQP

SEQ ID NO: 830777 - protein, 115 aa, Homo sapiens
MQPLAVKVSFQMLTRVFPEPTCSVSISLVPLALTFQILGSHKTSEQAVGFLLQLLGFVTRVLGLLGQPPAVPRGCLRHRWMPCVGREDCEHLQWDQLPQPGREAQALFHPGLWWG

SEQ ID NO: 830778 - protein, 416 aa, Homo sapiens
MDEADRRLLRRCRLRLVEELQVDQLWDALLSRELFRPHMIEDIQRAGSGSRRDQARQLIIDLETRGSQALPLFISCLEDTGQDMLASFLRTNRQAAKLSKPTLENLTPVVLRPEIRKPEVLRPETPRPVDIGSGGFGDVGALESLRGNADLAYILSMEPCGHCLIINNVNFCRESGLRTRTGSNIDCEKLRRRFSSLHFMVEVKGDLTAKKMVLALLELAQQDHGALDCCVVVILSHGCQASHLQFPGAVYGTDGCPVSVEKIVNIFNGTSCPSLGGKPKLFFIQACGGEQKDHGFEVASTSPEDESPGSNPEPDATPFQEGLRTFDQLDAISSLPTPSDIFVSYSTFPGFVSWRDPKSGSWYVETLDDIFEQWAHSEDLQSLLLRVANAVSVKGIYKQMPGCFNFLRKKLFFKTS

SEQ ID NO: 830779 - protein, 266 aa, Homo sapiens
MDEADRRLLRRCRLRLVEELQVDQLWDALLSRELFRPHMIEDIQRAGSGSRRDQARQLIIDLETRGSQALPLFISCLEDTGQDMLASFLRTNRQAAKLSKPTLENLTPVVLRPEIRKPEVLRPETPRPVDIGSGGFGDVEQKDHGFEVASTSPEDESPGSNPEPDATPFQEGLRTFDQLDAISSLPTPSDIFVSYSTFPGFVSWRDPKSGSWYVETLDDIFEQWAHSEDLQSLLLRVANAVSVKGIYKQMPGCFNFLRKKLFFKTS

SEQ ID NO: 830780 - protein, 386 aa, Homo sapiens
MDEADRRLLRRCRLRLVEELQVDQLWDALLSRELFRPHMIEDIQRAGSGSRRDQARQLIIDLETRGSQALPLFISCLEDTGQDMLASFLRTNRQAAKLSKPTLENLTPVVLRPEIRKPEVLRPETPRPVDIGSGGFGDVGALESLRGNADLAYILSMEPCGHCLIINNVNFCRESGLRTRTGSNIDCEKLRRRFSSLHFMVEVKGDLTAKASHLQFPGAVYGTDGCPVSVEKIVNIFNGTSCPSLGGKPKLFFIQACGGEQKDHGFEVASTSPEDESPGSNPEPDATPFQEGLRTFDQLDAISSLPTPSDIFVSYSTFPGFVSWRDPKSGSWYVETLDDIFEQWAHSEDLQSLLLRVANAVSVKGIYKQMPGCFNFLRKKLFFKTS

SEQ ID NO: 830781 - protein, 144 aa, Homo sapiens
KSLGFPPRLFFIQACGGEQKDHGFEVASTSPEDESPGSNPEPDATPFQEGLRTFDQLDAISSLPTPSDIFVSYSTFPGFVSWRDPKSGSWYVETLDDIFEQWAHSEDLQSLLLRVANAVSVKGIYKQMPGCFNFLRKKLFFKTS

SEQ ID NO: 830782 - protein, 316 aa, Homo sapiens
MDEADRRLLRRCRLRLVEELQVDQLWDALLSRELFRPHMIEDIQRAGSGSRRDQARQLIIDLETRGSQALPLFISCLEDTGQDMLASFLRTNRQAAKLSKPTLENLTPVVLRPEIRKPEVLRPETPRPVDIGSGGFGDVGALESLRGNADLAYILSMEPCGHCLIINNVNFCRESGLRTRTGSNIDCEKLRRRFSSLHFMVEVKGDLTAKKMVLALLELAQQDHGALDCCVVVILSHGCQPSTLQVPRGLPTATEEEFPLWVGAKTDSWNNLQMENQLVPGLGTASPRTIINPYEHNWCSEKRTSTGIITDGQTSP

SEQ ID NO: 830783 - protein, 65 aa, Homo sapiens
MPGGDPATPCARGQTPFSSRLSRLSSRERGESPGLRGSLCWQAYILSMEPCGHCLIINNVNFCRE

SEQ ID NO: 830784 - protein, 266 aa, Homo sapiens; identical to SEQ ID NO: 830779

SEQ ID NO: 830785 - protein, 266 aa, Homo sapiens; identical to SEQ ID NO: 830779

SEQ ID NO: 830786 - protein, 356 aa, Homo sapiens
MDEADRRLLRRCRLRLVEELQVDQLWDALLSRELFRPHMIEDIQRAGSGSRRDQARQLIIDLETRGSQALPLFISCLEDTGQDMLASFLRTNRQAAKLSKPTLENLTPVVLRPEIRKPEVLRPETPRPVDIGSGGFGDVGALESLRGNADLAYILSMEPCGHCLIINNVNFCRESGLRTRTGSNIDCEKLRRRFSSLHFMVEVKGDLTAKKMVLALLELAQQDHGALDCCVVVILSHGCQASHLQFPGAVYGTDGCPVSVEKIVNIFNGTSCPSLGGKPKLFFIQACGGGFVSWRDPKSGSWYVETLDDIFEQWAHSEDLQSLLLRVANAVSVKGIYKQMPGCFNFLRKKLFFKTS

SEQ ID NO: 830787 - protein, 217 aa, Homo sapiens
MDEADRRLLRRCRLRLVEELQVDQLWDALLSRELFRPHMIEDIQRAGSGSRRDQARQLIIDLETRGSQALPLFISCLEDTGQDMLASFLRTNRQAAKLSKPTLENLTPVVLRPEIRKPEVLRPETPRPVDIGSGGFGDVGALESLRGNADLAYILSMEPCGHCLIINNVNFCRESGLRTRTGSNIDCEKLRRRFSSLHFMVEVKGDLTAKRGWLLDC

SEQ ID NO: 830788 - protein, 486 aa, Homo sapiens
MAFLDNPTIILAHIRQSHVTSDDTGMCEMVLIDHDVDLEKIHPPSMPGDSGSEIQGSNGETQGYVYAQSVDITSSWDFGIRRRSNTAQRLERLRKERQNQIKCKNIQWKERNSKQSAQELKSLFEKKSLKEKPPISGKQSILSVRLEQCPLQLNNPFNEYSKFDGKGHVGTTATKKIDVYLPLHSSQDRLLPMTVVTMASARVQDLIGLICWQYTSEGREPKLNDNVSAYCLHIAEDDGEVDTDFPPLDSNEPIHKFGFSTLALVEKYSSPGLTSKESLFVRINAAHGFSLIQVDNTKVTMKEILLKAVKRRKGSQKVSGSRADGVFEEDSQIDIATVQDMLSSHHYKSFKVSMIHRLRFTTDVQLGISGDKVEIDPVTNQKASTKFWIKQKPISIDSDLLCACDLAEEKSPSHAIFKLTYLSNHDYKHLYFESDAATVNEIVLKVNYILESRASTARADYFAQKQRKLNRRTSFSFQKEKKSGQQ

SEQ ID NO: 830789 - protein, 74 aa, Homo sapiens
YFAGNLASGGAAGATSLCFVYPLDFARTRLAADVGKSGTEREFRGLGDCLAAVTLASSLNLFRSSEPACQGQVP

SEQ ID NO: 830790 - protein, 94 aa, Homo sapiens
DFNTLLRLYQLFTSMWCFLNVKFAVSDFLPSSCPFDLPGPQYRLEKQSEPNVAVDLDSTLESQSAWEFCLVRENSTLAASLHARFVLYTRRVQA

SEQ ID NO: 830791 - protein, 522 aa, Homo sapiens
MAFLDNPTIILAHIRQSHVTSDDTGMCEMVLIDHDVDLEKIHPPSMPGDSGSEIQGSNGETQGYVYAQSVDITSSWDFGIRRRSNTAQRLERLRKERQNQIKCKNIQWKERNSKQSAQELKSLFEKKSLKEKPPISGKQSILSVRLEQCPLQLNNPFNEYSKFDGKGHVGTTATKKIDVYLPLHSSQDRLLPMTVVTMASARVQDLIGLICWQYTSEGREPKLNDNVSAYCLHIAEDDGEVDTDFPPLDSNEPIHKFGFSTLALVEKYSSPGLTSKESLFVRINAAHGFSLIQVDNTKVTMKEILLKAVKRRKGSQKVSGPQYRLEKQSEPNVAVDLDSTLESQSAWEFCLVRENSSRADGVFEEDSQIDIATVQDMLSSHHYKSFKVSMIHRLRFTTDVQLGISGDKVEIDPVTNQKASTKFWIKQKPISIDSDLLCACDLAEEKSPSHAIFKLTYLSNHDYKHLYFESDAATVNEIVLKVNYILESRASTARADYFAQKQRKLNRRTSFSFQKEKKSGQQ

SEQ ID NO: 830792 - protein, 522 aa, Homo sapiens; identical to SEQ ID NO: 830791

SEQ ID NO: 830793 - protein, 522 aa, Homo sapiens; identical to SEQ ID NO: 830791

SEQ ID NO: 830794 - protein, 330 aa, Homo sapiens
MTVVTMASARVQDLIGLICWQYTSEGREPKLNDNVSAYCLHIAEDDGEVDTDFPPLDSNEPIHKFGFSTLALVEKYSSPGLTSKESLFVRINAAHGFSLIQVDNTKVTMKEILLKAVKRRKGSQKVSGPQYRLEKQSEPNVAVDLDSTLESQSAWEFCLVRENSSRADGVFEEDSQIDIATVQDMLSSHHYKSFKVSMIHRLRFTTDVQLGISGDKVEIDPVTNQKASTKFWIKQKPISIDSDLLCACDLAEEKSPSHAIFKLTYLSNHDYKHLYFESDAATVNEIVLKVNYILESRASTARADYFAQKQRKLNRRTSFSFQKEKKSGQQ

SEQ ID NO: 830795 - protein, 522 aa, Homo sapiens; identical to SEQ ID NO: 830791

SEQ ID NO: 830796 - protein, 544 aa, Homo sapiens
MVEEVQKHSVHTLVFRSLKRTHDMFVADNGKPVPLDEESHKRKMAIKLRNEYGPVLHMPTSKENLKEKGPQNATDSYVHKQYPANQGQEVEYFVAGTHPYPPGPGVALTADTKIQRMPSESAAQSLAVALPLQTKADETQELKSLFEKKSLKEKPPISGKQSILSVRLEQCPLQLNNPFNEYSKFDGKGHVGTTATKKIDVYLPLHSSQDRLLPMTVVTMASARVQDLIGLICWQYTSEGREPKLNDNVSAYCLHIAEDDGEVDTDFPPLDSNEPIHKFGFSTLALVEKYSSPGLTSKESLFVRINAAHGFSLIQVDNTKVTMKEILLKAVKRRKGSQKVSGPQYRLEKQSEPNVAVDLDSTLESQSAWEFCLVRENSSRADGVFEEDSQIDIATVQDMLSSHHYKSFKVSMIHRLRFTTDVQLGISGDKVEIDPVTNQKASTKFWIKQKPISIDSDLLCACDLAEEKSPSHAIFKLTYLSNHDYKHLYFESDAATVNEIVLKVNYILESRASTARADYFAQKQRKLNRRTSFSFQKEKKSGQQ

SEQ ID NO: 830797 - protein, 374 aa, Homo sapiens
ARYEARCYFNEYSKFDGKGHVGTTATKKIDVYLPLHSSQDRLLPMTVVTMASARVQDLIGLICWQYTSEGREPKLNDNVSAYCLHIAEDDGEVDTDFPPLDSNEPIHKFGFSTLALVEKYSSPGLTSKESLFVRINAAHGFSLIQVDNTKVTMKEILLKAVKRRKGSQKVSGPQYRLEKQSEPNVAVDLDSTLESQSAWEFCLVRENSSRADGVFEEDSQIDIATVQDMLSSHHYKSFKVSMIHRLRFTTDVQLGISGDKVEIDPVTNQKASTKFWIKQKPISIDSDLLCACDLAEEKSPSHAIFKLTYLSNHDYKHLYFESDAATVNEIVLKVNYILESRASTARADYFAQKQRKLNRRTSFSFQKEKKSGQQ

SEQ ID NO: 830798 - protein, 275 aa, Homo sapiens
  misc_feature (13)..(13): Xaa can be any naturally occurring amino acid
  misc_feature (15)..(16): Xaa can be any naturally occurring amino acid
GGGGEGRRGRETXRXXAVHLTNEPIHKFGFSTLALVEKYSSPGLTSKESLFVRINAAHGFSLIQVDNTKVTMKEILLKAVKRRPNVAVDLDSTLESQSAWEFCLVRENSSRADGVFEEDSQIDIATVQDMLSSHHYKSFKVSMIHRLRFTTDVQLGISGDKVEIDPVTNQKASTKFWIKQKPISIDSDLLCACDLAEEKSPSHAIFKLTYLSNHDYKHLYFESDAATVNEIVLKVNYILESRASTARADYFAQKQRKLNRRTSFSFQKEKKSGQQ

SEQ ID NO: 830799 - protein, 146 aa, Homo sapiens [sequence omitted]

SEQ ID NO: 830800 - protein, 172 aa, Homo sapiens
MAFLDNPTIILAHIRQSHVTSDDTGMCEMVLIDHDVDLEKIHPPSMPGDSGSEIQGSNGETQGYVYAQSVDITSSWDFGIRRRSNTAQRLERLRKERQNQIKCKNIQWKERNSKQSAQELKSLFEKKSLKEKPPISGKQSILSVRLEQCPLQLNNPFNEYSKFDGKVSKNET

SEQ ID NO: 830801 - protein, 77 aa, Homo sapiens
  misc_feature (1)..(1): Xaa can be any naturally occurring amino acid
  misc_feature (21)..(22): Xaa can be any naturally occurring amino acid
  misc_feature (34)..(34): Xaa can be any naturally occurring amino acid
  misc_feature (76)..(76): Xaa can be any naturally occurring amino acid
XPPPFPPPPPPPPPPPPPPPXXPPSPPPPPPPPXPPPPPPPPPPPPPPPPPPPPPPPPPPPPPLPLPPPPPPPPPXP

SEQ ID NO: 830802 - protein, 522 aa, Homo sapiens; identical to SEQ ID NO: 830791

SEQ ID NO: 830803 - protein, 494 aa, Homo sapiens
MAFLDNPTIILAHIRQSHVTSDDTGMCEMVLIDHDVDLEKIHPPSMPGDSGSEIQGSNAQRLERLRKERQNQIKCKNIQWKERNSKQSAQELKSLFEKKSLKEKPPISGKQSILSVRLEQCPLQLNNPFNEYSKFDGKGHVGTTATKKIDVYLPLHSSQDRLLPMTVVTMASARVQDLIGLICWQYTSEGREPKLNDNVSAYCLHIAEDDGEVDTDFPPLDSNEPIHKFGFSTLALVEKYSSPGLTSKESLFVRINAAHGFSLIQVDNTKVTMKEILLKAVKRRKGSQKVSGPQYRLEKQSEPNVAVDLDSTLESQSAWEFCLVRENSSRADGVFEEDSQIDIATVQDMLSSHHYKSFKVSMIHRLRFTTDVQLGISGDKVEIDPVTNQKASTKFWIKQKPISIDSDLLCACDLAEEKSPSHAIFKLTYLSNHDYKHLYFESDAATVNEIVLKVNYILESRASTARADYFAQKQRKLNRRTSFSFQKEKKSGQQ

SEQ ID NO: 830804 - protein, 330 aa, Homo sapiens; identical to SEQ ID NO: 830794

SEQ ID NO: 830805 - protein, 359 aa, Homo sapiens
MAFLDNPTIILAHIRQSHVTSDDTGMCEMVLIDHDVDLEKIHPPSMPGDSGSEIQGSNGETQGYVYAQSVDITSSWDFGIRRRSNTANEPIHKFGFSTLALVEKYSSPGLTSKESLFVRINAAHGFSLIQVDNTKVTMKEILLKAVKRRKGSQKVSGPQYRLEKQSEPNVAVDLDSTLESQSAWEFCLVRENSSRADGVFEEDSQIDIATVQDMLSSHHYKSFKVSMIHRLRFTTDVQLGISGDKVEIDPVTNQKASTKFWIKQKPISIDSDLLCACDLAEEKSPSHAIFKLTYLSNHDYKHLYFESDAATVNEIVLKVNYILESRASTARADYFAQKQRKLNRRTSFSFQKEKKSGQQ

SEQ ID NO: 830806 - protein, 323 aa, Homo sapiens
MAFLDNPTIILAHIRQSHVTSDDTGMCEMVLIDHDVDLEKIHPPSMPGDSGSEIQGSNGETQGYVYAQSVDITSSWDFGIRRRSNTAQRLERLRKERQNQIKCKNIQWKERNSKQSAQELKSLFEKKSLKEKPPISGKQSILSVRLEQCPLQLNNPFNEYSKFDGKGHVGTTATKKIDVYLPLHSSQDRLLPMTVVTMASARVQDLIGLICWQYTSEGREPKLNDNVSAYCLHIAEDDGEVDTDFPPLDSNEPIHKFGFSTLALVEKYSSPGLTSKESLFVRINAAHGFSLIQVDNTKVTMKEILLKAVKRRKGSQKVSGACD

SEQ ID NO: 830807 - protein, 106 aa, Homo sapiens
MAFLDNPTIILAHIRQSHVTSDDTGMCEMVLIDHDVDLEKIHPPSMPGDSGSEIQGSNGETQGYVYAQSVDITSSWDFGIRRRSNTAQRLERLRKERQSSSPGVDA

SEQ ID NO: 830808 - protein, 533 aa, Homo sapiens
MAPKPKPWVQTEGPEKKKGRQAGREEDPFRSTAEALKAIPAEKRIIRVDPTCPLSSNPGTQVYEDYNCTLNQTNIENNNNKFYIIQLLQDSNRFFTCWNRWGRVGEVGQSKINHFTRLEDAKKDFEKKFREKTKNNWAERDHFVSHPGKYTLIEVQAEDEAQEAVVKVDRGPVRTVTKRVQPCSLDPATQKLITNIFSKEMFKNTMALMDLDVKKMPLGKLSKQQIARGFEALEALEEALKGPTDGGQSLEELSSHFYTVIPHNFGHSQPPPINSPELLQAKKDMLLVLADIELAQALQAVSEQEKTVEEVPHPLDRDYQLLKCQLQLLDSGAPEYKVIQTYLEQTGSNHRCPTLQHIWKVNQEGEEDRFQAHSKLGNRKLLWHGTNMAVVAAILTSGLRIMPHSGGRVGKGIYFASENSKSAGYVIGMKCGAHHVGYMFLGEVALGREHHINTDNPSLKSPPPGFDSVIARGHTEPDPTQDTELELDGQQVVVPQGQPVPCPEFSSSTFSQSEYLIYQESQCRLRYLLEVHL

SEQ ID NO: 830809 - protein, 533 aa, Homo sapiens; identical to SEQ ID NO: 830808

SEQ ID NO: 830810 - protein, 599 aa, Homo sapiens
MAPKPKPWVQTEGPEKKKGRQAGREEDPFRSTAEALKAIPAEKRIIRVDPTCPLSSNPGTQVYEDYNCTLNQTNIENNNNKFYIIQLLQDSNRFFTCWNRWGRVGEVGQSKINHFTRLEDAKKDFEKKFREKTKNNWAERDHFVSHPGKYTLIEVQAEDEAQEAVVKVRWPRKVGRPWTEGGDSLESSRWLGSATAQLRSLSHRTPLWPQAGWSLSGVSPAPLLLPTCALYLQVDRGPVRTVTKRVQPCSLDPATQKLITNIFSKEMFKNTMALMDLDVKKMPLGKLSKQQIARGFEALEALEEALKGPTDGGQSLEELSSHFYTVIPHNFGHSQPPPINSPELLQAKKDMLLVLADIELAQALQAVSEQEKTVEEVPHPLDRDYQLLKCQLQLLDSGAPEYKVIQTYLEQTGSNHRCPTLQHIWKVNQEGEEDRFQAHSKLGNRKLLWHGTNMAVVAAILTSGLRIMPHSGGRVGKGIYFASENSKSAGYVIGMKCGAHHVGYMFLGEVALGREHHINTDNPSLKSPPPGFDSVIARGHTEPDPTQDTELELDGQQVVVPQGQPVPCPEFSSSTFSQSEYLIYQESQCRLRYLLEVHL

SEQ ID NO: 830811 - protein, 599 aa, Homo sapiens
MAPKPKPWVQTEGPEKKKGRQAGREEDPFRSTAEALKAIPAEKRIIRVDPTCPLSSNPGTQVYEDYNCTLNQTNIENNNNKFYIIQLLQDSNRFFTCWNRWGRVGEVGQSKINHFTRLEDAKKDFEKKFREKTKNNWAERDHFVSHPGKYTLIEVQAEDEAQEAVVKVRWPRKVGRPWTEGGDSLESSRWLGSATAQLRSLSHRTPLWPQAGWSLSGVTPAPLLLPTCALYLQVDRGPVRTVTKRVQPCSLDPATQKLITNIFSKEMFKNTMALMDLDVKKMPLGKLSKQQIARGFEALEALEEALKGPTDGGQSLEELSSHFYTVIPHNFGHSQPPPINSPELLQAKKDMLLVLADIELAQALQAVSEQEKTVEEVPHPLDRDYQLLKCQLQLLDSGAPEYKVIQTYLEQTGSNHRCPTLQHIWKVNQEGEEDRFQAHSKLGNRKLLWHGTNMAVVAAILTSGLRIMPHSGGRVGKGIYFASENSKSAGYVIGMKCGAHHVGYMFLGEVALGREHHINTDNPSLKSPPPGFDSVIARGHTEPDPTQDTELELDGQQVVVPQGQPVPCPEFSSSTFSQSEYLIYQESQCRLRYLLEVHL

SEQ ID NO: 830812 - protein, 436 aa, Homo sapiens
MAPKPKPWVQTEGPEKKKGRQAGREEDPFRSTAEALKAIPAEKRIIRVDPTCPLSSNPGTQVYEDYNCTLNQTNIENNNNKFYIIQLLQDSNRFFTCWNRWGRVGEVGQSKINHFTRLEDAKKDFEKKFREKTKNNWAERDHFVSHPGKYTLIEVQAEDEAQEAVVKVDRGPVRTVTKRVQPCSLDPATQKLITNIFSKEMFKNTMALMDLDVKKMPLGKLSKQQIARGFEALEALEEALKGPTDGGQSLEELSSHFYTVIPHNFGHSQPPPINSPELLQAKKDMLLVLADIELAQALQAVSEQEKTVEEVPHPLDRDYQLLKCQLQLLDSGAPEYKVIQTYLEQTGSNHRCPTLQHIWKVNQEGEEDRFQAHSKLGNRKLLWHGTSLCPAQSSAAPHSPRASTSSTRRASVACATCWRSTSECPPCPPGSCKAGL

SEQ ID NO: 830813 - protein, 342 aa, Homo sapiens
TRGSTTRRRCAKNTMALMDLDVKKMPLGKLSKQQIARGFEALEALEEALKGPTDGGQSLEELSSHFYTVIPHNFGHSQPPPINSPELLQAKKDMLLVLADIELAQALQAVSEQEKTVEEVPHPLDRDYQLLKCQLQLLDSGAPEYKVIQTYLEQTGSNHRCPTLQHIWKVNQEGEEDRFQAHSKLGNRKLLWHGTNMAVVAAILTSGLRIMPHSGGRVGKGIYFASENSKSAGYVIGMKCGAHHVGYMFLGEVALGREHHINTDNPSLKSPPPGFDSVIARGHTEPDPTQDTELELDGQQVVVPQGQPVPCPEFSSSTFSQSEYLIYQESQCRLRYLLEVHL

SEQ ID NO: 830814 - protein, 146 aa, Homo sapiens
PFLAGAAKPEGITSQQRGAPQVSRRQAELPTGASLCLAVIGMKCGAHHVGYMFLGEVALGREHHINTDNPSLKSPPPGFDSVIARGHTEPDPTQDTELELDGQQVVVPQGQPVPCPEFSSSTFSQSEYLIYQESQCRLRYLLEVHL

SEQ ID NO: 830815 - protein, 533 aa, Homo sapiens; identical to SEQ ID NO: 830808

SEQ ID NO: 830816 - protein, 562 aa, Homo sapiens
MAPKPKPWVQTEGPEKKKGRQAGREEDPFRSTAEALKAIPAEKRIIRVDPTCPLSSNPGTQVYEDYNCTLNQTNIENNNNKFYIIQLLQDSNRFFTCWNRWGRVGEVGQSKINHFTRLEDAKKDFEKKFREKTKNNWAERDHFVSHPGKYTLIEVQAEDEAQEAVVKVDRGPVRTVTKRVQPCSLDPATQKLITNIFSKEMFKNTMALMDLGEGGEAGRVAGASGWQGCGAESPHSPVPLDVKKMPLGKLSKQQIARGFEALEALEEALKGPTDGGQSLEELSSHFYTVIPHNFGHSQPPPINSPELLQAKKDMLLVLADIELAQALQAVSEQEKTVEEVPHPLDRDYQLLKCQLQLLDSGAPEYKVIQTYLEQTGSNHRCPTLQHIWKVNQEGEEDRFQAHSKLGNRKLLWHGTNMAVVAAILTSGLRIMPHSGGRVGKGIYFASENSKSAGYVIGMKCGAHHVGYMFLGEVALGREHHINTDNPSLKSPPPGFDSVIARGHTEPDPTQDTELELDGQQVVVPQGQPVPCPEFSSSTFSQSEYLIYQESQCRLRYLLEVHL

SEQ ID NO: 830817 - protein, 533 aa, Homo sapiens; identical to SEQ ID NO: 830808

SEQ ID NO: 830818 - protein, 541 aa, Homo sapiens
RVASPHRLAPPSVAAASARWPCPPAAAAAARARRSRGPARSERGPVLPFARPRAPLFSAPPPPPCWVWSSSGAAAAAAGEGGRERSPPRPGAQGAGPPRSPASPRQPPSRPAVQPASQRASKQASTGPRPRLQLRPERARRRRARPQPAAEPTRGSAMAEQTYSWAYSLVDSSQVSTFLISILLIVYGSFRSLNMDFENQDKEKDSNSSSGSFNGNSTNNSIQTIDSTQALFLPIGASVSLLVMFFFFDSVQVVFTICTAVLATIAFAFLLLPMCQYLTRPCSPQNKISFGCCGRFTAAELLSFSLSVMLVLIWVLTGHWLLMDALAMGLCVAMIAFVRLPSLKVSCLLLSGLLIYDVFWVFFSAYIFNSNVMVKVATQPADNPLDVLSRKLHLGPNVGRDVPRLSLPGKLVFPSSTGSHFSMLGIGDIVMPGLLLCFVLRYDNYKKQASGDSCGAPGPANISGRMQKVSYFHCTLIGYFVGLLTATVASRIHRAAQPALLYLVPFTLLPLLTMAYLKGDLRRMWSEPFHSKSSSSRFLEV

SEQ ID NO: 830819 - protein, 347 aa, Homo sapiens
MDFENQDKEKDSNSSSGSFNGNSTNNSIQTIDSTQALFLPIGASVSLLVMFFFFDSVQVVFTICTAVLATIAFAFLLLPMCQYLTRPCSPQNKISFGCCGRFTAAELLSFSLSVMLVLIWVLTGHWLLMDALAMGLCVAMIAFVRLPSLKVSCLLLSGLLIYDVFWVFFSAYIFNSNVMVKVATQPADNPLDVLSRKLHLGPNVGRDVPRLSLPGKLVFPSSTGSHFSMLGIGDIVMPGLLLCFVLRYDNYKKQASGDSCGAPGPANISGRMQKVSYFHCTLIGYFVGLLTATVASRIHRAAQPALLYLVPFTLLPLLTMAYLKGDLRRMWSEPFHSKSSSSRFLEV

SEQ ID NO: 830820 - protein, 347 aa, Homo sapiens; identical to SEQ ID NO: 830819

SEQ ID NO: 830821 - protein, 541 aa, Homo sapiens; identical to SEQ ID NO: 830818

SEQ ID NO: 830822 - protein, 192 aa, Homo sapiens
RVASPHRLAPPSVAAASARWPCPPAAAAAARARRSRGPARSERGPVLPFARPRAPLFSAPPPPPCWVWSSSGAAAAAAGEGGRERSPPRPGAQGAGPPRSPASPRQPPSRPAVQPASQRASKQASTGPRPRLQLRPERARRRRARPQPAAEPTRGSAMAEQTYSWAYSLVDSSQVSTFLISILLIVYGSFSP

SEQ ID NO: 830823 - protein, 541 aa, Homo sapiens; identical to SEQ ID NO: 830818

SEQ ID NO: 830824 - protein, 347 aa, Homo sapiens; identical to SEQ ID NO: 830819

SEQ ID NO: 830825 - protein, 400 aa, Homo sapiens
VEQPPQLRGRRLALGQGAQGELVRAYSLVDSSQVSTFLISILLIVYGSFRSLNMDFENQDKEKDSNSSSGSFNGNSTNNSIQTIDSTQALFLPIGASVSLLVMFFFFDSVQVVFTICTAVLATIAFAFLLLPMCQYLTRPCSPQNKISFGCCGRFTAAELLSFSLSVMLVLIWVLTGHWLLMDALAMGLCVAMIAFVRLPSLKVSCLLLSGLLIYDVFWVFFSAYIFNSNVMVKVATQPADNPLDVLSRKLHLGPNVGRDVPRLSLPGKLVFPSSTGSHFSMLGIGDIVMPGLLLCFVLRYDNYKKQASGDSCGAPGPANISGRMQKVSYFHCTLIGYFVGLLTATVASRIHRAAQPALLYLVPFTLLPLLTMAYLKGDLRRMWSEPFHSKSSSSRFLEV

SEQ ID NO: 830826 - protein, 533 aa, Homo sapiens
RVASPHRLAPPSVAAASARWPCPPAAAAAARARRSRGPARSERGPVLPFARPRAPLFSAPPPPPCWVWSSSGAAAAAAGEGGRERSPPRPGAQGAGPPRSPASPRQPPSRPAVQPASQRASKQASTGPRPRLQLRPERARRRRARPQPAAEPTRGSAMAEQTYSWAYSLVDSSQVSTFLISILLIVYGSFRSLNMDFENQDKEKDSNSSSGSFNGNSTNNSIQTIDSTQALFLPIGASVSLLVMFFFFDSVQVVFTICTAVLATIAFAFLLLPMCQYLTRPCSPQNKISFGCCGRFTAAELLSFSLSVMLVLIWVLTGHWLLMDALAMGLCVAMIAFVRLLLSGLLIYDVFWVFFSAYIFNSNVMVKVATQPADNPLDVLSRKLHLGPNVGRDVPRLSLPGKLVFPSSTGSHFSMLGIGDIVMPGLLLCFVLRYDNYKKQASGDSCGAPGPANISGRMQKVSYFHCTLIGYFVGLLTATVASRIHRAAQPALLYLVPFTLLPLLTMAYLKGDLRRMWSEPFHSKSSSSRFLEV

SEQ ID NO: 830827 - protein, 229 aa, Homo sapiens
QRFSQIIQSTKALQSQHSETLLLRARRADAESRLLPTPSVKGISPTRQVFFSAYIFNSNVMVKVATQPADNPLDVLSRKLHLGPNVGRDVPRLSLPGKLVFPSSTGSHFSMLGIGDIVMPGLLLCFVLRYDNYKKQASGDSCGAPGPANISGRMQKVSYFHCTLIGYFVGLLTATVASRIHRAAQPALLYLVPFTLLPLLTMAYLKGDLRRMWSEPFHSKSSSSRFLEV

SEQ ID NO: 830828 - protein, 541 aa, Homo sapiens; identical to SEQ ID NO: 830818

SEQ ID NO: 830829 - protein, 541 aa, Homo sapiens; identical to SEQ ID NO: 830818

SEQ ID NO: 830830 - protein, 305 aa, Homo sapiens
QPARFSGLQPAPPPASPPPGAMAGCAARAPPGSEARLSLATFLLGASVLALPLLTRAGLQGRTGLALYVAGLNALLLLLYRPPRYQIAIRACFLGFVFGCGTLLSFSQSSWSHFGWYMCSLSLFHYSEYLVTAVNNPKSLSLDSFLLNHSLEYTVAALSSWLEFTLENIFWPELKQITWLSVTGLLMVVFGECLRKAAMFTAGSNFNHVVQNEKSDTHTLVTSGVYAWFRHPSYVGWFYWSIGTQVMLCNPICGVSYALTVWRFFRDRTEEEEISLIHFFGEEYLEYKKRVPTGLPFIKGVKVDL

SEQ ID NO: 830831 - protein, 305 aa, Homo sapiens; identical to SEQ ID NO: 830830

SEQ ID NO: 830832 - protein, 305 aa, Homo sapiens; identical to SEQ ID NO: 830830

SEQ ID NO: 830833 - protein, 305 aa, Homo sapiens; identical to SEQ ID NO: 830830

SEQ ID NO: 830834 - protein, 305 aa, Homo sapiens; identical to SEQ ID NO: 830830

SEQ ID NO: 830835 - protein, 119 aa, Homo sapiens [sequence omitted]

SEQ ID NO: 830836 - protein, 305 aa, Homo sapiens; identical to SEQ ID NO: 830830

SEQ ID NO: 830837 - protein, 305 aa, Homo sapiens; identical to SEQ ID NO: 830830

SEQ ID NO: 830838 - protein, 305 aa, Homo sapiens; identical to SEQ ID NO: 830830

SEQ ID NO: 830839 - protein, 305 aa, Homo sapiens; identical to SEQ ID NO: 830830

SEQ ID NO: 830840 - protein, 305 aa, Homo sapiens; identical to SEQ ID NO: 830830

SEQ ID NO: 830841 - protein, 305 aa, Homo sapiens; identical to SEQ ID NO: 830830

SEQ ID NO: 830842 - protein, 305 aa, Homo sapiens; identical to SEQ ID NO: 830830

SEQ ID NO: 830843 - protein, 305 aa, Homo sapiens; identical to SEQ ID NO: 830830

SEQ ID NO: 830844 - protein, 188 aa, Homo sapiens
MCSLSLFHYSEYLVTAVNNPKSLSLDSFLLNHSLEYTVAALSSWLEFTLENIFWPELKQITWLSVTGLLMVVFGECLRKAAMFTAGSNFNHVVQNEKSDTHTLVTSGVYAWFRHPSYVGWFYWSIGTQVMLCNPICGVSYALTVWRFFRDRTEEEEISLIHFFGEEYLEYKKRVPTGLPFIKGVKVDL

SEQ ID NO: 830845 - protein, 119 aa, Homo sapiens [sequence omitted]

SEQ ID NO: 830846 - protein, 287 aa, Homo sapiens
QPARFSGLQPAPPPASPPPGAMAGCAARAPPGSEARLSLATFLLGASVLALPLLTRAGLQGRTGLALYVAGLNALLLLLYRPPRYQIAIRACFLGFVFGCGTLLSFSQSSWSHFGWYMCSLSLFHYSEYLVTAVNNPKSLSLDSFLLNHSLEYTVAALSSWLEFTLENIFWPELKQITWLSVTGLLMVVFGECLRKAAMFTAGSNFNHVVQNDPSYVGWFYWSIGTQVMLCNPICGVSYALTVWRFFRDRTEEEEISLIHFFGEEYLEYKKRVPTGLPFIKGVKVDL

SEQ ID NO: 830847 - protein, 305 aa, Homo sapiens; identical to SEQ ID NO: 830830

SEQ ID NO: 830848 - protein, 305 aa, Homo sapiens; identical to SEQ ID NO: 830830

SEQ ID NO: 830849 - protein, 305 aa, Homo sapiens; identical to SEQ ID NO: 830830

SEQ ID NO: 830850 - protein, 127 aa, Homo sapiens
METWSGPARAQGYALMCVLMWLESEGVRKGPSGSCLRSCRLTFGGAEKAAWKSDLGTSLGIIRAHSEDRTEQDQRVVWFGVSAVGGGDGRQETDFGLDSYKELVMGSKAFQQRDIPSGCEVACCGRA

SEQ ID NO: 830851 - protein, 401 aa, Homo sapiens
MSCAGRAGPARLAALALLTCSLWPARADNASQEYYTALINVTVQEPGRGAPLTFRIDRGRYGLDSPKAEVRGQVLAPLPLHGVADHLGCDPQTRFFVPPNIKQWIALLQRGNCTFKEKISRAAFHNAVAVVIYNNKSKEEPVTMTHPGTGDIIAVMITELRGKDILSYLENFSRGSLVFVSISFIVLMIISSAWLIFYFIQKIRYTNARDRNQRRLGDAAKKAISKLTTRTVKKGDKETDPDFDHCAVCIESYKQNDVVRILPCKHVFHKSCVDPWLSEHCTCPMCKLNILKALGIVPNLPCTDNVAFDMERLTRTQAVNRRSALGDLAGDNSLGLEPLRTSGISPLPQDGELTPRTGEINIAVTKEWFIIASFGLLSALTLCYMIIRATASLNANEVEWF

SEQ ID NO: 830852 - protein, 264 aa, Homo sapiens
DAWATTRPDILSYLEKNISVQMTIAVGTRMPPKNFSRGSLVFVSISFIVLMIISSAWLIFYFIQKIRYTNARDRNQRRLGDAAKKAISKLTTRTVKKGDKETDPDFDHCAVCIESYKQNDVVRILPCKHVFHKSCVDPWLSEHCTCPMCKLNILKALGIVPNLPCTDNVAFDMERLTRTQAVNRRSALGDLAGDNSLGLEPLRTSGISPLPQDGELTPRTGEINIAVTKEWFIIASFGLLSALTLCYMIIRATASLNANEVEWF

SEQ ID NO: 830853 - protein, 196 aa, Homo sapiens
GDPINGNRRRLGDAAKKAISKLTTRTVKKGDKETDPDFDHCAVCIESYKQNDVVRILPCKHVFHKSCVDPWLSEHCTCPMCKLNILKALGIVPNLPCTDNVAFDMERLTRTQAVNRRSALGDLAGDNSLGLEPLRTSGISPLPQDGELTPRTGEINIAVTKEWFIIASFGLLSALTLCYMIIRATASLNANEVEWF

SEQ ID NO: 830854 - protein, 419 aa, Homo sapiens
MSCAGRAGPARLAALALLTCSLWPARADNASQEYYTALINVTVQEPGRGAPLTFRIDRGRYGLDSPKAEVRGQVLAPLPLHGVADHLGCDPQTRFFVPPNIKQWIALLQRGNCTFKEKISRAAFHNAVAVVIYNNKSKEEPVTMTHPGTGDIIAVMITELRGKDILSYLEKNISVQMTIAVGTRMPPKNFSRGSLVFVSISFIVLMIISSAWLIFYFIQKIRYTNARDRNQRRLGDAAKKAISKLTTRTVKKGDKETDPDFDHCAVCIESYKQNDVVRILPCKHVFHKSCVDPWLSEHCTCPMCKLNILKALGIVPNLPCTDNVAFDMERLTRTQAVNRRSALGDLAGDNSLGLEPLRTSGISPLPQDGELTPRTGEINIAVTKEWFIIASFGLLSALTLCYMIIRATASLNANEVEWF

SEQ ID NO: 830855 - protein, 419 aa, Homo sapiens; identical to SEQ ID NO: 830854

SEQ ID NO: 830856 - protein, 384 aa, Homo sapiens
MSCAGRAGPARLAALALLTCSLWPARADNASQEYYTALINVTVQEPGRGAPLTFRIDRGRYGLDSPKAEVRGQVLAPLPLHGVADHLGCDPQTRFFVPPNIKQWIALLQRGNCTFKEKISRAAFHNAVAVVIYNNKSKEEPVTMTHPGTGDIIAVMITELRGKDILSYLEKNISVQMTIAVGTRMPPKNFSRGSLVFVSISFIVLMIISSAWLIFYFIQKIRYTNARDRNQRRLGDAAKKAISKLTTRTVKKGDKETDPDFDHCAVCIESYKQNDVVRILPCKHVFHKSCVDPWLSEHCTCPMCKLNILKALGIVPNLPCTDNVAFDMERLTRTQAVNRRSALGDLAGDNSLGLEPLRTSGISPLPQDGELTPRTGEINIAVTR

SEQ ID NO: 830857 - protein, 262 aa, Homo sapiens
MSCAGRAGPARLAALALLTCSLWPARADNASQEYYTALINVTVQEPGRGAPLTFRIDRGRYGLDSPKAEVRGQVLAPLPLHGVADHLGCDPQTRFFVPPNIKQWIALLQRGNCTFKEKISRAAFHNAVAVVIYNNKSKEEPVTMTHPGTGDIIAVMITELRGKDILSYLEKNISVQMTIAVGTRMPPKNFSRGSLVFVSISFIVLMIISSAWLIFYFIQKIRYTNARDRNQRRLGDAAKKAISKLTTRMGSSLREQEKSTLQ

SEQ ID NO: 830858 - protein, 285 aa, Homo sapiens
AGTGRRFMDPEPGPRAAAAAGGTMSCAGRAGPARLAALALLTCSLWPARADNASQEYYTALINVTVQEPGRGAPLTFRIDRGRYGLDSPKAEVRGQVLAPLPLHGVADHLGCDPQTRFFVPPNIKQWIALLQRGNCTFKEKISRAAFHNAVAVVIYNNKSKEEPVTMTHPGTGDIIAVMITELRGKDILSYLEKNISVQMTIAVGTRMPPKNFSRGSLVFVSISFIVLMIISSAWLIFYFIQKIRYTNARDRNQRRLGDAAKKAISKLTTRMGSSLREQEKSTLQ

SEQ ID NO: 830859 - protein, 127 aa, Homo sapiens; identical to SEQ ID NO: 830850

SEQ ID NO: 830860 - protein, 276 aa, Homo sapiens
MSCAGRAGPARLAALALLTCSLWPARADNASQEYYTALINVTVQEPGRGAPLTFRIDRGRYGLDSPKAEVRGQVLAPLPLHGVADHLGCDPQTRFFVPPNIKQWIALLQRGNCTFKEKISRAAFHNAVAVVIYNNKSKEEPVTMTHPGTGDIIAVMITELRGKDILSYLEKNISVQMTIAVGTRMPPKNFSRGSLVFVSISFIVLMIISSAWLIFYSGISPLPQDGELTPRTGEINIAVTKEWFIIASFGLLSALTLCYMIIRATASLNANEVEWF

SEQ ID NO: 830861 - protein, 127 aa, Homo sapiens; identical to SEQ ID NO: 830850

SEQ ID NO: 830862 - protein, 419 aa, Homo sapiens; identical to SEQ ID NO: 830854

SEQ ID NO: 830863 - protein, 419 aa, Homo sapiens; identical to SEQ ID NO: 830854

SEQ ID NO: 830864 - protein, 406 aa, Homo sapiens
MSCAGRAGPARLAALALLTCSLWPARADNASQEYYTALINVTVQEPGRGAPLTFRIDRGRYGLDSPKAEVRGQVLAPLPLHGVADHLGCDPQTRFFVPPNIKQWIALLQRGNCTFKEKISRAAFHNAVAVVIYNNKSKEEPVTMTHPGTGDIIAVMITELRGKDILSYLEKNISVQMTIAVGTRMPPKNFSRGSLVFVSISFIVLMIISSAWLIFYFIQKIRYTNARDRNQRRLGDAAKKAISKLTTRTVKKGDKETDPDFDHCAVCIESYKQNDVVRILPCKHVFHKSCVDPWLSEHCTCPMCKLNILKALGIVPNLPCTDNVAFDMERLTRTQAVNRRSALGDLAGDNSLGLEPLRTSGISPLPQDGELTPRTGEINIAVTKEWFIIASFATSGPIRYPIKILE

SEQ ID NO: 830865 - protein, 262 aa, Homo sapiens; identical to SEQ ID NO: 830857

SEQ ID NO: 830866 - protein, 251 aa, Homo sapiens [sequence omitted]

SEQ ID NO: 830867 - protein, 141 aa, Homo sapiens
MGFQKFSPFLALSILVLLQAGSLHAAPFRSALESSPADPATLSEDEARLLLAALVQDYVQMKASELEQEQEREGSSLDSPRSKRCGNLSTCMLGTYTQDFNKFHTFPQTAIGVGAPGKKRDMSSDLERDHRPHVSMPQNAN

SEQ ID NO: 830868 - protein, 172 aa, Homo sapiens
SGWTPPPPLPPPLIQATSRQVSPEILAQRGVMGFQKFSPFLALSILVLLQAGSLHAAPFRSALESSPADPATLSEDEARLLLAALVQDYVQMKASELEQEQEREGSSLDSPRSKRCGNLSTCMLGTYTQDFNKFHTFPQTAIGVGAPGKKRDMSSDLERDHRPHVSMPQNAN

SEQ ID NO: 830869 - protein, 104 aa, Homo sapiens
LERPPTTTKFAAASPATLSEDEARLLLAALVQDYVQMKASELEQEQEREGSRIIAQKRACDTATCVTHRLAGLLSRSGGVVKNNFVPTNVGSKAFGRRRRDLQA

SEQ ID NO: 830870 - protein, 139 aa, Homo sapiens
MGFQKFSPFLALSILVLLQAGSLHAAPFRSALESSPADPATLSEDEARLLLAALVQDYVQMKASELEQEQEREGSSLDSPRSKRCGNLSTCMLGTYTQDFNKFHTFPQTAIGVGAPGKKRDMSSDLERDHRNHCPEESL

SEQ ID NO: 830871 - protein, 117 aa, Homo sapiens
LERPPTTTKFAAASPATLSEDEARLLLAALVQDYVQMKASELEQEQEREGSSLDSPRSKRCGNLSTCMLGTYTQDFNKFHTFPQTAIGVGAPGKKRDMSSDLERDHRPHVSMPQNAN

SEQ ID NO: 830872 - protein, 120 aa, Homo sapiens
MMPSRTNLATGIPSSKVKYSRLSSTDDGYIDLQFKKTPPKIPYKAIALATVLFLIGAFLIIIGSLLLSGYISKGGADRAVPVLIIGILVFLPGFYHLRIAYYASKGYRGYSYDDIPDFDD

SEQ ID NO: 830873 - protein, 120 aa, Homo sapiens; identical to SEQ ID NO: 830872

SEQ ID NO: 830874 - protein, 120 aa, Homo sapiens; identical to SEQ ID NO: 830872

SEQ ID NO: 830875 - protein, 183 aa, Homo sapiens
MQPWALPTVGELWVCGRPGAALRWSLVLSPRLEPSGVISAHCNLHLLASSDSSASASRLCQRVMMPSRTNLATGIPSSKVKYSRLSSTDDGYIDLQFKKTPPKIPYKAIALATVLFLIGAFLIIIGSLLLSGYISKGGADRAVPVLIIGILVFLPGFYHLRIAYYASKGYRGYSYDDIPDFDD

SEQ ID NO: 830876 - protein, 120 aa, Homo sapiens; identical to SEQ ID NO: 830872

SEQ ID NO: 830877 - protein, 134 aa, Homo sapiens
GRPRRTDQKLCQRVMMPSRTNLATGIPSSKVKYSRLSSTDDGYIDLQFKKTPPKIPYKAIALATVLFLIGAFLIIIGSLLLSGYISKGGADRAVPVLIIGILVFLPGFYHLRIAYYASKGYRGYSYDDIPDFDD

SEQ ID NO: 830878 - protein, 120 aa, Homo sapiens; identical to SEQ ID NO: 830872

SEQ ID NO: 830879 - protein, 115 aa, Homo sapiens
LLRSLIRGFLKLKVNVAIVCAGEPGIFHFKKTPPKIPYKAIALATVLFLIGAFLIIIGSLLLSGYISKGGADRAVPVLIIGILVFLPGFYHLRIAYYASKGYRGYSYDDIPDFDD

SEQ ID NO: 830880 - protein, 120 aa, Homo sapiens; identical to SEQ ID NO: 830872

SEQ ID NO: 830881 - protein, 120 aa, Homo sapiens; identical to SEQ ID NO: 830872

SEQ ID NO: 830882 - protein, 120 aa, Homo sapiens; identical to SEQ ID NO: 830872

SEQ ID NO: 830883 - protein, 120 aa, Homo sapiens; identical to SEQ ID NO: 830872

SEQ ID NO: 830884 - protein, 81 aa, Homo sapiens
GGVLPSSSWDIARVRSTPSQPLLWSPVGRGAAILVARGVSRIRRVSLPSRWRGLCPCSVTAALGKRSAPKTLWLQLRLPIL

SEQ ID NO: 830885 - protein, 120 aa, Homo sapiens; identical to SEQ ID NO: 830872

SEQ ID NO: 830886 - protein, 120 aa, Homo sapiens; identical to SEQ ID NO: 830872

SEQ ID NO: 830887 - protein, 247 aa, Homo sapiens
IRGLATGVVAVAVWTSGSIRDEVLMLVTGIDGVSRNLLLSRLMSRVRDRVSSDQKFNAAESFSVVAYCALMRHRLLPSFPSKHRFRYLVIITDLMITVSQVSFIFLFSMVTRFMHERVRRIILCQRVMMPSRTNLATGIPSSKVKYSRLSSTDDGYIDLQFKKTPPKIPYKAIALATVLFLIGAFLIIIGSLLLSGYISKGGADRAVPVLIIGILVFLPGFYHLRIAYYASKGYRGYSYDDIPDFDD

SEQ ID NO: 830888 - protein, 178 aa, Homo sapiens
MMPSRTNLATGIPSSKVKYSRLSSTDDGYIDLQGKCRRELTRLTGCVSVKLQEDLPDGDFANCPWGLEGATRRKLSSETLSAIIAEEGRGRFKKTPPKIPYKAIALATVLFLIGAFLIIIGSLLLSGYISKGGADRAVPVLIIGILVFLPGFYHLRIAYYASKGYRGYSYDDIPDFDD

SEQ ID NO: 830889 - protein, 150 aa, Homo sapiens
MQPWALPTVGELWVCGRPGAALRRKTFQMEILLTVLGDYEGATRRKLSSETLSAIIAEEGRGRFKKTPPKIPYKAIALATVLFLIGAFLIIIGSLLLSGYISKGGADRAVPVLIIGILVFLPGFYHLRIAYYASKGYRGYSYDDIPDFDD

SEQ ID NO: 830890 - protein, 120 aa, Homo sapiens; identical to SEQ ID NO: 830872

SEQ ID NO: 830891 - protein, 183 aa, Homo sapiens; identical to SEQ ID NO: 830875

SEQ ID NO: 830892 - protein, 121 aa, Homo sapiens
CQNNYMNKHLHTRTPRHCFPPPTPSLPDVPDKTTFNSSSLLELDLSYNQLQKIPPVNTNLENLYLQGNRINEFSISSFCTVVDVVNFSKLQVLRLDGNEIKRSAMPADAPLCLRLASLIEI

SEQ ID NO: 830893 - protein, 376 aa, Homo sapiens
MQWTSLLLLAGLFSLSQAQYEDDPHWWFHYLRSQQSTYYDPYDPYPYETYEPYPYGVDEGPAYTYGSPSPPDPRDCPQECDCPPNFPTAMYCDNRNLKYLPFVPSRMKYVYFQNNQITSIQEGVFDNATGLLWIALHGNQITSDKVGRKVFSKLRHLERLYLDHNNLTRMPGPLPRSLRELHLDHNQISRVPNNALEGLENLTALYLQHNEIQEVGSSMRGLRSLILLDLSYNHLRKVPDGLPSALEQLYMEHNNVYTVPDSYFRGAPKLLYVRLSHNSLTNNGLASNTFNSSSLLELDLSYNQLQKIPPVNTNLENLYLQGNRINEFSISSFCTVVDVVNFSKLQVLRLDGNEIKRSAMPADAPLCLRLASLIEI

SEQ ID NO: 830894 - protein, 376 aa, Homo sapiens; identical to SEQ ID NO: 830893

SEQ ID NO: 830895 - protein, 376 aa, Homo sapiens; identical to SEQ ID NO: 830893

SEQ ID NO: 830896 - protein, 85 aa, Homo sapiens
MQWTSLLLLAGLFSLSQAQYEDDPHWWFHYLRSQQSTYYDPYDPYPYETYEPYPYGVDEGPAYTYGSPSPPDPRDCPQECDCPPN

SEQ ID NO: 830897 - protein, 376 aa, Homo sapiens; identical to SEQ ID NO: 830893

SEQ ID NO: 830898 - protein, 376 aa, Homo sapiens; identical to SEQ ID NO: 830893

SEQ ID NO: 830899 - protein, 376 aa, Homo sapiens; identical to SEQ ID NO: 830893

SEQ ID NO: 830900 - protein, 376 aa, Homo sapiens; identical to SEQ ID NO: 830893

SEQ ID NO: 830901 - protein, 311 aa, Homo sapiens
MSKSESPKEPKQLRKLFIGGLSFETTNESLRSHFEQWGTLMDCVVMRDPNTKCSRGFGFVTYATVEEVDAAMNARPHKVDGRVVESKRAVSREDSQRPGAHLTVKKIFVGGIKEDTEEHHLRDYFEQYGKIEVIEIMTDRGSGKKRGFAFVTFDDHDSVDKIVIQKYHTVNGHNCEVRKALSKQEMASASSSQRGRSGSGNFGGGRGGGFGGNDNFGRGGNFSGRGGFGGSRGGGGYGGSGDGYNGFGNDGSNFGGGGSYNDFGNYNNQSSNFGPMKGGNFGGRSSGPYGGGGQYFAKHETRWLWRFQQQQ

SEQ ID NO: 830902 - protein, 223 aa, Homo sapiens
MATPQSIFIFAICILMITELILASKSYYDILGVPKSASERQIKKAFHKLAMKYHPDKNKSPDAEAKFREIAEAYETLSDANRRKEYDTLGHSAFTSGKGQRGSGSSFEQSFNFNFDDLFKDFGFFGQNQNTGSKKRFENHFQTRQDGGSSRQRHHFQEFSFGGGLFDDMFEDMEKMFSFSGFDSTNQHTVQTENRFHGSSKHCRTVTQRRGNMVTTYTDCSGQ

SEQ ID NO: 830903 - protein, 223 aa, Homo sapiens; identical to SEQ ID NO: 830902

SEQ ID NO: 830904 - protein, 223 aa, Homo sapiens; identical to SEQ ID NO: 830902

SEQ ID NO: 830905 - protein, 83 aa, Homo sapiens
PEVAHSPSSNNSFPRARRAPGSRGEAEANGEAFRVGLLRWWRQRLPPACEELAERGLGAGGEGGALGRCTTEIRVRASSGRPR

SEQ ID NO: 830906 - protein, 223 aa, Homo sapiens; identical to SEQ ID NO: 830902

SEQ ID NO: 830907 - protein, 223 aa, Homo sapiens; identical to SEQ ID NO: 830902

SEQ ID NO: 830908 - protein, 223 aa, Homo sapiens; identical to SEQ ID NO: 830902

SEQ ID NO: 830909 - protein, 622 aa, Homo sapiens
QPPVHTLRVFVSCQAPWSHPPAQLSPVGADAMTLTLSVLICLGLSVGPRTCVQAGTLPKPTLWAEPASVIARGKPVTLWCQGPLETEEYRLDKEGLPWARKRQNPLEPGAKAKFHIPSTVYDSAGRYRCYYETPAGWSEPSDPLELVATGFYAEPTLLALPSPVVASGGNVTLQCDTLDGLLTFVLVEEEQKLPRTLYSQKLPKGPSQALFPVGPVTPSCRWRFRCYYYYRKNPQVWSNPSDLLEILVPGVSRKPSLLIPQGSVVARGGSLTLQCRSDVGYDIFVLYKEGEHDLVQGSGQQPQAGLSQANFTLGPVSRSHGGQYRCYGAHNLSPRWSAPSDPLDILIAGLIPDIPALSVQPGPKVASGENVTLLCQSWHQIDTFFLTKEGAAHPPLCLKSKYQSYRHQAEFSMSPVTSAQGGTYRCYSAIRSYPYLLSSPSYPQELVVSGPSGDPSLSPTGSTPTPAGPEDQPLTPTGLDPQSGLGRHLGVVTGVSVAFVLLLFLLLFLLLRHRHQSKHRTSAHFYRPAGAAGPEPKDQGLQKRASPVADIQEEILNAAVKDTQPKDGVEMDARAAASEAPQDVTYAQLHSLTLRREATEPPPSQEREPPAEPSIYAPLAIH

SEQ ID NO: 830910 - protein, 699 aa, Homo sapiens
QPPVHTLRVFVSCQAPWSHPPAQLSPVGADAMTLTLSVLICLGLSVGPRTCVQAGTLPKPTLWAEPASVIARGKPVTLWCQGPLETEEYRLDKEGLPWARKRQNPLEPGAKAKFHIPSTVYDSAGRYRCYYETPAGWSEPSDPLELVATGFYAEPTLLALPSPVVASGGNVTLQCDTLDGLLTFVLVEEEQKLPRTLYSQKLPKGPSQALFPVGPVTPSCRWRFRCYYYYRKNPQVWSNPSDLLEILVPGVSRKPSLLIPQGSVVARGGSLTLQCRSDVGYDIFVLYKEGEHDLVQGSGQQPQAGLSQANFTLGPVSRSHGGQYRCYGAHNLSPRWSAPSDPLDILIAGLIPDIPALSVQPGPKVASGENVTLLCQSWHQIDTFFLTKEGAAHPPLCLKSKYQSYRHQAEFSMSPVTSAQGGTYRCYSAIRSYPYLLSSPSYPQELVVSGPSGDPSLSPTGSTPTPAGPEDQPLTPTGLDPQSGLGRHLGVVTGVSVAFVLLLFLLLFLLLRHRHQSKHRTSAHFYRPAGAAGPEPKDQGLQKRASPVADIQEEILNAAVKDTQPKDGVEMDARSPHDEDPQAVTYAPVKHSRPRREMASPPSPLSGEFLDTKDRQAEEDRQMDTERVLSSPGPQASPPPPRSFLSLSPVQAAASEAPQDVTYAQLHSLTLRREATEPPPSQEREPPAEPSIYAPLAIH

SEQ ID NO: 830911 - protein, 468 aa, Homo sapiens
WYGPNVSYDQDLLEIPGPGVSRKPSLLIPQGSVVARGGSLTLQCRSDVGYDIFVLYKEGEHDLVQGSGQQPQAGLSQANFTLGPVSRSHGGQYRCYGAHNLSPRWSAPSDPLDILIAGLIPDIPALSVQPGPKVASGENVTLLCQSWHQIDTFFLTKEGAAHPPLCLKSKYQSYRHQAEFSMSPVTSAQGGTYRCYSAIRSYPYLLSSPSYPQELVVSGPSGDPSLSPTGSTPTPAGPEDQPLTPTGLDPQSGLGRHLGVVTGVSVAFVLLLFLLLFLLLRHRHQSKHRTSAHFYRPAGAAGPEPKDQGLQKRASPVADIQEEILNAAVKDTQPKDGVEMDARSPHDEDPQAVTYAPVKHSRPRREMASPPSPLSGEFLDTKDRQAEEDRQMDTERVLSSPGPQASPPPPRSFLSLSPVQAAASEAPQDVTYAQLHSLTLRREATEPPPSQEREPPAEPSIYAPLAIH

SEQ ID NO: 830912 - protein, 599 aa, Homo sapiens
QPPVHTLRVFVSCQAPWSHPPAQLSPVGADAMTLTLSVLICLGLSVGPRTCVQAGTLPKPTLWAEPASVIARGKPVTLWCQGPLETEEYRLDKEGLPWARKRQNPLEPGAKAKFHIPSTVYDSAGRYRCYYETPAGWSEPSDPLELVATGVSRKPSLLIPQGSVVARGGSLTLQCRSDVGYDIFVLYKEGEHDLVQGSGQQPQAGLSQANFTLGPVSRSHGGQYRCYGAHNLSPRWSAPSDPLDILIAGLIPDIPALSVQPGPKVASGENVTLLCQSWHQIDTFFLTKEGAAHPPLCLKSKYQSYRHQAEFSMSPVTSAQGGTYRCYSAIRSYPYLLSSPSYPQELVVSGPSGDPSLSPTGSTPTPAGPEDQPLTPTGLDPQSGLGRHLGVVTGVSVAFVLLLFLLLFLLLRHRHQSKHRTSAHFYRPAGAAGPEPKDQGLQKRASPVADIQEEILNAAVKDTQPKDGVEMDARSPHDEDPQAVTYAPVKHSRPRREMASPPSPLSGEFLDTKDRQAEEDRQMDTERVLSSPGPQASPPPPRSFLSLSPVQAAASEAPQDVTYAQLHSLTLRREATEPPPSQEREPPAEPSIYAPLAIH

SEQ ID NO: 830913 - protein, 168 aa, Homo sapiens
MKERPSSRLHTEGAHINDVIPIPNVITLQGLGRHLGVVTGVSVAFVLLLFLLLFLLLRHRHQSKHRTSAHFYRPAGAAGPEPKDQGLQKRASPVADIQEEILNAAVKDTQPKDGVEMDARAAASEAPQDVTYAQLHSLTLRREATEPPPSQEREPPAEPSIYAPLAIH

SEQ ID NO: 830914 - protein, 321 aa, Homo sapiens
MFIKGRAPRAPPRERRRATRGGLRQVVAPPRALGSTSRPHFRRASVCRRRCRKSGGLLAASRKMAAAAVNGAAGFSSSGPAATSGAVLQAATGMYEQLKGEWNRKSPNLSKCGEELGRLKLVLLELNFLPTTGTKLTKQQLILARDILEIGAQWSILRKDIPSFERYMAQLKCYYFDYKEQLPESAYMHQLLGLNLLFLLSQNRVAEFHTELERLPAKDIQTNVYIKHPVSLEQYLMEGSYNKVFLAKGNIPAESYTFFIDILLDTIRDEIAGCIEKAYEKILFTEATRILFFNTPKKMTDYAKKRGWVRGPNNYYSMAQR

SEQ ID NO: 830915 - protein, 239 aa, Homo sapiens
KNYGWVRRSVCNRPRNRKSPNLSKCGEELGRLKLVLLELNFLPTTGTKLTKQQLILARDILEIGAQWSILRKDIPSFERYMAQLKCYYFDYKEQLPESAYMHQLLGLNLLFLLSQNRVAEFHTELERLPAKDIQTNVYIKHPVSLEQYLMEGSYNKVFLAKGNIPAESYTFFIDILLDTIRDEIAGCIEKAYEKILFTEATRILFFNTPKKMTDYAKKRGWVLGPNNYYSIPQEDPLDR

SEQ ID NO: 830916 - protein, 168 aa, Homo sapiens
MFIKGRAPRAPPRERRRATRGGLRQVVAPPRALGSTSRPHFRRASVCRRRCRKSGGLLAASRKMAAAAVNGAAGFSSSGPAATSGAVLQAATGMYEQLKGEWNRKSPNLSKCGEELGRLKLVLLELNFLPTTTTVLLSQQQKPEDTTIPSTELAKQVIEYARQLEMIV

SEQ ID NO: 830917 - protein, 364 aa, Homo sapiens
MFIKGRAPRAPPRERRRATRGGLRQVVAPPRALGSTSRPHFRRASVCRRRCRKSGGLLAASRKMAAAAVNGAAGFSSSGPAATSGAVLQAATGMYEQLKGEWNRKSPNLSKCGEELGRLKLVLLELNFLPTTGTKLTKQQLILARDILEIGAQWSILRKDIPSFERYMAQLKCYYFDYKEQLPESAYMHQLLGLNLLFLLSQNRVAEFHTELERLPAKDIQTNVYIKHPVSLEQYLMEGSYNKVFLAKGNIPAESYTFFIDILLDTIRDEIAGCIEKAYEKILFTEATRILFFNTPKKMTDYAKKRGWVLGPNNYYSFAQPAAEAGRHHHSLHRTGQTGHRVCPAAGDDRLSPPGTGWGRARVI

SEQ ID NO: 830918 - protein, 364 aa, Homo sapiens; identical to SEQ ID NO: 830917

SEQ ID NO: 830919 - protein, 280 aa, Homo sapiens
DLEDPIRDGMYEQLKGEWNRKSPNLSKCGEELGRLKLVLLELNFLPTTGTKLTKQQLILARDILEIGAQWSILRKDIPSFERYMAQLKCYYFDYKEQLPESAYMHQLLGLNLLFLLSQNRVAEFHTELERLPAKDIQTNVYIKHPVSLEQYLMEGSYNKVFLAKGNIPAESYTFFIDILLDTIRDEIAGCIEKAYEKILFTEATRILFFNTPKKMTDYAKKRGWVLGPNNYYSFAQPAAEAGRHHHSLHRTGQTGHRVCPAAGDDRLSPPGTGWGRARVI

SEQ ID NO: 830920 - protein, 197 aa, Homo sapiens
MAQLKCYYFDYKEQLPESAYMHQLLGLNLLFLLSQNRVAEFHTELERLPAKDIQTNVYIKHPVSLEQYLMEGSYNKVFLAKGNIPAESYTFFIDILLDTIRDEIAGCIEKAYEKILFTEATRILFFNTPKKMTDYAKKRGWVLGPNNYYSFAQPAAEAGRHHHSLHRTGQTGHRVCPAAGDDRLSPPGTGWGRARVI

SEQ ID NO: 830921 - protein, 346 aa, Homo sapiens
MFIKGRAPRAPPRERRRATRGGLRQVVAPPRALGSTSRPHFRRASVCRRRCRKSGGLLAASRKMAAAAVNGAAGFSSSGPAATSGAVLQAATGMYEQLKGEWLVLLELNFLPTTGTKLTKQQLILARDILEIGAQWSILRKDIPSFERYMAQLKCYYFDYKEQLPESAYMHQLLGLNLLFLLSQNRVAEFHTELERLPAKDIQTNVYIKHPVSLEQYLMEGSYNKVFLAKGNIPAESYTFFIDILLDTIRDEIAGCIEKAYEKILFTEATRILFFNTPKKMTDYAKKRGWVLGPNNYYSFAQPAAEAGRHHHSLHRTGQTGHRVCPAAGDDRLSPPGTGWGRARVI

SEQ ID NO: 830922 - protein, 346 aa, Homo sapiens
MFIKGRAPRAPPRERRRATRGGLRQVVAPPRALGSTSRPHFRRASVCRRRCRKSGGLLAASRKMAAAAVNGAAGFSSSGPAATSGAVLQAATGMYEQLKGEWNRKSPNLSKCGEELGRLKLVLLELNFLPTTGTKLTKQQLILARDILEIGAQWSILRKDIPSFERYMAQLKCYYFDYKEQLPESAYMHQLLGLNLLFLLSQNRVAEFHTELERLPAKDIQTNVYIKHPVSLEQYLMEGSYNKVFLAKGNIPAESYTFFIDILLDTIRDEIAGCIEKAYEKILFTEATRILFFNTPKKMTDYAKKRGWVLGPNNYYSFAQPAAEAGRHHHSLHELFKTVTLQGFAQ

SEQ ID NO: 830923 - protein, 213 aa, Homo sapiens
YYYYIRGRSIPSFERYMAQLKCYYFDYKEQLPESAYMHQLLGLNLLFLLSQNRVAEFHTELERLPAKDIQTNVYIKHPVSLEQYLMEGSYNKVFLAKGNIPAESYTFFIDILLDTIRDEIAGCIEKAYEKILFTEATRILFFNTPKKMTDYAKKRGWVLGPNNYYSFAQPAAEAGRHHHSLHRTGQTGHRVCPAAGDDRLSPPGTGWGRARVI

SEQ ID NO: 830924 - protein, 177 aa, Homo sapiens
MHQLLGLNLLFLLSQNRVAEFHTELERLPAKDIQTNVYIKHPVSLEQYLMEGSYNKVFLAKGNIPAESYTFFIDILLDTIRDEIAGCIEKAYEKILFTEATRILFFNTPKKMTDYAKKRGWVLGPNNYYSFAQPAAEAGRHHHSLHRTGQTGHRVCPAAGDDRLSPPGTGWGRARVI

SEQ ID NO: 830925 - protein, 326 aa, Homo sapiens
MFIKGRAPRAPPRERRRATRGGLRQVVAPPRALGSTSRPHFRRASVCRRRCRKSGGLLAASRKMAAAAVNGAAGFSSSGPAATSGAVLQAATGMYEQLKGEWNRKSPNLSKCGEELGRLKLVLLELNFLPTTGTKLTKQQLILARDILEIGAQWSILRKDIPSFERYMAQLKCYYFDYKEQLPESAYMHQLLGLNLLFLLSQNRVAEFHTELERLPAKDIQTNVYIKHPVSLEQYLMEGSYNKVFLAKGNIPAESYTFFIDILLDTIRDEIAGCIEKAYEKILFTEATRILFFNTPKKMTDYAKKRGWVLGPNNYYSIPQEDPLDR

SEQ ID NO: 830926 - protein, 297 aa, Homo sapiens
MFIKGRAPRAPPRERRRATRGGLRQVVAPPRALGSTSRPHFRRASVCRRRCRKSGGLLAASRKMAAAAVNGAAGFSSSGPAATSGAVLQAATGMYEQLKGEWNRKSPNLSKCGEELGRLKLVLLELNFLPTTGTKLTKQQLILARDILEIGAQWSILRKDIPSFERYMAQLKCYYFDYKEQLPESAYMHQLLGLNLLFLLSQNRVAEFHTELERLPAKDIQTNVYIKHPVSLEQYLMEGSYNKVFLAKGNIPAESYTFFIDILLDTISELGLVMGLWITALISPPLAVDMCGHVCQT

SEQ ID NO: 830927 - protein, 318 aa, Homo sapiens
MFIKGRAPRAPPRERRRATRGGLRQVVAPPRALGSTSRPHFRRASVCRRRCRKSGGLLAASRKMAAAAVNGAAGFSSSGPAATSGAVLQAATGMYEQLKGEWNRKSPNLSKCGEELGRLKLVLLELNFLPTTGTKLTKQQLILARDILEIGAQWSILRKDIPSFERYMAQLKCYYFDYKEQLPESAYMHQLLGLNLLFLLSQNRVAEFHTELERLPAKDIQTNVYIKHPVSLEQYLMEGSYNKVFLAKGNIPAESYTFFIDILLDTIRDEIAGCIEKAYEKILFTEATRILFFNTPKKMTDYAKKRGWYPGGIPTLDI

SEQ ID NO: 830928 - protein, 297 aa, Homo sapiens; identical to SEQ ID NO: 830926

SEQ ID NO: 830929 - protein, 163 aa, Homo sapiens
MFIKGRAPRAPPRERRRATRGGLRQVVAPPRALGSTSRPHFRRASVCRRRCRKSGGLLAASRKMAAAAVNGAAGFSSSGPAATSGAVLQAATGMYEQLKGEWNRKSPNLSKCGEELGRLKLVLLELNFLPTTGTKLTKQQLILARECHWGWLGVIIWGSWQEW

SEQ ID NO: 830930 - protein, 72 aa, Homo sapiens
EVIQRIRPDYAKKRGWVLGPNNYYSFAQPAAEAGRHHHSLHRTGQTGHRVCPAAGDDRLSPPGTGWGRARVI

SEQ ID NO: 830931 - protein, 364 aa, Homo sapiens; identical to SEQ ID NO: 830917

SEQ ID NO: 830932 - protein, 279 aa, Homo sapiens
MFIKGRAPRAPPRERRRATRGGLRQVVAPPRALGSTSRPHFRRASVCRRRCRKSGGLLAASRKMAAAAVNGAAGFSSSGPAATSGAVLQAATGMYEQLKGEWNRKSPNLSKCGEELGRLKLVLLELNFLPTTGTKLTKQQLILARDILEIGAQWSILRKDIPSFERYMAQLKCYYFDYKEQLPESAYMHQLLGLNLLFLLSQNRVAEFHTELERLPAKDIQTNVYIKHPVSLEQYLMEGSYNKVFLAKGNIPAESYTFFIDILLDTIRCVAGPGPVEFG

SEQ ID NO: 830933 - protein, 108 aa, Homo sapiens
MPLPGCFSIASASAEQYLMEGSYNKVFLAKGNIPAESYTFFIDILLDTIRDEIAGCIEKAYEKILFTEATRILFFNTPKKMTDYAKKRGWVLGPNNYYSMAQRWGPSR

SEQ ID NO: 830934 - protein, 364 aa, Homo sapiens; identical to SEQ ID NO: 830917

SEQ ID NO: 830935 - protein, 197 aa, Homo sapiens; identical to SEQ ID NO: 830920

SEQ ID NO: 830936 - protein, 265 aa, Homo sapiens
KLVRGLGCKSAEGGEELGRLKLVLLELNFLPTTGTKLTKQQLILARDILEIGAQWSILRKDIPSFERYMAQLKCYYFDYKEQLPESAYMHQLLGLNLLFLLSQNRVAEFHTELERLPAKDIQTNVYIKHPVSLEQYLMEGSYNKVFLAKGNIPAESYTFFIDILLDTIRDEIAGCIEKAYEKILFTEATRILFFNTPKKMTDYAKKRGWVLGPNNYYSFAQPAAEAGRHHHSLHRTGQTGHRVCPAAGDDRLSPPGTGWGRARVI

SEQ ID NO: 830937 - protein, 314 aa, Homo sapiens
MFIKGRAPRAPPRERRRATRGGLRQVVAPPRALGSTSRPHFRRASVCRRRCRKSGGLLAASRKMAAAAVNGAAGFSSSGPAATSGAVLQAATGMYEQLKGEWNRKSPNLSKCGEELGRLKLKCYYFDYKEQLPESAYMHQLLGLNLLFLLSQNRVAEFHTELERLPAKDIQTNVYIKHPVSLEQYLMEGSYNKVFLAKGNIPAESYTFFIDILLDTIRDEIAGCIEKAYEKILFTEATRILFFNTPKKMTDYAKKRGWVLGPNNYYSFAQPAAEAGRHHHSLHRTGQTGHRVCPAAGDDRLSPPGTGWGRARVI

SEQ ID NO: 830938 - protein, 208 aa, Homo sapiens
  misc_feature (14)..(14): Xaa can be any naturally occurring amino acid
LPTGMSQSVDKSHXKTLCIILRRTGRIYVTSEAVLRFLLCSSFRKGESTTYSEHLYVVVPAKDIQTNVYIKHPVSLEQYLMEGSYNKVFLAKGNIPAESYTFFIDILLDTIRDEIAGCIEKAYEKILFTEATRILFFNTPKKMTDYAKKRGWVLGPNNYYSFAQPAAEAGRHHHSLHRTGQTGHRVCPAAGDDRLSPPGTGWGRARVI

SEQ ID NO: 830939 - protein, 326 aa, Homo sapiens
MFIKGRAPRAPPRERRRATRGGLRQVVAPPRALGSTSRPHFRRASVCRRRCRKSGGLLAASRKMAAAAVNGAAGFSSSGPAATSGAVLQAATGMYEQLKGEWNRKSPNLSKCGEELGRLKLVLLELNFLPTTGTKLTKQQLILARDILEIGAQWSILRKDIPSFERYMAQLKCYYFDYKEQLPESAYMHQLLGLNLLFLLSQNRVAEFHTELERLPAKDIQTNVYIKHPVSLEQYLMEGSYNKVFLAKGNIPAESYTFFIDILLDTIRDEIAGCIEKAYEKILFTEATRILFFNTPKKMTDYAKKRGWVLGPNNYYSMAQRWGPSR

SEQ ID NO: 830940 - protein, 105 aa, Homo sapiens
MRSFSSSPRDEIAGCIEKAYEKILFTEATRILFFNTPKKMTDYAKKRGWVLGPNNYYSFAQPAAEAGRHHHSLHRTGQTGHRVCPAAGDDRLSPPGTGWGRARVI

SEQ ID NO: 830941 - protein, 269 aa, Homo sapiens
MFIKGRAPRAPPRERRRATRGGLRQVVAPPRALGSTSRPHFRRASVCRRRCRKSGGLLAASRKMAAAAVNGAAGFSSSGPAATSGAVLQAATGMYEQLKGEWNRKSPNLSKCGEELGRLKLVLLELNFLPTTGTKLTKQQLILARDILEIGAQWSILRKDIPSFERYMAQLKCYYFDYKEQLPESAYMHQLLGLNLLFLLSQNRVAEFHTELERLPAKDIQTNVYIKQSQARKQAVIVERITHVDHLNIDRTAAAYTFLLEVQHYASHR

SEQ ID NO: 830942 - protein, 268 aa, Homo sapiens
HFRDTMKGGFTGGDEYQKHFLPRDYLATYYSFDGSPSPEAEMLKFNLECLHKTFGPGGLQGDTLIDIGSGPTIYQVLAACDSFQDITLSDFTDRNREELEKWLKKEPGAYDWTPAVKFACELEGNSGRWEEKEEKLRAAVKRVLKCDVHLGNPLAPAVLPLADCVLTLLAMECACCSLDAYRAALCNLASLLKPGGHLVTTVTLRLPSYMVGKREFSCVALEKEEVEQAVLDAGFDIEQLLHSPQSYSVTNAANNGVCCIVARKKPGP

SEQ ID NO: 830943 - protein, 268 aa, Homo sapiens; identical to SEQ ID NO: 830942

SEQ ID NO: 830944 - protein, 268 aa, Homo sapiens; identical to SEQ ID NO: 830942

SEQ ID NO: 830945 - protein, 422 aa, Homo sapiens
MVSESHHEALAAPPVTTVATVLPSNATEPASPGEGKEDAFSKLKEKFMNELHKIPLPPWALIAIAIVAVLLVLTCCFCICKKCLFKKKNKKKGKEKGGKNAINMKDVKDLGKTMKDQALKDDDAETGLTDGEEKEEPKEEEKLGKLQYSLDYDFQNNQLLVGIIQAAELPALDMGGTSDPYVKVFLLPDKKKKFETKVHRKTLNPVFNEQFTFKVPYSELGGKTLVMAVYDFDRFSKHDIIGEFKVPMNTVDFGHVTEEWRDLQSAEKEEQEKLGDICFSLRYVPTAGKLTVVILEAKNLKKMDVGGLSDPYVKIHLMQNGKRLKKKKTTIKKNTLNPYYNESFSFEVPFEQIQKVQVVVTVLDYDKIGKNDAIGKVFVGYNSTGAELRHWSDMLANPRRPIAQWHTLQVEEEVDAMLAVKK

SEQ ID NO: 830946 - protein, 422 aa, Homo sapiens; identical to SEQ ID NO: 830945

SEQ ID NO: 830947 - protein, 422 aa, Homo sapiens; identical to SEQ ID NO: 830945

SEQ ID NO: 830948 - protein, 73 aa, Homo sapiens
GRLLTGGIPGEAAVWGCSRPSTAPSVFPPPPAAAAAAAAVSSGNLRLHPGQVPRVVLSREGGLAPRRGVCRVG

SEQ ID NO: 830949 - protein, 422 aa, Homo sapiens; identical to SEQ ID NO: 830945

SEQ ID NO: 830950 - protein, 663 aa, Homo sapiens
MAITLQPSDLIFEFASNGMDDDIHQLEDPSVFPAVIVEQVPYPDLLHLYSGLELDDVHNGIITDGTLCMTQDQILEGSFLLTDDNEATSHTMSTAEVLLNMESPSDILDEKQIFSTSEMLPDSDPAPAVTLPNYLFPASEPDALNRAGDTSDQEGHSLEEKASREESAKKTGKSKKRIRKTKGNRSTSPVTDPSIPIRKKSKDGKGSTIYLWEFLLALLQDRNTCPKYIKWTQREKGIFKLVDSKAVSKLWGKQKNKPDMNYETMGRALRYYYQRGILAKVEGQRLVYQFKEMPKDLVVIEDEDESSEATAAPPQASTASVASASTTRRTSSRVSSRSAPQGKGSSSWEKPKIQHVGLQPSASLELGPSLDEEIPTTSTMLVSPAEGQVKLTKAVSASSVPSNIHLGVAPVGSGSALTLQTIPLTTVLTNGPPASTTAPTQLVLQSVPAASTFKDTFTLQASFPLNASFQDSQVAAPGAPLILSGLPQLLAGANRPTNPAPPTVTGAGPAGPSSQPPGTVIAAFIRTSGTTAAPRVKEGPLRSSSYVQGMVTGAPMEGLLVPEETLRELLRDQAHLQPLPTQVVSRGSHNPSLLGNQTLSPPSRPTVGLTPVAELELSSGSGSLLMAEPSVTTSGSLLTRSPTPAPFSPFNPTSLIKMEPHDI

SEQ ID NO: 830951 - protein, 645 aa, Homo sapiens
MDDDIHQLEDPSVFPAVIVEQVPYPDLLHLYSGLELDDVHNGIITDGTLCMTQDQILEGSFLLTDDNEATSHTMSTAEVLLNMESPSDILDEKQIFSTSEMLPDSDPAPAVTLPNYLFPASEPDALNRAGDTSDQEGHSLEEKASREESAKKTGKSKKRIRKTKGNRSTSPVTDPSIPIRKKSKDGKGSTIYLWEFLLALLQDRNTCPKYIKWTQREKGIFKLVDSKAVSKLWGKQKNKPDMNYETMGRALRYYYQRGILAKVEGQRLVYQFKEMPKDLVVIEDEDESSEATAAPPQASTASVASASTTRRTSSRVSSRSAPQGKGSSSWEKPKIQHVGLQPSASLELGPSLDEEIPTTSTMLVSPAEGQVKLTKAVSASSVPSNIHLGVAPVGSGSALTLQTIPLTTVLTNGPPASTTAPTQLVLQSVPAASTFKDTFTLQASFPLNASFQDSQVAAPGAPLILSGLPQLLAGANRPTNPAPPTVTGAGPAGPSSQPPGTVIAAFIRTSGTTAAPRVKEGPLRSSSYVQGMVTGAPMEGLLVPEETLRELLRDQAHLQPLPTQVVSRGSHNPSLLGNQTLSPPSRPTVGLTPVAELELSSGSGSLLMAEPSVTTSGSLLTRSPTPAPFSPFNPTSLIKMEPHDI

SEQ ID NO: 830952 - protein, 645 aa, Homo sapiens; identical to SEQ ID NO: 830951

SEQ ID NO: 830953 - protein, 200 aa, Homo sapiens
MFLTYFLLLSWAVCVIPAPRQTIAFADTPAYFPDPGLPLDYFLTFSSCQASLRLVRQRPRWGPPPFLLKHGHLPHGFCCSACLQLTSKADQPASVMTAADLLGCTNAPHLPLSHLTLTPSPRRRESAARSSRGTSLSSWLPASPFPLSEEGSTYSLSKPTPRPIAWISSPLPSLNELASLLPSLRARLRNVSHGNNSIIW

SEQ ID NO: 830954 - protein, 663 aa, Homo sapiens; identical to SEQ ID NO: 830950

SEQ ID NO: 830955 - protein, 663 aa, Homo sapiens; identical to SEQ ID NO: 830950

SEQ ID NO: 830956 - protein, 281 aa, Homo sapiens
RSTGEMEVEGLPPSSRLLPTPCPSSSRYYYQRGILTLQTIPLTTVLTNGPPASTTAPTQLVLQSVPAASTFKDTFTLQASFPLNASFQDSQVAAPGAPLILSGLPQLLAGANRPTNPAPPTVTGAGPAGPSSQPPGTVIAAFIRTSGTTAAPRVKEGPLRSSSYVQGMVTGAPMEGLLVPEETLRELLRDQAHLQPLPTQVVSRGSHNPSLLGNQTLSPPSRPTVGLTPVAELELSSGSGSLLMAEPSVTTSGSLLTRSPTPAPFSPFNPTSLIKMEPHDI

SEQ ID NO: 830957 - protein, 128 aa, Homo sapiens
MPKGKYLSNKIRMAPSARGNKFGQRRLNINKGETPLWGHTIYLPIDRPLGEGMVVPLGNKWVPISRGLKKKLVASPGKNDSTGHQANSTETQQATRNNNRSSTKTRQPNVIRGGDITTQARRPATRRD

SEQ ID NO: 830958 - protein, 144 aa, Homo sapiens
GSVHFSHPRPALLILLSFLTSCHCQRFYRYRAESFPAISFNTQASQIFLTQDLLGKACWVSSTDFKLSLHQNLGECFEDMKLFLPPPVALGWPTPTVELEREGGVQTWNFNSVIQGFSYVQHPCHLMIPPLLFHLPEACFLMPA

SEQ ID NO: 830959 - protein, 194 aa, Homo sapiens
MGHSWPGPKAPPSILVLLKPKGPLAVTEKEVQQWYKGFIKDCPSGQLDAAGFQKIYKQFFPFGDPTKFATFVFNVFDENKDGRIEFSEFIQALSVTSRGTLDEKLRWAFKLYDLDNDGYITRNEMLDIVDAIYQMVGNTVELPEEENTPEKRVDRIFAMMDKNADGKLTLQEFQEGSKADPSIVQALSLYDGLV

SEQ ID NO: 830960 - protein, 213 aa, Homo sapiens
ARPRPGPPGPAAPAGRPNRVRPGGAGAAAAEDGEIQQQVEARSCGGADQEDLLYKGFIKDCPSGQLDAAGFQKIYKQFFPFGDPTKFATFVFNVFDENKDGRIEFSEFIQALSVTSRGTLDEKLRWAFKLYDLDNDGYITRNEMLDIVDAIYQMVGNTVELPEEENTPEKRVDRIFAMMDKNADGKLTLQEFQEGSKADPSIVQALSLYDGLV

SEQ ID NO: 830961 - protein, 221 aa, Homo sapiens
RGPGPARPAQPLLLGAPTGSGPGGRGPRPPRMGKSNSKLKPEVVEELTRKTYFTEKEVQQWYKGFIKDCPSGQLDAAGFQKIYKQFFPFGDPTKFATFVFNVFDENKDGRIEFSEFIQALSVTSRGTLDEKLRWAFKLYDLDNDGYITRNEMLDIVDAIYQMVGNTVELPEEENTPEKRVDRIFAMMDKNADGKLTLQEFQEGSKADPSIVQALSLYDGLV

SEQ ID NO: 830962 - protein, 221 aa, Homo sapiens; identical to SEQ ID NO: 830961

SEQ ID NO: 830963 - protein, 83 aa, Homo sapiens
RLGGGWVATGVASGLSRWYACGPQPSMPVGPQPEPAQSCRKGRPSRPWRGAGHWPFSLEFAWQGPISAPSSPQASGCSDAAES

SEQ ID NO: 830964 - protein, 221 aa, Homo sapiens; identical to SEQ ID NO: 830961

SEQ ID NO: 830965 - protein, 221 aa, Homo sapiens; identical to SEQ ID NO: 830961

SEQ ID NO: 830966 - protein, 221 aa, Homo sapiens; identical to SEQ ID NO: 830961

SEQ ID NO: 830967 - protein, 85 aa, Homo sapiens
CRRILSQVPPEQPVRLSTAALPPNAARFRCSDAEGMPIVPLQSLALGPGQAPAPGGQSATACPLPRSVCSSLCVDGDLGECSDFP

SEQ ID NO: 830968 - protein, 1272 aa, Homo sapiens [sequence omitted]

SEQ ID NO: 830969 - protein, 1264 aa, Homo sapiens
MQQAPQPYEFFSEENSPKWRGLLVSALRKVQEQVHPTLSANEESLYYIEELIFQLLNKLCMAQPRTVQDVEERVQKTFPHPIDKWAIADAQSAIEKRKRRNPLLLPVDKIHPSLKEVLGYKVDYHVSLYIVAVLEYISADILKLAGNYVFNIRHYEISQQDIKVSMCADKDIEKIFSNISDIHELTVKLLGLIEDTVEMTDESSPHPLAGSCFEDLAEEQAFDPYETLSQDILSPEFHEHFNKLMARPAVALHFQSIADGFKEAVRYVLPRLMLVPVYHCWHYFELLKQLKACSEEQEDRECLNQAITALMNLQGSMDRIYKQYSPRRRPGDPVCPFYSHQLRSKHLAIKKMNEIQKNIDGWEGKDIGQCCNEFIMEGPLTRIGAKHERHIFLFDGLMISCKPNHGQTRLPGYSSAEYRLKEKFVMRKIQICDKEDTCEHKHAFELVSKDENSIIFAAKSAEEKNNWMAALISLHYRSTLDRMLDSVLLKEENEQPLRLPSPEVYRFVVKDSEENIVFEDNLQSRSGIPIIKGGTVVKLIERLTYHMYADPNFVRTFLTTYRSFCKPQELLSLLIERFEIPEPEPTDADKLAIEKGEQPISADLKRFRKEYVQPVQLRILNVFRHWVEHHFYDFERDLELLERLESFISSVRGKAMKKWVESIAKIIRRKKQAQANGVSHNITFESPPPPIEWHISKPGQFETFDLMTLHPIEIARQLTLLESDLYRKVQPSELVGSVWTKEDKEINSPNLLKMIRHTTNLTLWFEKCIVEAENFEERVAVLSRIIEILQVFQDLNNFNGVLEIVSAVNSVSVYRLDHTFEALQERKRKILDEAVELSQDHFKKYLVKLKSINPPCVPFFGIYLTNILKTEEGNNDFLKKKGKDLINFSKRRKVAEITGEIQQYQNQPYCLRIEPDMRRFFENLNPMGSASEKEFTDYLFNKSLEIEPRNCKQPPRFPRKSTFSLKSPGIRPNTGRHGSTSGTLRGHPTPLEREPCKISFSRIAETELESTVSAPTSPNTPSTPPVSASSDLSVFLDVDLNSSCGSNSIFAPVLLPHSKSFFSSCGSLHKLSEEPLIPPPLPPRKKFDHDASNSKGNMKSDDDPPAIPPRQPPPPKVKPRVPVPTGAFDGPLHSPPPPPPRDPLPDTPPPVPLRPPEHFINCPFNLQPPPLGHLHRDSDWLRDISTCPNSPSTPPSTPSPRVPRRCYVLSSSQNNLAHPPAPPVPPRQNSSPHLPKLPPKTYKRELSHPPLYRLPLLENAETPQ

SEQ ID NO: 830970 - protein, 1379 aa, Homo sapiens
MQQAPQPYEFFSEENSPKWRGLLVSALRKMESRFFARLGCSGAILAHCNLHLSGSSDSPASASRVAGTTGVCHHAQVQEQVHPTLSANEESLYYIEELIFQLLNKLCMAQPRTVQDVEERVQKTFPHPIDKWAIADAQSAIEKRKRRNPLLLPVDKIHPSLKEVLGYKVDYHVSLYIVAVLEYISADILKLAGNYVFNIRHYEISQQDIKVSMCADKVLMDMFDQDDIGLVSLCEDEPSSSGELNYYDLVRTEIAEERQYLRELNMIIKVFREAFLSDRKLFKPSDIEKIFSNISDIHELTVKLLGLIEDTVEMTDESSPHPLAGSCFEDLAEEQAFDPYETLSQDILSPEFHEHFNKLMARPAVALHFQSIADGFKEAVRYVLPRLMLVPVYHCWHYFELLKQLKACSEEQEDRECLNQAITALMNLQGSMDRIYKQYSPRRRPGDPVCPFYSHQLRSKHLAIKKMNEIQKNIDGWEGKDIGQCCNEFIMEGPLTRIGAKHERHIFLFDGLMISCKPNHGQTRLPGYSSAEYRLKEKFVMRKIQICDKEDTCEHKHAFELVSKDENSIIFAAKSAEEKNNWMAALISLHYRSTLDRMLDSVLLKEENEQPLRLPSPEVYRFVVKDSEENIVFEDNLQSRSGIPIIKGGTVVKLIERLTYHMYADPNFVRTFLTTYRSFCKPQELLSLLIERFEIPEPEPTDADKLAIEKGEQPISADLKRFRKEYVQPVQLRILNVFRHWVEHHFYDFERDLELLERLESFISSVRGKAMKKWVESIAKIIRRKKQAQANGVSHNITFESPPPPIEWHISKPGQFETFDLMTLHPIEIARQLTLLESDLYRKVQPSELVGSVWTKEDKEINSPNLLKMIRHTTNLTLWFEKCIVEAENFEERVAVLSRIIEILQVFQDLNNFNGVLEIVSAVNSVSVYRLDHTFEALQERKRKILDEAVELSQDHFKKYLVKLKSINPPCVPFFGIYLTNILKTEEGNNDFLKKKGKDLINFSKRRKVAEITGEIQQYQNQPYCLRIEPDMRRFFENLNPMGSASEKEFTDYLFNKSLEIEPRNCKQPPRFPRKSTFSLKSPGIRPNTGRHGSTSGTLRGHPTPLEREPCKISFSRIAETELESTVSAPTSPNTPSTPPVSASSDLSVFLDVDLNSSCGSNSIFAPVLLPHSKSFFSSCGSLHKLSEEPLIPPPLPPRKKFDHDASNSKGNMKSDDDPPAIPPRQPPPPKVKPRVPVPTGAFDGPLHSPPPPPPRDPLPDTPPPVPLRPPEHFINCPFNLQPPPLGHLHRDSDWLRDISTCPNSPSTPPSTPSPRVPRRCYVLSSSQNNLAHPPAPPVPPRQNSSPHLPKLPPKTYKRELSHPPLYRLPLLENAETPQ

SEQ ID NO: 830971 - protein, 1332 aa, Homo sapiens [sequence omitted]

SEQ ID NO: 830972 - protein, 1332 aa, Homo sapiens [sequence omitted]

SEQ ID NO: 830973 - protein, 167 aa, Homo sapiens [sequence omitted]

SEQ ID NO: 830974 - protein, 1332 aa, Homo sapiens [sequence omitted]

SEQ ID NO: 830975 - protein, 1332 aa, Homo sapiens [sequence omitted]

SEQ ID NO: 830976 - protein, 1332 aa, Homo sapiens [sequence omitted]

SEQ ID NO: 830977 - protein, 741 aa, Homo sapiens
MQQAPQPYEFFSEENSPKWRGLLVSALRKVQEQVHPTLSANEESLYYIEELIFQLLNKLCMAQPRTVQDVEERVQKTFPHPIDKWAIADAQSAIEKRKRRNPLLLPVDKIHPSLKEVLGYKVDYHVSLYIVAVLEYISADILKLAGNYVFNIRHYEISQQDIKVSMCADKVLMDMFDQDDIGLVSLCEDEPSSSGELNYYDLVRTEIAEERQYLRELNMIIKVFREAFLSDRKLFKPSDIEKIFSNISDIHELTVKLLGLIEDTVEMTDESSPHPLAGSCFEDLAEEQAFDPYETLSQDILSPEFHEHFNKLMARPAVALHFQSIADGFKEAVRYVLPRLMLVPVYHCWHYFELLKQLKACSEEQEDRECLNQAITALMNLQGSMDRIYKQYSPRRRPGDPVCPFYSHQLRSKHLAIKKMNEIQKNIDGWEGKDIGQCCNEFIMEGPLTRIGAKHERHIFLFDGLMISCKPNHGQTRLPGYSSAEYRLKEKFVMRKIQICDKEDTCEHKHAFELVSKDENSIIFAAKSAEEKNNWMAALISLHYRSTLDRMLDSVLLKEENEQPLRLPSPEVYRFVVKDSEENIVFEDNLQSRSGIPIIKGGTVVKLIERLTYHMYADPNFVRTFLTTYRSFCKPQELLSLLIERFEIPEPEPTDADKLAIEKGEQPISADLKRFRKEYVQPVQLRILNVFRHWVEHHFYDFERDLELLERLESFISSVRGILYKGLIESYIEHEFMFKFV

SEQ ID NO: 830978 - protein, 1029 aa, Homo sapiens
MQQAPQPYEFFSEENSPKWRGLLVSALRKVQEQVHPTLSANEESLYYIEELIFQLLNKLCMAQPRTVQDVEERVQKTFPHPIDKWAIADAQSAIEKRKRRNPLLLPVDKIHPSLKEVLGYKVDYHVSLYIVAVLEYISADILKLAGNYVFNIRHYEISQQDIKVSMCADKVLMDMFDQDDIGLVSLCEDEPSSSGELNYYDLVRTEIAEERQYLRELNMIIKVFREAFLSDRKLFKPSDIEKIFSNISDIHELTVKLLGLIEDTVEMTDESSPHPLAGSCFEDLAEEQAFDPYETLSQDILSPEFHEHFNKLMARPAVALHFQSIADGFKEAVRYVLPRLMLVPVYHCWHYFELLKQLKACSEEQEDRECLNQAITALMNLQGSMDRIYKQYSPRRRPGDPVCPFYSHQLRSKHLAIKKMNEIQKNIDGWEGKDIGQCCNEFIMEGPLTRIGAKHERHIFLFDGLMISCKPNHGQTRLPGYSSAEYRLKEKFVMRKIQICDKEDTCEHKHAFELVSKDENSIIFAAKSAEEKNNWMAALISLHYRSTLDRMLDSVLLKEENEQPLRLPSPEVYRFVVKDSEENIVFEDNLQSRSGIPIIKGGTVVKLIERLTYHMYADPNFVRTFLTTYRSFCKPQELLSLLIERFEIPEPEPTDADKLAIEKGEQPISADLKRFRKEYVQPVQLRILNVFRHWVEHHFYDFERDLELLERLESFISSVRGKAMKKWVESIAKIIRRKKQAQANGVSHNITFESPPPPIEWHISKPGQFETFDLMTLHPIEIARQLTLLESDLYRKVQPSELVGSVWTKEDKEINSPNLLKMIRHTTNLTLWFEKCIVEAENFEERVAVLSRIIEILQVFQDLNNFNGVLEIVSAVNSVSVYRLDHTFEALQERKRKILDEAVELSQDHFKKYLVKLKSINPPCVPFFGIYLTNILKTEEGNNDFLKKKGKDLINFSKRRKVAEITGEIQQYQNQPYCLRIEPDMRRFFENLNPMGSASEKEFTDYLFNKSLEIEPRNCKQPPRFVSLL

SEQ ID NO: 830979 - protein, 741 aa, Homo sapiens; identical to SEQ ID NO: 830977

SEQ ID NO: 830980 - protein, 1332 aa, Homo sapiens [sequence omitted]

SEQ ID NO: 830981 - protein, 1319 aa, Homo sapiens
MVLFHCPLDVLLQHLWVQEQVHPTLSANEESLYYIEELIFQLLNKLCMAQPRTVQDVEERVQKTFPHPIDKWAIADAQSAIEKRKRRNPLLLPVDKIHPSLKEVLGYKVDYHVSLYIVAVLEYISADILKLAGNYVFNIRHYEISQQDIKVSMCADKVLMDMFDQDDIGLVSLCEDEPSSSGELNYYDLVRTEIAEERQYLRELNMIIKVFREAFLSDRKLFKPSDIEKIFSNISDIHELTVKLLGLIEDTVEMTDESSPHPLAGSCFEDLAEEQAFDPYETLSQDILSPEFHEHFNKLMARPAVALHFQSIADGFKEAVRYVLPRLMLVPVYHCWHYFELLKQLKACSEEQEDRECLNQAITALMNLQGSMDRIYKQYSPRRRPGDPVCPFYSHQLRSKHLAIKKMNEIQKNIDGWEGKDIGQCCNEFIMEGPLTRIGAKHERHIFLFDGLMISCKPNHGQTRLPGYSSAEYRLKEKFVMRKIQICDKEDTCEHKHAFELVSKDENSIIFAAKSAEEKNNWMAALISLHYRSTLDRMLDSVLLKEENEQPLRLPSPEVYRFVVKDSEENIVFEDNLQSRSGIPIIKGGTVVKLIERLTYHMYADPNFVRTFLTTYRSFCKPQELLSLLIERFEIPEPEPTDADKLAIEKGEQPISADLKRFRKEYVQPVQLRILNVFRHWVEHHFYDFERDLELLERLESFISSVRGKAMKKWVESIAKIIRRKKQAQANGVSHNITFESPPPPIEWHISKPGQFETFDLMTLHPIEIARQLTLLESDLYRKVQPSELVGSVWTKEDKEINSPNLLKMIRHTTNLTLWFEKCIVEAENFEERVAVLSRIIEILQVFQDLNNFNGVLEIVSAVNSVSVYRLDHTFEALQERKRKILDEAVELSQDHFKKYLVKLKSINPPCVPFFGIYLTNILKTEEGNNDFLKKKGKDLINFSKRRKVAEITGEIQQYQNQPYCLRIEPDMRRFFENLNPMGSASEKEFTDYLFNKSLEIEPRNCKQPPRFPRKSTFSLKSPGIRPNTGRHGSTSGTLRGHPTPLEREPCKISFSRIAETELESTVSAPTSPNTPSTPPVSASSDLSVFLDVDLNSSCGSNSIFAPVLLPHSKSFFSSCGSLHKLSEEPLIPPPLPPRKKFDHDASNSKGNMKSDDDPPAIPPRQPPPPKVKPRVPVPTGAFDGPLHSPPPPPPRDPLPDTPPPVPLRPPEHFINCPFNLQPPPLGHLHRDSDWLRDISTCPNSPSTPPSTPSPRVPRRCYVLSSSQNNLAHPPAPPVPPRQNSSPHLPKLPPKTYKRELSHPPLYRLPLLENAETPQ

SEQ ID NO: 830982 - protein, 1332 aa, Homo sapiens [sequence omitted]

SEQ ID NO: 830983 - protein, 1332 aa, Homo sapiens [sequence omitted]

SEQ ID NO: 830984 - protein, 1332 aa, Homo sapiens [sequence omitted]

SEQ ID NO: 830985 - protein, 1332 aa, Homo sapiens [sequence omitted]

SEQ ID NO: 830986 - protein, 1332 aa, Homo sapiens [sequence omitted]

SEQ ID NO: 830987 - protein, 1173 aa, Homo sapiens
MQQAPQPYEFFSEENSPKWRGLLVSALRKVQEQVHPTLSANEESLYYIEELIFQLLNKLCMAQPRTVQDVEERVQKTFPHPIDKWAIADAQSAIEKRKRRNPLLLPVDKIHPSLKEVLGYKVDYHVSLYIVAVLEYISADILKLAGNYVFNIRHYEISQQDIKVSMCADKVLMDMFDQDDIGLVSLCEDEPSSSGELNYYDLVRTEIAEERQYLRELNMIIKVFREAFLSDRKLFKPSDIEKIFSNISDIHELTVKLLGLIEDTVEMTDESSPHPLAGSCFEDLAEEQAFDPYETLSQDILSPEFHEHFNKLMARPAVALHFQSIADGFKEAVRYVLPRLMLVPVYHCWHYFELLKQLKACSEEQEDRECLNQAITALMNLQGSMDRIYKQYSPRRRPGDPVCPFYSHQLRSKHLAIKKMNEIQKNIDGWEGKDIGQCCNEFIMEGPLTRIGAKHERHIFLFDGLMISCKPNHGQTRLPGYSSAEYRLKEKFVMRKIQICDKEDTCEHKHAFELVSKDENSIIFAAKSAEEKNNWMAALISLHYRSTLDRMLDSVLLKEENEQPLRLPSPEVYRFVVKDSEENIVFEDNLQSRSGIPIIKGGTVVKLIERLTYHMYADPNFVRTFLTTYRSFCKPQELLSLLIERFEIPEPEPTDADKLAIEKGEQPISADLKRFRKEYVQPVQLRILNVFRHWVEHHFYDFERDLELLERLESFISSVRGKAMKKWVESIAKIIRRKKQAQANGVSHNITFESPPPPIEWHISKPGQFETFDLMTLHPIEIARQLTLLESDLYRKVQPSELVGSVWTKEDKEINSPNLLKMIRHTTNLTLWFEKCIVEAENFEERVAVLSRIIEILQVFQDLNNFNGVLEIVSAVNSVSVYRLDHTFEALQERKRKILDEAVELSQDHFKKYLVKLKSINPPCVPFFGIYLTNILKTEEGNNDFLKKKGKDLINFSKRRKVAEITGEIQQYQNQPYCLRIEPDMRRFFENLNPMGSASEKEFTDYLFNKSLEIEPRNCKQPPRFPRKSTFSLKSPGIRPNTGRHGSTSGTLRGHPTPLEREPCKISFSRIAETELESTVSAPTSPNTPSTPPVSASSDLSVFLDVDLNSSCGSNSIFAPVLLPHSKSFFSSCGSLHKLSEEPLIPPPLPPRKKFDHDASNSKVINRTLLQLI

SEQ ID NO: 830988 - protein, 714 aa, Homo sapiens
MQQAPQPYEFFSEENSPKWRGLLVSALRKVQEQVHPTLSANEESLYYIEELIFQLLNKLCMAQPRTVQDVEERVQKTFPHPIDKWAIADAQSAIEKRKRRNPLLLPVDKIHPSLKEVLGYKVDYHVSLYIVAVLEYISADILKLAGNYVFNIRHYEISQQDIKVSMCADKVLMDMFDQDDIGLVSLCEDEPSSSGELNYYDLVRTEIAEERQYLRELNMIIKVFREAFLSDRKLFKPSDIEKIFSNISDIHELTVKLLGLIEDTVEMTDESSPHPLAGSCFEDLAEEQAFDPYETLSQDILSPEFHEHFNKLMARPAVALHFQSIADGFKEAVRYVLPRLMLVPVYHCWHYFELLKQLKACSEEQEDRECLNQAITALMNLQGSMDRIYKQYSPRRRPGDPVCPFYSHQLRSKHLAIKKMNEIQKNIDGWEGKDIGQCCNEFIMEGPLTRIGAKHERHIFLFDGLMISCKPNHGQTRLPGYSSAEYRLKEKFVMRKIQICDKEDTCEHKHAFELVSKDENSIIFAAKSAEEKNNWMAALISLHYRSTLDRMLDSVLLKEENEQPLRLPSPEVYRFVVKDSEENIVFEDNLQSRSGIPIIKGGTVVKLIERLTYHMYADPNFVRTFLTTYRSFCKPQELLSLLIERFEIPEPEPTDADKLAIEKGEQPISADLKRFRKEYVQPVQLRFGLNIFYIYIYTHIYTHTHTFYVSVFNI

SEQ ID NO: 830989 - protein, 235 aa, Homo sapiens
MENSGKANKKDTHDGPPKEIKLPTSEALLDYQCQIKEDAVEQFMFQIKTLRKKNQKYHERNSRLKEEQIWHIRHLLKELSEEKAEGLPVVTREDVEEAMKEKWKFERDQEKNLRDMRMQISNAEKLFLEKLSEKEYWEEYKNVGSERHAKLITSLQNDINTVKENAEKMSEHYKITLEDTRKKIIKETLLQLDQKKEWATQNAVKLIDKGSYLEIWENDWLKKERLQFTGRKLKN

SEQ ID NO: 830990 - protein, 262 aa, Homo sapiens
MAVTAQAARRKERVLCLFDVDGTLTPARQKIDPEVAAFLQKLRSRVQIGVVGGSDYCKIAEQLGDGDEVIEKFDYVFAENGTVQYKHGRLLSKQTIQNHLGEELLQDLINFCLSYMALLRLPKKRGTFIEFRNGMLNISPIGRSCTLEERIEFSELDKKEKIREKFVEALKTEFAGKGLRFSRGGMISFDVFPEGWDKRYCLDSLDQDSFDTIHFFGNETSPGGNDFEIFADPRTVGHSVVSPQDTVQRCREIFFPETAHEA

SEQ ID NO: 830991 - protein, 262 aa, Homo sapiens; identical to SEQ ID NO: 830990

SEQ ID NO: 830992 - protein, 235 aa, Homo sapiens [sequence omitted]

SEQ ID NO: 830993 - protein, 267 aa, Homo sapiens
MPLPILCGEVALAWALEAFLQGWIREEDSRTGAKKIDPEVAAFLQKLRSRVQIGVVGGSDYCKIAEQLGDGDEVIEKFDYVFAENGTVQYKHGRLLSKQTIQNHLGEELLQDLINFCLSYMALLRLPKKRGTFIEFRNGMLNISPIGRSCTLEERIEFSELDKKEKIREKFVEALKTEFAGKGLRFSRGGMISFDVFPEGWDKRYCLDSLDQDSFDTIHFFGNETSPGGNDFEIFADPRTVGHSVVSPQDTVQRCREIFFPETAHEA

SEQ ID NO: 830994 - protein, 269 aa, Homo sapiens
MAVTAQAARRKERVLCLFDVDGTLTPARQKIDPEVAAFLQKLRSRVQIGVVGGSDYCKIAEQLGDGDEVIEKFDYVFAENGTVQYKHGRLLSKQSPVFLGQTIQNHLGEELLQDLINFCLSYMALLRLPKKRGTFIEFRNGMLNISPIGRSCTLEERIEFSELDKKEKIREKFVEALKTEFAGKGLRFSRGGMISFDVFPEGWDKRYCLDSLDQDSFDTIHFFGNETSPGGNDFEIFADPRTVGHSVVSPQDTVQRCREIFFPETAHEA

SEQ ID NO: 830995 - protein, 234 aa, Homo sapiens
MKIDPEVAAFLQKLRSRVQIGVVGGSDYCKIAEQLGDGDEVIEKFDYVFAENGTVQYKHGRLLSKQTIQNHLGEELLQDLINFCLSYMALLRLPKKRGTFIEFRNGMLNISPIGRSCTLEERIEFSELDKKEKIREKFVEALKTEFAGKGLRFSRGGMISFDVFPEGWDKRYCLDSLDQDSFDTIHFFGNETSPGGNDFEIFADPRTVGHSVVSPQDTVQRCREIFFPETAHEA

SEQ ID NO: 830996 - protein, 157 aa, Homo sapiens
MCLPRTGRCSISTDDCSPSSGTFIEFRNGMLNISPIGRSCTLEERIEFSELDKKEKIREKFVEALKTEFAGKGLRFSRGGMISFDVFPEGWDKRYCLDSLDQDSFDTIHFFGNETSPGGNDFEIFADPRTVGHSVVSPQDTVQRCREIFFPETAHEA

SEQ ID NO: 830997 - protein, 162 aa, Homo sapiens
MAVTAQAARRKERVLCLFDVDGTLTPARQSWSREGFFSNSFMSSTHPDVRGSRPSLFAVRTLRKVRKIDPEVAAFLQKLRSRVQIGVVGGSDYCKIAEQLGDGDEVIEKFDYVFAENGTVQYKHGRLLSKQTIQNHLGEELLQDLINFCLSYMALLRLPKKR

SEQ ID NO: 830998 - protein, 240 aa, Homo sapiens
MAVTAQAARRKERVLCLFDVDGTLTPARQKIDPEVAAFLQKLRSRVQIGVVGGSDYCKIAEQLGDGDEVIEKFDYVFAENGTVQYKHGRLLSKQTIQNHLGEELLQDLINFCLSYMALLRLPKKRGTFIEFRNGMLNISPIGRSCTLEERIEFSELDKKEKIREKFVEALKTEFAGKGLRFSRGGMISFDVFPEGWDKRYCLDSLDQDSFDTIHFFGNETSPDTVQRCREIFFPETAHEA

SEQ ID NO: 830999 - protein, 244 aa, Homo sapiens
MAVTAQAARRKERVLCLFDVDGTLTPARQIGVVGGSDYCKIAEQLGDGDEVIEKFDYVFAENGTVQYKHGRLLSKQTIQNHLGEELLQDLINFCLSYMALLRLPKKRGTFIEFRNGMLNISPIGRSCTLEERIEFSELDKKEKIREKFVEALKTEFAGKGLRFSRGGMISFDVFPEGWDKRYCLDSLDQDSFDTIHFFGNETSPGGNDFEIFADPRTVGHSVVSPQDTVQRCREIFFPETAHEA

SEQ ID NO: 831000 - protein, 262 aa, Homo sapiens; identical to SEQ ID NO: 830990

SEQ ID NO: 831001 - protein, 336 aa, Homo sapiens
MAVTAQAARRKERVLCLFDVDGTLTPARQKIDPEVAAFLQKLRSRVQIGVVGGSDYCKIAEQLGDGDEVIEKFDYVFAENGTVQYKHGRLLSKQTIQNHLGEELLQDLINFCLSYMALLRLPKKRLRSHQPGLQNLGPEGGEVWVPQREPGDTWAPDFLRGVWILVPFEVLEAGVPGGARFEFRAVLVLSGSPPSLTTSGTFIEFRNGMLNISPIGRSCTLEERIEFSELDKKEKIREKFVEALKTEFAGKGLRFSRGGMISFDVFPEGWDKRYCLDSLDQDSFDTIHFFGNETSPGGNDFEIFADPRTVGHSVVSPQDTVQRCREIFFPETAHEA

SEQ ID NO: 831002 - protein, 128 aa, Homo sapiens
MLNISPIGRSCTLEERIEFSELDKKEKIREKFVEALKTEFAGKGLRFSRGGMISFDVFPEGWDKRYCLDSLDQDSFDTIHFFGNETSPGGNDFEIFADPRTVGHSVVSPQDTVQRCREIFFPETAHEA

SEQ ID NO: 831003 - protein, 172 aa, Homo sapiens
MAVTAQAARRKERVLCLFDVDGTLTPARQKIDPEVAAFLQKLRSRVQIGVVGGSDYCKIAEQLGDGDEVIEKFDYVFAENGTVQYKHGRLLSKQTIQNHLGEELLQDLINFCLSYMALLRLPKKRGTFIEFRNGMLNISPIGRSCTLEERIEFSELDKKEKIREKFVEALEA

SEQ ID NO: 831004 - protein, 121 aa, Homo sapiens
MSSTHPDVRGSRPSLFAVRTLRNSEKIDPEVAAFLQKLRSRVQIGVVGGSDYCKIAEQLGDGDEVIEKFDYVFAENGTVQYKHGRLLSKQTIQNHLGEELLQDLINFCLSYMALLRLPKKR

SEQ ID NO: 831005 - protein, 962 aa, Homo sapiens
MNFLRGVMGGQSAGPQHTEAETIQKLCDRVASSTLLDDRRNAVRALKSLSKKYRLEVGIQAMEHLIHVLQTDRSDSEIIGYALDTLYNIISNEEEEEVEENSTRQSEDLGSQFTEIFIKQQENVTLLLSLLEEFDFHVRWPGVKLLTSLLKQLGPQVQQIILVSPMGVSRLMDLLADSREVIRNDGVLLLQALTRSNGAIQKIVAFENAFERLLDIISEEGNSDGGIVVEDCLILLQNLLKNNNSNQNFFKEGSYIQRMKPWFEVGDENSGWSAQKVTNLHLMLQLVRVLVSPTNPPGATSSCQKAMFQCGLLQQLCTILMATGVPADILTETINTVSEVIRGCQVNQDYFASVNAPSNPPRPAIVVLLMSMVNERQPFVLRCAVLYCFQCFLYKNQKGQGEIVSTLLPSTIDATGNSVSAGQLLCGGLFSTDSLSNWCAAVALAHALQENATQKEQLLRVQLATSIGNPPVSLLQQCTNILSQGSKIQTRVGLLMLLCTWLSNCPIAVTHFLHNSANVPFLTGQIAENLGEEEQLVQGLCALLLGISIYFNDNSLESYMKEKLKQLIEKRIGKENFIEKLGFISKHELYSRASQKPQPNFPSPEYMIFDHEFTKLVKELEGVITKAIYKSSEEDKKEEEVKKTLEQHDNIVTHYKNMIREQDLQLEELRQQVSTLKCQNEQLQTAVTQQVSQIQQHKDQYNLLKIQLGKDNQHQGSYSEGAQMNGIQPEEIGRLREEIEELKRNQELLQSQLTEKDSMIENMKSSQTSGTNEQSSAIVSARDSEQVAELKQELATLKSQLNSQSVEITKLQTEKQELLQKTEAFAKSVEVQGETETIIATKTTDVEGRLSALLQETKELKNEIKALSEERTAIKEQLDSSNSTIAILQTEKDKLELEITDSKKEQDDLLVLLADQDQKILSLKNKLKDLGHPVEEEDELESGDQEDEDDESEDPGKDLDHI

SEQ ID NO: 831006 - protein, 900 aa, Homo sapiens
MIEEMLFVLSNHYLRNTAWKWVYKLWNILFMFYKQIEENSTRQSEDLGSQFTEIFIKQQENVTLLLSLLEEFDFHVRWPGVKLLTSLLKQLGPQVQQIILVSPMGVSRLMDLLADSREVIRNDGVLLLQALTRSNGAIQKIVAFENAFERLLDIISEEGNSDGGIVVEDCLILLQNLLKNNNSNQNFFKEGSYIQRMKPWFEVGDENSGWSAQKVTNLHLMLQLVRVLVSPTNPPGATSSCQKAMFQCGLLQQLCTILMATGVPADILTETINTVSEVIRGCQVNQDYFASVNAPSNPPRPAIVVLLMSMVNERQPFVLRCAVLYCFQCFLYKNQKGQGEIVSTLLPSTIDATGNSVSAGQLLCGGLFSTDSLSNWCAAVALAHALQENATQKEQLLRVQLATSIGNPPVSLLQQCTNILSQGSKIQTRVGLLMLLCTWLSNCPIAVTHFLHNSANVPFLTGQIAENLGEEEQLVQGLCALLLGISIYFNDNSLESYMKEKLKQLIEKRIGKENFIEKLGFISKHELYSRASQKPQPNFPSPEYMIFDHEFTKLVKELEGVITKAIYKSSEEDKKEEEVKKTLEQHDNIVTHYKNMIREQDLQLEELRQQVSTLKCQNEQLQTAVTQQVSQIQQHKDQYNLLKIQLGKDNQHQGSYSEGAQMNGIQPEEIGRLREEIEELKRNQELLQSQLTEKDSMIENMKSSQTSGTNEQSSAIVSARDSEQVAELKQELATLKSQLNSQSVEITKLQTEKQELLQKTEAFAKSVEVQGETETIIATKTTDVEGRLSALLQETKELKNEIKALSEERTAIKEQLDSSNSTIAILQTEKDKLELEITDSKKEQDDLLVLLADQDQKILSLKNKLKDLGHPVEEEDELESGDQEDEDDESEDPGKDLDHI

SEQ ID NO: 831007 - protein, 704 aa, Homo sapiens [sequence omitted]

SEQ ID NO: 831008 - protein, 962 aa, Homo sapiens; identical to SEQ ID NO: 831005

SEQ ID NO: 831009 - protein, 962 aa, Homo sapiens; identical to SEQ ID NO: 831005

SEQ ID NO: 831010 - protein, 962 aa, Homo sapiens; identical to SEQ ID NO: 831005

SEQ ID NO: 831011 - protein, 403 aa, Homo sapiens [sequence omitted]

SEQ ID NO: 831012 - protein, 322 aa, Homo sapiens
HASGPRVHDNIVTHYKNMIREQDLQLEELRQQVSTLKCQNEQLQTAVTQQVSQIQQHKDQYNLLKIQLGKDNQHQGSYSEGAQMNGIQPEEIGRLREEIEELKRNQELLQSQLTEKDSMIENMKSSQTSGTNEQSSAIVSARDSEQVAELKQELATLKSQLNSQSVEITKLQTEKQELLQKTEAFAKSVEVQGETETIIATKTTDVEGRLSALLQETKELKNEIKALSEERTAIKEQLDSSNSTIAILQTEKDKLELEITDSKKEQDDLLVLLADQDQKILSLKNKLKDLGHPVEEEDELESGDQEDEDDESEDPGKDLDHI

SEQ ID NO: 831013 - protein, 239 aa, Homo sapiens [sequence omitted]

SEQ ID NO: 831014 - protein, 676 aa, Homo sapiens
MNFLRGVMGGQSAGPQHTEAETIQKLCDRVASSTLLDDRRNAVRALKSLSKKYRLEVGIQAMEHLIHVLQTDRSDSEIIGYALDTLYNIISNEEEEEVEENSTRQSEDLGSQFTEIFIKQQENVTLLLSLLEEFDFHVRWPGVKLLTSLLKQLGPQVQQIILVSPMGVSRLMDLLADSREVIRNDGVLLLQALTRSNGAIQKIVAFENAFERLLDIISEEGNSDGGIVVEDCLILLQNLLKNNNSNQNFFKEGSYIQRMKPWFEVGDENSGWSAQKVTNLHLMLQLVRVLVSPTNPPGATSSCQKAMFQCGLLQQLCTILMATGVPADILTETINTVSEVIRGCQVNQDYFASVNAPSNPPRPAIVVLLMSMVNERQPFVLRCAVLYCFQCFLYKNQKGQGEIVSTLLPSTIDATGNSVSAGQLLCGGLFSTDSLSNWCAAVALAHALQENATQKEQLLRVQLATSIGNPPVSLLQQCTNILSQGSKIQTRVGLLMLLCTWLSNCPIAVTHFLHNSANVPFLTGQIAENLGEEEQLVQGLCALLLGISIYFNDNSLESYMKEKLKQLIEKRIGKENFIEKLGFISKHELYSRASQKPQPNFPSPEYMIFDHEFTKLVKELEGVITKAIYKSSEEDKKEEEVKKTLEQHDNIVTQVVLLILNPLTKHIAYPFLVLSL

SEQ ID NO: 831015 - protein, 427 aa, Homo sapiens
MNFLRGVMGGQSAGPQHTEAETIQKLCDRVASSTLLDDRRNAVRALKSLSKKYRLEVGIQAMEHLIHVLQTDRSDSEIIGYALDTLYNIISNEEEEEVEENSTRQSEDLGSQFTEIFIKQQENVTLLLSLLEEFDFHVRWPGVKLLTSLLKQLGPQVQQIILVSPMGVSRLMDLLADSREVIRNDGVLLLQALTRSNGAIQKIVAFENAFERLLDIISEEGNSDGGIVVEDCLILLQNLLKNNNSNQNFFKEGSYIQRMKPWFEVGDENSGWSAQKVTNLHLMLQLVRVLVSPTNPPGATSSCQKAMFQCGLLQQLCTILMATGVPADILTETINTVSEVIRGCQVNQDYFASVNAPSNPPRPAIVVLLMSMVNERQPFVLRCAVRTARANNRHNLLHYVYRSLSVFSKFYWLLPSPELKLVSCFCY

SEQ ID NO: 831016 - protein, 962 aa, Homo sapiens; identical to SEQ ID NO: 831005

SEQ ID NO: 831017 - protein, 969 aa, Homo sapiens
MNFLRGVMGGQSAGPQHTEAETIQKLCDRVASSTLLDDRRNAVRALKSLSKKYRLEVGIQAMEHLIHVLQTDRSDSEIIGYALDTLYNIISNEEEEEVEENSTRQSEDLGSQFTEIFIKQQENVTLLLSLLEEFDFHVRWPGVKLLTSLLKQLGPQVQQIILVSPMGVSRLMDLLADSREVIRNDGVLLLQALTRSNGAIQKIVAFENAFERLLDIISEEGNSDGGIVVEDCLILLQNLLKNNNSNQNFFKEGSYIQRMKPWFEVGDENSGWSAQKVTNLHLMLQLVRVLVSPTNPPGATSSCQKAMFQCGLLQQLCTILMATGVPADILTETINTVSEVIRGCQVNQDYFASVNAPSNPPRPAIVVLLMSMVNERQPFVLRCAVLYCFQCFLYKNQKGQGEIVSTLLPSTIDATGNSVSAGQLLCGGLFSTDSLSNWCAAVALAHALQENATQKEQLLRVQLATSIGNPPVSLLQQCTNILSQGDKIDRRGSKIQTRVGLLMLLCTWLSNCPIAVTHFLHNSANVPFLTGQIAENLGEEEQLVQGLCALLLGISIYFNDNSLESYMKEKLKQLIEKRIGKENFIEKLGFISKHELYSRASQKPQPNFPSPEYMIFDHEFTKLVKELEGVITKAIYKSSEEDKKEEEVKKTLEQHDNIVTHYKNMIREQDLQLEELRQQVSTLKCQNEQLQTAVTQQVSQIQQHKDQYNLLKIQLGKDNQHQGSYSEGAQMNGIQPEEIGRLREEIEELKRNQELLQSQLTEKDSMIENMKSSQTSGTNEQSSAIVSARDSEQVAELKQELATLKSQLNSQSVEITKLQTEKQELLQKTEAFAKSVEVQGETETIIATKTTDVEGRLSALLQETKELKNEIKALSEERTAIKEQLDSSNSTIAILQTEKDKLELEITDSKKEQDDLLVLLADQDQKILSLKNKLKDLGHPVEEEDELESGDQEDEDDESEDPGKDLDHI

SEQ ID NO: 831018 - protein, 962 aa, Homo sapiens; identical to SEQ ID NO: 831005

SEQ ID NO: 831019 - protein, 468 aa, Homo sapiens
EVDSVNLGRQQQTGFQEPVFDEARTEELTGQIAENLGEEEQLVQGLCALLLGISIYFNDNSLESYMKEKLKQLIEKRIGKENFIEKLGFISKHELYSRASQKPQPNFPSPEYMIFDHEFTKLVKELEGVITKAIYKSSEEDKKEEEVKKTLEQHDNIVTHYKNMIREQDLQLEELRQQVSTLKCQNEQLQTAVTQQVSQIQQHKDQYNLLKIQLGKDNQHQGSYSEGAQMNGIQPEEIGRLREEIEELKRNQELLQSQLTEKDSMIENMKSSQTSGTNEQSSAIVSARDSEQVAELKQELATLKSQLNSQSVEITKLQTEKQELLQKTEAFAKSVEVQGETETIIATKTTDVEGRLSALLQETKELKNEIKALSEERTAIKEQLDSSNSTIAILQTEKDKLELEITDSKKEQDDLLVLLADQDQKILSLKNKLKDLGHPVEEEDELESGDQEDEDDESEDPGKDLDHI

SEQ ID NO: 831020 - protein, 977 aa, Homo sapiens
MNFLRGVMGGQSAGPQHTEAETIQKLCDRVASSTLLDDRRNAVRALKSLSKKYRLEVGIQAMEHLIHVLQTDRSDSEIIGYALDTLYNIISNEEEEEVEENSTRQSEDLGSQFTEIFIKQQENVTLLLSLLEEFDFHVRWPGVKLLTSLLKQLGPQVQQIILVSPMGVSRLMDLLADSREVIRNDGVLLLQALTRSNGAIQKIVAFENAFERLLDIISEEGNSDGGIVVEDCLILLQNLLKNNNSNQNFFKEGSYIQRMKPWFEVGDENSGWSAQKVTNLHLMLQLVRVLVSPTNPPGATSSCQKAMFQCGLLQQLCTILMATGVPADILTETINTVSEVIRGCQVNQDYFASVNAPSNPPRPAIVVLLMSMVNERQPFVLRCAVLYCFQCFLYKNQKGQGEIVSTLLPSTIDATGNSVSAGQLLCGGLFSTDSLSNWCAAVALAHALQENATQKEQLLRVQLATSIGNPPVSLLQQCTNILSQGSKIQTRVGLLMLLCTWLSNCPIAVTHFLHNSANVPFLTGQIAENLGEEEQLVQGLCALLLGISIYFNDNSLESYMKEKLKQLIEKRIGKENFIEKLGFISKHELYSRASQKPQPNFPSPEYMIFDHEFTKLVKELEGVITKAIYKSSEEDKKEEEVKKTLEQHDNIVTHYKNMIREQDLQLEELRQQVSTLKCQNEQLQTAVTQQVSQIQQHKDQYNLLKIQLGKDNQHQGSYSEGAQMNGIQPEEIGRLREEIEELKRNQELLQSQLTEKDSMIENMKSSQTSGTNEQSSAIVSARDSEQVAELKQELATLKSQLNSQSVEITKLQTEKQELLQKTEAFAKSVEVQGETETIIATKTTDVEGRLSALLQETKELKNEIKALSEERTAIKEQLDSSNSTIAILQTEKDKLELEITDSKKEQDDLLVLLADQDQKILSLKNKLKDLGHPVKRDELNWEHREVITKTGGLTSSKRSHIITTETNNYFGILLFIF

SEQ ID NO: 831021 - protein, 494 aa, Homo sapiens
MNFLRGVMGGQSAGPQHTEAETIQKLCDRVASSTLLDDRRNAVRALKSLSKKYRLEVGIQAMEHLIHVLQTDRSDSEIIGYALDTLYNIISNEEEEEVEENSTRQSEDLGSQFTEIFIKQQENVTLLLSLLEEFDFHVRWPGVKLLTSLLKQLGPQVQQIILVSPMGVSRLMDLLADSREVIRNDGVLLLQALTRSNGAIQKIVAFENAFERLLDIISEEGNSDGGIVVEDCLILLQNLLKNNNSNQNFFKEGSYIQRMKPWFEVGDENSGWSAQKVTNLHLMLQLVRVLVSPTNPPGATSSCQKAMFQCGLLQQLCTILMATGVPADILTETINTVSEVIRGCQVNQDYFASVNAPSNPPRPAIVVLLMSMVNERQPFVLRCAVLYCFQCFLYKNQKGQGEIVSTLLPSTIDAQVIRSAAVYVGVVPRFLQLGALALSWVRMAPEHGPVLASWTPVFHGAFRAHTGVYGSRHRGVTSLERTSQSGFPVFFRLF

SEQ ID NO: 831022 - protein, 436 aa, Homo sapiens
MLDPDSDQPLNSLDVKPLRKPRIPMETFRKVGIPIIIALLSLASIIIVVVLIKVILDKYYFLCGQPLHFIPRKQLCDGELDCPLGEDEEHCVKSFPEGPAVAVRLSKDRSTLQVLDSATGNWFSACFDNFTEALAETACRQMGYSSKPTFRAVEIGPDQDLDVVEITENSQELRMRNSSGPCLSGSLVSLHCLACGKSLKTPRVVGGEEASVDSWPWQVSIQYDKQHVCGGSILDPHWVLTAAHCFRKHTDVFNWKVRAGSDKLGSFPSLAVAKIIIIEFNPMYPKDNDIALMKLQFPLTFSGTVRPICLPFFDEELTPATPLWIIGWGFTKQNGGKMSDILLQASVQVIDSTRCNADDAYQGEVTEKMMCAGIPEGGVDTCQGDSGGPLMYQSDQWHVVGIVSWGYGCGGPSTPGVYTKVSAYLNWIYNVWKAEL

SEQ ID NO: 831023 - protein, 350 aa, Homo sapiens
MLDPDSDQPLNSLDVKPLRKPRIPMETFRKVGIPIIIALLSLASIIIVVVLIKVILDKYYFLCGQPLHFIPRKQLCDGELDCPLGEDEEHCVKSFPEGPAVAVRLSKDRSTLQVLDSATGNWFSACFDNFTEALAETACRQMGYSSKPTFRAVEIGPDQDLDVVEITENSQELRMRNSSGPCLSGSLVSLHCLACGKSLKTPRVVGGEEASVDSWPWQVSIQYDKQHVCGGSILDPHWVLTAAHCFRKHTDVFNWKVRAGSDKLGSFPSLAVAKIIIIEFNPMYPKDNDIALMKLQFPLTFSGTVRPICLPFFDEELTPATPLWIIGWGFTKQNGGKSWVQDHRAGDALV

SEQ ID NO: 831024 - protein, 398 aa, Homo sapiens
MLDPDSDQPLNSLVKVILDKYYFLCGQPLHFIPRKQLCDGELDCPLGEDEEHCVKSFPEGPAVAVRLSKDRSTLQVLDSATGNWFSACFDNFTEALAETACRQMGYSSKPTFRAVEIGPDQDLDVVEITENSQELRMRNSSGPCLSGSLVSLHCLACGKSLKTPRVVGGEEASVDSWPWQVSIQYDKQHVCGGSILDPHWVLTAAHCFRKHTDVFNWKVRAGSDKLGSFPSLAVAKIIIIEFNPMYPKDNDIALMKLQFPLTFSGTVRPICLPFFDEELTPATPLWIIGWGFTKQNGGKMSDILLQASVQVIDSTRCNADDAYQGEVTEKMMCAGIPEGGVDTCQGDSGGPLMYQSDQWHVVGIVSWGYGCGGPSTPGVYTKVSAYLNWIYNVWKAEL

SEQ ID NO: 831025 - protein, 493 aa, Homo sapiens
MLDPDSDQPLNSLDVKPLRKPRIPMETFRKVGIPIIIALLSLASIIIVVVLIKVILDKYYFLCGQPLHFIPRKQLCDGELDCPLGEDEEHCVKSFPEGPAVAVRLSKDRSTLQVLDSATGNWFSACFDNFTEALAETACRQMGYSSKPTFRAVEIGPDQDLDVVEITENSQELRMRNSSGPCLSGSLVSLHCLACGKSLKTPRVVGGEEASVDSWPWQVSIQYDKQHVCGGSILDPHWVLTAAHCFRKHTDVFNWKVRAGSDKLGSFPSLAVAKIIIIEFNPMYPKDNDIALMKLQFPLTFSGTVRPICLPFFDEELTPATPLWIIGWGFTKQNGGKMSDILLQASVQVIDSTRCNADDAYQGEVTEKMMCAGIPEGGVDTCQGDSGGPLMYQSDQWHVVGIVSWGYGCGGPSTPGVYTKVSAYLNWIYNVWKDRTIQRSCNSPGTGLVIQQPAVPLMELRSARHTHRLTTCVCFLSFPALQPLSPLCPFPWD

SEQ ID NO: 831026 - protein, 397 aa, Homo sapiens
MLDPDSDQPLNSLDVKPLRKPRIPMETFRKVGIPIIIALLSLASIIIVVVLIKVILDKYYFLCGQPLHFIPRKQLCDGELDCPLGEDEEHCVKSFPEGPAVAVRLSKDRSTLQVLDSATGNWFSACFDNFTEALAETACRQMGYSSKPTFRAVEIGPDQDLDVVEITENSQELRMRNSSGPCLSGSLVSLHCLACGKSLKTPRVVGGEEASVDSWPWQVSIQYDKQHVCGGSILDPHWVLTAAHCFRKHTDVFNWKVRAGSDKLGSFPSLAVAKIIIIEFNPMYPKDNDIALMKLQFPLTFSGTVRPICLPFFDEELTPATPLWIIGWGFTKQNGGKMSDILLQASVQVIDSTRCNADDAYQGEVTEKMMCAGIPEGGVDTCQVGPPRIMGSSKNRV

SEQ ID NO: 831027 - protein, 436 aa, Homo sapiens; identical to SEQ ID NO: 831022

SEQ ID NO: 831028 - protein, 336 aa, Homo sapiens
MLDPDSDQPLNSLDVKPLRKPRIPMETFRKVGIPIIIALLSLASIIIVVVLIKVILDKYYFLCGQPLHFIPRKQLCDGELDCPLGEDEEHCVKSFPEGPAVAVRLSKDRSTLQVLDSATGNWFSACFDNFTEALAETACRQMGYSSKPTFRAVEIGPDQDLDVVEITENSQELRMRNSSGPCLSGSLVSLHCLACGKSLKTPRVVGGEEASVDSWPWQVSIQYDKQHVCGGSILDPHWVLTAAHCFRKHTDVFNWKVRAGSDKLGSFPSLAVAKIIIIEFNPMYPKDNDIALMKLQFPLTFSGTVRPICLPFFDEELTPATPLWIIGWGFTKQNGG

SEQ ID NO: 831029 - protein, 197 aa, Homo sapiens
MLDPDSDQPLNSLDVKPLRKPRIPMETFRKVGIPIIIALLSLASIIIVVVLIKVILDKYYFLCGQPLHFIPRKQLCDGELDCPLGEDEEHCVKSFPEGPAVAVRLSKDRSTLQVLDSATGNWFSACFDNFTEALAETACRQMGYSSKPTFRAVEIGPDQDLDVVEITENSQELRMRNSSGPVSQVLVSLHCLCCWES

SEQ ID NO: 831030 - protein, 385 aa, Homo sapiens
MLDPDSDQPLNSLDVKPLRKPRIPMETFRKVGIPIIIALLSLASIIIVVVLIRLSKDRSTLQVLDSATGNWFSACFDNFTEALAETACRQMGYSSKPTFRAVEIGPDQDLDVVEITENSQELRMRNSSGPCLSGSLVSLHCLACGKSLKTPRVVGGEEASVDSWPWQVSIQYDKQHVCGGSILDPHWVLTAAHCFRKHTDVFNWKVRAGSDKLGSFPSLAVAKIIIIEFNPMYPKDNDIALMKLQFPLTFSGTVRPICLPFFDEELTPATPLWIIGWGFTKQNGGKMSDILLQASVQVIDSTRCNADDAYQGEVTEKMMCAGIPEGGVDTCQGDSGGPLMYQSDQWHVVGIVSWGYGCGGPSTPGVYTKVSAYLNWIYNVWKAEL

SEQ ID NO: 831031 - protein, 350 aa, Homo sapiens; identical to SEQ ID NO: 831023

SEQ ID NO: 831032 - protein, 133 aa, Homo sapiens
MLDPDSDQPLNSLDVKPLRKPRIPMETFRKVGIPIIIALLSLASIIIVVVLIKVILDKYYFLCGQPLHFIPRKQLCDGELDCPLGEDEEHCVKSFPEGPAVAVRLSKDRSTLQVLDSATGNWFSACFDNFTEP

SEQ ID NO: 831033 - protein, 790 aa, Homo sapiens
MKITSTSCICPVLVCLCFVQRCYGTAHHSSIKVMRNQTKHIEGETEVHHRPKRGWVWNQFFVLEEHMGPDPQYVGKLHSNSDKGDGSVKYILTGEGAGTIFIIDDTTGDIHSTKSLDREQKTHYVLHAQAIDRRTNKPLEPESEFIIKVQDINDNAPKFTDGPYIVTVPEMSDMGTSVLQVTATDADDPTYGNSARVVYSILQGQPYFSVDPKTGVIRTALHNMDREAREHYSVVIQAKDMAGQVGGLSGSTTVNITLTDVNDNPPRFPQKHYQLYVPESAQVGSAVGKIKANDADTGSNADMTYSIINGDGMGIFSISTDKETREGILSLKKPLNYEKKKSYTLNIEGANTHLDFRFSHLGPFKDATMLKIIVGDVDEPPLFSMPSYLMEVYENAKIGTVVGTVLAQDPDSTNSLVRYFINYNVEDDRFFNIDANTGTIRTTKVLDREETPWYNITVTASEIDNPDLLSHVTVGIRVLDVNDNPPELAREYDIIVCENSKPGQVIHTISATDKDDFANGPRFNFFLDERLPVNPNFTLKDNEDNTASILTRRRRFSRTVQDVYYLPIMISDGGIPSLSSSSTLTIRVCACERDGRVRTCHAEAFLSSAGLSTGALIAILLCVLILLAIVVLFITLRRSKKEPLIISEEDVRENVVTYDDEGGGEEDTEAFDITALRNPSAAEELKYRRDIRPEVKLTPRHQTSSTLESIDVQEFIKQRLAEADLDPSVPPYDSLQTYAYEGQRSEAGSISSLDSATTQSDQDYHYLGDWGPEFKKLAELYGEIESERTT

SEQ ID NO: 831034 - protein, 790 aa, Homo sapiens; identical to SEQ ID NO: 831033

SEQ ID NO: 831035 - protein, 118 aa, Homo sapiens
GGLLLLLNSRPRRVGFTLTQNATNPDTERPFLCSATQPGSRPKSRHTKTDGHTLMTPEQVQTNMTLHTRNVVQLNTLIPRPGPLAHTRPLGTQALPNLFILSNDVFGSAHTRSHTHLL

SEQ ID NO: 831036 - protein, 90 aa, Homo sapiens
NLRLGTRLGGCDHDPSTMAVGKNKRLTKGGKKGAKKKVVDPFSKKDWYDVKAPAMFNYKKYWKDARHQDPRGTKIASDGLKGRVFERESC

SEQ ID NO: 831037 - protein, 101 aa, Homo sapiens
YCHTIVGRKTFIWNIQTYSSGCDHDPSTMAVGKNKRLTKGGKKGAKKKVVDPFSKKDWYDVKAPAMFNYKKYWKDARHQDPRGTKIASDGLKGRVFERESC

SEQ ID NO: 831038 - protein, 102 aa, Homo sapiens
MMSSLQHTHAHTHNCFEKEKAQSLLTLSGGTSSMGGFQWGAQGPGKFLGKKKATGGGPERTTGGPHTSFETRKPGIGEIYLKPTKLPRKILGSHTGSQNFSN

SEQ ID NO: 831039 - protein, 82 aa, Homo sapiens
AAYYYYCSEFKLLTMYGDMGAQGPGKFLGKKKATGGGPERTTGGPHTSFETRKPGIGEIYLKPTKLPRKILGSHTGSQNFPN

SEQ ID NO: 831040 - protein, 90 aa, Homo sapiens; identical to SEQ ID NO: 831036

SEQ ID NO: 831041 - protein, 114 aa, Homo sapiens
MVTCLRLFCVGFTLTQNATNPDTERPFLCSATQPGSRPKSRHTKTDGHTLMTPEQVQTNMTLHTRNVVQLNTLIPRPGPLAHTRPLGTQALPNLFILSNDVFGSAHTRSHTHLL

SEQ ID NO: 831042 - protein, 114 aa, Homo sapiens; identical to SEQ ID NO: 831041

SEQ ID NO: 831043 - protein, 114 aa, Homo sapiens; identical to SEQ ID NO: 831041

SEQ ID NO: 831044 - protein, 114 aa, Homo sapiens; identical to SEQ ID NO: 831041

SEQ ID NO: 831045 - protein, 114 aa, Homo sapiens; identical to SEQ ID NO: 831041

SEQ ID NO: 831046 - protein, 114 aa, Homo sapiens; identical to SEQ ID NO: 831041

SEQ ID NO: 831047 - protein, 114 aa, Homo sapiens; identical to SEQ ID NO: 831041

SEQ ID NO: 831048 - protein, 114 aa, Homo sapiens; identical to SEQ ID NO: 831041

SEQ ID NO: 831049 - protein, 114 aa, Homo sapiens; identical to SEQ ID NO: 831041

SEQ ID NO: 831050 - protein, 114 aa, Homo sapiens; identical to SEQ ID NO: 831041

SEQ ID NO: 831051 - protein, 92 aa, Homo sapiens
RLVRGRVLIGRGCDHDPSTMAVGKNKRLTKGGKKGAKKKVVDPFSKKDWYDVKAPAMFNYKKYWKDARHQDPRGTKIASDGLKGRVFERESC

SEQ ID NO: 831052 - protein, 114 aa, Homo sapiens; identical to SEQ ID NO: 831041

SEQ ID NO: 831053 - protein, 114 aa, Homo sapiens; identical to SEQ ID NO: 831041

SEQ ID NO: 831054 - protein, 114 aa, Homo sapiens; identical to SEQ ID NO: 831041

SEQ ID NO: 831055 - protein, 114 aa, Homo sapiens; identical to SEQ ID NO: 831041

SEQ ID NO: 831056 - protein, 114 aa, Homo sapiens; identical to SEQ ID NO: 831041

SEQ ID NO: 831057 - protein, 114 aa, Homo sapiens; identical to SEQ ID NO: 831041

SEQ ID NO: 831058 - protein, 108 aa, Homo sapiens
TASTRPGVNRPRPKFSRDSHFRPFGSLTAVTMTPAPWRLARTSALRKAAKREPRRKCKSRLSWRLAFWGSAGIGGLVLDRGVGRMARIPVGLCGPWRVGAPRNAAWRG

SEQ ID NO: 831059 - protein, 114 aa, Homo sapiens
MVTCLRLFCVGFTLTQNATNPDTERPFLCSATQPGSRPKSRHTKTDGHTLMTPEQVQTNMTLHTRNVVQLNTLIPRPGPLAHTRPLGTQALPNLFILSNDVFGSAHTRSHTHLP

SEQ ID NO: 831060 - protein, 114 aa, Homo sapiens; identical to SEQ ID NO: 831041

SEQ ID NO: 831061 - protein, 114 aa, Homo sapiens; identical to SEQ ID NO: 831041

SEQ ID NO: 831062 - protein, 114 aa, Homo sapiens; identical to SEQ ID NO: 831041

SEQ ID NO: 831063 - protein, 114 aa, Homo sapiens; identical to SEQ ID NO: 831041

SEQ ID NO: 831064 - protein, 114 aa, Homo sapiens; identical to SEQ ID NO: 831041

SEQ ID NO: 831065 - protein, 126 aa, Homo sapiens
MVTCLRLFCVGFTLTQNATNPDTERPFLCSATQPGSRPKSRHTKTDGHTLMTPEQVQTNMTLHTRNVVQLNTCRGEQAPWEASNGVHKRQVSSWGKKRPLGGDPHAPRVALTKGLKPESLGFVRYI

SEQ ID NO: 831066 - protein, 126 aa, Homo sapiens; identical to SEQ ID NO: 831065

SEQ ID NO: 831067 - protein, 68 aa, Homo sapiens
TASTRPGVNRPRPKFSRDSHFRPFGSLTAVTMTPAPWRLARTSALRKAAKREPRRKWLIHFLRKIGMM

SEQ ID NO: 831068 - protein, 68 aa, Homo sapiens; identical to SEQ ID NO: 831067

SEQ ID NO: 831069 - protein, 126 aa, Homo sapiens; identical to SEQ ID NO: 831065

SEQ ID NO: 831070 - protein, 75 aa, Homo sapiens
MAVGKNKRLTKGGKKGAKKKVVDPFSKKDWYDVKAPAMFNYKKYWKDARHQDPRGTTKLLCVSGGGLARELNSTD

SEQ ID NO: 831071 - protein, 92 aa, Homo sapiens; identical to SEQ ID NO: 831051

SEQ ID NO: 831072 - protein, 101 aa, Homo sapiens; identical to SEQ ID NO: 831037

SEQ ID NO: 831073 - protein, 84 aa, Homo sapiens
ISVLGWRLLVRYVCHRSCHILHGGKKGAKKKVVDPFSKKDWYDVKAPAMFNYKKYWKDARHQDPRGTKIASDGLKGRVFERESC

SEQ ID NO: 831074 - protein, 114 aa, Homo sapiens; identical to SEQ ID NO: 831041

SEQ ID NO: 831075 - protein, 84 aa, Homo sapiens; identical to SEQ ID NO: 831073

SEQ ID NO: 831076 - protein, 114 aa, Homo sapiens; identical to SEQ ID NO: 831041

SEQ ID NO: 831077 - protein, 114 aa, Homo sapiens; identical to SEQ ID NO: 831041

SEQ ID NO: 831078 - protein, 114 aa, Homo sapiens; identical to SEQ ID NO: 831041

SEQ ID NO: 831079 - protein, 114 aa, Homo sapiens; identical to SEQ ID NO: 831041

SEQ ID NO: 831080 - protein, 114 aa, Homo sapiens; identical to SEQ ID NO: 831041

SEQ ID NO: 831081 - protein, 114 aa, Homo sapiens; identical to SEQ ID NO: 831041

SEQ ID NO: 831082 - protein, 114 aa, Homo sapiens; identical to SEQ ID NO: 831041

SEQ ID NO: 831083 - protein, 114 aa, Homo sapiens; identical to SEQ ID NO: 831041

SEQ ID NO: 831084 - protein, 128 aa, Homo sapiens
TASTRPGVNRPRPKFSRDSHFRPFGSLTAVTMTPAPWRLARTSALRKAAKREPRRKLKNTVRIDLQWNLSIFLKSRVDPFSKKDWYDVKAPAMFNYKKYWKDARHQDPRGTKIASDGLKGRVFERESC

SEQ ID NO: 831085 - protein, 119 aa, Homo sapiens
  misc_feature (75)..(76): Xaa can be any naturally occurring amino acid
  misc_feature (80)..(80): Xaa can be any naturally occurring amino acid
MAVGKNKRLTKGGKKGAKKKVVDPFSKKDWYDVKAPAMFNYKKYWKDARHQDPRGTKELGILGMGSQKGIRVVSXXEKRXGKGFSFGLEFLGQKMGCKVGIVAETFKLITERMFRVKTA

SEQ ID NO: 831086 - protein, 111 aa, Homo sapiens
TASTRPGVNRPRPKFSRDSHFRPFGSLTAVTMTPAPWRLARTSALRKAAKREPRRKCKSRLSWRLAFWGSAGIGGLVLDRGVGRMARIPVGLCGPWRVGAPRNAAWRVGVE

SEQ ID NO: 831087 - protein, 114 aa, Homo sapiens
MVTCLRLFCVGFTLTQNATNPDTERPFLCSATQPGSRPKSRHTKTDGHTLMTPEKVQTNMTLHTRNVVQLNTWIPRPGPLAHTRPLATQALPNLFILSNDVFASAHTRSHTHLL

SEQ ID NO: 831088 - protein, 170 aa, Homo sapiens
MVTCLRLFCVGFTLTQNATNPDTERPFLCSATQPGSRPKSRHTKTDGHTLMTPEQVQTNMTLHTRNVVQLNTLIPRPGPLAHTRPLGTQALPNLFILSNDVFGSAHTGAQGPGKFLGKKKATGGGPERTTGGPHTSFETRKPGIGEIYLKPTKLPRKILGSHTGSQNFPN

SEQ ID NO: 831089 - protein, 68 aa, Homo sapiens; identical to SEQ ID NO: 831067

SEQ ID NO: 831090 - protein, 126 aa, Homo sapiens; identical to SEQ ID NO: 831065

SEQ ID NO: 831091 - protein, 68 aa, Homo sapiens; identical to SEQ ID NO: 831067

SEQ ID NO: 831092 - protein, 68 aa, Homo sapiens; identical to SEQ ID NO: 831067

SEQ ID NO: 831093 - protein, 122 aa, Homo sapiens
MAVGKNKRLTKGGKKGAKKKVVDPFSKKDWYDVKAPAMFNYKKYWKDARHQDPRGTTKLASNGSQGSGVFKVSLADSQSDEVDIERYTLITRVYRKTTASITTSHGSHRHICATMTNVPTMM

SEQ ID NO: 831094 - protein, 170 aa, Homo sapiens
EEEEEEEEGAGVPACPPKGPGDVPLSPGAPLERPAEEEEDEEDGQEPGGLALPPPPPPPPPPPPRSREQRRNYQPRWRGEYLMDYDGSRRGLVCMVCGGALATLKVSTIKRHILQVHPFSMDFTPEERQTILEAYEEAALRCYGHEGFGPPAPAPRDGGADLKSGAVCRA

SEQ ID NO: 831095 - protein, 170 aa, Homo sapiens; identical to SEQ ID NO: 831094

SEQ ID NO: 831096 - protein, 170 aa, Homo sapiens; identical to SEQ ID NO: 831094

SEQ ID NO: 831097 - protein, 517 aa, Homo sapiens
MLLPLLLLLPMCWAVEVKRPRGVSLTNHHFYDESKPFTCLDGSATIPFDQVNDDYCDCKDGSDEPGTAACPNGSFHCTNTGYKPLYIPSNRVNDGVCDCCDGTDEYNSGVICENTCKEKGRKERESLQQMAEVTREGFRLKKILIEDWKKAREEKQKKLIELQAGKKSLEDQVEMLRTVKEEAEKPEREAKEQHQKLWEEQLAAAKAQQEQELAADAFKELDDDMDGTVSVTELQTHPELDTDGDGALSEAEAQALLSGDTQTDATSFYDRVWAAIRDKYRSEALPTDLPAPSAPDLTEPKEEQPPVPSSPTEEEEEEEEEEEEEAEEEEEEEDSEEAPPPLSPPQPASPAEEDKMPPYDEQTQAFIDAAQEARNKFEEAERSLKDMEESIRNLEQEISFDFGPNGEFAYLYSQCYELTTNEYVYRLCPFKLVSQKPKLGGSPTSLGTWGSWIGPDHDKFSAMKYEQGTGCWQGPNRSTTVRLLCGKETMVTSTTRAQSLRVPHGADDASRLPGATA

SEQ ID NO: 831098 - protein, 524 aa, Homo sapiens
MLLPLLLLLPMCWAVEVKRPRGVSLTNHHFYDESKPFTCLDGSATIPFDQVNDDYCDCKDGSDEPGTAACPNGSFHCTNTGYKPLYIPSNRVNDGVCDCCDGTDEYNSGVICENTCKEKGRKERESLQQMAEVTREGFRLKKILIEDWKKAREEKQKKLIELQAGKKSLEDQVEMLRTVKEEAEKPEREAKEQHQKLWEEQLAAAKAQQEQELAADAFKELDDDMDGTVSVTELQTHPELDTDGDGALSEAEAQALLSGDTQTDATSFYDRVWAAIRDKYRSEALPTDLPAPSAPDLTEPKEEQPPVPSSPTEEEEEEEEEEEEEAEEEEEEEDSEVQGEQPKEAPPPLSPPQPASPAEEDKMPPYDEQTQAFIDAAQEARNKFEEAERSLKDMEESIRNLEQEISFDFGPNGEFAYLYSQCYELTTNEYVYRLCPFKLVSQKPKLGGSPTSLGTWGSWIGPDHDKFSAMKYEQGTGCWQGPNRSTTVRLLCGKETMVTSTTRAQSLRVPHGADDASRLPGATA

SEQ ID NO: 831099 - protein, 514 aa, Homo sapiens
MLLPLLLLLPMCWAVEVKRPRGVSLTNHHFYDESKPFTCLDGSATIPFDQVNDDYCDCKDGSDEPGTAACPNGSFHCTNTGYKPLYIPSNRVNDGVCDCCDGTDEYNSGVICENTCKEKGRKERESLQQMAEVTREGFRLKKILIEDWKKAREEKQKKLIELQAGKKSLEDQVEMLRTVKEEAEKPEREAKEQHQKLWEEQLAAAKAQQEQELAADAFKELDDDMDGTVSVTELQTHPELDTDGDGALSEAEAQALLSGDTQTDATSFYDRVWAAIRDKYRSEALPTDLPAPSAPDLTEPKEEQPPVPSSPTEEEEEEEEEEEEEAEEEEEEEDSEVQGEQPKPASPAEEDKMPPYDEQTQAFIDAAQEARNKFEEAERSLKDMEESIRNLEQEISFDFGPNGEFAYLYSQCYELTTNEYVYRLCPFKLVSQKPKLGGSPTSLGTWGSWIGPDHDKFSAMKYEQGTGCWQGPNRSTTVRLLCGKETMVTSTTRAQSLRVPHGADDASRLPGATA

SEQ ID NO: 831100 - protein, 358 aa, Homo sapiens
MLLPLLLLLPMCWAVEVKRPRGVSLTNHHFYDESKPFTCLDGSATIPFDQVNDDYCDCKDGSDEPGTAACPNGSFHCTNTGYKPLYIPSNRVNDGVCDCCDGTDEYNSGVICENTCKEKGRKERESLQQMAEVTREGFRLKKILIEDWKKAREEKQKKLIELQAGKKSLEDQVEMLRTVKEEAEKPEREAKEQHQKLWEEQLAAAKAQQEQELAADAFKELDDDMDGTVSVTELQTHPELDTDGDGALSEAEAQALLSGDTQTDATSFYDRVWAAIRDKYRSEALPTDLPAPSAPDLTEPKEEQPPVPSSPTEEEEEEEEEEEEEAEEEEEEEDSEVQGEQPKLPRRPATSSRRPSGR

SEQ ID NO: 831101 - protein, 488 aa, Homo sapiens
MLLPLLLLLPMCWAVEVKRPRGVSLTNHHFYDESKPFTCLDGSATIPFDQVNDDYCDCKDGSDEPGTAACPNGSFHCTNTGYKPLYIPSNRVNDGVCDCCDGTDEYNSGVICENTCKEKGRKERESLQQMAEVTREGFRLKKILIEDWKKAREEKQKKLIELQAGKKSLEDQVEMLRTVKEEAEKPEREAKEQHQKLWEEQLAAAKAQQEQELAADAFKELDDDMDGTVSVTELQTHPELDTDGDGALSEAEAQALPTDLPAPSAPDLTEPKEEQPPVPSSPTEEEEEEEEEEEEEAEEEEEEEDSEEAPPPLSPPQPASPAEEDKMPPYDEQTQAFIDAAQEARNKFEEAERSLKDMEESIRNLEQEISFDFGPNGEFAYLYSQCYELTTNEYVYRLCPFKLVSQKPKLGGSPTSLGTWGSWIGPDHDKFSAMKYEQGTGCWQGPNRSTTVRLLCGKETMVTSTTRAQSLRVPHGADDASRLPGATA

SEQ ID NO: 831102 - protein, 546 aa, Homo sapiens
MLLPLLLLLPMCWAVEVKRPRGVSLTNHHFYDESKPFTCLDGSATIPFDQVNDDYCDCKDGSDEPGTAACPNGSFHCTNTGYKPLYIPSNRVNDGVCDCCDGTDEYNSGVICENTCKEKGRKERESLQQMAEVTREGFRLKKILIEDWKKAREEKQKKLIELQAGKKSLEDQVEMLRTVKEEAEKPEREAKEQHQKLWEEQLAAAKAQQEQELAADAFKELDDDMDGTVSVTELQTHPELDTDGDGALSEAEAQALLSGDTQTDATSFYDRVWAAIRDKYRSEALPTDLPAPSAPDLTEPKEEQPPVPSSPTEEEEEEEEEEEEEAEEEEEEEDSEEAPPPLSPPQPASPAEEDKMPPYDEQTQAFIDAAQEARNKFEEAERSLKDMEESIRNLEQEISFDFGPNGEFAYLYSQCYELTTNEYVYRLCPFKLVSQKPKLGGSPTSLGGVAWAGPFPLPPPGAPTPAQPSAPCVSHSTWGSWIGPDHDKFSAMKYEQGTGCWQGPNRSTTVRLLCGKETMVTSTTRAQSLRVPHGADDASRLPGATA

SEQ ID NO: 831103 - protein, 517 aa, Homo sapiens; identical to SEQ ID NO: 831097

SEQ ID NO: 831104 - protein, 517 aa, Homo sapiens; identical to SEQ ID NO: 831097

SEQ ID NO: 831105 - protein, 517 aa, Homo sapiens; identical to SEQ ID NO: 831097

SEQ ID NO: 831106 - protein, 686 aa, Homo sapiens
  misc_feature (1)..(1): Xaa can be any naturally occurring amino acid
XYRTLRGTKEEEEEEEEEEAEEEEEEEDSEEAPPPLSPPQPASPAEEDKMPPYDEQTQAFIDAAQEARNKFEEAERSLKDMEESIRNLEQEISFDFGPNGEFAYLYSQCYELTTNEYVYRLCPFKLVSQKPKLGGSPTSLGTWGSWIGPDHDKFSAMKYEQGTGCWQDPMTVTTHRAPPVRERDHGDQHHRAQSLHHHFYDESKPFTCLDGSATIPFDQVNDDYCDCKDGSDEPGTAACPNGSFHCTNTGYKPLYIPSNRVNDGVCDCCDGTDEYNSGVICENTCKEKGRKERESLQQMAEVTREGFRLKKILIEDWKKAREEKQKKLIELQAGKKSLEDQVEMLRTVKEEAEKPEREAKEQHQKLWEEQLAAAKAQQEQELAADAFKELDDDMDGTVSVTELQTHPELDTDGDGALSEAEAQALLSGDTQTDATSFYDRVWAAIRDKYRSEALPTDLPAPSAPDLTEPKEEQPPVPSSPTEEEEEEEEEEEEEAEEEEEEEDSEEAPPPLSPPQPASPAEEDKMPPYDEQTQAFIDAAQEARNKFEEAERSLKDMEESIRNLEQEISFDFGPNGEFAYLYSQCYELTTNEYVYRLCPFKLVSQKPKLGGSPTSLGTWGSWIGPDHDKFSAMKYEQGTGCWQGPNRSTTVRLLCGKETMVTSTTRAQSLRVPHGADDASRLPGATA

SEQ ID NO: 831107 - protein, 388 aa, Homo sapiens
MAEVTREGFRLKKILIEDWKKAREEKQKKLIELQAGKKSLEDQVEMLRTVKEEAEKPEREAKEQHQKLWEEQLAAAKAQQEQELAADAFKELDDDMDGTVSVTELQTHPELDTDGDGALSEAEAQALLSGDTQTDATSFYDRVWAAIRDKYRSEALPTDLPAPSAPDLTEPKEEQPPVPSSPTEEEEEEEEEEEEEAEEEEEEEDSEEAPPPLSPPQPASPAEEDKMPPYDEQTQAFIDAAQEARNKFEEAERSLKDMEESIRNLEQEISFDFGPNGEFAYLYSQCYELTTNEYVYRLCPFKLVSQKPKLGGSPTSLGTWGSWIGPDHDKFSAMKYEQGTGCWQGPNRSTTVRLLCGKETMVTSTTRAQSLRVPHGADDASRLPGATA

SEQ ID NO: 831108 - protein, 357 aa, Homo sapiens
LWVRVTVWVSGDCWVLVTVKEEAEKPEREAKEQHQKLWEEQLAAAKAQQEQELAADAFKELDDDMDGTVSVTELQTHPELDTDGDGALSEAEAQALLSGDTQTDATSFYDRVWAAIRDKYRSEALPTDLPAPSAPDLTEPKEEQPPVPSSPTEEEEEEEEEEEEEAEEEEEEEDSEEAPPPLSPPQPASPAEEDKMPPYDEQTQAFIDAAQEARNKFEEAERSLKDMEESIRNLEQEISFDFGPNGEFAYLYSQCYELTTNEYVYRLCPFKLVSQKPKLGGSPTSLGTWGSWIGPDHDKFSAMKYEQGTGCWQGPNRSTTVRLLCGKETMVTSTTRAQSLRVPHGADDASRLPGATA

SEQ ID NO: 831109 - protein, 503 aa, Homo sapiens
  misc_feature (1)..(1): Xaa can be any naturally occurring amino acid
XYRTLRGTKEEEEEEEEEEAEEEEEEEDSEEAPPPLSPPQPASPAEEDKMPPYDEQTQAFIDAAQEARNKFEEAERSLKDMEESIRNLEQEISFDFGPNGEFAYLYSQCYELTTNEYVYRLCPFKLVSQKPKLGGSPTSLGTWGSWIGPDHDKFSAMKYEQGTGCWQDPMTVTTTVRLLCGKETMVTSTTEPSRYEYLMELDARKELDDDMDGTVSVTELQTHPELDTDGDGALSEAEAQALLSGDTQTDATSFYDRVWAAIRDKYRSEALPTDLPAPSAPDLTEPKEEQPPVPSSPTEEEEEEEEEEEEEAEEEEEEEDSEEAPPPLSPPQPASPAEEDKMPPYDEQTQAFIDAAQEARNKFEEAERSLKDMEESIRNLEQEISFDFGPNGEFAYLYSQCYELTTNEYVYRLCPFKLVSQKPKLGGSPTSLGTWGSWIGPDHDKFSAMKYEQGTGCWQGPNRSTTVRLLCGKETMVTSTTRAQSLRVPHGADDASRLPGATA

SEQ ID NO: 831110 - protein, 366 aa, Homo sapiens
MLLPLLLLLPMCWAVEVKRPRGVSLTNHHFYDESKPFTCLDGSATIPFDQVNDDYCDCKDGSDEPGTAACPNGSFHCTNTGYKPLYIPSNRVNDGVCDCCDGTDEYNSGVICENTCKEKGRKERESLQQMAEVTREGFRLKKILIEDWKKAREEKQKKLIELQAGKKSLEDQVEMLRTVKEEAEKPEREAKEQHQKLWEEQLAAAKAQQEQELAADAFKELDDDMDGTVSVTELQTHPELDTDGDGALSEAEAQALLSGDTQTDATSFYDRVWAAIRDKYRSEALPTDLPAPSAPDLTEPKEEQPPVPSSPTEEEEEEEEEEEEEAEEEEEEEDSERPDDMSPRAAACEKTMRPREKQLIRVAESR

SEQ ID NO: 831111 - protein, 331 aa, Homo sapiens
MLLPLLLLLPMCWAVEVKRPRGVSLTNHHFYDESKPFTCLDGSATIPFDQVNDDYCDCKDGSDEPGTAACPNGSFHCTNTGYKPLYIPSNRVNDGVCDCCDGTDEYNSGVICENTCKEKGRKERESLQQMAEVTREGFRLKKEEEEEDSEEAPPPLSPPQPASPAEEDKMPPYDEQTQAFIDAAQEARNKFEEAERSLKDMEESIRNLEQEISFDFGPNGEFAYLYSQCYELTTNEYVYRLCPFKLVSQKPKLGGSPTSLGTWGSWIGPDHDKFSAMKYEQGTGCWQGPNRSTTVRLLCGKETMVTSTTRAQSLRVPHGADDASRLPGATA

SEQ ID NO: 831112 - protein, 322 aa, Homo sapiens
MLLPLLLLLPMCWAVEVKRPRGVSLTNHHFYDESKPFTCLDGSATIPFDQVNDDYCDCKDGSDEPGTAACPNGSFHCTNTGYKPLYIPSNRVNDGVCDCCDGTDEYNSGVICENTCKEKGRKERESLQQMAEVTREGFRLKKILIEDWKKAREEKQKKLIELQAGKKSLEDQVEMLRTVKEEAEKPEREAKEQHQKLWEEQLAAAKAQQEQELAADAFKELDDDMDGTVSVTELQTHPELDTDGDGALSEAEAQALLSGDTQTDATSFYDRVWAAIRDKYRSEALPTDLPAPSAPDLTEPKEEQPPVPSSPSPVPATPPSGD

SEQ ID NO: 831113 - protein, 299 aa, Homo sapiens
MLLPLLLLLPMCWAVEVKRPRGVSLTNHHFYDESKPFTCLDGSATIPFDQVNDDYCDCKDGSDEPGTAACPNGSFHCTNTGYKPLYIPSNRVNDGVCDCCDGTDEYNSGVICENTCKEKGRKERESLQQMAEVTREGFRLKKILIEDWKKAREEKQKKLIELQAGKKSLEDQVEMLRTVKEEAEKPEREAKEQHQKLWEEQLAAAKAQQEQELAADAFKELDDDMDGTVSVTELQTHPELDTDGDGALSEAEAQALLSGDTQTDATSFYDRVWAAIRDKYRSEHCPPTFQHLRFGKGTE

SEQ ID NO: 831114 - protein, 350 aa, Homo sapiens
MLLPLLLLLPMCWAVEVKRPRGVSLTNHHFYDESKPFTCLDGSATIPFDQVNDDYCDCKDGSDEPGTAACPNGSFHCTNTGYKPLYIPSNRVNDGVCDCCDGTDEYNSGVICENTCKEKGRKERESLQQMAEVTREGFRLKKILIEDWKKAREEKQKKLIELQAGKKSLEDQVEMLRTVKEEAEKPEREAKEQHQKLWEEQLAAAKAQQEQELAADAFKELDDDMDGTVSVTELQTHPELDTDGDGALSEAEAQALLSGDTQTDATSFYDRVWAAIRDKYRSEHLPTDLPDLLGLIVLPGWADRQMDRPTLPELLTWSSEITPLPSFPSPPTQRFFGSAQTYFSIKQLEP

SEQ ID NO: 831115 - protein, 256 aa, Homo sapiens
MLLPLLLLLPMCWAVEVKRPRGVSLTNHHFYDESKPFTCLDGSATIPFDQVNDDYCDCKDGSDEPGTAACPNGSFHCTNTGYKPLYIPSNRVNDGVCDCCDGTDEYNSGVICENTCKEKGRKERESLQQMAEVTREGFRLKKILIEDWKKAREEKQKKLIELQAGKKSLEDQVEMLRTVKEEAEKPEREAKEQHQKLWEEQLAAAKAQQEQELAADAFKELDDDMDGTVSVTELQTHPELDTDGDGALSEAEAQPS

SEQ ID NO: 831116 - protein, 186 aa, Homo sapiens
  misc_feature (1)..(1): Xaa can be any naturally occurring amino acid
XYRTLRGTKEEEEEEEEEEAEEEEEEEDSEEAPPPLSPPQPASPAEEDKMPPYDEQTQAFIDAAQEARNKFEEAERSLKDMEESIRNLEQEISFDFGPNGEFAYLYSQCYELTTNDTWGSWIGPDHDKFSAMKYEQGTGCWQGPNRSTTVRLLCGKETMVTSTTRAQSLRVPHGADDASRLPGATA

SEQ ID NO: 831117 - protein, 115 aa, Homo sapiens
MEFHRVGQAGLKLITSGDPPASASWVAGLHGTELVVVGGSPTSLGTWGSWIGPDHDKFSAMKYEQGTGCWQGPNRSTTVRLLCGKETMVTSTTRAQSLRVPHGADDASRLPGATA

SEQ ID NO: 831118 - protein, 519 aa, Homo sapiens
  misc_feature (1)..(1): Xaa can be any naturally occurring amino acid
XYRTLRGTKEEEEEEEEEEAEEEEEEEDSEEAPPPLSPPQPASPAEEDKMPPYDEQTQAFIDAAQEARNKFEEAERSLKDMEESIRNLEQEISFDFGPNGEFAYLYSQCYELTTNEYVYRLCPFKLVSQKPKLGGSPTSLGTWGSWIGPDHDKFSAMKYEQGTGCWQDPMTVTTHRAPPVRERDHGDQHHRAQSLHHHFYDESKPFTCLDGSATIPFDQVNDDYCDCKDGSDEPGTAACPNGSFHCTNTGYKPLYIPSNRVNDGVCDCCDGTDEYNSGVICENTCKEKGRKERESLQQMAEVTREGFRLKKILIEDWKKAREEKQKKLIELQAGKKSLEDQVEMLRTVKEEAEKPEREAKEQHQKLWEEQLAAAKAQQEQELAADAFKELDDDMDGTVSVTELQTHPELDTDGDGALSEAEAQALLSGDTQTDATSFYDRVWAAIRDKYRSEHLPTDLPDLLGLIVLPGWADRQMDRPTLPELLTWSSEITPLPSFPSPPTQRFFGSAQTYFSIKQLEP

SEQ ID NO: 831119 - protein, 43 aa, Homo sapiens
MLLPLLLLLPMCWAVEVKRPRGVSLTNHHFYDESALLPDVARV

SEQ ID NO: 831120 - protein, 517 aa, Homo sapiens; identical to SEQ ID NO: 831097

SEQ ID NO: 831121 - protein, 517 aa, Homo sapiens; identical to SEQ ID NO: 831097

SEQ ID NO: 831122 - protein, 517 aa, Homo sapiens; identical to SEQ ID NO: 831097

SEQ ID NO: 831123 - protein, 492 aa, Homo sapiens
MLLPLLLLLPMCWAVEVKRPRGVSLTNHHFYDESKPFTCLDGSATIPFDQVNDDYCDCKDGSDEPGTAACPNGSFHCTNTGYKPLYIPSNRVNDGVCDCCDGTDEYNSGVICENTCKEKGRKERESLQQMAEVTREGFRLKKILIEDWKKAREEKQKKLIELQAGKKSLEDQVEMLRTVKEEAEKPEREAKEQHQKLWEEQLAAAKAQQEQELAADAFKELDDDMDGTVSVTELQTHPELDTDGDGALSEAEAQALLSGDTQTDATSFYDRVWAAIRDKYRSEALPTDLPAPSAPDLTEPKEEQPPVPSSPTEEEEEEEEEEEEEAEEEEEEEDSEEAPPPLSPPQPASPAEEDKMPPYDEQTQAFIDAAQEARNKFEEAERSLKDMEESIRNLEQEISFDFGPNGEFAYLYSQCYELTTNDTWGSWIGPDHDKFSAMKYEQGTGCWQGPNRSTTVRLLCGKETMVTSTTRAQSLRVPHGADDASRLPGATA

SEQ ID NO: 831124 - protein, 517 aa, Homo sapiens; identical to SEQ ID NO: 831097

SEQ ID NO: 831125 - protein, 551 aa, Homo sapiens
MLLPLLLLLPMCWAVEVKRPRGVSLTISRECSAGGDGRTEVVFGGEGAYLPWAELPVPQQNHHFYDESKPFTCLDGSATIPFDQVNDDYCDCKDGSDEPGTAACPNGSFHCTNTGYKPLYIPSNRVNDGVCDCCDGTDEYNSGVICENTCKEKGRKERESLQQMAEVTREGFRLKKILIEDWKKAREEKQKKLIELQAGKKSLEDQVEMLRTVKEEAEKPEREAKEQHQKLWEEQLAAAKAQQEQELAADAFKELDDDMDGTVSVTELQTHPELDTDGDGALSEAEAQALLSGDTQTDATSFYDRVWAAIRDKYRSEALPTDLPAPSAPDLTEPKEEQPPVPSSPTEEEEEEEEEEEEEAEEEEEEEDSEEAPPPLSPPQPASPAEEDKMPPYDEQTQAFIDAAQEARNKFEEAERSLKDMEESIRNLEQEISFDFGPNGEFAYLYSQCYELTTNEYVYRLCPFKLVSQKPKLGGSPTSLGTWGSWIGPDHDKFSAMKYEQGTGCWQGPNRSTTVRLLCGKETMVTSTTRAQSLRVPHGADDASRLPGATA

SEQ ID NO: 831126 - protein, 524 aa, Homo sapiens; identical to SEQ ID NO: 831098

SEQ ID NO: 831127 - protein, 517 aa, Homo sapiens; identical to SEQ ID NO: 831097

SEQ ID NO: 831128 - protein, 528 aa, Homo sapiens
MLLPLLLLLPMCWAVEVKRPRGVSLTNHHFYDESKPFTCLDGSATIPFDQVNDDYCDCKDGSDEPGTAACPNGSFHCTNTGYKPLYIPSNRVNDGVCDCCDGTDEYNSGVICENTCKEKGRKERESLQQMAEVTREGFRLKKILIEDWKKAREEKQKKLIELQAGKKSLEDQVEMLRTVKEEAEKPEREAKEQHQKLWEEQLAAAKAQQEQELAADAFKELDDDMDGTVSVTELQTHPELDTDGDGALSEAEAQALLSGDTQTDATSFYDRVWAAIRDKYRSEALPTDLPAPSAPDLTEPKEEQPPVPSSPTEEEEEEEEEEEEEAEEEEEEEDSEEAPPPLSPPQPASPAEEDKMPPYDEQTQAFIDAAQEARNKFEEAERSLKDMEESIRNLEQEISFDFGPNGEFAYLYSQCYELTTNEYVYRLCPFKLVSQKPKLGGSPTSLGTWGSWIGPDHDKFSAMKYEQGTGCWQGPNRSTTVRLLCGKETMVTSTTRAQSLRVPHGADDASRVSQIALTQFLSSQPRSQ

SEQ ID NO: 831129 - protein, 385 aa, Homo sapiens
LRGELRWWRRLLLLLLLLLLLEPDGVIRSRGGEIGSDLMLMFWLVLMENWNPEKLPSSNKRAEGCLSQQLAAAKAQQEQELAADAFKELDDDMDGTVSVTELQTHPELDTDGDGALSEAEAQALLSGDTQTDATSFYDRVWAAIRDKYRSEALPTDLPAPSAPDLTEPKEEQPPVPSSPTEEEEEEEEEEEEEAEEEEEEEDSEEAPPPLSPPQPASPAEEDKMPPYDEQTQAFIDAAQEARNKFEEAERSLKDMEESIRNLEQEISFDFGPNGEFAYLYSQCYELTTNEYVYRLCPFKLVSQKPKLGGSPTSLGTWGSWIGPDHDKFSAMKYEQGTGCWQGPNRSTTVRLLCGKETMVTSTTRAQSLRVPHGADDASRLPGATA

SEQ ID NO: 831130 - protein, 258 aa, Homo sapiens
MSDSRGYPFDGCLGAPVRYTYRVRALPTDLPAPSAPDLTEPKEEQPPVPSSPTEEEEEEEEEEEEEAEEEEEEEDSEEAPPPLSPPQPASPAEEDKMPPYDEQTQAFIDAAQEARNKFEEAERSLKDMEESIRNLEQEISFDFGPNGEFAYLYSQCYELTTNEYVYRLCPFKLVSQKPKLGGSPTSLGTWGSWIGPDHDKFSAMKYEQGTGCWQGPNRSTTVRLLCGKETMVTSTTRAQSLRVPHGADDASRLPGATA

SEQ ID NO: 831131 - protein, 219 aa, Homo sapiens
RPTRRGRVGRPTRRPRVRDAWEEEEEEAEEEEEEEDSEEAPPPLSPPQPASPAEEDKMPPYDEQTQAFIDAAQEARNKFEEAERSLKDMEESIRNLEQEISFDFGPNGEFAYLYSQCYELTTNEYVYRLCPFKLVSQKPKLGGSPTSLGTWGSWIGPDHDKFSAMKYEQGTGCWQGPNRSTTVRLLCGKETMVTSTTRAQSLRVPHGADDASRLPGATA

SEQ ID NO: 831132 - protein, 273 aa, Homo sapiens
MLLPLLLLLPMCWAVEVKRPRGVSLTNHHFYDESKPFTCLDGSATIPFDQVNDDYCDCKDGSDEPGTAACPNGSFHCTNTGYKPLYIPSNRVNDGVCDCCDGTDEYNSGVICENTCKEKGRKERESLQQMAEVTREGFRLKKILIEDWKKAREEKQKKLIELQAGKKSLEDQVEMLRTVKEEAEKPEREAKEQHQKLWEEQLAAAKAQQEQELAADAFKELDDDMDGTVSVTELQTHPELDTDGDGALSEAEAQALLSGDTQTDATRLPGATA

SEQ ID NO: 831133 - protein, 321 aa, Homo sapiens
MLLPLLLLLPMCWAVEVKRPRGVSLTNHHFYDESKPFTCLDGSATIPFDQVNDDYCDCKDGSDEPGTAACPNGSFHCTNTGYKPLYIPSNRVNDGVCDCCDGTDEYNSGVICENTCKEKGRKERESLQQMAEVTREGFRLKKILIEDWKKAREEKQKKLIELQAGKKSLEDQVEMLRTVKEEAEKPEREAKEQHQKLWEEQLAAAKAQQEQELAADAFKELDDDMDGTVSVTELQTHPELDTDGDGALSEAEAQALLSGDTQTDATSFYDRVLGPRRGWSTFPGPNSLQRWVKELALPGPPTLVTRPTTPSPVPATPPSGD

SEQ ID NO: 831134 - protein, 298 aa, Homo sapiens
MLLPLLLLLPMCWAVEVKRPRGVSLTNHHFYDESKPFTCLDGSATIPFDQVNDDYCDCKDGSDEPGTAACPNGSFHCTNTGYKPLYIPSNRVNDGVCDCCDGTDEYNSGVICENTCKEKGRKERESLQQMAEVTREGFRLKKILIEDWKKAREEKQKKLIELQAGKKSLEDQVEMLRTVKEEAEKPEREAKEQHQKLWEEQLAAAKAQQEQELAADAFKELDDDMDGTVSVTELQTHPELDTDGDGALSEAEAQPSSVGDEGTGGCSSLGSVKSGAEGAGRSVGSASDRYLSLMAAQT

SEQ ID NO: 831135 - protein, 255 aa, Homo sapiens
MLLPLLLLLPMCWAVEVKRPRGVSLTNHHFYDESKPFTCLDGSATIPFDQVNDDYCDCKDGSDEPGTAACPNGSFHCTNTGYKPLYIPSNRVNDGVCDCCDGTDEYNSGVICENTCKEKGRKERESLQQMAEVTREGFRLKKILIEDWKKAREEKQKKLIELQAGKKSLEDQVEMLRTVKEEAEKPEREAKEQHQKLWEEQLAAAKAQQEQELAADAFKELDDDMDGTVSVTELQTHPELDTDGDGALSEAEAQV

SEQ ID NO: 831136 - protein, 224 aa, Homo sapiens
MLLPLLLLLPMCWAVEVKRPRGVSLTNHHFYDESKPFTCLDGSATIPFDQVNDDYCDCKDGSDEPGTAACPNGSFHCTNTGYKPLYIPSNRVNDGVCDCCDGTDEYNSGVICENTCKEKGRKERESLQQMAEVTREGFRLKKILIEDWKKAREEKQKKLIELQAGKKSLEDQVEMLRTVKEEAEKPEREAKEQHQKLWEEQLAASRPTERAAADAFRTIRERDL

SEQ ID NO: 831137 - protein, 199 aa, Homo sapiens
MLLPLLLLLPMCWAVEVKRPRGVSLTNHHFYDESKPFTCLDGSATIPFDQVNDDYCDCKDGSDEPGEPFLCSSIRCLLNTAQCQALSVDQDTTSAGSPLSGQKQAQKSVVSVMAPGSWRSPESSSPKPRGQRRLLQGGTAACPNGSFHCTNTGYKPLYIPSNRVNDGVCDCCDGTDEYNSGVICENTCKYVGDSTPPIT

SEQ ID NO: 831138 - protein, 85 aa, Homo sapiens
EMLRTVKEEAEKPEREAKEQHQKLWEGMAEMAKDSPSVLGGSRSGPRSLPLIICCQFQQVFDHAAHRLVCFEVRLDCGICQEPPF

SEQ ID NO: 831139 - protein, 159 aa, Homo sapiens
MDKPRKENEEEPQSAPKTDEERPPVEHSPEKQSPEEQSSEEQSSEEEFFPEELLPELLPEMLLSEERPPQEGLSRKDLFEGRPPMEQPPCGVGKHKLEEGSFKERLARSRPQFRGDIHGRNLSNEEMIQAADELEEMKRVRNKLMIMHWKAKRSRPYPI

SEQ ID NO: 831140 - protein, 159 aa, Homo sapiens; identical to SEQ ID NO: 831139

SEQ ID NO: 831141 - protein, 159 aa, Homo sapiens; identical to SEQ ID NO: 831139

SEQ ID NO: 831142 - protein, 159 aa, Homo sapiens; identical to SEQ ID NO: 831139

SEQ ID NO: 831143 - protein, 159 aa, Homo sapiens; identical to SEQ ID NO: 831139

SEQ ID NO: 831144 - protein, 74 aa, Homo sapiens
KNRAGGFPGPRRWGGERCAGGGGGRGGAGPAEGGHLAEAQLPPCLSARAQSSDPCAGSRARPERGSSSSAVDRF

SEQ ID NO: 831145 - protein, 78 aa, Homo sapiens
GRSLTGGLDARPSPISEPGRLFSPFSRPGDGRHLVTRNLRSTENSGPGVMGPSGGSWQQSPPPPPGTHLSILSFDAEA

SEQ ID NO: 831146 - protein, 78 aa, Homo sapiens; identical to SEQ ID NO: 831145

SEQ ID NO: 831147 - protein, 84 aa, Homo sapiens
MRLRFNNDRMKTTIKETTILSSAILTFLTYLMKMSFERCTARNKMFVNSPFYPRVDNYCTSSWKKFYLKCYFSLNTIKKEKKMT

SEQ ID NO: 831148 - protein, 277 aa, Homo sapiens
MAAGRLFLSRLRAPFSSMAKSPLEGVSSSRGLHAGRGPRRLSIEGNIAVGKSTFVKLLTKTYPEWHVATEPVATWQNIQAAGTQKACTAQSLGNLLDMMYREPARWSYTFQTFSFLSRLKVQLEPFPEKLLQARKPVQIFERSVYSDRYIFAKNLFENGSLSDIEWHIYQDWHSFLLWEFASRITLHGFIYLQASPQVCLKRLYQRAREEEKGIELAYLEQLHGQHEAWLIHKTTKLHFEALMNIPVLVLDVNDDFSEEVTKQEDLMREVNTFVKNL

SEQ ID NO: 831149 - protein, 180 aa, Homo sapiens
MMYREPARWSYTFQTFSFLSRLKVQLEPFPEKLLQARKPVQIFERSVYSDRYIFAKNLFENGSLSDIEWHIYQDWHSFLLWEFASRITLHGFIYLQASPQVCLKRLYQRAREEEKGIELAYLEQLHGQHEAWLIHKTTKLHFEALMNIPVLVLDVNDDFSEEVTKQEDLMREVNTFVKNL

SEQ ID NO: 831150 - protein, 180 aa, Homo sapiens; identical to SEQ ID NO: 831149

SEQ ID NO: 831151 - protein, 174 aa, Homo sapiens
MMYREPARWSYTFQTFSFLSRLKVQLEPFPEKLLQARKPVQIFERYIFAKNLFENGSLSDIEWHIYQDWHSFLLWEFASRITLHGFIYLQASPQVCLKRLYQRAREEEKGIELAYLEQLHGQHEAWLIHKTTKLHFEALMNIPVLVLDVNDDFSEEVTKQEDLMREVNTFVKNL

SEQ ID NO: 831152 - protein, 153 aa, Homo sapiens
SLSRAFHSISHSPALPIPIPLPTRYIFAKNLFENGSLSDIEWHIYQDWHSFLLWEFASRITLHGFIYLQASPQVCLKRLYQRAREEEKGIELAYLEQLHGQHEAWLIHKTTKLHFEALMNIPVLVLDVNDDFSEEVTKQEDLMREVNTFVKNL

SEQ ID NO: 831153 - protein, 180 aa, Homo sapiens; identical to SEQ ID NO: 831149

SEQ ID NO: 831154 - protein, 180 aa, Homo sapiens; identical to SEQ ID NO: 831149

SEQ ID NO: 831155 - protein, 103 aa, Homo sapiens
KHNLSNFSFKMLQVPKKTMAKSNHNLTNQLLSGTSDRCVNRGWDGRGPPLSKSASSTLQFHGQEPTRGRFLLQRPARGARAPKALHRRQHWPALPKVLETCWI

SEQ ID NO: 831156 - protein, 189 aa, Homo sapiens
MAAGRLFLSRLRAPFSSMAKSPLEGVSSSRGLHAGRGPRRLSIEGNIAVGKSTFVKLLTKTYPEWHVATEPVATWQNIQAAGTQKACTAQSLGNLLDMMYREPARWSYTFQTFSFLSRLKVQLEPFPEKLLQARKPVQIFERSVYSDRLHFEALMNIPVLVLDVNDDFSEEVTKQEDLMREVNTFVKNL

SEQ ID NO: 831157 - protein, 103 aa, Homo sapiens; identical to SEQ ID NO: 831155

SEQ ID NO: 831158 - protein, 183 aa, Homo sapiens
MAAGRLFLSRLRAPFSSMAKSPLEGVSSSRGLHAGRGPRRLSIEGNIAVGKSTFVKLLTKTYPEWHVATEPVATWQNIQAAGTQKACTAQSLGNLLDMMYREPARWSYTFQTFSFLSRLKVQLEPFPEKLLQARKPVQIFERLHFEALMNIPVLVLDVNDDFSEEVTKQEDLMREVNTFVKNL

SEQ ID NO: 831159 - protein, 90 aa, Homo sapiens
KHNLSNFSFKMLQVPKKTMAKSNHNLTNQLLSGTSDRCVNRGWDGRGPPLSKSASSTLQFHGQEPTRGRFLLQRPARGARAPKALHRRQH

SEQ ID NO: 831160 - protein, 210 aa, Homo sapiens
  misc_feature (206)..(206): Xaa can be any naturally occurring amino acid
MAAGRLFLSRLRAPFSSMAKSPLEGVSSSRGLHAGRGPRRLSIEGNIAVGKSTFVKLLTKTYPEWHVATEPVATWQNIQAAGTQKACTAQSLGNLLDMMYREPARWSYTFQTFSFLSRLKVQLEPFPEKLLQARKPVQIFERSVYSDRYIFAKNLFENGSLSDIEWHIYQDWHSFLLWEFASRITLHGFIYLQASPQFCLKDCTLXSSEE

SEQ ID NO: 831161 - protein, 132 aa, Homo sapiens
KHNLSNFSFKMLQVPKKTMAKSNHNLTNQLLSGTSDRCVNRGWDGRGPPLSKSASSTLQFHGQEPTRGRFLLQRPARGARAPKALHRRQHWLHFEALMNIPVLVLDVNDDFSEEVTKQEDLMREVNTFVKNL

SEQ ID NO: 831162 - protein, 103 aa, Homo sapiens; identical to SEQ ID NO: 831155

SEQ ID NO: 831163 - protein, 122 aa, Homo sapiens
MNIPVLVLDVNDDFSEEVSHINHLRVQQHPTVLVPRVNFLKNHRLAHPIMLPVPFLPRAESTSAHQWGRKASLFRTLHAPGIQGNAPATPISLEFLGLPPLARRFPFLVPGAAAQPGSDLAG

SEQ ID NO: 831164 - protein, 180 aa, Homo sapiens; identical to SEQ ID NO: 831149

SEQ ID NO: 831165 - protein, 103 aa, Homo sapiens; identical to SEQ ID NO: 831155

SEQ ID NO: 831166 - protein, 189 aa, Homo sapiens; identical to SEQ ID NO: 831156

SEQ ID NO: 831167 - protein, 132 aa, Homo sapiens; identical to SEQ ID NO: 831161

SEQ ID NO: 831168 - protein, 172 aa, Homo sapiens
MAAGRLFLSRLRAPFSSMAKSPLEGVSSSRGLHAGRGPRRLSIEGNIAVGKSTFVKLLTKTYPEWHVATEPVATWQNIQAAGTQKPARWSYTFQTFSFLSRLKVQLEPFPEKLLQARKPVQIFERSVYSDRLHFEALMNIPVLVLDVNDDFSEEVTKQEDLMREVNTFVKNL

SEQ ID NO: 831169 - protein, 103 aa, Homo sapiens; identical to SEQ ID NO: 831155

SEQ ID NO: 831170 - protein, 189 aa, Homo sapiens; identical to SEQ ID NO: 831156

SEQ ID NO: 831171 - protein, 132 aa, Homo sapiens; identical to SEQ ID NO: 831161

SEQ ID NO: 831172 - protein, 169 aa, Homo sapiens
MAAGRLFLSRLRAPFSSMAKSPLEGVSSSRGLHAGRGPRRLSIEGNIAVGKSTFVKLLTKTYPEWHVATEPVATWQNIQAAGTQKACTAQSLGNLLDMMYREPARWSYTFQTFSFLSRLKVQLEPFPEKLLQARKPVQIFERSVYSDSILAKIFFVLLWEFASGSHYMA

SEQ ID NO: 831173 - protein, 132 aa, Homo sapiens; identical to SEQ ID NO: 831161

SEQ ID NO: 831174 - protein, 82 aa, Homo sapiens [sequence omitted]

SEQ ID NO: 831175 - protein, 95 aa, Homo sapiens
PTRSDMICGYACLKGTAAMRNTKRGSWYIEALAQVFSERACDMHVADMLVKVNALHCSGYVEKLLLKLNKDDLFKFSGRKQSSSPHFKFFLLKFS

SEQ ID NO: 831176 - protein, 452 aa, Homo sapiens
MAAPSAGSWSTFQHKELMAADRGRRILGVCGMHPHHQETLKKNRVVLAKQLLLSELLEHLLEKDIITLEMRELIQAKVGSFSQNVELLNLLPKRGPQAFDAFCEALRETKQGHLEDMLLTTLSGLQHVLPPLSCDYDLSLPFPVCESCPLYKKLRLSTDTVEHSLDNKDGPVCLQVKPCTPEFYQTHFQLAYRLQSRPRGLALVLSNVHFTGEKELEFRSGGDVDHSTLVTLFKLLGYDVHVLCDQTAQEMQEKLQNFAQLPAHRVTDSCIVALLSHGVEGAIYGVDGKLLQLQEVFQLFDNANCPSLQNKPKMFFIQACRGDETDRGVDQQDGKNHAGSPGCEESDAGKEKLPKMRLPTRSDMICGYACLKGTAAMRNTKRGSWYIEALAQVFSERACDMHVADMLVKVNALIKDREGYAPGTEFHRCKEMSEYCSTLCRHLYLFPGHPPT

SEQ ID NO: 831177 - protein, 296 aa, Homo sapiens
MWNSSTCCLRGVPKLLMPSVKPCTPEFYQTHFQLAYRLQSRPRGLALVLSNVHFTGEKELEFRSGGDVDHSTLVTLFKLLGYDVHVLCDQTAQEMQEKLQNFAQLPAHRVTDSCIVALLSHGVEGAIYGVDGKLLQLQEVFQLFDNANCPSLQNKPKMFFIQACRGDETDRGVDQQDGKNHAGSPGCEESDAGKEKLPKMRLPTRSDMICGYACLKGTAAMRNTKRGSWYIEALAQVFSERACDMHVADMLVKVNALIKDREGYAPGTEFHRCKEMSEYCSTLCRHLYLFPGHPPT

SEQ ID NO: 831178 - protein, 296 aa, Homo sapiens; identical to SEQ ID NO: 831177

SEQ ID NO: 831179 - protein, 501 aa, Homo sapiens
MAAPSAGSWSTFQHKELMAADRGRRILGVCGMHPHHQETLKKNRVVLAKQLLLSELLEHLLEKDIITLEMRELIQAKVGSFSQNVELLNLLPKRGPQAFDAFCEALRETKQGHLEDMLLTTLSGLQHVLPPDEALVIWGLGRVSLTGKEFVSQSEGDKILLYLDRTTSLRSVIMSFDFLQLSCDYDLSLPFPVCESCPLYKKLRLSTDTVEHSLDNKDGPVCLQVKPCTPEFYQTHFQLAYRLQSRPRGLALVLSNVHFTGEKELEFRSGGDVDHSTLVTLFKLLGYDVHVLCDQTAQEMQEKLQNFAQLPAHRVTDSCIVALLSHGVEGAIYGVDGKLLQLQEVFQLFDNANCPSLQNKPKMFFIQACRGDETDRGVDQQDGKNHAGSPGCEESDAGKEKLPKMRLPTRSDMICGYACLKGTAAMRNTKRGSWYIEALAQVFSERACDMHVADMLVKVNALIKDREGYAPGTEFHRCKEMSEYCSTLCRHLYLFPGHPPT

SEQ ID NO: 831180 - protein, 441 aa, Homo sapiens
MHPHHQETLKKNRVVLAKQLLLSELLEHLLEKDIITLEMRELIQAKVGSFSQNVELLNLLPKRGPQAFDAFCEALRETKQGHLEDMLLTTLSGLQHVLPPLSCDYDLSLPFPVCESCPLYKKLRLSTDTVEHSLDNKDGPVCLQVKPCTPEFYQTHFQLAYRLQSRPRGLALVLSNVHFTGEKELEFRSGGDVDHSTLVTLFKLLGYDVHVLCDQTAQEMQEKLQNFAQLPAHRVTDSCIVALLSHGVEGAIYGVDGKLLQLQEVFQLFDNANCPSLQNKPKMFFIQACRGGAIGSLGHLLLFTAATASLLYETDRGVDQQDGKNHAGSPGCEESDAGKEKLPKMRLPTRSDMICGYACLKGTAAMRNTKRGSWYIEALAQVFSERACDMHVADMLVKVNALIKDREGYAPGTEFHRCKEMSEYCSTLCRHLYLFPGHPPT

SEQ ID NO: 831181 - protein, 452 aa, Homo sapiens; identical to SEQ ID NO: 831176

SEQ ID NO: 831182 - protein, 352 aa, Homo sapiens
MAAPSAGSWSTFQHKELMAADRGRRILGVCGMHPHHQETLKKNRVVLAKQLLLSELLEHLLEKDIITLEMRELIQAKVGSFSQNVELLNLLPKRGPQAFDAFCEALRETKQGHLEDMLLTTLSGLQHVLPPLSCDYDLSLPFPVCESCPLYKKLRLSTDTVEHSLDNKDGPVCLQVKPCTPEFYQTHFQLAYRLQSRPRGLALVLSNVHFTGEKELEFRSGGDVDHSTLVTLFKLLGYDVHVLCDQTAQEMQEKLQNFAQLPAHRVTDSCIVALLSHGVEGAIYGVDGKLLQLQEVFQLFDNFSLPASLSSHPGDPAWFFPSCWSTPRSVSSPRQAWMKNILGWFCRLGQLG

SEQ ID NO: 831183 - protein, 136 aa, Homo sapiens
ESKSVLKHASGAVRRRGENDPRTDQSPRAAASRVQHLRPAAVAAATMPKRKAEGDAKGDKAKVKDEPQRRSARLSAKPAPPKPEPKPKKAPAKKGEKVPKGKKGKADAGKEGNNPAENGDAKTDQAQKAEGAGDAK

SEQ ID NO: 831184 - protein, 700 aa, Homo sapiens [sequence omitted]

SEQ ID NO: 831185 - protein, 570 aa, Homo sapiens
MEQELEARTRELSRTQEELMNSNQMSSDLSQKLEELQRHYSTLEEQRDHVIASKTGAESKITALEQKEQELQALIQQLSIDLQKVTAETQEKEDVITHLQEKVASLEKRLEQNLSGEEHVQELLKEKTLAEQNLEDTRQQLLAARSSQAKAINTLETRVRELEQTLQASEEQLQQSKGIVAAQETQIQELAAANQESSHVQQQALALEQQFLERTQALEAQIVALERTRAADQTTAEQGMRQLEQENAALKECRNEYERSLQNHQFELKKLKEEWSQREIVSVAMAQALEEVRKQREEFQQQAANLTAIIDEKEQNLREKTEVLLQKEQEILQLERGHNSALLQIHQLQAELEALRTLKAEEAAVVAEQEDLLRLRGPLQAEALSVNESHVTSRAMQDPVFQLPTAGRTPNGEVGAMDLTQLQKEKQDLEQQLLEKNKTIKQMQQRMLELRKTLQKELKIRPDNELFEVREKPGPEMANMAPSVTNNTDLTDAREINFEYLKHVVLKFMSCRESEAFHLIKAVSVLLNFSQEEENMLKETLEYKMSWFGSKPAPKGSIRPSISNPRIPWS

SEQ ID NO: 831186 - protein, 82 aa, Homo sapiens
GRSNIRPRAEFGTRCYHSGHQTGGSWHYPDFHSAANIPAPASTPSAPESSNFTVALTAEAISIWQAHLSHHVALLLEVETAL

SEQ ID NO: 831187 - protein, 399 aa, Homo sapiens
MFAKLKKKIAEETAVAQRPGGATRIPRSVSKESVASMGADSGDDFASDGSSSREDLSSQLLRRNEQIRKLEARLSDYAEQVRNLQKIKEKLEIALEKHQDSSMRKFQEQNETFQANRAKMAEGLALALARKDQEWSEKMDQLEKEKNILTAQLQEMKNQSMNLFQRRDEMDELEGFQQQELSKIKHMLLKKEESLGKMEQELEARTRELSRTQEELMNSNQMSSDLSQKLEELQRHYSTLEEQRDHVIASKTGAESKITALEQKEQELQALIQQLSIDLQKVTAETQEKEDVITHLQEKVASLEKRLEQNLSGEEHVQELLKEKTLAEQNLEDTRQQLLAARSSQAKAINTLETRVRELEQTLQASEEQLQQSKGIVAAQETQIQELVSAYWSCCIPGP

SEQ ID NO: 831188 - protein, 767 aa, Homo sapiens
MFAKLKKKIAEETAVAQRPGGATRIPRSVSKESVASMGADSGDDFASDGSSSREDLSSQLLRRNEQIRKLEARLSDYAEQVRNLQKIKEKLEIALEKHQDSSMRKFQEQNETFQANRAKMAEGLALALARKDQEWSEKMDQLEKEKNILTAQLQEMKNQSMNLFQRRDEMDELEGFQQQELSKIKHMLLKKEESLGKMEQELEARTRELSRTQEELMNSNQMSSDLSQKLEELQRHYSTLEEQRDHVIASKTGAESKITALEQKEQELQALIQQLSIDLQKVTAETQEKEDVITHLQEKVASLEKRLEQNLSGEEHVQELLKEKTLAEQNLEDTRQQLLAARSSQAKAINTLETRVRELEQTLQASEEQLQQSKGIVAAQETQIQELAAANQESSHVQQQALALEQQFLERTQALEAQIVALERTRAADQTTAEQGMRQLEQENAALKECRNEYERSLQNHQFELKKLKEEWSQREIVSVAMAQALEEVRKQREEFQQQAANLTAIIDEKEQNLREKTEVLLQKEQEILQLERGHNSALLQIHQLQAELEALRTLKAEEAAVVAEQEDLLRLRGPLQAEALSVNESHVTSRAMQDPVFQLPTAGRTPNGEVGAMDLTQLQKEKQDLEQQLLEKNKTIKQMQQRMLELRKTLQKELKIRPDNELFEVREKPGPEMANMAPSVTNNTDLTDAREINFEYLKHVVLKFMSCRESEAFHLIKAVSVLLNFSQEEENMLKETLEYKMSWFGSKPAPKGSIRPSISNPRIPWS

SEQ ID NO: 831189 - protein, 767 aa, Homo sapiens; identical to SEQ ID NO: 831188

SEQ ID NO: 831190 - protein, 122 aa, Homo sapiens
HHLSPSLGPTGEPCTSAALKPAFHFRTFLKSRRIFRSMASYCVTGDTLTVTRTLTLSALSLWPASPTWLPSGTPPESPCSAATGGRDGPLRWCPAGQTHLPLPGTANSMGTLWEWLLKIQMS

SEQ ID NO: 831191 - protein, 197 aa, Homo sapiens
MFAKLKKKIAEETAVAQRPGGATRIPRSVSKESVASMGADSGDDFASDGSSSREDLSSQLLRRNEQIRKLEARLSDYAEQVRNLQKIKEKLEIALEKHQDSSMRKFQEQNETFQANRAKMAEGLALALARKDQEWSEKMDQLEKEKNILTAQLQEMKNQSMNLFQRRDEMDELEGFQQQELSKIKHMVCIFVLVAKY

SEQ ID NO: 831192 - protein, 429 aa, Homo sapiens
MATEQRPFHLVVFGASGFTGQFVTEEVAREQVDPERSSRLPWAVAGRSREKLQRVLEKAALKLGRPTLSSEVGIIICDIANPASLDEMAKQATVVLNCVGPYRFYGEPVIKACIENGASCIDISGEPQFLELMQLKYHEKAADKGVYIIGSSGFDSIPADLGVIYTRNKMNGTLTAVESFLTIHSGPEGLSIHDGTWKSAIYGFGDQSNLRKLRNVSNLKPVPLIGPKLKRRWPISYCRELKGYSIPFMGSDVSVVRRTQRYLYENLEESPVQYAAYVTVGGITSVIKLMFAGLFFLFFVRFGIGRQLLIKFPWFFSFGYFSKQGPTQKQIDAASFTLTFFGQGYSQGTGTDKNKPNIKICTQVKGPEAGYVATPIAMVQAAMTLLSDASHLPKAGGVFTPGAAFSKTKLIDRLNKHGIEFSVISSSEV

SEQ ID NO: 831193 - protein, 429 aa, Homo sapiens; identical to SEQ ID NO: 831192

SEQ ID NO: 831194 - protein, 429 aa, Homo sapiens; identical to SEQ ID NO: 831192

SEQ ID NO: 831195 - protein, 342 aa, Homo sapiens [sequence omitted]

SEQ ID NO: 831196 - protein, 237 aa, Homo sapiens
MATEQRPFHLVVFGASGFTGQFVTEEVAREQVDPERSSRLPWAVAGRSREKLQRVLEKAALKLGRPTLSSEVGIIICDIANPASLDEMAKQATVVLNCVGPYRFYGEPVIKACIENGASCIDISGEPQFLELMQLKYHEKAADKGVYIIGSSGFDSIPADLGVIYTRNKMNGTLTAVESFLTIHSGPEGLSIHDGTWKSAIYGFGDQSNLRKLRNVSNLKPVPLIVPFLLWDLMCLL

SEQ ID NO: 831197 - protein, 233 aa, Homo sapiens
MATEQRPFHLVVFGASGFTGQFVTEEVAREQVDPERSSRLPWAVAGRSREKLQRVLEKAALKLGRPTLSSEVGIIICDIANPASLDEMAKQATVVLNCVGPYRFYGEPVIKACIENGASCIDISGEPQFLELMQLKYHEKAADKGVYIIGSSGFDSIPADLGVIYTRNKMNGTLTAVESFLTIHSGPEGLSIHDGTWKSAIYGFGDQSNCGQFLIVGNSKVIPFLLWDLMCLL

SEQ ID NO: 831198 - protein, 225 aa, Homo sapiens
SLSLSLSLSLSLSLLKPVPLIGPKLKRRWPISYCRELKGYSIPFMGSDVSVVRRTQRYLYENLEESPVQYAAYVTVGGITSVIKLMFAGLFFLFFVRFGIGRQLLIKFPWFFSFGYFSKQGPTQKQIDAASFTLTFFGQGYSQGTGTDKNKPNIKICTQVKGPEAGYVATPIAMVQAAMTLLSDASHLPKAGGVFTPGAAFSKTKLIDRLNKHGIEFSVISSSEV

SEQ ID NO: 831199 - protein, 171 aa, Homo sapiens
MLHTILENLEESPVQYAAYVTVGGITSVIKLMFAGLFFLFFVRFGIGRQLLIKFPWFFSFGYFSKQGPTQKQIDAASFTLTFFGQGYSQGTGTDKNKPNIKICTQVKGPEAGYVATPIAMVQAAMTLLSDASHLPKAGGVFTPGAAFSKTKLIDRLNKHGIEFSVISSSEV

SEQ ID NO: 831200 - protein, 125 aa, Homo sapiens
MATEQRPFHLVVFGASGFTGQFVTEEVAREQVDPERSSRLPWAVAGRSREKLQRVLEKAALKLGRPTLSSEVGIIICDIANPASLDEMAKQATVVLNCVGPVSNQPFFVSEQTIHSFLAKYSRGT

SEQ ID NO: 831201 - protein, 209 aa, Homo sapiens
MATEQRPFHLVVFGASGFTGQFVTEEVAREQVDPERSSRLPWAVAGRSREKLQRVLEKAALKLGRPTLSSEVGIIICDIANPASLDEMAKQATVVLNCVGPYRFYGEPVIKACIENGASCIDISGEPQFLELMQLKYHEKAADKGVYIIGSSGFDSIPADLGVIYTRNKMNGTLTAVESFLTIHSGPEGLSIHDGTWKSAIYGFGDQSN

SEQ ID NO: 831202 - protein, 429 aa, Homo sapiens; identical to SEQ ID NO: 831192

SEQ ID NO: 831203 - protein, 411 aa, Homo sapiens
MATEQRPFHLVVFGASGFTGQFVTEEVAREQVDPERSSRLPWAVAGRSREKLQRVLEKAALKLGRPTLSSEVGIIICDIANPASLDEMAKQATVVLNCVGPYRFYGEPVIKACIENGASCIDISGEPQFLELMQLKYHEKAADKGVYIIGSSGFDSIPADLGVIYTRNKMNGTLTAVESFLTIHSGPEGLSIHDGTWKSAIYGFGDQSNLRKLRNVSNLKPVPLIGPKLKRRWPISYCRELKGYSIPFMGSDVSVVRRTQRYLYENLEESPVQYAAYVTVGGITSVIKLMFAGLFFLFFVRFGIGRQLLIKFPWFFSFGYFSKQGPTQKQIDAASFTLTFFGQGYSQGTEAGYVATPIAMVQAAMTLLSDASHLPKAGGVFTPGAAFSKTKLIDRLNKHGIEFSVISSSEV

SEQ ID NO: 831204 - protein, 402 aa, Homo sapiens
MATEQRPFHLVVFGASGFTGQFVTEEVAREQVDPERSSRLPWAVAGRSREKLQRVLEKAALKLGRPTLSSEVGIIICDIANPASLDEMAKQATVVLNCVGPFLELMQLKYHEKAADKGVYIIGSSGFDSIPADLGVIYTRNKMNGTLTAVESFLTIHSGPEGLSIHDGTWKSAIYGFGDQSNLRKLRNVSNLKPVPLIGPKLKRRWPISYCRELKGYSIPFMGSDVSVVRRTQRYLYENLEESPVQYAAYVTVGGITSVIKLMFAGLFFLFFVRFGIGRQLLIKFPWFFSFGYFSKQGPTQKQIDAASFTLTFFGQGYSQGTGTDKNKPNIKICTQVKGPEAGYVATPIAMVQAAMTLLSDASHLPKAGGVFTPGAAFSKTKLIDRLNKHGIEFSVISSSEV

SEQ ID NO: 831205 - protein, 176 aa, Homo sapiens
MATEQRPFHLVVFGASGFTGQFVTEEVAREQVDPERSSRLPWAVAGRSREKLQRVLEKAALKLGRPTLSSEVGIIICDIANPASLDEMAKQATVVLNCVGPYRFYGEPVIKACIENGASCIDISGEPQFLELMQLKYHEKAADKGVYIIGSSGFDSIPADLGVIYTRNKMNGVEHS

SEQ ID NO: 831206 - protein, 166 aa, Homo sapiens
NFVFSIIEVQYAAYVTVGGITSVIKLMFAGLFFLFFVRFGIGRQLLIKFPWFFSFGYFSKQGPTQKQIDAASFTLTFFGQGYSQGTGTDKNKPNIKICTQVKGPEAGYVATPIAMVQAAMTLLSDASHLPKAGGVFTPGAAFSKTKLIDRLNKHGIEFSVISSSEV

SEQ ID NO: 831207 - protein, 109 aa, Homo sapiens
MIPLSPTQKQIDAASFTLTFFGQGYSQGTGTDKNKPNIKICTQVKGPEAGYVATPIAMVQAAMTLLSDASHLPKAGGVFTPGAAFSKTKLIDRLNKHGIEFSVISSSEV

SEQ ID NO: 831208 - protein, 839 aa, Homo sapiens [sequence omitted]

SEQ ID NO: 831209 - protein, 839 aa, Homo sapiens [sequence omitted]

SEQ ID NO: 831210 - protein, 839 aa, Homo sapiens [sequence omitted]

SEQ ID NO: 831211 - protein, 839 aa, Homo sapiens [sequence omitted]

SEQ ID NO: 831212 - protein, 512 aa, Homo sapiens
IGRRLPAPAPPPWAKSADLWGRWLQTGAARVREIMAARPITLGIDLGTTSVKAALLRAAPDDPSGFAVLASCARAARAEAAVESAVAGPQGREQDVSRILQALHECLAALPRPQLRSVVGIGVSGQMHGVVFWKTGQGCEWTEGGITPVFEPRAVSHLVTWQDGRCSSEFLASLPQPKSHLSVATGFGCATIFWLLKYRPEFLKSYDAAGTIHDYVVAMLCGLPRPLMSDQNAASWGYFNTQSQSWNVKTLRSSGFPVHLLPDIAEPGSVAGRTSHMWFEIPKGTQVGVALGDLQASVYSCMAQRTDAVLNISTSVQLAASMPSGFQPAQTPDPTAPVAYFPYFNRTYLGVAASLNGGNVLATFVHMLVQWMADLGLEVEESTVYSRMIQAAVQQRDTHLTITPTVLGERHLPDQLASVTRISSSDLSLGHVTRALCRGIVQNLHSMLPIQQLQEWGVERVMGSGSALSRNDVLKQEVQRAFPLPMSFGQDVDAAVGAALVMLRRHLNQKES

SEQ ID NO: 831213 - protein, 839 aa, Homo sapiens [sequence omitted]

SEQ ID NO: 831214 - protein, 512 aa, Homo sapiens; identical to SEQ ID NO: 831212

SEQ ID NO: 831215 - protein, 101 aa, Homo sapiens
EIIQLADRYYKGQTALHIAIERRNMALVTLLVENGADVQAAAHGDFFKKTKGRPGFYFGELPLSLAACTNQLGIVKFLLQNSWLIWGIFFLDKGSAPCGQP

SEQ ID NO: 831216 - protein, 839 aa, Homo sapiens [sequence omitted]

SEQ ID NO: 831217 - protein, 839 aa, Homo sapiens [sequence omitted]

SEQ ID NO: 831218 - protein, 649 aa, Homo sapiens
EIIQLADRYYKGQTALHIAIERRNMALVTLLVENGADVQAAAHGDFFKKTKGRPGFYFGELPLSLAACTNQLGIVKFLLQNSWQTADISARDSVGNTVLHALVEVADNTADNTKFVTSMYNEILILGAKLHPTLKLEELTNKKGMTPLALAAGTGKIGVLAYILQREIQEPECRHLSRKFTEWAYGPVHSSLYDLSCIDTCEKNSVLEVIAYSSSETPNRHDMLLVEPLNRLLQDKWDRFVKRIFYFNFLVYCLYMIIFTMAAYYRPVDGLPPFKMEKIGDYFRVTGEILSVLGGVYFFFRGIQYFLQRRPSMKTLFVDSYSEMLFFLQSLFMLATVVLYFSHLKEYVASMVFSLALGWTNMLYYTRGFQQMGIYAVMIEKMILRDLCRFMFVYIVFLFGFSTAVVTLIEDGKNDSLPSESTSHRWRGPACRPPDSSYNSLYSTCLELFKFTIGMGDLEFTENYDFKAVFIILLLAYVILTYILLLNMLIALMGETVNKIAQESKNIWKLQRAITILDTEKSFLKCMRKAFRSGKLLQVGYTPDGKDDYRWCFRVDEVNWTTWNTNVGIINEDPGNCEGVKRTLSFSLRSSRVSGRHWKNFALVPLLREASARDRQSAQPEEVYLRQFSGSLKPEDAEVFKSPAASGEK

SEQ ID NO: 831219 - protein, 186 aa, Homo sapiens
MSGISGCPFFLWGLLALLGLALVISLIFNISHYVEKQRQDKMYSYSSDHTRVDEYYIEDTPIYGNLDDMISEPMDENCYEQMKARPEKSVNKMQEATPSAQATNETQMCYASLDHSVKGKRRKPRKQNTHFSDKDGDEQLHAIDASVSKTTLVDSFSPESQAVEENIHDDPIRLFGLIRAKREPIN

SEQ ID NO: 831220 - protein, 145 aa, Homo sapiens
MYSYSSDHTRVDEYYIEDTPIYGNLDDMISEPMDENCYEQMKARPEKSVNKMQEATPSAQATNETQMCYASLDHSVKGKRRKPRKQNTHFSDKDGDEQLHAIDASVSKTTLVDSFSPESQAVEENIHDDPIRLFGLIRAKREPIN

SEQ ID NO: 831221 - protein, 149 aa, Homo sapiens
MSDKMYSYSSDHTRVDEYYIEDTPIYGNLDDMISEPMDENCYEQMKARPEKSVNKMQEATPSAQATNETQMCYASLDHSVKGKRRKPRKQNTHFSDKDGDEQLHAIDASVSKTTLVDSFSPESQAVEENIHDDPIRLFGLIRAKREPIN

SEQ ID NO: 831222 - protein, 82 aa, Homo sapiens
MGREFGNLTRMRHVISYSLSPFEQRAYPHVFTKGIPNVLRRIRESFFRVVPQFVVFYLIYTWGTEEFERSKRKNPAAYENDK

SEQ ID NO: 831223 - protein, 82 aa, Homo sapiens; identical to SEQ ID NO: 831222

SEQ ID NO: 831224 - protein, 86 aa, Homo sapiens
KFSGRVDVRFPNSRMRHVISYSLSPFEQRAYPHVFTKGIPNVLRRIRESFFRVVPQFVVFYLIYTWGTEEFERSKRKNPAAYENDK

SEQ ID NO: 831225 - protein, 93 aa, Homo sapiens
MGREFGNLTRMRHVISYSLSPFEQRAYPHVFTKGIPNVLRRIRESFFRVVPQFVVFYLIYTWGTEEFERSKRRIQLPMKMTNEQRIRMTVPCL

SEQ ID NO: 831226 - protein, 82 aa, Homo sapiens; identical to SEQ ID NO: 831222

SEQ ID NO: 831227 - protein, 39 aa, Homo sapiens
MGREFGNLTRMRHVISYSLSPFEQRAYPHVFTKGIPNVL

SEQ ID NO: 831228 - protein, 82 aa, Homo sapiens; identical to SEQ ID NO: 831222

SEQ ID NO: 831229 - protein, 82 aa, Homo sapiens; identical to SEQ ID NO: 831222

SEQ ID NO: 831230 - protein, 93 aa, Homo sapiens; identical to SEQ ID NO: 831225

SEQ ID NO: 831231 - protein, 82 aa, Homo sapiens; identical to SEQ ID NO: 831222

SEQ ID NO: 831232 - protein, 163 aa, Homo sapiens
MRLSPFHLQLEFHMKEKREDLQISWSFISVPEMAVNIQPKALGEDQVAETSAMSDVLKDILKHLAGSASPSVVLITKPTTVKEAQNLQCAASTAQESCPPKPPRAHELKLLVRNIHVLLLSEPGASGHINAVCVVQLNDPVQRFSSTLTKNTPDLMWEEEFTL

SEQ ID NO: 831233 - protein, 227 aa, Homo sapiens
MGGTTSTRRVTFEADENENITVVKGIRLSENVIDRMKESSPSGSKSQRYSGAYGASVSDEELKRRVAEELALEQAKKESEDQKRLKQAKELDRERAAANEQLTRAILRERICSEEERAKAKHLARQLEEKDRVLKKQDAFYKEQLARLEERSSEFYRVTTEQYQKAAEEVEAKFKRYESHPVCADLQAKILQCYRENTHQTLKCSALATQYMHCVNHAKQSMLEKGG

SEQ ID NO: 831234 - protein, 138 aa, Homo sapiens
MGGTTSTRRVTFEADENENITVVKGIRLSENVIDRMKESSPSGSKSQRYSGAYGASVSDEELKRRVAEELALEQAKKESEDQKRLKQAKELDRERAAANEQLTRAILRERICSEEERAKAKHLIKVELLWVKPGVLTA

SEQ ID NO: 831235 - protein, 227 aa, Homo sapiens; identical to SEQ ID NO: 831233

SEQ ID NO: 831236 - protein, 227 aa, Homo sapiens; identical to SEQ ID NO: 831233

SEQ ID NO: 831237 - protein, 210 aa, Homo sapiens
MGGTTSTRRVTFEADENENITVVKGIRLFYLLLLFIDSEFSDEELKRRVAEELALEQAKKESEDQKRLKQAKELDRERAAANEQLTRAILRERICSEEERAKAKHLARQLEEKDRVLKKQDAFYKEQLARLEERSSEFYRVTTEQYQKAAEEVEAKFKRYESHPVCADLQAKILQCYRENTHQTLKCSALATQYMHCVNHAKQSMLEKGG

SEQ ID NO: 831238 - protein, 118 aa, Homo sapiens
MHSTKNSWLDWRRGAQSSTESPLNNIRKLLKRWKQSSSDMSLIQSVLICRPKFFSVTVRTPTRPSNAPLWPPSICTVSIMPNRACLRREDKNFQNEQNTINVNSRDGTFFFLVRKQPI

SEQ ID NO: 831239 - protein, 118 aa, Homo sapiens; identical to SEQ ID NO: 831238

SEQ ID NO: 831240 - protein, 70 aa, Homo sapiens
ADVETRYPLFEGPETGKKRPSRNEDHFDHFGPLALIKKKKLQLELKRDIKNGFSRIISRFEQQQFEGPKP

SEQ ID NO: 831241 - protein, 71 aa, Homo sapiens
MGGTTSTRRVTFEADENENITVVKGIRVSARGRAEGQWLDSDPKAPSFRTRSAWVSPVLDPSVLRPEAQVS

SEQ ID NO: 831242 - protein, 175 aa, Homo sapiens
MGGTTSTRRVTFEADENENITVVKGIRLSENVIDRMKESSPSGSKSQRYSGAYGASVSDEELKRRVAEELALEQAKKESEDQKRLKQAKELDRERAAANEQLTRAILRERICSEEERAKAKHLARQLEEKDRVLKKQDAFYKEQLARLEERSSEFYRVTTEQYQKAAEEVEAKFK

SEQ ID NO: 831243 - protein, 227 aa, Homo sapiens; identical to SEQ ID NO: 831233

SEQ ID NO: 831244 - protein, 231 aa, Homo sapiens
  misc_feature (18)..(18): Xaa can be any naturally occurring amino acid
  misc_feature (21)..(21): Xaa can be any naturally occurring amino acid
  misc_feature (27)..(27): Xaa can be any naturally occurring amino acid
  misc_feature (29)..(29): Xaa can be any naturally occurring amino acid
  misc_feature (36)..(36): Xaa can be any naturally occurring amino acid
  misc_feature (39)..(39): Xaa can be any naturally occurring amino acid
  misc_feature (41)..(41): Xaa can be any naturally occurring amino acid
  misc_feature (44)..(44): Xaa can be any naturally occurring amino acid
  misc_feature (47)..(47): Xaa can be any naturally occurring amino acid
  misc_feature (50)..(50): Xaa can be any naturally occurring amino acid
  misc_feature (58)..(58): Xaa can be any naturally occurring amino acid
MGGTTSTRRVTFEADEKXKKXEEKGKXQXEKEKKRXKEXTXTGXKKXRKXGAKGAKEXEEVSDEELKRRVAEELALEQAKKESEDQKRLKQAKELDRERAAANEQLTRAILRERICSEEERAKAKHLARQLEEKDRVLKKQDAFYKEQLARLEERSSEFYRVTTEQYQKAAEEVEAKFKRYESHPVCADLQAKILQCYRENTHQTLKCSALATQYMHCVNHAKQSMLEKGG

SEQ ID NO: 831245 - protein, 209 aa, Homo sapiens
MGGTTSTRRVTFEADENENITVVKGIRLSENVIDRMKESSPSGSKSQRYSGAYGASVSDEELDQKRLKQAKELDRERAAANEQLTRAILRERICSEEERAKAKHLARQLEEKDRVLKKQDAFYKEQLARLEERSSEFYRVTTEQYQKAAEEVEAKFKRYESHPVCADLQAKILQCYRENTHQTLKCSALATQYMHCVNHAKQSMLEKGG

SEQ ID NO: 831246 - protein, 105 aa, Homo sapiens
MCSLTLIFILNEDHWSQRSLCLFSGDMSLIQSVLICRPKFFSVTVRTPTRPSNAPLWPPSICTVSIMPNRACLRREDKNFQNEQNTINVNSRDGTFFFLVRKQPI

SEQ ID NO: 831247 - protein, 107 aa, Homo sapiens
MGGTTSTRRVTFEADENENITVVKGIRLSENVIDRMKESSPSGSKSQRYSGAYGASVSDEELKRRVAEELALEQAKKESEDQKRRTKASPKELEPEERGLGGQMEPG

SEQ ID NO: 831248 - protein, 432 aa, Homo sapiens
GGSAAGTTAVPTAIRPPGLACPCARLPSARRPPAALPRSVPPRPRPAGMQRSPPGYGAQDDPPARRDCAWAPGHGAAADTRGLAAGPAALAAPAAPASPPSPQRSPPRSPEPGRYGLSPAGRGERQAADESRIRRPMNAFMVWAKDERKRLAQQNPDLHNAVLSKMLGKAWKELNAAEKRPFVEEAERLRVQHLRDHPNYKYRPRRKKQARKARRLEPGLLLPGLAPPQPPPEPFPAASGSARAFRELPPLGAEFDGLGLPTPERSPLDGLEPGEAAFFPPPAAPEDCALRPFRAPYAPTELSRDPGGCYGAPLAEALRTAPPAAPLAGLYYGTLGTPGPYPGPLSPPPEAPPLESAEPLGPAADLWADVDLTEFDQYLNCSRTRPDAPGLPYHVALAKLGPRAMSCPEESSLISALSDASSAVYYSACISG

SEQ ID NO: 831249 - protein, 432 aa, Homo sapiens; identical to SEQ ID NO: 831248

SEQ ID NO: 831250 - protein, 378 aa, Homo sapiens
GGSAAGTTAVPTAIRPPGLACPCARLPSARRPPAALAAPAAPASPPSPQRSPPRSPEPGRYGLSPAGRGERQAADESRIRRPMNAFMVWAKDERKRLAQQNPDLHNAVLSKMLGKAWKELNAAEKRPFVEEAERLRVQHLRDHPNYKYRPRRKKQARKARRLEPGLLLPGLAPPQPPPEPFPAASGSARAFRELPPLGAEFDGLGLPTPERSPLDGLEPGEAAFFPPPAAPEDCALRPFRAPYAPTELSRDPGGCYGAPLAEALRTAPPAAPLAGLYYGTLGTPGPYPGPLSPPPEAPPLESAEPLGPAADLWADVDLTEFDQYLNCSRTRPDAPGLPYHVALAKLGPRAMSCPEESSLISALSDASSAVYYSACISG

SEQ ID NO: 831251 - protein, 432 aa, Homo sapiens; identical to SEQ ID NO: 831248

SEQ ID NO: 831252 - protein, 432 aa, Homo sapiens; identical to SEQ ID NO: 831248

SEQ ID NO: 831253 - protein, 1167 aa, Homo sapiens
MEELIWEQYTVTLQKDSKRGFGIAVSGGRDNPHFENGETSIVISDVLPGGPADGLLQENDRVVMVNGTPMEDVLHSFAVQQLRKSGKVAAIVVKRPRKVQVAALQASPPLDQDDRAFEVMDEFDGRSFRSGYSERSRLNSHGGRSRSWEDSPERGRPHERARSRERDLSRDRSRGRSLERGLDQDHARTRDRSRGRSLERGLDHDFGPSRDRDRDRSRGRSIDQDYERAYHRAYDPDYERAYSPEYRRGARHDARSRGPRSRSREHPHSRSPSPEPRGRPGPIGVLLMKSRANEEYGLRLGSQIFVKEMTRTGLATKDGNLHEGDIILKINGTVTENMSLTDARKLIEKSRGKLQLVVLRDSQQTLINIPSLNDSDSEIEDISEIESNRSFSPEERRHQYSDYDYHSSSEKLKERPSSREDTPSRLSRMGATPTPFKSTGDIAGTVVPETNKEPRYQEEPPAPQPKAAPRTFLRPSPEDEAIYGPNTKMVRFKKGDSVGLRLAGGNDVGIFVAGIQEGTSAEQEGLQEGDQILKVNTQDFRGLVREDAVLYLLEIPKGEMVTILAQSRADVYRDILACGRGDSFFIRSHFECEKETPQSLAFTRGEVFRVVDTLYDGKLGNWLAVRIGNELEKGLIPNKSRAEQMASVQNAQRDNAGDRADFWRMRGQRSGVKKNLRKSREDLTAVVSVSTKFPAYERVLLREAGFKRPVVLFGPIADIAMEKLANELPDWFQTAKTEPKDAGSEKSTGVVRLNTVRQIIEQDKHALLDVTPKAVDLLNYTQWFPIVIFFNPDSRQGVKTMRQRLNPTSNKSSRKLFDQANKLKKTCAHLFTATINLNSANDSWFGSLKDTIQHQQGEAVWVSEGKMEGMDDDPEDRMSYLTAMGADYLSCDSRLISDFEDTDGEGGAYTDNELDEPAEEPLVSSITRSSEPVQHEESIRKPSPEPRAQMRRAASSDQLRDNSPPPAFKPEPPKAKTQNKEESYDFSKSYEYKSNPSAVAGNETPGASTKGYPPPVAAKPTFGRSILKPSTPIPPQEGEEVGESSEEQDNAPKSVLGKVKIFEKMDHKARLQRMQELQEAQNARIEIAQKHPDIYAVPIKTHKPDPGTPQHTSSRPPEPQKAPSRPYQDTRGSYGSDAEEEEYRQQLSEHSKRGYYGQSARYRDTEL

SEQ ID NO: 831254 - protein, 1167 aa, Homo sapiens; identical to SEQ ID NO: 831253

SEQ ID NO: 831255 - protein, 874 aa, Homo sapiens
MEELIWEQYTVTLQKDSKRGFGIAVSGGRDNPHFENGETSIVISDVLPGGPADGLLQENDRVVMVNGTPMEDVLHSFAVQQLRKSGKVAAIVVKRPRKVQVAALQASPPLDQDDRAFEVMDEFDGRSFRSGYSERSRLNSHGGRSRSWEDSPERGRPHERARSRERDLSRDRSRGRSLERGLDQDHARTRDRSRGRSLERGLDHDFGPSRDRDRDRSRGRSIDQDYERAYHRAYDPDYERAYSPEYRRGARHDARSRGPRSRSREHPHSRSPSPEPRGRPGPIGVLLMKSRANEEYGLRLGSQIFVKEMTRTGLATKDGNLHEGDIILKINGTVTENMSLTDARKLIEKSRGKLQLVVLRDSQQTLINIPSLNDSDSEIEDISEIESNRSFSPEERRHQYSDYDYHSSSEKLKERPSSREDTPSRLSRMGATPTPFKSTGDIAGTVVPETNKEPRYQEEPPAPQPKAAPRTFLRPSPEDEAIYGPNTKMVRFKKGDSVGLRLAGGNDVGIFVAGIQEGTSAEQEGLQEGDQILKVNTQDFRGLVREDAVLYLLEIPKGEMVTILAQSRADVYRDILACGRGDSFFIRSHFECEKETPQSLAFTRGEVFRVVDTLYDGKLGNWLAVRIGNELEKGLIPNKSRAEQMASVQNAQRDNAGDRADFWRMRGQRSGVKKNLRKSREDLTAVVSVSTKFPAYERVLLREAGFKRPVVLFGPIADIAMEKLANELPDWFQTAKTEPKDAGSEKSTGVVRLNTVRQIIEQDKHALLDVTPKAVDLLNYTQWFPIVIFFNPDSRQGVKTMRQRLNPTSNKSSRKLFDQANKLKKTCAHLFTATINLNSANDSWFGSLKDTIQHQQGEAVWVSEGKVCGIDMLL

SEQ ID NO: 831256 - protein, 1130 aa, Homo sapiens
MEELIWEQYTVTLQKDSKRGFGIAVSGGRDNPHFENGETSIVISDVLPGGPADGLLQENDRVVMVNGTPMEDVLHSFAVQQLRKSGKVAAIVVKRPRKVQVAALQASPPLDQDDRAFEVMDEFDGRSFRSGYSERSRLNSHGGRSRSWEDSPERGRPHERARSRERDLSRDRSRGRSLERGLDQDHARTRDRSRGRSLERGLDHDFGPSRDRDRDRSRGRSIDQDYERAYHRAYDPDYERAYSPEYRRGARHDARSRGPRSRSREHPHSRSPSPEPRGRPGPIGVLLMKSRANEEYGLRLGSQIFVKEMTRTGLATKDGNLHEGDIILKINGTVTENMSLTDARKLIEKSRGKLQLVVLRDSQQTLINIPSLNDSDSEIEDISEIESNRSFSPEERRHQYSDYDYHSSSEKLKERPSSREDTPSRLSRMGATPTPFKSTGDIAGTVVPETNKEPRYQEEPPAPQPKAAPRTFLRPSPEDEAIYGPNTKMVRFKKGDSVGLRLAGGNDVGIFVAGIQEGTSAEQEGLQEGDQILKVNTQDFRGLVREDAVLYLLEIPKGEMVTILAQSRADVYRDILACGRGDSFFIRSHFECEKETPQSLAFTRGEVFRVVDTLYDGKLGNWLAVRIGNELEKGLIPNKSRAEQMASVQNAQRDNAGDRADFWRMRGQRSGVKKNLRKSREDLTAVVSVSTKFPAYERVLLREAGFKRPVVLFGPIADIAMEKLANELPDWFQTAKTEPKDAGSEKSTGVVRLNTVRQIIEQDKHALLDVTPKAVDLLNYTQWFPIVIFFNPDSRQGVKTMRQRLNPTSNKSSRKLFDQANKLKKTCAHLFTATINLNSANDSWFGSLKDTIQHQQGEAVWVSEGKMEGMDDDPEDRMSYLTAMGADYLSCDSRLISDFEDTDGEGGAYTDNELDEPAEEPLVSSITRSSEPVQHEEAKTQNKEESYDFSKSYEYKSNPSAVAGNETPGASTKGYPPPVAAKPTFGRSILKPSTPIPPQEGEEVGESSEEQDNAPKSVLGKVKIFEKMDHKARLQRMQELQEAQNARIEIAQKHPDIYAVPIKTHKPDPGTPQHTSSRPPEPQKAPSRPYQDTRGSYGSDAEEEEYRQQLSEHSKRGYYGQSARYRDTEL

SEQ ID NO: 831257 - protein, 1059 aa, Homo sapiens
MEELIWEQYTVTLQKDSKRGFGIAVSGGRDNPHFENGETSIVISDVLPGGPADGLLQENDRVVMVNGTPMEDVLHSFAVQQLRKSGKVAAIVVKRPRKVQVAALQASPPLDQDDRAFEVMDEFDGRSFRSGYSERSRLNSHGGRSRSWEDSPERGRPHERARSRERDLSRDRSRGRSLERGLDQDHARTRDRSRGRSLERGLDHDFGPSRDRDRDRSRGRSIDQDYERAYHRAYDPDYERAYSPEYRRGARHDARSRGPRSRSREHPHSRSPSPEPRGRPGPIGVLLMKSRANEEYGLRLGSQIFVKEMTRTGLATKDGNLHEGDIILKINGTVTENMSLTDARKLIEKSRGKLQLVVLRDSQQTLINIPSLNDSDSEIEDISEIESNRSFSPEERRHQYSDYDYHSSSEKLKERPSSREDTPSRLSRMGATPTPFKSTGDIAGTVVPETNKEPRYQEEPPAPQPKAAPRTFLRPSPEDEAIYGPNTKMVRFKKGDSVGLRLAGGNDVGIFVAGIQEGTSAEQEGLQEGDQILKVNTQDFRGLVREDAVLYLLEIPKGEMVTILAQSRADVYRDILACGRGDSFFIRSHFECEKETPQSLAFTRGEVFRVVDTLYDGKLGNWLAVRIGNELEKGLIPNKSRAEQMASVQNAQRDNAGDRADFWRMRGQRSGVKKNLRKSREDLTAVVSVSTKFPAYERVLLREAGFKRPVVLFGPIADIAMEKLANELPDWFQTAKTEPKDAGSEKSTGVVRLNTVRQIIEQDKHALLDVTPKAVDLLNYTQWFPIVIFFNPDSRQGVKTMRQRLNPTSNKSSRKLFDQANKLKKTCAHLFTATINLNSANDSWFGSLKDTIQHQQGEAVWVSEGKAKTQNKEESYDFSKSYEYKSNPSAVAGNETPGASTKGYPPPVAAKPTFGRSILKPSTPIPPQEGEEVGESSEEQDNAPKSVLGKVKIFEKMDHKARLQRMQELQEAQNARIEIAQKHPDIYAVPIKTHKPDPGTPQHTSSRPPEPQKAPSRPYQDTRGSYGSDAEEEEYRQQLSEHSKRGYYGQSARYRDTEL

SEQ ID NO: 831258 - protein, 510 aa, Homo sapiens
KKQLEDGRYYFLDYNIRRSTNCIYDLSQRGGMQIFVKTLTGKTITLEVEPSDTIENVKAKIQDKESIPPDQQRLIFAGKQLEDGRTHSDYNILLAGDTAKQDSQQDKHALLDVTPKAVDLLNYTQWFPIVIFFNPDSRQGVKTMRQRLNPTSNKSSRKLFDQANKLKKTCAHLFTATINLNSANDSWFGSLKDTIQHQQGEAVWVSEGKMEGMDDDPEDRMSYLTAMGADYLSCDSRLISDFEDTDGEGGAYTDNELDEPAEEPLVSSITRSSEPVQHEESIRKPSPEPRAQMRRAASSDQLRDNSPPPAFKPEPPKAKTQNKEESYDFSKSYEYKSNPSAVAGNETPGASTKGYPPPVAAKPTFGRSILKPSTPIPPQEGEEVGESSEEQDNAPKSVLGKVKIFEKMDHKARLQRMQELQEAQNARIEIAQKHPDIYAVPIKTHKPDPGTPQHTSSRPPEPQKAPSRPYQDTRGSYGSDAEEEEYRQQLSEHSKRGYYGQSARYRDTEL

SEQ ID NO: 831259 - protein, 350 aa, Homo sapiens
MPLEINADLFVYISIATINLNSANDSWFGSLKDTIQHQQGEAVWVSEGKMEGMDDDPEDRMSYLTAMGADYLSCDSRLISDFEDTDGEGGAYTDNELDEPAEEPLVSSITRSSEPVQHEESIRKPSPEPRAQMRRAASSDQLRDNSPPPAFKPEPPKAKTQNKEESYDFSKSYEYKSNPSAVAGNETPGASTKGYPPPVAAKPTFGRSILKPSTPIPPQEGEEVGESSEEQDNAPKSVLGKVKIFEKMDHKARLQRMQELQEAQNARIEIAQKHPDIYAVPIKTHKPDPGTPQHTSSRPPEPQKAPSRPYQDTRGSYGSDAEEEEYRQQLSEHSKRGYYGQSARYRDTEL

SEQ ID NO: 831260 - protein, 103 aa, Homo sapiens
MDHKARLQRMQELQEAQNARIEIAQKHPDIYAVPIKTHKPDPGTPQHTSSRPPEPQKAPSRPYQDTRGSYGSDAEEEEYRQQLSEHSKRGYYGQSARYRDTEL

SEQ ID NO: 831261 - protein, 1113 aa, Homo sapiens
MEELIWEQYTVTLQKDSKRGFGIAVSGGRDNPHFENGETSIVISDVLPGGPADGLLQENDRVVMVNGTPMEDVLHSFAVQQLRKSGKVAAIVVKRPRKVQVAALQASPPLDQDDRAFEVMDEFDGRSFRSGYSERSRLNSHGGRSRSWEDSPERGRPHERARSRERDLSRDRSRGRSLERGLDQDHARTRDRSRGRSLERGLDHDFGPSRDRDRDRSRGRSIDQDYERAYHRAYDPDYERAYSPEYRRGARHDARSRGPRSRSREHPHSRSPSPEPRGRPGPIGVLLMKSRANEEYGLRLGSQIFVKEMTRTGLATKDGNLHEGDIILKINGTVTENMSLTDARKLIEKSRGKLQLVVLRDSQQTLINIPSLNDSDSEIEDISEIESNRSFSPEERRHQYSDYDYHSSSEKLKERPSSREDTPSRLSRMGATPTPFKSTGDIAGTVVPETNKEPRYQEEPPAPQPKAAPRTFLRPSPEDEAIYGPNTKMVRFKKGDSVGLRLAGGNDVGIFVAGIQEGTSAEQEGLQEGDQILKVNTQDFRGLVREDAVLYLLEIPKGEMVTILAQSRADVYRDILACGRGDSFFIRSHFECEKETPQSLAFTRGEVFRVVDTLYDGKLGNWLAVRIGNELEKGLIPNKSRAEQMASVQNAQRDNAGDRADFWRMRGQRSGVKKNLRKSREDLTAVVSVSTKFPAYERVLLREAGFKRPVVLFGPIADIAMEKLANELPDWFQTAKTEPKDAGSEKSTGVVRLNTVRQIIEQDKHALLDVTPKAVDLLNYTQWFPIVIFFNPDSRQGVKTMRQRLNPTSNKSSRKLFDQANKLKKTCAHLFTATINLNSANDSWFGSLKDTIQHQQGEAVWVSEGKMEGMDDDPEDRMSYLTAMGADYLSCDSRLISDFEDTDGEGGAYTDNELDEPAEEPLVSSITRSSEPVQHEESIRKPSPEPRAQMRRAASSDQLRDNSPPPAFKPEPPKAKTQNKEESYDFSKSYEYKSNPSAVAGNETPGASTKGYPPPVAAKPTFGRSILKPSTPIPPQEGEEVGESSEEQDNAPKSVLGKVKIFEKMDHKARLQRMQELQEAQNARIEIAQKHPDIYAVPIKTHKPDPGTPQHTR

SEQ ID NO: 831262 - protein, 871 aa, Homo sapiens
MEELIWEQYTVTLQKDSKRGFGIAVSGGRDNPHFENGETSIVISDVLPGGPADGLLQENDRVVMVNGTPMEDVLHSFAVQQLRKSGKVAAIVVKRPRKVQVAALQASPPLDQDDRAFEVMDEFDGRSFRSGYSERSRLNSHGGRSRSWEDSPERGRPHERARSRERDLSRDRSRGRSLERGLDQDHARTRDRSRGRSLERGLDHDFGPSRDRDRDRSRGRSIDQDYERAYHRAYDPDYERAYSPEYRRGARHDARSRGPRSRSREHPHSRSPSPEPRGRPGPIGVLLMKSRANEEYGLRLGSQIFVKEMTRTGLATKDGNLHEGDIILKINGTVTENMSLTDARKLIEKSRGKLQLVVLRDSQQTLINIPSLNDSDSEIEDISEIESNRSFSPEERRHQYSDYDYHSSSEKLKERPSSREDTPSRLSRMGATPTPFKSTGDIAGTVVPETNKEPRYQEEPPAPQPKAAPRTFLRPSPEDEAIYGPNTKMVRFKKGDSVGLRLAGGNDVGIFVAGIQEGTSAEQEGLQEGDQILKVNTQDFRGLVREDAVLYLLEIPKGEMVTILAQSRADVYRDILACGRGDSFFIRSHFECEKETPQSLAFTRGEVFRVVDTLYDGKLGNWLAVRIGNELEKGLIPNKSRAEQMASVQNAQRDNAGDRADFWRMRGQRSGVKKNLRKSREDLTAVVSVSTKFPAYERVLLREAGFKRPVVLFGPIADIAMEKLANELPDWFQTAKTEPKDAGSEKSTGVVRLNTVRQIIEQDKHALLDVTPKAVDLLNYTQWFPIVIFFNPDSRQGVKTMRQRLNPTSNKSSRKLFDQANKLKKTCAHLFTATINLNSANDSWFGSLKDTIQHQQGEAVWVSEGKMEGMV

SEQ ID NO: 831263 - protein, 102 aa, Homo sapiens
MEELIWEQYTVTLQKDSKRGFGIAVSGGRDNPHFENGETSIVISDVLPGGPADGLLQENDRVVMVNGTPMEDVLHSFAVQQLRKSGKVAAIVSTGFAFSLPY

SEQ ID NO: 831264 - protein, 1190 aa, Homo sapiens [sequence omitted]

SEQ ID NO: 831265 - protein, 1139 aa, Homo sapiens
MEELIWEQYTVTLQKDSKRGFGIAVSGGRDNPHFENGETSIVISDVLPGGPADGLLQENDRVVMVNGTPMEDVLHSFAVQQLRKSGKVAAIVVKRPRKVQVAALQASPPLDQDDRAFEVMDEFDGRSFRSGYSERSRLNSHGGRSRSWEDSPERGRPHERARSRERDLSRDRSRGRSLERGLDQDHARTRDRSRGRSLERGLDHDFGPSRDRDRDRSRGRSIDQDYERAYHRAYDPDYERAYSPEYRRGARHDAHRGPPDEKQSERRVWSPAGSQIFVKEMTRTGLATKDGNLHEGDIILKINGTVTENMSLTDARKLIEKSRGKLQLVVLRDSQQTLINIPSLNDSDSEIEDISEIESNRSFSPEERRHQYSDYDYHSSSEKLKERPSSREDTPSRLSRMGATPTPFKSTGDIAGTVVPETNKEPRYQEEPPAPQPKAAPRTFLRPSPEDEAIYGPNTKMVRFKKGDSVGLRLAGGNDVGIFVAGIQEGTSAEQEGLQEGDQILKVNTQDFRGLVREDAVLYLLEIPKGEMVTILAQSRADVYRDILACGRGDSFFIRSHFECEKETPQSLAFTRGEVFRVVDTLYDGKLGNWLAVRIGNELEKGLIPNKSRAEQMASVQNAQRDNAGDRADFWRMRGQRSGVKKNLRKSREDLTAVVSVSTKFPAYERVLLREAGFKRPVVLFGPIADIAMEKLANELPDWFQTAKTEPKDAGSEKSTGVVRLNTVRQIIEQDKHALLDVTPKAVDLLNYTQWFPIVIFFNPDSRQGVKTMRQRLNPTSNKSSRKLFDQANKLKKTCAHLFTATINLNSANDSWFGSLKDTIQHQQGEAVWVSEGKMEGMDDDPEDRMSYLTAMGADYLSCDSRLISDFEDTDGEGGAYTDNELDEPAEEPLVSSITRSSEPVQHEESIRKPSPEPRAQMRRAASSDQLRDNSPPPAFKPEPPKAKTQNKEESYDFSKSYEYKSNPSAVAGNETPGASTKGYPPPVAAKPTFGRSILKPSTPIPPQEGEEVGESSEEQDNAPKSVLGKVKIFEKMDHKARLQRMQELQEAQNARIEIAQKHPDIYAVPIKTHKPDPGTPQHTSSRPPEPQKAPSRPYQDTRGSYGSDAEEEEYRQQLSEHSKRGYYGQSARYRDTEL

SEQ ID NO: 831266 - protein, 1149 aa, Homo sapiens
MEELIWEQYTVTLQKDSKRGFGIAVSGGRDNPHFENGETSIVISDVLPGGPADGLLQENDRVVMVNGTPMEDVLHSFAVQQLRKSGKVAAIVVKRPRKVQVAALQASPPLDQDDRAFEVMDEFDGRSFRSGYSERSRLNSHGGRSRSWEDSPERGRPHERARSRERDLSRDRSRGRSLERGLDQDHARTRDRSRGRSLERGLDHDFGPSRDRDRDRSRGRSIDQDYERAYHRAYDPDYERAYSPEYRRGARHDARSRGPRSRSREHPHSRSPSPEPRGRPGPIGVLLMKSRANEEYGLRLGSQIFVKEMTRTGLATKDGNLHEGDIILKINGTVTENMSLTDARKLIEKSRGKLQLVVLRDSQQTLINIPSLNDSDSEIEDISEIESNRSFSPEERRHQYSDYDYHSSSEKLKERPSSREDTPSRLSRMGATPTPFKSTGDIAGTVVPETNKEPRYQEEPPAPQPKAAPRTFLRPSPEDEAIYGPNTKMVRFKKGDSVGLRLAGGNDVGIFVAGIQEGTSAEQEGLQEGDQILKVNTQDFRGLVREDAVLYLLEIPKGEMVTILAQSRADVYRDILACGRGDSFFIRSHFECEKETPQSLAFTRGEVFRVVDTLYDGKLGNWLAVRIGNELEKGLIPNKSRAEQMASVQNAQRDNAGDRADFWRMRGQRSGVKKNLRKSREDLTAVVSVSTKFPAYERVLLREAGFKRPVVLFGPIADIAMEKLANELPDWFQTAKTEPKDAGSEKSTGVVRLNTVRQIIEQDKHALLDVTPKAVDLLNYTQWFPIVIFFNPDSRQGVKTMRQRLNPTSNKSSRKLFDQANKLKNWFGSLKDTIQHQQGEAVWVSEGKMEGMDDDPEDRMSYLTAMGADYLSCDSRLISDFEDTDGEGGAYTDNELDEPAEEPLVSSITRSSEPVQHEESIRKPSPEPRAQMRRAASSDQLRDNSPPPAFKPEPPKAKTQNKEESYDFSKSYEYKSNPSAVAGNETPGASTKGYPPPVAAKPTFGRSILKPSTPIPPQEGEEVGESSEEQDNAPKSVLGKVKIFEKMDHKARLQRMQELQEAQNARIEIAQKHPDIYAVPIKTHKPDPGTPQHTSSRPPEPQKAPSRPYQDTRGSYGSDAEEEEYRQQLSEHSKRGYYGQSARYRDTEL

SEQ ID NO: 831267 - protein, 1103 aa, Homo sapiens
MEELIWEQYTVTLQKDSKRGFGIAVSGGRDNPHFENGETSIVISDVLPGGPADGLLQENDRVVMVNGTPMEDVLHSFAVQQLRKSGKVAAIVVKRPRKVQVAALQASPPLDQDDRAFEVMDEFDGRSFRSGYSERSRLNSHGGRSRSWEDSPERGRPHERARSRERDLSRDRSRGRSLERGLDQDHARTRDRSRGRSLERGLDHDFGPSRDRDRDRSRGRSIDQDYERAYHRAYDPDYERAYSPEYRRGARHDARSRGPRSRSREHPHSRSPSPEPRGRPGPIGVLLMKSRANEEYGLRLGSQIFVKEMTRTGLATKDGNLHEGDIILKINGTVTENMSLTDARKLIEKSRGKLQLVVLRDSQQTLINIPSLNDSDSEIEDISEIESNRSFSPEERRHQYSDYDYHSSSEKLKERPSSREDTPSRLSRMGATPTPFKSTGDIAGTVVPETNKEPRYQEEPPAPQPKAAPRTFLRPSPEDEAIYGPNTKMVRFKKGDSVGLRLAGGNDVGIFVAGIQEGTSAEQEGLQEGDQILKVNTQDFRGLVREDAVLYLLEIPKGEMVTILAQSRADVYRDILACGRGDSFFIRSHFECEKETPQSLAFTRGEVFRVVDTLYDGKLGNWLAVRIGNELEKGLIPNKSRAEQMASVQNAQRDNAGDRADFWRMRGQRSGVKKNLRKSREDLTAVVSVSTKFPAYERVLLREAGFKRPVVLFGPIADIAMEKLANELPDWFQTAKTEPKDAGSEKSTGVVRLNTVRQIIEQDKHALLDVTPKAVDLLNYTQWFPIVIFFNPDSRQGVKTMRQRLNPTSNKSSRKLFDQANKLKKTCAHLFTATINLNSANDSWFGSLKDTIQHQQGEAVWVSEGKMEGMDDDPEDRMSYLTAMGADYLSCDSRLISDFEDTDGEGGAYTDNELDEPAEEPLVSSITRSSEPVQHEESIRKPSPEPRAQMRRAASSDQLRDNSPPPAFKPEPPKAKTQNKEESYDFSKSYEYKSNPSAVAGNETPGASTKGYPPPVAAKPTFGRSILKPSTPIPPQEGEEVGESSEEQDNAPKSVLGKVKIFEKMDHKARLQRMQELQEAQNARIEIAQKHPDIYAVPIFQTP

SEQ ID NO: 831268 - protein, 1167 aa, Homo sapiens; identical to SEQ ID NO: 831253

SEQ ID NO: 831269 - protein, 218 aa, Homo sapiens [sequence omitted]

SEQ ID NO: 831270 - protein, 874 aa, Homo sapiens; identical to SEQ ID NO: 831255

SEQ ID NO: 831271 - protein, 1019 aa, Homo sapiens
MEELIWEQYTVTLQKDSKRGFGIAVSGGRDNPHFENGETSIVISDVLPGGPADGLLQENDRVVMVNGTPMEDVLHSFAVQQLRKSGKVAAIVVKRPRKVQVAALQASPPLDQDDRAFEVMDEFDGRSFRSGYSERSRLNSHGGRSRSWEDSPERGRPHERARSRERDLSRDRSRGRSLERGLDQDHARTRDRSRGRSLERGLDHDFGPSRDRDRDRSRGRSIDQDYERAYHRAYDPDYERAYSPEYRRGARHDARSRGPRSRSREHPHSRSPSPEPRGRPGPIGVLLMKSRANEEYGLRLGSQIFVKEMTRTGLATKDGNLHEGDIILKINGTVTENMSLTDARKLIEKSRGKLQLVVLRDSQQTLINIPSLNDSDSEIEDISEIESNRSFSPEERRHQYSDYDYHSSSEKLKERPSSREDTPSRLSRMGATPTPFKSTGDIAGTVVPETNKEPRYQEEPPAPQPKAAPRTFLRPSPEDEAIYGPNTKMVRFKKGDSVGLRLAGGNDVGIFVAGIQEGTSAEQEGLQEGDQILKVNTQDFRGLVREDAVLYLLEIPKGEMVTILAQSRADVYRDILACGRGDSFFIRSHFECEKETPQSLAFTRGEVFRVVDTLYDGKLGNWLAVRIGNELEKGLIPNKSRAEQMASVQNAQRDNAGDRADFWRMRGQRSGVKKNLRKSREDLTAVVSVSTKFPAYERVLLREAGFKRPVVLFGPIADIAMEKLANELPDWFQTAKTEPKDAGSEKSTGVVRLNTVRQIIEQDKHALLDVTPKAVDLLNYTQWFPIVIFFNPDSRQGVKTMRQRLNPTSNKSSRKLFDQANKLKKTCAHLFTATINLNSANDSWFGSLKDTIQHQQGEAVWVSEGKMEGMDDDPEDRMSYLTAMGADYLSCDSRLISDFEDTDGEGGAYTDNELDEPAEEPLVSSITRSSEPVQHEESIRKPSPEPRAQMRRAASSDQLRDNSPPPAFKPEPPKVRGWEAPGWEGRGSRCPLKPPWTAQGGACTLRWCLITVLTHCVLY

SEQ ID NO: 831272 - protein, 262 aa, Homo sapiens
KWRERQGGALHPVRQLKLGARVTPAATPPGPTDTTAAPALSLLGRAMGTRDDEYDYLFKVVLIGDSGVGKSNLLSRFTRNEFNLESKSTIGVEFATRSIQVDGKTIKAQIWDTAGQERYRAITSAYYRGAVGALLVYDIAKHLTYENVERWLKELRDHADSNIVIMLVGNKSDLRHLRAVPTDEARAFAEKNGLSFIETSALDSTNVEAAFQTILTEIYRIVSQKQMSDRRENDMSPSNNVVPIHVPPTTENKPKVQCCQNI

SEQ ID NO: 831273 - protein, 262 aa, Homo sapiens; identical to SEQ ID NO: 831272

SEQ ID NO: 831274 - protein, 261 aa, Homo sapiens
LYRLGTRRVVNRPRLKLGARVTPAATPPGPTDTTAAPALSLLGRAMGTRDDEYDYLFKVVLIGDSGVGKSNLLSRFTRNEFNLESKSTIGVEFATRSIQVDGKTIKAQIWDTAGQERYRAITSAYYRGAVGALLVYDIAKHLTYENVERWLKELRDHADSNIVIMLVGNKSDLRHLRAVPTDEARAFAEKNGLSFIETSALDSTNVEAAFQTILTEIYRIVSQKQMSDRRENDMSPSNNVVPIHVPPTTENKPKVQCCQNI

SEQ ID NO: 831275 - protein, 262 aa, Homo sapiens; identical to SEQ ID NO: 831272

SEQ ID NO: 831276 - protein, 227 aa, Homo sapiens
LSRSPSDGFFASLLALPSVQTPITVVLIGDSGVGKSNLLSRFTRNEFNLESKSTIGVEFATRSIQVDGKTIKAQIWDTAGQERYRAITSAYYRGAVGALLVYDIAKHLTYENVERWLKELRDHADSNIVIMLVGNKSDLRHLRAVPTDEARAFAEKNGLSFIETSALDSTNVEAAFQTILTEIYRIVSQKQMSDRRENDMSPSNNVVPIHVPPTTENKPKVQCCQNI

SEQ ID NO: 831277 - protein, 244 aa, Homo sapiens
KWRERQGGALHPVRQLKLGARVTPAATPPGPTDTTAAPALSLLGRAMGTRDDEYDYLFKVVLIGDSGVGKSNLLSRFTRNEFNLESKSTIGVEFATRSIQVDGKTIKAQIWDTAGQERYRAITSAYYRGAVGALLVYDIAKHLTYENVERWLKELRDHADSNIVIMLVGNKSDLRHLRAVPTDEARAFAEAAFQTILTEIYRIVSQKQMSDRRENDMSPSNNVVPIHVPPTTENKPKVQCCQNI

SEQ ID NO: 831278 - protein, 111 aa, Homo sapiens
GPALSGPADSNIVIMLVGNKSDLRHLRAVPTDEARAFAEKNGLSFIETSALDSTNVEAAFQTILTEIYRIVSQKQMSDRRENDMSPSNNVVPIHVPPTTENKPKVQCCQNI

SEQ ID NO: 831279 - protein, 92 aa, Homo sapiens
GSVRIRLSGQFLQMKQSFAEKNGLSFIETSALDSTNVEAAFQTILTEIYRIVSQKQMSDRRENDMSPSNNVVPIHVPPTTENKPKVQCCQNI

SEQ ID NO: 831280 - protein, 86 aa, Homo sapiens
LVDQAERNSSDLSNFKKERKNELKCNGMIFAHCNLRLLDSKIYRIVSQKQMSDRRENDMSPSNNVVPIHVPPTTENKPKVQCCQNI

SEQ ID NO: 831281 - protein, 262 aa, Homo sapiens; identical to SEQ ID NO: 831272

SEQ ID NO: 831282 - protein, 90 aa, Homo sapiens
CVTLVFYYFILMKQSFAEKNGLSFIETSALDSTNVEAAFQTILTEIYRIVSQKQMSDRRENDMSPSNNVVPIHVPPTTENKPKVQCCQNI

SEQ ID NO: 831283 - protein, 262 aa, Homo sapiens; identical to SEQ ID NO: 831272

SEQ ID NO: 831284 - protein, 262 aa, Homo sapiens; identical to SEQ ID NO: 831272

SEQ ID NO: 831285 - protein, 217 aa, Homo sapiens
SRGSRSLSTRYPFKVVLIGDSGVGKSNLLSRFTRNEFNLESKSTIGVEFATRSIQVDGKTIKAQIWDTAGQERYRAITSAYYRGAVGALLVYDIAKHLTYENVERWLKELRDHADSNIVIMLVGNKSDLRHLRAVPTDEARAFAEKNGLSFIETSALDSTNVEAAFQTILTEIYRIVSQKQMSDRRENDMSPSNNVVPIHVPPTTENKPKVQCCQNI

SEQ ID NO: 831286 - protein, 244 aa, Homo sapiens
KWRERQGGALHPVRQLKLGARVTPAATPPGPTDTTAAPALSLLGRAMGTRDDEYDYLFKVVLIGDSGVGKSNLLSRFTRNEFNLESKSTIGVEFATRSIQVDGKTIKAQIWDTAGQERYRAITSAYYRGAVGALLVYDIAKHLTYDIMLVGNKSDLRHLRAVPTDEARAFAEKNGLSFIETSALDSTNVEAAFQTILTEIYRIVSQKQMSDRRENDMSPSNNVVPIHVPPTTENKPKVQCCQNI

SEQ ID NO: 831287 - protein, 221 aa, Homo sapiens
KWRERQGGALHPVRQLKLGARVTPAATPPGPTDTTAAPALSLLGRAMGTRDDEYDYLFKVVLIGDSGVGKSNLLSRFTRNEFNLESKSTIGVEFATRSIQVDGKTIKAQIWDTAGQERYRAITSAYYRGAVGALLVYDIAKHLTYENVERWLKELRDHADSNIVIMLVGNKSDLRHLRAVPTDEQMSDRRENDMSPSNNVVPIHVPPTTENKPKVQCCQNI

SEQ ID NO: 831288 - protein, 1116 aa, Homo sapiens
MSSSPLSKKRRVSGPDPKPGSNCSPAQSVLSEVPSVPTNGMAKNGSEADIDEGLYSRQLYVLGHEAMKRLQTSSVLVSGLRGLGVEIAKNIILGGVKAVTLHDQGTAQWADLSSQFYLREEDIGKNRAEVSQPRLAELNSYVPVTAYTGPLVEDFLSGFQVVVLTNTPLEDQLRVGEFCHNRGIKLVVADTRGLFGQLFCDFGEEMILTDSNGEQPLSAMVSMVTKDNPGVVTCLDEARHGFESGDFVSFSEVQGMVELNGNQPMEIKVLGPYTFSICDTSNFSDYIRGGIVSQVKVPKKISFKSLVASLAEPDFVVTDFAKFSRPAQLHIGFQALHQFCAQHGRPPRPRNEEDAAELVALAQAVNARALPAVQQNNLDEDLIRKLAYVAAGDLAPINAFIGGLAAQEVMKACSGKFMPIMQWLYFDALECLPEDKEVLTEDKCLQRQNRYDGQVAVFGSDLQEKLGKQKYFLVGAGAIGCELLKNFAMIGLGCGEGGEIIVTDMDTIEKSNLNRQFLFRPWDVTKLKSDTAAAAVRQMNPHIRVTSHQNRVGPDTERIYDDDFFQNLDGVANALDNVDARMYMDRRCVYYRKPLLESGTLGTKGNVQVVIPFLTESYSSSQDPPEKSIPICTLKNFPNAIEHTLQWARDEFEGLFKQPAENVNQYLTDPKFVERTLRLAGTQPLEVLEAVQRSLVLQRPQTWADCVTWACHHWHTQYSNNIRQLLHNFPPDQLTSSGAPFWSGPKRCPHPLTFDVNNPLHLDYVMAAANLFAQTYGLTGSQDRAAVATFLQSVQVPEFTPKSGVKIHVSDQELQSANASVDDSRLEELKATLPSPDKLPGFKMYPIDFEKDDDSNFHMDFIVAASNLRAENYDIPSADRHKSKLIAGKIIPAIATTTAAVVGLVCLELYKVVQGHRQLDSYKNGFLNLALPFFGFSEPLAAPRHQYYNQEWTLWDRFEVQGLQPNGEEMTLKQFLDYFKTEHKLEITMLSPGRVHALFLLHASCQAQGTVGSADDRDCEPCVEAKAGAATCGRWCLSCAVTTRAARMSRFPMSDTPSADPVCSSRLAPCPPLSTPLPAQGSHLASGSGPTSQVWCSLIIPLPEPLLPLPSTLFET

SEQ ID NO: 831289 - protein, 288 aa, Homo sapiens
MSSSPLSKKRRVSGPDPKPGSNCSPAQSVLSEVPSVPTNGMAKNGSEADIDEGLYSRQLYVLGHEAMKRLQTSSVLVSGLRGLGVEIAKNIILGGVKAVTLHDQGTAQWADLSSQFYLREEDIGKNRAEVSQPRLAELNSYVPVTAYTGPLVEDFLSGFQVVVLTNTPLEDQLRVGEFCHNRGIKLVVADTRGLFGQLFCDFGEEMILTDSNGEQPLSAMVSMVTKTTRGGYCWMRPPGVDERDLSFRSTGWWLTDYLGQAGLTLVGTPFRIGGCIRKAKINWRRTVW

SEQ ID NO: 831290 - protein, 1116 aa, Homo sapiens; identical to SEQ ID NO: 831288

SEQ ID NO: 831291 - protein, 820 aa, Homo sapiens
  misc_feature (8)..(8): Xaa can be any naturally occurring amino acid
TLVRPRVXGISSTSAVADFVVTDFAKFSRPAQLHIGFQALHQFCAQHGRPPRPRNEEDAAELVALAQAVNARALPAVQQNNLDEDLIRKLAYVAAGDLAPINAFIGGLAAQEVMKACSGKFMPIMQWLYFDALECLPEDKEVLTEDKCLQRQNRYDGQVAVFGSDLQEKLGKQKYFLVGAGAIGCELLKNFAMIGLGCGEGGEIIVTDMDTIEKSNLNRQFLFRPWDVTKLKSDTAAAAVRQMNPHIRVTSHQNRVGPDTERIYDDDFFQNLDGVANALDNVDARMYMDRRCVYYRKPLLESGTLGTKGNVQVVIPFLTESYSSSQDPPEKSIPICTLKNFPNAIEHTLQWARDEFEGLFKQPAENVNQYLTDPKFVERTLRLAGTQPLEVLEAVQRSLVLQRPQTWADCVTWACHHWHTQYSNNIRQLLHNFPPDQLTSSGAPFWSGPKRCPHPLTFDVNNPLHLDYVMAAANLFAQTYGLTGSQDRAAVATFLQSVQVPEFTPKSGVKIHVSDQELQSANASVDDSRLEELKATLPSPDKLPGFKMYPIDFEKDDDSNFHMDFIVAASNLRAENYDIPSADRHKSKLIAGKIIPAIATTTAAVVGLVCLELYKVVQGHRQLDSYKNGFLNLALPFFGFSEPLAAPRHQYYNQEWTLWDRFEVQGLQPNGEEMTLKQFLDYFKTEHKLEITMLSPGRVHALFLLHASCQAQGTVGSADDRDCEPCVEAKAGAATCGRWCLSCAVTTRAARMSRFPMSDTPSADPVCSSRLAPCPPLSTPLPAQGSHLASGSGPTSQVWCSLIIPLPEPLLPLPSTLFET

SEQ ID NO: 831292 - protein, 578 aa, Homo sapiens
MNPHIRVTSHQNRVGPDTERIYDDDFFQNLDGVANALDNVDARMYMDRRCVYYRKPLLESGTLGTKGNVQVVIPFLTESYSSSQDPPEKSIPICTLKNFPNAIEHTLQWARDEFEGLFKQPAENVNQYLTDPKFVERTLRLAGTQPLEVLEAVQRSLVLQRPQTWADCVTWACHHWHTQYSNNIRQLLHNFPPDQLTSSGAPFWSGPKRCPHPLTFDVNNPLHLDYVMAAANLFAQTYGLTGSQDRAAVATFLQSVQVPEFTPKSGVKIHVSDQELQSANASVDDSRLEELKATLPSPDKLPGFKMYPIDFEKDDDSNFHMDFIVAASNLRAENYDIPSADRHKSKLIAGKIIPAIATTTAAVVGLVCLELYKVVQGHRQLDSYKNGFLNLALPFFGFSEPLAAPRHQYYNQEWTLWDRFEVQGLQPNGEEMTLKQFLDYFKTEHKLEITMLSPGRVHALFLLHASCQAQGTVGSADDRDCEPCVEAKAGAATCGRWCLSCAVTTRAARMSRFPMSDTPSADPVCSSRLAPCPPLSTPLPAQGSHLASGSGPTSQVWCSLIIPLPEPLLPLPSTLFET

SEQ ID NO: 831293 - protein, 957 aa, Homo sapiens
PLDGSRTDCSVTASLGGFQVVVLTNTPLEDQLRVGEFCHNRGIKLVVADTRGLFGQLFCDFGEEMILTDSNGEQPLSAMVSMVTKDNPGVVTCLDEARHGFESGDFVSFSEVQGMVELNGNQPMEIKVLGPYTFSICDTSNFSDYIRGGIVSQVKVPKKISFKSLVASLAEPDFVVTDFAKFSRPAQLHIGFQALHQFCAQHGRPPRPRNEEDAAELVALAQAVNARALPAVQQNNLDEDLIRKLAYVAAGDLAPINAFIGGLAAQEVMKACSGKFMPIMQWLYFDALECLPEDKEVLTEDKCLQRQNRYDGQVAVFGSDLQEKLGKQKYFLVGAGAIGCELLKNFAMIGLGCGEGGEIIVTDMDTIEKSNLNRQFLFRPWDVTKLKSDTAAAAVRQMNPHIRVTSHQNRVGPDTERIYDDDFFQNLDGVANALDNVDARMYMDRRCVYYRKPLLESGTLGTKGNVQVVIPFLTESYSSSQDPPEKSIPICTLKNFPNAIEHTLQWARDEFEGLFKQPAVAGTQPLEVLEAVQRSLVLQRPQTWADCVTWACHHWHTQYSNNIRQLLHNFPPDQLTSSGAPFWSGPKRCPHPLTFDVNNPLHLDYVMAAANLFAQTYGLTGSQDRAAVATFLQSVQVPEFTPKSGVKIHVSDQELQSANASVDDSRLEELKATLPSPDKLPGFKMYPIDFEKDDDSNFHMDFIVAASNLRAENYDIPSADRHKSKLIAGKIIPAIATTTAAVVGLVCLELYKVVQGHRQLDSYKNGFLNLALPFFGFSEPLAAPRHQYYNQEWTLWDRFEVQGLQPNGEEMTLKQFLDYFKTEHKLEITMLSPGRVHALFLLHASCQAQGTVGSADDRDCEPCVEAKAGAATCGRWCLSCAVTTRAARMSRFPMSDTPSADPVCSSRLAPCPPLSTPLPAQGSHLASGSGPTSQVWCSLIIPLPEPLLPLPSTLFET

SEQ ID NO: 831294 - protein, 522 aa, Homo sapiens
PLDGSRTDCSVTASLGGFQVVVLTNTPLEDQLRVGEFCHNRGIKLVVADTRGLFGQLFCDFGEEMILTDSNGEQPLSAMVSMVTKDNPGVVTCLDEARHGFESGDFVSFSEVQGMVELNGNQPMEIKVLGPYTFSICDTSNFSDYIRGGIVSQVKVPKKISFKSLVASLAEPDFVVTDFAKFSRPAQLHIGFQALHQFCAQHGRPPRPRNEEDAAELVALAQAVNARALPAVQQNNLDEDLIRKLAYVAAGDLAPINAFIGGLAAQEVMKACSGKFMPIMQWLYFDALECLPEDKEVLTEDKCLQRQNRYDGQVAVFGSDLQEKLGKQKYFLVGAGAIGCELLKNFAMIGLGCGEGGEIIVTDMDTIEKSNLNRQFLFRPWDVTKLKSDTAAAAVRQMNPHIRVTSHQNRVGPDTERIYDDDFFQNLDGVANALDNVDARMYMDRRCVYYRKPLLESGTLGTKGNVQVVIPFLTESYSSSQDPPEKSIPICTLKNFPNAIEHTLQWARDEFEGLFKQPAVTA

SEQ ID NO: 831295 - protein, 418 aa, Homo sapiens
PLDGSRTDCSVTASLGGFQVVVLTNTPLEDQLRVGEFCHNRGIKLVVADTRGLFGQLFCDFGEEMILTDSNGEQPLSAMVSMVTKDNPGVVTCLDEARHGFESGDFVSFSEVQGMVELNGNQPMEIKVLGPYTFSICDTSNFSDYIRGGIVSQVKVPKKISFKSLVASLAEPDFVVTDFAKFSRPAQLHIGFQALHQFCAQHGRPPRPRNEEDAAELVALAQAVNARALPAVQQNNLDEDLIRKLAYVAAGDLAPINAFIGGLAAQEVMKACSGKFMPIMQWLYFDALECLPEDKEVLTEDKCLQRQNRYDGQVAVFGSDLQEKLGKQKYFLVGAGAIGCELLKNFAMIGLGCGEGGEIIVTDMDTIEKSNLNRQFLFRPWDVTKLKSDTAAAAVRQMNPHIRVTSRTHLRSPSPSVP

SEQ ID NO: 831296 - protein, 975 aa, Homo sapiens
PLDGSRTDCSVTASLGGFQVVVLTNTPLEDQLRVGEFCHNRGIKLVVADTRGLFGQLFCDFGEEMILTDSNGEQPLSAMVSMVTKDNPGVVTCLDEARHGFESGDFVSFSEVQGMVELNGNQPMEIKVLGPYTFSICDTSNFSDYIRGGIVSQVKVPKKISFKSLVASLAEPDFVVTDFAKFSRPAQLHIGFQALHQFCAQHGRPPRPRNEEDAAELVALAQAVNARALPAVQQNNLDEDLIRKLAYVAAGDLAPINAFIGGLAAQEVMKACSGKFMPIMQWLYFDALECLPEDKEVLTEDKCLQRQNRYDGQVAVFGSDLQEKLGKQKYFLVGAGAIGCELLKNFAMIGLGCGEGGEIIVTDMDTIEKSNLNRQFLFRPWDVTKLKSDTAAAAVRQMNPHIRVTSHQNRVGPDTERIYDDDFFQNLDGVANALDNVDARMYMDRRCVYYRKPLLESGTLGTKGNVQVVIPFLTESYSSSQDPPEKSIPICTLKNFPNAIEHTLQWARDEFEGLFKQPAENVNQYLTDPKFVERTLRLAGTQPLEVLEAVQRSLVLQRPQTWADCVTWACHHWHTQYSNNIRQLLHNFPPDQLTSSGAPFWSGPKRCPHPLTFDVNNPLHLDYVMAAANLFAQTYGLTGSQDRAAVATFLQSVQVPEFTPKSGVKIHVSDQELQSANASVDDSRLEELKATLPSPDKLPGFKMYPIDFEKDDDSNFHMDFIVAASNLRAENYDIPSADRHKSKLIAGKIIPAIATTTAAVVGLVCLELYKVVQGHRQLDSYKNGFLNLALPFFGFSEPLAAPRHQYYNQEWTLWDRFEVQGLQPNGEEMTLKQFLDYFKTEHKLEITMLSPGRVHALFLLHASCQAQGTVGSADDRDCEPCVEAKAGAATCGRWCLSCAVTTRAARMSRFPMSDTPSADPVCSSRLAPCPPLSTPLPAQGSHLASGSGPTSQVWCSLIIPLPEPLLPLPSTLFET

SEQ ID NO: 831297 - protein, 261 aa, Homo sapiens
MKISFKSLVASLAEPDFVVTDFAKFSRPAQLHIGFQALHQFCAQHGRPPRPRNEEDAAELVALAQAVNARALPAVQQNNLDEDLIRKLAYVAAGDLAPINAFIGGLAAQEVMKACSGKFMPIMQWLYFDALECLPEDKEVLTEDKCLQRQNRYDGQVAVFGSDLQEKLGKQKYFLVGAGAIGCELLKNFAMIGLGCGEGGEIIVTDMDTIEKSNLNRQFLFRPWDVTKLKSDTAAAAVRQMNPHIRVTSRTHLRSPSPSVP

SEQ ID NO: 831298 - protein, 975 aa, Homo sapiens; identical to SEQ ID NO: 831296

SEQ ID NO: 831299 - protein, 975 aa, Homo sapiens; identical to SEQ ID NO: 831296

SEQ ID NO: 831300 - protein, 975 aa, Homo sapiens; identical to SEQ ID NO: 831296

SEQ ID NO: 831301 - protein, 980 aa, Homo sapiens
PLDGSRTDCSVTASLGGFQVVVLTNTPLEDQLRVGEFCHNRGIKLVVADTRGLFGQLFCDFGEEMILTDSNGEQPLSAMVSMVTKDNPGVVTCLDEARHGFESGDFVSFSEVQGMVELNGNQPMEIKVLGPYTFSICDTSNFSDYIRGGIVSQVKVPKKISFKSLVASLAEPDFVVTDFAKFSRPAQLHIGFQALHQFCAQHGRPPRPRNEEDAAELVALAQAVNARALPAVQQNNLDEDLIRKLAYVAAGDLAPINAFIGGLAAQEVMKACSGKFMPIMQWLYFDALECLPEDKEVLTEDKCLQRQNRYDGQVAVFGSDLQEKLGKQKYFLVGAGAIGCELLKNFAMIGLGCGEGGEIIVTDMDTIEKSNLNRQFLFRPWDVTKLKSDTAAAAVRQMNPHIRVTSHQNRVGPDTERIYDDDFFQNLDGVANALDNVDARMYMDRRCVYYRKPLLESGTLGTKGNVQVVIPFLTESYSSSQDPPEKSIPICTLKNFPNAIEHTLQWARDEFEGLFKQPAENVNQYLTDPKFVERTLRLAGTQPLEVLEAVQRSLVLQRPQTWADCVTWACHHWHTQYSNNIRQLLHNFPPDQLTSSGAPFWSGPKRCPHPLTFDVNNPLHLDYVMAAANLFAQTYGLTGSQDRAAVATFLQSVQVPEFTPKSGVKIHVSDQELQSANASVDDSRLEELKATLPSPDKLPGFKMYPIDFEKDDDSNFHMDFIVAASNLRAENYDIPSADRHKSKLIAGKIIPAIATTTAAVVGLVCLELYKVVQGHRQLDSYKNGFLNLALPFFGFSEPLAAPRHQYYNQEWTLWDRFEVQGLQPNGEEMTLKQFLDYFKTEHKLEITMLSPGRVHALFLLHASCQAQGTVGSADDRDCEPCVEAKAGAATCGRWCLSCAVTTRAARMSRFPMSDTPSADPVCSSRLAPCPPLSTPLPAQGSQLAQTQPHPGLIISIIPLLFFNLSTTTIFSCSQLAQTYS

SEQ ID NO: 831302 - protein, 971 aa, Homo sapiens
PLDGSRTDCSVTASLGGFQVVVLTNTPLEDQLRVGEFCHNRGIKLVVADTRGLFGQLFCDFGEEMILTDSNGEQPLSAMVSMVTKDNPGVVTCLDEARHGFESGDFVSFSEVQGMVELNGNQPMEIKVLGPYTFSICDTSNFSDYIRGGIVSQVKVPKKISFKSLVASLAEPDFVVTDFAKFSRPAQLHIGFQALHQFCAQHGRPPRPRNEEDAAELVALAQAVNARALPAVQQNNLDEDLIRKLAYVAAGDLAPINAFIGGLAAQEVMKACSGKFMPIMQWLYFDALECLPEDKEVLTEDKCLQRQNRYDGQVAVFGSDLQEKLGKQKYFLVGAGAIGCELLKNFAMIGLGCGEGGEIIVTDMDTIEKSNLNRQFLFRPWDVTKLKSDTAAAAVRQMNPHIRVTSHQNRVGPDTERIYDDDFFQNLDGVANALDNVDARMYMDRRCVYYRKPLLESGTLGTKGNVQVVIPFLTESYSSSQDPPEKSIPICTLKNFPNAIEHTLQWARDEFEGLFKQPAENVNQYLTDPKFVERTLRLAGTQPLEVLEAVQRSLVLQRPQTWADCVTWACHHWHTQYSNNIRQLLHNFPPDQLTSSGAPFWSGPKRCPHPLTFDVNNPLHLDYVMAAANLFAQTYGLTGSQDRAAVATFLQSVQVPEFTPKSGVKIHVSDQELQSANASVDDSRLEELKATLPSPDKLPGFKMYPIDFEKDDDSNFHMDFIVAASNLRAENYDIPSADRHKSKLIAGKIIPAIATTTAAVVGLVCLELYKVVQGHRQLDSYKNGFLNLALPFFGFSEPLAAPRHQYYNQEWTLWDRFEVQGLQPNGEEMTLKQFLDYFKTEHKLEITMLSPGRVHALFLLHASCQAQGTVGSAMTEIVSRVSKRKLGRHVRALVLELCCNDESGEDVEVPYVRYTIPLTPSAPLGWPLVNPSPHPFQPAAKLKERLYQPMTEIVSRVSKRKLGPPRAGAGA

SEQ ID NO: 831303 - protein, 971 aa, Homo sapiens; identical to SEQ ID NO: 831302

SEQ ID NO: 831304 - protein, 883 aa, Homo sapiens
PLDGSRTDCSVTASLGGFQVVVLTNTPLEDQLRVGEFCHNRGIKLVVADTRGLFGQLFCDFGEEMILTDSNGEQPLSAMVSMVTKDNPGVVTCLDEARHGFESGDFVSFSEVQGMVELNGNQPMEIKVLGPYTFSICDTSNFSDYIRGGIVSQVKVPKKISFKSLVASLAEPDFVVTDFAKFSRPAQLHIGFQALHQFCAQHGRPPRPRNEEDAAELVALAQAVNARALPAVQQNNLDEDLIRKLAYVAAGDLAPINAFIGGLAAQEVMKACSGKFMPIMQWLYFDALECLPEDKEVLTEDKCLQRQNRYDGQVAVFGSDLQEKLGKQKYFLVGAGAIGCELLKNFAMIGLGCGEGGEIIVTDMDTIEKSNLNRQFLFRPWDVTKLKSDTAAAAVRQMNPHIRVTSHQNRVGPDTERIYDDDFFQNLDGVANALDNVDARMYMDRRCVYYRKPLLESGTLGTKGNVQVVIPFLTESYSSSQDPPEKSIPICTLKNFPNAIEHTLQWARDEFEGLFKQPAENVNQYLTDPKFVERTLRLAGTQPLEVLEAVQRSLVLQRPQTWADCVTWACHHWHTQYSNNIRQLLHNFPPDQLTSSGAPFWSGPKRCPHPLTFDVNNPLHLDYVMAAANLFAQTYGLTGSQDRAAVATFLQSVQVPEFTPKSGVKIHVSDQELQSANASVDDSRLEELKATLPSPDKLPGFKMYPIDFEKDDDSNFHMDFIVAASNLRAENYDIPSADRHKSKLIAGKIIPAIATTTAAVVGLVCLELYKVVQGHRQLDSYKNGFLNLALPFFGFSEPLAAPRHQYYNQEWTLWDRFEVQGLQPNGEEMTLKQFLDYFKTEHKLEITMLSPGRRHVRALVLELCCNDESGEDVEVPYVRYTIR

SEQ ID NO: 831305 - protein, 243 aa, Homo sapiens
MRTELWQAQSKLIAGKIIPAIATTTAAVVGLVCLELYKVVQGHRQLDSYKNGFLNLALPFFGFSEPLAAPRHQYYNQEWTLWDRFEVQGLQPNGEEMTLKQFLDYFKTEHKLEITMLSPGRVHALFLLHASCQAQGTVGSADDRDCEPCVEAKAGAATCGRWCLSCAVTTRAARMSRFPMSDTPSADPVCSSRLAPCPPLSTPLPAQGSHLASGSGPTSQVWCSLIIPLPEPLLPLPSTLFET

SEQ ID NO: 831306 - protein, 927 aa, Homo sapiens
PLDGSRTDCSVTASLGGFQVVVLTNTPLEDQLRVGEFCHNRGIKLVVADTRGLFGQLFCDFGEEMILTDSNGEQPLSAMVSMVTKDNPGVVTCLDEARHGFESGDFVSFSEVQGMVELNGNQPMEIKVLGPYTFSICDTSNFSDYIRGGIVSQVKVPKKISFKSLVASLAEPDFVVTDFAKFSRPAQLHIGFQALHQFCAQHGRPPRPRNEEDAAELVALAQAVNARALPAVQQNNLDEDLIRKLAYVAAGDLAPINAFIGGLAAQEVMKACSGKFMPIMQWLYFDALECLPEDKEVLTEDKCLQRQNRYDGQVAVFGSDLQEKLGKQKYFLVGAGAIGCELLKNFAMIGLGCGEGGEIIVTDMDTIEKSNLNRQFLFRPWDVTKLKSDTAAAAVRQMNPHIRVTSHQNRVGPDTERIYDDDFFQNLDGVANALDNVDARMYMDRRCVYYRKPLLESGTLGTKGNVQVVIPFLTESYSSSQDPPEKSIPICTLKNFPNAIEHTLQWARDEFEGLFKQPAENVNQYLTDPKFVERTLRLAGTQPLEVLEAVQRSLVLQRPQTWADCVTWACHHWHTQYSNNIRQLLHNFPPDQLTSSGAPFWSGPKRCPHPLTFDVNNPLHLDYVMAAANLFAQTYGLTGSQDRAAVATFLQSVQVPEFTPKSGVKIHVSDQELQSANASVDDSRLEELKATLPSPDKLPGFKMYPIDFEKDDDSNFHMDFIVAASNLRAENYDIPSADRHKSKLIAGKIIPAIATTTAAVVGLVCLELYKVVQGHRQLDSYKNGFLNLALPFFGFSEPLAAPRHQVHALFLLHASCQAQGTVGSADDRDCEPCVEAKAGAATCGRWCLSCAVTTRAARMSRFPMSDTPSADPVCSSRLAPCPPLSTPLPAQGSHLASGSGPTSQVWCSLIIPLPEPLLPLPSTLFET

SEQ ID NO: 831307 - protein, 868 aa, Homo sapiens
PLDGSRTDCSVTASLGGFQVVVLTNTPLEDQLRVGEFCHNRGIKLVVADTRGLFGQLFCDFGEEMILTDSNGEQPLSAMVSMVTKDNPGVVTCLDEARHGFESGDFVSFSEVQGMVELNGNQPMEIKVLGPYTFSICDTSNFSDYIRGGIVSQVKVPKKISFKSLVASLAEPDFVVTDFAKFSRPAQLHIGFQALHQFCAQHGRPPRPRNEEDAAELVALAQAVNARALPAVQQNNLDEDLIRKLAYVAAGDLAPINAFIGGLAAQEVMKACSGKFMPIMQWLYFDALECLPEDKEVLTEDKCLQRQNRYDGQVAVFGSDLQEKLGKQKYFLVGAGAIGCELLKNFAMIGLGCGEGGEIIVTDMDTIEKSNLNRQFLFRPWDVTKLKSDTAAAAVRQMNPHIRVTSHQNRVGPDTERIYDDDFFQNLDGVANALDNVDARMYMDRRCVYYRKPLLESGTLGTKGNVQVVIPFLTESYSSSQDPPEKSIPICTLKNFPNAIEHTLQWARDEFEGLFKQPAENVNQYLTDPKFVERTLRLAGTQPLEVLEAVQRSLVLQRPQTWADCVTWACHHWHTQYSNNIRQLLHNFPPDQLTSSGAPFWSGPKRCPHPLTFDVNNPLHLDYVMAAANLFAQTYGLTGSQDRAAVATFLQSVQVPEFTPKSGVKIHVSDQELQSANASVDDSRLEELKATLPSPDKLPGFKMYPIDFEKDDDSNFHMDFIVAASNLRAENYDIPSADRHKSKLIAGKIIPAIATTTAAVVGLVCLELYKVVQGHRQLDSYKNGFLNLALPFFGFSEPLAAPRHQSDTPSADPVCSSRLAPCPPLSTPLPAQGSHLASGSGPTSQVWCSLIIPLPEPLLPLPSTLFET

SEQ ID NO: 831308 - protein, 953 aa, Homo sapiens
PLDGSRTDCSVTASLGGFQVVVLTNTPLEDQLRVGEFCHNRGIKLVVADTRGLFGQLFCDFGEEMILTDSNGEQPLSAMVSMVTKDNPGVVTCLDEARHGFESGDFVSFSEVQGMVELNGNQPMEIKVLGPYTFSICDTSNFSDYIRGGIVSQVKVPKKISFKSLVASLAEPDFVVTDFAKFSRPAQLHIGFQALHQFCAQHGRPPRPRNEEDAAELVALAQAVNARALPAVQQNNLDEDLIRKLAYVAAGDLAPINAFIGGLAAQEVMKACSGKFMPIMQWLYFDALECLPEDKEVLTEDKCLQRQNRYDGQVAVFGSDLQEKLGKQKYFLVGAGAIGCELLKNFAMIGLGCGEGGEIIVTDMDTIEKSNLNRQFLFRPWDVTKLKSDTAAAAVRQMNPHIRVTSHQNRVGPDTERIYDDDFFQNLDGVANALDNVDARMYMDRRCVYYRKPLLESGTLGTKGNVQVVIPFLTESYSSSQDPPEKSIPICTLKNFPNAIEHTLQWARDEFEGLFKQPAENVNQYLTDPKFVERTLRLAGTQPLEVLEAVQRSLVLQRPQTWADCVTWACHHWHTQYSNNIRQLLHNFPPDQLTSSGAPFWSGPKRCPHPLTFDVNNPLHLDYVMAAANLFAQTYGLTGSQDRAAVATFLQSVQVPEFTPKSGVKIHVSDQELQSANASVDDSRLEELKATLPSPDKLPGFKMYPIDFEKDDDSNFHMDFIVAASNLRAEIIPAIATTTAAVVGLVCLELYKVVQGHRQLDSYKNGFLNLALPFFGFSEPLAAPRHQYYNQEWTLWDRFEVQGLQPNGEEMTLKQFLDYFKTEHKLEITMLSPGRVHALFLLHASCQAQGTVGSAMTEIVSRVSKRKLGRHVRALVLELCCNDESGEDVEVPYVRYTIPLTPSAPLGWPLVNPSPHPFQPAAKLKERLYQPMTEIVSRVSKRKLGPPRAGAGA

SEQ ID NO: 831309 - protein, 557 aa, Homo sapiens
PLDGSRTDCSVTASLGGFQVVVLTNTPLEDQLRVGEFCHNRGIKLVVADTRGLFGQLFCDFGEEMILTDSNGEQPLSAMVSMVTKDNPGVVTCLDEARHGFESGDFVSFSEVQGMVELNGNQPMEIKVLGPYTFSICDTSNFSDYIRGGIVSQVKVPKKISFKSLVASLAEPDFVVTDFAKFSRPAQLHIGFQALHQFCAQHGRPPRPRNEEDAAELVALAQAVNARALPAVQQNNLDEDLIRKLAYVAAGDLAPINAFIGGLAAQEVMKACSGKFMPIMQWLYFDALECLPEDKEVLTEDKCLQRQNRYDGQVAVFGSDLQEKLGKQKYFLVGAGAIGCELLKNFAMIGLGCGEGGEIIVTDMDTIEKSNLNRQFLFRPWDVTKLKSDTAAAAVRQMNPHIRVTSHQNRVGPDTERIYDDDFFQNLDGVANALDNVDARMYMDRRCVYYRKPLLESGTLGTKGNVQVVIPFLTESYSSSQDPPEKSIPICTLKNFPNAIEHTLQVISCGRRERGQASGQAAASPPPGPCLAFRCCMPKCKMCLFSKPPSLTSHQAA

SEQ ID NO: 831310 - protein, 484 aa, Homo sapiens
MTDPALTVSVTASLGGFQVVVLTNTPLEDQLRVGEFCHNRGIKLVVADTRGLFGQLFCDFGEEMILTDSNGEQPLSAMVSMVTKDNPGVVTCLDEARHGFESGDFVSFSEVQGMVELNGNQPMEIKVLGPYTFSICDTSNFSDYIRGGIVSQVKVPKKISFKSLVASLAEPDFVVTDFAKFSRPAQLHIGFQALHQFCAQHGRPPRPRNEEDAAELVALAQAVNARALPAVQQNNLDEDLIRKLAYVAAGDLAPINAFIGGLAAQEVMKACSGKFMPIMQWLYFDALECLPEDKEVLTEDKCLQRQNRYDGQVAVFGSDLQEKLGKQKYFLVGAGAIGCELLKNFAMIGLGCGEGGEIIVTDMDTIEKSNLNRQFLFRPWDVTKLKSDTAAAAVRQMNPHIRVTSHQNRVGPDTERIYDDDFFQNLDGVANALDNVDARMYMDRRCVYYRKPLLESGTLGTKGNVQVVIPFLTESYSSSQDPPI

SEQ ID NO: 831311 - protein, 103 aa, Homo sapiens
GKEVAAPHSRADVLTLPCPAFSQPLHLDYVMAAANLFAQTYGLTGSQDRAAVATFLQSVQVPEFTPKSGVKIHVSDQELQSANASVGEGVWPVGQESPHMSPA

SEQ ID NO: 831312 - protein, 223 aa, Homo sapiens
MDFIVAASNLRAENYDIPSADRHKSKLIAGKIIPAIATTTAAVVGLVQYGKAKDSELTFPGGGGAISCLMEHHGKCGTQGLKDSIPKRWEQENATEFESCLAQGFLPAGRALSGPSGSPCLSGANCHWTHPSFIITSLGQQQQPGTSKELDNRGTRFGPSSEDRILRYSNSELVQGERRHPQRPQNQEVDASLLLHAVWEQREGLRHKSSNPHLPWRDPQITR

SEQ ID NO: 831313 - protein, 975 aa, Homo sapiens; identical to SEQ ID NO: 831296

SEQ ID NO: 831314 - protein, 818 aa, Homo sapiens
MKISFKSLVASLAEPDFVVTDFAKFSRPAQLHIGFQALHQFCAQHGRPPRPRNEEDAAELVALAQAVNARALPAVQQNNLDEDLIRKLAYVAAGDLAPINAFIGGLAAQEVMKACSGKFMPIMQWLYFDALECLPEDKEVLTEDKCLQRQNRYDGQVAVFGSDLQEKLGKQKYFLVGAGAIGCELLKNFAMIGLGCGEGGEIIVTDMDTIEKSNLNRQFLFRPWDVTKLKSDTAAAAVRQMNPHIRVTSHQNRVGPDTERIYDDDFFQNLDGVANALDNVDARMYMDRRCVYYRKPLLESGTLGTKGNVQVVIPFLTESYSSSQDPPEKSIPICTLKNFPNAIEHTLQWARDEFEGLFKQPAENVNQYLTDPKFVERTLRLAGTQPLEVLEAVQRSLVLQRPQTWADCVTWACHHWHTQYSNNIRQLLHNFPPDQLTSSGAPFWSGPKRCPHPLTFDVNNPLHLDYVMAAANLFAQTYGLTGSQDRAAVATFLQSVQVPEFTPKSGVKIHVSDQELQSANASVDDSRLEELKATLPSPDKLPGFKMYPIDFEKDDDSNFHMDFIVAASNLRAENYDIPSADRHKSKLIAGKIIPAIATTTAAVVGLVCLELYKVVQGHRQLDSYKNGFLNLALPFFGFSEPLAAPRHQYYNQEWTLWDRFEVQGLQPNGEEMTLKQFLDYFKTEHKLEITMLSPGRVHALFLLHASCQAQGTVGSADDRDCEPCVEAKAGAATCGRWCLSCAVTTRAARMSRFPMSDTPSADPVCSSRLAPCPPLSTPLPAQGSHLASGSGPTSQVWCSLIIPLPEPLLPLPSTLFET

SEQ ID NO: 831315 - protein, 789 aa, Homo sapiens
LGRGRAVNRQRFCAQHGRPPRPRNEEDAAELVALAQAVNARALPAVQQNNLDEDLIRKLAYVAAGDLAPINAFIGGLAAQEVMKACSGKFMPIMQWLYFDALECLPEDKEVLTEDKCLQRQNRYDGQVAVFGSDLQEKLGKQKYFLVGAGAIGCELLKNFAMIGLGCGEGGEIIVTDMDTIEKSNLNRQFLFRPWDVTKLKSDTAAAAVRQMNPHIRVTSHQNRVGPDTERIYDDDFFQNLDGVANALDNVDARMYMDRRCVYYRKPLLESGTLGTKGNVQVVIPFLTESYSSSQDPPEKSIPICTLKNFPNAIEHTLQWARDEFEGLFKQPAENVNQYLTDPKFVERTLRLAGTQPLEVLEAVQRSLVLQRPQTWADCVTWACHHWHTQYSNNIRQLLHNFPPDQLTSSGAPFWSGPKRCPHPLTFDVNNPLHLDYVMAAANLFAQTYGLTGSQDRAAVATFLQSVQVPEFTPKSGVKIHVSDQELQSANASVDDSRLEELKATLPSPDKLPGFKMYPIDFEKDDDSNFHMDFIVAASNLRAENYDIPSADRHKSKLIAGKIIPAIATTTAAVVGLVCLELYKVVQGHRQLDSYKNGFLNLALPFFGFSEPLAAPRHQYYNQEWTLWDRFEVQGLQPNGEEMTLKQFLDYFKTEHKLEITMLSPGRVHALFLLHASCQAQGTVGSADDRDCEPCVEAKAGAATCGRWCLSCAVTTRAARMSRFPMSDTPSADPVCSSRLAPCPPLSTPLPAQGSHLASGSGPTSQVWCSLIIPLPEPLLPLPSTLFET

SEQ ID NO: 831316 - protein, 615 aa, Homo sapiens
PLDGSRTDCSVTASLGGFQVVVLTNTPLEDQLRVGEFCHNRGIKLVVADTRGLFGQLFCDFGEEMILTDSNGEQPLSAMVSMVTKDNPGVVTCLDEARHGFESGDFVSFSEVQGMVELNGNQPMEIKVLGPYTFSICDTSNFSDYIRGGIVSQVKVPKKISFKSLVASLAEPDFVVTDFAKFSRPAQLHIGFQALHQFCAQHGRPPRPRNEEDAAELVALAQAVNARALPAVQQNNLDEDLIRKLAYVAAGDLAPINAFIGGLAAQEVMKACSGKFMPIMQWLYFDALECLPEDKEVLTEDKCLQRQNRYDGQVAVFGSDLQEKLGKQKYFLVGAGAIGCELLKNFAMIGLGCGEGGEIIVTDMDTIEKSNLNRQFLFRPWDVTKLKSDTAAAAVRQMNPHIRVTSHQNRVGPDTERIYDDDFFQNLDGVANALDNVDARMYMDRRCVYYRKPLLESGTLGTKGNVQVVIPFLTESYSSSQDPPEKSIPICTLKNFPNAIEHTLQWARDEFEGLFKQPAENVNQYLTDPKFVERTLRLAGTQPLEVLEAVQRSLVLQRPQTWATGTPSTRTTSGSCCTTSLLTSSQAQERRSGLGPNAVHTRSPLMSTIPCIWTM

SEQ ID NO: 831317 - protein, 416 aa, Homo sapiens
MTGNDCVTWACHHWHTQYSNNIRQLLHNFPPDQLTSSGAPFWSGPKRCPHPLTFDVNNPLHLDYVMAAANLFAQTYGLTGSQDRAAVATFLQSVQVPEFTPKSGVKIHVSDQELQSANASVDDSRLEELKATLPSPDKLPGFKMYPIDFEKDDDSNFHMDFIVAASNLRAENYDIPSADRHKSKLIAGKIIPAIATTTAAVVGLVCLELYKVVQGHRQLDSYKNGFLNLALPFFGFSEPLAAPRHQYYNQEWTLWDRFEVQGLQPNGEEMTLKQFLDYFKTEHKLEITMLSPGRVHALFLLHASCQAQGTVGSADDRDCEPCVEAKAGAATCGRWCLSCAVTTRAARMSRFPMSDTPSADPVCSSRLAPCPPLSTPLPAQGSHLASGSGPTSQVWCSLIIPLPEPLLPLPSTLFET

SEQ ID NO: 831318 - protein, 351 aa, Homo sapiens
TIIFIGVNLTFFPPGSQDRAAVATFLQSVQVPEFTPKSGVKIHVSDQELQSANASVDDSRLEELKATLPSPDKLPGFKMYPIDFEKDDDSNFHMDFIVAASNLRAENYDIPSADRHKSKLIAGKIIPAIATTTAAVVGLVCLELYKVVQGHRQLDSYKNGFLNLALPFFGFSEPLAAPRHQYYNQEWTLWDRFEVQGLQPNGEEMTLKQFLDYFKTEHKLEITMLSPGRVHALFLLHASCQAQGTVGSADDRDCEPCVEAKAGAATCGRWCLSCAVTTRAARMSRFPMSDTPSADPVCSSRLAPCPPLSTPLPAQGSHLASGSGPTSQVWCSLIIPLPEPLLPLPSTLFET

SEQ ID NO: 831319 - protein, 944 aa, Homo sapiens
PLDGSRTDCSVTASLGGFQVVVLTNTPLEDQLRVGEFCHNRGIKLVVADTRGLFGQLFCDFGEEMILTDSNGEQPLSAMVSMVTKDNPGVVTCLDEARHGFESGDFVSFSEVQGMVELNGNQPMEIKVLGPYTFSICDTSNFSDYIRGGIVSQVKVPKKISFKSLVASLAEPDFVVTDFAKFSRPAQLHIGFQALHQFCAQHGRPPRPRNEEDAAELVALAQAVNARALPAVQQNNLDEDLIRKLAYVAAGDLAPINAFIGGLAAQEVMKACSGKFMPIMQWLYFDALECLPEDKEVLTEDKCLQRQNRYDGQVAVFGSDLQEKLGKQKYFLVGAGAIGCELLKNFAMIGLGCGEGGEIIVTDMDTIEKSNLNRQFLFRPWDVTKLKSDTAAAAVRQMNPHIRVTSHQNRVGPDTERIYDDDFFQNLDGVANALDNVDARMYMDRRCVYYRKPLLESGTLGTKGNVQVVIPFLTESYSSSQDPPEKSIPICTLKNFPNAIEHTLQWARDEFEGLFKQPAENVNQYLTDPKFVERTLRLAGTQPLEVLEAVQRSLVLQRPQTWADCVTWACHHWHTQYSNNIRQLLHNFPPDQLTSSGAPFWSGPKRCPHPLTFDVNNPLHLDYVMAAANLFAQTYGLTGSQDRAAVATFLQSVQVPEFTPKSGVKIHVSDQELQSANASVDDSRLEELKATLPSPDKLPGFKMYPIDFEKDDDSNFHMDFIVAASNLRAENYDIPSADRHKSKLIAGKIIPAIATTTAAVVGLVCLELYKVVQGHRQLDSYKNGFLNLALPFFGFSEPLAAPRHQYYNQEWTLWDRFEVQGLQPNGEEMTLKQFLDYFKTEHKLEITMLSPGRVHALFLLHASCQAQGTVGSADDRDCEPCVEAKAGAATCGRWCLSCAVTTRAARMSRFPMSDTPSADRLSGPSCCGHIPAVCAGPRIHPQVW

SEQ ID NO: 831320 - protein, 273 aa, Homo sapiens
MYPTDFEKDDDSNFHMDFIVAASNLRAENYDIPSADRHKSKLIAGKIIPAIATTTAAVVGLVCLELYKVVQGHRQLDSYKNGFLNLALPFFGFSEPLAAPRHQYYNQEWTLWDRFEVQGLQPNGEEMTLKQFLDYFKTEHKLEITMLSPGRVHALFLLHASCQAQGTVGSADDRDCEPCVEAKAGAATCGRWCLSCAVTTRAARMSRFPMSDTPSADPVCSSRLAPCPPLSTPLPAQGSHLASGSGPTSQVWCSLIIPLPEPLLPLPSTLFET

SEQ ID NO: 831321 - protein, 910 aa, Homo sapiens
MTDPALTVSVTASLGGFQVVVLTNTPLEDQLRVGEFCHNRGIKLVVADTRGLFGQLFCDFGEEMILTDSNGEQPLSAMVSMVTKDNPGVVTCLDEARHGFESGDFVSFSEVQGMVELNGNQPMEIKVLGPYTFSICDTSNFSDYIRGGIVSQVKVPKKISFKSLVASLAEPDFVVTDFAKFSRPAQLHIGFQALHQFCAQHGRPPRPRNEEDAAELVALAQAVNARALPAVQQNNLDEDLIRKLAYVAAGDLAPINAFIGGLAAQEVMKACSGKFMPIMQWLYFDALECLPEDKEVLTEDKCLQRQNRYDGQVAVFGSDLQEKLGKQKYFLVGAGAIGCELLKNFAMIGLGCGEGGEIIVTDMDTIEKSNLNRQFLFRPWDVTKLKSDTAAAAVRQMNPHIRVTSHQNRVGPDTERIYDDDFFQNLDGVANALDNVDARMYMDRRCVYYRKPLLESGTLGTKGNVQVVIPFLTESYSSSQDPPEKSIPICTLKNFPNAIEHTLQWARDEFEGLFKQPAENVNQYLTDPKFVERTLRLAGTQPLEVLEAVQRSLVLQRPQTWADCVTWACHHWHTQYSNNIRQLLHNFPPDQLTSSGAPFWSGPKRCPHPLTFDVNNPLHLDYVMAAANLFAQTYGLTGSQDRAAVATFLQSVQVPEFTPKSGVKIHVSDQELQSANASVDDSRLEELKATLPSPDKLPGFKMYPIDFEKDDDSNFHMDFIVAASNLRAENYDIPSADRHKSKLIAGKIIPAIATTTAAVVGLVCLELYKVVQGHRQLDSYKNGFLNLALPFFGFSEPLAAPRHQYYNQEWTLWDRFEVQGLQPNGEEMTLKQFLDYFKAARMSRFPMSDTPSADPVCSSRLAPCPPLSTPLPAQGSHLASGSGPTSQVWCSLIIPLPEPLLPLPSTLFET

SEQ ID NO: 831322 - protein, 963 aa, Homo sapiens
PLDGSRTDCSVTASLGGFQVVVLTNTPLEDQLRVGEFCHNRGIKLVVADTRGLFGQLFCDFGEEMILTDSNGEQPLSAMVSMVTKDNPGVVTCLDEARHGFESGDFVSFSEVQGMVELNGNQPMEIKVLGPYTFSICDTSNFSDYIRGGIVSQVKVPKKISFKSLVASLAEPDFVVTDFAKFSRPAQLHIGFQALHQFCAQHGRPPRPRNEEDAAELVALAQAVNARALPAVQQNNLDEDLIRKLAYVAAGDLAPINAFIGGLAAQEVMKACSGKFMPIMQWLYFDALECLPEDKEVLTEDKCLQRQNRYDGQVAVFGSDLQEKLGKQKYFLVGAGAIGCELLKNFAMIGLGCGEGGEIIVTDMDTIEKSNLNRQFLFRPWDVTKLKSDTAAAAVRQMNPHIRVTSHQNRVGPDTERIYDDDFFQNLDGVANALDNVDARMYMDRRCVYYRKPLLESGTLGTKGNVQVVIPFLTESYSSSQDPPEKSIPICTLKNFPNAIEHTLQWARDEFEGLFKQPAENVNQYLTDPKFVERTLRLAGTQPLEVLEAVQRSLVLQRPQTWADCVTWACHHWHTQYSNNIRQLLHNFPPDQLTSSGAPFWSGPKRCPHPLTFDVNNPLHLDYVMAAANLFAQTYGLTGSQDRAAVATFLQSVQVPEFTPKSGVKIHVSDQELQSANASVDDSRLEELKATLPSPDKLPGFKMYPIDFEKDDDSNFHMDFIVAASNLRAENYDIPSADRHKSKLIAGKIIPAIATTTAAVVGLVCLELYKVVQGHRQLDSYKNGFLNLALPFFGFSEPLAAPRHQYYNQEWTLWDRFEVQGLQPNGEEMTLKQFLDYFKIEHGHAHGHAGRKGRSPEHLDACQSLCRSMSKSHKEHGVDTSQQDTEDGGRGAVSSQHSEEPFNVAERRWEGEARSCAIGNKTRRVDGTVLTSWHPDGPSTNLIPERPRPGTHGRMGRHEPAMR

SEQ ID NO: 831323 - protein, 868 aa, Homo sapiens; identical to SEQ ID NO: 831307

SEQ ID NO: 831324 - protein, 616 aa, Homo sapiens
PLDGSRTDCSVTASLGGFQVVVLTNTPLEDQLRVGEFCHNRGIKLVVADTRGLFGQLFCDFGEEMILTDSNGEQPLSAMVSMVTKDNPGVVTCLDEARHGFESGDFVSFSEVQGMVELNGNQPMEIKVLGPYTFSICDTSNFSDYIRGGIVSQVKVPKKISFKSLVASLAEPDFVVTDFAKFSRPAQLHIGFQALHQFCAQHGRPPRPRNEEDAAELVALAQAVNARALPAVQQNNLDEDLIRKLAYVAAGDLAPINAFIGGLAAQEVMKACSGKFMPIMQWLYFDALECLPEDKEVLTEDKCLQRQNRYDGQVAVFGSDLQEKLGKQKYFLVGAGAIGCELLKNFAMIGLGCGEGGEIIVTDMDTIEKSNLNRQFLFRPWDVTKLKSDTAAAAVRQMNPHIRVTSHQNRVGPDTERIYDDDFFQNLDGVANALDNVDARMYMDRRCVYYRKPLLESGTLGTKGNVQVVIPFLTESYSSSQDPPEKSIPICTLKNFPNAIEHTLQWARDEFEGLFKQPAENVNQYLTDPKFVERTLRLAGTQPLEVLEAVQRSLVLQRPQTWADCVTWACHHWHTQYSNNIRQLLHNFPPDQLTSSEASSFLGPIFFLQESAVTIV

SEQ ID NO: 831325 - protein, 485 aa, Homo sapiens
MTDPALTVSVTASLGGFQVVVLTNTPLEDQLRVGEFCHNRGIKLVVADTRGLFGQLFCDFGEEMILTDSNGEQPLSAMVSMVTKDNPGVVTCLDEARHGFESGDFVSFSEVQGMVELNGNQPMEIKVLGPYTFSICDTSNFSDYIRGGIVSQVKVPKKISFKSLVASLAEPDFVVTDFAKFSRPAQLHIGFQALHQFCAQHGRPPRPRNEEDAAELVALAQAVNARALPAVQQNNLDEDLIRKLAYVAAGDLAPINAFIGGLAAQEVMKACSGKFMPIMQWLYFDALECLPEDKEVLTEDKCLQRQNRYDGQVAVFGSDLQEKLGKQKYFLVGAGAIGCELLKNFAMIGLGCGEGGEIIVTDMDTIEKSNLNRQFLFRPWDVTKLKSDTAAAAVRQMNPHIRVTSHQNRVGPDTERIYDDDFFQNLDGVANALDNVDARMYMDRRCVYYRKPLLESGTLGTKGNVQVVIPFLTESYSSSSVIRIR

SEQ ID NO: 831326 - protein, 378 aa, Homo sapiens
PLDGSRTDCSVTASLGGFQVVVLTNTPLEDQLRVGEFCHNRGIKLVVADTRGLFGQLFCDFGEEMILTDSNGEQPLSAMVSMVTKDNPGVVTCLDEARHGFESGDFVSFSEVQGMVELNGNQPMEIKVLGPYTFSICDTSNFSDYIRGGIVSQVKVPKKISFKSLVASLAEPDFVVTDFAKFSRPAQLHIGFQALHQFCAQHGRPPRPRNEEDAAELVALAQAVNARALPAVQQNNLDEDLIRKLAYVAAGDLAPINAFIGGLAAQEVMKACSGKFMPIMQWLYFDALECLPEDKEVLTEDKCLQRQNRYDGQVAVFGSDLQEKLGKQKYFLVGAGAIGCELLKNFAKLKERLDQPMTEIVSRVSKRKLGPPRAGAGA

SEQ ID NO: 831327 - protein, 78 aa, Homo sapiens
PAAQQGREPGPRRPSVPRPRKARRRQSEDPPGLKEKDEVIFGREGQASHPGTPGVQVLFEGIPPCKKHVFMVSSQQGQ

SEQ ID NO: 831328 - protein, 306 aa, Homo sapiens
PAPPPSNSRRLLCRFCRSLSDTFGSTSLILSFAGGRNQARAATMFRNQYDNDVTVWSPQGRIHQIEYAMEAVKQGSATVGLKSKTHAVLVALKRAQSELAAHQKKILHVDNHIGISIAGLTADARLLCNFMRQECLDSRFVFDRPLPVSRLVSLIGSKTQIPTQRYGRRPYGVGLLIAGYDDMGPHIFQTCPSANYFDCRAMSIGARSQSARTYLERHMSEFMECNLNELVKHGLRALRETLPAEQDLTTKNVSIGIVGKDLEFTIYDDDDVSPFLEGLEERPQRKAQPAQPADEPAEKADEPMEH

SEQ ID NO: 831329 - protein, 269 aa, Homo sapiens
MQLSKVKFRNQYDNDVTVWSPQGRIHQIEYAMEAVKQGSATVGLKSKTHAVLVALKRAQSELAAHQKKILHVDNHIGISIAGLTADARLLCNFMRQECLDSRFVFDRPLPVSRLVSLIGSKTQIPTQRYGRRPYGVGLLIAGYDDMGPHIFQTCPSANYFDCRAMSIGARSQSARTYLERHMSEFMECNLNELVKHGLRALRETLPAEQDLTTKNVSIGIVGKDLEFTIYDDDDVSPFLEGLEERPQRKAQPAQPADEPAEKADEPMEH

SEQ ID NO: 831330 - protein, 238 aa, Homo sapiens
MEAVKQGSATVGLKSKTHAVLVALKRAQSELAAHQKKILHVDNHIGISIAGLTADARLLCNFMRQECLDSRFVFDRPLPVSRLVSLIGSKTQIPTQRYGRRPYGVGLLIAGYDDMGPHIFQTCPSANYFDCRAMSIGARSQSARTYLERHMSEFMECNLNELVKHGLRALRETLPAEQDLTTKNVSIGIVGKDLEFTIYDDDDVSPFLEGLEERPQRKAQPAQPADEPAEKADEPMEH

SEQ ID NO: 831331 - protein, 238 aa, Homo sapiens; identical to SEQ ID NO: 831330

SEQ ID NO: 831332 - protein, 290 aa, Homo sapiens
MTARYEAWEVKSAEGFAGGRNQAAAATMFRNQYDNDVTVWSPQGRIHQIEYAMEAVKQGSATVGLKSKTHAVLVALKRAQSELAAHQKKILHVDNHIGISIAGLTADARLLCNFMRQECLDSRFVFDRPLPVSRLVSLIGSKTQIPTQRYGRRPYGVGLLIAGYDDMGPHIFQTCPSANYFDCRAMSIGARSQSARTYLERHMSEFMECNLNELVKHGLRALRETLPAEQDLTTKNVSIGIVGKDLEFTIYDDDDVSPFLEGLEERPQRKAQPAQPADEPAEKADEPMEH

SEQ ID NO: 831333 - protein, 178 aa, Homo sapiens
PRVADAWVDPRVRLCRSLSDTFGSTSLILSFAGGRNQARAATMFRNQYDNDVTVWSPQGRIHQIEYAMEAVKQGSATVGLKSKTHAVLVALKRAQSELAAHQKKILHVDNHIGISIAGLTADARLLCNFMRQECLDSRFVFDRPLPVSRLVSLIGSSILFMLAFMDMNFEGFDTCVNY

SEQ ID NO: 831334 - protein, 176 aa, Homo sapiens
MRQECLDSRFVFDRPLPVSRLVSLIGSKTQIPTQRYGRRPYGVGLLIAGYDDMGPHIFQTCPSANYFDCRAMSIGARSQSARTYLERHMSEFMECNLNELVKHGLRALRETLPAEQDLTTKNVSIGIVGKDLEFTIYDDDDVSPFLEGLEERPQRKAQPAQPADEPAEKADEPMEH

SEQ ID NO: 831335 - protein, 169 aa, Homo sapiens
PRVADAWVDPRVRLCRSLSDTFGSTSLILSFAGGRNQARAATMFRNQYDNDVTVWSPQGRIHQIEYAMEAVKQGSATVGLKSKTHAVLVALKRAQSELAAHQKKILHVDNHIGISIAGLTADARLLCNFMRQECLDSRFVFDRPLPVSRLVSLIGSRYGPSHFPNLSIC

SEQ ID NO: 831336 - protein, 105 aa, Homo sapiens
MSIGARSQSARTYLERHMSEFMECNLNELVKHGLRALRETLPAEQDLTTKNVSIGIVGKDLEFTIYDDDDVSPFLEGLEERPQRKAQPAQPADEPAEKADEPMEH

SEQ ID NO: 831337 - protein, 228 aa, Homo sapiens
PRVADAWVDPRVRLCRSLSDTFGSTSLILSFAGGRNQARAATMFRNQYDNDVTVWSPQGRIHQIEYAMEAVKQGSATVGLKSKTHAVLVALKRAQSELAAHQKKILHVDNHIGISIAGLTADARLLCNFMRQECLDSRFVFDRPLPVSRLVSLIGSKTQIPTQRYGRRPYGVGLLIAGYDDMGPHIFQTCPSANYFDCRAMSIGARSQSARTYLERHMSEFMECNLMN

SEQ ID NO: 831338 - protein, 305 aa, Homo sapiens
PRVADAWVDPRVRLCRSLSDTFGSTSLILSFAGGRNQARAATMFRNQYDNDVTVWSPQGRIHQIEYAMEAVKQGSATVGLKSKTHAVLVALKRAQSELAAHQKKILHVDNHIGISIAGLTADARLLCNFMRQECLDSRFVFDRPLPVSRLVSLIGSKTQIPTQRYGRRPYGVGLLIAGYDDMGPHIFQTCPSANYFDCRAMSIGARSQSARTYLERHMSEFMECNLNELVKHGLRALRETLPAEQDLTTKNVSIGIVGKDLEFTIYDDDDVSPFLEGLEERPQRKAQPAQPADEPAEKADEPMEH

SEQ ID NO: 831339 - protein, 306 aa, Homo sapiens; identical to SEQ ID NO: 831328

SEQ ID NO: 831340 - protein, 238 aa, Homo sapiens; identical to SEQ ID NO: 831330

SEQ ID NO: 831341 - protein, 178 aa, Homo sapiens; identical to SEQ ID NO: 831333

SEQ ID NO: 831342 - protein, 268 aa, Homo sapiens
PRVADAWVDPRVRLCRSLSDTFGSTSLILSFAGGRNQARAATMFRNQYDNDVTVWSPQGRIHQIEYAMEAVKQGSATVGLKSKTHAVLVALKRAQSELAAHQKKILHVDNHIGISIAGLTADARLLCNFMRQECLDSRFVFDRPLPVSRLVSLIGSKTQIPTQRYGRRPYGVGLLIAGYDDMGPHIFQTCPSANYFDCRAMSIGARSQSARTYLERHMSEFMECNLNELVKHGLRALRETLPAEQDLTTKPAQPADEPAEKADEPMEH

SEQ ID NO: 831343 - protein, 218 aa, Homo sapiens
PRVADAWVDPRVRLCRSLSDTFGSTSLILSFAGGRNQARAATMFRNQYDNDVTVWSPQGRIHQIEYAMEAVKQGSATVGLKSKTHAVLVALKRAQSELAAHQKKILHVDNHIGISIAGLTADARLLCNFMRQECLDSRFVFDRPLPVSRLVSLIGSKQDLTTKNVSIGIVGKDLEFTIYDDDDVSPFLEGLEERPQRKAQPAQPADEPAEKADEPMEH

SEQ ID NO: 831344 - protein, 154 aa, Homo sapiens
MIPRKRYGSKNTDQGVYLGLSKTQVLSPATAGSSSSDIAPLPPPVTLVPPPPDTMSCRDRTQEFLSACKSLQTRQNGIQTNKPALRAVRQRSEFTLMAKRIGKDLSNTFAKLEKLTILAKRKSLFDDKAVEIEELTYIIKQDINRPQQTYCSGL

SEQ ID NO: 831345 - protein, 151 aa, Homo sapiens
PPKCVSLWRSVTGPPGGAEGNRGNERAGLGPGAVTRAGPESQDHGVGSGPVSASGSPARALAARAKLEEESEAGSTWDRGKAGPFPLLVRPRICERPGRESPREVQKGLGDLLIGVGRGSLGKEVAWGMTLSPPQQSEVMRLNDPAETLRV

SEQ ID NO: 831346 - protein, 355 aa, Homo sapiens
MIPRKRYGSKNTDQGVYLGLSKTQVLSPATAGSSSSDIAPLPPPVTLVPPPPDTMSCRDRTQEFLSACKSLQTRQNGIQTNKPALRAVRQRSEFTLMAKRIGKDLSNTFAKLEKLTILAKRKSLFDDKAVEIEELTYIIKQDINSLNKQIAQLQDFVRAKGSQSGRHLQTHSNTIVVSLQSKLASMSNDFKSVLEVRTENLKQQRSRREQFSRAPVSALPLAPNHLGGGAVVLGAESHASKDVAIDMMDSRTSQQLQLIDEQDSYIQSRADTMQNIESTIVELGSIFQQLAHMVKEQEETIQRIDENVLGAQLDVEAAHSEILKYFQSVTSNRWLMVKIFLILIVFFIIFVVFLA

SEQ ID NO: 831347 - protein, 355 aa, Homo sapiens; identical to SEQ ID NO: 831346

SEQ ID NO: 831348 - protein, 355 aa, Homo sapiens; identical to SEQ ID NO: 831346

SEQ ID NO: 831349 - protein, 266 aa, Homo sapiens
MIPRKRYGSKNTDQGVYLGLSKTQVLSPATAGSSSSDIAPLPPPVTLVPPPPDTMSCRDRTQEFLSACKSLQTRQNGIQTNKPALRAVRQRSEFTLMAKRIGKDLSNTFAKLEKLTILAKRKSLFDDKAVEIEELTYIIKQDINSLNKQIAQLQDFVRAKGSQSGRHLQTHSNTIVVSLQSKLASMSNDFKSVLEVRTENLKQQRSRREQFSRAPVSALPLAPNHLGGGAVVLGAESHASKDVAIDMMDSRTSQQLQLIDEQVPRL

SEQ ID NO: 831350 - protein, 381 aa, Homo sapiens
MIPRKRYGSKNTDQGVYLGLSKTQVLSPATAGSSSSDIAPLPPPVTLVPPPPDTMSCRDRTQEFLSACKSLQTRQNGIQTNKPALRAVRQRSEFTLMAKRIGKDLSNTFAKLEKLTILAKRKSLFDDKAVEIEELTYIIKQDINSLNKQIAQLQDFVRAKGSQSGRHLQTHSNTIVVSLQSKLASMSNDFKSVLEVRTENLKQQRSRREQFSRAPVSALPLAPNHLGGGAVVLGAESHASKDVAIDMMDSRTSQQLQLIDEQDSYIQSRADTMQNIESTIVELGSIFQQLAHMVKEQEETIQRIDENVLGAQLDVEAAHSEILKYFQSVTSNRWLMVKILNPLYSEALCWGLGPSWEGKWPVLPLSLCRVLGRKALFPWNC

SEQ ID NO: 831351 - protein, 132 aa, Homo sapiens
RVGDVAASSLWSGFGGSKDVAIDMMDSRTSQQLQLIDEQDSYIQSRADTMQNIESTIVELGSIFQQLAHMVKEQEETIQRIDENVLGAQLDVEAAHSEILKYFQSVTSNRWLMVKIFLILIVFFIIFVVFLA

SEQ ID NO: 831352 - protein, 111 aa, Homo sapiens
IAVLEDHLDVLSQQYERVDSYIQSRADTMQNIESTIVELGSIFQQLAHMVKEQEETIQRIDENVLGAQLDVEAAHSEILKYFQSVTSNRWLMVKIFLILIVFFIIFVVFLA

SEQ ID NO: 831353 - protein, 355 aa, Homo sapiens; identical to SEQ ID NO: 831346

SEQ ID NO: 831354 - protein, 303 aa, Homo sapiens [sequence omitted]

SEQ ID NO: 831355 - protein, 266 aa, Homo sapiens; identical to SEQ ID NO: 831349

SEQ ID NO: 831356 - protein, 355 aa, Homo sapiens; identical to SEQ ID NO: 831346

SEQ ID NO: 831357 - protein, 355 aa, Homo sapiens; identical to SEQ ID NO: 831346

SEQ ID NO: 831358 - protein, 355 aa, Homo sapiens; identical to SEQ ID NO: 831346

SEQ ID NO: 831359 - protein, 355 aa, Homo sapiens; identical to SEQ ID NO: 831346

SEQ ID NO: 831360 - protein, 301 aa, Homo sapiens
MSCRDRTQEFLSACKSLQTRQNGIQTNKPALRAVRQRSEFTLMAKRIGKDLSNTFAKLEKLTILAKRKSLFDDKAVEIEELTYIIKQDINSLNKQIAQLQDFVRAKGSQSGRHLQTHSNTIVVSLQSKLASMSNDFKSVLEVRTENLKQQRSRREQFSRAPVSALPLAPNHLGGGAVVLGAESHASKDVAIDMMDSRTSQQLQLIDEQDSYIQSRADTMQNIESTIVELGSIFQQLAHMVKEQEETIQRIDENVLGAQLDVEAAHSEILKYFQSVTSNRWLMVKIFLILIVFFIIFVVFLA

SEQ ID NO: 831361 - protein, 259 aa, Homo sapiens
MAKRIGKDLSNTFAKLEKLTILAKRKSLFDDKAVEIEELTYIIKQDINSLNKQIAQLQDFVRAKGSQSGRHLQTHSNTIVVSLQSKLASMSNDFKSVLEVRTENLKQQRSRREQFSRAPVSALPLAPNHLGGGAVVLGAESHASKDVAIDMMDSRTSQQLQLIDEQDSYIQSRADTMQNIESTIVELGSIFQQLAHMVKEQEETIQRIDENVLGAQLDVEAAHSEILKYFQSVTSNRWLMVKIFLILIVFFIIFVVFLA

SEQ ID NO: 831362 - protein, 259 aa, Homo sapiens; identical to SEQ ID NO: 831361

SEQ ID NO: 831363 - protein, 321 aa, Homo sapiens
MIPRKRYGSKNTDQGVYLGLSKTQVLSPATAGSSSSDIAPLPPPVTLVPPPPDTMSCRDRTQEFLSACKSLQTRQNGIQTNKPALRAVRQRSEFTLMAKRIGKDLSNTFAKLEKLTILAKRKSLFDDKAVEIEELTYIIKQDINSLNKQIAQLQDFVRAKGSQSGRHLQTHSNTIVVSLQSKLASMSNDFKSVLEVRTENLKQQRSRREQFSRAPVSALPLAPNHLGGGAVVLGAESHASKDVAIDMMDSRTSQQLQLIDEQDSYIQSRADTMQNIESTIVELGSIFQQLAHMVKEQEETIQSVLLFPLLPALSPGSTRTC

SEQ ID NO: 831364 - protein, 155 aa, Homo sapiens
GIQTQSMWALNLLLTVKVCHILFSPPGGGAVVLGAESHASKDVAIDMMDSRTSQQLQLIDEQDSYIQSRADTMQNIESTIVELGSIFQQLAHMVKEQEETIQRIDENVLGAQLDVEAAHSEILKYFQSVTSNRWLMVKIFLILIVFFIIFVVFLA

SEQ ID NO: 831365 - protein, 355 aa, Homo sapiens; identical to SEQ ID NO: 831346

SEQ ID NO: 831366 - protein, 355 aa, Homo sapiens; identical to SEQ ID NO: 831346

SEQ ID NO: 831367 - protein, 205 aa, Homo sapiens
MDSRPNKPGFCVPVRNKRTPHNSPSWPNAASGNDLSKQHFRNAGRQRGQPSAQGASSLLTTDHKHADTFDEPHQSMHRNAGSITSPHARTKRDQAPRDTDEQPTAAAQQRPRPCRTHSNTKGEHCTHANGHHTLTDLQQVRTQPNTCTQQNGEARHPLNGTDKHWTLTTERPATGKQDTGAHTKTGTKNKEATQGPQSRETPTHS

SEQ ID NO: 831368 - protein, 481 aa, Homo sapiens
KEDINDKVGSALRQGFPSKMKPNIIFVLSLLLILEKQAAVMGQKGGSKGRLPSEFSQFPHGQKGQHYSGQKGKQQTESKGSFSIQYTYHVDANDHDQSRKSQQYDLNALHKTTKSQRHLGGSQQLLHNKQEGRDHDKSKGHFHRVVIHHKGGKAHRGTQNPSQDQGNSPSGKGISSQYSNTEERLWVHGLSKEQTSVSGAQKGRKQGGSQSSYVLQTEELVANKQQRETKNSHQNKGHYQNVVEVREEHSSKVQTSLCPAHQDKLQHGSKDIFSTQDELLVYNKNQHQTKNLNQDQQHGRKANKISYQSSSTEERRLHYGENGVQKDVSQSSIYSQTEEKAQGKSQKQITIPSQEQEHSQKANKISYQSSSTEERRLHYGENGVQKDVSQRSIYSQTEKLVAGKSQIQAPNPKQEPWHGENAKGESGQSTNREQDLLSHEQKGRHQHGSHGGLDIVIIEQEDDSDRHLAQHLNNDRNPLFT

SEQ ID NO: 831369 - protein, 142 aa, Homo sapiens
GRLLLLLNSRPRRQPNIIFVLSLLLILEKQAAVMGQKGGSKGRLPSEFSQFPHGQKGQHYSGQKGKQQTESKGSFSIQYTYHVDANDHDQSRKSQQYDLNALHKTTKSQRHLGGSQQLLHNKQEGRDQKKSRRGREFSSSSR

SEQ ID NO: 831370 - protein, 444 aa, Homo sapiens
KEDINDKVGSALRQGFPSKMKPNIIFVLSLLLILEKQAAVMGQKGGSKGRLPSEFSQFPHGQKGQHYSGQKGKQQTESKGSFSIQYTYHVDANDHDQSRKSQQYDLNALHKTTKSQRHLGGSQQLLHNKQEGRDHDKSKGHFHRVVIHHKGGKAHRGTQNPSQDQGNSPSGKGISSQYSNTEERLWVHGLSKEQTSVSGAQKGRKQGGSQSSYVLQTEELVANKQQRETKNSHQNKGHYQNVVEVREEHSSKVQTSLCPAHQDKLQHGSKDIFSTQDELLVYNKNQHQKDVSQSSIYSQTEEKAQGKSQKQITIPSQEQEHSQKANKISYQSSSTEERRLHYGENGVQKDVSQRSIYSQTEKLVAGKSQIQAPNPKQEPWHGENAKGESGQSTNREQDLLSHEQKGRHQHGSHGGLDIVIIEQEDDSDRHLAQHLNNDRNPLFT

SEQ ID NO: 831371 - protein, 481 aa, Homo sapiens; identical to SEQ ID NO: 831368

SEQ ID NO: 831372 - protein, 481 aa, Homo sapiens; identical to SEQ ID NO: 831368

SEQ ID NO: 831373 - protein, 481 aa, Homo sapiens; identical to SEQ ID NO: 831368

SEQ ID NO: 831374 - protein, 204 aa, Homo sapiens
KEDINDKVGSALRQGFPSKMKPNIIFVLSLLLILEKQAAVMGQKGGSKGRLPSEFSQFPHGQKGQHYSGQKGKQQTESKGSFSIQYTYHVDANDHDQSRKSQQYDLNALHKTTKSQRHLGGSQQLLHNKQEGRDHDKSKGHFHRVVIHHKGGKAHRGTQNPSQDQGNSPSGKGISSQYSNTEERLWVHGSNMDPKTFFLPKMSS

SEQ ID NO: 831375 - protein, 301 aa, Homo sapiens
KEDINDKVGSALRQGFPSKMKPNIIFVLSLLLILEKQAAVMGQKGGSKGRLPSEFSQFPHGQKGQHYSGQKGKQQTESKGSFSIQYTYHVDANDHDQSRKSQQYDLNALHKTTKSQRHLGGSQQLLHNKQEGRDHDKSKGHFHRVVIHHKGGKAHRGTQNPSQDQGNSPSGKGISSQYSNTEERLWVHGLSKEQTSVSGAQKGRKQGGSQSSYVLQTEELVANKQQRETKNSHQNKGHYQNVVEVREEHSSKVQTSLCPAHQDKLQHGSKDIFSTQDELLVYNKNQHQTKNLNQDQQHGRK

SEQ ID NO: 831376 - protein, 252 aa, Homo sapiens
KEDINDKVGSALRQGFPSKMKPNIIFVLSLLLILEKQAAVMGQKGGSKGRLPSEFSQFPHGQKGQHYSGQKGKQQTESKGSFSIQYTYHVDANDHDQSRKSQQYDLNALHKTTKSQRHLGGSQQLLHNKQEGRDHDKSKGHFHRVVIHHKGGKAHRGTQNPSQDQGNSPSGKGISSQYSNTEERLWVHGLSKEQTSVSGAQKGRKQGGSQSSYVLQTEELVANKQQRETKNSHQNKGHYQNVVEVREEHSSK

SEQ ID NO: 831377 - protein, 120 aa, Homo sapiens
GRLLLLLNSRPRRHIFSTQDELLVYNKNQHQTKNLNQDQQHGRKANKISYQSSSTEERRLHYGENGVQKDVSQSSIYSQTEEKAQGKSQKQITIPSQEQEHSQKAKKKSRRGREFSSSSR

SEQ ID NO: 831378 - protein, 421 aa, Homo sapiens
KEDINDKVGSALRQGFPSKMKPNIIFVLSLLLILEKQAAVMGQKGGSKGRLPSEFSQFPHGQKGQHYSGQKGKQQTESKGSFSIQYTYHVDANDHDQSRKSQQYDLNALHKTTKSQRHLGGSQQLLHNKQEGRDHDKSKGHFHRVVIHHKGGKAHRGTQNPSQDQGNSPSGKGISSQYSNTEERLWVHGLSKEQTSVSGAQKGRKQGGSQSSYVLQTEELVANKQQRETKNSHQNKGHYQNVVEVREEHSSKVQTSLCPAHQDKLQHGSKDIFSTQDELLVYNKNQHQTKNLNQDQQHGRKANKISYQSSSTEERRLHYGENGVQKDVSQRSIYSQTEKLVAGKSQIQAPNPKQEPWHGENAKGESGQSTNREQDLLSHEQKGRHQHGSHGGLDIVIIEQEDDSDRHLAQHLNNDRNPLFT

SEQ ID NO: 831379 - protein, 481 aa, Homo sapiens; identical to SEQ ID NO: 831368

SEQ ID NO: 831380 - protein, 481 aa, Homo sapiens; identical to SEQ ID NO: 831368

SEQ ID NO: 831381 - protein, 421 aa, Homo sapiens; identical to SEQ ID NO: 831378

SEQ ID NO: 831382 - protein, 439 aa, Homo sapiens
GRLLLLLNSRPRRPQFPHGQKGQHYSGQKGKQQTESKGSFSIQYTYHVDANDHDQSRKSQQYDLNALHKTTKSQRHLGGSQQLLHNKQEGRDHDKSKGHFHRVVIHHKGGKAHRGTQNPSQDQGNSPSGKGISSQYSNTEERLWVHGLSKEQTSVSGAQKGRKQGGSQSSYVLQTEELVANKQQRETKNSHQNKGHYQNVVEVREEHSSKVQTSLCPAHQDKLQHGSKDIFSTQDELLVYNKNQHQTKNLNQDQQHGRKANKISYQSSSTEERRLHYGENGVQKDVSQSSIYSQTEEKAQGKSQKQITIPSQEQEHSQKANKISYQSSSTEERRLHYGENGVQKDVSQRSIYSQTEKLVAGKSQIQAPNPKQEPWHGENAKGESGQSTNREQDLLSHEQKGRHQHGSHGGLDIVIIEQEDDSDRHLAQHLNNDRNPLFT

SEQ ID NO: 831383 - protein, 412 aa, Homo sapiens
MVPPPPGEESQTVILPPGWQSYLSPQGRRYYVNTTTNETTWERPSSSPGIPASPGSHRSSLPPTVNGYHASGTPAHPPETAHMSVRKSTGDSQNLGSSSPSKKQSKENTITINCVTFPHPDTMPEQQLLKPTEWSYCDYFWADKKDPQGNGTVAGFELLLQKQLKGKQMQKEMSEFIRERIKIEEDYAKNLAKLSQNSLASQEEGSLGEAWAQVKKSLADEAEVHLKFSAKLHSEVEKPLMNFRENFKKDMKKCDHHIADLRKQLASRYASVEKARKALTERQRDLEMKTQQLEIKLSNKTEEDIKKARRKSTQAGDDLMRCVDLYNQAQSKWFEEMVTTTLELERLEVERVEMIRQHLCQYTQLRHETDMFNQSTVEPVDQLLRKVDPAKDRELWVREHKTGNIRPVDMEI

SEQ ID NO: 831384 - protein, 232 aa, Homo sapiens
VVIPPQPPTTGPPRKEVPKTTPSEPKKKQPPPPESGPEQSKQKKVAPRPSIPVKQKPKEKEKPPPVNKQENAGTLNILSTLSNGNSSKKKFQQMESTGSEWTLKPGMVPPPPGEESQTVILPPGWQSYLSPQGRRYYVNTTTNETTWERPSSSPGIPASPGSHRSSLPPTVNGYHASGTPAHPPETAHMSVRKSTGDSQNLGSSSPSKKQKLEWWPVWIQAQGPRHSLLHSF

SEQ ID NO: 831385 - protein, 244 aa, Homo sapiens
MSTRPPMRPPGNVPAVLLGFQPALALTGALCLQQNLGSSSPSKKQSKENTITINCVTFPHPDTMPEQQLLKPTEWSYCDYFWADKKDPQGNGTVAGFELLLQKQLKGKQMQKEMSEFIRERIKIEEDYAKNLAKLSQNSLASQEEGSLGEAWAQVKKSLADEAEVHLKFSAKLHSEVEKPLMNFRENFKKDMKKCDHHIADLRKQLASRYASVEKRGKPPEREPGINLVETRTHRGVKGEATGD

SEQ ID NO: 831386 - protein, 336 aa, Homo sapiens
MSNMENSFDDVSCLSPQNLGSSSPSKKQSKENTITINCVTFPHPDTMPEQQLLKPTEWSYCDYFWADKKDPQGNGTVAGFELLLQKQLKGKQMQKEMSEFIRERIKIEEDYAKNLAKLSQNSLASQEEGSLGEAWAQVKKSLADEAEVHLKFSAKLHSEVDKPLMNFRENFKKDMKKCDHHIADLRKQLASRYASVEKARKALTERQRDLEMKTQQLEIKLSNKTEEDIKKARRKSTQAGDDLMRCVDLYNQAQSKWFEEMVTTTLELERLEVERVEMIRQHLCQYTQLRHETDMFNQSTVEPVDQLLRKVDPAKDRELWVREHKTGNIRPVDMEI

SEQ ID NO: 831387 - protein, 412 aa, Homo sapiens; identical to SEQ ID NO: 831383

SEQ ID NO: 831388 - protein, 336 aa, Homo sapiens; identical to SEQ ID NO: 831386

SEQ ID NO: 831389 - protein, 336 aa, Homo sapiens
MSNMENSFDDVSCLSPQNLGSSSPSKKQSKENTITINCVTFPHPDTMPEQQLLKPTEWSYCDYFWADKKDPQGNGTVAGFELLLQKQLKGKQMQKEMSEFIRERIKIEEDYAKNLAKLSQNSLASQEEGSLGEAWAQVKKSLADEAEVHLKFSAKLHSEVEKPLMNFRENFKKDMKKCDHHIADLRKQLASRYASVEKARKALTERQRDLEMKTQQLEIKLSNKTEEDIKKARRKSTQAGDDLMRCVDLYNQAQSKWFEEMVTTTLELERLEVERVEMIRQHLCQYTQLRHETDMFNQSTVEPVDQLLRKVDPAKDRELWVREHKTGNIRPVDMEI

SEQ ID NO: 831390 - protein, 400 aa, Homo sapiens
MVPPPPGEESQTVILPPGWQSYLSPQGRRYYVNTTTNETTWERPSSSPGIPASPGSHRSSLPPTVNGYHASGTPAHPPETAHMSVRKSTGDSQNLGSSSPSKKQSKENTITINCVTFPHPDTMPEQQLLKPTEWSYCDYFWADKKDPQGNGTVAGFELLLQKQLKGKQMQKEMSEFIRERIKIEEDYAKNLAKLSQNSLASQEEGSLGEAWAQVKKSLADEAEVHLKFSAKLHSEVEKPLMNFRENFKKDMKKCDHHIADLRKQLASRYASVEKARKALTERQRDLEMKTQQLEIKLSNKTEEDIKKARRKSTQAGDDLMRCVDLYNQAQSKWFEEMVTTTLELERLEVERVEMIRQHLCQYTQLRHETDGLSGVVGSRQLCGPRDRHEHIGKPYESGIF

SEQ ID NO: 831391 - protein, 419 aa, Homo sapiens
VVIPPQPPTTGPPRKEVPKTTPSEPKKKQPPPPESGPEQSKQKKVAPRPSIPVKQKPKEKEKPPPVNKQENAGTLNILSTLSNGNSSKKKFQQMESTGSEWTLKPGMVPPPPGEESQTVILPPGWQSYLSPQGRRYYVNTTTNETTWERPSSSPGIPASPGSHRSSLPPTVNGYHASGTPAHPPETAHMSVRKSTGDSQNLGSSSPSKKQSKENTITINCVTFPHPDTMPEQQLLKPTEWSYCDYFWADKKDPQGNGTVAGFELLLQKQLKGKQMQKEMSEFIRERIKIEEDYAKNLAKLSQNSLASQEEGSLGEAWAQVKKSLADEAEVHLKFSAKLHSEVEKPLMNFRENFKKDMKKCDHHIADLRKQLASRYASVEKARKALTERQRDLEMKTQQLEWWPVWIQAQGPRHSLLHSF

SEQ ID NO: 831392 - protein, 336 aa, Homo sapiens; identical to SEQ ID NO: 831389

SEQ ID NO: 831393 - protein, 335 aa, Homo sapiens
MVPPPPGEESQTVILPPGWQSYLSPQGRRYYVNTTTNETTWERPSSSPGIPASPGSHRSSLPPTVNGYHASGTPAHPPETAHMSVRKSTGDSQNLGSSSPSKKQSKENTITINCVTFPHPDTMPEQQLLKPTEWSYCDYFWADKKDPQGNGTVAGFELLLQKQLKGKQMQKEMSEFIRERIKIEEDYAKNLAKLSQNSLASQEEGSLGEAWAQVKKSLADEAEVHLKFSAKLHSEVEKPLMNFRENFKKDMKKCDHHIADLRKQLASRYASVEKARKALTERQRDLEMKTQQLEIKLSNKTEEDIKKARRKSTQAGKCWAPAWPGQCTQKERARG

SEQ ID NO: 831394 - protein, 336 aa, Homo sapiens; identical to SEQ ID NO: 831386

SEQ ID NO: 831395 - protein, 412 aa, Homo sapiens; identical to SEQ ID NO: 831383

SEQ ID NO: 831396 - protein, 158 aa, Homo sapiens
TCALKGCPSLTPAFPGLEPAEPQQGRRGVPGPCSPAPPGSARGGAGRGGTRRASWALAPPSGGHLGTGAAGVGASTLRSRQPSILGWPRGGGRAAPCSPETNARTGPPEAGSAGRNRSRFVLHLRKCLRAYSHSILVYQNEMQGTKNNIIEGSKSEIK

SEQ ID NO: 831397 - protein, 158 aa, Homo sapiens; identical to SEQ ID NO: 831396

SEQ ID NO: 831398 - protein, 158 aa, Homo sapiens; identical to SEQ ID NO: 831396

SEQ ID NO: 831399 - protein, 183 aa, Homo sapiens
TCALKGCPSLTPAFPGLEPAEPQQGRRGVPGPCSPAPPGSARGGAGRGGTRRASWALAPPSGGHLGTGAAGVGASTLRSRQPSILGWPRGGGRAAPCSPETNARTGPPEAGSAGRNRSRFVLHLRKCLRLQEENSVTRHEVKCQGKPLAGIHRKRMQHGARSPSTEDQRRQERTPRTFSKPKM

SEQ ID NO: 831400 - protein, 158 aa, Homo sapiens; identical to SEQ ID NO: 831396

SEQ ID NO: 831401 - protein, 483 aa, Homo sapiens
RSWWQLHWGDIANNSGNMKPPLLVFIVCLLWLKDSHCAPTWKDKTAISENLKSFSEVGEIDADEEVKKALTGIKQMKIMMERKEKEHTNLMSTLKKCREEKQEALKLLNEVQEHLEEEERLCRESLADSWGECRSCLENNCMRIYTTCQPSWSSVKNKIERFFRKIYQFLFPFHEDNEKDLPISEKLIEEDAQLTQMEDVFSQLTVDVNSLFNRSFNVFRQMQQEFDQTFQSHFISDTDLTEPYFFPAFSKEPMTKADLEQCWDIPNFFQLFCNFSVSIYESVSETITKMLKAIEDLPKQDKAPDHGGLISKMLPGQDRGLCGELDQNLSRCFKFHEKCQKCQAHLSEDCPDVPALHTELDEAIRLVNVSNQQYGQILQMTRKHLEDTAYLVEKMRGQFGWVSELANQAPETEIIFNSIQVVPRIHEGNISKQDETMMTDLSILPSSNFTLKIPLEESAESSNFIGYVVAKALQHFKEHFKTW

SEQ ID NO: 831402 - protein, 466 aa, Homo sapiens
MKPPLLVFIVCLLWLKDSHCAPTWKDKTAISENLKSFSEVGEIDADEEVKKALTGIKQMKIMMERKEKEHTNLMSTLKKCREEKQEALKLLNEVQEHLEEEERLCRESLADSWGECRSCLENNCMRIYTTCQPSWSSVKNKIERFFRKIYQFLFPFHEDNEKDLPISEKLIEEDAQLTQMEDVFSQLTVDVNSLFNRSFNVFRQMQQEFDQTFQSHFISDTDLTEPYFFPAFSKEPMTKADLEQCWDIPNFFQLFCNFSVSIYESVSETITKMLKAIEDLPKQDKAPDHGGLISKMLPGQDRGLCGELDQNLSRCFKFHEKCQKCQAHLSEDCPDVPALHTELDEAIRLVNVSNQQYGQILQMTRKHLEDTAYLVEKMRGQFGWVSELANQAPETEIIFNSIQVVPRIHEGNISKQDETMMTDLSILPSSNFTLKIPLEESAESSNFIGYVVAKALQHFKEHFKTW

SEQ ID NO: 831403 - protein, 477 aa, Homo sapiens
MRTWDYSNSGNMKPPLLVFIVCLLWLKDSHCAPTWKDKTAISENLKSFSEVGEIDADEEVKKALTGIKQMKIMMERKEKEHTNLMSTLKKCREEKQEALKLLNEVQEHLEEEERLCRESLADSWGECRSCLENNCMRIYTTCQPSWSSVKNKIERFFRKIYQFLFPFHEDNEKDLPISEKLIEEDAQLTQMEDVFSQLTVDVNSLFNRSFNVFRQMQQEFDQTFQSHFISDTDLTEPYFFPAFSKEPMTKADLEQCWDIPNFFQLFCNFSVSIYESVSETITKMLKAIEDLPKQDKAPDHGGLISKMLPGQDRGLCGELDQNLSRCFKFHEKCQKCQAHLSEDCPDVPALHTELDEAIRLVNVSNQQYGQILQMTRKHLEDTAYLVEKMRGQFGWVSELANQAPETEIIFNSIQVVPRIHEGNISKQDETMMTDLSILPSSNFTLKIPLEESAESSNFIGYVVAKALQHFKEHFKTW

SEQ ID NO: 831404 - protein, 422 aa, Homo sapiens [sequence omitted]

SEQ ID NO: 831405 - protein, 422 aa, Homo sapiens [sequence omitted]

SEQ ID NO: 831406 - protein, 436 aa, Homo sapiens
MQNSHSGVNQLGGVFVNGRPLPDSTRQKIVELAHSGARPCDISRILQTHADAKVQVLDNQNVSNGCVSKILGRYYETGSIRPRAIGGSKPRVATPEVVSKIAQYKRECPSIFAWEIRDRLLSEGVCTNDNIPSVSSINRVLRNLASEKQQMGADGMYDKLRMLNGQTGSWGTRPGWYPGTSVPGQPTQDGCQQQEGGGENTNSISSNGEDSDEAQMRLQLKRKLQRNRTSFTQEQIEALEKEFERTHYPDVFARERLAAKIDLPEARIQVWFSNRRAKWRREEKLRNQRRQASNTPSHIPISSSFSTSVYQPIPQPTTPVSSFTSGSMLGRTDTALTNTYSALPPMPSFTMANNLPMQPPVPSQTSSYSCMLPTSPSVNGRSYDTYTPPHMQTHMNSQPMGTSGTTSTGLISPGVSVPVQVPGSEPDMSQYWPRLQ

SEQ ID NO: 831407 - protein, 251 aa, Homo sapiens
MQNNGCQQQEGGGENTNSISSNGEDSDEAQMRLQLKRKLQRNRTSFTQEQIEALEKEFERTHYPDVFARERLAAKIDLPEARIQVWFSNRRAKWRREEKLRNQRRQASNTPSHIPISSSFSTSVYQPIPQPTTPVSSFTSGSMLGRTDTALTNTYSALPPMPSFTMANNLPMQPPVPSQTSSYSCMLPTSPSVNGRSYDTYTPPHMQTHMNSQPMGTSGTTSTGLISPGVSVPVQVPGSEPDMSQYWPRLQ

SEQ ID NO: 831408 - protein, 129 aa, Homo sapiens
EPHRLKEGPQHLIHLFWKRRSPPGASGAGHSGVNQLGGVFVNGRPLPDSTRQKIVELAHSGARPCDISRILQTHADAKVQVLDNQNVSNGCVSKILGRYYERLISPGVSVPVQVPGSEPDMSQYWPRLQ

SEQ ID NO: 831409 - protein, 422 aa, Homo sapiens [sequence omitted]

SEQ ID NO: 831410 - protein, 422 aa, Homo sapiens [sequence omitted]

SEQ ID NO: 831411 - protein, 474 aa, Homo sapiens
MHCGCLLLLSFFLFPFLLSFLFLFSLIFLFLFSLFFLFTLLSSLLFPFPLLSLSSGHSGVNQLGGVFVNGRPLPDSTRQKIVELAHSGARPCDISRILQVSNGCVSKILGRYYETGSIRPRAIGGSKPRVATPEVVSKIAQYKRECPSIFAWEIRDRLLSEGVCTNDNIPSVSSINRVLRNLASEKQQMGADGMYDKLRMLNGQTGSWGTRPGWYPGTSVPGQPTQDGCQQQEGGGENTNSISSNGEDSDEAQMRLQLKRKLQRNRTSFTQEQIEALEKEFERTHYPDVFARERLAAKIDLPEARIQVWFSNRRAKWRREEKLRNQRRQASNTPSHIPISSSFSTSVYQPIPQPTTPVSSFTSGSMLGRTDTALTNTYSALPPMPSFTMANNLPMQPPVPSQTSSYSCMLPTSPSVNGRSYDTYTPPHMQTHMNSQPMGTSGTTSTGLISPGVSVPVQVPGSEPDMSQYWPRLQ

SEQ ID NO: 831412 - protein, 112 aa, Homo sapiens
MIRLVGRVPREEGAWGCGCVMCSSVTTGLPLSSQPPVPSQTSSYSCMLPTSPSVNGRSYDTYTPPHMQTHMNSQPMGTSGTTSTGLISPGVSVPVQVPGSEPDMSQYWPRLQ

SEQ ID NO: 831413 - protein, 416 aa, Homo sapiens
MSSNCTSTTAVAVAPLSASKTKTKKKHFVCQKVKLFRASEPILSVLMWGVNHTINELSNVPVPVMLMPDDFKAYSKIKVDNHLFNKENLPSRFKFKEYCPMVFRNLRERFGIDDQDYQNSVTRSAPINSDSQGRCGTRFLTTYDRRFVIKTVSSEDVAEMHNILKKYHQFIVECHGNTLLPQFLGMYRLTVDGVETYMVVTRNVFSHRLTVHRKYDLKGSTVAREASDKEKAKDLPTFKDNDFLNEGQKLHVGEESKKNFLEKLKRDVEFLAQLKIMDYSLLVGIHDVDRAEQEEMEVEERAEDEECENDGVGGNLLCSYGTPPDSPGNLLSFPRFFGPGEFDPSVDVYAMKSHESSPKKEVYFMAIIDILTPYDTKKKAAHAAKTVKHGAGAEISTVNPEQYSKRFNEFMSNILT

SEQ ID NO: 831414 - protein, 416 aa, Homo sapiens; identical to SEQ ID NO: 831413

SEQ ID NO: 831415 - protein, 409 aa, Homo sapiens
KEASDKEKAKDLPTFKDNDFLNEGQKLHVGEESKKNFLEKLKRDVEINELSNVPVPVMLMPDDFKAYSKIKVDNHLFNKENLPSRFKFKEYCPMVFRNLRERFGIDDQDYQNSVTRSAPINSDSQGRCGTRFLTTYDRRFVIKTVSSEDVAEMHNILKKYHQFIVECHGNTLLPQFLGMYRLTVDGVETYMVVTRNVFSHRLTVHRKYDLKGSTVAREASDKEKAKDLPTFKDNDFLNEGQKLHVGEESKKNFLEKLKRDVEFLAQLKIMDYSLLVGIHDVDRAEQEEMEVEERAEDEECENDGVGGNLLCSYGTPPDSPGNLLSFPRFFGPGEFDPSVDVYAMKSHESSPKKEVYFMAIIDILTPYDTKKKAAHAAKTVKHGAGAEISTVNPEQYSKRFNEFMSNILT

SEQ ID NO: 831416 - protein, 416 aa, Homo sapiens; identical to SEQ ID NO: 831413

SEQ ID NO: 831417 - protein, 416 aa, Homo sapiens; identical to SEQ ID NO: 831413

SEQ ID NO: 831418 - protein, 280 aa, Homo sapiens
MSSNCTSTTAVAVAPLSASKTKTKKKHFVCQKVKLFRASEPILSVLMWGVNHTINELSNVPVPVMLMPDDFKAYSKIKVDNHLFNKENLPSRFKFKEYCPMVFRNLRERFGIDDQDYQNSVTRSAPINSDSQGRCGTRFLTTYDRRFVIKTVSSEDVAEMHNILKKYHQFIVECHGNTLLPQFLGMYRLTVDGVETYMVVTRNVFSHRLTVHRKYDLKGSTVAREASDKEKAKDLPTFKDNDFHRSLLPLRRATVRGGGSQHPWGRGQYCSAHPSIRSDH

SEQ ID NO: 831419 - protein, 368 aa, Homo sapiens
MSSNCTSTTAVAVAPLSASKTKTKKKHFVCQKVKLFRASEPILSVLMWGVNHTINELSNVPVPVMLMPDDFKAYSKIKVDNHLFNKENLPSRFKFKEYCPMVFRNLRERFGIDDQDYQNSVTRSAPINSDSQGRCGTRFLTTYDRRFVIKTVSSEDVAEMHNILKKYHQFIVECHGNTLLPQFLGMYRLTVDGVETYMVVTRNVFSHRLTVHRKYDLKGSTVAREASDKEKAKDLPTFKDNDFLNEGQKLHVGEESKKNFLEKLKRDVEFLAQLKIMDYSLLVGIHDVDRAEQEEMEVEERAEDEECENDGVGGNLLCSYGTPPDSPGNLLSFPRFFGPGEFDPSVDFSISHCSFHFLNGNFQSPVLV

SEQ ID NO: 831420 - protein, 244 aa, Homo sapiens
MSSNCTSTTAVAVAPLSASKTKTKKKHFVCQKVKLFRASEPILSVLMWGVNHTINELSNVPVPVMLMPDDFKAYSKIKVDNHLFNKENLPSRFKFKEYCPMVFRNLRERFGIDDQDYQNSVTRSAPINSDSQGRCGTRFLTTYDRRFVIKTVSSEDVAEMHNILKKYHQFIVECHGNTLLPQFLGMYRLTVDGVETYMVVTRNVFSHRLTVHRKYDLKVKGSVFAGAVPPLYLSPEGATTPTSM

SEQ ID NO: 831421 - protein, 67 aa, Homo sapiens
KEASDKEKAKDLPTFKDNDFLNEGQKLHVGEESKKNFLEKLKRDVELTTLGTSHKRKQTAKRGGSCL

SEQ ID NO: 831422 - protein, 416 aa, Homo sapiens; identical to SEQ ID NO: 831413

SEQ ID NO: 831423 - protein, 316 aa, Homo sapiens [sequence omitted]

SEQ ID NO: 831424 - protein, 416 aa, Homo sapiens; identical to SEQ ID NO: 831413

SEQ ID NO: 831425 - protein, 416 aa, Homo sapiens; identical to SEQ ID NO: 831413

SEQ ID NO: 831426 - protein, 284 aa, Homo sapiens
MSSNCTSTTAVAVAPLSASKTKTKKKHFVCQKVKLFRASEPILSVLMWGVNHTINELSNVPVPVMLMPDDFKAYSKIKVDNHLFNKENLPSRFKFKEYCPMVFRNLRERFGIDDQDYQNSVTRSAPINSDSQGRCGTRFLTTYDRRFVIKTVSSEDVAEMHNILKKYHQFIVECHGNTLLPQFLGMYRLTVDGVETYMVVTRNVFSHRLTVHRKYDLKGSTVAREASDKEKAKDLPTFKDNDFLNEGQKLHVGEESKKNFLEKLKRDVEVLTNLHFHLQGSFCT

SEQ ID NO: 831427 - protein, 224 aa, Homo sapiens
MSSNCTSTTAVAVAPLSASKTKTKKKHFVCQKVKLFRASEPILSVLMWGVNHTINELSNVPVPVMLMPDDFKAYSKIKVDNHLFNKENLPSRFKFKEYCPMVFRNLRERFGIDDQDYQNSVTRSAPINSDSQGRCGTRFLTTYDRRFVIKTVSSEDVAEMHNILKKYHQFIVECHGNTLLPQFLGMYRLLGKQDKPPPHQVCDFSISHCSFHFLNGNFQSPVLV

SEQ ID NO: 831428 - protein, 1050 aa, Homo sapiens
WRRAACGRSGRASLKEHPRGTLLSDGSPALSRNVGMTVSQKGGPQPTPSPAGPGTQLGPITGEMDEADSAFLKFKQTADDSLSLTSPNTESIFVEDPYTASLRSEIESDGHEFEAESWSLAVDAAYAKKQKREVVKRQDVLYELMQTEVHHVRTLKIMLKVYSRALQEELQFSSKAIGRLFPCADDLLETHSHFLARLKERRQESLEEGSDRNYVIQKIGDLLVQQFSGENGERMKEKYGVFCSGHNEAVSHYKLLLQQNKKFQNLIKKIGNFSIVRRLGVQECILLVTQRITKYPVLVERIIQNTEAGTEDYEDLTQALNLIKDIISQVDAKVSECEKGQRLREIAGKMDLKSSSKLKNGLTFRKEDMLQRQLHLEGMLCWKTTSGRLKDILAILLTDVLLLLQEKDQKYVFASVDSKPPVISLQKLIVREVANEEKAMFLISASLQGPEMYEIYTSSKEDRNAWMAHIQRAVESCPDEEEGPFSLPEEERKVVEARATRLRDFQERLSMKDQLIAQSLLEKQQIYLEMAEMGGLEDLPQPRGLFRGGDPSETLQGELILKSAMSEIEGIQSLICRQLGSANGQAEDGGSSTGPPRRAETFAGYDCTNSPTKNGSFKKKVSSTDPRPRDWRGPPNSPDLKLSDSDIPGSSEESPQVVEAPGTESDPRLPTVLESELVQRIQTLSQLLLNLQAVIAHQDSYVETQRAAIQEREKQFRLQSTRGNLLLEQERQRNFEKQREERAALEKLQSQLRHEQQRWERERQWQHQELERAGARLQEREGEARQLRERLEQERAELERQRQAYQHDLERLREAQRAVERERERLELLRRLKKQNTAPGALPPDTLAEAQPPSHPPSFNGEGLEGPRVSMLPSGVGPEYAERPEVARRDSAPTENRLAKSDVPIQLLSATNQFQRQAAVQQQIPTKLAASTKGGKDKGGKSRGSQRWESSASFDLKQQLLLNKLMGKDESTSRNRRSLSPILPGRHSPAPPPDPGFPAPSPPPADSPSEGFSLKAGGTALLPGPPAPSPLPATPLSAKEDASKEDVIFF

SEQ ID NO: 831429 - protein, 997 aa, Homo sapiens
STNSVLASVTASLKEHPRGTLLSDGSPALSRNVGMTVSQKGGPQPTPSPAGPGTQLGPITGEMDEADSAFLKFKQTADDSLSLTSPNTESIFVEDPYTASLRSEIESDGHEFEAESWSLAVDAAYAKKQKREVVKRQDVLYELMQTEVHHVRTLKIMLKVYSRALQEELQFSSKAIGRLFPCADDLLETHSHFLARLKERRQESLEEGSDRNYVIQKIGDLLVQQFSGENGERMKEKYGVFCSGHNEAVSHYKLLLQQNKKFQNLIKKIGNFSIVRRLGVQECILLVTQRITKYPVLVERIIQNTEAGTEDYEDLTQALNLIKDIISQVDAKVSECEKGQRLREIAGKMDLKSSSKLKNGLTFRKEDMLQRQLHLEGMLCWKTTSGRLKDILAILLTDVLLLLQEKDQKYVFASVDSKPPVISLQKLIVREVANEEKAMFLISASLQGPEMYEIYTSSKEDRNAWMAHIQRAVESCPDEEEGPFSLPEEERKVVEARATRLRDFQERLSMKDQLIAQSLLEKQQIYLEMAEMGGLEDLPQPRARRAETFAGYDCTNSPTKNGSFKKKVSSTDPRPRDWRGPPNSPDLKLSDSDIPGSSEESPQVVEAPGTESDPRLPTVLESELVQRIQTLSQLLLNLQAVIAHQDSYVETQRAAIQEREKQFRLQSTRGNLLLEQERQRNFEKQREERAALEKLQSQLRHEQQRWERERQWQHQELERAGARLQEREGEARQLRERLEQERAELERQRQAYQHDLERLREAQRAVERERERLELLRRLKKQNTAPGALPPDTLAEAQPPSHPPSFNGEGLEGPRVSMLPSGVGPEYAERPEVARRDSAPTENRLAKSDVPIQLLSATNQFQRQAAVQQQIPTKLAASTKGGKDKGGKSRGSQRWESSASFDLKQQLLLNKLMGKDESTSRNRRSLSPILPGRHSPAPPPDPGFPAPSPPPADSPSEGFSLKAGGTALLPGPPAPSPLPATPLSAKEDASKEDVIFF

SEQ ID NO: 831430 - protein, 785 aa, Homo sapiens
MSSMKIGDLLVQQFSGENGERMKEKYGVFCSGHNEAVSHYKLLLQQNKKFQNLIKKIGNFSIVRRLGVQECILLVTQRITKYPVLVERIIQNTEAGTEDYEDLTQALNLIKDIISQVDAKVSECEKGQRLREIAGKMDLKSSSKLKNGLTFRKEDMLQRQLHLEGMLCWKTTSGRLKDILAILLTDVLLLLQEKDQKYVFASVDSKPPVISLQKLIVREVANEEKAMFLISASLQGPEMYEIYTSSKEDRNAWMAHIQRAVESCPDEEEGPFSLPEEERKVVEARATRLRDFQERLSMKDQLIAQSLLEKQQIYLEMAEMGGLEDLPQPRARRAETFAGYDCTNSPTKNGSFKKKVSSTDPRPRDWRGPPNSPDLKLSDSDIPGSSEESPQVVEAPGTESDPRLPTVLESELVQRIQTLSQLLLNLQAVIAHQDSYVETQRAAIQEREKQFRLQSTRGNLLLEQERQRNFEKQREERAALEKLQSQLRHEQQRWERERQWQHQELERAGARLQEREGEARQLRERLEQERAELERQRQAYQHDLERLREAQRAVERERERLELLRRLKKQNTAPGALPPDTLAEAQPPSHPPSFNGEGLEGPRVSMLPSGVGPEYAERPEVARRDSAPTENRLAKSDVPIQLLSATNQFQRQAAVQQQIPTKLAASTKGGKDKGGKSRGSQRWESSASFDLKQQLLLNKLMGKDESTSRNRRSLSPILPGRHSPAPPPDPGFPAPSPPPADSPSEGFSLKAGGTALLPGPPAPSPLPATPLSAKEDASKEDVIFF

SEQ ID NO: 831431 - protein, 997 aa, Homo sapiens; identical to SEQ ID NO: 831429

SEQ ID NO: 831432 - protein, 805 aa, Homo sapiens
MNRKCIFCLFCKEGYKERVILYVEESCIVNSLSKSKITLRRGSIEHVRKFSYVVDGLCKSSAQCMSVEVGGHSLALELLLSSMEAKNSKPGNGVVKLICLWILCVELLWSWLVVITYMNLPPSPLEFGQVQKALQYKNKILSFPTKEKIAPRFNQETYVLLKPKDRVKTGIPQESITMKWKGPYQVLLSTPTAVKLQGTPTWAHRSRTKPVSYESQAQRKGTTTTTNISKALEDLCYLFKIINTQPEEECNAVDGNRSIDLALLPDCEYFLSMALTSHLLLGNISCGLVGYRSYSKTQPDTMMPLLILFALLINLSKCVCGQGGWTKFYSKYFKNYSIIESSLWLPDLSSTPPGRQFHLPTYLENLRTMSPDLLTNHSTPKYPNPYCEVELFPTEWIPPGPCCPPALTTIIGIWEVGHLYLQCTHNSNICIHSCINDTKVEASLRCSGPTLLPSFQDHGEVNEIPFVSEEDHIWYLLPDGNIQRKNNCLIWEGDQYYLLLENKDCSTTTMRTGGKYLYRPNLAMKYKHRTPQASLGALVGFIFVCDYEWEEVTPCNHSNSLRSHLFFKEELSLVSKKLGTDMNERWPLLPLQGSQSITPRTQEYQKYVSNKTNSGRNQGGNRTSSTLGWLCLPGVNAKELGSNPRILSHQRRSGIKENSRVPQTLENVVVDNRLALDYLLAEQGGVIVQLLIKPAAHILTLDRLRLTFKRSMSKLPSYIDDNQGTAPNYIWSTIKSAFPSLTCFSPLLGPLTTVLLQMFGPCFFNLLVKFVYSRLPQFQRQCWHKASSPSCPLTRRMKSSCLWAP

SEQ ID NO: 831433 - protein, 150 aa, Homo sapiens
MKELLRLKHCKHLLTTHVHSPWTPSLTLTPSLLTLDTLTHPRHRHSSPWTPHSAPWTPSLTLDTFTHPDTLTHPGHPHSPWIPSLLTLDTLTHPGYPHSSPWTLSLTLTPSILTLDSLTPHPGLPHSSPWTPSLLILDTLTQPGHPHSSP

SEQ ID NO: 831434 - protein, 125 aa, Homo sapiens
MGTTRSIPRDSPLGCLLSYWSKFKFGLKKKKLILYCNTIWVKYKLDDEYIWPKHGSIYYSDILRLGLFCKREGKWEEIPYVQAFMALYWITLLPGIRMPCIRDPHLAAPHRKFISLPRVSSVPQS

SEQ ID NO: 831435 - protein, 150 aa, Homo sapiens; identical to SEQ ID NO: 831433

SEQ ID NO: 831436 - protein, 125 aa, Homo sapiens; identical to SEQ ID NO: 831434

SEQ ID NO: 831437 - protein, 225 aa, Homo sapiens
MDQQAIYAELNLPTDSGPESSSPSSLPRDVCQGSPWHQFALKLSCAGIILLVLVVTGLSVSVTSLIQKSSIEKCSVDIQQSRNKTTERPGLLNCPIYWQQLREKCLLFSHTVNPWNNSLADCSTKESSLLLIRDKDELIHTQNLIRDKAILFWIGLNFSLSEKNWKWINGSFLNSNDLEIRGDAKENSCISISQTSVYSEYCSTEIRWICQKELTPVRNKVYPDS

SEQ ID NO: 831438 - protein, 1581 aa, Homo sapiens
MRKRKISVCQQTWALLCKNFLKKWRMKRESLMEWLNSLLLLLCLYIYPHSHQVNDFSSLLTMDLGRVDTFNESRFSVVYTPVTNTTQQIMNKVASTPFLAGKEVLGLPDEESIKEFTANYPEEIVRVTFTNTYSYHLKFLLGHGMPAKKEHKDHTAHCYETNEDVYCEVSVFWKEGFVALQAAINAAIIEITTNHSVMEELMSVTGKNMKMHSFIGQSGVITDLYLFSCIISFSSFIYYASVNVTRERKRMKALMTMMGLRDSAFWLSWGLLYAGFIFIMALFLALVIRSTQFIILSGFMVVFSLFLLYGLSLVALAFLMSILVKKSFLTGLVVFLLTVFWGCLGFTSLYRHLPASLEWILSLLSPFAFMLGMAQLLHLDYDLNSNAFPHPSDGSNLIVATNFMLAFDTCLYLALAIYFEKILPNEYGHRRPPLFFLKSSFWSQTQKTDHVALEDEMDADPSFHDSFEQAPPEFQGKEAIRIRNVTKEYKGKPDKIEALKDLVFDIYEGQITAILGHSGAGKSTLLNILSGLSVPTKGSVTIYNNKLSEMADLENLSKLTGVCPQSNVQFDFLTVRENLRLFAKIKGILPQEVDKEIFLLDEPTAGLDPFSRHQVWNLLKERKTDRVILFSTQFMDEADILADRKVFLSQGKLKCAGSSLFLKKKWGIGYHLSLQLNEICVEENITSLVKQHIPDAKLSAKSEGKLIYTLPLERTNKFPELYKDLDSYPDLGIENYGVSMTTLNEVFLKLEGKSTINESDIAILGEVQAEKADDTERLVEMEQVLSSLNKMRKTIGGVALWRQQICAIARVRLLKLKHERKALLALLLILMAGFCPLLVEYTMVKIYQNSYTWELSPHLYFLAPGQQPHDPLTQLLIINKTGASIDDFIQSVEHQNIALEVDAFGTRNGTDDPSYNGAITVCCNEKNYSFSLACNAKRLNCFPVLMDIVSNGLLGMVKPSVHIRTERSTFLENGQDNPIGFLAYIMFWLVLTSSCPPYIAMSSIDDYKNRARSQLRISGLSPSAYWFGQALVDVSLYFLVFVFIYLMSYISNFEDMLLTIIHIIQIPCAVGYSFSLIFMTYVISFIFRKGRKNSGIWSFCFYVVTVFSVAGFAFSIFESDIPFIFTFLIPPATMIGCLFLSSHLLFSSLFSEERMDVQPFLVFLIPFLHFIIFLFTLRCLEWKFGKKSMRKDPFFRISPRSSDVCQNPEEPEGEDEDVQMERVRTANALNSTNFDEKPVIIASCLRKEYAGKRKGCFSKRKNKIATRNVSFCVRKGEVLGLLGHNGAGKSTSIKVITGDTKPTAGQVLLKGSGGGDALEFLGYCPQENALWPNLTVRQHLEVYAAVKGLRKGDAEVAITRLVDALKLQDQLKSPVKTLSEGIKRKLCFVLSILGNPSVVLLDEPSTGMDPEGQQQMWQAIRATFRNTERGALLTTHYMAEAEAVCDRVAIMVSGRLRCIGSIQHLKSKFGKDYLLEMKVKNLAQVEPLHAEILRLFPQAARQERYSSLMVYKLPVEDVQPLAQAFFKLEKVKQSFDLEEYSLSQSTLEQVFLELSKEQELGDFEEDFDPSVKWKLLPQEEP

SEQ ID NO: 831439 - protein, 1032 aa, Homo sapiens
MADLENLSKLTGVCPQSNVQFDFLTVRENLRLFAKIKGILPQEVDKEIFLLDEPTAGLDPFSRHQVWNLLKERKTDRVILFSTQFMDEADILADRKVFLSQGKLKCAGSSLFLKKKWGIGYHLSLQLNEICVEENITSLVKQHIPDAKLSAKSEGKLIYTLPLERTNKFPELYKDLDSYPDLGIENYGVSMTTLNEVFLKLEGKSTINESDIAILGEVQAEKADDTERLVEMEQVLSSLNKMRKTIGGVALWRQQICAIARVRLLKLKHERKALLALLLILMAGFCPLLVEYTMVKIYQNSYTWELSPHLYFLAPGQQPHDPLTQLLIINKTGASIDDFIQSVEHQNIALEVDAFGTRNGTDDPSYNGAITVCCNEKNYSFSLACNAKRLNCFPVLMDIVSNGLLGMVKPSVHIRTERSTFLENGQDNPIGFLAYIMFWLVLTSSCPPYIAMSSIDDYKNRARSQLRISGLSPSAYWFGQALVDVSLYFLVFVFIYLMSYISNFEDMLLTIIHIIQIPCAVGYSFSLIFMTYVISFIFRKGRKNSGIWSFCFYVVTVFSVAGFAFSIFESDIPFIFTFLIPPATMIGCLFLSSHLLFSSLFSEERMDVQPFLVFLIPFLHFIIFLFTLRCLEWKFGKKSMRKDPFFRISPRSSDVCQNPEEPEGEDEDVQMERVRTANALNSTNFDEKPVIIASCLRKEYAGKRKGCFSKRKNKIATRNVSFCVRKGEVLGLLGHNGAGKSTSIKVITGDTKPTAGQVLLKGSGGGDALEFLGYCPQENALWPNLTVRQHLEVYAAVKGLRKGDAEVAITRLVDALKLQDQLKSPVKTLSEGIKRKLCFVLSILGNPSVVLLDEPSTGMDPEGQQQMWQAIRATFRNTERGALLTTHYMAEAEAVCDRVAIMVSGRLRCIGSIQHLKSKFGKDYLLEMKVKNLAQVEPLHAEILRLFPQAARQERYSSLMVYKLPVEDVQPLAQAFFKLEKVKQSFDLEEYSLSQSTLEQVFLELSKEQELGDFEEDFDPSVKWKLLPQEEP

SEQ ID NO: 831440 - protein, 616 aa, Homo sapiens
TARIPRVDGQDNPIGFLAYIMFWLVLTSSCPPYIAMSSIDDYKNRARSQLRISGLSPSAYWFGQALVDVSLYFLVFVFIYLMSYISNFEDMLLTIIHIIQIPCAVGYSFSLIFMTYVISFIFRKGRKNSGIWSFCFYVVTVFSVAGFAFSIFESDIPFIFTFLIPPATMIGCLFLSSHLLFSSLFSEERMDVQPFLVFLIPFLHFIIFLFTLRCLEWKFGKKSMRKDPFFRISPRSSDVCQNPEEPEGEDEDVQMERVRTANALNSTNFDEKPVIIASCLRKEYAGKRKGCFSKRKNKIATRNVSFCVRKGEVLGLLGHNGAGKSTSIKVITGDTKPTAGQVLLKGSGGGDALEFLGYCPQENALWPNLTVRQHLEVYAAVKGLRKGDAEVAITRLVDALKLQDQLKSPVKTLSEGIKRKLCFVLSILGNPSVVLLDEPSTGMDPEGQQQMWQAIRATFRNTERGALLTTHYMAEAEAVCDRVAIMVSGRLRCIGSIQHLKSKFGKDYLLEMKVKNLAQVEPLHAEILRLFPQAARQERYSSLMVYKLPVEDVQPLAQAFFKLEKVKQSFDLEEYSLSQSTLEQVFLELSKEQELGDFEEDFDPSVKWKLLPQEEP

SEQ ID NO: 831441 - protein, 404 aa, Homo sapiens
MRKRKISVCQQTWALLCKNFLKKWRMKRESLMEWLNSLLLLLCLYIYPHSHQVNDFSSLLTMDLGRVDTFNESRFSVVYTPVTNTTQQIMNKVASTPFLAGKEVLGLPDEESIKEFTANYPEEIVRVTFTNTYSYHLKFLLGHGMPAKKEHKDHTAHCYETNEDVYCEVSVFWKEGFVALQAAINAAIIEITTNHSVMEELMSVTGKNMKMHSFIGQSGVITDLYLFSCIISFSSFIYYASVNVTRERKRMKALMTMMGLRDSAFWLSWGLLYAGFIFIMALFLALVIRSTQFIILSGFMVVFSLFLLYGLSLVALAFLMSILVKKSFLTGLVVFLLTVFWGCLGFTSLYRHLPASLEWILSLLSPFAFMLGMAQLCWSLQWGQHFKNVTSSWAWWLMPIIPAL

SEQ ID NO: 831442 - protein, 266 aa, Homo sapiens
MRKRKISVCQQTWALLCKNFLKKWRMKRESLMEWLNSLLLLLCLYIYPHSHQVNDFSSLLTMDLGRVDTFNESRFSVVYTPVTNTTQQIMNKVASTPFLAGKEVLGLPDEESIKEFTANYPEEIVRVTFTNTYSYHLKFLLGHGMPAKKEHKDHTAHCYETNEDVYCEVSVFWKEGFVALQAAINAAIIEITTNHSVMEELMSVTGKNMKMHSFIGQSGVITDLYLFSCIISFSSFIYYASVNVTRERKRMKALMTMMGLRDSAFW

SEQ ID NO: 831443 - protein, 1417 aa, Homo sapiens
MRKRKISVCQQTWALLCKNFLKKWRMKRESLMEWLNSLLLLLCLYIYPHSHQVNDFSSLLTMDLGRVDTFNESRFSVVYTPVTNTTQQIMNKVASTPFLAGKEVLGLPDEESIKEFTANYPEEIVRVTFTNTYSYHLKFLLGHGMPAKKEHKDHTAHCYETNEDVYCEVSVFWKEGFVALQAAINAAIIEITTNHSVMEELMSVTGKNMKMHSFIGQSGVITDLYLFSCIISFSSFIYYASVNVTRERKRMKALMTMMGLRDSAFWLSWGLLYAGFIFIMALFLALVIRSTQFIILSGFMVVFSLFLLYGLSLVALAFLMSILVKKSFLTGLVVFLLTVFWGCLGFTSLYRHLPASLEWILSLLSPFAFMLGMAQLLHLDYDLNSNAFPHPSDGSNLIVATNFMLAFDTCLYLALAIYFEKILPNEYGHRRPPLFFLKSSFWSQTQKTDHVALEDEMDADPSFHDSFEQAPPEFQGKEAIRIRNVTKEYKGKPDKIEALKDLVFDIYEGQITAILGHSGAGKSTLLNILSGLSVPTKGSVTIYNNKLSEMADLENLSKLTGVCPQSNVQFDFLTVRENLRLFAKIKGILPQEVDKEIFLLDEPTAGLDPFSRHQVWNLLKERKTDRVILFSTQFMDEADILADRKVFLSQGKLKCAGSSLFLKKKWGIGYHLSLQLNEICVEENITSLVKQHIPDAKLSAKSEGKLIYTLPLERTNKFPELYKDLDSYPDLGIENYGVSMTTLNEVFLKLEGKSTINESDIAILGEVQAEKADDTERLVEMEQVLSSLNKMRKTIGGVALWRQQICAIARVRLLKLKHERKALLALLLILMAGFCPLLVEYTMVKIYQNSYTWELSPHLYFLAPGQQPHDPLTQLLIINKTGASIDDFIQSVEHQNIALEVDAFGTRNGTDDPSYNGAITVCCNEKNYSFSLACNAKRLNCFPVLMDIVSNGLLGMVKPSVHIRTERSTFLENGQDNPIGFLAYIMFWLVLTSSCPPYIAMSSIDDYKNRARSQLRISGLSPSAYWFGQALVDVSLYFLVFVFIYLMSYISNFEDMLLTIIHIIQIPCAVGYSFSLIFMTYVISFIFRKGRKNSGIWSFCFYVVTVFSVAGFAFSIFESDIPFIFTFLIPPATMIGCLFLSSHLLFSSLFSEERMDVQPFLVFLIPFLHFIIFLFTLRCLEWKFGKKSMRKDPFFRISPRSSDVCQNPEEPEGEDEDVQMERVRTANALNSTNFDEKPVIIASCLRKEYAGKRKGCFSKRKNKIATRNVSFCVRKGEVLGLLGHNGAGKSTSIKVITGDTKPTAGQVLLKGSGGGDALEFLGYCPQENALWPNLTVRQHLEVYAAVKGLRKGDAEVAITRLVDALKLQDQLKSPVKTLSEGIKRKLCFVLSILGNPSVVLLDEPSTGMDPEGQQQMW

SEQ ID NO: 831444 - protein, 252 aa, Homo sapiens
ATLASPEPAAGGCDGPGADGGGRGGGVDARGAGWGITAGLDPEMALLAEHLLKPLPADKQIETGPFLEAVSHLPPFFDCLGSPVFTPIKADISGNITKIKAVYDTNPAKFRTLQNILEVEKEMYGAEWPKVGATLALMWLKRGLRFIQVFLQSICDGERDENHPNLIRVNATKAYEMALKKYHGWIVQKIFQAALYAAPYKSDFLKALSKGQNVTEEECLEKIRLFLVNYTATIDVIYEMYTQMNAELNYKV

SEQ ID NO: 831445 - protein, 233 aa, Homo sapiens
ATLASPEPAAGGCDGPGADGGGRGGGVDARGAGWGITAGLDPEMALLAEHLLKPLPADKQIETGPFLEAVSHLPPFFDCLGSPVFTPIKADISGNITKIKAVYDTNPAKFRTLQNILEVEKEIGLRFIQVFLQSICDGERDENHPNLIRVNATKAYEMALKKYHGWIVQKIFQAALYAAPYKSDFLKALSKGQNVTEEECLEKIRLFLVNYTATIDVIYEMYTQMNAELNYKV

SEQ ID NO: 831446 - protein, 358 aa, Homo sapiens
ATLASPEPAAGGCDGPGADGGGRGGGVDARGAGWGITAGLDPEMALLAEHLLKPLPADKQIETGPFLEAVSHLPPFFDCLGSPVFTPIKADISGNITMRKLRLRGVEGLAEGHKQVRGKAGIQTQAYLAPSQRPSFLDFLESSEPISTCPPKQNFRYLVSEAVSVVAGEHELCINCVTLGKSVLLCEPPVSLPVKWDNDSNIKKIKAVYDTNPAKFRTLQNILEVEKEMYGAEWPKVGATLALMWLKRGLRFIQVFLQSICDGERDENHPNLIRVNATKAYEMALKKYHGWIVQKIFQAALYAAPYKSDFLKALSKGQNVTEEECLEKIRLFLVNYTATIDVIYEMYTQMNAELNYKV

SEQ ID NO: 831447 - protein, 252 aa, Homo sapiens; identical to SEQ ID NO: 831444

SEQ ID NO: 831448 - protein, 365 aa, Homo sapiens
ATLASPEPAAGGCDGPGADGGGRGGGVDARGAGWGITAGLDPEMALLAEHLLKPLPADKQIETGPFLEAVSHLPPFFDCLGSPVFTPIKADISGNITMRKLRLRGVEGLAEGHKQVRGKAGIQTQAYLAPSQRPSFLDFLESSEPISTCPPKQNFRYLVSEAVSVVAGEHELCINCVTLGKSVLLCEPQCLCLENGIMTATSGLPPGSYKKIKAVYDTNPAKFRTLQNILEVEKEMYGAEWPKVGATLALMWLKRGLRFIQVFLQSICDGERDENHPNLIRVNATKAYEMALKKYHGWIVQKIFQAALYAAPYKSDFLKALSKGQNVTEEECLEKIRLFLVNYTATIDVIYEMYTQMNAELNYKV

SEQ ID NO: 831449 - protein, 222 aa, Homo sapiens
ATLASPEPAAGGCDGPGADGGGRGGGVDARGAGWGITAGLDPEMALLAEHLLKPLPADKQIETGPFLEAVSHLPPFFDCLGSPVFTPIKADISGNITKIKAVYDTNPAKFRTLQNILEVEKEMYGAEWPKVGATLALMWLKRGLRFIQVFLQSICDGERDENHPNLIRVNATKAYEMALKKYHGWIVQKIFQLLEMDSRSVSQAGVQWHDLGLLQPPPPEFQ

SEQ ID NO: 831450 - protein, 123 aa, Homo sapiens [sequence omitted]

SEQ ID NO: 831451 - protein, 406 aa, Homo sapiens
MATPGNLGSSVLASKTKTKKKHFVAQKVKLFRASDPLLSVLMWGVNHSINELSHVQIPVMLMPDDFKAYSKIKVDNHLFNKENMPSHFKFKEYCPMVFRNLRERFGIDDQDFQNSLTRSAPLPNDSQARSGARFHTSYDKRYIIKTITSEDVAEMHNILKKYHQYIVECHGITLLPQFLGMYRLNVDGVEIYVIVTRNVFSHRLSVYRKYDLKGSTVAREASDKEKAKELPTLKDNDFINEGQKIYIDDNNKKVFLEKLKKDVEFLAQLKLMDYSLLVGIHDVERAEQEEVECEENDGEEEGESDGTHPVGTPPDSPGNTLNSSPPLAPGEFDPNIDVYGIKCHENSPRKEVYFMAIIDILTHYDAKKKAAHAAKTVKHGAGAEISTVNPEQYSKRFLDFIGHILT

SEQ ID NO: 831452 - protein, 168 aa, Homo sapiens
MLTRVKSAVANFMGGIMAGSSGSEHGGGSCGGSDLPLRFPYGRPEFLGLSQDEVECSADHIARPILILKETRRLPWATGYAEECSDTGGAPALLAALPRTVPALFSPCFSASGLSLAAGVQASAGSSLLTLAISLFSPLPLPPAQGRGVSSPGMGGGGVGGSAGAWES

SEQ ID NO: 831453 - protein, 514 aa, Homo sapiens
MLTRVKSAVANFMGGIMAGSSGSEHGGGSCGGSDLPLRFPYGRPEFLGLSQDEVECSADHIARPILILKETRRLPWATGYAEVINAGKSTHNEDQASCEVLTVKKKAGAVTSTPNRNSSKRRSSLPNGEGLQLKENSESEGVSCHYWSLFDGHAGSGAAVVASRLLQHHITEQLQDIVDILKNSAVLPPTCLGEEPENTPANSRTLTRAASLRGGVGAPGSPSTPPTRFFTEKKIPHECLVIGALESAFKEMDLQIERERSSYNISGGCTALIVICLLGKLYVANAGDSRAIIIRNGEIIPMSSEFTPETERQRLQYLAFMQPHLLGNEFTHLEFPRRVQRKELGKKMLYRDFNMTGWAYKTIEDEDLKFPLIYGEGKKARVMATIGVTRGLGDHDLKVHDSNIYIKPFLSSAPEVRIYDLSKYDHGSDDVLILATDGLWDVLSNEEVAEAITQFLPNCDPDDPHRYTLAAQDLVMRARGVLKDRGWRISNDRLGSGDDISVYVIPLIHGNKLS

SEQ ID NO: 831454 - protein, 506 aa, Homo sapiens
MLTRVKSAVANFMGGIMAGSSGSEHGGGSCGGSDLPLRFPYGRPEFLGLSQDEVECSADHIARPILILKETRRLPWATGYAEVINAGKSTHNEDQASCEVLTVKKKAGAVTSTPNRNSSKRRSSLPNGEGLQLKENSESEGVSCHYWSLFDGHAGSGAAVVASRLLQHHITEQLQDIVDILKNSAVLPPTCLGEEPENTPANSRTLTRAASLRGGVGAPGSPSTPPTRFFTEKKIPHECLVIGALESAFKEMDLQIERERSSYNISGGCTALIVICLLGKLYVANAGDSRAIIIRNGEIIPMSSEFTPETERQRLQYLAFMQPHLLGNEFTHLEFPRRVQRKELGKKMLYRDFNMTGWAYKTIEDEDLKFPLIYGEGKKARVMATIGVTRGLGDHDLKVHDSNIYIKPFLSSAPEVRIYDLSKYDHGSDDVLILATDGLWDVLSNEEVAEAITQFLPNCDPDDPHRFVHFYNCRVVPQAFFPGQAGMATPHGTPRELRPPGPEGCG

SEQ ID NO: 831455 - protein, 446 aa, Homo sapiens
MLTRVKSAVANFMGGIMAGSSGSEHGGGSCGGSDLPLRFPYGRPEFLGLSQDEVECSADHIARPILILKETRRLPWATGYAEVINAGKSTHNEDQASCEVLTVKKKAGAVTSTPNRNSSKRRSSLPNGEGLQLKENSESEGVSCHYWSLFDGLPQHAPHTLLYREEDSPECLVIGALESAFKEMDLQIERERSSYNISGGCTALIVICLLGKLYVANAGDSRAIIIRNGEIIPMSSEFTPETERQRLQYLAFMQPHLLGNEFTHLEFPRRVQRKELGKKMLYRDFNMTGWAYKTIEDEDLKFPLIYGEGKKARVMATIGVTRGLGDHDLKVHDSNIYIKPFLSSAPEVRIYDLSKYDHGSDDVLILATDGLWDVLSNEEVAEAITQFLPNCDPDDPHRYTLAAQDLVMRARGVLKDRGWRISNDRLGSGDDISVYVIPLIHGNKLS

SEQ ID NO: 831456 - protein, 514 aa, Homo sapiens; identical to SEQ ID NO: 831453

SEQ ID NO: 831457 - protein, 715 aa, Homo sapiens
MPAESGKRFKPSKYVPVSAAAIFLVGATTLFFAFTCPGLSLYVSPAVPIYNAIMFLFVLANFSMATFMDPGIFPRAEEDEDKEDDFRAPLYKTVEIKGIQVRMKWCATCRFYRPPRCSHCSVCDNCVEEFDHHCPWVNNCIGRRNYRYFFLFLLSLTAHIMGVFGFGLLYVLYHIEELSGVRTAVTMAVMCVAGLFFIPVAGLTGFHVVLVARGRTTNEQVTGKFRGGVNPFTNGCCNNVSRVLCSSPAPRYLGRPKKEKTIVIRPPFLRPEVSDGQITVKIMDNGIQGELRRTKSKGSLEITESQSADAEPPPPPKPDLSRYTGLRTHLGLATNEDSSLLAKDSPPTPTMYKYRPGYSSSSTSAAMPHSSSAKLSRGDSLKEPTSIAESSRHPSYRSEPSLEPESFRSPTFGKSFHFDPLSSGSRSSSLKSAQGTGFELGQLQSIRSEGTTSTSYKSLANQTRNGSLSYDSLLTPSDSPDFESVQAGPEPDPPLGYTSPFLSARLAQQREAERHPRLVPTGPTHREPSPVRYDNLSRHIVASLQEREKLLRQSPPLPGREEEPGLGDSGIQSTPGSGHAPRTSSSSDDSKRSPLGKTPLGRPAVPRFGKPDGLRGRGVGSPEPGPTAPYLGRSMSYSSQKAQPGVSETEEVALQPLLTPKDEVQLKTTYSKSNGQPKSLGSASPGPGQPPLSSPTRGGVKKVSGVGGTTYEISV

SEQ ID NO: 831458 - protein, 662 aa, Homo sapiens
MFLFVLANFSMATFMDPGIFPRAEEDEDKEDDFRAPLYKTVEIKGIQVRMKWCATCRFYRPPRCSHCSVCDNCVEEFDHHCPWVNNCIGRRNYRYFFLFLLSLTAHIMGVFGFGLLYVLYHIEELSGVRTAVTMAVMCVAGLFFIPVAGLTGFHVVLVARGRTTNEQVTGKFRGGVNPFTNGCCNNVSRVLCSSPAPRYLGRPKKEKTIVIRPPFLRPEVSDGQITVKIMDNGIQGELRRTKSKGSLEITESQSADAEPPPPPKPDLSRYTGLRTHLGLATNEDSSLLAKDSPPTPTMYKYRPGYSSSSTSAAMPHSSSAKLSRGDSLKEPTSIAESSRHPSYRSEPSLEPESFRSPTFGKSFHFDPLSSGSRSSSLKSAQGTGFELGQLQSIRSEGTTSTSYKSLANQTRNGSLSYDSLLTPSDSPDFESVQAGPEPDPPLGYTSPFLSARLAQQREAERHPRLVPTGPTHREPSPVRYDNLSRHIVASLQEREKLLRQSPPLPGREEEPGLGDSGIQSTPGSGHAPRTSSSSDDSKRSPLGKTPLGRPAVPRFGKPDGLRGRGVGSPEPGPTAPYLGRSMSYSSQKAQPGVSETEEVALQPLLTPKDEVQLKTTYSKSNGQPKSLGSASPGPGQPPLSSPTRGGVKKVSGVGGTTYEISV

SEQ ID NO: 831459 - protein, 715 aa, Homo sapiens; identical to SEQ ID NO: 831457

SEQ ID NO: 831460 - protein, 169 aa, Homo sapiens
MDIEKNIIFFSEPLKLSPFPMFSVPFPDTYVLSLLSRDEVQLKTTYSKSNGQPKSLGSASPGPGQPPLSNGSLSYDSLLTPSDSPDFESVQAGLSQTHLYGYTSPFLSARLASNGKLRGTTFGANWPNTPRALTIRYDNLSRHIVDSSPTRGGVKKVSGVGGTTYEISV

SEQ ID NO: 831461 - protein, 396 aa, Homo sapiens [sequence omitted]

SEQ ID NO: 831462 - protein, 225 aa, Homo sapiens
MPAESGKRFKPSKYVPVSAAAIFLVGATTLFFAFTCPGLSLYVSPAVPIYNAIMFLFVLANFSMATFMDPGIFPRAEEDEDKEDDFRAPLYKTVEIKGIQVRMKWCATCRFYRPPRCSHCSVCDNCVEEFDHHCPWVNNCIGRRNYRYFFLFLLSLTAHIMGVFGFGLLYVLYHIEELSGVRTAVTMAVMCVAGLFFIPVAGLTGFHIILITKEPTTNKPITNKF

SEQ ID NO: 831463 - protein, 613 aa, Homo sapiens
MKWCATCRFYRPPRCSHCSVCDNCVEEFDHHCPWVNNCIGRRNYRYFFLFLLSLTAHIMGVFGFGLLYVLYHIEELSGVRTAVTMAVMCVAGLFFIPVAGLTGFHVVLVARGRTTNEQVTGKFRGGVNPFTNGCCNNVSRVLCSSPAPRYLGRPKKEKTIVIRPPFLRPEVSDGQITVKIMDNGIQGELRRTKSKGSLEITESQSADAEPPPPPKPDLSRYTGLRTHLGLATNEDSSLLAKDSPPTPTMYKYRPGYSSSSTSAAMPHSSSAKLSRGDSLKEPTSIAESSRHPSYRSEPSLEPESFRSPTFGKSFHFDPLSSGSRSSSLKSAQGTGFELGQLQSIRSEGTTSTSYKSLANQTRNGSLSYDSLLTPSDSPDFESVQAGPEPDPPLGYTSPFLSARLAQQREAERHPRLVPTGPTHREPSPVRYDNLSRHIVASLQEREKLLRQSPPLPGREEEPGLGDSGIQSTPGSGHAPRTSSSSDDSKRSPLGKTPLGRPAVPRFGKPDGLRGRGVGSPEPGPTAPYLGRSMSYSSQKAQPGVSETEEVALQPLLTPKDEVQLKTTYSKSNGQPKSLGSASPGPGQPPLSSPTRGGVKKVSGVGGTTYEISV

SEQ ID NO: 831464 - protein, 715 aa, Homo sapiens; identical to SEQ ID NO: 831457

SEQ ID NO: 831465 - protein, 147 aa, Homo sapiens
MPAESGKRFKPSKYVPVSAAAIFLVGATTLFFAFTCPGLSLYVSPAVPIYNAIMFLFVLANFSMATFMDPGIFPRAEEDEDKEDDFRAPLYKTVEIKGIQVRMKWCATCRFYRPPRCSHCSVCDNCVEEFDHHCPWVNNCIGALRLG

SEQ ID NO: 831466 - protein, 725 aa, Homo sapiens
MPAESGKRFKPSKYVPVSAAAIFLVGATTLFFAFTCPGLSLYVSPAVPIYNAIMFLFVLANFSMATFMDPGIFPRAEEDEDKEDDFRAPLYKTVEIKGIQVRMKWCATCRFYRPPRCSHCSVCDNCVEEFDHHCPWVNNCIGRRNYRYFFLFLLSLTAHIMGVFGFGLLYVLYHIEELSGVRTAVTMAVMCVAGLFFIPVAGLTGFHVVLVARGRTTNEQVTGKFRGGVNPFTNGCCNNVSRVLCSSPAPRYLGRPKKEKTIVIRPPFLRPEVSDGQITVKIMDNGIQGELRRTKSKGSLEITESQSADAEPPPPPKPDLSRYTGLRTHLGLATNEDSSLLAKDSPPTPTMYKYRPGYSSSSTSAAMPHSSSAKLSRGDSLKEPTSIAESSRHPSYRSEPSLEPESFRSPTFGKSFHFDPLSSGSRSSSLKSAQGTGFELGQLQSIRSEGTTSTSYKSLANQTRNGSLSYDSLLTPSDSPDFESVQAGPEPDPPLGYTSPFLSARLAQQREAERHPRLVPTGPTHREPSPVRYDNLSRHIVASLQEREKLLRQSPPLPGREEEPGLGDSGIQSTPGSGHAPRTSSSSDDSKRSPLGKTPLGRPAVPRFGKPDGLRGRGVGSPEPGPTAPYLGRSMSYSSQKAQPGVSETEEVALQPLLTPKDEVQLKTTYSKSNGQPKSLGSASPGPGQPPLREGVAGLGPSDCPLGVTPQPTSLWCWVEGIPGF

SEQ ID NO: 831467 - protein, 110 aa, Homo sapiens
MQHWIPVHRQPESSNLQKTDPLEGTMPRKDQKLKVEQILRKNKKITHQTSHQLRQEVELEEFESCCTCCRTITILKPGLKNRLIQRSKRRKGMPSLCVLHKLHSSQQEIM

SEQ ID NO: 831468 - protein, 391 aa, Homo sapiens
MIEVVAELSRGPVFLAGEALECVVTVTNPLPPTATSASSEALAWASAQIHCQFHASESRVALPPPDSSQPDVQPDSQTVFLPHRGERGQCILSTPPKILFCDLRLDPGESKSYSYSEVLPIEGPPSFRGQSVKYVYKLTIGCQRVNSPITLLRVPLRVLVLTGLQDVRFPQDEAVAPSSPFLEEDEGGKKDSWLAELAGERLMAATSCRSLHLYNISDGRGKVGTFGIFKSVYRLGEDVVGTLNLGEGTVACLQFSVSLQTEERVQPEYQRRRGAGGVPSVSHVTHARHQESCLHTTRTSFSLPIPLSSTPGFCTAIVSLKWRLHFEFVTSREPGLVLLPPVEQPEPTTWTGPEQVPVDTFSWDLPIKVLPTSPTLASYAAPGPSTSTITI

SEQ ID NO: 831469 - protein, 391 aa, Homo sapiens; identical to SEQ ID NO: 831468

SEQ ID NO: 831470 - protein, 375 aa, Homo sapiens
MIEVVAELSRGPVFLAGEALECVVTVTNPLPPTATSASSEALAWASAQIHCQFHASESRVALPPPDSSQPDVQPDSQTVFLPHRGERGQCILSTPPKILFCDLRLDPGESKSYSYSEVLPIEGPPSFRGQSVKYVYKLTIGCQRVNSPITLLRVPLRVLVLTGLQDVRFPQDEAVAPSSPFLEEDEGGKKDSWLAELAGERLMAATSCRSLHLYNISDGRGKVGTFGIFKSVYRLGEDVVGTLNLGEGTVACLQFSVSLQTEERVQPEYQRRRGAGGVPSVSHVTHARHQESCLHTTRTSFSLPIPLSSTPGFCTAIVSLKWRLHFEFVTSREPGLVLLPPVEQPEPTTWTGPEQVPVDTFSWDLPIKLEEAWVF

SEQ ID NO: 831471 - protein, 391 aa, Homo sapiens; identical to SEQ ID NO: 831468

SEQ ID NO: 831472 - protein, 391 aa, Homo sapiens; identical to SEQ ID NO: 831468

SEQ ID NO: 831473 - protein, 391 aa, Homo sapiens; identical to SEQ ID NO: 831468

SEQ ID NO: 831474 - protein, 391 aa, Homo sapiens; identical to SEQ ID NO: 831468

SEQ ID NO: 831475 - protein, 118 aa, Homo sapiens
MNIRNARPEDLMNMQHCNLLCLPENYQMKYYFYHGLSWPQLSYIAEDENGKIVGYVLAKMEEDPDDVPHGHITSLAVKRSHRRLGLAQKLMDQASRAMIENFNAKYVSLHVRKRWKPG

SEQ ID NO: 831476 - protein, 108 aa, Homo sapiens [sequence omitted]

SEQ ID NO: 831477 - protein, 224 aa, Homo sapiens [sequence omitted]

SEQ ID NO: 831478 - protein, 235 aa, Homo sapiens
MNIRNARPEDLMNMQHCNLLCLPENYQMKYYFYHGLSWPQLSYIAEDENGKIVGYVLAKMEEDPDDVPHGHITSLAVKRSHRRLGLAQKLMDQASRAMIENFNAKYVSLHVRKSNRAALHLYSNTLNFQISEVEPKYYADGEDAYAMKRDLTQMADELRRHLELKEKGRHVVLGAIENKVESKGNSPPSSGEACREEKGLAAEDSGGDSKDLSEVSETTESTDVKDSSEASDSAS

SEQ ID NO: 831479 - protein, 145 aa, Homo sapiens
MDQASRAMIENFNAKYVSLHVRKSNRAALHLYSNTLNFQISEVEPKYYADGEDAYAMKRDLTQMADELRRHLELKEKGRHVVLGAIENKVESKGNSPPSSGEACREEKGLAAEDSGGDSKDLSEVSETTESTDVKDSSEASDSAS

SEQ ID NO: 831480 - protein, 220 aa, Homo sapiens
MNIRNARPEDLMNMQHCNLLCLPENYQMKYYFYHGLSWPQLSYIAEDENGKIVGYVLAKMEEDPDDVPHGHITSLAVKRSHRRLGLAQKLMDQASRAMIENFNAKYVSLHVRKRISEVEPKYYADGEDAYAMKRDLTQMADELRRHLELKEKGRHVVLGAIENKVESKGNSPPSSGEACREEKGLAAEDSGGDSKDLSEVSETTESTDVKDSSEASDSAS

SEQ ID NO: 831481 - protein, 154 aa, Homo sapiens
MNIRNARPEDLMNMQHCNLLCLPENYQMKYYFYHGLSWPQLSYIAEDENGKIVGYVLAKMEEDPDDVPHGHITSLAVKRSHRRLGLAQKLMDQASRAMIENFNAKYVSLHVRKSNRAALHLYSNTLNFQSVKWSPNTMQMRCTSSAPALPPPPK

SEQ ID NO: 831482 - protein, 235 aa, Homo sapiens; identical to SEQ ID NO: 831478

SEQ ID NO: 831483 - protein, 235 aa, Homo sapiens; identical to SEQ ID NO: 831478

SEQ ID NO: 831484 - protein, 101 aa, Homo sapiens
PEGPGRARPGGPECACGRWTYGAGPARRRGRGAGPGLRFPPVCVMSGLRWVGSGDLRGAHSCSCAPGVVQSQIVTVPAQPRGRGAEQTDGEQASHPWSPPP

SEQ ID NO: 831485 - protein, 93 aa, Homo sapiens
RVQTVLRVQTVPRVQTVPRVQTVPENFNAKYVSLHVRKSNRAALHLYSNTLNFQISEVEPKYYADGEDAYAMKRDLTQMADEWPTQLFSQGQW

SEQ ID NO: 831486 - protein, 235 aa, Homo sapiens; identical to SEQ ID NO: 831478

SEQ ID NO: 831487 - protein, 235 aa, Homo sapiens; identical to SEQ ID NO: 831478

SEQ ID NO: 831488 - protein, 245 aa, Homo sapiens
LVDPPGWQEFGTSRNARPEDLMNMQHCNLLCLPENYQMKYYFYHGLSWPQLSYIAEDENGKIVGYVLAKMEEDPDDVPHGHITSLAVKRSHRRLGLAQKLMDQASRAMIENFNAKYVSLHVRKSNRAALHLYSNTLNFQISEVEPKYYADGEDAYAMKRDLTQMADELRRHLELKEKGRHVVLGAIENKVESKGNSPPSSGEACREEKGLAAEDSGGDSKDLSEVSETTESTDVKDSSEASDSAS

SEQ ID NO: 831489 - protein, 118 aa, Homo sapiens; identical to SEQ ID NO: 831475

SEQ ID NO: 831490 - protein, 220 aa, Homo sapiens
MAVVRQLSKGQGAGQGGKGKAEFRASAHKKPQKWILSIQAKDTERGQDGWGGPLCPGAFAGENRGQVTLDLLSQDGAFREKTWHLAPVATIPGVEEGVPGIQVFLLALQPSAPRISEVEPKYYADGEDAYAMKRDLTQMADELRRHLELKEKGRHVVLGAIENKVESKGNSPPSSGEACREEKGLAAEDSGGDSKDLSEVSETTESTDVKDSSEASDSAS

SEQ ID NO: 831491 - protein, 136 aa, Homo sapiens
MEPFSCDTFVALPPATVDNRIIFGKNSDRLYDEVQEVVYFPAVVHDNLGERLKCTYIEIDQVPETYAVVLSRPVLNDGIKTRSLVLVERRKAQSGTLGRAMMMYLASGPRQLMAEASRGLARKGQIRDLENEQERR

SEQ ID NO: 831492 - protein, 424 aa, Homo sapiens
MEPFSCDTFVALPPATVDNRIIFGKNSDRLYDEVQEVVYFPAVVHDNLGERLKCTYIEIDQVPETYAVVLSRPAWLWGAEMGANEHGVCIGNEAVWGREEVCDEEALLGMDLVRLGLERADTAEKALNVIVDLLEKYGQGGNCTEGRMVFSYHNSFLIADRNEAWILETAGKYWAAEKVQEGVRNISNQLSITTKIAREHPDMRNYAKRKGWWDGKKEFDFAAAYSYLDTAKMMTSSGRYCEGYKLLNKHKGNITFETMMEILRDKPSGINMEGEFLTTASMVSILPQDSSLPCIHFFTGTPDPERSVFKPFIFVPHISQLLDTSSPTFELEDLVKKKSHFKPDRRHPLYQKHQQALEVVNNNEEKAKIMLDNMRKLEKELFREMESILQNKHLDVEKIVNLFPQCTKDEIQIYQSNLSVKVSS

SEQ ID NO: 831493 - protein, 444 aa, Homo sapiens
MTDSSARTEALSILYPALKKMEPFSCDTFVALPPATVDNRIIFGKNSDRLYDEVQEVVYFPAVVHDNLGERLKCTYIEIDQVPETYAVVLSRPAWLWGAEMGANEHGVCIGNEAVWGREEVCDEEALLGMDLVRLGLERADTAEKALNVIVDLLEKYGQGGNCTEGRMVFSYHNSFLIADRNEAWILETAGKYWAAEKVQEGVRNISNQLSITTKIAREHPDMRNYAKRKGWWDGKKEFDFAAAYSYLDTAKMMTSSGRYCEGYKLLNKHKGNITFETMMEILRDKPSGINMEGEFLTTASMVSILPQDSSLPCIHFFTGTPDPERSVFKPFIFVPHISQLLDTSSPTFELEDLVKKKSHFKPDRRHPLYQKHQQALEVVNNNEEKAKIMLDNMRKLEKELFREMESILQNKHLDVEKIVNLFPQCTKDEIQIYQSNLSVKVSS

SEQ ID NO: 831494 - protein, 424 aa, Homo sapiens; identical to SEQ ID NO: 831492

SEQ ID NO: 831495 - protein, 424 aa, Homo sapiens; identical to SEQ ID NO: 831492

SEQ ID NO: 831496 - protein, 165 aa, Homo sapiens
MEILRDKPSGINMEGEFLTTASMVSILPQDSSLPCIHFFTGTPDPERSVFKPFIFVPHISQLLDTSSPTFELEDLVKKKSHFKPDRRHPLYQKHQQALEVVNNNEEKAKIMLDNMRKLEKELFREMESILQNKHLDVEKIVNLFPQCTKDEIQIYQSNLSVKVSS

SEQ ID NO: 831497 - protein, 166 aa, Homo sapiens [sequence omitted]

SEQ ID NO: 831498 - protein, 344 aa, Homo sapiens
MGANEHGVCIGNEAVWGREEVCDEEALLGMDLVRLGLERADTAEKALNVIVDLLEKYGQGGNCTEGRMVFSYHNSFLIADRNEAWILETAGKYWAAEKVQEGVRNISNQLSITTKIAREHPDMRNYAKRKGWWDGKKEFDFAAAYSYLDTAKMMTSSGRYCEGYKLLNKHKGNITFETMMEILRDKPSGINMEGEFLTTASMVSILPQDSSLPCIHFFTGTPDPERSVFKPFIFVPHISQLLDTSSPTFELEDLVKKKSHFKPDRRHPLYQKHQQALEVVNNNEEKAKIMLDNMRKLEKELFREMESILQNKHLDVEKIVNLFPQCTKDEIQIYQSNLSVKVSS

SEQ ID NO: 831499 - protein, 165 aa, Homo sapiens; identical to SEQ ID NO: 831496

SEQ ID NO: 831500 - protein, 165 aa, Homo sapiens; identical to SEQ ID NO: 831496

SEQ ID NO: 831501 - protein, 180 aa, Homo sapiens
MASTISAYKEKMKELSVLSLICSCFYTQPHPNTVYQYGDMEVKQLDKRASGQSFEVILKSPSDLSPESPMLSSPPKKKDTSLEELQKRLEAAEERRKTQEAQVLKQLAERREHEREVLHKALEENNNFSRQAEEKLNYKMELSKEIREAHLAALRERLREKELHAAEVRRNKEQREEMSG

SEQ ID NO: 831502 - protein, 202 aa, Homo sapiens
MSVGRHRVVNSATGLRCVDSALGWPIVLTYKEKMKELSVLSLICSCFYTQPHPNTVYQYGDMEVKQLDKRASGQSFEVILKSPSDLSPESPMLSSPPKKKDTSLEELQKRLEAAEERRKTQEAQVLKQLAERREHEREVLHKALEENNNFSRQAEEKLNYKMELSKEIREAHLAALRERLREKELHAAEVRRNKEQREEMSG

SEQ ID NO: 831503 - protein, 218 aa, Homo sapiens [sequence omitted]

SEQ ID NO: 831504 - protein, 138 aa, Homo sapiens
AGRRRMEKQVSVEDETDINAEREEKRGEAEGERDRRQGTHHGDSADVWKREELERRRGRRCGDTQESVLGSSVSHRDMIEAAMGRENGGPGGQAPVVLAQPSLVPTAYKEKMKELSVLSLICSCFYTQPHPNTVYQYG

SEQ ID NO: 831505 - protein, 180 aa, Homo sapiens; identical to SEQ ID NO: 831501

SEQ ID NO: 831506 - protein, 218 aa, Homo sapiens [sequence omitted]

SEQ ID NO: 831507 - protein, 218 aa, Homo sapiens [sequence omitted]

SEQ ID NO: 831508 - protein, 176 aa, Homo sapiens
MCNIKIHETQPLLNLKLDRVMQDIVYKLVPGLQDSEEKRIREFYQSRGLDRVTQPTGEEPALSNLGLPFSSFDHSKAHYYRYDEQLNLCLERLSSGKDKNKSVLQNKYVRCSVRAEVRHLRRVLCHRLMLNPQHVQLLFDNEVLPDHMTMKQIWLSRWFGKPSPLLLQYSVKEKRR

SEQ ID NO: 831509 - protein, 259 aa, Homo sapiens
MASPQGGQIAIAMRLRNQLQSVYKMDPLRNEEEVRVKIKDLNEHIVCCLCAGYFVDATTITECLHTFCKSCIVKYLQTSKYCPMCNIKIHETQPLLNLKLDRVMQDIVYKLVPGLQDSEEKRIREFYQSRGLDRVTQPTGEEPALSNLGLPFSSFDHSKAHYYRYDEQLNLCLERLSSGKDKNKSVLQNKYVRCSVRAEVRHLRRVLCHRLMLNPQHVQLLFDNEVLPDHMTMKQIWLSRWFGKPSPLLLQYSVKEKRR

SEQ ID NO: 831510 - protein, 92 aa, Homo sapiens
CAYYYQTRPAGCRYYFVDATTITECLHTCECLGDCLVLPVPSLHQADCQLLCGLPHASRHPTQPMNPVSRGPENLLFFSCSLQELYCEVPPN

SEQ ID NO: 831511 - protein, 176 aa, Homo sapiens; identical to SEQ ID NO: 831508

SEQ ID NO: 831512 - protein, 258 aa, Homo sapiens
GSGRLGSAFKMASPQGGQIAIAMRLRNQLQSVYKMDPLRNEEEVRVKIKDLNEHIVCCLCAGYFVDATTITECLHTFCKSCIVKYLQTSKYCPMCNIKIHETQPLLNLKLDRVMQDIVYKLVPGLQDSEEKRIREFYQSRGLDRVTQPTGEEPALSNLGLPFSSFDHSKAHYYRYDEQLNLCLERLSSGKDKNKSVLQNKYVRCSVRAEVRHLRRVLCHRLMLNPQHVQLLFDNEVLPDHMTMKQIWLSRWFGKPSLG

SEQ ID NO: 831513 - protein, 176 aa, Homo sapiens; identical to SEQ ID NO: 831508

SEQ ID NO: 831514 - protein, 142 aa, Homo sapiens
MCNIKIHETQPLLNLKLDRVMQDIVYKLVPGLQDSEEKRIREFYQSRGLDRVTQPTGEEPALSNLGLPFSSFDHSKAHYYRYDEQLNLCLERLSSGKDKNKSVLQNKYVRCSVRAEVRHLRRVLCHRLMLNPQHGASSFFDN

SEQ ID NO: 831515 - protein, 106 aa, Homo sapiens
MCNIKIHETQPLLNLKLDRVMQDIVYKLVPGLQDSEEKRIREFYQSRGLDRVTQPTGEEPALSNLGLPFSSFDHSKAHYYRYDEQLNLCLERLSSGKDKNKSVLQS

SEQ ID NO: 831516 - protein, 375 aa, Homo sapiens [sequence omitted]

SEQ ID NO: 831517 - protein, 433 aa, Homo sapiens
MVVFLSGDNLSSPSHSGIIWQCLETFWVLTNRRRMPLASSRSAMLLSILQCPGQPHKDSSSLNVNSAEVEEPYFTGTRQEESVCPRTLVIITCPLQYSTTQRQCFLGNGFFSLQVLHFENVKDVPFGFQTVTSDVNKLSSFYSLKLIKRLYVDKSLNLSTEFISSTKRPYAKELETVDFKDKLEETKGQINNSIKDLTDGHFENILADNSVNDQTKILVVNAAYFVGKWMKKFPESETKECPFRVNKTDTKPVQMMNMEATFCMGNIDSINCKIIELPFQNKHLSMFILLPKDVEDESTGLEKIEKQLNSESLSQWTNPSTMANAKVKLSIPKFKVEKMIDPKACLENLGLKHIFSEDTSDFSGMSETKGVALSNVIHKVCLEITEDGGDSIEVPGARILQHKDELNADHPFIYIIRHNKTRNIIFFGKFCSP

SEQ ID NO: 831518 - protein, 203 aa, Homo sapiens
MDALQLANSAFAVDLFKQLCEKEPLGNVLFSPICLSTSLSLAQVGAKGDTANEIGQVLHFENVKDVPFGFQTVTSDVNKLSSFYSLKLIKRLYVDKSLNLSTEFISSTKRPYAKELETVDFKDKLEETKGQINNSIKDLTDGHFENILADNSVNDQTKILVVNAAYFVGKWMKKMKGLSIIFNIASLACLAYSMIEKGMLEKR

SEQ ID NO: 831519 - protein, 375 aa, Homo sapiens [sequence omitted]

SEQ ID NO: 831520 - protein, 2235 aa, Homo sapiens
LEFKISDEEADDADAAGRDSPSNTSQSEQQESVDAEGPVVEKIMSSRSVKKQKESGEEVEIEEFYVKYKNFSYLHCQWASIEDLEKDKRIQQKIKRFKAKQGQNKFLSEIEDELFNPDYVEVDRIMDFARSTDDRGEPVTHYLVKWCSLPYEDSTWERRQDIDQAKIEEFEKLMSREPETERVERPPADDWKKSESSREYKNNNKLREYQLEGVNWLLFNWYNMRNCILADEMGLGKTIQSITFLYEIYLKGIHGPFLVIAPLSTIPNWEREFRTWTELNVVVYHGSQASRRTIQLYEMYFKDPQGRVIKGSYKFHAIITTFEMILTDCPELRNIPWRCVVIDEAHRLKNRNCKLLEGLKMMDLEHKVLLTGTPLQNTVEELFSLLHFLEPSRFPSETTFMQEFGDLKTEEQVQKLQAILKPMMLRRLKEDVEKNLAPKEETIIEVELTNIQKKYYRAILEKNFTFLSKGGGQANVPNLLNTMMELRKCCNHPYLINGAEEKILEEFKETHNAESPDFQLQAMIQAAGKLVLIDKLLPKLKAGGHRVLIFSQMVRCLDILEDYLIQRRYPYERIDGRVRGNLRQAAIDRFSKPDSDRFVFLLCTRAGGLGINLTAADTCIIFDSDWNPQNDLQAQARCHRIGQSKSVKIYRLITRNSYEREMFDKASLKLGLDKAVLQSMSGRENATNGVQQLSKKEIEDLLRKGAYGALMDEEDEGSKFCEEDIDQILLRRTHTITIESEGKGSTFAKASFVASGNRTDISLDDPNFWQKWAKKAELDIDALNGRNNLVIDTPRVRKQTRLYSAVKEDELMEFSDLESDSEEKPCAKPRRPQDKSQGYARSECFRVEKNLLVYGWGRWTDILSHGRYKRQLTEQDVETICRTILVYCLNHYKGDENIKSFIWDLITPTADGQTRALVNHSGLSAPVPRGRKGKKVKAQSTQPVVQDADWLASCNPDALFQEDSYKKHLKHHCNKVLLRVRMLYYLRQEVIGDQADKILEGADSSEADVWIPEPFHAEVPADWWDKEADKSLLIGVFKHGYEKYNSMRADPALCFLERVGMPDAKAIAAEQRGTDMLADGGDGGEFDREDEDPEYKPTRTPFKDEIDEFANSPSEDKEESMEIHATGKHSESNAELGQLYWPNTSTLTTRLRRLITAYQRSYKRQQMRQEALMKTDRRRRRPREEVRALEAEREAIISEKRQKWTRREEADFYRVVSTFGVIFDPVKQQFDWNQFRAFARLDKKSDESLEKYFSCFVAMCRRVCRMPVKPDDEPPDLSSIIEPITEERASRTLYRIELLRKIREQVLHHPQLGERLKLCQPSLDLPEWWECGRHDRDLLVGAAKHGVSRTDYHILNDPELSFLDAHKNFAQNRGAGNTSSLNPLAVGFVQTPPVISSAHIQDERVLEQAEGKVEEPENPAAKEKCEGKEEEEETDGSGKESKQECEAEASSVKNELKGVEVGADTGSKSISEKGSEEDEEEKLEDDDKSEESSQPEAGAVSRGKNFDEESNASMSTARDETRDGFYMEDGDPSVAQLLHERTFAFSFWPKDRVMINRLDNICEAVLKGKWPVNRRQMFDFQGLIPGYTPTTVDSPLQKRSFAELSMVGQASISGSEDITTSPQLSKEDALNLSVPRQRRRRRRKIEIEAERAAKRRNLMEMVAQLRESQVVSENGQEKVVDLSKASREATSSTSNFSSLSSKFILPNVSTPVSDAFKTQMELLQAGLSRTPTRHLLNGSLVDGEPPMKRRRGRRKNVEGLDLLFMSHKRTSLSAEDAEVTKAFEEDIETPPTRNIPSPGQLDPDTRIPVINLEDGTRLVGEDAPKNKDLVEWLKLHPTYTVDMPSYVPKNADVLFSSFQKPKQKRHRCRNPNKLDINTLTGEERVPVVNKRNGKKMGGAMAPPMKDLPRWLEENPEFAVAPDWTDIVKQSGFVPESMFDRLLTGPVVRGEGASRRGRRPKSEIARAAAAAAAVASTSGINPLLVNSLFAGMDLTSLQNLQNLQSLQLAGLMGFPPGLATAATAGGDAKNPAAVLPLMLPGMAGLPNVFGLGGLLNNPLSAATGNTTTASSQGEPEDSTSKGEEKGNENEDENKDSEKSTDAVSAADSANGSVGAATAPAGLPSNPLAFNPFLLSTMAPGLFYPSMFLPPGLGGLTLPGFPALAGLQNAVGSSEEKAADKAEGGPFKDGETLEGSDAEESLDKTAESSLLEDEIAQGEELDSLDGGDEIENNENDE

SEQ ID NO: 831521 - protein, 877 aa, Homo sapiens
MADPGMMSLFGEDGNIFSEGLEGLGECGYPENPVNPMGQQMPIDQGFASLQPSLHHPSTNQNQTKLTHFDHYNQYEQQKMHLMDQPNRMMSNTPGNGLASPHSQYHTPPVPQVPHGGSGGGQMGVYPGMQNERHGQSFVDSSSMWGPRAVQVPDQIRAPYQQQQPQPQPPQPAPSGPPAQGHPQHMQQMGSYMARGDFSMQQHGQPQQRMSQFSQGQEGLNQGNPFIATSGPGHLSHVPQQSPSMAPSLRHSVQQFHHHPSTALHGESVAHSPRFSPNPPQQGAVRPQTLNFSSRSQTVPSPTINNSGQYSRYPYSNLNQGLVNNTGMNQNLGLTNNTPMNQSVPRYPNAVGFPSNSGQGLMHQQPIHPSGSLNQMNTQTMHPSQPQGTYASPPPMSPMKAMSNPAGTPPPQVRPGSAGIPMEVGSYPNMPHPQPSHQPPGAMGIGQRNMGPRNMQQSRPFIGMSSAPRELTGHMRPNGCPGVGLGDPQAIQERLIPGQQHPGQQPSFQQLPTCPPLQPHPGLHHQSSPPHPHHQPWMGGAMAPPMKDLPRWLEENPEFAVAPDWTDIVKQSGFVPESMFDRLLTGPVVRGEGASRRGRRPKSEIARAAAAAAAVASTSGINPLLVNSLFAGMDLTSLQNLQNLQSLQLAGLMGFPPGLATAATAGGDAKNPAAVLPLMLPGMAGLPNVFGLGGLLNNPLSAATGNTTTASSQGEPEDSTSKGEEKGNENEDENKDSEKSTDAVSAADSANGSVGAATAPAGLPSNPLAFNPFLLSTMAPGLFYPSMFLPPGLGGLTLPGFPALAGLQNAVGSSEEKAADKAEGGPFKDGETLEGSDAEESLDKTAESSLLEDEIAQGEELDSLDGGDEIENNENDE

SEQ ID NO: 831522 - protein, 904 aa, Homo sapiens
MADPGMMSLFGEDGNIFSEGLEGLGECGYPENPVNPMGQQMPIDQGFASLQPSLHHPSTNQNQTKLTHFDHYNQYEQQKMHLMDQPNRMMSNTPGNGLASPHSQYHTPPVPQVPHGGSGGGQMGVYPGMQNERHGQSFVDSSSMWGPRAVQVPDQIRAPYQQQQPQPQPPQPAPSGPPAQGHPQHMQQMGSYMARGDFSMQQHGQPQQRMSQFSQGQEGLNQGNPFIATSGPGHLSHVPQQSPSMAPSLRHSVQQFHHHPSTALHGESVAHSPRFSPNPPQQGAVRPQTLNFSSRSQTVPSPTINNSGQYSRYPYSNLNQGLVNNTGMNQNLGLTNNTPMNQSVPRYPNAVGFPSNSGQGLMHQQPIHPSGSLNQMNTQTMHPSQPQGTYASPPPMSPMKAMSNPAGTPPPQVRPGSAGIPMEVGSYPNMPHPQPSHQPPGAMGIGQRNMGPRNMQQSRPFIGMSSAPRELTGHMRPNGCPGVGLGDPQAIQERLIPGQQHPGQQPSFQQLPTCPPLQPHPGLHHQSSPPHPHHQPWMGGAMAPPMKDLPRWLEENPEFAVAPDWTDIVKQSVHHRGSHGDQVVFDSLYKPLFASPVLQGFVPESMFDRLLTGPVVRGEGASRRGRRPKSEIARAAAAAAAVASTSGINPLLVNSLFAGMDLTSLQNLQNLQSLQLAGLMGFPPGLATAATAGGDAKNPAAVLPLMLPGMAGLPNVFGLGGLLNNPLSAATGNTTTASSQGEPEDSTSKGEEKGNENEDENKDSEKSTDAVSAADSANGSVGAATAPAGLPSNPLAFNPFLLSTMAPGLFYPSMFLPPGLGGLTLPGFPALAGLQNAVGSSEEKAADKAEGGPFKDGETLEGSDAEESLDKTAESSLLEDEIAQGEELDSLDGGDEIENNENDE

SEQ ID NO: 831523 - protein, 877 aa, Homo sapiens; identical to SEQ ID NO: 831521

SEQ ID NO: 831524 - protein, 159 aa, Homo sapiens
MADPGMMSLFGEDGNIFSEGLEGLGECGYPENPVNPMGQQMPIDQGFASLQPSLHHPSTNQNQTKLTHFDHYNQYEQQKMHLMDQPNRMMSNTPGNGLASPHSQYHTPPVPQVPHGGSGGGQMGVYPGMQNERHGQSFVDSSSMWGPRAVQACPRHQGN

SEQ ID NO: 831525 - protein, 1911 aa, Homo sapiens
LEFKISDEEADDADAAGRDSPSNTSQSEQQESVDAEGPVVEKIMSSRSVKKQKESGEEVEIEEFYVKYKNFSYLHCQWASIEDLEKDKRIQQKIKRFKAKQGQNKFLSEIEDELFNPDYVEVDRIMDFARSTDDRGEPVTHYLVKWCSLPYEDSTWERRQDIDQAKIEEFEKLMSREPETERVERPPADDWKKSESSREYKNNNKLREYQLEGVNWLLFNWYNMRNCILADEMGLGKTIQSITFLYEIYLKGIHGPFLVIAPLSTIPNWEREFRTWTELNVVVYHGSQASRRTIQLYEMYFKDPQGRVIKGSYKFHAIITTFEMILTDCPELRNIPWRCVVIDEAHRLKNRNCKLLEGLKMMDLEHKVLLTGTPLQNTVEELFSLLHFLEPSRFPSETTFMQEFGDLKTEEQVQKLQAILKPMMLRRLKEDVEKNLAPKEETIIEVELTNIQKKYYRAILEKNFTFLSKGGGQANVPNLLNTMMELRKCCNHPYLINGAEEKILEEFKETHNAESPDFQLQAMIQAAGKLVLIDKLLPKLKAGGHRVLIFSQMVRCLDILEDYLIQRRYPYERIDGRVRGNLRQAAIDRFSKPDSDRFVFLLCTRAGGLGINLTAADTCIIFDSDWNPQNDLQAQARCHRIGQSKSVKIYRLITRNSYEREMFDKASLKLGLDKAVLQSMSGRENATNGVQQLSKKEIEDLLRKGAYGALMDEEDEGSKFCEEDIDQILLRRTHTITIESEGKGSTFAKASFVASGNRTDISLDDPNFWQKWAKKAELDIDALNGRNNLVIDTPRVRKQTRLYSAVKEDELMEFSDLESDSEEKPCAKPRRPQDKSQGYARSECFRVEKNLLVYGWGRWTDILSHGRYKRQLTEQDVETICRTILVYCLNHYKGDENIKSFIWDLITPTADGQTRALVNHSGLSAPVPRGRKGKKVKAQSTQPVVQDADWLASCNPDALFQEDSYKKHLKHHCNKVLLRVRMLYYLRQEVIGDQADKILEGADSSEADVWIPEPFHAEVPADWWDKEADKSLLIGVFKHGYEKYNSMRADPALCFLERVGMPDAKAIAAEQRGTDMLADGGDGGEFDREDEDPEYKPTRTPFKDEIDEFANSPSEDKEESMEIHATGKHSESNAELGQLYWPNTSTLTTRLRRLITAYQRSYKRQQMRQEALMKTDRRRRRPREEVRALEAEREAIISEKRQKWTRREEADFYRVVSTFGVIFDPVKQQFDWNQFRAFARLDKKSDESLEKYFSCFVAMCRRVCRMPVKPDDEPPDLSSIIEPITEERASRTLYRIELLRKIREQVLHHPQLGERLKLCQPSLDLPEWWECGRHDRDLLVGAAKHGVSRTDYHILNDPELSFLDAHKNFAQNRGAGNTSSLNPLAVGFVQTPPVISSAHIQDERVLEQAEGKVEEPENPAAKEKCEGKEEEEETDGSGKESKQECEAEASSVKNELKGVEVGADTGSKSISEKGSEEDEEEKLEDDDKSEESSQPEAGAVSRGKNFDEESNASMSTARDETRDGFYMEDGDPSVAQLLHERTFAFSFWPKDRVMINRLDNICEAVLKGKWPVNRRQMFDFQGLIPGYTPTTVDSPLQKRSFAELSMVGQASISGSEDITTSPQLSKEDALNLSVPRQRRRRRRKIEIEAERAAKRRNLMEMVAQLRESQVVSENGQEKVVDLSKASREATSSTSNFSSLSSKFILPNVSTPVSDAFKTQMELLQAGLSRTPTRHLLNGSLVDGEPPMKRRRGRRKNVEGLDLLFMSHKRTSLSAEDAEVTKAFEEDIETPPTRNIPSPGQLDPDTRIPVINLEDGTRLVGEDAPKNKDLVEWLKLHPTYTVDMPSYVPVSIAEFRVGRNLAGRSTSFPYNIEIPDSWSLCLFLECFLVSNISQVFVVESSSLQILASGLSY

SEQ ID NO: 831526 - protein, 627 aa, Homo sapiens
MADPGMMSLFGEDGNIFSEGLEGLGECGYPENPVNPMGQQMPIDQGFASLQPSLHHPSTNQNQTKLTHFDHYNQYEQQKMHLMDQPNRMMSNTPGNGLASPHSQYHTPPVPQVPHGGSGGGQMGVYPGMQNERHGQSFVDSSSMWGPRAVQVPDQIRAPYQQQQPQPQPPQPAPSGPPAQGHPQHMQQMGSYMARGDFSMQQHGQPQQRMSQFSQGQEGLNQGNPFIATSGPGHLSHVPQQSPSMAPSLRHSVQQFHHHPSTALHGESVAHSPRFSPNPPQQGAVRPQTLNFSSRSQTVPSPTINNSGQYSRYPYSNLNQGLVNNTGMNQNLGLTNNTPMNQSVPRYPNAVGFPSNSGQGLMHQQPIHPSGSLNQMNTQTMHPSQPQGTYASPPPMSPMKAMSNPAGTPPPQVRPGSAGIPMEVGSYPNMPHPQPSHQPPGAMGIGQRNMGPRNMQQSRPFIGMSSAPRELTGHMRPNGCPGVGLGDPQAIQERLIPGQQHPGQQPSFQQLPTCPPLQPHPGLHHQSSPPHPHHQPWAQLHPSPQNTPQKVPVHQHSPSEPFLEKPVPDMTQVSGPNAQLVKSDDYLPSIEQQPQQKKKKKKNNHIVAEDPSKGFGKDDFPGGVDNQ

SEQ ID NO: 831527 - protein, 2235 aa, Homo sapiens; identical to SEQ ID NO: 831520

SEQ ID NO: 831528 - protein, 877 aa, Homo sapiens; identical to SEQ ID NO: 831521

SEQ ID NO: 831529 - protein, 841 aa, Homo sapiens
MGQQMPIDQGFASLQPSLHHPSTNQNQTKLTHFDHYNQYEQQKMHLMDQPNRMMSNTPGNGLASPHSQYHTPPVPQVPHGGSGGGQMGVYPGMQNERHGQSFVDSSSMWGPRAVQVPDQIRAPYQQQQPQPQPPQPAPSGPPAQGHPQHMQQMGSYMARGDFSMQQHGQPQQRMSQFSQGQEGLNQGNPFIATSGPGHLSHVPQQSPSMAPSLRHSVQQFHHHPSTALHGESVAHSPRFSPNPPQQGAVRPQTLNFSSRSQTVPSPTINNSGQYSRYPYSNLNQGLVNNTGMNQNLGLTNNTPMNQSVPRYPNAVGFPSNSGQGLMHQQPIHPSGSLNQMNTQTMHPSQPQGTYASPPPMSPMKAMSNPAGTPPPQVRPGSAGIPMEVGSYPNMPHPQPSHQPPGAMGIGQRNMGPRNMQQSRPFIGMSSAPRELTGHMRPNGCPGVGLGDPQAIQERLIPGQQHPGQQPSFQQLPTCPPLQPHPGLHHQSSPPHPHHQPWMGGAMAPPMKDLPRWLEENPEFAVAPDWTDIVKQSGFVPESMFDRLLTGPVVRGEGASRRGRRPKSEIARAAAAAAAVASTSGINPLLVNSLFAGMDLTSLQNLQNLQSLQLAGLMGFPPGLATAATAGGDAKNPAAVLPLMLPGMAGLPNVFGLGGLLNNPLSAATGNTTTASSQGEPEDSTSKGEEKGNENEDENKDSEKSTDAVSAADSANGSVGAATAPAGLPSNPLAFNPFLLSTMAPGLFYPSMFLPPGLGGLTLPGFPALAGLQNAVGSSEEKAADKAEGGPFKDGETLEGSDAEESLDKTAESSLLEDEIAQGEELDSLDGGDEIENNENDE

SEQ ID NO: 831530 - protein, 243 aa, Homo sapiens
VALEVPGRLSTPMSPMKAMSNPAGTPPPQVRPGSAGIPMEVGSYPNMPHPQPSHQPPGAMGIGQRNMGPRNMQQSRPFIGMSSAPRELTGHMRPNGCPGVGLGDPQAIQERLIPGQQHPGQQPSFQQLPTCPPLQPHPGLHHQSSPPHPHHQPWAQLHPSPQNTPQKVPVHQHSPSEPFLEKPVPDMTQVSGPNAQLVKSDDYLPSIEQQPQQKKKKKKNNHIVAEDPSKGFGKDDFPGGVDN

SEQ ID NO: 831531 - protein, 104 aa, Homo sapiens
LGGRAPPLAPPNPRASLGGEGEPGSCERAGERSCRRWGGRSRGAGAERGCGRSGRLRQRRRLSVIVPGSRQQFLYLRRGSERSLCRTRSKERKQSKFFFIKSTV

SEQ ID NO: 831532 - protein, 70 aa, Homo sapiens
LEGRAPPLAPPNPRASLGGEGEPGSCERAGERSCRRWGGRSRGAGAERGCGRSGRLRQRRRKGDGGLTEV

SEQ ID NO: 831533 - protein, 103 aa, Homo sapiens
KNLGNIHSTVKDTVEGQAVQSVINGSFTKSKENALQRKKILKKSLLKFQKICFYIYTFSLHSPSRTFCSEDSHIQLWEIIISLIIPSTFEDYQISQQQYCGLE

SEQ ID NO: 831534 - protein, 368 aa, Homo sapiens
MWPLWRLVSLLALSQALPFEQRGFWDFTLDDGPFMMNDEEASGADTSGVLDPDSVTPTYSAMCPFGCHCHLRVVQCSDLGLKSVPKEISPDTTLLDLQNNDISELRKDDFKGLQHLYALVLVNNKISKIHEKAFSPLRKLQKLYISKNHLVEIPPNLPSSLVELRIHDNRIRKVPKGVFSGLRNMNCIEMGGNPLENSGFEPGAFDGLKLNYLRISEAKLTGIPKDLPETLNELHLDHNKIQAIELEDLLRYSKLYRLGLGHNQIRMIENGSLSFLPTLRELHLDNNKLARVPSGLPDLKLLQVVYLHSNNITKVGVNDFCPMGFGVKRAYYNGISLFNNPVPYWEVQPATFRCVTDRLAIQFGNYKK

SEQ ID NO: 831535 - protein, 368 aa, Homo sapiens; identical to SEQ ID NO: 831534

SEQ ID NO: 831536 - protein, 333 aa, Homo sapiens
MNDEEASGADTSGVLDPDSVTPTYSAMCPFGCHCHLRVVQCSDLGLKSVPKEISPDTTLLDLQNNDISELRKDDFKGLQHLYALVLVNNKISKIHEKAFSPLRKLQKLYISKNHLVEIPPNLPSSLVELRIHDNRIRKVPKGVFSGLRNMNCIEMGGNPLENSGFEPGAFDGLKLNYLRISEAKLTGIPKDLPETLNELHLDHNKIQAIELEDLLRYSKLYRLGLGHNQIRMIENGSLSFLPTLRELHLDNNKLARVPSGLPDLKLLQVVYLHSNNITKVGVNDFCPMGFGVKRAYYNGISLFNNPVPYWEVQPATFRCVTDRLAIQFGNYKK

SEQ ID NO: 831537 - protein, 368 aa, Homo sapiens; identical to SEQ ID NO: 831534

SEQ ID NO: 831538 - protein, 516 aa, Homo sapiens
MWPLWRLVSLLALSQALPFEQRGFWDFTLDDGPFMMNDEEASGADTSGVLDPDSVTPTYSAMCPFGCHCHLRVVQCSDLGLKSVPKEISPDTTLLDLQNNDISELRKDDFKGLQHLYALVLVNNKISKIHEKAFSPLRKLQKLYISKNHLVEIPPNLPSSLVELRIHDNRIRKVPKGVFSGLRNMNCIEMGGNPLENSGFEPGAFDGLKLNYLRISEAKLTGIPKDLPETLNELHLDHNKIQAIELEDLLRYSKLYRLGLGHNQIRMIENGSLSFLPTLRELHLDNNKLARVPSGLPDLKLLQVVYLHSNNITASPWLPRVQVGARPGPHHMFPWPQSCPCSPTTATQRHPMKLFSRSLPNPSVQGSSPRRTVPGSAARRRSIRMGTVGSARAAAPVQTHMFCSSSSCISSLSTLPDSAAPLSPLASSWPVPPRPLLHWPFDQSSLLFSLSPSFLSLSLSLSLSFCVCVCVCVCVCVCVLCFLRPFSLLSLVACSLHLSEPGFACPFHSTPSGLLP

SEQ ID NO: 831539 - protein, 265 aa, Homo sapiens
MWPLWRLVSLLALSQALPFEQRGFWDFTLDDGPFMMNDEEASGADTSGVLDPDSVTPTYSAMCPFGCHCHLRVVQCSDLGLKSVPKEISPDTTLLDLQNNDISELRKDDFKGLQHLYALVLVNNKISKIHEKAFSPLRKLQKLYISKNHLVEIPPNLPSSLVELRIHDNRIRKVPKGVFSGLRNMNCIEMGGNPLENSGFEPGAFDGLKLNYLRISEAKLTGIPKDLPETLNELHLDHNKIQAIELEDLLRYSKLYSSGEHSQTS

SEQ ID NO: 831540 - protein, 368 aa, Homo sapiens; identical to SEQ ID NO: 831534

SEQ ID NO: 831541 - protein, 103 aa, Homo sapiens
CLEITRGPPPSMDSRPRRRDNNKLARVPSGLPDLKLLQVVYLHSNNITKVGVNDFCPMGFGVKRAYYNGISLFNNPVPYWEVQPATFRCVTDRLAIQFGNYKK

SEQ ID NO: 831542 - protein, 248 aa, Homo sapiens
MWPLWRLVSLLALSQALPFEQRGFWDFTLDDGPFMMNDEEASGADTSGVLDPDSVTPTYSAMCPFGCHCHLRVVQCSDLGLKSVPKEISPDTTLLDLQNNDISELRKDDFKGLQHLYALVLVNNKISKIHEKAFSPLRKLQKLYISKNHLVEIPPNLPSSLVELRIHDNRIRKVPKGVFSGLRNMNCIEMGGNPLENSGFEPGAFDGLKLNYLRISELPLLSHHSHPEAPHEAFFSFTPKPKCPRLQS

SEQ ID NO: 831543 - protein, 368 aa, Homo sapiens; identical to SEQ ID NO: 831534

SEQ ID NO: 831544 - protein, 174 aa, Homo sapiens
REKKDGERENRREDWSKANPSVQGSSPRRTVPGSAARRRSIRMGTVGSARAAAPVQTHMFCSSSSCISSLSTLPDSAAPLSPLASSWPVPPRPLLHWPFDQSSLLFSLSPSFLSLSLSLSLSFCVCVCVCVCVCVCVLCFLRPFSLLSLVACSLHLSEPGFACPFHSTPSGLLP

SEQ ID NO: 831545 - protein, 338 aa, Homo sapiens
MWPLWRLVSLLALSQALPFEQRGFWDFTLDDGPFMMNDEEASGADTSGVLDPDSVTPTYSAMCPFGCHCHLRVVQCSDLGLKSVPKEISPDTTLLDLQNNDISELRKDDFKGLQHLYALVLVNNKISKIHEKAFSPLRKLQKLYISKNHLVEIPPNLPSSLVELRIHDNRIRKVPKGVFSGLRNMNCIEMGGNPLENSGFEPGAFDGLKLNYLRISEAKLTGIPKDLPETLNELHLDHNKIQAIELEDLLRYSKLYSGPTVLCHRHLTASHQQTVVPSDVDSPRRYPSWTQPLDSDPDSWPSLQGACHLLRDSSSSPSRRDLLCSCLHSFPGFKCAWH

SEQ ID NO: 831546 - protein, 235 aa, Homo sapiens
MWPLWRLVSLLALSQALPFEQRGFWDFTLDDGPFMMNDEEASGADTSGVLDPDSVTPTYSAMCPFGCHCHLRVVQCSDLGLKSVPKEISPDTTLLDLQNNDISELRKDDFKGLQHLYALVLVNNKISKIHEKAFSPLRKLQKLYISKNHLVEIPPNLPSSLVELRIHDNRIRKVPKGVFSGLRNMNCIEMGGNPLENSGFEPGAFDGLKLNYLRISEAKLTGIPKDLPETLNELH

SEQ ID NO: 831547 - protein, 162 aa, Homo sapiens
TVDADGIIATKSQTSYRNAEFSPGKKCARICEFMCVCVCVCVCVCLVLPQTFLASELGGLFPPSLRTWLRLSLSLHTLWPSALSWDCFLSVRPAPSPCPQNPRDSGLPSLPCSGLAPKPVLSRRRLGGGGPASRADDTINRQSPRHTPVFLEAPHPHWPTGG

SEQ ID NO: 831548 - protein, 221 aa, Homo sapiens
  misc_feature (202)..(202): Xaa can be any naturally occurring amino acid
  misc_feature (213)..(213): Xaa can be any naturally occurring amino acid
MWPLWRLVSLLALSQALPFEQRGFWDFTLDDGPFMMNDEEASGADTSGVLDPDSVTPTYSAMCPFGCHCHLRVVQCSDLGLKSVPKEISPDTTLLDLQNNDISELRKDDFKGLQHLYALVLVNNKISKIHEKAFSPLRKLQKLYISKNHLVEIPPNLPSSLVELRIHDNRIRKVPKGVFSGLRNMNCIEMGREPTWKTMAFXPWNPSNGPEAXNYPGAIFK

SEQ ID NO: 831549 - protein, 368 aa, Homo sapiens; identical to SEQ ID NO: 831534

SEQ ID NO: 831550 - protein, 368 aa, Homo sapiens; identical to SEQ ID NO: 831534

SEQ ID NO: 831551 - protein, 368 aa, Homo sapiens; identical to SEQ ID NO: 831534

SEQ ID NO: 831552 - protein, 368 aa, Homo sapiens; identical to SEQ ID NO: 831534

SEQ ID NO: 831553 - protein, 368 aa, Homo sapiens; identical to SEQ ID NO: 831534

SEQ ID NO: 831554 - protein, 385 aa, Homo sapiens
MWPLWRLVSLLALSQALPFEQRGFWDFTLDDGPFMMNDEEASGADTSGVLDPDSVTPTYSAMCPFGCHCHLRVVQCSDLGLKSVPKEISPDTTLLDLQNNDISELRKDDFKGLQHLYVRSWEEPAGLQQRAGVRALVLVNNKISKIHEKAFSPLRKLQKLYISKNHLVEIPPNLPSSLVELRIHDNRIRKVPKGVFSGLRNMNCIEMGGNPLENSGFEPGAFDGLKLNYLRISEAKLTGIPKDLPETLNELHLDHNKIQAIELEDLLRYSKLYRLGLGHNQIRMIENGSLSFLPTLRELHLDNNKLARVPSGLPDLKLLQVVYLHSNNITKVGVNDFCPMGFGVKRAYYNGISLFNNPVPYWEVQPATFRCVTDRLAIQFGNYKK

SEQ ID NO: 831555 - protein, 368 aa, Homo sapiens; identical to SEQ ID NO: 831534

SEQ ID NO: 831556 - protein, 368 aa, Homo sapiens; identical to SEQ ID NO: 831534

SEQ ID NO: 831557 - protein, 265 aa, Homo sapiens; identical to SEQ ID NO: 831539

SEQ ID NO: 831558 - protein, 189 aa, Homo sapiens
ARPPRELIPRLCGSPQPPCKFMACPSQTPAPLALRPVLPSVLSFPVLPLSLSLSLSLFLCVCVCVCVCVCVCLVLPQTFLASELGGLFPPSLRTWLRLSLSLHTLWPSALSWDCFLSVRPAPSPCPQNPRDSGLPSLPCSGLAPKPVLSRRRLGGGGPASRADDTINRQSPRHTPVFLEAPHPHWPTGG

SEQ ID NO: 831559 - protein, 251 aa, Homo sapiens
MWPLWRLVSLLALSQALPFEQRGFWDFTLDDGPFMMNDEEASGADTSGVLDPDSVTPTYSAMCPFGCHCHLRVVQCSDLGLKSVPKEISPDTTLLDLQNNDISELRKDDFKGLQHLYALVLVNNKISKIHEKAFSPLRKLQKLYISKNHLVEIPPNLPSSLVELRIHDNRIRKVPKGVFSGLRNMNCIEMGGNPLENSGFEPGAFDGLKLNYLRISEAKLTGIPKELLKPYESTIPKKSGLQMGTWFLSQA

SEQ ID NO: 831560 - protein, 258 aa, Homo sapiens
MTTEVGSVSEVKKDSSQLGTDATKEKPKEVAENQQNQSSDPEEEKGSQPPPAAESQSSLRRQKREKETSESRGISRFIPPWLKKQKSYTLVVAKDGGDKKEPTQAVVEEQVLDKEEPLPEEQRQAKGDAEEMAQKKQKKKKKKKFWGGWGEKRFFTPLLVGRAAAPAGNAAHGAPRRPKEDTVRLEDAGEFSPPKKKGAGGSEVHGHIPEGAGRLHGSNHRSSGRYPRAGRGGKTQTTHNTHKQPTTRPHADNSEHSN

SEQ ID NO: 831561 - protein, 1005 aa, Homo sapiens
MTTEVGSVSEVKKDSSQLGTDATKEKPKEVAENQQNQSSDPEEEKGSQPPPAAESQSSLRRQKREKETSESRGISRFIPPWLKKQKSYTLVVAKDGGDKKEPTQAVVEEQVLDKEEPLPEEQRQAKGDAEEMAQKKQEIKVEVKEEKPSVSKEEKPSVSKVEMQPTELVSKEREEKVKETQEDKLEGGAAKRETKEVQTNELKAEKASQKVTKKTKTVQCKVTLLDGTEYSCDLEKHAKGQVLFDKVCEHLNLLEKDYFGLLFQESPEQKNWLDPAKEIKRQLRNLPWLFTFNVKFYPPDPSQLTEDITRYFLCLQLRQDIASGRLPCSFVTHALLGSYTLQAELGDYDPEEHGSIDLSEFQFAPTQTKELEEKVAELHKTHRGLSPAQADSQFLENAKRLSMYGVDLHHAKDSEGVDIKLGVCANGLLIYKDRLRINRFAWPKILKISYKRSNFYIKVRPAELEQFESTIGFKLPNHRAAKRLWKVCVEHHTFYRLVSPEQPPKAKFLTLGSKFRYSGRTQAQTRQASTLIDRPAPHFERTSSKRVSRSLDGAPIGVMDQSLMKDFPGAAGEISAYGPGLVSIAVVQDGDGRREVRSPTKAPHLQLIEGKKNSLRVEGDNIYVRHSNLMLEELDKAQEDILKHQASISELKRNFMESTPEPRPNEWEKRRITPLSLQTQGSSHETLNIVEEKKRAEVGKDERVITEEMNGKEISPGSGPGEIRKVEPVTQKDSTSLSSESSSSSSESEEEDVGEYRPHHRVTEGTIREEQEYEEEVEEEPRPAAKVVEREEAVPEASPVTQAGASVITVETVIQENVGAQKIPGEKSVHEGALKQDMGEEAEEEPQKVNGEVSHVDIDVLPQIICCSEPPVVKTEMVTISDASQRTEISTKEVPIVQTETKTITYESPQIDGGAGGDSGTLLTAQTITSESVSTTTTTHITKTVKGGISETRIEKRIVITGDGDIDHDQALAQAIREAREQHPDMSVTRVVVHKETELAEEGED

SEQ ID NO: 831562 - protein, 1005 aa, Homo sapiens; identical to SEQ ID NO: 831561

SEQ ID NO: 831563 - protein, 1079 aa, Homo sapiens
MTTEVGSVSEVKKDSSQLGTDATKEKPKEVAENQQNQSSDPEEEKGSQPPPAAESQSSLRRQKREKETSESRGISRFIPPWLKKQKSYTLVVAKDGGDKKEPTQAVVEEQVLDKEEPLPEEQRQAKGDAEEMAQKKQEIKVEVKEEKPSVSKEEKPSVSKVEMQPTELVSKEREEKVKETQEDKLEGGAAKRETKEVQTNELKAEKASQKVTKKTKTVQCKVTLLDGTEYSCDLEKHAKGQVLFDKVCEHLNLLEKDYFGLLFQESPEQKNWLDPAKEIKRQLRNLPWLFTFNVKFYPPDPSQLTEDITRYFLCLQLRQDIASGRLPCSFVTHALLGSYTLQAELGDYDPEEHGSIDLSEFQFAPTQTKELEEKVAELHKTHRGLSPAQADSQFLENAKRLSMYGVDLHHAKDSEGVDIKLGVCANGLLIYKDRLRINRFAWPKILKISYKRSNFYIKVRPAELEQFESTIGFKLPNHRAAKRLWKVCVEHHTFYRLVSPEQPPKAKFLTLGSKFRYSGRTQAQTRQASTLIDRPAPHFERTSSKRVSRSLDGAPIGVMDQSLMKDFPGAAGEISAYGPGLVSIAVVQDGDGRREVRSPTKAPHLQLIEGKKNSLRVEGDNIYVRHSNLMLEELDKAQEDILKHQASISELKRNFMESTPEPRPNEWEKRRITPLSLQTQGSLEEEITSILFSEKGFSDSMKATFTSATTWTAEGAVVSANAPSEKLSSSPFSHLLETRAPESEGPCTGARDAVKSSHETLNIVEEKKRAEVGKDERVITEEMNGKEISPGSGPGEIRKVEPVTQKDSTSLSSESSSSSSESEEEDVGEYRPHHRVTEGTIREEQEYEEEVEEEPRPAAKVVEREEAVPEASPVTQAGASVITVETVIQENVGAQKIPGEKSVHEGALKQDMGEEAEEEPQKVNGEVSHVDIDVLPQIICCSEPPVVKTEMVTISDASQRTEISTKEVPIVQTETKTITYESPQIDGGAGGDSGTLLTAQTITSESVSTTTTTHITKTVKGGISETRIEKRIVITGDGDIDHDQALAQAIREAREQHPDMSVTRVVVHKETELAEEGED

SEQ ID NO: 831564 - protein, 870 aa, Homo sapiens
MTTEVGSVSEVKKDSSQLGTDATKEKPKEVAENQQNQSSDPEEEKGSQPPPAAESQSSLRRQKREKETSESRGISRFIPPWLKKQKSYTLVVAKDGGDKKEPTQAVVEEQVLDKEEPLPEEQRQAKGDAEEMAQKKQEIKVEVKEEKPSVSKEEKPSVSKVEMQPTELVSKEREEKVKETQEDKLEGGAAKRETKEVQTNELKAEKASQKVTKKTKTVQCKVTLLDGTEYSCDLEKHAKGQVLFDKVCEHLNLLEKDYFGLLFQESPEQKNWLDPAKEIKRQLRNLPWLFTFNVKFYPPDPSQLTEDITRYFLCLQLRQDIASGRLPCSFVTHALLGSYTLQAELGDYDPEEHGSIDLSEFQFAPTQTKELEEKVAELHKTHRGLSPAQADSQFLENAKRLSMYGVDLHHAKDSEGVDIKLGVCANGLLIYKDRLRINRFAWPKILKISYKRSNFYIKVRPAELEQFESTIGFKLPNHRAAKRLWKVCVEHHTFYRLVSPEQPPKAKFLTLGSKFRYSGRTQAQTRQASTLIDRPAPHFERTSSKRVSRSLDGAPIGVMDQSLMKDFPGAAGEISAYGPGLVSIAVVQDGDGRREVRSPTKAPHLQLIEGKSSHETLNIVEEKKRAEVGKDERVITEEMNGKEISPGSGPGEIRKVEPVTQKDSTSLSSESSSSSSESEEEDVGEYRPHHRVTEGTIREEQEYEEEVEEEPQKVNGEVSHVDIDVLPQIICCSEPPVVKTEMVTISDASQRTEISTKEVPIVQTETKTITYESPQIDGGAGGDSGTLLTAQTITSESVSTTTTTHITKTVKGGISETRIEKRIVITGDGDIDHDQALAQAIREAREQHPDMSVTRVVVHKETELAEEGED

SEQ ID NO: 831565 - protein, 647 aa, Homo sapiens
AFGRWISISFPQFSNDKEIADSGLDVLKSCKHAKGQVLFDKVCEHLNLLEKDYFGLLFQESPEQKNWLDPAKEIKRQLRNLPWLFTFNVKFYPPDPSQLTEDITRYFLCLQLRQDIASGRLPCSFVTHALLGSYTLQAELGDYDPEEHGSIDLSEFQFAPTQTKELEEKVAELHKTHRGLSPAQADSQFLENAKRLSMYGVDLHHAKDSEGVDIKLGVCANGLLIYKDRLRINRFAWPKILKISYKRSNFYIKVRPAELEQFESTIGFKLPNHRAAKRLWKVCVEHHTFYRLVSPEQPPKAKFLTLGSKFRYSGRTQAQTRQASTLIDRPAPHFERTSSKRVSRSLDGAPIGVMDQSLMKDFPGAAGEISAYGPGLVSIAVVQDGDGRREVRSPTKAPHLQLIEGKSSHETLNIVEEKKRAEVGKDERVITEEMNGKEISPGSGPGEIRKVEPVTQKDSTSLSSESSSSSSESEEEDVGEYRPHHRVTEGTIREEQEYEEEVEEEPRPAAKPPVVKTEMVTISDASQRTEISTKEVPIVQTETKTITYESPQIDGGAGGDSGTLLTAQTITSESVSTTTTTHITKTVKGGISETRIEKRIVITGDGDIDHDQALAQAIREAREQHPDMSVTRVVVHKETELAEEGED

SEQ ID NO: 831566 - protein, 574 aa, Homo sapiens
FDLVALRRPSALRRPSALRRPSALRRPSALRRPSALRRPSALRRPSALRRPFVTHALLGSYTLQAELGDYDPEEHGSIDLSEFQFAPTQTKELEEKVAELHKTHRGLSPAQADSQFLENAKRLSMYGVDLHHAKDSEGVDIKLGVCANGLLIYKDRLRINRFAWPKILKISYKRSNFYIKVRPAELEQFESTIGFKLPNHRAAKRLWKVCVEHHTFYRLVSPEQPPKAKFLTLGSKFRYSGRTQAQTRQASTLIDRPAPHFERTSSKRVSRSLDGAPIGVMDQSLMKDFPGAAGEISAYGPGLVSIAVVQDGDGRREVRSPTKAPHLQLIEGKSSHETLNIVEEKKRAEVGKDERVITEEMNGKEISPGSGPGEIRKVEPVTQKDSTSLSSESSSSSSESEEEDVGEYRPHHRVTEGTIREEQEYEEEVEEEPRPAAKPPVVKTEMVTISDASQRTEISTKEVPIVQTETKTITYESPQIDGGAGGDSGTLLTAQTITSESVSTTTTTHITKTVKGGISETRIEKRIVITGDGDIDHDQALAQAIREAREQHPDMSVTRVVVHKETELAEEGED

SEQ ID NO: 831567 - protein, 214 aa, Homo sapiens
MNGKEISPGSGPGEIRKVEPVTQKDSTSLSSESSSSSSESEEEDVGEYRPHHRVTEGTIREEQEYEEEVEEEPRPAAKPPVVKTEMVTISDASQRTEISTKEVPIVQTETKTITYESPQIDGGAGGDSGTLLTAQTITSESVSTTTTTHITKTVKGGISETRIEKRIVITGDGDIDHDQALAQAIREAREQHPDMSVTRVVVHKETELAEEGED

SEQ ID NO: 831568 - protein, 381 aa, Homo sapiens
CLKQERKGDHLFKDILSVKEKYLMPTIWTVEEKAQETDKTRAPESEGPCTGARDAVKSSHETLNIVEEKKRAEVGKDERVITEEMNGKEISPGSGPGEIRKVEPVTQKDSTSLSSESSSSSSESEEEDVGEYRPHHRVTEGTIREEQEYEEEVEEEPRPAAKVVEREEAVPEASPVTQAGASVITVETVIQENVGAQKIPGEKSVHEGALKQDMGEEAEEEPQKVNGEVSHVDIDVLPQIICCSEPPVVKTEMVTISDASQRTEISTKEVPIVQTETKTITYESPQIDGGAGGDSGTLLTAQTITSESVSTTTTTHITKTVKGGISETRIEKRIVITGDGDIDHDQALAQAIREAREQHPDMSVTRVVVHKETELAEEGED

SEQ ID NO: 831569 - protein, 1005 aa, Homo sapiens; identical to SEQ ID NO: 831561

SEQ ID NO: 831570 - protein, 271 aa, Homo sapiens
AKMEEEETQLEEELDKAQEDILKHQASISELKRNFMESTPEPRPNEWEKRRITPLSLQTQGSLEEEITSILFSEKGFSDSMKATFTSATTWTAEGAVVSANAPSEKLSSSPFSHLLETRAPESEGPCTGARDAVKPPVVKTEMVTISDASQRTEISTKEVPIVQTETKTITYESPQIDGGAGGDSGTLLTAQTITSESVSTTTTTHITKTVKGGISETRIEKRIVITGDGDIDHDQALAQAIREAREQHPDMSVTRVVVHKETELAEEGED

SEQ ID NO: 831571 - protein, 1005 aa, Homo sapiens; identical to SEQ ID NO: 831561

SEQ ID NO: 831572 - protein, 771 aa, Homo sapiens
MTTEVGSVSEVKKDSSQLGTDATKEKPKEVAENQQNQSSDPEEEKGSQPPPAAESQSSLRRQKREKETSESRGISRFIPPWLKKQKSYTLVVAKDGGDKKEPTQAVVEEQVLDKEEPLPEEQRQAKGDAEEMAQKKQEIKVEVKEEKPSVSKEEKPSVSKVEMQPTELVSKEREEKVKETQEDKLEGGAAKRETKEVQTNELKAEKASQKVTKKTKTVQCKVTLLDGTEYSCDLEKHAKGQVLFDKVCEHLNLLEKDYFGLLFQESPEQKNWLDPAKEIKRQLRNLPWLFTFNVKFYPPDPSQLTEDITRYFLCLQLRQDIASGRLPCSFVTHALLGSYTLQAELGDYDPEEHGSIDLSEFQFAPTQTKELEEKVAELHKTHRGLSPAQADSQFLENAKRLSMYGVDLHHAKDSEGVDIKLGVCANGLLIYKDRLRINRFAWPKILKISYKRSNFYIKVRPAELEQFESTIGFKLPNHRAAKRLWKVCVEHHTFYRLVSPEQPPKAKFLTLGSKFRYSGRTQAQTRQASTLIDRPAPHFERTSSKRVSRSLDGAPIGVMDQSLMKDFPGAAGEISAYGPGLVSIAVVQDGDGRREVRSPTKAPHLQLIEGKSSHETLNIVEEKKRAEVGKDERVITEEMNGKEISPGSGPGEIRKVEPVTQKDSTSLSSESSSSSSESEEEDVGEYRPHHRVTEGTIREEQEYEEEVEEEPQKVNGEVSHVDIDVLPQIICCSEVNGSPRWEPNSRAASQMGNSCLSSPVLPVLQLFSTRI

SEQ ID NO: 831573 - protein, 479 aa, Homo sapiens
MTTEVGSVSEVKKDSSQLGTDATKEKPKEVAENQQNQSSDPEEEKGSQPPPAAESQSSLRRQKREKETSESRGISRFIPPWLKKQKSYTLVVAKDGGDKKEPTQAVVEEQVLDKEEPLPEEQRQAKGDAEEMAQKKQEIKVEVKEEKPSVSKEEKPSVSKVEMQPTELVSKEREEKVKETQEDKLEGGAAKRETKEVQTNELKAEKASQKVTKKTKTVQCKVTLLDGTEYSCDLEKHAKGQVLFDKVCEHLNLLEKDYFGLLFQESPEQKNWLDPAKEIKRQLRNLPWLFTFNVKFYPPDPSQLTEDITRYFLCLQLRQDIASGRLPCSFVTHALLGSYTLQAELGDYDPEEHGSIDLSEFQFAPTQTKELEEKVAELHKTHRGLSPAQADSQFLENAKRLSMYGVDLHHAKDSEGVDIKLGVCANGLLIYKDRLRINRFAWPKILKISYKRSNFYIKVRPAELVTRKLYHLKLAPETR

SEQ ID NO: 831574 - protein, 110 aa, Homo sapiens
MTTEVGSVSEVKKDSSQLGTDATKEKPKEVAENQQNQSSDPEEEKGSQPPPAAESQSSLRRQKREKETSESRGISRFIPPWLKKQKSYTLVVAKDGGELLLCIKPLCLHM

SEQ ID NO: 831575 - protein, 173 aa, Homo sapiens [sequence omitted]

SEQ ID NO: 831576 - protein, 1005 aa, Homo sapiens; identical to SEQ ID NO: 831561

SEQ ID NO: 831577 - protein, 1005 aa, Homo sapiens; identical to SEQ ID NO: 831561

SEQ ID NO: 831578 - protein, 1005 aa, Homo sapiens; identical to SEQ ID NO: 831561

SEQ ID NO: 831579 - protein, 852 aa, Homo sapiens
MTTEVGSVSEVKKDSSQLGTDATKEKPKEVAENQQNQSSDPEEEKGSQPPPAAESQSSLRRQKREKETSESRGISRFIPPWLKKQKSYTLVVAKDGGDKKEPTQAVVEEQVLDKEEPLPEEQRQAKGDAEEMAQKKQEIKVEVKEEKPSVSKEEKPSVSKVEMQPTELVSKEREEKVKETQEDKLEGGAAKRETKEVQTNELKAEKASQKVTKKTKTVQCKVTLLDGTEYSCDLEKHAKGQVLFDKVCEHLNLLEKDYFGLLFQESPEQKNWLDPAKEIKRQLRNLPWLFTFNVKFYPPDPSQLTEDITRYFLCLQLRQDIASGRLPCSFVTHALLGSYTLQAELGDYDPEEHGSIDLSEFQFAPTQTKELEEKVAELHKTHRGLSPAQADSQFLENAKRLSMYGVDLHHAKDSEGVDIKLGVCANGLLIYKDRLRINRFAWPKILKISYKRSNFYIKVRPAELEQFESTIGFKLPNHRAAKRLWKVCVEHHTFYRLVSPEQPPKAKFLTLGSKFRYSGRTQAQTRQASTLIDRPAPHFERTSSKRVSRSLDGAPIGVMDQSLMKDFPGAAGEISAYGPGLVSIAVVQDGDGRREVRSPTKAPHLQLIEGKSSHETLNIVEEKKRAEVGKDERVITEEMNGKEISPGSGPGEIRKVEPVTQKDSTSLSSESSSSSSESEEEDVGEYRPHHRVTEGTIREEQEYEEEVEEEPRPAAKPPVVKTEMVTISDASQRTEISTKEVPIVQTETKTITYESPQIDGGAGGDSGTLLTAQTITSESVSTTTTTHITKTVKGGISETRIEKRIVITGDGDIDHDQALAQAIREAREQHPDMSVTRVVVHKETELAEEGED

SEQ ID NO: 831580 - protein, 1072 aa, Homo sapiens
MTTEVGSVSEVKKDSSQLGTDATKEKPKEVAENQQNQSSDPEEEKGSQPPPAAESQSSLRRQKREKETSESRGISRFIPPWLKKQKSYTLVVAKDGGDKKEPTQAVVEEQVLDKEEPLPEEQRQAKGDAEEMAQKKQEIKVEVKEEKPSVSKEEKPSVSKVEMQPTELVSKEREEKVKETQEDKLEGGAAKRETKEVQTNELKAEKASQKVTKKTKTVQCKVTLLDGTEYSCDLEKHAKGQVLFDKVCEHLNLLEKDYFGLLFQESPEQKNWLDPAKEIKRQLRNLPWLFTFNVKFYPPDPSQLTEDITRYFLCLQLRQDIASGRLPCSFVTHALLGSYTLQAELGDYDPEEHGSIDLSEFQFAPTQTKELEEKVAELHKTHRGLSPAQADSQFLENAKRLSMYGVDLHHAKDSEGVDIKLGVCANGLLIYKDRLRINRFAWPKILKISYKRSNFYIKVRPAELEQFESTIGFKLPNHRAAKRLWKVCVEHHTFYRLVSPEQPPKAKFLTLGSKFRYSGRTQAQTRQASTLIDRPAPHFERTSSKRVSRSLDGAPIGVMDQSLMKDFPGAAGEISAYGPGLVSIAVVQDGDGRREVRSPTKAPHLQLIEGKKNSLRVEGDNIYVRHSNLMLEELDKAQEDILKHQASISELKRNFMESTPEPRPNEWEKRRITPLSLQTQGSLEEEITSILFSEKGFSDSMKATFTSATTWTAEGAVVSANAPSEKLSSSPFSHLLETRAPESEGPCTGARDAVKSSHETLNIVEEKKRAEVGKDERVITEEMNGKEISPGSGPGEIRKVEPVTQKDSTSLSSESSSSSSESEEEDVGEYRPHHRVTEGTIREEQEYEEEVEEEPRPAAKVVEREEAVPEASPVTQAGASVITVETVIQENVGAQKIPGEKSVHEGALKQDMGEEAEEEPQKVNGEVSHVDIDVLPQIICCSEMVTISDASQRTEISTKEVPIVQTETKTITYESPQIDGGAGGDSGTLLTAQTITSESVSTTTTTHITKTVKGGISETRIEKRIVITGDGDIDHDQALAQAIREAREQHPDMSVTRVVVHKETELAEEGED

SEQ ID NO: 831581 - protein, 267 aa, Homo sapiens
MESTPEPRPNEWEKRRITPLSLQTQGSSHETLNIVEEKKRAEVGKDERVITEEMNGKEISPGSGPGEIRKVEPVTQKDSTSLSSESSSSSSESEEEDVGEYRPHHRVTEGTIREEQEYEEEVEEEPRPAAKPPVVKTEMVTISDASQRTEISTKEVPIVQTETKTITYESPQIDGGAGGDSGTLLTAQTITSESVSTTTTTHITKTVKGGISETRIEKRIVITGDGDIDHDQALAQAIREAREQHPDMSVTRVVVHKETELAEEGED

SEQ ID NO: 831582 - protein, 296 aa, Homo sapiens
MKATFTSATTWTAEGAVVSANAPSEKLSSSPFSHLLETRAPESEGPCTGARDAVKSSHETLNIVEEKKRAEVGKDERVITEEMNGKEISPGSGPGEIRKVEPVTQKDSTSLSSESSSSSSESEEEDVGEYRPHHRVTEGTIREEQEYEEEVEEEPRPAAKPPVVKTEMVTISDASQRTEISTKEVPIVQTETKTITYESPQIDGGAGGDSGTLLTAQTITSESVSTTTTTHITKTVKGGISETRIEKRIVITGDGDIDHDQALAQAIREAREQHPDMSVTRVVVHKETELAEEGED

SEQ ID NO: 831583 - protein, 948 aa, Homo sapiens
MTTEVGSVSEVKKDSSQLGTDATKEKPKEVAENQQNQSSDPEEEKGSQPPPAAESQSSLRRQKREKETSESRGISRFIPPWLKKQKSYTLVVAKDGGDKKEPTQAVVEEQVLDKEEPLPEEQRQAKGDAEEMAQKKQEIKVEVKEEKPSVSKEEKPSVSKVEMQPTELVSKEREEKVKETQEDKLEGGAAKRETKEVQTNELKAEKASQKVTKKTKTVQCKVTLLDGTEYSCDLEKHAKGQVLFDKVCEHLNLLEKDYFGLLFQESPEQKNWLDPAKEIKRQLRNLPWLFTFNVKFYPPDPSQLTEDITRYFLCLQLRQDIASGRLPCSFVTHALLGSYTLQAELGDYDPEEHGSIDLSEFQFAPTQTKELEEKVAELHKTHRGLSPAQADSQFLENAKRLSMYGVDLHHAKDSEGVDIKLGVCANGLLIYKDRLRINRFAWPKILKISYKRSNFYIKVRPAELEQFESTIGFKLPNHRAAKRLWKVCVEHHTFYRLVSPEQPPKAKFLTLGSKFRYSGRTQAQTRQASTLIDRPAPHFERTSSKRVSRSLDGAPIGVMDQSLMKDFPGAAGEISAYGPGLVSIAVVQDGDGRREVRSPTKAPHLQLIEGKKNSLRVEGDNIYVRHSNLMLEELDKAQEDILKHQASISELKRNFMESTPEPRPNEWEKRRITPLSLQTQGSSHETLNIVEEKKRAEVGKDERVITEEMNGKEISPGSGPGEIRKVEPVTQKDSTSLSSESSSSSSESEEEDVGEYRPHHRVTEGTIREEQEYEEEVEEEPRPAAKVVEREEAVPEASPVTQAGASVITVETVIQENVGAQKIPGEKSVHEGALKQDMGEEAEEEPQKVNGEVSHVDIDVLPQIICCSEPPVVKTEMVTISDASQRTEISTKEVPIVQTETKTITYESPQIDGGAGGDSGTLLTAQTITSESVSTTTTTHITKSRSLS

SEQ ID NO: 831584 - protein, 1005 aa, Homo sapiens; identical to SEQ ID NO: 831561

SEQ ID NO: 831585 - protein, 1005 aa, Homo sapiens; identical to SEQ ID NO: 831561

SEQ ID NO: 831586 - protein, 785 aa, Homo sapiens
MTTEVGSVSEVKKDSSQLGTDATKEKPKEVAENQQNQSSDPEEEKGSQPPPAAESQSSLRRQKREKETSESRGISRFIPPWLKKQKSYTLVVAKDGGDKKEPTQAVVEEQVLDKEEPLPEEQRQAKGDAEEMAQKKQEIKVEVKEEKPSVSKEEKPSVSKVEMQPTELVSKEREEKVKETQEDKLEGGAAKRETKEVQTNELKAEKASQKVTKKTKTVQCKVTLLDGTEYSCDLEKHAKGQVLFDKVCEHLNLLEKDYFGLLFQESPEQKNWLDPAKEIKRQLRNLPWLFTFNVKFYPPDPSQLTEDITRYFLCLQLRQDIASGRLPCSFVTHALLGSYTLQAELGDYDPEEHGSIDLSEFQFAPTQTKELEEKVAELHKTHRGLSPAQADSQFLENAKRLSMYGVDLHHAKDSEGVDIKLGVCANGLLIYKDRLRINRFAWPKILKISYKRSNFYIKVRPAELEQFESTIGFKLPNHRAAKRLWKVCVEHHTFYRLVSPEQPPKAKFLTLGSKFRYSGRTQAQTRQASTLIDRPAPHFERTSSKRVSRSLDGAPIGVMDQSLMKDFPGAAGEISAYGPGLVSIAVVQDGDGRREVRSPTKAPHLQLIEGKKNSLRVEGDNIYVRHSNLMLEELDKAQEDILKHQASISELKRNFMESTPEPRPNEWEKRRITPLSLQTQGSLEEEITSILFSEKGFSDSMKATFTSATTWTAEGAVVSANAPSEKLSSSPFSHLLEVHFTLFPLLLKATYERDFHFFKYSGTIPSSAFIGEINSSWEKHSRNND

SEQ ID NO: 831587 - protein, 279 aa, Homo sapiens
  misc_feature (264)..(264): Xaa can be any naturally occurring amino acid
MTTEVGSVSEVKKDSSQLGTDATKEKPKEVAENQQNQSSDPEEEKGSQPPPAAESQSSLRRQKREKETSESRGISRFIPPWLKKQKSYTLVVAKDGGDKKEPTQAVVEEQVLDKEEPLPEEQRQAKGDAEEMAQKKQEIKVEVKEEKPSVSKEEKPSVSKVEMQPTELVSKEREEKVKETQEDKLEGGAAKRETKEVQTNELKAEKASQKVTKKTKTVQCKVTLLDGTEYSCDLEHKLVGMTTEVDSVSEVKKDSSQLGTDATXEKPKEVAGCGGYRAR

SEQ ID NO: 831588 - protein, 188 aa, Homo sapiens
RGDPECPRVPACFPSPHDAAGVLKQKQPGQGDPSSEQYEPFHPRPGFRASQAPLGGMFLKRVWSFESVRTGYAGCWAPCWALETEGQGRPGVSAFREMALGCLLRGSSDVQSLGTNSREHGRSETGNSQVRLSSPGVSGPPAGPQGRTHFQCAEWTQGRLVTEAPAGNSGSAGAKTGPFTFSAAHGLG

SEQ ID NO: 831589 - protein, 259 aa, Homo sapiens
MERKSPSGKKFRSKPQLARYLGGSMDLSTFDFRTGKMLMSKMNKSRQRVRYDSSNQVKGKPDLNTALPVRQTASIFKQPVTKITNHPSNKVKSDPQKAVDQPRQLFWEKKLSGLNAFDIAEELVKTMDLPKGLQGVGPGCTDETLLSAIASALHTSTMPITGQLSAAVEKNPGVWLNTTQPLCKAFMVTDEDIRKQEELVQQVRKRLEEALMADMLAHVEELARDGEAPLDKACAEDDDEEDEEEEEEEPDPDPEMEHV

SEQ ID NO: 831590 - protein, 235 aa, Homo sapiens
MDLSTFDFRTGKMLMSKMNKSRQRVRYDSSNQVKGKPDLNTALPVRQTASIFKQPVTKITNHPSNKVKSDPQKAVDQPRQLFWEKKLSGLNAFDIAEELVKTMDLPKGLQGVGPGCTDETLLSAIASALHTSTMPITGQLSAAVEKNPGVWLNTTQPLCKAFMVTDEDIRKQEELVQQVRKRLEEALMADMLAHVEELARDGEAPLDKACAEDDDEEDEEEEEEEPDPDPEMEHV

SEQ ID NO: 831591 - protein, 268 aa, Homo sapiens
WSTYRASSEEAPETPSGKKFRSKPQLARYLGGSMDLSTFDFRTGKMLMSKMNKSRQRVRYDSSNQVKGKPDLNTALPVRQTASIFKQPVTKITNHPSNKVKSDPQKAVDQPRQLFWEKKLSGLNAFDIAEELVKTMDLPKGLQGVGPGCTDETLLSAIASALHTSTMPITGQLSAAVEKNPGVWLNTTQPLCKAFMVTDEDIRKQEELVQQVRKRLEEALMADMLAHVEELARDGEAPLDKACAEDDDEEDEEEEEEEPDPDPEMEHV

SEQ ID NO: 831592 - protein, 291 aa, Homo sapiens
MERKRWECPALPQGWEREEVPRRSGLSAGHRDVFYYSPSGKKFRSKPQLARYLGGSMDLSTFDFRTGKMLMSKMNKSRQRVRYDSSNQVKGKPDLNTALPVRQTASIFKQPVTKITNHPSNKVKSDPQKAVDQPRQLFWEKKLSGLNAFDIAEELVKTMDLPKGLQGVGPGCTDETLLSAIASALHTSTMPITGQLSAAVEKNPGVWLNTTQPLCKAFMVTDEDIRKQEELVQQVRKRLEEALMADMLAHVEELARDGEAPLDKACAEDDDEEDEEEEEEEPDPDPEMEHV

SEQ ID NO: 831593 - protein, 259 aa, Homo sapiens; identical to SEQ ID NO: 831589

SEQ ID NO: 831594 - protein, 248 aa, Homo sapiens
MDLSTFDFRTGKMLMSKMNKSRQRVRYDSSNQVKGKPDLNTALPVRQTASIFKQPVTKITNHPSNKVKSDPQKAVDQPRQLFWEKKLSGLNAFDIAEELVKTMDLPKGLQGVGPGCTDETLLSAIASALHTSTMPITGQLSAAVEKNPGVWLNTTQPLCKAFMVTDEDIRKQEELVQQVRKRLEEALMADMLAHVEELARDGEAPLDKACAEDDDEEDEEEEEEEPCLAPYDLWARGQLLPMPAVPAP

SEQ ID NO: 831595 - protein, 259 aa, Homo sapiens; identical to SEQ ID NO: 831589

SEQ ID NO: 831596 - protein, 153 aa, Homo sapiens
PAGRNSRGKWRRRQRQRSLQTRSSAPREPGSAAKPSLGDTQEEGRAPGSLLGPSPLPGASGHTAGAAPTRKTLHARPLQSPASGSAGCSWALPGSLRPLGSRPAPPHARCPSSLRLESSQQVPGSSAPRLADSWEGFSVWRRSFETHITHCAA

SEQ ID NO: 831597 - protein, 110 aa, Homo sapiens
MYEAGLNRQRLVLPGASGHTAGAAPTRKTLHARPLQSPASGSAGCSWALPGSLRPLGSRPAPPHARCPSSLRLESSQQVPGSSAPRLADSWEGFSVWRRSFETHITHCAA

SEQ ID NO: 831598 - protein, 259 aa, Homo sapiens; identical to SEQ ID NO: 831589

SEQ ID NO: 831599 - protein, 259 aa, Homo sapiens; identical to SEQ ID NO: 831589

SEQ ID NO: 831600 - protein, 102 aa, Homo sapiens
PKLGFLPRRWQLPFLGHFRGLSGPQLPRGDLSSLRLFVHCLAGVGPGCTDETLLSAIASALHTSTMPITGQLSAAVEKNPGVWLNTTQPLCKAFMVTDEDIR

SEQ ID NO: 831601 - protein, 90 aa, Homo sapiens
WGLTAGAEEAPLHRLPSKDPHGGSGLAASCCSLSESKHKSSGRAQGPGQPREAPGGDHVFLRLVPTGWDPLQWGGLPSVCLVEGAVGVGT

SEQ ID NO: 831602 - protein, 291 aa, Homo sapiens; identical to SEQ ID NO: 831592

SEQ ID NO: 831603 - protein, 259 aa, Homo sapiens; identical to SEQ ID NO: 831589

SEQ ID NO: 831604 - protein, 259 aa, Homo sapiens; identical to SEQ ID NO: 831589

SEQ ID NO: 831605 - protein, 385 aa, Homo sapiens
VLWVWLAPRSRGQLWGAGVWDEGLGSRQGWGLGLGPGPAWVWGQGRVGVWGWGRDLKLGLGLGLGLRPRPGFGVWGPPGAPTVPPPRSPEREEVPQQAAAGALPGRLHGPEHLRLPHGQDADEQDEQEPPARALRLLQPGQGQARPEHGAARAPDGVHLQAAGDQDYQPPQQQGQERPAEGGGPAAPESRSVTQAGVQWQDLNSLQPLPPGFNWVQVILPPQPHKKLGFQLFWEKKLSGLNAFDIAEELVKTMDLPKGLQGVGPGCTDETLLSAIASALHTSTMPITGQLSAAVEKNPGVWLNTTQPLCKAFMVTDEDIRKQEELVQQVRKRLEEALMADMLAHVEELARDGEAPLDKACAEDDDEEDEEEEEEEPDPDPEMEHV

SEQ ID NO: 831606 - protein, 192 aa, Homo sapiens
RRPNKYRLGRGLGGLIGRGPSNKVKSDPQKAVDQPRQLFWEKKLSGLNAFDIAEELVKTMDLPKGLQGVGPGCTDETLLSAIASALHTSTMPITGQLSAAVEKNPGVWLNTTQPLCKAFMVTDEDIRKQEELVQQVRKRLEEALMADMLAHVEELARDGEAPLDKACAEDDDEEDEEEEEEEPDPDPEMEHV

SEQ ID NO: 831607 - protein, 137 aa, Homo sapiens
ASQQASARYRPGWFNRPRQDETLLSAIASALHTSTMPITGQLSAAVEKNPGVWLNTTQPLCKAFMVTDEDIRKQEELVQQVRKRLEEALMADMLAHVEELARDGEAPLDKACAEDDDEEDEEEEEEEPDPDPEMEHV

SEQ ID NO: 831608 - protein, 202 aa, Homo sapiens
LRLVRARVYFGRGSWPVTGRRRWTRPALRTTTRKTRRRRRRSPTRTRRWSTSRAEALPRARAACWSRLQTRSSAPREPGSAAKPSLGDTQEEGRAPGSLLGPSPLPGASGHTAGAAPTRKTLHARPLQSPASGSAGCSWALPGSLRPLGSRPAPPHARCPSSLRLESSQQVPGSSAPRLADSWEGFSVWRRSFETHITHCAA

SEQ ID NO: 831609 - protein, 209 aa, Homo sapiens
MDLSTFDFRTGKMLMSKMNKSRQRVRYDSSNQVKGKPDLNTALPVRQTASIFKQPVTKITNHPSNKVKSDPQKAVDQPRQLFWEKKLSGLNAFDIAEELVKTMDLPKGLQGVGPGCTDETLLSAIASALHTSTMPITGQLSAAVEKNPGVWLNTTQPLCKAFMVTDEDIRKQEELVQQVRKRSSPCPLSQLLETGEQPAGARQLGATAC

SEQ ID NO: 831610 - protein, 259 aa, Homo sapiens; identical to SEQ ID NO: 831589

SEQ ID NO: 831611 - protein, 235 aa, Homo sapiens; identical to SEQ ID NO: 831590

SEQ ID NO: 831612 - protein, 441 aa, Homo sapiens
MLTVLHETFSQHTFLMNGLIQGVKGLLSFLSAPLIGALSDVWGRKPFLLGTVFFTCFPIPLMRISPWWYFAMISVSGVFSVTFSVIFAYVADVTQEHERSTAYGWVSATFAASLVSSPAIGAYLSASYGDSLVVLVATVVALLDICFILVAVPESLPEKMRPVSWGAQISWKQADPFASLKKVGKDSTVLLICITVFLSYLPEAGQYSSFFLYLRQVIGFGSVKIAAFIAMVGILSIVAQTAFLSILMRSLGNKNTVLLGLGFQMLQLAWYGFGSQAWMMWAAGTVAAMSSITFPAISALVSRNAESDQQGVAQGIITGIRGLCNGLGPALYGFIFYMFHVELTELGPKLNSNNVPLQGAVIPGPPFLFGACIVLMSFLVALFIPEYSKASGVQKHSNSSSGSLTNTPERGSDEDIEPLLQDSSIWELSSFEEPGNQCTEL

SEQ ID NO: 831613 - protein, 504 aa, Homo sapiens
GAAAELEEKAASEPDGGSHAGEARGRAGRGDAPGLQGFGRPSVYHAAIVIFLEFFAWGLLTTPMLTVLHETFSQHTFLMNGLIQGVKGLLSFLSAPLIGALSDVWGRKPFLLGTVFFTCFPIPLMRISPWWYFAMISVSGVFSVTFSVIFAYVADVTQEHERSTAYGWVSATFAASLVSSPAIGAYLSASYGDSLVVLVATVVALLDICFILVAVPESLPEKMRPVSWGAQISWKQADPFASLKKVGKDSTVLLICITVFLSYLPEAGQYSSFFLYLRQVIGFGSVKIAAFIAMVGILSIVAQTAFLSILMRSLGNKNTVLLGLGFQMLQLAWYGFGSQAWMMWAAGTVAAMSSITFPAISALVSRNAESDQQGVAQGIITGIRGLCNGLGPALYGFIFYMFHVELTELGPKLNSNNVPLQGAVIPGPPFLFGACIVLMSFLVALFIPEYSKASGVQKHSNSSSGSLTNTPERGSDEDIEPLLQDSSIWELSSFEEPGNQCTEL

SEQ ID NO: 831614 - protein, 213 aa, Homo sapiens [sequence omitted]

SEQ ID NO: 831615 - protein, 441 aa, Homo sapiens; identical to SEQ ID NO: 831612

SEQ ID NO: 831616 - protein, 441 aa, Homo sapiens; identical to SEQ ID NO: 831612

SEQ ID NO: 831617 - protein, 166 aa, Homo sapiens
MLTVLHETFSQHTFLMNGLIQGVKGLLSFLSAPLIGALSDVWGRKPFLLGTVFFTCFPIPLMRISPWWYFAMISVSGVFSVTFSVIFACRHACFTFGFGYDAQFLIQPLTRSAVLTEQMTALRRQANSECCTFFYQHHVVLAVDQVLTYCRDLDVNLSFITQLLYH

SEQ ID NO: 831618 - protein, 282 aa, Homo sapiens
MRPVSWGAQISWKQADPFASLKKVGKDSTVLLICITVFLSYLPEAGQYSSFFLYLRQVIGFGSVKIAAFIAMVGILSIVAQTAFLSILMRSLGNKNTVLLGLGFQMLQLAWYGFGSQAWMMWAAGTVAAMSSITFPAISALVSRNAESDQQGVAQGIITGIRGLCNGLGPALYGFIFYMFHVELTELGPKLNSNNVPLQGAVIPGPPFLFGACIVLMSFLVALFIPEYSKASGVQKHSNSSSGSLTNTPERGSDEDIEPLLQDSSIWELSSFEEPGNQCTEL

SEQ ID NO: 831619 - protein, 289 aa, Homo sapiens [sequence omitted]

SEQ ID NO: 831620 - protein, 311 aa, Homo sapiens
MLTVLHETFSQHTFLMNGLIQGVKGLLSFLSAPLIGALSDVWGRKPFLLGTVFFTCFPIPLMRISPWWYFAMISVSGVFSVTFSVIFAYVADVTQEHERSTAYGWVSATFAASLVSSPAIGAYLSASYGDSLVVLVATVVALLDICFILVAVPESLPEKMRPVSWGAQISWKQADPFASLKKVGKDSTVLLICITVFLSYLPEAGQYSSFFLYLRQVIGFGSVKIAAFIAMVGILSIVAQTAFLSILMRSLGNKNTVLLGLGFQMLQLAWYGFGSQAWSCPGDHNWNKRTMQWPGASTVWLHILHVPCGTD

SEQ ID NO: 831621 - protein, 552 aa, Homo sapiens
MGQNNVTFFFFEMESHFVAQAGIQWHNLGSLQPLHSRFKLVSCLSLLSSWDYRHTPPRPANFLYFYRDGVSPCWSGWSRTADLMIRLPWPPKVLEITGVSHCTQPQNNVTFKKLDISSLKSCRHFGDTVTVRGLEIIARLLWLLIRITMGAFKTYLCPGHTAREPDLTGLQWSSSISLLSFPCSPYPLSFAYIIDFNVQAKLRATGFANEQCCIGSIKSQSFCFIFYYLIPYLSTCGLGMERVYKTTGRHIIENVYKTFHNLSCACLERFLTSVLDINYWLYRFSFQHVLICHWFYEFSRLIIVIEHNISYYFIISILLKCFHFISMVIGFGSVKIAAFIAMVGILSIVAQTAFLSILMRSLGNKNTVLLGLGFQMLQLAWYGFGSQAWMMWAAGTVAAMSSITFPAISALVSRNAESDQQGVAQGIITGIRGLCNGLGPALYGFIFYMFHVELTELGPKLNSNNVPLQGAVIPGPPFLFGACIVLMSFLVALFIPEYSKASGVQKHSNSSSGSLTNTPERGSDEDIEPLLQDSSIWELSSFEEPGNQCTEL

SEQ ID NO: 831622 - protein, 441 aa, Homo sapiens; identical to SEQ ID NO: 831612

SEQ ID NO: 831623 - protein, 441 aa, Homo sapiens; identical to SEQ ID NO: 831612

SEQ ID NO: 831624 - protein, 968 aa, Homo sapiens
MVLGCELSGSTRVVVGVEALLTGASSPLPGVGPANKHKPWIEAEYQGIVMENDNTVLLNPPLFALDKDAPLRYAGEICGFRLHGSGVPFEAVILDKATGEGLIRAKEPVDCEAQKEHTFTIQAYDCGEGPDGANTKKSHKATVHVRVNDVNEFAPVFVERLYRAAVTEGKLYDRILRVEAIDGDCSPQYSQICYYEILTPNTPFLIDNDGNIENTEKLQYSGERLYKFTVTAYDCGKKRAADDAEVEIQVKPTCKPSWQGWNKRIEYAPGAGSLALFPGIRLETCDEPLWNIQATIELQTSHVAKGCDRDNYSERALRKLCGAATGEVDLLPMPGPNANWTAGLSVHYSQDSSLIYWFNGTQAVQVPLGGPSGLGSGPQDSLSDHFTLSFWMKHGVTPNKGKKEEETIVCNTVQNEDGFSHYSLTVHGCRIAFLYWPLLESARPVKFLWKLEQVCDDEWHHYALNLEFPTVTLYTDGISFDPALIHDNGLIHPPRREPALMIGACWTEEKNKEKEKGDNSTDTTQGDPLSIHHYFHGYLAGFSVRSGRLESREVIECLYACREGLDYRDFESLGKGMKVHVNPSQSLLTLEGDDVETFNHALQHVAYMNTLRFATPGVRPLRLTTAVKCFSEESCVSIPEVEGYVVVLQPDAPQILLSGTAHFARPAVDFEGTNGVPLFPDLQITCSISHQVEAKKDESWQGTVTDTRMSDEIVHNLDGCEISLVGDDLDPERESLLLDTTSLQQRGLELTNTSAYLTIAGVESITVYEEILRQARYRLRHGAALYTRKFRLSCSEMNGRYSSNEFIVEVNVLHSMNRVAHPSHVLSSQQFLHRGHQPPPEMAGHSLASSHRNSMIPSAATLIIVVCVGFLVLMVVLGLVRIHSLHRRVSGAGGPPGASSDPKDPDLFWDDSALTIIVNPMESYQNRQSCVTGAVGGQQEDEDSSDSEVADSPSSDERRIIETPPHRY

SEQ ID NO: 831625 - protein, 158 aa, Homo sapiens
ESSWYHHLKTVAERALRKLCGAATGEVDLLPMPGPNANWTAGLSVHYSQDSSLIYWFNGTQAVQVPLGGPSGLGSGPQDSLSDHFTLSFWMKHGVTPNKGKKEEETIVCNTVQNEDGFSHYSLTVHGCRIAFLYWPLLESARPVKFLWKLEQADHKDQ

SEQ ID NO: 831626 - protein, 956 aa, Homo sapiens
MTLLLLPLLLASLLASCSCNKANKHKPWIEAEYQGIVMENDNTVLLNPPLFALDKDAPLRYAGEICGFRLHGSGVPFEAVILDKATGEGLIRAKEPVDCEAQKEHTFTIQAYDCGEGPDGANTKKSHKATVHVRVNDVNEFAPVFVERLYRAAVTEGKLYDRILRVEAIDGDCSPQYSQICYYEILTPNTPFLIDNDGNIENTEKLQYSGERLYKFTVTAYDCGKKRAADDAEVEIQVKPTCKPSWQGWNKRIEYAPGAGSLALFPGIRLETCDEPLWNIQATIELQTSHVAKGCDRDNYSERALRKLCGAATGEVDLLPMPGPNANWTAGLSVHYSQDSSLIYWFNGTQAVQVPLGGPSGLGSGPQDSLSDHFTLSFWMKHGVTPNKGKKEEETIVCNTVQNEDGFSHYSLTVHGCRIAFLYWPLLESARPVKFLWKLEQVCDDEWHHYALNLEFPTVTLYTDGISFDPALIHDNGLIHPPRREPALMIGACWTEEKNKEKEKGDNSTDTTQGDPLSIHHYFHGYLAGFSVRSGRLESREVIECLYACREGLDYRDFESLGKGMKVHVNPSQSLLTLEGDDVETFNHALQHVAYMNTLRFATPGVRPLRLTTAVKCFSEESCVSIPEVEGYVVVLQPDAPQILLSGTAHFARPAVDFEGTNGVPLFPDLQITCSISHQVEAKKDESWQGTVTDTRMSDEIVHNLDGCEISLVGDDLDPERESLLLDTTSLQQRGLELTNTSAYLTIAGVESITVYEEILRQARYRLRHGAALYTRKFRLSCSEMNGRYSSNEFIVEVNVLHSMNRVAHPSHVLSSQQFLHRGHQPPPEMAGHSLASSHRNSMIPSAATLIIVVCVGFLVLMVVLGLVRIHSLHRRVSGAGGPPGASSDPKDPDLFWDDSALTIIVNPMESYQNRQSCVTGAVGGQQEDEDSSDSEVADSPSSDERRIIETPPHRY

SEQ ID NO: 831627 - protein, 967 aa, Homo sapiens
PEHQGGALMEVEMGGGEERADCLSLRDRWAGSLLFWLSVGIPACSFLAYGCTVSRLYLGVQYKAVSRCAHIEAVCWCTVLRLYLGVRYRTCPSMCRIKAVSDVPYRGCTSVCCIKAVSQCIMSRLAAVSSSLLLSGICRATVHVRVNDVNEFAPVFVERLYRAAVTEGKLYDRILRVEAIDGDCSPQYSQICYYEILTPNTPFLIDNDGNIENTEKLQYSGERLYKFTVTAYDCGKKRAADDAEVEIQVKPTCKPSWQGWNKRIEYAPGAGSLALFPGIRLETCDEPLWNIQATIELQTSHVAKGCDRDNYSERALRKLCGAATGEVDLLPMPGPNANWTAGLSVHYSQDSSLIYWFNGTQAVQVPLGGPSGLGSGPQDSLSDHFTLSFWMKHGVTPNKGKKEEETIVCNTVQNEDGFSHYSLTVHGCRIAFLYWPLLESARPVKFLWKLEQVCDDEWHHYALNLEFPTVTLYTDGISFDPALIHDNGLIHPPRREPALMIGACWTEEKNKEKEKGDNSTDTTQGDPLSIHHYFHGYLAGFSVRSGRLESREVIECLYACREGLDYRDFESLGKGMKVHVNPSQSLLTLEGDDVETFNHALQHVAYMNTLRFATPGVRPLRLTTAVKCFSEESCVSIPEVEGYVVVLQPDAPQILLSGTAHFARPAVDFEGTNGVPLFPDLQITCSISHQVEAKKDESWQGTVTDTRMSDEIVHNLDGCEISLVGDDLDPERESLLLDTTSLQQRGLELTNTSAYLTIAGVESITVYEEILRQARYRLRHGAALYTRKFRLSCSEMNGRYSSNEFIVEVNVLHSMNRVAHPSHVLSSQQFLHRGHQPPPEMAGHSLASSHRNSMIPSAATLIIVVCVGFLVLMVVLGLVRIHSLHRRVSGAGGPPGASSDPKDPDLFWDDSALTIIVNPMESYQNRQSCVTGAVGGQQEDEDSSDSEVADSPSSDERRIIETPPHRY

SEQ ID NO: 831628 - protein, 468 aa, Homo sapiens [sequence omitted]

SEQ ID NO: 831629 - protein, 364 aa, Homo sapiens
MHGGQGCAPMWGVVTQLPVRALGLEVRVWGLCLHLLSLGLRAFLLFFLVLLRELCVCVQEAGRAVLMAARSVALTAHVCSVYVFLQGVAWSAQLVGSWVMLHIWLYRALLETPRRVPLLPQCEQAARWLVWASMQAGKGLAQVWGVATFVQLCAHTVFLSMYLCMHICFAAISSKVRVRVNAPFCVSVPLKVHAPLSLGIKVGLQGQKHGRATGEAGMPQGEMLGKQEPQTSRSPKPTRRREVSRSELSPVIPSAATLIIVVCVGFLVLMVVLGLVRIHSLHRRVSGAGGPPGASSDPKDPDLFWDDSALTIIVNPMESYQNRQSCVTGAVGGQQEDEDSSDSEVADSPSSDERRIIETPPHRY

SEQ ID NO: 831630 - protein, 956 aa, Homo sapiens; identical to SEQ ID NO: 831626

SEQ ID NO: 831631 - protein, 267 aa, Homo sapiens
MTLLLLPLLLASLLASCSCNKANKHKPWIEAEYQGIVMENDNTVLLNPPLFALDKDAPLRYAGEICGFRLHGSGVPFEAVILDKATGEGLIRAKEPVDCEAQKEHTFTIQAYDCGEGPDGANTKKSHKATVHVRVNDVNEFAPVFVERLYRAAVTEGKLYDRILRVEAIDGDCSPQYSQICYYEILTPNTPFLIDNDGNIENTEKLQYSGERLYKFTVTAYDCGKKRAADDAEVEIQVKPTCKPSWQGWNKRIEYAPGAGSLALFPV

SEQ ID NO: 831632 - protein, 364 aa, Homo sapiens; identical to SEQ ID NO: 831629

SEQ ID NO: 831633 - protein, 254 aa, Homo sapiens
MTLLLLPLLLASLLASCSCNKANKHKPWIEAEYQGIVMENDNTVLLNPPLFALDKDAPLRYAGEICGFRLHGSGVPFEAVILDKATGEGLIRAKEPVDCEAQKEHTFTIQAYDCGEGPDGANTKKSHKATVHVRVNDVNEFAPVFVERLYRAAVTEGKLYDRILRVEAIDGDCSPQYSQICYYEILTPNTPFLIDNDGNIENTEKLQYSGERLYKFTVTAYDCGKKRAADDAEVEIQVKPTCKPSWQGESSALC

SEQ ID NO: 831634 - protein, 963 aa, Homo sapiens
MTLMQLGALWGGEERADCLSLRDRWAGSLLFWLSVGIPACSFLAYGCTVSRLYLGVQYKAVSRCAHIEAVCWCTVLRLYLGVRYRTCPSMCRIKAVSDVPYRGCTSVCCIKAVSQCIMSRLAAVSSSLLLSGICRATVHVRVNDVNEFAPVFVERLYRAAVTEGKLYDRILRVEAIDGDCSPQYSQICYYEILTPNTPFLIDNDGNIENTEKLQYSGERLYKFTVTAYDCGKKRAADDAEVEIQVKPTCKPSWQGWNKRIEYAPGAGSLALFPGIRLETCDEPLWNIQATIELQTSHVAKGCDRDNYSERALRKLCGAATGEVDLLPMPGPNANWTAGLSVHYSQDSSLIYWFNGTQAVQVPLGGPSGLGSGPQDSLSDHFTLSFWMKHGVTPNKGKKEEETIVCNTVQNEDGFSHYSLTVHGCRIAFLYWPLLESARPVKFLWKLEQVCDDEWHHYALNLEFPTVTLYTDGISFDPALIHDNGLIHPPRREPALMIGACWTEEKNKEKEKGDNSTDTTQGDPLSIHHYFHGYLAGFSVRSGRLESREVIECLYACREGLDYRDFESLGKGMKVHVNPSQSLLTLEGDDVETFNHALQHVAYMNTLRFATPGVRPLRLTTAVKCFSEESCVSIPEVEGYVVVLQPDAPQILLSGTAHFARPAVDFEGTNGVPLFPDLQITCSISHQVEAKKDESWQGTVTDTRMSDEIVHNLDGCEISLVGDDLDPERESLLLDTTSLQQRGLELTNTSAYLTIAGVESITVYEEILRQARYRLRHGAALYTRKFRLSCSEMNGRYSSNEFIVEVNVLHSMNRVAHPSHVLSSQQFLHRGHQPPPEMAGHSLASSHRNSMIPSAATLIIVVCVGFLVLMVVLGLVRIHSLHRRVSGAGGPPGASSDPKDPDLFWDDSALTIIVNPMESYQNRQSCVTGAVGGQQEDEDSSDSEVADSPSSDERRIIETPPHRY

SEQ ID NO: 831635 - protein, 956 aa, Homo sapiens; identical to SEQ ID NO: 831626

SEQ ID NO: 831636 - protein, 551 aa, Homo sapiens
MHGGQGCAPMWGVVTQLPVRALGLEVRVWGLCLHLLSLGLRAFLLFFLVLLRELCVCVQEAGRAVLMAARSVALTAHVCSVYVFLQGVAWSAQLVGSWVMLHIWLYRALLETPRRVPLLPQCEQAARWLVWASMQAGKGLAQVWGVATFVQLCAHTVFLSMYLCMHICFAAISSKVRVRVNAPFCVSVPLKVHAPLSLGIKVGLQGQKHGRATGEAGMPQGEMLGKQEPQTSRSPKPTRRREVSRSELSPGGEGKGLLCAPWTCPQPQVLVPSSCSQPRPGACISSCSAKPVWGPLLSLTGHWHLFPRLSGLWGRHRWNDRGRFQSLPSVLLRIGLFMTVLGRESFSSSALASLYTCLPLCLFLCLAAAPFLPFRLLPFLVGCFSSGFSRCSSLLGHRVFCPGSPSARAASFPTQPPVQVPPGVPESRSAHPRALSAVIPSAATLIIVVCVGFLVLMVVLGLVRIHSLHRRVSGAGGPPGASSDPKDPDLFWDDSALTIIVNPMESYQNRQSCVTGAVGGQQEDEDSSDSEVADSPSSDERRIIETPPHRY

SEQ ID NO: 831637 - protein, 477 aa, Homo sapiens
MTLLLLPLLLASLLASCSCNKANKHKPWIEAEYQGIVMENDNTVLLNPPLFALDKDAPLRYAGEICGFRLHGSGVPFEAVILDKATGEGLIRAKEPVDCEAQKEHTFTIQAYDCGEGPDGANTKKSHKATVHVRVNDVNEFAPVFVERLYRAAVTEGKLYDRILRVEAIDGDCSPQYSQICYYEILTPNTPFLIDNDGNIENTEKLQYSGERLYKFTVTAYDCGKKRAADDAEVEIQVKPTCKPSWQGWNKRIEYAPGAGSLALFPGIRLETCDEPLWNIQATIELQTSHVAKGCDRDNYSERALRKLCGAATGEVDLLPMPGPNANWTAGLSVHYSQDSSLIYWFNGTQAVQVPLGGPSGLGSGPQDSLSDHFTLSFWMKHGVTPFSLLSMGSFSPSAGLPQLDHRPCFSYDRPTSFPFQSGDPISPSFPTSFLSCPVSLPALAVLRSCSPGPSSVTWCGQAAGTGGDVGAPGVHI

SEQ ID NO: 831638 - protein, 537 aa, Homo sapiens
MTLLLLPLLLASLLASCSCNKANKHKPWIEAEYQGIVMENDNTVLLNPPLFALDKDAPLRYAGEICGFRLHGSGVPFEAVILDKATGEGLIRAKEPVDCEAQKEHTFTIQAYDCGEGPDGANTKKSHKATVHVRVNDVNEFAPVFVERLYRAAVTEGKLYDRILRVEAIDGDCSPQYSQICYYEILTPNTPFLIDNDGNIENTEKLQYSGERLYKFTVTAYDCGKKRAADDAEVEIQVKPTCKPSWQGWNKRIEYAPGAGSLALFPGIRLETCDEPLWNIQATIELQTSHVAKGCDRDNYSERALRKLCGAATGEVDLLPMPGPNANWTAGLSVHYSQDSSLIYWFNGTQAVQVPLGGPSGLGSGPQDSLSDHFTLSFWMKHGVTPNKGKKEEETIVCNTVQNEDGFSHYSLTVHGCRIAFLYWPLLESARPVKFLWKLEQVCDDEWHHYALNLEFPTVTLYTDGISFDPALIHDNGLIHPPRREPALMIGACWTGKLLSEDSSGSGFGKGGRLVRSKGSLTQQLRPPPASLCSCAG

SEQ ID NO: 831639 - protein, 103 aa, Homo sapiens [sequence omitted]

SEQ ID NO: 831640 - protein, 330 aa, Homo sapiens [sequence omitted]

SEQ ID NO: 831641 - protein, 723 aa, Homo sapiens
GMKRIGASTKSKDRKTEVDTSHRLSIFLELIDVHRLNGEQHEATKVLQDAIHEFSGTSEEVRVTIANADLALAQGDIERALSILQNVTAEQPYFIEAREKMADIYLKHRKDKMLYITCFREIAERMANPRSFLLLGDAYMNILEPEEAIVAYEQALNQNPKDGTLASKMGKALIKTHNYSMAITYYEAALKTGQKNYLCYDLAELLLKLKWYDKAEKVLQHALAHEPVNELSALMEDGRCQVLLAKVYSKMEKLGDAITALQQARELQARVLKRVQMEQPDAVPAQKHLAAEICAEIAKHSVAQRDYEKAIKFYREALVHCETDNKIMLELARLYLAQDDPDSCLRQCALLLQSDQDNEAATMMMADLMFRKQDYEQAVFHLQQLLERKPDNYMTLSRLIDLLRRCGKLEDVPRFFSMAEKRNSRAKLEPGFQYCKGLYLWYTGEPNDALRHFNKARKDRDWGQNALYNMIEICLNPDNETVGGEVFENLDGDLGNSTEKQESVQLAVRTAEKLLKELKPQTVQGHVQLRIMENYCLMATKQKSNVEQALNTFTEIAASEKEHIPALLGMATAYMILKQTPRARNQLKRIAKMNWNAIDAEEFEKSWLLLADIYIQSAKYDMAEDLLKRCLRHNRSCCKAYEYMGYIMEKEQAYTDAALNYEMAWKYSNRTNPAVGYKLAFNYLKAKRYVDSIDICHQVLEAHPTYPKIRKDILDKARASLRP

SEQ ID NO: 831642 - protein, 723 aa, Homo sapiens; identical to SEQ ID NO: 831641

SEQ ID NO: 831643 - protein, 81 aa, Homo sapiens
TPQVMEPSDIHATVSRTFGGPSRLITRGKEFLDTPGPHGGPPLFFKITNYPAIVAHARYPRYSGGLEREIAWTREAEVSLS

SEQ ID NO: 831644 - protein, 723 aa, Homo sapiens; identical to SEQ ID NO: 831641

SEQ ID NO: 831645 - protein, 723 aa, Homo sapiens; identical to SEQ ID NO: 831641

SEQ ID NO: 831646 - protein, 637 aa, Homo sapiens
MKRIGASTKSKDRKTEVDTSHRLSIFLELIDVHRLNGEQHEATKVLQDAIHEFSGTSEEVRVTIANADLALAQGDIERALSILQNVTAEQPYFIEAREKMADIYLKHRKDKMLYITCFREIAERMANPRSFLLLGDAYMNILEPEEAIVAYEQALNQNPKDGTLASKMGKALIKTHNYSMAITYYEAALKTGQKNYLCYDLAELLLKLKWYDKAEKVLQHALAHEPVNELSALMEDGRCQVLLAKVYSKMEKLGDAITALQQARELQARVLKRVQMEQPDAVPAQKHLAAEICAEIAKHSVAQRDYEKAIKFYREALVHCETDNKIMLELARLYLAQDDPDSCLRQCALLLQSDQDNEAATMMMADLMFRKQDYEQAVFHLQQLLERKPDNYMTLSRLIDLLRRCGKLEDVPRFFSMAEKRNSRAKLEPGFQYCKGLYLWYTGEPNDALRHFNKARKDRDWGQNALYNMIEICLNPDNETVGGEVFENLDGDLGNSTEKQESVQLAVRTAEKLLKELKPQTVQGHVQLRIMENYCLMATKQKSNVEQALNTFTEIAASEKEHIPALLGMATAYMILKQTPRARNQLKRIAKMNWNAIDAEEFEKSWLLLADIYIQSAKYDMAEDLLKRCLRHNRVGD

SEQ ID NO: 831647 - protein, 491 aa, Homo sapiens
MVFGEFFHRPGQDEELVNLNVGGFKQSVDQSTLLRFPHTRLGKLLTCHSEEAILELCDDYSVADKEYYFDRNPSLFRYVLNFYYTGKLHVMEELCVFSFCQEIEYWGINELFIDSCCSNRYQERKEENHEKDWDQKSHDVSTDSSFEESSLFEKELEKFDTLRFGQLRKKIWIRMENPAYCLSAKLIAISSLSVVLASIVAMCVHSMSEFQNEDGEVDDPVLEGVEIACIAWFTGELAVRLAAAPCQKKFWKNPLNIIDFVSIIPFYATLAVDTKEEESEDIENMGKVVQILRLMRIFRILKLARHSVGLRSLGATLRHSYHEVGLLLLFLSVGISIFSVLIYSVEKDDHTSSLTSIPICWWWATISMTTVGYGDTHPVTLAGKLIASTCIICGILVVALPITIIFNKFSKYYQKQKDIDVDQCSEDAPEKCHELPYFNIRDIYAQRMHAFITSLSSVGIVVSDPDSTDASSIEDNEDICNTTSLENCTAK

SEQ ID NO: 831648 - protein, 279 aa, Homo sapiens
MVFGEFFHRPGQDEELVNLNVGGFKQSVDQSTLLRFPHTRLGKLLTCHSEEAILELCDDYSVADKEYYFDRNPSLFRYVLNFYYTGKLHVMEELCVFSFCQEIEYWGINELFIDSCCSNRYQERKEENHEKDWDQKSHDVSTDSSFEESSLFEKELEKFDTLRFGQLRKKIWIRMENPAYCLSAKLIAISSLSVVLASIVAMCVHSMSEFQNEDGEVDDPVLEGVEIACIAWFTGELAVRLAAAPCQKKFWKNPLNIIDFVSIIPFYASFCVCHLLTLS

SEQ ID NO: 831649 - protein, 491 aa, Homo sapiens; identical to SEQ ID NO: 831647

SEQ ID NO: 831650 - protein, 448 aa, Homo sapiens
MVFGEFFHRPGQDEELVNLNVGGFKQSVDQSTLLRFPHTRLGKLLTCHSEEAILELCDDYSVADKEYYFDRNPSLFRYVLNFYYTGKLHVMEELCVFSFCQEIEYWGINELFIDSCCSNRYQERKEENHEKDWDQKSHDVSTDSSFEESSLFEKELEKFDTLRFGQLRKKIWIRMENPAYCLSAKLIAISSLSVVLASIVAMCVHSMSEFQNEDGEVDDPVLEGVEIACIAWFTGELAVRLAAAPCQKKFWKNPLNIIDFVSIIPFYATLAVDTKEEESEDIENMGKVVQILRLMRIFRILKLARHSVGLRSLGATLRHSYHEVGLLLLFLSVGISIFSVLIYSVEKDDHTSSLTSIPICWWWATISMTTVGYGDTHPVTLAGKLIASTCIICGILVVALPITIIFNKFSKYYQKQKDIDVDQCSEDAPEKCHELPYFNIRDIFWNIR

SEQ ID NO: 831651 - protein, 758 aa, Homo sapiens [sequence omitted]

SEQ ID NO: 831652 - protein, 758 aa, Homo sapiens [sequence omitted]

SEQ ID NO: 831653 - protein, 758 aa, Homo sapiens [sequence omitted]

SEQ ID NO: 831654 - protein, 362 aa, Homo sapiens
MAPAMQPAEIQFAQRLASSEKGIRDRAVKKLRQYISVKTQRETGGFSQEELLKIWKGLFYCMWVQDEPLLQEELANTIAQLVHAVNNSAAQHLFIQTFWQTMNREWKGIDRLRLDKYYMLIRLVLRQSFEVLKRNGWEESRIKVFLDVLMKEVLCPESQSPNGVRFHFIDIYLDELSKVGGKELLADQNLKFIDPFCKIAAKTKDHTLVQTIARGVFEAIVDQSPFVPEETMEEQKTKVGDGDLSAEEIPENEVSLRRAVSKKKTALGKNHSRKDGLSDERGRDDCGTFEDTGPLLQFDYKAVADRLLEMTSRKNTPHFNRKRLSKLIKKFQDLSEGSSISQLSFAEDISADEDDQILSQGS

SEQ ID NO: 831655 - protein, 152 aa, Homo sapiens
MAPAMQPAEIQFAQRLASSEKGIRDRAVKKLRQYISVKTQRETGGFSQEELLKIWKGLFYCMWVQDEPLLQEELANTIAQLVHAVNNSAAQHLFIQTFWQTMNREWKGIDRLRLDKYYMLIRLVLRQSFEVLKRNGWEESRKMIMGTAIVVM

SEQ ID NO: 831656 - protein, 738 aa, Homo sapiens
MAPAMQPAEIQFAQRLASSEKGIRDRAVKKLRQYISVKTQRETGGFSQEELEELANTIAQLVHAVNNSAAQHLFIQTFWQTMNREWKGIDRLRLDKYYMLIRLVLRQSFEVLKRNGWEESRIKVFLDVLMKEVLCPESQSPNGVRFHFIDIYLDELSKVGGKELLADQNLKFIDPFCKIAAKTKDHTLVQTIARGVFEAIVDQSPFVPEETMEEQKTKVGDGDLSAEEIPENEVSLRRAVSKKKTALGKNHSRKDGLSDERGRDDCGTFEDTGPLLQFDYKAVADRLLEMTSRKNTPHFNRKRLSKLIKKFQDLSEGSSISQLSFAEDISADEDDQILSQGKHKKKGNKLLEKTNLEKEKGSRVFCVEEEDSESSLQKRRRKKKKKHHLQPENPGPGGAAPSLEQNRGREPEASGPKALKARVAEPGAEATSSTGEESGSEHPPAVPMHNKRKRPRKKSPRAHREMLESAVLPPEDMSQSGPSGSHPQGPRGSPTGGAQLLKRKRKLGVVPVNGSGLSTPAWPPLQQEGPPTGPAEGANSHTTLPQRRRLQKKKAGPGSLELCGLPSQKTASLKKRKKMRVMSNLVEHNGVLESEAGQPQALGSSGTCSSLKKQKLRAESDFVKFDTPFLPKPLFFRRAKSSTATHPPGPAVQLNKTPSSSKKVTFGLNRNMTAEFKKTDKSILVSPTGPSRVAFDPEQKPLHGVLKTPTSSPASSPLVAKKPLTTTPRRRPRAMDFF

SEQ ID NO: 831657 - protein, 141 aa, Homo sapiens
MPPIQEPRFFSKTRPVPFSTAASQQRAPGSPRSQLWLWTTWLRPLGLQSLHWVYLGLIHSWSQGWGFTCEHQTDLLASRAVDSLMKALVRRKHSVLRLLCNRFVIMSHEKSNELVLLIVTVMRSLTYNIAVVAAWFNGCIR

SEQ ID NO: 831658 - protein, 76 aa, Homo sapiens
RRFHRPSWHGAMIAVVLCVKPELCRMEGLSASAVRKTAGRRVGWICLGLCLPLLCVWAAQEALSSDPSSASHPSLT

SEQ ID NO: 831659 - protein, 400 aa, Homo sapiens
MLSNSQGQSPPVPFPAPAPPPQPPTPALPHPPAQPPPPPPQQFPQFHVKSGLQIKKNAIIDDYKVTSQVLGLGINGKVLQIFNKRTQEKFALKMLQDCPKARREVELHWRASQCPHIVRIVDVYENLYAGRKCLLIVMECLDGGELFSRIQDRGDQAFTEREASEIMKSIGEAIQYLHSINIAHRDVKPENLLYTSKRPNAILKLTDFGFAKETTSHNSLTTPCYTPYYVAPEVLGPEKYDKSCDMWSLGVIMYILLCGYPPFYSNHGLAISPGMKTRIRMGQYEFPNPEWSEVSEEVKMLIRNLLKTEPTQRMTITEFMNHPWIMQSTKVPQTPLHTSRVLKEDKERWEDVKEEMTSALATMRVDYEQIKIKKIEDASNPLLLKRRKKARALEAAALAH

SEQ ID NO: 831660 - protein, 370 aa, Homo sapiens
MLSNSQGQSPPVPFPAPAPPPQPPTPALPHPPAQPPPPPPQQFPQFHVKSGLQIKKNAIIDDYKVTSQVLGLGINGKVLQIFNKRTQEKFALKMLQDCPKARREVELHWRASQCPHIVRIVDVYENLYAGRKCLLIVMECLDGGELFSRIQDRGDQAFTEREASEIMKSIGEAIQYLHSINIAHRDVKPENLLYTSKRPNAILKLTDFGFAKETTSHNSLTTPCYTPYYVAPEVLGPEKYDKSCDMWSLGVIMYILLCGYPPFYSNHGLAISPGMKTRIRMGQYEFPNPEWSEVSEEVKMLIRNLLKTEPTQRMTITEFMNHPWIMQSTKVPQTPLHTSRVLKEDKERWEDVKGCLHDKNSDQATWLTRL

SEQ ID NO: 831661 - protein, 491 aa, Homo sapiens
MSQTGEKKKKSGRFPPAGPPPPRGPQSARPPGGGREGAGPVGASGARWDPRSPATRRAWSRAGSGKPAPARSELRSPSGGGGEGARSRRRGRPRAPPPVPRRPRAPCCPTPRARARRCRSPPRPRRRPPPPQQFPQFHVKSGLQIKKNAIIDDYKVTSQVLGLGINGKVLQIFNKRTQEKFALKMLQDCPKARREVELHWRASQCPHIVRIVDVYENLYAGRKCLLIVMECLDGGELFSRIQDRGDQAFTEREASEIMKSIGEAIQYLHSINIAHRDVKPENLLYTSKRPNAILKLTDFGFAKETTSHNSLTTPCYTPYYVAPEVLGPEKYDKSCDMWSLGVIMYILLCGYPPFYSNHGLAISPGMKTRIRMGQYEFPNPEWSEVSEEVKMLIRNLLKTEPTQRMTITEFMNHPWIMQSTKVPQTPLHTSRVLKEDKERWEDVKEEMTSALATMRVDYEQIKIKKIEDASNPLLLKRRKKARALEAAALAH

SEQ ID NO: 831662 - protein, 400 aa, Homo sapiens; identical to SEQ ID NO: 831659

SEQ ID NO: 831663 - protein, 263 aa, Homo sapiens
MEGLDGGELFSRIQDRGDQAFTEREASEIMKSIGEAIQYLHSINIAHRDVKPENLLYTSKRPNAILKLTDFGFAKETTSHNSLTTPCYTPYYVAPEVLGPEKYDKSCDMWSLGVIMYILLCGYPPFYSNHGLAISPGMKTRIRMGQYEFPNPEWSEVSEEVKMLIRNLLKTEPTQRMTITEFMNHPWIMQSTKVPQTPLHTSRVLKEDKERWEDVKEEMTSALATMRVDYEQIKIKKIEDASNPLLLKRRKKARALEAAALAH

SEQ ID NO: 831664 - protein, 359 aa, Homo sapiens
MLSNSQGQSPPVPFPAPAPPPQPPTPALPHPPAQPPPPPPQQFPQFHVKSGLQIKKNAIIDDYKVTSQVLGLGINGKVLQIFNKRTQEKFALKMLQDCPKARREVELHWRASQCPHIVRIVDVYENLYAGRKCLLIVMECLDGGELFSRIQDRGDQAFTEREASEIMKSIGEAIQYLHSINIAHRDVKPENLLYTSKRPNAILKLTDFGFAKETTSHNSLTTPCYTPYYVAPEVLGPEKYDKSCDMWSLGVIMYILLCGYPPFYSNHGLAISPGMKTRIRMGQYEFPNPEWSEVSEEVKMLIRNLLKTEPTQRMTITEFMNHPWIMQSTKVPQTPLHTSRVLKEDKERWEDVKVRGTTG

SEQ ID NO: 831665 - protein, 517 aa, Homo sapiens
MLSNSQGQSPPVPFPAPAPPPQPPTPALPHPPAQPPPPPPQQFPQFHVKSGLQIKKNAIIDDYKVTSQVLGLGINGKVLQIFNKRTQEKFALKMLQDCPKARREVELHWRASQCPHIVRIVDVYENLYAGRKCLLIVMECLDGGELFSRIQDRGDQAFTEREASEIMKSIGEAIQYLHSINIAHRDVKPENLLYTSKRPNAILKLTDFGFAKETTSHNSLTTPCYTPYYVAPEVLGPEKYDKSCDMWSLGVIMYILLCGYPPFYSNHGLAISPGMKTRIRMGQYEFPNPEWSEVSEEGKNPGFQDKGKSPCVCVCVYVCTRRHMYGPPSHVRGVTVGYTYAHACGVRPASFCLCGGLEAGPRLWGCAGPLKWYSRNGPWGQLLRQPASMHPLFEPGFPMKTGERSRPGRVTPELSLPPVPPHSEDAHSESAENRAHPENDHHRVYEPPLDHGFHSDPFSLFSAINKGPSNPTAHQPGPEGGQGAVGGCQGEGHHWVRGAPGGVGGLRGVPRCEAWCW

SEQ ID NO: 831666 - protein, 137 aa, Homo sapiens
MHPLFEPGFPMKTGERSRPGRVTPELHCPLSHPTVKMLIRNLLKTEPTQRMTITEFMNHPWIMQSTKVPQTPLHTSRVLKEDKERWEDVKEEMTSALATMRVDYEQIKIKKIEDASNPLLLKRRKKARALEAAALAH

SEQ ID NO: 831667 - protein, 131 aa, Homo sapiens
MSQTGEKKKKSGRFPPAGPPPPRGPQSARPPGGGREGAGPVGASGARWDPRSPATRRAWSRAGSGKPAPARSELRSPSGGGGEGARSRRRGRPRAPPPVPRRPRAPCCPTEPPRPPAHGRTSNNSLQEYIF

SEQ ID NO: 831668 - protein, 378 aa, Homo sapiens
MLSNSQGQSPPVPFPAPAPPPQPPTPALPHPPAQPPPPPPQQFPQFHVKSGLQIKKNAIIDDYKVTSQVLGLGINGKVLQIFNKRTQEKFALKMLQDCPKARREVELHWRASQCPHIVRIVDVYENLYAGRKCLLIVMECLDGGELFSRIQDRGDQAFTEREASEIMKSIGEAIQYLHSINIAHRDVKPENLLYTSKRPNAILKLTDFGFAKETTSHNSLTTPCYTPYYVAPEVLGPEKYDKSCDMWSLGVIMYILLCGYPPFYSNHGLAISPGMKTRIRMGQYEFPNPEWSEVSEEVKMLIRNLLKTEPTQRMTITEFMNHPWIMQSTKVPQTPLHTSRVLKEDKERWEDVKRGVTGHWHCDQEDWTPSPQGPPPPT

SEQ ID NO: 831669 - protein, 387 aa, Homo sapiens
MLSNSQGQSPPVPFPAPAPPPQPPTPALPHPPAQPPPPPPQQFPQFHVKSGLQIKKNAIIDDYKVTSQVLGLGINGKVLQIFNKRTQEKFALKMLQDCPKARREVELHWRASQCPHIVRIVDVYENLYAGRKCLLIVMECLDGGELFSRIQDRGDQAFTEREASEIMKSIGEAIQYLHSINIAHRDVKPENLLYTSKRPNAILKLTDFGFAKETTSHNSLTTPCYTPYYVAPEVLGPEKYDKSCDMWSLGVIMYILLCGYPPFYSNHGLAISPGMKTRIRMGQYEFPNPEWSEVSEEVKMLIRNLLKTEPTQRMTITEFMNHPWIMQSTKVPQTPLHTSRVLKEDKERWEDVKEEMTSALATMRVDYEQIKIKKIEDAPSTDEEQLG

SEQ ID NO: 831670 - protein, 70 aa, Homo sapiens
KLGRLGSLGSHGTIPQDRVLARTLPQAFTRTPFLSSQQSTKVPQTPLHTSRVLKEDKERWEDVKVRGTTG

SEQ ID NO: 831671 - protein, 400 aa, Homo sapiens; identical to SEQ ID NO: 831659

SEQ ID NO: 831672 - protein, 400 aa, Homo sapiens; identical to SEQ ID NO: 831659

SEQ ID NO: 831673 - protein, 370 aa, Homo sapiens; identical to SEQ ID NO: 831660

SEQ ID NO: 831674 - protein, 234 aa, Homo sapiens
MKSIGEAIQYLHSINIAHRDVKPENLLYTSKRPNAILKLTDFGFAKETTSHNSLTTPCYTPYYVAPEVLGPEKYDKSCDMWSLGVIMYILLCGYPPFYSNHGLAISPGMKTRIRMGQYEFPNPEWSEVSEEVKMLIRNLLKTEPTQRMTITEFMNHPWIMQSTKVPQTPLHTSRVLKEDKERWEDVKEEMTSALATMRVDYEQIKIKKIEDASNPLLLKRRKKARALEAAALAH

SEQ ID NO: 831675 - protein, 525 aa, Homo sapiens
MLSNSQGQSPPVPFPAPAPPPQPPTPALPHPPAQPPPPPPQQFPQFHVKSGLQIKKNAIIDDYKVTSQVLGLGINGKVLQIFNKRTQEKFALKMLQDCPKARREVELHWRASQCPHIVRIVDVYENLYAGRKCLLIVMECLDGGELFSRIQDRGDQAFTEREASEIMKSIGEAIQYLHSINIAHRDVKPENLLYTSKRPNAILKLTDFGFAKETTSHNSLTTPCYTPYYVAPEVLGPEKYDKSCDMWSLGVIMYILLCGYPPFYSNHGLAISPGMKTRIRMGQYEFPNPEWSEVSEEGKNPGFQDKGKSPCVCVCVYVCTRRHMYGPPSHVRGVTVGYTYAHACGVRPASFCLCGGLEAGPRLWGCAGPLKWYSRNGPWGQLLRQPASMHPLFEPGFPMKTGERSRPGRVTPELHCPLSHPTVKMLIRNLLKTEPTQRMTITEFMNHPWIMQSTKVPQTPLHTSRVLKEDKERWEDVKEEMTSALATMRVDYEQIKIKKIEDASNPLLLKRRKKARALEAAALAH

SEQ ID NO: 831676 - protein, 126 aa, Homo sapiens
  misc_feature (9)..(9): Xaa can be any naturally occurring amino acid
RRLVRPGYXDIVDQGVADAWAEEVKMLIRNLLKTEPTQRMTITEFMNHPWIMQSTKVPQTPLHTSRVLKEDKERWEDVKEEMTSALATMRVDYEQIKIKKIEDASNPLLLKRRKKARALEAAALAH

SEQ ID NO: 831677 - protein, 400 aa, Homo sapiens; identical to SEQ ID NO: 831659

SEQ ID NO: 831678 - protein, 381 aa, Homo sapiens
MLSNSQGQSPPVPFPAPAPPPQPPTPALPHPPAQPPPPPPQQFPQFHVKSGLQIKKNAIIDDYKVTSQVLGLGINGKVLQIFNKRTQEKFALKMLQDCPKARREVELHWRASQCPHIVRIVDVYENLYAGRKCLLIVMECLDGGELFSRIQDRGDQAFTEREASEIMKSIGEAIQYLHSINIAHRDVKPENLLYTSKRPNAILKLTDFGFAKETTSHNSLTTPCYTPYYVAPEVLGPEKYDKSCDMWSLGVIMYILLCGYPPFYSNHGLAISPGMKTRIRMGQYEFPNPEWSEVSEEVKMLIRNLLKTEPTQRMTITEFMNHPWIMQSTKVPQTPLHTSRVLKEDKERWEDVKRGVTGHWHCDQEDWTPSPPPSTDEEQLG

SEQ ID NO: 831679 - protein, 158 aa, Homo sapiens
MLSNSQGQSPPVPFPAPAPPPQPPTPALPHPPAQPPPPPPQQFPQFHVKSGLQIKKNAIIDDYKVTSQVLGLGINGKVLQIFNKRPPLPLPLEGEVAGILHLSSPSGAGGGGAPRVVFVYGGRRWVPAAPPLSQMVCPALDCCKLLFCMSEIVFTKQI

SEQ ID NO: 831680 - protein, 651 aa, Homo sapiens
MKPGKPKADAKKVPKKPEEITPENHVEGTARLVTDTAEILSRLGGVELLQDTLGHVMPSVQLPPNINLVPKVPVPLNTTKYNSALDTNATMINSFNKFPYPTQAELSWLTAASKHPEEHIRIWFATQRLKHGISWSPEEVEEARKKMFNGTIQSVPPTITVLPAQLAPTKVTQPILQTALPCQILGQTSLVLTQVTSGSTTVSCSPITLAVAGVTNHGQKRPLVTPQAAPEPKRPHIAQVPEPPPKVANPPLTPASDRKKTKEQIAHLKASFLQSQFPDDAEVYRLIEVTGLARSEIKKWFSDHRYRCQRGIVHITSESLAKDQLAIAASRHGRTYHAYPDFAPQKFKEKTQGQVKILEDSFLKSSFPTQAELDRLRVETKLSRREIDSWFSERRKLRDSMEQAVLDSMGSGKKGQDVGAPNGALSRLDQLSGAQLTSSLPSPSPAIAKSQEQVHLLRSTFARTQWPTPQEYDQLAAKTGLVRTEIVRWFKENRCLLKTGTVKWMEQYQHQPMADDHGYDAVARKATKPMAESPKNGGDVVPQYYKDPKKLCEEDLEKLVTRVKVGSEPAKDCLPAKPSEATSDRSEGSSRDGQGSDENEESSVVDYVEVTVGEEDAISDRSDSWSQAAAEGVSELAESDSDCVPAEAGQA

SEQ ID NO: 831681 - protein, 768 aa, Homo sapiens
STHTNHHHTLRKPNRTTQCRTLFPILHPSRIPTTAGSTSLYPKHHRLTKLLNYPSLSDHNSKFHPGEANFKLKLIKRNNQTVLEQSIETTNHVVSITTSGPGTGDSDSGISVSKTPIMKPGKPKADAKKVPKKPEEITPENHVEGTARLVTDTAEILSRLGGVELLQDTLGHVMPSVQLPPNINLVPKVPVPLNTTKYNSALDTNATMINSFNKFPYPTQAELSWLTAASKHPEEHIRIWFATQRLKHGISWSPEEVEEARKKMFNGTIQSVPPTITVLPAQLAPTKVTQPILQTALPCQILGQTSLVLTQVTSGSTTVSCSPITLAVAGVTNHGQKRPLVTPQAAPEPKRPHIAQVPEPPPKVANPPLTPASDRKKTKEQIAHLKASFLQSQFPDDAEVYRLIEVTGLARSEIKKWFSDHRYRCQRGIVHITSESLAKDQLAIAASRHGRTYHAYPDFAPQKFKEKTQGQVKILEDSFLKSSFPTQAELDRLRVETKLSRREIDSWFSERRKLRDSMEQAVLDSMGSGKKGQDVGAPNGALSRLDQLSGAQLTSSLPSPSPAIAKSQEQVHLLRSTFARTQWPTPQEYDQLAAKTGLVRTEIVRWFKENRCLLKTGTVKWMEQYQHQPMADDHGYDAVARKATKPMAESPKNGGDVVPQYYKDPKKLCEEDLEKLVTRVKVGSEPAKDCLPAKPSEATSDRSEGSSRDGQGSDENEESSVVDYVEVTVGEEDAISDRSDSWSQAAAEGVSELAESDSDCVPAEAGQA

SEQ ID NO: 831682 - protein, 837 aa, Homo sapiens
MASKRKSTTPCMVRTSQVVEQDVPEEVDRAKEKGIGTPQPDVAKDSWAAELENSSKENEVIEVKSMGESQSKKLQGGYECKYCPYSTQNLNEFTEHVDMQHPNVILNPLYVCAECNFTTKKYDSLSDHNSKFHPGEANFKLKLIKRNNQTVLEQSIETTNHVVSITTSGPGTGDSDSGISVSKTPIMKPGKPKADAKKVPKKPEEITPENHVEGTARLVTDTAEILSRLGGVELLQDTLGHVMPSVQLPPNINLVPKVPVPLNTTKYNSALDTNATMINSFNKFPYPTQAELSWLTAASKHPEEHIRIWFATQRLKHGISWSPEEVEEARKKMFNGTIQSVPPTITVLPAQLAPTKVTQPILQTALPCQILGQTSLVLTQVTSGSTTVSCSPITLAVAGVTNHGQKRPLVTPQAAPEPKRPHIAQVPEPPPKVANPPLTPASDRKKTKEQIAHLKASFLQSQFPDDAEVYRLIEVTGLARSEIKKWFSDHRYRCQRGIVHITSESLAKDQLAIAASRHGRTYHAYPDFAPQKFKEKTQGQVKILEDSFLKSSFPTQAELDRLRVETKLSRREIDSWFSERRKLRDSMEQAVLDSMGSGKKGQDVGAPNGALSRLDQLSGAQLTSSLPSPSPAIAKSQEQVHLLRSTFARTQWPTPQEYDQLAAKTGLVRTEIVRWFKENRCLLKTGTVKWMEQYQHQPMADDHGYDAVARKATKPMAESPKNGGDVVPQYYKDPKKLCEEDLEKLVTRVKVGSEPAKDCLPAKPSEATSDRSEGSSRDGQGSDENEESSVVDYVEVTVGEEDAISDRSDSWSQAAAEGVSELAESDSDCVPAEAGQA

SEQ ID NO: 831683 - protein, 837 aa, Homo sapiens; identical to SEQ ID NO: 831682

SEQ ID NO: 831684 - protein, 652 aa, Homo sapiens
RAQSCPCILYLCKLCPKPEEITPENHVEGTARLVTDTAEILSRLGGVELLQDTLGHVMPSVQLPPNINLVPKVPVPLNTTKYNSALDTNATMINSFNKFPYPTQAELSWLTAASKHPEEHIRIWFATQRLKHGISWSPEEVEEARKKMFNGTIQSVPPTITVLPAQLAPTKVTQPILQTALPCQILGQTSLVLTQVTSGSTTVSCSPITLAVAGVTNHGQKRPLVTPQAAPEPKRPHIAQVPEPPPKVANPPLTPASDRKKTKEQIAHLKASFLQSQFPDDAEVYRLIEVTGLARSEIKKWFSDHRYRCQRGIVHITSESLAKDQLAIAASRHGRTYHAYPDFAPQKFKEKTQGQVKILEDSFLKSSFPTQAELDRLRVETKLSRREIDSWFSERRKLRDSMEQAVLDSMGSGKKGQDVGAPNGALSRLDQLSGAQLTSSLPSPSPAIAKSQEQVHLLRSTFARTQWPTPQEYDQLAAKTGLVRTEIVRWFKENRCLLKTGTVKWMEQYQHQPMADDHGYDAVARKATKPMAESPKNGGDVVPQYYKDPKKLCEEDLEKLVTRVKVGSEPAKDCLPAKPSEATSDRSEGSSRDGQGSDENEESSVVDYVEVTVGEEDAISDRSDSWSQAAAEGVSELAESDSDCVPAEAGQA

SEQ ID NO: 831685 - protein, 189 aa, Homo sapiens
MASKRKSTTPCMVRTSQVVEQDVPEEVDRAKEKGIGTPQPDVAKDSWAAELENSSKENEVIEVKSMGESQSKKLQGGYECKYCPYSTQNLNEFTEHVDMQHPNVILNPLYVCAECNFTTKKYDSLSDHNSKFHPGEANFKLKLIKRNNQTVLEQSIETTNQMCPLYMRDGVSEPRNCVGTLPRSHDWSV

SEQ ID NO: 831686 - protein, 144 aa, Homo sapiens
MEFEVVKPPPSSAPARRGASVAKPRRPGLPGAALSDPARAPSGVASLNQSALSRPMQRKLVTLVNCQLVEEEGRVRAMRAARSLGERTVTELILQHQNPQQLSANLWAAVRARGCQFLGPGKIGYYLTFFISYWGLRMPISGAR

SEQ ID NO: 831687 - protein, 1191 aa, Homo sapiens
MPVQAAQWTEFLSCPICYNEFDENVHKPISLGCSHTVCKTCLNKLHRKACPFDQTAINTDIDVLPVNFALLQLVGAQVPDHQSIKLSNLGENKHYEVAKKCVEDLALYLKPLSGGKGVASLNQSALSRPMQRKLVTLVNCQLVEEEGRVRAMRAARSLGERTVTELILQHQNPQQLSANLWAAVRARGCQFLGPAMQEEALKLVLLALEDGSALSRKVLVLFVVQRLEPRFPQASKTSIGHVVQLLYRASCFKVTKRDEDSSLMQLKEEFRSYEALRREHDAQIVHIAMEAGLRISPEQWSSLLYGDLAHKSHMQSIIDKLQSPESFAKSVQELTIVLQRTGDPANLNRLRPHLELLANIDPNPDAVSPTWEQLENAMVAVKTVVHGLVDFIQNYSRKGHETPQPQPNSKYKTSMCRDLRQQGGCPRGTNCTFAHSQEELEKYRLRNKKINATVRTFPLLNKVGVNNTVTTTAGNVISVIGSTETTGKIVPSTNGISNAENSVSQLISRSTDSTLRALETVKKVGKVGANGQNAAGPSADSVTENKIGSPPKTPVSNVAATSAGPSNVGTELNSVPQKSSPFLTRVPVYPPHSENIQYFQDPRTQIPFEVPQYPQTGYYPPPPTVPAGVAPCVPRFVRSNNVPESSLPPASMPYADHYSTFSPRDRMNSSPYQPPPPQPYGPVPPVPSGMYAPVYDSRRIWRPPMYQRDDIIRSNSLPPMDVMHSSVYQTSLRERYNSLDGYYSVACQPPSEPRTTVPLPREPCGHLKTSCEEQIRRKPDQWAQYHTQKAPLVSSTLPVATQSPTPPSPLFSVDFRADFSESVSGTKFEEDHLSHYSPWSCGTIGSCINAIDSEPKDVIANSNAVLMDLDSGDVKRRVHLFETQRRTKEEDPIIPFSDGPIISKWGAISRSSRTGYHTTDPVQATASQGSATKPISVSDYVPYVNAVDSRWSSYGNEATSSAHYVERDRFIVTDLSGHRKHSSTGDLLSLELQQAKSNSLLLQREANALAMQQKWNSLDEGRHLTLNLLSKEIELRNGELQSDYTEDATDTKPDRDIELELSALDTDEPDGQSEPIEEILDIQLGISSQNDQLLNGMAVENGHPVQQHQKEPPKQKKQSLGEDHVILEEQKTILPVTSCFSQPLPVSISNASCLPITTSVSAGNLILKTHVMSEDKNDFLKPVANGKMVNS

SEQ ID NO: 831688 - protein, 1152 aa, Homo sapiens
MPVQAAQWTEFLSCPICYNEFDENVHKPISLGCSHTVCKTCLNKLHRKACPFDQTAINTDIDVLPVNFALLQLVGAQVPDHQSIKLSNLGENKHYEVAKKCVEDLALYLKPLSGGKGVASLNQSALSRPMQRKLVTLVNCQLVEEEGRVRAMRAARSLGERTVTELILQHQNPQQLSANLWAAVRARGCQFLGPAMQEEALKLVLLALEDGSALSRKVLVLFVVQRLEPRFPQASKTSIGHVVQLLYRASCFKVTKRDEDSSLMQLKEEFRSYEALRREHDAQIVHIAMEAGLRISPEQWSSLLYGDLAHKSHMQSIIDKLQSPESFAKSVQELTIVLQRTGDPANLNRLRPHLELLANIDPNPDAVSPTWEQLENAMVAVKTVVHGLVDFNKIIVEKAMRPLSLSQTANTRLACAEICDSKGVVHEEQIVHLPILRKSLKRSTETTGKIVPSTNGISNAENSVSQLISRSTDSTLRALETVKKVGKVGANGQNAAGPSADSVTENKIGSPPKTPVSNVAATSAGPSNVGTELNSVPQKSSPFLTRVPVYPPHSENIQYFQDPRTQIPFEVPQYPQTGYYPPPPTVPAGVAPCVPRFVRSNNVPESSLPPASMPYADHYSTFSPRDRMNSSPYQPPPPQPYGPVPPVPSGMYAPVYDSRRIWRPPMYQRDDIIRSNSLPPMDVMHSSVYQTSLRERYNSLDGYYSVACQPPSEPRTTVPLPREPCGHLKTSCEEQIRRKPDQWAQYHTQKAPLVSSTLPVATQSPTPPSPLFSVDFRADFSESVSGTKFEEDHLSHYSPWSCGTIGSCINAIDSEPKDVIANSNAVLMDLDSGDVKRRVHLFETQRRTKEEDPIIPFSDGPIISKWGAISRSSRTGYHTTDPVQATASQGSATKPISVSDYVPYVNAVDSRWSSYGNEATSSAHYVERDRFIVTDLSGHRKHSSTGDLLSLELQQAKSNSLLLQREANALAMQQKWNSLDEGRHLTLNLLSKEIELRNGELQSDYTEDATDTKPDRDIELELSALDTDEPDGQSEPIEEILDIQLGISSQNDQLLNGMAVENGHPVQQHQKEPPKQKKQSLGEDHVILEEQKTILPVTSCFSQPLPVSISNASCLPITTSVSAGNLILKTHVMSEDKNDFLKPVANGKMVNS

SEQ ID NO: 831689 - protein, 1064 aa, Homo sapiens
MPVQAAQWTEFLSCPICYNEFDENVHKPISLGCSHTVCKTCLNKLHRKACPFDQTAINTDIDVLPVNFALLQLVGAQVPDHQSIKLSNLGENKHYEVAKKCVEDLALYLKPLSGGKGVASLNQSALSRPMQRKLVTLVNCQLVEEEGRVRAMRAARSLGERTVTELILQHQNPQQLSANLWAAVRARGCQFLGPAMQEEALKLVLLALEDGSALSRKVLVLFVVQRLEPRFPQASKTSIGHVVQLLYRASCFKVTKRDEDSSLMQLKEEFRSYEALRREHDAQIVHIAMEAGLRISPEQWSSLLYGDLAHKSHMQSIIDKLQSPESFAKSVQELTIVLQRTGDPANLNRLRPHLELLANIDPNPDAVSPTWEQLENAMVAVKTVVHGLVDFIQNYSRKGHETPQPQPNSKYKTSMCRDLRQQGGCPRGTNCTFAHSQEELEKYRLRNKKINATVRTFPLLNKVGVNNTVTTTAGNVISVIGSTETTGKIVPSTNGISNAENSVSQLISRSTDSTLRALETVKKVGKVGANGQNAAGPSADSVTENKIGSPPKTPVSNVAATSAGPSNVGTELNSVPQKSSPFLTRVPVYPPHSENIQYFQDPRTQIPFEVPQYPQTGYYPPPPTVPAGVAPCVPRFVRSNNVPESSLPPASMPYADHYSTFSPRDRMNSSPYQPPPPQPYGPVPPVPSGMYAPVYDSRRIWRPPMYQRDDIIRSNSLPPMDVMHSSVYQTSLRERYNSLDGYYSVACQPPSEPRTTVPLPREPCGHLKTSCEEQIRRKPDQWAQYHTQKAPLVSSTLPVATQSPTPPSPLFSVDFRADFSESVSGTKFEEDHLSHYSPWSCGTIGSCINAIDSEPKDVIANSNAVLMDLDSGDVKRRVHLFETQRRTKEEDPIIPFSDGPIISKWGAISRSSRTGYHTTDPVQATASQGSATKPISVSDYVPYVNAVDSRWSSYGNEATSSAHYVERDRFIVTDLSGHRKHSSTGDLLSLELQQAKSNSLLLQREANALAMQQKWNSLDEGRHLTLNLLSKEIELRNGEVKKLNLSASCLMYLFSAAASWLYHY

SEQ ID NO: 831690 - protein, 1129 aa, Homo sapiens
MPVQAAQWTEFLSCPICYNEFDENVHKPISLGCSHTVCKTCLNKLHRKACPFDQTAINTDIDVLPVNFALLQLVGAQVPDHQSIKLSNLGENKHYEVAKKCVEDLALYLKPLSGGKGVASLNQSALSRPMQRKLVTLVNCQLVEEEGRVRAMRAARSLGERTVTELILQHQNPQQLSANLWAAVRARGCQFLGPAMQEEALKLVLLALEDGSALSRKVLVLFVVQRLEPRFPQASKTSIGHVVQLLYRASCFKVTKRDEDSSLMQLKEEFRSYEALRREHDAQIVHIAMEAGLRISPEQWSSLLYGDLAHKSHMQSIIDKLQSPESFAKSVQELTIVLQRTGDPANLNRLRPHLELLANIDPNPDAVSPTWEQLENAMVAVKTVVHGLVDFIQNYSRKGHETPQPQPNSKYKTSMCRDLRQQGGCPRGTNCTFAHSQEELEKYRLRNKKINATVRTFPLLNKVGVNNTVTTTAGNVISVIGSTETTGKIVPSTNGISNAENSVSQLISRSTDSTLRALETVKKVGKVGANGQNAAGPSADSVTENKIGSPPKTPVSNVAATSAGPSNVGTELNSVPQKSSPFLTRVPVYPPHSENIQYFQDPRTQIPFEVPQYPQTGYYPPPPTVPAGVAPCVPRFVRSNNVPESSLPPASMPYADHYSTFSPRDRMNSSPYQPPPPQPYGPVPPVPSGMYAPVYDSRRIWRPPMYQRDDIIRSNSLPPMDVMHSSVYQTSLRERYNSLDGYYSVACQPPSEPRTTVPLPREPCGHLKTSCEEQIRRKPDQWAQYHTQKAPLVSSTLPVATQSPTPPSPLFSVDFRADFSESVSGTKFEEDHLSHYSPWSCGTIGSCINAIDSEPKDVIANSNAVLMDLDSGDVKRRVHLFETQRRTKEEDPIIPFSDGPIISKWGAISRSSRTGYHTTDPVQATASQGSATKPISVSDYVPYVNAVDSRWSSYGNEATSSAHYVERDRFIVTDLSGHRKHSSTGDLLSLELQQAKSNSLLLQREANALAMQQKWNSLDEGRHLTLNLLSKEIELRNGELQSDYTEDATDTKPDRDIELELSALDTDEPDGQSEPIEEILDIQLGISSQNDQLLNGMAVENGHPVQQHQKEPPKQKKQSLGRSKKQFCR

SEQ ID NO: 831691 - protein, 1134 aa, Homo sapiens
MPVQAAQWTEFLSCPICYNEFDENVHKPISLGCSHTVCKTCLNKLHRKACPFDQTAINTDIDVLPVNFALLQLVGAQVPDHQSIKLSNLGENKHYEVAKKCVEDLALYLKPLSGGKGVASLNQSALSRPMQRKLVTLVNCQLVEEEGRVRAMRAARSLGERTVTELILQHQNPQQLSANLWAAVRARGCQFLGPAMQEEALKLVLLALEDGSALSRKVLVLFVVQRLEPRFPQASKTSIGHVVQLLYRASCFKVTKRDEDSSLMQLKEEFRSYEALRREHDAQIVHIAMEAGLRISPEQWSSLLYGDLAHKSHMQSIIDKLQSPESFAKSVQELTIVLQRTGDPANLNRLRPHLELLANIDPNPDAVSPTWEQLENAMVAVKTVVHGLVDFIQNYSRKGHETPQPQPNSKYKTSMCRDLRQQGGCPRGTNCTFAHSQEELEKYRLRNKKINATVRTFPLLNKVGVNNTVTTTAGNVISVIGSTETTGKIVPSTNGISNAENSVSQLISRSTDSTLRALETVKKVGKVGANGQNAAGPSADSVTENKIGSPPKTPVSNVAATSAGPSNVGTELNSVPQKSSPFLTRVPVYPPHSENIQYFQDPRTQIPFEVPQYPQTGYYPPPPTVPAGVAPCVPRFVRSNNVPESSLPPASMPYADHYSTFSPRDRMNSSPYQPPPPQPYGPVPPVPSGMYAPVYDSRRIWRPPMYQRDDIIRSNSLPPMDVMHSSVYQTSLRERYNSLDGYYSVACQPPSEPRTTVPLPRFSESVSGTKFEEDHLSHYSPWSCGTIGSCINAIDSEPKDVIANSNAVLMDLDSGDVKRRVHLFETQRRTKEEDPIIPFSDGPIISKWGAISRSSRTGYHTTDPVQATASQGSATKPISVSDYVPYVNAVDSRWSSYGNEATSSAHYVERDRFIVTDLSGHRKHSSTGDLLSLELQQAKSNSLLLQREANALAMQQKWNSLDEGRHLTLNLLSKEIELRNGELQSDYTEDATDTKPDRDIELELSALDTDEPDGQSEPIEEILDIQLGISSQNDQLLNGMAVENGHPVQQHQKEPPKQKKQSLGEDHVILEEQKTILPVTSCFSQPLPVSISNASCLPITTSVSAGNLILKTHVMSEDKNDFLKPVANGKMVNS

SEQ ID NO: 831692 - protein, 1191 aa, Homo sapiens; identical to SEQ ID NO: 831687

SEQ ID NO: 831693 - protein, 1191 aa, Homo sapiens; identical to SEQ ID NO: 831687

SEQ ID NO: 831694 - protein, 1062 aa, Homo sapiens
MQRKLVTLVNCQLVEEEGRVRAMRAARSLGERTVTELILQHQNPQQLSANLWAAVRARGCQFLGPAMQEEALKLVLLALEDGSALSRKVLVLFVVQRLEPRFPQASKTSIGHVVQLLYRASCFKVTKRDEDSSLMQLKEEFRSYEALRREHDAQIVHIAMEAGLRISPEQWSSLLYGDLAHKSHMQSIIDKLQSPESFAKSVQELTIVLQRTGDPANLNRLRPHLELLANIDPNPDAVSPTWEQLENAMVAVKTVVHGLVDFIQNYSRKGHETPQPQPNSKYKTSMCRDLRQQGGCPRGTNCTFAHSQEELEKYRLRNKKINATVRTFPLLNKVGVNNTVTTTAGNVISVIGSTETTGKIVPSTNGISNAENSVSQLISRSTDSTLRALETVKKVGKVGANGQNAAGPSADSVTENKIGSPPKTPVSNVAATSAGPSNVGTELNSVPQKSSPFLTRVPVYPPHSENIQYFQDPRTQIPFEVPQYPQTGYYPPPPTVPAGVAPCVPRFVRSNNVPESSLPPASMPYADHYSTFSPRDRMNSSPYQPPPPQPYGPVPPVPSGMYAPVYDSRRIWRPPMYQRDDIIRSNSLPPMDVMHSSVYQTSLRERYNSLDGYYSVACQPPSEPRTTVPLPREPCGHLKTSCEEQIRRKPDQWAQYHTQKAPLVSSTLPVATQSPTPPSPLFSVDFRADFSESVSGTKFEEDHLSHYSPWSCGTIGSCINAIDSEPKDVIANSNAVLMDLDSGDVKRRVHLFETQRRTKEEDPIIPFSDGPIISKWGAISRSSRTGYHTTDPVQATASQGSATKPISVSDYVPYVNAVDSRWSSYGNEATSSAHYVERDRFIVTDLSGHRKHSSTGDLLSLELQQAKSNSLLLQREANALAMQQKWNSLDEGRHLTLNLLSKEIELRNGELQSDYTEDATDTKPDRDIELELSALDTDEPDGQSEPIEEILDIQLGISSQNDQLLNGMAVENGHPVQQHQKEPPKQKKQSLGEDHVILEEQKTILPVTSCFSQPLPVSISNASCLPITTSVSAGNLILKTHVMSEDKNDFLKPVANGKMVNS

SEQ ID NO: 831695 - protein, 621 aa, Homo sapiens
SNQPGIRVLVDDGIAADLLGAVSIPEGAESLLVIDVSRAQRCNMAVRYYPPPPTVPAGVAPCVPRFVRSNNVPESSLPPASMPYADHYSTFSPRDRMNSSPYQPPPPQPYGPVPPVPSGMYAPVYDSRRIWRPPMYQRDDIIRSNSLPPMDVMHSSVYQTSLRERYNSLDGYYSVACQPPSEPRTTVPLPREPCGHLKTSCEEQIRRKPDQWAQYHTQKAPLVSSTLPVATQSPTPPSPLFSVDFRADFSESVSGTKFEEDHLSHYSPWSCGTIGSCINAIDSEPKDVIANSNAVLMDLDSGDVKRRVHLFETQRRTKEEDPIIPFSDGPIISKWGAISRSSRTGYHTTDPVQATASQGSATKPISVSDYVPYVNAVDSRWSSYGNEATSSAHYVERDRFIVTDLSGHRKHSSTGDLLSLELQQAKSNSLLLQREANALAMQQKWNSLDEGRHLTLNLLSKEIELRNGELQSDYTEDATDTKPDRDIELELSALDTDEPDGQSEPIEEILDIQLGISSQNDQLLNGMAVENGHPVQQHQKEPPKQKKQSLGEDHVILEEQKTILPVTSCFSQPLPVSISNASCLPITTSVSAGNLILKTHVMSEDKNDFLKPVANGKMVNS

SEQ ID NO: 831696 - protein, 1064 aa, Homo sapiens; identical to SEQ ID NO: 831689

SEQ ID NO: 831697 - protein, 509 aa, Homo sapiens
MNLLDPFMKMTDEQEKGLSGAPSPTMSEDSAGSPCPSGSGSDTENTRPQENTFPKGEPDLKKESEEDKFPVCIREAVSQVLKGYDWTLVPMPVRVNGSSKNKPHVKRPMNAFMVWAQAARRKLADQYPHLHNAELSKTLGKLWRLLNESEKRPFVEEAERLRVQHKKDHPDYKYQPRRRKSVKNGQAEAEEATEQTHISPNAIFKALQADSPHSSSGMSEVHSPGEHSGQSQGPPTPPTTPKTDVQPGKADLKREGRPLPEGGRQPPIDFRDVDIGELSSDVISNIETFDVNEFDQYLPPNGHPGVPATHGQVTYTGSYGISSTAATPASAGHVWMSKQQAPPPPPQQPPQAPPAPQAPPQPQAAPPQQPAAPPQQPQAHTLTTLSSEPGQSQRTHIKTEQLSPSHYSEQQQHSPQQIAYSPFNLPHYSPSYPPITRSQYDYTDHQNSSSYYSHAAGQGTGLYSTFTYMNPAQRPMYTPIADTSGVPSIPQTHSPQHWEQPVYTQLTRP

SEQ ID NO: 831698 - protein, 509 aa, Homo sapiens; identical to SEQ ID NO: 831697

SEQ ID NO: 831699 - protein, 509 aa, Homo sapiens; identical to SEQ ID NO: 831697

SEQ ID NO: 831700 - protein, 509 aa, Homo sapiens; identical to SEQ ID NO: 831697

SEQ ID NO: 831701 - protein, 119 aa, Homo sapiens
VIRRGPLRSDLKTLGNRRGGAQLENLELQREEVGRPQPPALGTTRLHTAHSTLRRPPTKGEDGRDDPKNNRRKRGPTRIPFGHLCFFVFLFCFVFSSSSSSLKTFKLKATRTQISKTQT

SEQ ID NO: 831702 - protein, 509 aa, Homo sapiens; identical to SEQ ID NO: 831697

SEQ ID NO: 831703 - protein, 341 aa, Homo sapiens
MPFPFGKSHKSPADIVKNLKESMAVLEKQDISDKKAEKATEEVSKNLVAMKEILYGTNEKEPQTEAVAQLAQELYNSGLLSTLVADLQLIDFEGKKDVAQIFNNILRRQIGTRTPTVEYICTQQNILFMLLKGYESPEIALNCGIMLRECIRHEPLAKIILWSEQFYDFFRYVEMSTFDIASDAFATFKDLLTRHKLLSAEFLEQHYDRFFSEYEKLLHSENYVTKRQSLKLLGELLLDRHNFTIMTKYISKPENLKLMMNLLRDKSRNIQFEAFHVFKVFVANPNKTQPILDILLKNQAKLIEFLSKFQNDRTEDEQFNDEKTYLVKQIRDLKRPAQQEA

SEQ ID NO: 831704 - protein, 341 aa, Homo sapiens; identical to SEQ ID NO: 831703

SEQ ID NO: 831705 - protein, 226 aa, Homo sapiens
TPDKLTDSKDNPYTFCIMYESPEIALNCGIMLRECIRHEPLAKIILWSEQFYDFFRYVEMSTFDIASDAFATFKDLLTRHKLLSAEFLEQHYDRFFSEYEKLLHSENYVTKRQSLKLLGELLLDRHNFTIMTKYISKPENLKLMMNLLRDKSRNIQFEAFHVFKVFVANPNKTQPILDILLKNQAKLIEFLSKFQNDRTEDEQFNDEKTYLVKQIRDLKRPAQQEA

SEQ ID NO: 831706 - protein, 205 aa, Homo sapiens
MPFPFGKSHKSPADIVKNLKESMAVLEKQDISDKKAEKATEEVSKNLVAMKEILYGTNEKEPQTEAVAQLAQELYNSGLLSTLVADLQLIDFEGKKDVAQIFNNILRRQIGTRTPTVEYICTQQNILFMLLKGYESPEIALNCGIMLRECIRHEPLAKIILWSEQFYDFFRYVEMSTFDIASDAFATFKFASSNSAWLQLIKKLI

SEQ ID NO: 831707 - protein, 341 aa, Homo sapiens; identical to SEQ ID NO: 831703

SEQ ID NO: 831708 - protein, 182 aa, Homo sapiens
MPFPFGKSHKSPADIVKNLKESMAVLEKQDISDKKAEKATEEVSKNLVAMKEILYGTNEKEPQTEAVAQLAQELYNSGLLSTLVADLQLIDFEGKKDVAQIFNNILRRQIGTRTPTVEYICTQQNILFMLLKGYESPEIALNCGIMLRECIRHEPLAKIILWSEQSGDSYEHDDIFAFEYTS

SEQ ID NO: 831709 - protein, 134 aa, Homo sapiens
MSFFSEYEKLLHSENYVTKRQSLKLLGELLLDRHNFTIMTKYISKPENLKLMMNLLRDKSRNIQFEAFHVFKVFVANPNKTQPILDILLKNQAKLIEFLSKFQNDRTEDEQFNDEKTYLVKQIRDLKRPAQQEA

SEQ ID NO: 831710 - protein, 341 aa, Homo sapiens; identical to SEQ ID NO: 831703

SEQ ID NO: 831711 - protein, 341 aa, Homo sapiens; identical to SEQ ID NO: 831703

SEQ ID NO: 831712 - protein, 130 aa, Homo sapiens
MGMGQKEAPHCGEVRGGFGTGVRGGGRCDLGLSPLRSLWLWSWGPLWGSEVRLRLGSRVKLSPPAPPPKSGERYRKVMPSLRSLSDKRIARTHPLQRYLLETKDFPTCLYLVTEGISKTSCSFLSIVFIS

SEQ ID NO: 831713 - protein, 130 aa, Homo sapiens; identical to SEQ ID NO: 831712

SEQ ID NO: 831714 - protein, 130 aa, Homo sapiens; identical to SEQ ID NO: 831712

SEQ ID NO: 831715 - protein, 618 aa, Homo sapiens
PPQPAAAGRTLPRPSMSLPVVLPGSCCPVAGLSGGPQAGGPGAAAAAAQEPPLPPLRPRWPRGALQPPSRPRCAATAAAGVLAAPPALSSRRAVAAAAAAAPGSALLPARPLLSLGLLQLILGCCMVALSFGALSLSSSPQVKNSCPFWAGSSVILSGIIGLTTWKRPMILLVNLFVLLSVVCVLLNLAGFILGCQGAQFVSSVPRCDLVDLGEGKICFCCEEFQPAKCTDKENALKLFPVQPCSAVHLLLKKVLFALCALNALTTTVCLVAAALRYLQIFATRRSCIDESQISAEEAEDHGRIPDPDDFVPPVPPPSYFATFYSCTPRMNRRMVGPDVIPLPHIYGARIKGVEVFCPLDPPPPYEAVVSQMDQEQGSSFQMSEGSEAAVIPLDLGCTQVTQDGDIPNIPAEENASTSTPSSTLVRPIRSRRALPPLRTRSKSDPVLHPSEERAAPVLSCEAATQTERRLDLAAVTLRRGLRSRASRCRPRSLIDYKSYMDTKLLVARFLEQSSCTMTPDIHELVENIKSVLKSDEEHMEEAITSASFLEQIMAPLQPSTSRAHKLPSRRQPGLLHLQSCGDLHTFTPAGRPRAERRPRRVEAERPHSLIGVIRETVL

SEQ ID NO: 831716 - protein, 399 aa, Homo sapiens
MHPLLRIVLWRQRYYYFKDFLHCILVMFVEVLSGAIVSLPQKVLFALCALNALTTTVCLVAAALRYLQIFATRRSCIDESQISAEEAEDHGRIPDPDDFVPPVPPPSYFATFYSCTPRMNRRMVGPDVIPLPHIYGARIKGVEVFCPLDPPPPYEAVGSSFQMSEGSEAAVIPLDLGCTQVTQDGDIPNIPAEENASTSTPSSTLVRPIRSRRALPPLRTRSKSDPVLHPSEERAAPVLSCEAATQTERRLDLAAVTLRRGLRSRASRCRPRSLIDYKSYMDTKLLVARFLEQSSCTMTPDIHELVENIKSVLKSDEEHMEEAITSASFLEQIMAPLQPSTSRAHKLPSRRQPGLLHLQSCGDLHTFTPAGRPRAERRPRRVEAERPHSLIGVIRETVL

SEQ ID NO: 831717 - protein, 119 aa, Homo sapiens
MDTKLLVARFLEQSSCTMTPDIHELVENIKSVLKSDEEHMEEAITSASFLEQIMAPLQPSTSRAHKLPSRRQPGLLHLQSCGDLHTFTPAGRPRAERRPRRVEAERPHSLIGVIRETVL

SEQ ID NO: 831718 - protein, 67 aa, Homo sapiens
VCLECPDHHRLLGGRCPPLPPDIRNQEILHRKSMQGHHGHVSAEPAHGPLRVIHCLSPRAFVMKAVD

SEQ ID NO: 831719 - protein, 239 aa, Homo sapiens
MTCFGPYPIGTGLQGITLCYSCFPSFCKMKSRMCMAISICQMLSMLSFVVCAFRYRHMFKRGWPMGTCCLFLPTAAPVLSCEAATQTERRLDLAAVTLRRGLRSRASRCRPRSLIDYKSYMDTKLLVARFLEQSSCTMTPDIHELVENIKSVLKSDEEHMEEAITSASFLEQIMAPLQPSTSRAHKLPSRRQPGLLHLQSCGDLHTFTPAGRPRAERRPRRVEAERPHSLIGVIRETVL

SEQ ID NO: 831720 - protein, 610 aa, Homo sapiens
PPQPAAAGRTLPRPSMSLPVVLPGSCCPVAGLSGGPQAGGPGAAAAAAQEPPLPPLRPRWPRGALQPPSRPRCAATAAAGVLAAPPALSSRRAVAAAAAAAPGSALLPARPLLSLGLLQLILGCCMVALSFGALSLSSSPQVKNSCPFWAGSSVILSGIIGLTTWKRPMILLVNLFVLLSVVCVLLNLAGFILGCQGAQFVSSVPRCDLVDLGEGKICFCCEEFQPAKCTDKENALKLFPVQPCSAVHLLLKKVLFALCALNALTTTVCLVAAALRYLQIFATRRSCIDESQISAEEAEDHGRIPDPDDFVPPVPPPSYFATFYSCTPRMNRRMVGPDVIPLPHIYGARIKGVEVFCPLDPPPPYEAVGSSFQMSEGSEAAVIPLDLGCTQVTQDGDIPNIPAEENASTSTPSSTLVRPIRSRRALPPLRTRSKSDPVLHPSEERAAPVLSCEAATQTERRLDLAAVTLRRGLRSRASRCRPRSLIDYKSYMDTKLLVARFLEQSSCTMTPDIHELVENIKSVLKSDEEHMEEAITSASFLEQIMAPLQPSTSRAHKLPSRRQPGLLHLQSCGDLHTFTPAGRPRAERRPRRVEAERPHSLIGVIRETVL

SEQ ID NO: 831721 - protein, 277 aa, Homo sapiens
MVGPDVIPLPHIYGARIKGVEVFCPLDPPPPYEAVGSSFQMSEGSEAAVIPLDLGCTQVTQDGDIPNIPAEENASTSTPSSTLVRPIRSRRALPPLRTRSKSDPVLHPSEERAAPVLSCEAATQTERRLDLAAVTLRRGLRSRASRCRPRSLIDYKSYMDTKLLVARFLEQSSCTMTPDIHELVENIKSVLKSDEEHMEEAITSASFLEQIMAPLQPSTSRAHKLPSRRQPGLLHLQSCGDLHTFTPAGRPRAERRPRRVEAERPHSLIGVIRETVL

SEQ ID NO: 831722 - protein, 458 aa, Homo sapiens
PPQPAAAGRTLPRPSMSLPVVLPGSCCPVAGLSGGPQAGGPGAAAAAAQEPPLPPLRPRWPRGALQPPSRPRCAATAAAGVLAAPPALSSRRAVAAAAAAAPGSALLPARPLLSLGLLQLILGCCMVALSFGALSLSSSPQVKNSCPFWAGSSVILSGIIGLTTWKRPMILLVNLFVLLSVVCVLLNLAGFILGCQGAQFVSSVPRCDLVDLGEGKICFCCEEFQPAKCTDKENALKLFPVQPCSAVHLLLKKVLFALCALNALTTTVCLVAAALRYLQIFATRRSCIDESQISAEEAEDHGRIPDPDDFVPPVPPPSYFATFYSCTPRMNRRMVGPDVIPLPHIYGARIKGVEVFCPLDPPPPYEAVVSQMDQEQGSSFQMSEGSEAAVIPLDLGCTQVTQDGDIPNIPAEENASTSTPSSTLVRPIRSRRALPPLRTRSKSDPVLHPSEERENYKK

SEQ ID NO: 831723 - protein, 656 aa, Homo sapiens
MTGAKRKKKSMLWSKMHTPQCEDIIQWCRRRLPILDWAPHYNLKENLLPDTVSGIMLAVQQVTQGLAFAVLSSVHPVFGLYGSLFPAIIYAIFGMGHHVATGTFALTSLISANAVERIVPQNMQNLTTQSNTSVLGLSDFEMQRIHVAAAVSFLGGVIQVAMFVLQLGSATFVVTEPVISAMTTGAATHVVTSQVKYLLGMKMPYISGPLGFFYIYAYVFENIKSVRLEALLLSLLSIVVLVLVKELNEQFKRKIKVVLPVDLVLIIAASFACYCTNMENTYGLEVVGHIPQGIPSPRAPPMNILSAVITEAFGVALVGYVASLALAQGSAKKFKYSIDDNQEFLAHGLSNIVSSFFFCIPSAAAMGRTAGLYSTGAKTQVACLISCIFVLIVIYAIGPLLYWLPMCVLASIIVVGLKGMLIQFRDLKKYWNVDKIDWGIWVSTYVFTICFAANVGLLFGVVCTIAIVIGRFPRAMTVSIKNMKEMEFKVKTEMDSETLQQVKIISINNPLVFLNAKKFYTDLMNMIQKENACNQPLDDISKCEQNTLLNSLSNGNCNEEASQSCPNEKCYLILDCSGFTFFDYSGVSMLVEVYMDCKGRSVDVLLAHCTASLIKAMTYYGNLDSEKPIFFESVSAAISHIHSNKNLSKLSDHSEV

SEQ ID NO: 831724 - protein, 226 aa, Homo sapiens
FCFLFLFQGIWVSTYVFTICFAANVGLLFGVVCTIAIVIGRFPRAMTVSIKNMKEMEFKVKTEMDSETLQQVKIISINNPLVFLNAKKFYTDLMNMIQKENACNQPLDDISKCEQNTLLNSLSNGNCNEEASQSCPNEKCYLILDCSGFTFFDYSGVSMLVEVYMDCKGRSVDVLLAHCTASLIKAMTYYGNLDSEKPIFFESVSAAISHIHSNKNLSKLSDHSEV

SEQ ID NO: 831725 - protein, 629 aa, Homo sapiens
MTGAKRKKKSMLWSKMHTPQCEDIIQWCRRRLPILDWAPHYNLKENLLPDTVSGIMLAVQQVTQGLAFAVLSSVHPVFGLYGSLFPAIIYAIFGMGHHVATGTFALTSLISANAVERIVPQNMQNLTTQSNTSVLGLSDFEMQRIHVAAAVSFLGGVIQVAMFVLQLGSATFVVTEPVISAMTTGAATHVVTSQVKYLLGMKMPYISGPLGFFYIYAYVFENIKSVRLEALLLSLLSIVVLVLVKELNEQFKRKIKVVLPVDLVLIIAASFACYCTNMENTYGLEVVGHIPQGIPSPRAPPMNILSAVITEAFGVALVGYVASLALAQGSAKKFKYSIDDNQEFLAHGLSNIVSSFFFCIPSAAAMGRTAGLYSTGAKTQVACLISCIFVLIVIYAIGPLLYWLPMCVLASIIVVGLKGMLIQFRDLKKYWNVDKIDWGIWVSTYVFTICFAANVGLLFGVVCTIAIVIGRFPRAMTVSIKNMKEMEFKVKTEMDSETLQQVKIISINNPLVFLNAKKFYTDLMNMIQKENACNQPLDDISKCEQNTLLNSLSNGNCNEEASQSCPNEKCYLILDCSGFTFFDYSGVSMLVEVYMDCKGRSVDVLLAHCTASLIKAMTHVDPRQRLIYD

SEQ ID NO: 831726 - protein, 226 aa, Homo sapiens; identical to SEQ ID NO: 831724

SEQ ID NO: 831727 - protein, 233 aa, Homo sapiens
FCFLFLFQGIWVSTYVFTICFAANVGLLFGVVCTIAIVIGRFPRAMTVSIKNMKEMEFKVKTEMDSETLQQVKIISINNPLVFLNAKKFYTDLMNMIQKENACNQPLDDISKCEQNTLLNSLSNGNCNEEASQSCPNEKCYLILDCSGFTFFDYSGVSMLVEVYMDCKGRSVDVLLAHCTASLIKAMTYYGNLDSEKPIFFESVSAAISHIHSNKASYKLLFDNLDLPTMPPL

SEQ ID NO: 831728 - protein, 470 aa, Homo sapiens
SGRACVAARGPGFGLQGALVQSPPVSAGSRPRRPPRSRTGAAMSSSPWEPATLRRVFVVGVGMTKFVKPGAENSRDYPDLAEEAGKKALADAQIPYSAVDQACVGYVFGDSTCGQRAIYHSLGMTGIPIINVNNNCATGSTALFMARQLIQGGVAECVLALGFEKMSKGSLGIKFSDRTIPTDKHVDLLINKYGLSAHPVAPQMFGYAGKEHMEKYGTKIEHFAKIGWKNHKHSVNNPYSQFQDEYSLDEVMASKEVFDFLTILQCCPTSDGAAAAILASEAFVQKYGLQSKAVEILAQEMMTDLPSSFEEKSIIKMVGFDMSKEAARKCYEKSGLTPNDIDVIELHDCFSTNELLTYEALGLCPEGQGATLVDRGDNTYGGKWVINPSGGLISKGHPLGATGLAQCAELCWQLRGEAGKRQVPGAKVALQHNLGIGGAVVVTLYKMGFPEAASSFRTHQIEAVPTSSAR

SEQ ID NO: 831729 - protein, 470 aa, Homo sapiens; identical to SEQ ID NO: 831728

SEQ ID NO: 831730 - protein, 426 aa, Homo sapiens
SGRACVAARGPGFGLQGALVQSPPVSAGSRPRRPPRSRTGAAMSSSPWEPATLRRVFVVGVGMTKFVKPGAENSRDYPDLAEEAGKKALADAQIPYSAVDQACVGYVFGVAECVLALGFEKMSKGSLGIKFSDRTIPTDKHVDLLINKYGLSAHPVAPQMFGYAGKEHMEKYGTKIEHFAKIGWKNHKHSVNNPYSQFQDEYSLDEVMASKEVFDFLTILQCCPTSDGAAAAILASEAFVQKYGLQSKAVEILAQEMMTDLPSSFEEKSIIKMVGFDMSKEAARKCYEKSGLTPNDIDVIELHDCFSTNELLTYEALGLCPEGQGATLVDRGDNTYGGKWVINPSGGLISKGHPLGATGLAQCAELCWQLRGEAGKRQVPGAKVALQHNLGIGGAVVVTLYKMGFPEAASSFRTHQIEAVPTSSAR

SEQ ID NO: 831731 - protein, 470 aa, Homo sapiens; identical to SEQ ID NO: 831728

SEQ ID NO: 831732 - protein, 470 aa, Homo sapiens; identical to SEQ ID NO: 831728

SEQ ID NO: 831733 - protein, 454 aa, Homo sapiens
SGRACVAARGPGFGLQGALVQSPPVSAGSRPRRPPRSRTGAAMSSSPWEPATLRRVFVVGVGMTKFVKPGAENSRDYPDLAEEAGKKALADAQIPYSAVDQACVGYVFGDSTCGQRAIYHSLGMTGIPIINVNNNCATGSTALFMARQLIQGGVAECVLALGFEKMSKGSLGIKFSDRTIPTDKHVDLLINKYGLSAHPVAPQMFGYAGKEHMEKYGTKIEHFAKIGWKNHKHSVNNPYSQFQDEYSLDEVMASKEVFDFLTILQCCPTSDGAAAAILASEAFVQKYGLQSKAVEILAQEMMTDLPSSFEEKSIIKMVGFDMSKEAARKCYEKSGLTPNDIDVIELHDCFSTNELLTYEALGLCPEGQGATLVDRGDNTYGGKWVINPSGGLISKGHPLGATGLAQCAELCWQLRGEAGKRQVPGAKVALQHNLGIGGAVVVTLYKMGFPEAAR

SEQ ID NO: 831734 - protein, 470 aa, Homo sapiens; identical to SEQ ID NO: 831728

SEQ ID NO: 831735 - protein, 470 aa, Homo sapiens; identical to SEQ ID NO: 831728

SEQ ID NO: 831736 - protein, 470 aa, Homo sapiens; identical to SEQ ID NO: 831728

SEQ ID NO: 831737 - protein, 470 aa, Homo sapiens; identical to SEQ ID NO: 831728

SEQ ID NO: 831738 - protein, 470 aa, Homo sapiens; identical to SEQ ID NO: 831728

SEQ ID NO: 831739 - protein, 226 aa, Homo sapiens
RGRACVAARGPGFGLQGALVQSPPVSAGSRPRRPPRSRTGAAMSSSPWEPATLRRVFVVGVGMTKFVKPGAENSRDYPDLAEEAGKKALADAQIPYSAVDQACVGYVFGDSTCGQRAIYHSLGMTGIPIINVNNNCATGSTALFMARQLIQGGVAECVLALGFEKMSKGSLGIKFSDRTIPTDKHVDLLINKYGLSAHPVAPQMFGYAGKEHMEKYGIPSSKMNTV

SEQ ID NO: 831740 - protein, 452 aa, Homo sapiens
SGRACVAARGPGFGLQGALVQSPPVSAGSRPRRPPRSRTGAAMSSSPWEPATLRRVFVVGVGMTKFVKPGAENSRDYPDLAEEAGKKALADAQIPYSAVDQACVGYVFGDSTCGQRAIYHSLGMTGIPIINVNNNCATGSTALFMARQLIQGGVAECVLALGFEKMSKGSLGIKYGLSAHPVAPQMFGYAGKEHMEKYGTKIEHFAKIGWKNHKHSVNNPYSQFQDEYSLDEVMASKEVFDFLTILQCCPTSDGAAAAILASEAFVQKYGLQSKAVEILAQEMMTDLPSSFEEKSIIKMVGFDMSKEAARKCYEKSGLTPNDIDVIELHDCFSTNELLTYEALGLCPEGQGATLVDRGDNTYGGKWVINPSGGLISKGHPLGATGLAQCAELCWQLRGEAGKRQVPGAKVALQHNLGIGGAVVVTLYKMGFPEAASSFRTHQIEAVPTSSAR

SEQ ID NO: 831741 - protein, 470 aa, Homo sapiens; identical to SEQ ID NO: 831728

SEQ ID NO: 831742 - protein, 470 aa, Homo sapiens; identical to SEQ ID NO: 831728

SEQ ID NO: 831743 - protein, 470 aa, Homo sapiens; identical to SEQ ID NO: 831728

SEQ ID NO: 831744 - protein, 470 aa, Homo sapiens; identical to SEQ ID NO: 831728

SEQ ID NO: 831745 - protein, 470 aa, Homo sapiens; identical to SEQ ID NO: 831728

SEQ ID NO: 831746 - protein, 408 aa, Homo sapiens
SGRACVAARGPGFGLQGALVQSPPVSAGSRPRRPPRSRTGAAMSSSPWEPATLRRVFVVGVGMTKFVKPGAENSRDYPDLAEEAGKKALADAQIPYSAVDQACVGYVFGDSTCGQRAIYHSLGMTGIPIINVNNNCATGSTALFMARQLIQGGVAECVLALGFEKMSKGSLGIKFSDRTIPTDKHVDLLINKYGLSAHPVAPQMFGYAGKEHMEKYGTKIEHFAKIGWKNHKHSVNNPYSQFQDEYSLDEVMASKEVFDFLTILQCCPTSDGAAAAILASEAFVQKYGLQSKAVEILAQEMMTDLPSSFEEKSIIKMVGFDMSKEAARKCYEKSGLTPNDIDVIELHDCFSTNELLTYEALGLCPEGQGATLVDRGDNTYGGKWVINPSGGLISKGHPLGATGGHSCS

SEQ ID NO: 831747 - protein, 361 aa, Homo sapiens
AGWTSSCPGPLATPHTASLGWGWDCGLASWVGESESAPRSTCQPSGHVRARGDPGSHPGLHPAARLPFLATCHHRSSSLGPLGGMGRPSSPRAAWGTFSPPQRTQVPDCHSARSKTYGNVLVLDGVIQCTERDEFSYQEMIANLPLCSHPNPRKVLIIGGGDGGVLREVVKHPSVESVVQCEIDEDVIQVSKKFLPGMAIGYSSSKLTLHVGDGFEFMKQNQDAFDVIITDSSDPMGPAESLFKESYYQLMKTALKEDGVLCCQGRVPVAAPGPHQGDAAVLPVPVPRGGLCLLHHPHLPQRPDRLHAVQQEPEHELPGAGAAADTAAGGADAAEVLQLRRAPRRLCAARVCPQGALNDVS

SEQ ID NO: 831748 - protein, 193 aa, Homo sapiens
DSRGLCRGGVVQCEIDEDVIQVSKKFLPGMAIGYSSSKLTLHVGDGFEFMKQNQDAFDVIITDSSDPMGPAESLFKESYYQLMKTALKEDGVLCCQGRVPVAAPGPHQGDAAVLPVPVPRGGLCLLHHPHLPQRPDRLHAVQQEPEHELPGAGAAADTAAGGADAAEVLQLRRAPRRLCAARVCPQGALNDVS

SEQ ID NO: 831749 - protein, 217 aa, Homo sapiens
MEPGPDGPAASGPAAIREGWFRETCSLWPGQALSLQVEQLLHHRRSRYQDILVFRSKTYGNVLVLDGVIQCTERDEFSYQEMIANLPLCSHPNPRKVLIIGGGDGGVLREVVKHPSVESVVQCEIDEDVIQVSKKFLPGMAIGYSSSKLTLHVGDGFEFMKQNQDAFDVIITDSSDPMGPAESLFKESYYQLMKTALKEDGVLCCQGARTSRSRCSR

SEQ ID NO: 831750 - protein, 69 aa, Homo sapiens
AAAYYYYCSEFKLLTMYGDMLCSKNPSTNFQEPVQPLTQQQVAQMQLKYYNSDVHRAAFVLPEFARKGP

SEQ ID NO: 831751 - protein, 303 aa, Homo sapiens
MEPGPDGPAASGPAAIREGWFRETCSLWPGQALSLQVEQLLHHRRSRYQDILVFRSKTYGNVLVLDGVIQCTERDEFSYQEMIANLPLCSHPNPRKVLIIGGGDGGVLREVVKHPSVESVVQCEIDEDVIQVSKKFLPGMAIGYSSSKLTLHVGDGFEFMKQNQDAFDVIITDSSDPMGPAESLFKESYYQLMKTALKEDGVLCCQGRVPVAAPGPHQGDAAVLPVPVPRGGLCLLHHPHLPQRPDRLHAVQQEPEHELPGAGAAADTAAGGADAAEVLQLRRAPRRLCAARVCPQGALNDVS

SEQ ID NO: 831752 - protein, 303 aa, Homo sapiens; identical to SEQ ID NO: 831751

SEQ ID NO: 831753 - protein, 209 aa, Homo sapiens
MEPGPDGPAASGPAAIREGWFRETCSLWPGQALSLQVEQLLHHRRSRYQDILVFRSKTYGNVLVLDGVIQCTERDEFSYQEMIANLPLCSHPNPRKVLIIGGGDGGVLREVVKHPSVESVVQCEIDEDVIQVSKKFLPGMAIGYSSSKLTLHVGDGFEFMKQNQDAFDVIITDSSDPMGPAESLFKESYYQLMKTALKEDGVLCCQGSR

SEQ ID NO: 831754 - protein, 325 aa, Homo sapiens
MEPGPDGPAASGPAAIREGWFRETCSLWPGQALSLQVEQLLHHRRSRYQDILVFRSKTYGNVLVLDGVIQCTERDEFSYQEMIANLPLCSHPNPRKVLIIGGGDGGVLREVVKHPSVESVVQCEIDEDVIQVSKKFLPGMAIGYSSSKLTLHVGDGFEFMKQNQDAFDVIITDSSDPMGPAESLFKESYYQLMKTALKEDGVLCCQGRVPVAAPGPHQGDAAVLPVPVPRGGLCLLHHPHLPQRPDRLHAVQQEPEHELPGAGAAADTAAGGADAAEVLQLRRAPRRLCAARVCPQGWVACGAGWWDPGTQSALLTGLMSLQGPE

SEQ ID NO: 831755 - protein, 272 aa, Homo sapiens
MEPGPDGPAASGPAAIREGWFRETCSLWPGQALSLQVEQLLHHRRSRYQDILVFRSKTYGNVLVLDGVIQCTERDEFSYQEMIANLPLCSHPNPRKVLIIGGGDGGVLREVVKHPSVESVVQCEIDEDVIQVSKKFLPGMAIGYSSSKLTLHVGDGFEFMKQNQDAFDVIITDSSDPMGPAESLFKESYYQLMKTALKEDGVLCCQGRVPVAAPGPHQGDAAVLPVPVPRGGLCLLHHPHLPQRPDRLHAVQQEPGEMGVSGGGGWGEGGHK

SEQ ID NO: 831756 - protein, 67 aa, Homo sapiens
LYALEQGRNPQGLTSLLVCREDRINMSTAGKVIKCKAAVLWELKKPFSIEEVEVAPPKAHEVRIKMV

SEQ ID NO: 831757 - protein, 375 aa, Homo sapiens [sequence omitted]

SEQ ID NO: 831758 - protein, 375 aa, Homo sapiens [sequence omitted]

SEQ ID NO: 831759 - protein, 375 aa, Homo sapiens [sequence omitted]

SEQ ID NO: 831760 - protein, 375 aa, Homo sapiens [sequence omitted]

SEQ ID NO: 831761 - protein, 359 aa, Homo sapiens
MSTAGKVIKCKAAVLWEVKKPFSIEDVEVAPPKAYEVRIKMVAVGICRTDDHVVSGNLVTPLPVILGHEAAGIVESVGEGVTTVKPGDKVIPLFTPQCGKCRVCKNPESNYCLKNDLGNPRGTLQDGTRRFTCRGKPIHHFLGTSTFSQYTVVDENAVAKIDAASPLEKVCLIGCGFSTGYGSAVNVAKVTPGSTCAVFGLGGVGLSAVMGCKAAGAARIIAVDINKDKFAKAKELGATECINPQDYKKPIQEVLKEMTDGGVDFSFEVIGRLDTMMASLLCCHEACGTSVIVGVPPASQNLSINPMLLLTGRTWKGAVYGGFKSKEGIPKLVADFMAKKFSLDALITHVLPFEKINEF

SEQ ID NO: 831762 - protein, 359 aa, Homo sapiens; identical to SEQ ID NO: 831761

SEQ ID NO: 831763 - protein, 112 aa, Homo sapiens
MSTAGKVIKCKAAVLWEVKKPFSIEDVEVAPPKAYEVRIKMVAVGICRTDDHVVSGNLVTPLPVILGHEAAGIVESVGEGVTTVKPGTGFTLREHVWFTIQDFPAWIRKPRQ

SEQ ID NO: 831764 - protein, 99 aa, Homo sapiens
MASLLCCHEACGTSVIVGVPPDSQNLSMNPMLLLTGRTWKGAILGGFKSKECVPKLVADFMAKKFSLDALITHVLPFEKINEGFDLLHSGKSIRTILMF

SEQ ID NO: 831765 - protein, 137 aa, Homo sapiens [sequence omitted]

SEQ ID NO: 831766 - protein, 266 aa, Homo sapiens
MASLLCCHEACGTSVIVGVPPDSQNLSMNPMLLLTGRTWKGAILGGFKRQERVPKLVADSTAKTPPIECINNPSPPFSPTKRRIISRFTPGYKNTTYYSPSYHTPHRLSLKMNYKIDETKKNAPSSGSRPNTTPILSTYFPPLHQPHYSSHYFSQTHLFDLNLTTQLISPQPPTILICSPFFFNRHTPVSKCFTPSPPTPVSSHCTIHAPATPIQHAMHKCIRTHTAPLSHPYNIYLLPTTPQSPSFYVFIDAFYRPPVAVPPTRD

SEQ ID NO: 831767 - protein, 375 aa, Homo sapiens [sequence omitted]

SEQ ID NO: 831768 - protein, 375 aa, Homo sapiens [sequence omitted]

SEQ ID NO: 831769 - protein, 375 aa, Homo sapiens [sequence omitted]

SEQ ID NO: 831770 - protein, 357 aa, Homo sapiens
MSTAGKVIKCKAAVLWEVKKPFSIEDVEVAPPKAYEVRIKMVAVGICRTDDHVVSGNLVTPLPVILGHEAAGIVESVGEGVTTVKPGDKVIPLFTPQCGKCRVCKNPESNYCLKNDLGNPRGTLQDGTRRFTCRGKPIHHFLGTSTFSQYTVVDENAVASTGYGSAVNVAKVTPGSTCAVFGLGGVGLSAVMGCKAAGAARIIAVDINKDKFAKAKELGATECINPQDYKKPIQEVLKEMTDGGVDFSFEVIGRLDTMMASLLCCHEACGTSVIVGVPPASQNLSINPMLLLTGRTWKGAVYGGFKSKEGIPKLVADFMAKKFSLDALITHVLPFEKINEGFDLLHSGKSIRTVLTF

SEQ ID NO: 831771 - protein, 375 aa, Homo sapiens [sequence omitted]

SEQ ID NO: 831772 - protein, 381 aa, Homo sapiens
MSTAGKVIKCKAAVLWEVKKPFSIEDVEVAPPKAYEVRIKMVAVGICRTDDHVVSGNLVTPLPVILGHEAAGIVESVGEGVTTVKPGDKVIPLFTPQCGKCRVCKNPESNYCLKNDLGNPRGTLQDGTRRFTCRGKPIHHFLGTSTFSQYTVVDENAVAKIDAASPLEKVCLIGCGFSTGYGSAVNVAKVTPGSTCAVFGLGGVGLSAVMGCKAAGAARIIAVDINKDKFAKAKELGATECINPQDYKKPIQEVLKEMTDGGVDFSFEVIGRLDTMMASLLCCHEACGTSVIVGVPPASQNLSINPMLLLTGRTWKGAVYGGFKSKEGIPKLVADFMAKKFSLDALITHVLPFEKINEGFDLLHSGKSLQPPLPYKIWSNS

SEQ ID NO: 831773 - protein, 92 aa, Homo sapiens
MASLLCCHEACGTSVIVGVPPDSQNLSMNPMLLLTGRTWKGAILGGFKSKECVPKLVADFMAKKFSLDALITHVLPFEKINEGFDLLHSGKR

SEQ ID NO: 831774 - protein, 662 aa, Homo sapiens
MVVSEVDIAKADPAAASHPLLLNGDATVAQKNPGSVAENNLCSQYEEKVRPCIDLIDSLRALGVEQDLALPAIAVIGDQSSGKSSVLEALSGVALPRGSGIVTRCPLVLKLKKLVNEDKWRGKVSYQDYEIEISDASEVEKEINKAQNAIAGEGMGISHELITLEISSRDVPDLTLIDLPGITRVAVGNQPADIGYKIKTLIKKYIQRQETISLVVVPSNVDIATTEALSMAQEVDPEGDRTIGILTKPDLVDKGTEDKVVDVVRNLVFHLKKGYMIVKCRGQQEIQDQLSLSEALQREKIFFENHPYFRDLLEEGKATVPCLAEKLTSELITHICKSLPLLENQIKETHQRITEELQKYGVDIPEDENEKMFFLIDKINAFNQDITALMQGEETVGEEDIRLFTRLRHEFHKWSTIIENNFQEGHKILSRKIQKFENQYRGRELPGFVNYRTFETIVKQQIKALEEPAVDMLHTVTDMVRLAFTDVSIKNFEEFFNLHRTAKSKIEDIRAEQEREGEKLIRLHFQMEQIVYCQDQVYRGALQKVREKELEEEKKKKSWDFGAFQSSSATDSSMEEIFQHLMAYHQEASKRISSHIPLIIQFFMLQTYGQQLQKAMLQLLQDKDTYSWLLKERSDTSDKRKFLKERLARLTQARRRLAQFPG

SEQ ID NO: 831775 - protein, 662 aa, Homo sapiens; identical to SEQ ID NO: 831774

SEQ ID NO: 831776 - protein, 662 aa, Homo sapiens; identical to SEQ ID NO: 831774

SEQ ID NO: 831777 - protein, 662 aa, Homo sapiens; identical to SEQ ID NO: 831774

SEQ ID NO: 831778 - protein, 651 aa, Homo sapiens
MVVSEVDIAKADPAAASHPLLLNGDATVAQKNPGSVAENNLCSQYEEKVRPCIDLIDSLRALGVEQDLALPAIAVIGDQSSGKSSVLEALSGVALPRGSGIVTRCPLVLKLKKLVNEDKWRGKVSYQDYEIEISDASEVEKEINKAQNAIAGEGMGISHELITLEISSRDVPDLTLIDLPGITRVAVGNQPADIGYKIKTLIKKYIQRQETISLVVVPSNVDIATTEALSMAQEVDPEGDRTIGILTKPDLVDKGTEDKVVDVVRNLVFHLKKGYMIVKCRGQQEIQDQLSLSEALQREKIFFENHPYFRDLLEEGKATVPCLAEKLTSELITHICKSLPLLENQIKETHQRITEELQKYGVDIPEDENEKMFFLIDKINAFNQDITALMQGEETVGEEDIRLFTRLRHEFHKWSTIIENNFQEGHKILSRKIQKFENQYRGRELPGFVNYRTFETIVKQQIKALEEPAVDMLHTVTDMVRLAFTDVSIKNFEEFFNLHRTAKPPLPDGTDCLLPGPGIQGCIAEGQREGAGRRKEEEILGFWGFPIQLGNRLFHGGDLSAPDGLSPGGQQAHLQPHPFDHPVLHAPDVRPAASEGHAAAPAGQGHLQLAPEGAERHQRQAEVPEGAACTADAGSAPACPVPRLTTLCPAP

SEQ ID NO: 831779 - protein, 291 aa, Homo sapiens [sequence omitted]

SEQ ID NO: 831780 - protein, 184 aa, Homo sapiens [sequence omitted]

SEQ ID NO: 831781 - protein, 136 aa, Homo sapiens [sequence omitted]

SEQ ID NO: 831782 - protein, 86 aa, Homo sapiens
RGRGQADGLAGNAAGRMGRLWDAPPFRDHPPPRPSRTGSRLGEVLAVYAPKSTWAWSRTEPCCQRYTQSNSTPGACHSNSILNRSW

SEQ ID NO: 831783 - protein, 662 aa, Homo sapiens; identical to SEQ ID NO: 831774

SEQ ID NO: 831784 - protein, 662 aa, Homo sapiens; identical to SEQ ID NO: 831774

SEQ ID NO: 831785 - protein, 616 aa, Homo sapiens
MVVSEVDIAKADPAAASHPLLLNGDATVAQKNPGSVAENNLCSQYEEKVRPCIDLIDSLRALGVEQDLALPAIAVIGDQSSGKSSVLEALSGVALPRGSAQNAIAGEGMGISHELITLEISSRDVPDLTLIDLPGITRVAVGNQPADIGYKIKTLIKKYIQRQETISLVVVPSNVDIATTEALSMAQEVDPEGDRTIGILTKPDLVDKGTEDKVVDVVRNLVFHLKKGYMIVKCRGQQEIQDQLSLSEALQREKIFFENHPYFRDLLEEGKATVPCLAEKLTSELITHICKSLPLLENQIKETHQRITEELQKYGVDIPEDENEKMFFLIDKINAFNQDITALMQGEETVGEEDIRLFTRLRHEFHKWSTIIENNFQEGHKILSRKIQKFENQYRGRELPGFVNYRTFETIVKQQIKALEEPAVDMLHTVTDMVRLAFTDVSIKNFEEFFNLHRTAKSKIEDIRAEQEREGEKLIRLHFQMEQIVYCQDQVYRGALQKVREKELEEEKKKKSWDFGAFQSSSATDSSMEEIFQHLMAYHQEASKRISSHIPLIIQFFMLQTYGQQLQKAMLQLLQDKDTYSWLLKERSDTSDKRKFLKERLARLTQARRRLAQFPG

SEQ ID NO: 831786 - protein, 291 aa, Homo sapiens [sequence omitted]

SEQ ID NO: 831787 - protein, 662 aa, Homo sapiens; identical to SEQ ID NO: 831774

SEQ ID NO: 831788 - protein, 324 aa, Homo sapiens
MVVSEVDIAKADPAAASHPLLLNGDATVAQKNPGSVAENNLCSQYEEKVRPCIDLIDSLRALGVEQDLALPAIAVIGDQSSGKSSVLEALSGVALPRGSGIVTRCPLVLKLKKLVNEDKWRGKVSYQDYEIEISDASEVEKEINKAQNAIAGEGMGISHELITLEISSRDVPDLTLIDLPGITRVAVGNQPADIGYKIKTLIKKYIQRQETISLVVVPSNVDIATTEALSMAQEVDPEGDRTIGILTKPDLVDKGTEDKVVDVVRNLVFHLKKGYMIVKCRGQQEIQDQLSLSEALQREKIFFENHPYFRCACLGFIMDQSKPR

SEQ ID NO: 831789 - protein, 423 aa, Homo sapiens
GDMRWILFIGALIGSSICGREKFFGDQVLRINVRNGDEISKLSQLVNSNNLKLNFWKSPSSFNRPVDVLVPSVSLQAFKSFLRSQGLEYAVTIEDLQALLDNEDDEMQHNEGQERSSNNFNYGAYHSLEAIYHEMDNIAADFPDLARRVKIGHSFENRPMYVLKFSTGKGVRRPAVWLNAGIHSREWISQATAIWTARKIVSDYQRDPAITSILEKMDIFLLPVANPDGYVYTQTQNRLWRKTRSRNPGSSCIGADPNRNWNASFAGKGASDNPCSEVYHGPHANSEVEVKSVVDFIQKHGNFKGFIDLHSYSQLLMYPYGYSVKKAPDAEELDKVARLAAKALASVSGTEYQVGPTCTTVYPASGSSIDWAYDNGIKFAFTFELRDTGTYGFLLPANQIIPTAEETWLGLKTIMEHVRDNLY

SEQ ID NO: 831790 - protein, 423 aa, Homo sapiens; identical to SEQ ID NO: 831789

SEQ ID NO: 831791 - protein, 423 aa, Homo sapiens; identical to SEQ ID NO: 831789

SEQ ID NO: 831792 - protein, 434 aa, Homo sapiens
MDDQSRMLQTLAGVNLAGHSVQGGMALPPPPHGHEGADGDGRKQDIGDILHQIMTITDQSLDEAQAKKHALNCHRMKPALFSVLCEIKEKTGLSIRGAQEEDPPDPQLMRLDNMLLAEGVSGPEKGGGSAAAAAAAAASGGSSDNSIEHSDYRAKLTQIRQIYHTELEKYEQACNEFTTHVMNLLREQSRTRPISPKEIERMVGIIHRKFSSIQMQLKQSTCEAVMILRSRFLDARRKRRNFSKQATEILNEYFYSHLSNPYPSEEAKEELAKKCSITVSQVSNWFGNKRIRYKKNIGKFQEEANLYAAKTAVTAAHAVAAAVQNNQTNSPTTPNSGSSGSFNLPNSGDMFMNMQSLNGDSYQGSQVGANVQSQVDTLRHVINQTGGYSDGLGGNSLYSPHNLNANGGWQDATTPSSVTSPTEGPGSVHSDTSN

SEQ ID NO: 831793 - protein, 170 aa, Homo sapiens
MNLLREQSRTRPISPKEIERMVGIIHRKFSSIQMQLKQSTCEAVMILRSRFLDARRKRRNFSKQATEILNEYFYSHLSNPYPSEEAKEELAKKCSITVSQVSNWFGNKRIRYKKNIGKFQEEANLYAAKTAVTAAHAVAAAVQNNQTNSPTTPNSGGYPPSCYQSDGRLQ

SEQ ID NO: 831794 - protein, 253 aa, Homo sapiens
MNLLREQSRTRPISPKEIERMVGIIHRKFSSIQMQLKQSTCEAVMILRSRFLDARRKRRNFSKQATEILNEYFYSHLSNPYPSEEAKEELAKKCSITVSQVSNWFGNKRIRYKKNIGKFQEEANLYAAKTAVTAAHAVAAAVQNNQTNSPTTPNSGSSGSFNLPNSGDMFMNMQSLNGDSYQGSQVGANVQSQVDTLRHVINQTGGYSDGLGGNSLYSPHNLNANGGWQDATTPSSVTSPTEGPGSVHSDTSN

SEQ ID NO: 831795 - protein, 455 aa, Homo sapiens
MDDQSRMLQTLAGVNLAGHSVQGGMALPPPPHGHEGADGDGRKQDIGDILHQIMTITDQSLDEAQAKKHALNCHRMKPALFSVLCEIKEKTGLSIRGAQEEDPPDPQLMRLDNMLLAEGVSGPEKGGGSAAAAAAAAASGGSSDNSIEHSDYRAKLTQIRQIYHTELEKYEQACNEFTTHVMNLLREQSRTRPISPKEIERMVGIIHRKFSSIQMQLKQSTCEAVMILRSRFLDARRKRRNFSKQATEILNEYFYSHLSNPYPSEEAKEELAKKCSITVSQSLVKDPKERGSKGSDIQPTSVVSNWFGNKRIRYKKNIGKFQEEANLYAAKTAVTAAHAVAAAVQNNQTNSPTTPNSGSSGSFNLPNSGDMFMNMQSLNGDSYQGSQVGANVQSQVDTLRHVINQTGGYSDGLGGNSLYSPHNLNANGGWQDATTPSSVTSPTEGPGSVHSDTSN

SEQ ID NO: 831796 - protein, 276 aa, Homo sapiens
MKPALFSVLCEIKEKTGLSIRGAQEEDPPDPQLMRLDNMLLAEGVSGPEKGGGSAAAAAAAAASGGSSDNSIEHSDYRAKLTQIRQIYHTELEKYEQACNEFTTHVMNLLREQSRTRPISPKEIERMVGIIHRKFSSIQMQLKQSTCEAVMILRSRFLDARRKRRNFSKQATEILNEYFYSHLSNPYPSEEAKEELAKKCSITVSQVSNWFGNKRIRYKKNIGKFQEEANLYAAKTAVTAAHAVAAAVQNNQTNSPTTPNSGGYPPSCYQSDGRLQ

SEQ ID NO: 831797 - protein, 170 aa, Homo sapiens; identical to SEQ ID NO: 831793

SEQ ID NO: 831798 - protein, 170 aa, Homo sapiens; identical to SEQ ID NO: 831793

SEQ ID NO: 831799 - protein, 253 aa, Homo sapiens; identical to SEQ ID NO: 831794

SEQ ID NO: 831800 - protein, 107 aa, Homo sapiens
MDDQSRMLQTLAGVNLAGHSVQGGMALPPPPHGHEGADGDGRKQDIGDILHQIMTITDQSLDEAQAKKHALNCHRMKPALFSVLCEIKEKTECPHLNFFLTTHGFGL

SEQ ID NO: 831801 - protein, 127 aa, Homo sapiens
MDDQSRMLQTLAGVNLAGHSVQGGMALPPPPHGHEGADGDGRKQDIGDILHQIMTITDQSLDEAQAKKHALNCHRMKPALFSVLCEIKEKTGKTLRPAVGLETPEVGVGATPSTLQLRAAAFGHRHL

SEQ ID NO: 831802 - protein, 434 aa, Homo sapiens; identical to SEQ ID NO: 831792

SEQ ID NO: 831803 - protein, 351 aa, Homo sapiens
MDDQSRMLQTLAGVNLAGHSVQGGMALPPPPHGHEGADGDGRKQDIGDILHQIMTITDQSLDEAQAKKHALNCHRMKPALFSVLCEIKEKTGLSIRGAQEEDPPDPQLMRLDNMLLAEGVSGPEKGGGSAAAAAAAAASGGSSDNSIEHSDYRAKLTQIRQIYHTELEKYEQACNEFTTHVMNLLREQSRTRPISPKEIERMVGIIHRKFSSIQMQLKQSTCEAVMILRSRFLDARRKRRNFSKQATEILNEYFYSHLSNPYPSEEAKEELAKKCSITVSQVSNWFGNKRIRYKKNIGKFQEEANLYAAKTAVTAAHAVAAAVQNNQTNSPTTPNSGGYPPSCYQSDGRLQ

SEQ ID NO: 831804 - protein, 271 aa, Homo sapiens
CFLENKSGAITCLSIRGAQEEDPPDPQLMRLDNMLLAEGVSGPEKGGGSAAAAAAAAASGGSSDNSIEHSDYRAKLTQIRQIYHTELEKYEQACNEFTTHVMNLLREQSRTRPISPKEIERMVGIIHRKFSSIQMQLKQSTCEAVMILRSRFLDARRKRRNFSKQATEILNEYFYSHLSNPYPSEEAKEELAKKCSITVSQVSNWFGNKRIRYKKNIGKFQEEANLYAAKTAVTAAHAVAAAVQNNQTNSPTTPNSGGYPPSCYQSDGRLQ

SEQ ID NO: 831805 - protein, 170 aa, Homo sapiens; identical to SEQ ID NO: 831793

SEQ ID NO: 831806 - protein, 170 aa, Homo sapiens; identical to SEQ ID NO: 831793

SEQ ID NO: 831807 - protein, 129 aa, Homo sapiens
LPLPLPLFLLLPRRRRRRRRLSLRLSRRPLPPARGGMDDQSRMLQTLAGVNLAGHSVQGGMALPPPPHGHEGADGDGRKQDIGDILHQIMTITDQSLDEAQANLECSLTTSEQYSRCSLSLSYLFASCN

SEQ ID NO: 831808 - protein, 92 aa, Homo sapiens
MAYRGQGQKVQKVMVQPINLIFRYLQNRSRIQVWLYEQVNMRIEGCIIGFDEYMNLVLDDAEEIHSKTKSRKQLGRIMLKGDNITLLQSVSN

SEQ ID NO: 831809 - protein, 92 aa, Homo sapiens; identical to SEQ ID NO: 831808

SEQ ID NO: 831810 - protein, 68 aa, Homo sapiens
SGSLFRKLLSEAACGCALCEIPPWRTVARVRKCRRLWCSPSYPTQDVRTRRFGSEYGVRRRRLRAGLG

SEQ ID NO: 831811 - protein, 68 aa, Homo sapiens; identical to SEQ ID NO: 831810

SEQ ID NO: 831812 - protein, 68 aa, Homo sapiens; identical to SEQ ID NO: 831810

SEQ ID NO: 831813 - protein, 104 aa, Homo sapiens
MAYRGQGQKVQKVMVQPINLIFRYLQNRSRIQVWLYEQVNMRIEGCIINDQSMGEMQIIGGDDLSTLAGKKTLGRRDSSDDWEIPDGQITVGQRIGSGSFGTVY

SEQ ID NO: 831814 - protein, 68 aa, Homo sapiens; identical to SEQ ID NO: 831810

SEQ ID NO: 831815 - protein, 92 aa, Homo sapiens; identical to SEQ ID NO: 831808

SEQ ID NO: 831816 - protein, 92 aa, Homo sapiens; identical to SEQ ID NO: 831808

SEQ ID NO: 831817 - protein, 735 aa, Homo sapiens
CGPRLPFKRAGPAPAAPHRGDQEARWFSGAAPSRLPPAPRFSGPAAIFLSAQGPPSGAMQPTLLLSLLGAVGLAAVNSMPVDNRNHNEGMVTRCIIEVLSNALSKSSAPPITPECRQVLKTSRKDVKDKETTENENTKFEVRLLRDPADASEAHESSSRGEAGAPGEEDIQGPTKADTEKWAEGGGHSRERADEPQWSLYPSDSQVSEEVKTRHSEKSQREDEEEEEGENYQKGERGEDSSEEKHLEEPGETQNAFLNERKQASAIKKEELVARSETHAAGHSQEKTHSREKSSQESGEEAGSQENHPQESKGQPRSQEESEEGEEDATSEVDKRRTRPRHHHGRSRPDRSSQGGSLPSEEKGHPQEESEESNVSMASLGEKRDHHSTHYRASEEEPEYGEEIKGYPGVQAPEDLEWERYRGRGSEEYRAPRPQSEESWDEEDKRNYPSLELDKMAHGYGEESEEERGLEPGKGRHHRGRGGEPRAYFMSDTREEKRFLGEGHHRVQENQMDKARRHPQGAWKELDRNYLNYGEEGAPGKWQQQGDLQDTKENREEARFQDKQYSSHHTAEKRKRLGELFNPYYDPLQWKSSHFERRDNMNDNFLEGEEENELTLNEKNFFPEYNYDWWEKKPFSEDVNWGYEKRNLARVPKLDLKRQYDRVAQLDQLLHYRKKSAEFPDFYDSEEPVSTHQEAENEKDRADQTVLTEDEKKELENLAAMDLELQKIAEKFSQRG

SEQ ID NO: 831818 - protein, 767 aa, Homo sapiens
AAPACPLKERGLRRPRHTAGTRRHAGFPGPLHRAFLLRLASPVQPPSSFPHRGRRAGPCSQRCFSASWEPWGWRSFICRRYYRFPAERESAEMGVFSSSHLEDEENTVNSMPVDNRNHNEGMVTRCIIEVLSNALSKSSAPPITPECRQVLKTSRKDVKDKETTENENTKFEVRLLRDPADASEAHESSSRGEAGAPGEEDIQGPTKADTEKWAEGGGHSRERADEPQWSLYPSDSQVSEEVKTRHSEKSQREDEEEEEGENYQKGERGEDSSEEKHLEEPGETQNAFLNERKQASAIKKEELVARSETHAAGHSQEKTHSREKSSQESGEEAGSQENHPQESKGQPRSQEESEEGEEDATSEVDKRRTRPRHHHGRSRPDRSSQGGSLPSEEKGHPQEESEESNVSMASLGEKRDHHSTHYRASEEEPEYGEEIKGYPGVQAPEDLEWERYRGRGSEEYRAPRPQSEESWDEEDKRNYPSLELDKMAHGYGEESEEERGLEPGKGRHHRGRGGEPRAYFMSDTREEKRFLGEGHHRVQENQMDKARRHPQGAWKELDRNYLNYGEEGAPGKWQQQGDLQDTKENREEARFQDKQYSSHHTAEKRKRLGELFNPYYDPLQWKSSHFERRDNMNDNFLEGEEENELTLNEKNFFPEYNYDWWEKKPFSEDVNWGYEKRNLARVPKLDLKRQYDRVAQLDQLLHYRKKSAEFPDFYDSEEPVSTHQEAENEKDRADQTVLTEDEKKELENLAAMDLELQKIAEKFSQRG

SEQ ID NO: 831819 - protein, 716 aa, Homo sapiens
CGPRLPFKRAGPAPAAPHRGDQEARWFSGAAPSRLPPAPRFSGPAAIFLSAQGPPSGAMQPTLLLSLLGAVGLAAVNSMPVDNRNHNEGMVTRCIIEVLSNALSKSSAPPITPECRQVLKTSRKDVKDKETTENENTKFEVRLLRDPADASEAHESSSRGEAGAPGEEDIQGPTKADTEKWAEGGGHSRERADEPQWSLYPSDSQVSEEVKTRHSEKSQREDEEEEEGENYQKGERGEDSSEEKHLEEPGETQNAFLNERKQASAIKKEELVARSETHAAGHSQEKTHSREKSSQESGEEAGSQENHPQESKGQPRSQEESEEGEEDATSEVDKRRTRPRHHHGRSRPDRSSQGGSLPSEEKGHPQEESEESNVSMASLGEKRDHHSTHYRASEEEPEYGEEIKGYPGVQAPEDLEWERYRGRGSEEYRAPRPQSEESWDEEDKRNYPSLELDKMAHGYGEESEEERGLEPGKGRHHRGRGGEPRAYFMSDTREEKRFLGEGHHRVQENQMDKARRHPQGAWKELDRNYLNYGEEGAPGKWQQQGDLQDTKENREEARFQDKQYSSHHTAEKRKRLGELFNPYYDPLQWKSSHFERRDNMNDNFLEGEEENELTLNEKNFFPEYNYDWWEKKPFSEDVNWGYEKRNLARVPKLDLKRQYDRVAQLDQLLHYRKKSAEFPDFYDSEEPVSTHQEAENEKDRADQTVLTEDEKFSQRG

SEQ ID NO: 831820 - protein, 574 aa, Homo sapiens
CGPRLPFKRAGPAPAAPHRGDQEARWFSGAAPSRLPPAPRFSGPAAIFLSAQGPPSGAMQPTLLLSLLGAVGLAAVNSMPVDNRNHNEGMVTRCIIEVLSNALSKSSAPPITPECRQVLKTSRKDVKDKETTENENTKFEVRLLRDPADASEAHESSSRGEAGAPGEEDIQGPTKADTEKWAEGGGHSRERADEPQWSLYPSDSQVSEEVKTRHSEKSQREDEEEEEGENYQKGERGEDSSEEKHLEEPGETQNAFLNERKQASAIKKEELVARSETHAAGHSQEKTHSREKSSQESGEEAGSQENHPQESKGQPRSQEESEEGEEDATSEVDKRRTRPRHHHGRSRPDRSSQGGSLPSEEKGHPQEESEESNVSMASLGEKRDHHSTHYRASEEEPEYGEEIKGYPGVQAPEDLEWERYRGRGSEEYRAPRPQSEESWDEEDKRNYPSLELDKMAHGYGEESEEERGLEPGKGRHHRGRGGEPRANPVGTRQETDGQRPRARNPGRKAPNGVKRTTHTERTREYTTPRLRAHRQKTHPDRRSHPPTRTKRNGTRTVNSMSANPATQPHHAPPP

SEQ ID NO: 831821 - protein, 174 aa, Homo sapiens
CGPRLPFKRAGPAPAAPHRGDQEARWFSGAAPSRLPPAPRFSGPAAIFLSAQGPPSGAMQPTLLLSLLGAVGLAAVNSMPVDNRNLARVPKLDLKRQYDRVAQLDQLLHYRKKSAEFPDFYDSEEPVSTHQEAENEKDRADQTVLTEDEKKELENLAAMDLELQKIAEKFSQRG

SEQ ID NO: 831822 - protein, 717 aa, Homo sapiens
CGPRLPFKRAGPAPAAPHRGDQEARWFSGAAPSRLPPAPRFSGPAAIFLSAQGPPSGAMQPTLLLSLLGAVGLAAVNSMPVDNRNHNEGMVTRCIIEVLSNALSKSSAPPITPECRQVLKTSRKDVKDKETTENENTKFEVRLLRDPADASEAHESSSRGEAGAPGEEDIQGPTKADTEKWAEGGGHSRERADEPQWSLYPSDSQVSEEVKTRHSEKSQREDEEEEEGENYQKGERGEDSSEEKHLEEPGETQNAFLNERKQASAIKKEELVARSETHAAGHSQEKTHSREKSSQESGEEAGSQENHPQESKGQPRSQEESEEGEEDATSEVDKRRTRPRHHHGRSRPDRSSQGGSLPSEEKGHPQEESEESNVSMASLGDGEEIKGYPGVQAPEDLEWERYRGRGSEEYRAPRPQSEESWDEEDKRNYPSLELDKMAHGYGEESEEERGLEPGKGRHHRGRGGEPRAYFMSDTREEKRFLGEGHHRVQENQMDKARRHPQGAWKELDRNYLNYGEEGAPGKWQQQGDLQDTKENREEARFQDKQYSSHHTAEKRKRLGELFNPYYDPLQWKSSHFERRDNMNDNFLEGEEENELTLNEKNFFPEYNYDWWEKKPFSEDVNWGYEKRNLARVPKLDLKRQYDRVAQLDQLLHYRKKSAEFPDFYDSEEPVSTHQEAENEKDRADQTVLTEDEKKELENLAAMDLELQKIAEKFSQRG

SEQ ID NO: 831823 - protein, 735 aa, Homo sapiens; identical to SEQ ID NO: 831817

SEQ ID NO: 831824 - protein, 348 aa, Homo sapiens
CGPRLPFKRAGPAPAAPHRGDQEARWFSGAAPSRLPPAPRFSGPAAIFLSAQGPPSGAMQPTLLLSLLGAVGLAAVNSMPVDNRNHNEGMVTRCIIEVLSNALSKSSAPPITPECRQVLKTSRKDVKDKETTENENTKFEVRLLRDPADASEAHESSSRGEAGAPGEEDIQGPTKADTEKWAEGGGHSRERADEPQWSLYPSDSQVSEEVKTRHSEKSQREDEEEEEGENYQKGERGEDSSEEKKPFSEDVNWGYEKRNLARVPKLDLKRQYDRVAQLDQLLHYRKKSAEFPDFYDSEEPVSTHQEAENEKDRADQTVLTEDEKKELENLAAMDLELQKIAEKFSQRG

SEQ ID NO: 831825 - protein, 71 aa, Homo sapiens
MKDSASAASAGAELVLRRFPWAFLVRRPLLPPPETLPDRWLQAAEEEEVELLPFPRSRHCTLAWGTERDSV

SEQ ID NO: 831826 - protein, 1925 aa, Homo sapiens
MKDSASAASAGAELVLRRFPWAFLVRRPLLPPPETLPDRWLQAAEEEEVELLPFRSPPREENVPEILDRKHFDQEGMCIYYTKFQGPSQMPSRMSNLSATRQVFLGRLVKQHACFTASLAMKYSDVKLGDHFNQAIEEWSVEKHTEQSPTDAYGVINFQGGSHSYRAKYVRLSYDTKPEVILQLLLKEWQMELPKLVISVHGGMQKFELHPRIKQLLGKGLIKAAVTTGAWILTGGVNTGVAKHVGDALKEHASRSSRKICTIGIAPWGVIENRNDLVGRDVVAPYQTLLNPLSKLNVLNNLHSHFILVDDGTVGKYGAEVRLRRELEKTINQQRIHARIGQGVPVVALIFEGGPNVILTVLEYLQESPPVPVVVCEGTGRAADLLAYIHKQTEEGGNLPDAAEPDIISTIKKTFNFGQNEALHLFQTLMECMKRKELITVFHIGSDEHQDIDVAILTALLKGTNASAFDQLILTLAWDRVDIAKNHVFVYGQQWLVGSLEQAMLDALVMDRVAFVKLLIENGVSMHKFLTIPRLEELYNTKQGPTNPMLFHLVRDVKQGNLPPGYKITLIDIGLVIEYLMGGTYRCTYTRKRFRLIYNSLGGNNRRSGRNTSSSTPQLRKSHESFGNRADKKEKMRHNHFIKTAQPYRPKIDTVMEEGKKKRTKDEIVDIDDPETKRFPYPLNELLIWACLMKRQVMARFLWQHGEESMAKALVACKIYRSMAYEAKQSDLVDDTSEELKQYSNDFGQLAVELLEQSFRQDETMAMKLLTYELKNWSNSTCLKLAVSSRLRPFVAHTCTQMLLSDMWMGRLNMRKNSWYKVILSILVPPAILLLEYKTKAEMSHIPQSQDAHQMTMDDSENNFQNITEEIPMEVFKEVRILDSNEGKNEMEIQMKSKKLPITRKFYAFYHAPIVKFWFNTLAYLGFLMLYTFVVLVQMEQLPSVQEWIVIAYIFTYAIEKVREIFMSEAGKVNQKIKVWFSDYFNISDTIAIISFFIGFGLRFGAKWNFANAYDNHVFVAGRLIYCLNIIFWYVRLLDFLAVNQQAGPYVMMIGKMVANMFYIVVIMALVLLSFGVPRKAILYPHEAPSWTLAKDIVFHPYWMIFGEVYAYEIDVCANDSVIPQICGPGTWLTPFLQAVYLFVQYIIMVNLLIAFFNNVYLQVKAISNIVWKYQRYHFIMAYHEKPVLPPPLIILSHIVSLFCCICKRRKKDKTSDGPKLFLTEEDQKKLHDFEEQCVEMYFNEKDDKFHSGSEERIRVTFERVEQMCIQIKEVGDRVNYIKRSLQSLDSQIGHLQDLSALTVDTLKTLTAQKASEASKVHNEITRELSISKHLAQNLIDDGPVRPSVWKKHGVVNTLSSSLPQGDLESNNPFHCNILMKDDKDPQCNIFGQDLPAVPQRKEFNFPEAGSSSGALFPSAVSPPELRQRLHGVELLKIFNKNQKLGSSSTSIPHLSSPPTKFFVSTPPQPSCKSHLETGTKDQETVCSKATEGDNTEFGAFVGHRDSMDLQRFKETSNKIKILSNNNTSENTLKRASSLAGFTDCHRTSIPVHSEQEKISRRPSTEDTHEVDSKAALIPDWLQDRPSNREMPSEEGTLNGLTSPFKPAMDTNYYYSAVERNNLMRLSQSIPFTPVPPRGEPVTVYRLEESSPNILNNSMSSWSQLGLCAKIEFLSKEEMGGGLRRAVKVQCTWSEHDILKSGHLYIIKSFLPEVVNTWSSIYKEDTVLHLCLREIQQQRAAQKLTFAFNQMKPKSIPYSPRFLEVFLLYCHSAGQWFAVEECMTGEFRKYNNNNGDEIIPTNTLEEIMLAFSHWTYEYTRGELLVLDLQGVGENLTDPSVIKAEEKRSCDMVFGPANLGEDAIKNFRAKHHCNSCCRKLKLPDLKRNDYTPDKIIFPQDEPSDLNLQPGNSTKESESTNSVRLML

SEQ ID NO: 831827 - protein, 1925 aa, Homo sapiens; identical to SEQ ID NO: 831826

SEQ ID NO: 831828 - protein, 1577 aa, Homo sapiens
MKDSASAASAGAELVLRRFPWAFLVRRPLLPPPETLPDRWLQAAEEEEVELLPFRSPPREENVPEILDRKHFDQEGMCIYYTKFQGPSQMPSRMSNLSATRQVFLGRLVKQHACFTASLAMKYSDVKLGDHFNQAIEEWSVEKHTEQSPTDAYGVINFQGGSHSYRAKYVRLSYDTKPEVILQLLLKEWQMELPKLVISVHGGMQKFELHPRIKQLLGKGLIKAAVTTGAWILTGGVNTGVAKHVGDALKEHASRSSRKICTIGIAPWGVIENRNDLVGRDVVAPYQTLLNPLSKLNVLNNLHSHFILVDDGTVGKYGAEVRLRRELEKTINQQRIHARIGQGVPVVALIFEGGPNVILTVLEYLQESPPVPVVVCEGTGRAADLLAYIHKQTEEGGNLPDAAEPDIISTIKKTFNFGQNEALHLFQTLMECMKRKELITVFHIGSDEHQDIDVAILTALLKGTNASAFDQLILTLAWDRVDIAKNHVFVYGQQWLVGSLEQAMLDALVMDRVAFVKLLIENGVSMHKFLTIPRLEELYNTKQGPTNPMLFHLVRDVKQGNLPPGYKITLIDIGLVIEYLMGGTYRCTYTRKRFRLIYNSLGGNNRRSGRNTSSSTPQLRKSHESFGNRADKKEKMRHNHFIKTAQPYRPKIDTVMEEGKKKRTKDEIVDIDDPETKRFPYPLNELLIWACLMKRQVMARFLWQHGEESMAKALVACKIYRSMAYEAKQSDLVDDTSEELKQYSNDFGQLAVELLEQSFRQDETMAMKLLTYELKNWSNSTCLKLAVSSRLRPFVAHTCTQMLLSDMWMGRLNMRKNSWYKVILSILVPPAILLLEYKTKAEMSHIPQSQDAHQMTMDDSENNFQNITEEIPMEVFKEVRILDSNEGKNEMEIQMKSKKLPITRKFYAFYHAPIVKFWFNTLAYLGFLMLYTFVVLVQMEQLPSVQEWIVIAYIFTYAIEKVREIFMSEAGKVNQKIKVWFSDYFNISDTIAIISFFIGFGLRFGAKWNFANAYDNHVFVAGRLIYCLNIIFWYVRLLDFLAVNQQAGPYVMMIGKMVANMFYIVVIMALVLLSFGVPRKAILYPHEAPSWTLAKDIVFHPYWMIFGEVYAYEIDVCANDSVIPQICGPGTWLTPFLQAVYLFVQYIIMVNLLIAFFNNVYLQVKAISNIVWKYQRYHFIMAYHEKPVLPPPLIILSHIVSLFCCICKRRKKDKTSDGPKLFLTEEDQKKLHDFEEQCVEMYFNEKDDKFHSGSEERIRVTFERVEQMCIQIKEVGDRVNYIKRSLQSLDSQIGHLQDLSALTVDTLKTLTAQKASEASKVHNEITRELSISKHLAQNLIDDGPVRPSVWKKHGVVNTLSSSLPQGDLESNNPFHCNILMKDDKDPQCNIFGQDLPAVPQRKEFNFPEAGSSSGALFPSAVSPPELRQRLHGVELLKIFNKNQKLGSSSTSIPHLSSPPTKFFVSTPPQPSCKSHLETGTKDQETVCSKATEGDNTEFGAFVGHRDSMDLQRFKETSNKIKILSNNNTSENTLKRASSLAGFTDCHRTSIPVHSEQAEKKSRRGREFSSSSSSSRRP

SEQ ID NO: 831829 - protein, 865 aa, Homo sapiens
MFYIVVIMALVLLSFGVPRKAILYPHEAPSWTLAKDIVFHPYWMIFGEVYAYEIDVCANDSVIPQICGPGTWLTPFLQAVYLFVQYIIMVNLLIAFFNNVYLQVKAISNIVWKYQRYHFIMAYHEKPVLPPPLIILSHIVSLFCCICKRRKKDKTSDGPKLFLTEEDQKKLHDFEEQCVEMYFNEKDDKFHSGSEERIRVTFERVEQMCIQIKEVGDRVNYIKRSLQSLDSQIGHLQDLSALTVDTLKTLTAQKASEASKVHNEITRELSISKHLAQNLIDDGPVRPSVWKKHGVVNTLSSSLPQGDLESNNPFHCNILMKDDKDPQCNIFGQDLPAVPQRKEFNFPEAGSSSGALFPSAVSPPELRQRLHGVELLKIFNKNQKLGSSSTSIPHLSSPPTKFFVSTPPQPSCKSHLETGTKDQETVCSKATEGDNTEFGAFVGHRDSMDLQRFKETSNKIKILSNNNTSENTLKRASSLAGFTDCHRTSIPVHSEQEKISRRPSTEDTHEVDSKAALIPDWLQDRPSNREMPSEEGTLNGLTSPFKPAMDTNYYYSAVERNNLMRLSQSIPFTPVPPRGEPVTVYRLEESSPNILNNSMSSWSQLGLCAKIEFLSKEEMGGGLRRAVKVQCTWSEHDILKSGHLYIIKSFLPEVVNTWSSIYKEDTVLHLCLREIQQQRAAQKLTFAFNQMKPKSIPYSPRFLEVFLLYCHSAGQWFAVEECMTGEFRKYNNNNGDEIIPTNTLEEIMLAFSHWTYEYTRGELLVLDLQGVGENLTDPSVIKAEEKRSCDMVFGPANLGEDAIKNFRAKHHCNSCCRKLKLPDLKRNDYTPDKIIFPQDEPSDLNLQPGNSTKESESTNSVRLML

SEQ ID NO: 831830 - protein, 1907 aa, Homo sapiens
MKDSASAASAGAELVLRRFPWAFLVRRPLLPPPETLPDRWLQAAEEEEVELLPFRSPPREENVPEILDRKHFDQEGMCIYYTKFQGPSQMPSRMSNLSATRQVFLGRLVKQHACFTASLAMKYSDVKLGDHFNQAIEEWSVEKHTEQSPTDAYGVINFQGGSHSYRAKYVRLSYDTKPEVILQLLLKEWQMELPKLVISVHGGMQKFELHPRIKQLLGKGLIKAAVTTGAWILTGGVNTGVAKHVGDALKEHASRSSRKICTIGIAPWGVIENRNDLVGRDVVAPYQTLLNPLSKLNVLNNLHSHFILVDDGTVGKYGAEVRLRRELEKTINQQRIHARIGQGVPVVALIFEGGPNVILTVLEYLQESPPVPVVVCEGTGRAADLLAYIHKQTEEGGNLPDAAEPDIISTIKKTFNFGQNEALHLFQTLMECMKRKELITVFHIGSDEHQDIDVAILTALLKGTNASAFDQLILTLAWDRVDIAKNHVFVYGQQWLVGSLEQAMLDALVMDRVAFVKLLIENGVSMHKFLTIPRLEELYNTKQGPTNPMLFHLVRDVKQGNLPPGYKITLIDIGLVIEYLMGGTYRCTYTRKRFRLIYNSLGGNNRRSGRNTSSSTPQLRKSHESFGNRADKKEKMRHNHFIKTAQPYRPKIDTVMEEGKKKRTKDEIVDIDDPETKRFPYPLNELLIWACLMKRQVMARFLWQHGEESMAKALVACKIYRSMAYEAKQSDLVDDTSEELKQYSNDFGQLAVELLEQSFRQDETMAMKLLTYELKNWSNSTCLKLAVSSRLRPFVAHTCTQMLLSDMWMGRLNMRKNSWYKVILSILVPPAILLLEYKTKAEMSHIPQSQDAHQMTMDDSENNFQNITEEIPMEVFKEVRILDSNEGKNEMEIQMKSKKLPITRKFYAFYHAPIVKFWFNTLAYLGFLMLYTFVVLVQMEQLPSVQEWIVIAYIFTYAIEKVREIFMSEAGKVNQKIKVWFSDYFNISDTIAIISFFIGFGLRFGAKWNFANAYDNHVFVAGRLIYCLNIIFWYVRLLDFLAVNQQAGPYVMMIGKMVANMFYIVVIMALVLLSFGVPRKAILYPHEAPSWTLAKDIVFHPYWMIFGEVYAYEIDVCANDSVIPQICGPGTWLTPFLQAVYLFVQYIIMVNLLIAFFNNVYLQVKAISNIVWKYQRYHFIMAYHEKPVLPPPLIILSHIVSLFCCICKRRKKDKTSDGPKLFLTEEDQKKLHDFEEQCVEMYFNEKDDKFHSGSEERIRVTFERVEQMCIQIKEVGDRVNYIKRSLQSLDSQIGHLQDLSALTVDTLKTLTAQKASEASKVHNEITRELSISKHLAQNLIDDGPVRPSVWKKHGVVNTLSSSLPQGDLESNNPFHCNILMKDDKDPQCNIFGQDLPAVPQRKEFNFPEAGSSSGALFPSAVSPPELRQRLHGVELLKIFNKNQFFVSTPPQPSCKSHLETGTKDQETVCSKATEGDNTEFGAFVGHRDSMDLQRFKETSNKIKILSNNNTSENTLKRASSLAGFTDCHRTSIPVHSEQEKISRRPSTEDTHEVDSKAALIPDWLQDRPSNREMPSEEGTLNGLTSPFKPAMDTNYYYSAVERNNLMRLSQSIPFTPVPPRGEPVTVYRLEESSPNILNNSMSSWSQLGLCAKIEFLSKEEMGGGLRRAVKVQCTWSEHDILKSGHLYIIKSFLPEVVNTWSSIYKEDTVLHLCLREIQQQRAAQKLTFAFNQMKPKSIPYSPRFLEVFLLYCHSAGQWFAVEECMTGEFRKYNNNNGDEIIPTNTLEEIMLAFSHWTYEYTRGELLVLDLQGVGENLTDPSVIKAEEKRSCDMVFGPANLGEDAIKNFRAKHHCNSCCRKLKLPDLKRNDYTPDKIIFPQDEPSDLNLQPGNSTKESESTNSVRLML

SEQ ID NO: 831831 - protein, 1598 aa, Homo sapiens
MKDSASAASAGAELVLRRFPWAFLVRRPLLPPPETLPDRWLQAAEEEEVELLPFRSPPREENVPEILDRKHFDQEGMCIYYTKFQGPSQMPSRMSNLSATRQVFLGRLVKQHACFTASLAMKYSDVKLGDHFNQAIEEWSVEKHTEQSPTDAYGVINFQGGSHSYRAKYVRLSYDTKPEVILQLLLKEWQMELPKLVISVHGGMQKFELHPRIKQLLGKGLIKAAVTTGAWILTGGVNTGVAKHVGDALKEHASRSSRKICTIGIAPWGVIENRNDLVGRDVVAPYQTLLNPLSKLNVLNNLHSHFILVDDGTVGKYGAEVRLRRELEKTINQQRIHARIGQGVPVVALIFEGGPNVILTVLEYLQESPPVPVVVCEGTGRAADLLAYIHKQTEEGGNLPDAAEPDIISTIKKTFNFGQNEALHLFQTLMECMKRKELITVFHIGSDEHQDIDVAILTALLKGTNASAFDQLILTLAWDRVDIAKNHVFVYGQQWLVGSLEQAMLDALVMDRVAFVKLLIENGVSMHKFLTIPRLEELYNTKQGPTNPMLFHLVRDVKQGNLPPGYKITLIDIGLVIEYLMGGTYRCTYTRKRFRLIYNSLGGNNRRSGRNTSSSTPQLRKSHESFGNRADKKEKMRHNHFIKTAQPYRPKIDTVMEEGKKKRTKDEIVDIDDPETKRFPYPLNELLIWACLMKRQVMARFLWQHGEESMAKALVACKIYRSMAYEAKQSDLVDDTSEELKQYSNDFGQLAVELLEQSFRQDETMAMKLLTYELKNWSNSTCLKLAVSSRLRPFVAHTCTQMLLSDMWMGRLNMRKNSWYKVILSILVPPAILLLEYKTKAEMSHIPQSQDAHQMTMDDSENNFQNITEEIPMEVFKEVRILDSNEGKNEMEIQMKSKKLPITRKFYAFYHAPIVKFWFNTLAYLGFLMLYTFVVLVQMEQLPSVQEWIVIAYIFTYAIEKVREIFMSEAGKVNQKIKVWFSDYFNISDTIAIISFFIGFGLRFGAKWNFANAYDNHVFVAGRLIYCLNIIFWYVRLLDFLAVNQQAGPYVMMIGKMVANMFYIVVIMALVLLSFGVPRKAILYPHEAPSWTLAKDIVFHPYWMIFGEVYAYEIDVCANDSVIPQICGPGTWLTPFLQAVYLFVQYIIMVNLLIAFFNNVYLQVKAISNIVWKYQRYHFIMAYHEKPVLPPPLIILSHIVSLFCCICKRRKKDKTSDGPKLFLTEEDQKKLHDFEEQCVEMYFNEKDDKFHSGSEERIRVTFERVEQMCIQIKEVGDRVNYIKRSLQSLDSQIGHLQDLSALTVDTLKTLTAQKASEASKVHNEITRELSISKHLAQNLIDDGPVRPSVWKKHGVVNTLSSSLPQGDLESNNPFHCNILMKDDKDPQCNIFGQDLPAVPQRKEFNFPEAGSSSGALFPSAVSPPELRQRLHGVELLKIFNKNQKLGSSSTSIPHLSSPPTKFFVSTPPQPSCKSHLETGTKDQETVCSKATEGDNTEFGAFVGHRDSMDLQRFKETSNKIKILSNNNTSENTLKRASSLAGFTDCHRTSIPVHSEQEKISRRPSTEDTHEVDSKAALIPVCRFQLNRYILLNTLNFFR

SEQ ID NO: 831832 - protein, 1059 aa, Homo sapiens
MKDSASAASAGAELVLRRFPWAFLVRRPLLPPPETLPDRWLQAAEEEEVELLPFRSPPREENVPEILDRKHFDQEGMCIYYTKFQGPSQMPSRMSNLSATRQVFLGRLVKQHACFTASLAMKYSDVKLGDHFNQAIEEWSVEKHTEQSPTDAYGVINFQGGSHSYRAKYVRLSYDTKPEVILQLLLKEWQMELPKLVISVHGGMQKFELHPRIKQLLGKGLIKAAVTTGAWILTGGVNTGVAKHVGDALKEHASRSSRKICTIGIAPWGVIENRNDLVGRDVVAPYQTLLNPLSKLNVLNNLHSHFILVDDGTVGKYGAEVRLRRELEKTINQQRIHARIGQGVPVVALIFEGGPNVILTVLEYLQESPPVPVVVCEGTGRAADLLAYIHKQTEEGGNLPDAAEPDIISTIKKTFNFGQNEALHLFQTLMECMKRKELITVFHIGSDEHQDIDVAILTALLKGTNASAFDQLILTLAWDRVDIAKNHVFVYGQQWLVGSLEQAMLDALVMDRVAFVKLLIENGVSMHKFLTIPRLEELYNTKQGPTNPMLFHLVRDVKQGNLPPGYKITLIDIGLVIEYLMGGTYRCTYTRKRFRLIYNSLGGNNRRSGRNTSSSTPQLRKSHESFGNRADKKEKMRHNHFIKTAQPYRPKIDTVMEEGKKKRTKDEIVDIDDPETKRFPYPLNELLIWACLMKRQVMARFLWQHGEESMAKALVACKIYRSMAYEAKQSDLVDDTSEELKQYSNDFGQLAVELLEQSFRQDETMAMKLLTYELKNWSNSTCLKLAVSSRLRPFVAHTCTQMLLSDMWMGRLNMRKNSWYKVILSILVPPAILLLEYKTKAEMSHIPQSQDAHQMTMDDSENNFQNITEEIPMEVFKEVRILDSNEGKNEMEIQMKSKKLPITRKFYAFYHAPIVKFWFNTLAYLGFLMLYTFVVLVQMEQLPSVQEWIVIAYIFTYAIEKVREIFMSEAGKVNQKIKVWFSDYFNISDTIAIISFFIGFGLRFGAKWNFANAYDNHVFVAGRLIYCLNIIFWYVRLLDFLAVNQQAGPYVMMIGKMVS

SEQ ID NO: 831833 - protein, 331 aa, Homo sapiens
MKDSASAASAGAELVLRRFPWAFLVRRPLLPPPETLPDRWLQAAEEEEVELLPFRSPPREENVPEILDRKHFDQEGMCIYYTKFQGPSQMPSRMSNLSATRQVFLGRLVKQHACFTASLAMKYSDVKLGDHFNQAIEEWSVEKHTEQSPTDAYGVINFQGGSHSYRAKYVRLSYDTKPEVILQLLLKEWQMELPKLVISVHGGMQKFELHPRIKQLLGKGLIKAAVTTGAWILTGGVNTGVAKHVGDALKEHASRSSRKICTIGIAPWGVIENRNDLVGRDVVAPYQTLLNPLSKLNVLNNLHSHFILVDDGTVGKYGAEVRLRWCGLRWC

SEQ ID NO: 831834 - protein, 1925 aa, Homo sapiens; identical to SEQ ID NO: 831826

SEQ ID NO: 831835 - protein, 1750 aa, Homo sapiens
MKDSASAASAGAELVLRRFPWAFLVRRPLLPPPETLPDRWLQAAEEEEVELLPFRSPPREENVPEILDRKHFDQEGMCIYYTKFQGPSQMPSRMSNLSATRQVFLGRLVKQHACFTASLAMKYSDVKLGDHFNQAIEEWSVEKHTEQSPTDAYGVINFQGGSHSYRAKYVRLSYDTKPEVILQLLLKEWQMELPKLVISVHGGMQKFELHPRIKQLLGKGLIKAAVTTGAWILTGGVNTGVAKHVGDALKEHASRSSRKICTIGIAPWGVIENRNDLVGRDVVAPYQTLLNPLSKLNVLNNLHSHFILVDDGTVGKYGAEVRLRRELEKTINQQRIHARIGQGVPVVALIFEGGPNVILTVLEYLQESPPVPVVVCEGTGRAADLLAYIHKQTEEGGNLPDAAEPDIISTIKKTFNFGQNEALHLFQTLMECMKRKELITVFHIGSDEHQDIDVAILTALLKGTNASAFDQLILTLAWDRVDIAKNHVFVYGQQWLVGSLEQAMLDALVMDRVAFVKLLIENGVSMHKFLTIPRLEELYNTKQGPTNPMLFHLVRDVKQGNLPPGYKITLIDIGLVIEYLMGGTYRCTYTRKRFRLIYNSLGGNNRRSGRNTSSSTPQLRKSHESFGNRADKKEKMRHNHFIKTAQPYRPKIDTVMEEGKKKRTKDEIVDIDDPETKRFPYPLNELLIWACLMKRQVMARFLWQHGEESMAKALVACKIYRSMAYEAKQSDLVDDTSEELKQYSNDFGQLAVELLEQSFRQDETMAMKLLTYELKNWSNSTCLKLAVSSRLRPFVAHTCTQMLLSDMWMGRLNMRKNSWYKVILSILVPPAILLLEYKTKAEMSHIPQSQDAHQMTMDDSENNFQNITEEIPMEVFKEVRILDSNEGKNEMEIQMKSKKLPITRKFYAFYHAPIVKFWFNTLAYLGFLMLYTFVVLVQMEQLPSVQEWIVIAYIFTYAIEKVREIFMSEAGKVNQKIKVWFSDYFNISDTIAIISFFIGFGLRFGAKWNFANAYDNHVFVAGRLIYCLNIIFWYVRLLDFLAVNQQAGPYVMMIGKMVANMFYIVVIMALVLLSFGVPRKAILYPHEAPSWTLAKDIVFHPYWMIFGEVYAYEIDVCANDSVIPQICGPGTWLTPFLQAVYLFVQYIIMVNLLIAFFNNVYLQVKAISNIVWKYQRYHFIMAYHEKPVLPPPLIILSHIVSLFCCICKRRKKDKTSDGPKLFLTEEDQKKLHDFEEQCVEMYFNEKDDKFHSGSEERIRVTFERVEQMCIQIKEVGDRVNYIKRSLQSLDSQIGHLQDLSALTVDTLKTLTAQKASEASKVHNEITRELSISKHLAQNLIDDGPVRPSVWKKHGVVNTLSSSLPQGDLESNNPFHCNILMKDDKDPQCNIFGQDLPAVPQRKEFNFPEAGSSSGALFPSAVSPPELRQRLHGVELLKIFNKNQKLGSSSTSIPHLSSPPTKFFVSTPPQPSCKSHLETGTKDQETVCSKATEGDNTEFGAFVGHRDSMDLQRFKETSNKIKILSNNNTSENTLKRASSLAGFTDCHRTSIPVHSEQEKISRRPSTEDTHEVDSKAALIPDWLQDRPSNREMPSEEGTLNGLTSPFKPAMDTNYYYSAVERNNLMRLSQSIPFTPVPPRGEPVTVYRLEESSPNILNNSMSSWSQLGLCAKIEFLSKEEMGGGLRRAVKVQCTWSEHDILKSGHLYIIKSFLPEVVNTWSSIYKEDTVLHLCLRVSVSEYLIVEHNLSFIF

SEQ ID NO: 831836 - protein, 1925 aa, Homo sapiens; identical to SEQ ID NO: 831826

SEQ ID NO: 831837 - protein, 1591 aa, Homo sapiens
MKDSASAASAGAELVLRRFPWAFLVRRPLLPPPETLPDRWLQAAEEEEVELLPFRSPPREENVPEILDRKHFDQEGMCIYYTKFQGPSQMPSRMSNLSATRQVFLGRLVKQHACFTASLAMKYSDVKLGDHFNQAIEEWSVEKHTEQSPTDAYGVINFQGGSHSYRAKYVRLSYDTKPEVILQLLLKEWQMELPKLVISVHGGMQKFELHPRIKQLLGKGLIKAAVTTGAWILTGGVNTGVAKHVGDALKEHASRSSRKICTIGIAPWGVIENRNDLVGRDVVAPYQTLLNPLSKLNVLNNLHSHFILVDDGTVGKYGAEVRLRRELEKTINQQRIHARIGQGVPVVALIFEGGPNVILTVLEYLQESPPVPVVVCEGTGRAADLLAYIHKQTEEGGNLPDAAEPDIISTIKKTFNFGQNEALHLFQTLMECMKRKELITVFHIGSDEHQDIDVAILTALLKGTNASAFDQLILTLAWDRVDIAKNHVFVYGQQWLVGSLEQAMLDALVMDRVAFVKLLIENGVSMHKFLTIPRLEELYNTKQGPTNPMLFHLVRDVKQGNLPPGYKITLIDIGLVIEYLMGGTYRCTYTRKRFRLIYNSLGGNNRRSGRNTSSSTPQLRKSHESFGNRADKKEKMRHNHFIKTAQPYRPKIDTVMEEGKKKRTKDEIVDIDDPETKRFPYPLNELLIWACLMKRQVMARFLWQHGEESMAKALVACKIYRSMAYEAKQSDLVDDTSEELKQYSNDFGQLAVELLEQSFRQDETMAMKLLTYELKNWSNSTCLKLAVSSRLRPFVAHTCTQMLLSDMWMGRLNMRKNSWYKVILSILVPPAILLLEYKTKAEMSHIPQSQDAHQMTMDDSENNFQNITEEIPMEVFKEVRILDSNEGKNEMEIQMKSKKLPITRKFYAFYHAPIVKFWFNTLAYLGFLMLYTFVVLVQMEQLPSVQEWIVIAYIFTYAIEKVREIFMSEAGKVNQKIKVWFSDYFNISDTIAIISFFIGFGLRFGAKWNFANAYDNHVFVAGRLIYCLNIIFWYVRLLDFLAVNQQAGPYVMMIGKMVANMFYIVVIMALVLLSFGVPRKAILYPHEAPSWTLAKDIVFHPYWMIFGEVYAYEIDVCANDSVIPQICGPGTWLTPFLQAVYLFVQYIIMVNLLIAFFNNVYLQVKAISNIVWKYQRYHFIMAYHEKPVLPPPLIILSHIVSLFCCICKRRKKDKTSDGPKLFLTEEDQKKLHDFEEQCVEMYFNEKDDKFHSGSEERIRVTFERVEQMCIQIKEVGDRVNYIKRSLQSLDSQIGHLQDLSALTVDTLKTLTAQKASEASKVHNEITRELSISKHLAQNLIDDGPVRPSVWKKHGVVNTLSSSLPQGDLESNNPFHCNILMKDDKDPQCNIFGQDLPAVPQRKEFNFPEAGSSSGALFPSAVSPPELRQRLHGVELLKIFNKNQKLGSSSTSIPHLSSPPTKFFVSTPPQPSCKSHLETGTKDQETVCSKATEGDNTEFGAFVGHRDSMDLQRFKETSNKIKILSNNNTSENTLKRASSLAGFTDCHRTSIPVHSEQEKISRRPSTEDTHEVDSKAALIPDWLQDRPSNREM

SEQ ID NO: 831838 - protein, 435 aa, Homo sapiens
MSAQYLQNNNTSENTLKRASSLAGFTDCHRTSIPVHSEQEKISRRPSTEDTHEVDSKAALIPDWLQDRPSNREMPSEEGTLNGLTSPFKPAMDTNYYYSGQYILKTKFNSILDLYRFNYFSLIFDAAVERNNLMRLSQSIPFTPVPPRGEPVTVYRLEESSPNILNNSMSSWSQLGLCAKIEFLSKEEMGGGLRRAVKVQCTWSEHDILKSGHLYIIKSFLPEVVNTWSSIYKEDTVLHLCLREIQQQRAAQKLTFAFNQMKPKSIPYSPRFLEVFLLYCHSAGQWFAVEECMTGEFRKYNNNNGDEIIPTNTLEEIMLAFSHWTYEYTRGELLVLDLQGVGENLTDPSVIKAEEKRSCDMVFGPANLGEDAIKNFRAKHHCNSCCRKLKLPDLKRNDYTPDKIIFPQDEPSDLNLQPGNSTKESESTNSVRLML

SEQ ID NO: 831839 - protein, 286 aa, Homo sapiens
MLKSCSRASFSPSVRKPPLILRRLLSEDVGMDIPFEEGVLSPSAADMRPEPPNSLDLNDTHPRRIKLTAPNINLSLDQSEGSILSDDNLDSPDEIDINVDELDTPDEADSFEYTGHEDPTANKDSGQESESIPEYTAEEEREDNRLWRTVVIGEQEQRIDMKVIEPYRRVISHGGVGYYGDGLNAIIVFAACFLPDSSRADYHYVMENLFLYVISTLELMVAEDYMIVYLNGATPRRRMPGLGWMKKCYQMIDRRLRKNLKSFIIVHPSWFIRTILAVTRPFIRYS

SEQ ID NO: 831840 - protein, 355 aa, Homo sapiens
MLKSCSRASFSPSVRKPPLILRRLLSEDVGMDIPFEEGVLSPSAADMRPEPPNSLDLNDTHPRRIKLTAPNINLSLDQSEGSILSDDNLDSPDEIDINVDELDTPDEADSFEYTGHEDPTANKDSGQESESIPEYTAEEEREDNRLWRTVVIGEQEQRIDMKVIEPYRRVISHGGSGYYGDGLNAIIVFAACFLPDSSRADYHYVMENLFLYVISTLELMVAEDYMIVYLNGATPRRRMPGLGWMKKCYQMIDRRLRKNLKSFIIVHPSWFIRTILAVTRPFISSKFSSKIKYVNSLSELSGLIPMDCIHIPESIIKLDEELREASEAAKTSCLYNDPEMSSMEKDIDLKLKEKP

SEQ ID NO: 831841 - protein, 822 aa, Homo sapiens
ALFDGDPHLSTENPALVPDALLASDTCLDISEAAFDHSFSDASGLNTSTGTIDDMSKLTLSEGHPETPVDGDLGKQDICSSEASWGDFEYDVMGQNIDEDLLREPEHFLYGGDPPLEEDSLKQSLAPYTPPFDLSYLTEPAQSAETIEEAGSPEDESLGCRAAEIVLSALPDRRSEGNQAETKNRLPGSQLAVLHIREDPESVYLPVGAGSNILSPSNVDWEVETDNSDLPAGGDIGPPNGASKEIPELEEEKTIPTKEPEQIKSEYKEERCTEKNEDRHALHMDYILVNREENSHSKPETCEERESIAELELYVGSKETGLQGTQLASFPDTCQPASLNERKGLSAEKMSSKGDTRSSFESPAQDQSWMFLGHSEVGDPSLDARDSGPGWSGKTVEPFSELGLGEGPQLQILEEMKPLESLALEEASGPVSQSQKSKSRGRAGPDAVTHDNEWEMLSPQPVQKNMIPDTEMEEETEFLELGTRISRPNGLLSEDVGMDIPFEEGVLSPSAADMRPEPPNSLDLNDTHPRRIKLTAPNINLSLDQSEGSILSDDNLDSPDEIDINVDELDTPDEADSFEYTGHEDPTANKDSGQESESIPEYTAEEEREDNRLWRTVVIGEQEQRIDMKVIEPYRRVISHGGSGYYGDGLNAIIVFAACFLPDSSRADYHYVMENLFLYVISTLELMVAEDYMIVYLNGATPRRRMPGLGWMKKCYQMIDRRLRKNLKSFIIVHPSWFIRTILAVTRPFISSKFSSKIKYVNSLSELSGLIPMDCIHIPESIIKLDEELREASEAAKTSCLYNDPEMSSMEKDIDLKLKEKP

SEQ ID NO: 831842 - protein, 593 aa, Homo sapiens
ALFDGDPHLSTENPALVPDALLASDTCLDISEAAFDHSFSDASGLNTSTGTIDDMSKLTLSEGHPETPVDGDLGKQDICSSEASWGDFEYDVMGQNIDEDLLREPEHFLYGGDPPLEEDSLKQSLAPYTPPFDLSYLTEPAQSAETIEEAGSPEDESLGCRAAEIVLSALPDRRSEGNQAETKNRLPGSQLAVLHIREDPESVYLPVGAGSNILSPSNVDWEVETDNSDLPAGGDIGPPNGASKEIPELEEEKTIPTKEPEQIKSEYKEERCTEKNEDRHALHMDYILVNREENSHSKPETCEERESIAELELYVGSKETGLQGTQLASFPDTCQPASLNERKGLSAEKMSSKGDTRSSFESPAQDQSWMFLGHSEVGDPSLDARDSGPGWSGKTVEPFSELGLGEGPQLQILEEMKPLESLALEEASGPVSQSQKSKSRGRAGPDAVTHDNEWEMLSPQPVQKNMIPDTEMEEETEFLELGTRISRPNGLLSEDVGMDIPFEEGVLSPSAADMRPEPPNSLDLNDTHPRRIKLTAPNINLSLDQSEGSILSDDNLDSPDEIDINVDELDTPDEADSFEYTGHGKSLSWQGQS

SEQ ID NO: 831843 - protein, 694 aa, Homo sapiens
ALFDGDPHLSTENPALVPDALLASDTCLDISEAAFDHSFSDASGLNTSTGTIDDMSKLTLSEGHPETPVDGDLGKQDICSSEASWGDFEYDVMGQNIDEDLLREPEHFLYGGDPPLEEDSLKQSLAPYTPPFDLSYLTEPAQSAETIEEAGSPEDESLGCRAAEIVLSALPDRRSEGNQAETKNRLPGSQLAVLHIREDPESVYLPVGAGSNILSPSNVDWEVETDNSDLPAGGDIGPPNGASKEIPELEEEKTIPTKEPEQIKSEYKEERCTEKNEDRHALHMDYILVNREENSHSKPETCEERESIAELELYVGSKETGLQGTQLASFPDTCQPASLNERKGLSAEKMSSKGDTRSSFESPAQDQSWMFLGHSEVGDPSLDARDSGPGWSGKTVEPFSELGLGEGPQLQILEEMKPLESLALEEASGPVSQSQKSKSRGRAGPDAVTHDNEWEMLSPQPVQKNMIPDTEMEEETEFLELGTRISRPNGLLSEDVGMDIPFEEGVLSPSAADMRPEPPNSLDLNDTHPRRIKLTAPNINLSLDQSEGSILSDDNLDSPDEIDINVDELDTPDEADSFEYTGHEDPTANKDSGQESESIPEYTAEEEREDNRLWRTVVIGEQEQRIDMKVIEPYRRVISHGGSGYYGDGLNAIIVFAACFLPDSSRADYHYVMENLFLYCHKYFRAVGAQILYS

SEQ ID NO: 831844 - protein, 822 aa, Homo sapiens; identical to SEQ ID NO: 831841

SEQ ID NO: 831845 - protein, 30 aa, Homo sapiens
MKVIEPYRRVISHGGQEIQVTFSEVLLDKG

SEQ ID NO: 831846 - protein, 484 aa, Homo sapiens
ALFDGDPHLSTENPALVPDALLASDTCLDISEAAFDHSFSDASGLNTSTGTIDDMSKLTLSEGHPETPVDGDLGKQDICSSEASWGDFEYDVMGQNIDEDLLREPEHFLYGGDPPLEEDSLKQSLAPYTPPFDLSYLTEPAQSAETIEEAGSPEDESLGCRAAEIVLSALPDRRSEGNQAETKNRLPGSQLAVLHIREDPESVYLPVGAGSNILSPSNVDWEVETDNSDLPAGGDIGPPNGASKEIPELEEEKTIPTKEPEQIKSEYKEERCTEKNEDRHALHMDYILVNREENSHSKPETCEERESIAELELYVGSKETGLQGTQLASFPDTCQPASLNERKGLSAEKMSSKGDTRSSFESPAQDQSWMFLGHSEVGDPSLDARDSGPGWSGKTVEPFSELGLGEGPQLQILEEMKPLESLALEEASGPVSQSQKSKSRGRAGPDAVTHDNEWEMLSPQPVQKNMIPSFRTCPHTRSSALFPP

SEQ ID NO: 831847 - protein, 813 aa, Homo sapiens
ALFDGDPHLSTENPALVPDALLASDTCLDISEAAFDHSFSDASGLNTSTGTIDDMSKLTLSEGHPETPVDGDLGKQDICSSEASWGDFEYDVMGQNIDEDLLREPEHFLYGGDPPLEEDSLKQSLAPYTPPFDLSYLTEPAQSAETIEEAGSPEDESLGCRAAEIVLSALPDRRSEGNQAETKNRLPGSQLAVLHIREDPESVYLPVGAGSNILSPSNVDWEVETDNSDLPAGGDIGPPNGASKEIPELEEEKTIPTKEPEQIKSEYKEERCTEKNEDRHALHMDYILVNREENSHSKPETCEERESIAELELYVGSKETGLQGTQLASFPDTCQPASLNERKGLSAEKMSSKGDTRSSFESPAQDQSWMFLGHSEVGDPSLDARDSGPGWSGKTVEPFSELGLGEGPQLQILEEMKPLESLALEEASGPVSQSQKSKSRGRAGPDAVTHDNEWEMLSPQPVQKNMIPDTEMEEETEFLELGTRISRPNGLLSEDVGMDIPFEEGVLSPSAADMRPEPPNSLDLNDTHPRRIKLTAPNINLSLDQSEGSILSDDNLDSPDEIDINVDELDTPDEADSFEYTGHEDPTANKDSGQESESIPEYTAEEEREDNRLWRTVVIGEQEQRIDMKVIEPYRRVISHGGSGYYGDGLNAIIVFAACFLPDSSRADYHYVMENLFLYVISTLELMVAEDYMIVYLNGATPRRRMPGLGWMKKCYQMIDRRLRKNLKSFIIVHPSWFIRTILAVTRPFISSKFSSKIKYVNSLSELSGLIPMDCIHIPESIIKLDEELREASEAAKTSCLYNDPEMSSMEKE

SEQ ID NO: 831848 - protein, 753 aa, Homo sapiens
ALFDGDPHLSTENPALVPDALLASDTCLDISEAAFDHSFSDASGLNTSTGTIDDMSKLTLSEGHPETPVDGDLGKQDICSSEASWGDFEYDVMGQNIDEDLLREPEHFLYGGDPPLEEDSLKQSLAPYTPPFDLSYLTEPAQSAETIEEAGSPEDESLGCRAAEIVLSALPDRRSEGNQAETKNRLPGSQLAVLHIREDPESVYLPVGAGSNILSPSNVDWEVETDNSDLPAGGDIGPPNGASKEIPELEEEKTIPTKEPEQIKSEYKEERCTEKNEDRHALHMDYILVNREENSHSKPETCEERESIAELELYVGSKETGLQGTQLASFPDTCQPASLNERKGLSAEKMSSKGDTRSSFESPAQDQSWMFLGHSEVGDPSLDARDSGPGWSGKTVEPFSELGLGEGPQLQILEEMKPLESLALEEASGPVSQSQKSKSRGRAGPDAVTHDNEWEMLSPQPVQKNMIPDTEMEEETEFLELGTRISRPNGLLSEDVGMDIPFEEGVLSPSAADMRPEPPNSLDLNDTHPRRIKLTAPNINLSLDQSEGSILSDDNLDSPDEIDINVDELDTPDEADSFEYTGHEDPTANKDSGQESESIPEYTAEEEREDNRLWRTVVIGEQEQRIDMKVIEPYRRVISHGGSGYYGDGLNAIIVFAACFLPDSSRADYHYVMENLFLYVISTLELMVAEDYMIVYLNGATPRRRMPGLGWMKKCYQMIDRRLRKNLKSFIIVHPSWFIRTILAVTRPFIRYS

SEQ ID NO: 831849 - protein, 533 aa, Homo sapiens
LRVRGLPGASCTLAPDGVNSWWCPPTTTRCLNHHDDDDVIVVVVPTRFGNADGAACHFPFIFEGRSYSACTTDGRSDGLPWCSTTANYDTDDRFGFCPSERLYTRDGNADGKPCQFPFIFQGQSYSACTTDGRSDGYRWCATTANYDRDKLFGFCPTRADSTVMGGNSAGELCVFPFTFLGKEYSTCTSEGRGDGRLWCATTSNFDSDKKWGFCPDQGYSLFLVAAHEFGHALGLDHSSVPEALMYPMYRFTEGPPLHKDDVNGIRHLYGPRPEPEPRPPTTTTPQPTAPPTVCPTGPPTVHPSERPTAGPTGPPSAGPTGPPTAGPSTATTVPLSPVDDACNVNIFDAIAEIGNQLYLFKDGKYWRFSEGRGSRPQGPFLIADKWPALPRKLDSVFEEPLSKKLFFFSGRQVWVYTGASVLGPRRLDKLGLGADVAQVTGALRSGRGKMLLFSGRRLWRFDVKAQMVDPRSASEVDRMFPGVPLDTHDVFQYREKAYFCQDRFYWRVSSRSELNQVDQVGYVTYDILQCPED

SEQ ID NO: 831850 - protein, 179 aa, Homo sapiens
PFPCCLHDGKYWRFSEGRGSRPQGPFLIADKWPALPRKLDSVFEEPLSKKLFFFSGRQVWVYTGASVLGPRRLDKLGLGADVAQVTGALRSGRGKMLLFSGRRLWRFDVKAQMVDPRSASEVDRMFPGVPLDTHDVFQYREKAYFCQDRFYWRVSSRSELNQVDQVGYVTYDILQCPED

SEQ ID NO: 831851 - protein, 524 aa, Homo sapiens
DTSALTMSLWQPLVLVLLVLGCCFAAPRQRQSTLVLFPGDLRTNLTDRQLAEEYLYRYGYTRVAEMRGESKSLGPALLLLQKQLSLPETGELDSATLKAMRTPRCGVPDLGRFQTFEGDLKWHHHNITYWIQNYSEDLPRAVIDDAFARAFALWSAVTPLTFTRVYSRDADIVIQFGVAEHGDGYPFDGKDGLLAHAFPPGPGIQGDAHFDDDELWSLGKGVVVPTRFGNADGAACHFPFIFEGRSYSACTTDGRSDGLPWCSTTANYDTDDRFGFCPSERLYTRDGNADGKPCQFPFIFQGQSYSACTTDGRSDGYRWCATTANYDRDKLFGFCPTRADSTVMGGNSAGELCVFPFTFLGKEYSTCTSEGRGDGRLWCATTSNFDSDKKWGFCPDQGYSLFLVAAHEFGHALGLDHSSVPEALMYPMYRFTEGPPLHKDDVNGIRHLYGPRPEPEPRPPTTTTPQPTAMFPGVPLDTHDVFQYREKAYFCQDRFYWRVSSRSELNQVDQVGYVTYDILQCPED

SEQ ID NO: 831852 - protein, 496 aa, Homo sapiens
  misc_feature (476)..(476): Xaa can be any naturally occurring amino acid
  misc_feature (479)..(479): Xaa can be any naturally occurring amino acid
DTSALTMSLWQPLVLVLLVLGCCFAAPRQRQSTLVLFPGDLRTNLTDRQLAEEYLYRYGYTRVAEMRGESKSLGPALLLLQKQLSLPETGELDSATLKAMRTPRCGVPDLGRFQTFEGDLKWHHHNITYWIQNYSEDLPRAVIDDAFARAFALWSAVTPLTFTRVYSRDADIVIQFGVAEHGDGYPFDGKDGLLAHAFPPGPGIQGDAHFDDDELWSLGKGVVVPTRFGNADGAACHFPFIFEGRSYSACTTDGRSDGLPWCSTTANYDTDDRFGFCPSERLYTRDGNADGKPCQFPFIFQGQSYSACTTDGRSDGYRWCATTANYDRDKLFGFCPTRADSTVMGGNSAGELCVFPFTFLGKEYSTCTSEGRGDGRLWCATTSNFDSDKKWGFCPDQGYSLFLVAAHEFGHALGLDHSSVPEALMYPMYRFTEGPPLHKDDVNGIRHLYGPRPEPEPRPPTTTTPQPTALPSNRVXHGXQMLTPDTPHIWPQLFPY

SEQ ID NO: 831853 - protein, 314 aa, Homo sapiens
DTSALTMSLWQPLVLVLLVLGCCFAAPRQRQSTLVLFPGDLRTNLTDRQLAEEYLYRYGYTRVAEMRGESKSLGPALLLLQKQLSLPETGELDSATLKAMRTPRCGVPDLGRFQTFEGDLKWHHHNITYWIQNYSEDLPRAVIDDAFARAFALWSAVTPLTFTRVYSRDADIVIQFGVAEHGDGYPFDGKDGLLAHAFPPGPGIQGDAHFDDDELWSLGKGVVVPTRFGNADGAACHFPFIFEGRSYSACTTDGRSDGLPWCSTTANYDTDDRFGFCPSERLYTQEEGVCQEPVLPVEGIPVSVLRDTKLDDDV

SEQ ID NO: 831854 - protein, 96 aa, Homo sapiens
SPARPPQLKQPGKSISNWEVMERLKGMVQNHQFSTLRISKSTMDFIRFEGEVENKSLEKAYFCQDRFYWRVSSRSELNQVDQVGYVTYDILQCPED

SEQ ID NO: 831855 - protein, 713 aa, Homo sapiens
DTSALTMSLWQPLVLVLLVLGCCFAAPRQRQSTLVLFPGDLRTNLTDRQLAEEYLYRYGYTRVAEMRGESKSLGPALLLLQKQLSLPETGELDSATLKAMRTPRCGVPDLGRFQTFEGDLKWHHHNITYWIQNYSEDLPRAVIDDAFARAFALWSAVTPLTFTRVYSRDADIVIQFGVAEHGDGYPFDGKDGLLAHAFPPGPGIQGDAHFDDDELWSLGKGVVVPTRFGNADGAACHFPFIFEGRSYSACTTDGRSDGLPWCSTTANYDTDDRFGFCPSERLYTRDGNADGKPCQFPFIFQGQSYSACTTDGRSDGYRWCATTANYDRDKLFGFCPTRADSTVMGGNSAGELCVFPFTFLGKEYSTCTSEGRGDGRLWCATTSNFDSDKKWGFCPDQGYSLFLVAAHEFGHALGLDHSSVPEALMYPMYRFTEGPPLHKDDVNGIRHLYGPRPEPEPRPPTTTTPQPTAPPTVCPTGPPTVHPSERPTAGPTGPPSAGPTGPPTAGPSTATTVPLSPVDDACNVNIFDAIAEIGNQLYLFKDGKYWRFSEGRGSRPQGPFLIADKWPALPRKLDSVFEEPLSKKLFFFSGRQVWVYTGASVLGPRRLDKLGLGADVAQVTGALRSGRGKMLLFSGRRLWRFDVKAQMVDPRSASEVDRMFPGVPLDTHDVFQYREKAYFCQDRFYWRVSSRSELNQVDQVGYVTYDILQCPED

SEQ ID NO: 831856 - protein, 444 aa, Homo sapiens
MTSCGPWARASWFQLGLETQMARPCQFPFIFQGQSYSACTTDGRSDGYRWCATTANYDRDKLFGFCPTRADSTVMGGNSAGELCVFPFTFLGKEYSTCTSEGRGDGRLWCATTSNFDSDKKWGFCPDQGYSLFLVAAHEFGHALGLDHSSVPEALMYPMYRFTEGPPLHKDDVNGIRHLYGPRPEPEPRPPTTTTPQPTAPPTVCPTGPPTVHPSERPTAGPTGPPSAGPTGPPTAGPSTATTVPLSPVDDACNVNIFDAIAEIGNQLYLFKDGKYWRFSEGRGSRPQGPFLIADKWPALPRKLDSVFEEPLSKKLFFFSGRQVWVYTGASVLGPRRLDKLGLGADVAQVTGALRSGRGKMLLFSGRRLWRFDVKAQMVDPRSASEVDRMFPGVPLDTHDVFQYREKAYFCQDRFYWRVSSRSELNQVDQVGYVTYDILQCPED

SEQ ID NO: 831857 - protein, 572 aa, Homo sapiens
DTSALTMSLWQPLVLVLLVLGCCFAAPRQRQSTLVLFPGDLRTNLTDRQLAEEYLYRYGYTRVAEMRGESKSLGPALLLLQKQLSLPETGELDSATLKAMRTPRCGVPDLGRFQTFEGDLKWHHHNITYWIQNYSEDLPRAVIDDAFARAFALWSAVTPLTFTRVYSRDADIVIQFGVAEHGDGYPFDGKDGLLAHAFPPGPGIQGDAHFDDDELWSLGKGVVVPTRFGNADGAACHFPFIFEGRSYSACTTDGRSDGLPWCSTTANYDTDDRFGFCPSERLYTRDGNADGKPCQFPFIFQGQSYSACTTDGRSDGYRWCATTANYDRDKLFGFCPTRADSTVMGGNSAGELCVFPFTFLGKEYSTCTSEGRGDGRLWCATTSNFDSDKKWGFCPDQGYSLFLVAAHEFGHALGLDHSSVPEALMYPMYRFTEGPPLHKDDVNGIRHLYGPRPEPEPRPPTTTTPQPTAPPTVCPTGPPTVHPSERPTAGPTGPPSAGPTGPPTAGPSTATTVPLSPVDDACNVNIFDAIAEIGNQLYLFKDGCSPGCLWTRTTSSSTERKPISARTASTGA

SEQ ID NO: 831858 - protein, 473 aa, Homo sapiens
DTSALTMSLWQPLVLVLLVLGCCFAAPRQRQSTLVLFPGDLRTNLTDRQLAEEYLYRYGYTRVAEMRGESKSLGPALLLLQKQLSLPETGELDSATLKAMRTPRCGVPDLGRFQTFEGDLKWHHHNITYWIQNYSEDLPRAVIDDAFARAFALWSAVTPLTFTRVYSRDADIVIQFGVAEHGDGYPFDGKDGLLAHAFPPGPGIQGDAHFDDDELWSLGKGVVVPTRFGNADGAACHFPFIFEGRSYSACTTDGRSDGLPWCSTTANYDTDDRFGFCPSERLYTRDGNADGKPCQFPFIFQGQSYSACTTDGRSDGYRWCATTANYDRDKLFGFCPTRADSTVMGGNSAGELCVFPFTFLGKEYSTCTSEGRGDGRLWCATTSNFDSDKKWGFCPDQGYSLFLVAAHEFGHALGLDHSSVPEALMYPMYRFTEGPPLHKDDVNGIRHLYGPRPEPEPRPPTTTTTTGSSRTPH

SEQ ID NO: 831859 - protein, 95 aa, Homo sapiens
ARAPSVRPLAGSAPVSSAPARRFDVKAQMVDPRSASEVDRMFPGVPLDTHDVFQYREKAYFCQDRFYWRVSSRSELNQVDQVGYVTYDILQCPED

SEQ ID NO: 831860 - protein, 151 aa, Homo sapiens
LFFKDLTINLINNLYVIVIIPDFKKQELASSCFLKEKLAGLNQRWDAIVAEVKDRQPRLKGESKQVMKYRHQLDEIICWLTKAEHAMQKRSTTELGENLQELRDLTQEMEVHAEKLKWLNRTELEMLSDKSLSLPERDKISRSRNWPVPAS

SEQ ID NO: 831861 - protein, 3432 aa, Homo sapiens
MAKYGEHEASPDNGQNEFSDIIKSRSDEHNDVQKKTFTKWINARFSKSGKPPINDMFTDLKDGRKLLDLLEGLTGTSLPKERGSTRVHALNNVNRVLQVLHQNNVELVNIGGTDIVDGNHKLTLGLLWSIILHWQVKDVMKDVMSDLQQTNSEKILLSWVRQTTRPYSQVNVLNFTTSWTDGLAFNAVLHRHKPDLFSWDKVVKMSPIERLEHAFSKAQTYLGIEKLLDPEDVAVQLPDKKSIIMYLTSLFEVLPQQVTIDAIREVETLPRKYKKECEEEAINIQSTAPEEEHESPRAETPSTVTEVDMDLDSYQIALEEVLTWLLSAEDTFQEQDDISDDVEEVKDQFATHEAFMMELTAHQSSVGSVLQAGNQLITQGTLSDEEEFEIQEQMTLLNARWEALRVESMDRQSRLHDVLMELQKKQLQQLSAWLTLTEERIQKMETCPLDDDVKSLQKLLEEHKSLQSDLEAEQVKVNSLTHMVVIVDENSGESATAILEDQLQKLGERWTAVCRWTEERWNRLQEINILWQELLEEQCLLKAWLTEKEEALNKVQTSNFKDQKELSVSVRRLAILKEDMEMKRQTLDQLSEIGQDVGQLLDNSKASKKINSDSEELTQRWDSLVQRLEDSSNQVTQAVAKLGMSQIPQKDLLETVRVREQAITKKSKQELPPPPPPKKRQIHVDIEAKKKFDAISAELLNWILKWKTAIQTTEIKEYMKMQDTSEMKKKLKALEKEQRERIPRADELNQTGQILVEQMGKEGLPTEEIKNVLEKVSSEWKNVSQHLEDLERKIQLQEDINAYFKQLDELEKVIKTKEEWVKHTSISESSRQSLPSLKDSCQRELTNLLGLHPKIEMARASCSALMSQPSAPDFVQRGFDSFLGRYQAVQEAVEDRQQHLENELKGQPGHAYLETLKTLKDVLNDSENKAQVSLNVLNDLAKVEKALQEKKTLDEILENQKPALHKLAEETKALEKNVHPDVEKLYKQEFDDVQGKWNKLKVLVSKDLHLLEEIALTLRAFEADSTVIEKWMDGVKDFLMKQQAAQGDDAGLQRQLDQCSAFVNEIETIESSLKNMKEIETNLRSGPVAGIKTWVQTRLGDYQTQLEKLSKEIATQKSRLSESQEKAANLKKDLAEMQEWMTQAEEEYLERDFEYKSPEELESAVEEMKRAKEDVLQKEVRVKILKDNIKLLAAKVPSGGQELTSELNVVLENYQLLCNRIRGKCHTLEEVWSCWIELLHYLDLETTWLNTLEERMKSTEVLPEKTDAVNEALESLESVLRHPADNRTQIRELGQTLIDGGILDDIISEKLEAFNSRYEDLSHLAESKQISLEKQLQVLRETDQMLQVLQESLGELDKQLTTYLTDRIDAFQVPQEAQKIQAEISAHELTLEELRRNMRSQPLTSPESRTARGGSQMDVLQRKLREVSTKFQLFQKPANFEQRMLDCKRVLDGVKAELHVLDVKDVDPDVIQTHLDKCMKLYKTLSEVKLEVETVIKTGRHIVQKQQTDNPKGMDEQLTSLKVLYNDLGAQVTEGKQDLERASQLARKMKKEAASLSEWLSATETELVQKSTSEGLLGDLDTEISWAKNVLKDLEKRKADLNTITESSAALQNLIEGSEPILEERLCVLNAGWSRVRTWTEDWCNTLMNHQNQLEIFDGNVAHISTWLYQAEALLDEIEKKPTSKQEEIVKRLVSELDDANLQVENVRDQALILMNARGSSSRELVEPKLAELNRNFEKVSQHIKSAKLLIAQEPLYQCLVTTETFETGVPFSDLEKLENDIENMLKFVEKHLESSDEDEKMDEESAQIEEVLQRGEEMLHQPMEDNKKEKIRLQLLLLHTRYNKIKAIPIQQRKMGQLASGIRSSLLPTDYLVEINKILLCMDDVELSLNVPELNTAIYEDFSFQEDSLKNIKDQLDKLGEQIAVIHEKQPDVILEASGPEAIQIRDTLTQLNAKWDRINRMYSDRKGCFDRAMEEWRQFHCDLNDLTQWITEAEELLVDTCAPGGSLDLEKARIHQQELEVGISSHQPSFAALNRTGDGIVQKLSQADGSFLKEKLAGLNQRWDAIVAEVKDRQPRLKGESKQVMKYRHQLDEIICWLTKAEHAMQKRSTTELGENLQELRDLTQEMEVHAEKLKWLNRTELEMLSDKSLSLPERDKISESLRTVNMTWNKICREVPTTLKECIQEPSSVSQTRIAAHPNVQKVVLVSSASDIPVQSHRTSEISIPADLDKTITELADWLVLIDQMLKSNIVTVGDVEEINKTVSRMKITKADLEQRHPQLDYVFTWAQKLKNKASSSDMRTAITEKLERVKNQWDGTQHGVELRQQQLEDMIIDSLQWDDHREETEELMRKYEARLYILQQARRDPLTKQISVPNTASRTGPGDGIVMAFDNVLQKLLEEYGSDDTRNVKETTEYLKTSWINLKQSIADRQNALEAEWRTVQASRRDLENFLKWIQEAETTVNVLVDASHRENALQDSILARELKQQMQDIQAEIDAHNDIFKSIDGNRQKMVKALGNSEEATMLQHRLDDMNQRWNDLKAKSASIRAHLEASAEKWNRLLMSLEELIKWLNMKDEELKKQMPIGGDVPALQLQYDHCKALRRELKEKEYSVLNAVDQARVFLADQPIEAPEEPRRNLQSKTELTPEERAQKIAKAMRKQSSEVKEKWESLNAVTSNWQKQVDKALEKLRDLQGAMDDLDADMKEAESVRNGWKPVGDLLIDSLQDHIEKIMAFREEIAPINFKVKTVNDLSSQLSPLDLHPSLKMSRQLDDLNMRWKLLQVSVDDRLKQLQEAHRDFGPSSQHFLSTSVQLPWQRSISHNKVPYYINHQTQTTCWDHPKMTELFQSLADLNNVRFSAYRTAIKIRRLQKALCLDLLELSTTNEIFKQHKLNQNDQLLSVPDVINCLTTTYDGLEQMHKDLVNVPLCVDMCLNWLLNVYDTGRTGKIRVQSLKIGLMSLSKGLLEEKYRYLFKEVAGPTEMCDQRQLGLLLHDAIQIPRQLGEVAAFGGSNIEPSVRSCFQQNNNKPEISVKEFIDWMHLEPQSMVWLPVLHRVAAAETAKHQAKCNICKECPIVGFRYRSLKHFNYDVCQSCFFSGRTAKGHKLHYPMVEYCIPTTSGEDVRDFTKVLKNKFRSKKYFAKHPRLGYLPVQTVLEGDNLETPITLISMWPEHYDPSQSPQLFHDDTHSRIEQYATRLAQMERTNGSFLTDSSSTTGSVEDEHALIQQYCQTLGGESPVSQPQSPAQILKSVEREERGELERIIADLEEEQRNLQVEYEQLKDQHLRRGLPVGSPPESIISPHHTSEDSELIAEAKLLRQHKGRLEARMQILEDHNKQLESQLHRLRQLLEQPESDSRINGVSPWASPQHSALSYSLDPDASGPQFHQAAGEDLLAPPHDTSTDLTEVMEQIHSTFPSCCPNVPSRPQAM

SEQ ID NO: 831862 - protein, 3432 aa, Homo sapiens; identical to SEQ ID NO: 831861

SEQ ID NO: 831863 - protein, 3432 aa, Homo sapiens; identical to SEQ ID NO: 831861

SEQ ID NO: 831864 - protein, 3491 aa, Homo sapiens
MSGLAATTFHWKKCRLDLPGHVALQACKRLPDEHNDVQKKTFTKWINARFSKSGKPPINDMFTDLKDGRKLLDLLEGLTGTSLPKERGSTRVHALNNVNRVLQVLHQNNVELVNIGGTDIVDGNHKLTLGLLWSIILHWQVKDVMKDVMSDLQQTNSEKILLSWVRQTTRPYSQVNVLNFTTSWTDGLAFNAVLHRHKPDLFSWDKVVKMSPIERLEHAFSKAQTYLGIEKLLDPEDVAVQLPDKKSIIMYLTSLFEVLPQQVTIDAIREVETLPRKYKKECEEEAINIQSTAPEEEHESPRAETPSTVTEVDMDLDSYQIALEEVLTWLLSAEDTFQEQDDISDDVEEVKDQFATHEAFMMELTAHQSSVGSVLQAGNQLITQGTLSDEEEFEIQEQMTLLNARWEALRVESMDRQSRLHDVLMELQKKQLQQLSAWLTLTEERIQKMETCPLDDDVKSLQKLLEEHKSLQSDLEAEQVKVNSLTHMVVIVDENSGESATAILEDQLQKLGERWTAVCRWTEERWNRLQEINILWQELLEEQCLLKAWLTEKEEALNKVQTSNFKDQKELSVSVRRLAILKEDMEMKRQTLDQLSEIGQDVGQLLDNSKASKKINSDSEELTQRWDSLVQRLEDSSNQVTQAVAKLGMSQIPQKDLLETVRVREQAITKKSKQELPPPPPPKKRQIHVDIEAKKKFDAISAELLNWILKWKTAIQTTEIKEYMKMQDTSEMKKKLKALEKEQRERIPRADELNQTGQILVEQMGKEGLPTEEIKNVLEKVSSEWKNVSQHLEDLERKIQLQEDINAYFKQLDELEKVIKTKEEWVKHTSISESSRQSLPSLKDSCQVRSQRSGKWRNSMCSSRVKEGFSYHELEVNAALINFLLRMFIFSELCDRIFSSLRELTNLLGLHPKIEMARASCSALMSQPSAPDFVQRGFDSFLGRYQAVQEAVEDRQQHLENELKGQPGHAYLETLKTLKDVLNDSENKAQVSLNVLNDLAKVEKALQEKKTLDEILENQKPALHKLAEETKALEKNVHPDVEKLYKQEFDDVQGKWNKLKVLVSKDLHLLEEIALTLRAFEADSTVIEKWMDGVKDFLMKQQAAQGDDAGLQRQLDQCSAFVNEIETIESSLKNMKEIETNLRSGPVAGIKTWVQTRLGDYQTQLEKLSKEIATQKSRLSESQEKAANLKKDLAEMQEWMTQAEEEYLERDFEYKSPEELESAVEEMKRAKEDVLQKEVRVKILKDNIKLLAAKVPSGGQELTSELNVVLENYQLLCNRIRGKCHTLEEVWSCWIELLHYLDLETTWLNTLEERMKSTEVLPEKTDAVNEALESLESVLRHPADNRTQIRELGQTLIDGGILDDIISEKLEAFNSRYEDLSHLAESKQISLEKQLQVLRETDQMLQVLQESLGELDKQLTTYLTDRIDAFQVPQEAQKIQAEISAHELTLEELRRNMRSQPLTSPESRTARGGSQMDVLQRKLREVSTKFQLFQKPANFEQRMLDCKRVLDGVKAELHVLDVKDVDPDVIQTHLDKCMKLYKTLSEVKLEVETVIKTGRHIVQKQQTDNPKGMDEQLTSLKVLYNDLGAQVTEGKQDLERASQLARKMKKEAASLSEWLSATETELVQKSTSEGLLGDLDTEISWAKNVLKDLEKRKADLNTITESSAALQNLIEGSEPILEERLCVLNAGWSRVRTWTEDWCNTLMNHQNQLEIFDGNVAHISTWLYQAEALLDEIEKKPTSKQEEIVKRLVSELDDANLQVENVRDQALILMNARGSSSRELVEPKLAELNRNFEKVSQHIKSAKLLIAQEPLYQCLVTTETFETGVPFSDLEKLENDIENMLKFVEKHLESSDEDEKMDEESAQIEEVLQRGEEMLHQPMEDNKKEKIRLQLLLLHTRYNKIKAIPIQQRKMGQLASGIRSSLLPTDYLVEINKILLCMDDVELSLNVPELNTAIYEDFSFQEDSLKNIKDQLDKLGEQIAVIHEKQPDVILEASGPEAIQIRDTLTQLNAKWDRINRMYSDRKGCFDRAMEEWRQFHCDLNDLTQWITEAEELLVDTCAPGGSLDLEKARIHQQELEVGISSHQPSFAALNRTGDGIVQKLSQADGSFLKEKLAGLNQRWDAIVAEVKDRQPRLKGESKQVMKYRHQLDEIICWLTKAEHAMQKRSTTELGENLQELRDLTQEMEVHAEKLKWLNRTELEMLSDKSLSLPERDKISESLRTVNMTWNKICREVPTTLKECIQEPSSVSQTRIAAHPNVQKVVLVSSASDIPVQSHRTSEISIPADLDKTITELADWLVLIDQMLKSNIVTVGDVEEINKTVSRMKITKADLEQRHPQLDYVFTWAQKLKNKASSSDMRTAITEKLERVKNQWDGTQHGVELRQQQLEDMIIDSLQWDDHREETEELMRKYEARLYILQQARRDPLTKQISVPNTASRTGPGDGIVMAFDNVLQKLLEEYGSDDTRNVKETTEYLKTSWINLKQSIADRQNALEAEWRTVQASRRDLENFLKWIQEAETTVNVLVDASHRENALQDSILARELKQQMQDIQAEIDAHNDIFKSIDGNRQKMVKALGNSEEATMLQHRLDDMNQRWNDLKAKSASIRAHLEASAEKWNRLLMSLEELIKWLNMKDEELKKQMPIGGDVPALQLQYDHCKALRRELKEKEYSVLNAVDQARVFLADQPIEAPEEPRRNLQSKTELTPEERAQKIAKAMRKQSSEVKEKWESLNAVTSNWQKQVDKALEKLRDLQGAMDDLDADMKEAESVRNGWKPVGDLLIDSLQDHIEKIMAFREEIAPINFKVKTVNDLSSQLSPLDLHPSLKMSRQLDDLNMRWKLLQVSVDDRLKQLQEAHRDFGPSSQHFLSTSVQLPWQRSISHNKVPYYINHQTQTTCWDHPKMTELFQSLADLNNVRFSAYRTAIKIRRLQKALCLDLLELSTTNEIFKQHKLNQNDQLLSVPDVINCLTTTYDGLEQMHKDLVNVPLCVDMCLNWLLNVYDTGRTGKIRVQSLKIGLMSLSKGLLEEKYRYLFKEVAGPTEMCDQRQLGLLLHDAIQIPRQLGEVAAFGGSNIEPSVRSCFQQNNNKPEISVKEFIDWMHLEPQSMVWLPVLHRVAAAETAKHQAKCNICKECPIVGFRYRSLKHFNYDVCQSCFFSGRTAKGHKLHYPMVEYCIPTTSGEDVRDFTKVLKNKFRSKKYFAKHPRLGYLPVQTVLEGDNLETPITLISMWPEHYDPSQSPQLFHDDTHSRIEQYATRLAQMERTNGSFLTDSSSTTGSVEDEHALIQQYCQTLGGESPVSQPQSPAQILKSVEREERGELERIIADLEEEQRNLQVEYEQLKDQHLRRGLPVGSPPESIISPHHTSEDSELIAEAKLLRQHKGRLEARMQILEDHNKQLESQLHRLRQLLEQPESDSRINGVSPWASPQHSALSYSLDPDASGPQFHQAAGEDLLAPPHDTSTDLTEVMEQIHSTFPSCCPNVPSRPQAM

SEQ ID NO: 831865 - protein, 2891 aa, Homo sapiens
MGRKLVFDFFNIIRNIILLLESVLSRKQPGQHFLQRNLIAVQIHVNLMTVLGVSDVGQLLDNSKASKKINSDSEELTQRWDSLVQRLEDSSNQVTQAVAKLGMSQIPQKDLLETVRVREQAITKKSKQELPPPPPPKKRQIHVDIEAKKKFDAISAELLNWILKWKTAIQTTEIKEYMKMQDTSEMKKKLKALEKEQRERIPRADELNQTGQILVEQMGKEGLPTEEIKNVLEKVSSEWKNVSQHLEDLERKIQLQEDINAYFKQLDELEKVIKTKEEWVKHTSISESSRQSLPSLKDSCQRELTNLLGLHPKIEMARASCSALMSQPSAPDFVQRGFDSFLGRYQAVQEAVEDRQQHLENELKGQPGHAYLETLKTLKDVLNDSENKAQVSLNVLNDLAKVEKALQEKKTLDEILENQKPALHKLAEETKALEKNVHPDVEKLYKQEFDDVQGKWNKLKVLVSKDLHLLEEIALTLRAFEADSTVIEKWMDGVKDFLMKQQAAQGDDAGLQRQLDQCSAFVNEIETIESSLKNMKEIETNLRSGPVAGIKTWVQTRLGDYQTQLEKLSKEIATQKSRLSESQEKAANLKKDLAEMQEWMTQAEEEYLERDFEYKSPEELESAVEEMKRAKEDVLQKEVRVKILKDNIKLLAAKVPSGGQELTSELNVVLENYQLLCNRIRGKCHTLEEVWSCWIELLHYLDLETTWLNTLEERMKSTEVLPEKTDAVNEALESLESVLRHPADNRTQIRELGQTLIDGGILDDIISEKLEAFNSRYEDLSHLAESKQISLEKQLQVLRETDQMLQVLQESLGELDKQLTTYLTDRIDAFQVPQEAQKIQAEISAHELTLEELRRNMRSQPLTSPESRTARGGSQMDVLQRKLREVSTKFQLFQKPANFEQRMLDCKRVLDGVKAELHVLDVKDVDPDVIQTHLDKCMKLYKTLSEVKLEVETVIKTGRHIVQKQQTDNPKGMDEQLTSLKVLYNDLGAQVTEGKQDLERASQLARKMKKEAASLSEWLSATETELVQKSTSEGLLGDLDTEISWAKNVLKDLEKRKADLNTITESSAALQNLIEGSEPILEERLCVLNAGWSRVRTWTEDWCNTLMNHQNQLEIFDGNVAHISTWLYQAEALLDEIEKKPTSKQEEIVKRLVSELDDANLQVENVRDQALILMNARGSSSRELVEPKLAELNRNFEKVSQHIKSAKLLIAQEPLYQCLVTTETFETGVPFSDLEKLENDIENMLKFVEKHLESSDEDEKMDEESAQIEEVLQRGEEMLHQPMEDNKKEKIRLQLLLLHTRYNKIKAIPIQQRKMGQLASGIRSSLLPTDYLVEINKILLCMDDVELSLNVPELNTAIYEDFSFQEDSLKNIKDQLDKLGEQIAVIHEKQPDVILEASGPEAIQIRDTLTQLNAKWDRINRMYSDRKGCFDRAMEEWRQFHCDLNDLTQWITEAEELLVDTCAPGGSLDLEKARIHQQELEVGISSHQPSFAALNRTGDGIVQKLSQADGSFLKEKLAGLNQRWDAIVAEVKDRQPRLKGESKQVMKYRHQLDEIICWLTKAEHAMQKRSTTELGENLQELRDLTQEMEVHAEKLKWLNRTELEMLSDKSLSLPERDKISESLRTVNMTWNKICREVPTTLKECIQEPSSVSQTRIAAHPNVQKVVLVSSASDIPVQSHRTSEISIPADLDKTITELADWLVLIDQMLKSNIVTVGDVEEINKTVSRMKITKADLEQRHPQLDYVFTWAQKLKNKASSSDMRTAITEKLERVKNQWDGTQHGVELRQQQLEDMIIDSLQWDDHREETEELMRKYEARLYILQQARRDPLTKQISVPNTASRTGPGDGIVMAFDNVLQKLLEEYGSDDTRNVKETTEYLKTSWINLKQSIADRQNALEAEWRTVQASRRDLENFLKWIQEAETTVNVLVDASHRENALQDSILARELKQQMQDIQAEIDAHNDIFKSIDGNRQKMVKALGNSEEATMLQHRLDDMNQRWNDLKAKSASIRAHLEASAEKWNRLLMSLEELIKWLNMKDEELKKQMPIGGDVPALQLQYDHCKALRRELKEKEYSVLNAVDQARVFLADQPIEAPEEPRRNLQSKTELTPEERAQKIAKAMRKQSSEVKEKWESLNAVTSNWQKQVDKALEKLRDLQGAMDDLDADMKEAESVRNGWKPVGDLLIDSLQDHIEKIMAFREEIAPINFKVKTVNDLSSQLSPLDLHPSLKMSRQLDDLNMRWKLLQVSVDDRLKQLQEAHRDFGPSSQHFLSTSVQLPWQRSISHNKVPYYINHQTQTTCWDHPKMTELFQSLADLNNVRFSAYRTAIKIRRLQKALCLDLLELSTTNEIFKQHKLNQNDQLLSVPDVINCLTTTYDGLEQMHKDLVNVPLCVDMCLNWLLNVYDTGRTGKIRVQSLKIGLMSLSKGLLEEKYRYLFKEVAGPTEMCDQRQLGLLLHDAIQIPRQLGEVAAFGGSNIEPSVRSCFQQNNNKPEISVKEFIDWMHLEPQSMVWLPVLHRVAAAETAKHQAKCNICKECPIVGFRYRSLKHFNYDVCQSCFFSGRTAKGHKLHYPMVEYCIPTTSGEDVRDFTKVLKNKFRSKKYFAKHPRLGYLPVQTVLEGDNLETPITLISMWPEHYDPSQSPQLFHDDTHSRIEQYATRLAQMERTNGSFLTDSSSTTGSVEDEHALIQQYCQTLGGESPVSQPQSPAQILKSVEREERGELERIIADLEEEQRNLQVEYEQLKDQHLRRGLPVGSPPESIISPHHTSEDSELIAEAKLLRQHKGRLEARMQILEDHNKQLESQLHRLRQLLEQPESDSRINGVSPWASPQHSALSYSLDPDASGPQFHQAAGEDLLAPPHDTSTDLTEVMEQIHSTFPSCCPNVPSRPQAM

SEQ ID NO: 831866 - protein, 2576 aa, Homo sapiens
MARASCSALMSQPSAPDFVQRGFDSFLGRYQAVQEAVEDRQQHLENELKGQPGHAYLETLKTLKDVLNDSENKAQVSLNVLNDLAKVEKALQEKKTLDEILENQKPALHKLAEETKALEKNVHPDVEKLYKQEFDDVQGKWNKLKVLVSKDLHLLEEIALTLRAFEADSTVIEKWMDGVKDFLMKQQAAQGDDAGLQRQLDQCSAFVNEIETIESSLKNMKEIETNLRSGPVAGIKTWVQTRLGDYQTQLEKLSKEIATQKSRLSESQEKAANLKKDLAEMQEWMTQAEEEYLERDFEYKSPEELESAVEEMKRAKEDVLQKEVRVKILKDNIKLLAAKVPSGGQELTSELNVVLENYQLLCNRIRGKCHTLEEVWSCWIELLHYLDLETTWLNTLEERMKSTEVLPEKTDAVNEALESLESVLRHPADNRTQIRELGQTLIDGGILDDIISEKLEAFNSRYEDLSHLAESKQISLEKQLQVLRETDQMLQVLQESLGELDKQLTTYLTDRIDAFQVPQEAQKIQAEISAHELTLEELRRNMRSQPLTSPESRTARGGSQMDVLQRKLREVSTKFQLFQKPANFEQRMLDCKRVLDGVKAELHVLDVKDVDPDVIQTHLDKCMKLYKTLSEVKLEVETVIKTGRHIVQKQQTDNPKGMDEQLTSLKVLYNDLGAQVTEGKQDLERASQLARKMKKEAASLSEWLSATETELVQKSTSEGLLGDLDTEISWAKNVLKDLEKRKADLNTITESSAALQNLIEGSEPILEERLCVLNAGWSRVRTWTEDWCNTLMNHQNQLEIFDGNVAHISTWLYQAEALLDEIEKKPTSKQEEIVKRLVSELDDANLQVENVRDQALILMNARGSSSRELVEPKLAELNRNFEKVSQHIKSAKLLIAQEPLYQCLVTTETFETGVPFSDLEKLENDIENMLKFVEKHLESSDEDEKMDEESAQIEEVLQRGEEMLHQPMEDNKKEKIRLQLLLLHTRYNKIKAIPIQQRKMGQLASGIRSSLLPTDYLVEINKILLCMDDVELSLNVPELNTAIYEDFSFQEDSLKNIKDQLDKLGEQIAVIHEKQPDVILEASGPEAIQIRDTLTQLNAKWDRINRMYSDRKGCFDRAMEEWRQFHCDLNDLTQWITEAEELLVDTCAPGGSLDLEKARIHQQELEVGISSHQPSFAALNRTGDGIVQKLSQADGSFLKEKLAGLNQRWDAIVAEVKDRQPRLKGESKQVMKYRHQLDEIICWLTKAEHAMQKRSTTELGENLQELRDLTQEMEVHAEKLKWLNRTELEMLSDKSLSLPERDKISESLRTVNMTWNKICREVPTTLKECIQEPSSVSQTRIAAHPNVQKVVLVSSASDIPVQSHRTSEISIPADLDKTITELADWLVLIDQMLKSNIVTVGDVEEINKTVSRMKITKADLEQRHPQLDYVFTWAQKLKNKASSSDMRTAITEKLERVKNQWDGTQHGVELRQQQLEDMIIDSLQWDDHREETEELMRKYEARLYILQQARRDPLTKQISVPNTASRTGPGDGIVMAFDNVLQKLLEEYGSDDTRNVKETTEYLKTSWINLKQSIADRQNALEAEWRTVQASRRDLENFLKWIQEAETTVNVLVDASHRENALQDSILARELKQQMQDIQAEIDAHNDIFKSIDGNRQKMVKALGNSEEATMLQHRLDDMNQRWNDLKAKSASIRAHLEASAEKWNRLLMSLEELIKWLNMKDEELKKQMPIGGDVPALQLQYDHCKALRRELKEKEYSVLNAVDQARVFLADQPIEAPEEPRRNLQSKTELTPEERAQKIAKAMRKQSSEVKEKWESLNAVTSNWQKQVDKALEKLRDLQGAMDDLDADMKEAESVRNGWKPVGDLLIDSLQDHIEKIMAFREEIAPINFKVKTVNDLSSQLSPLDLHPSLKMSRQLDDLNMRWKLLQVSVDDRLKQLQEAHRDFGPSSQHFLSTSVQLPWQRSISHNKVPYYINHQTQTTCWDHPKMTELFQSLADLNNVRFSAYRTAIKIRRLQKALCLDLLELSTTNEIFKQHKLNQNDQLLSVPDVINCLTTTYDGLEQMHKDLVNVPLCVDMCLNWLLNVYDTGRTGKIRVQSLKIGLMSLSKGLLEEKYRYLFKEVAGPTEMCDQRQLGLLLHDAIQIPRQLGEVAAFGGSNIEPSVRSCFQQNNNKPEISVKEFIDWMHLEPQSMVWLPVLHRVAAAETAKHQAKCNICKECPIVGFRYRSLKHFNYDVCQSCFFSGRTAKGHKLHYPMVEYCIPTTSGEDVRDFTKVLKNKFRSKKYFAKHPRLGYLPVQTVLEGDNLETPITLISMWPEHYDPSQSPQLFHDDTHSRIEQYATRLAQMERTNGSFLTDSSSTTGSVEDEHALIQQYCQTLGGESPVSQPQSPAQILKSVEREERGELERIIADLEEEQRNLQVEYEQLKDQHLRRGLPVGSPPESIISPHHTSEDSELIAEAKLLRQHKGRLEARMQILEDHNKQLESQLHRLRQLLEQPESDSRINGVSPWASPQHSALSYSLDPDASGPQFHQAAGEDLLAPPHDTSTDLTEVMEQIHSTFPSCCPNVPSRPQAM

SEQ ID NO: 831867 - protein, 1473 aa, Homo sapiens
MQQHSTSFKGCFDRAMEEWRQFHCDLNDLTQWITEAEELLVDTCAPGGSLDLEKARIHQQELEVGISSHQPSFAALNRTGDGIVQKLSQADGSFLKEKLAGLNQRWDAIVAEVKDRQPRLKGESKQVMKYRHQLDEIICWLTKAEHAMQKRSTTELGENLQELRDLTQEMEVHAEKLKWLNRTELEMLSDKSLSLPERDKISESLRTVNMTWNKICREVPTTLKECIQEPSSVSQTRIAAHPNVQKVVLVSSASDIPVQSHRTSEISIPADLDKTITELADWLVLIDQMLKSNIVTVGDVEEINKTVSRMKITKADLEQRHPQLDYVFTWAQKLKNKASSSDMRTAITEKLERVKNQWDGTQHGVELRQQQLEDMIIDSLQWDDHREETEELMRKYEARLYILQQARRDPLTKQISVPNTASRTGPGDGIVMAFDNVLQKLLEEYGSDDTRNVKETTEYLKTSWINLKQSIADRQNALEAEWRTVQASRRDLENFLKWIQEAETTVNVLVDASHRENALQDSILARELKQQMQDIQAEIDAHNDIFKSIDGNRQKMVKALGNSEEATMLQHRLDDMNQRWNDLKAKSASIRAHLEASAEKWNRLLMSLEELIKWLNMKDEELKKQMPIGGDVPALQLQYDHCKALRRELKEKEYSVLNAVDQARVFLADQPIEAPEEPRRNLQSKTELTPEERAQKIAKAMRKQSSEVKEKWESLNAVTSNWQKQVDKALEKLRDLQGAMDDLDADMKEAESVRNGWKPVGDLLIDSLQDHIEKIMAFREEIAPINFKVKTVNDLSSQLSPLDLHPSLKMSRQLDDLNMRWKLLQVSVDDRLKQLQEAHRDFGPSSQHFLSTSVQLPWQRSISHNKVPYYINHQTQTTCWDHPKMTELFQSLADLNNVRFSAYRTAIKIRRLQKALCLDLLELSTTNEIFKQHKLNQNDQLLSVPDVINCLTTTYDGLEQMHKDLVNVPLCVDMCLNWLLNVYDTGRTGKIRVQSLKIGLMSLSKGLLEEKYRYLFKEVAGPTEMCDQRQLGLLLHDAIQIPRQLGEVAAFGGSNIEPSVRSCFQQNNNKPEISVKEFIDWMHLEPQSMVWLPVLHRVAAAETAKHQAKCNICKECPIVGFRYRSLKHFNYDVCQSCFFSGRTAKGHKLHYPMVEYCIPTTSGEDVRDFTKVLKNKFRSKKYFAKHPRLGYLPVQTVLEGDNLETPITLISMWPEHYDPSQSPQLFHDDTHSRIEQYATRLAQMERTNGSFLTDSSSTTGSVEDEHALIQQYCQTLGGESPVSQPQSPAQILKSVEREERGELERIIADLEEEQRNLQVEYEQLKDQHLRRGLPVGSPPESIISPHHTSEDSELIAEAKLLRQHKGRLEARMQILEDHNKQLESQLHRLRQLLEQPESDSRINGVSPWASPQHSALSYSLDPDASGPQFHQAAGEDLLAPPHDTSTDLTEVMEQIHSTFPSCCPNVPSRPQAM

SEQ ID NO: 831868 - protein, 3424 aa, Homo sapiens
MSGLAATTFHWKKCRLDLPGHVALQACKRLPDEHNDVQKKTFTKWINARFSKSGKPPINDMFTDLKDGRKLLDLLEGLTGTSLPKERGSTRVHALNNVNRVLQVLHQNNVELVNIGGTDIVDGNHKLTLGLLWSIILHWQVKDVMKDVMSDLQQTNSEKILLSWVRQTTRPYSQVNVLNFTTSWTDGLAFNAVLHRHKPDLFSWDKVVKMSPIERLEHAFSKAQTYLGIEKLLDPEDVAVQLPDKKSIIMYLTSLFEVLPQQVTIDAIREVETLPRKYKKECEEEAINIQSTAPEEEHESPRAETPSTVTEVDMDLDSYQIALEEVLTWLLSAEDTFQEQDDISDDVEEVKDQFATHEAFMMELTAHQSSVGSVLQAGNQLITQGTLSDEEEFEIQEQMTLLNARWEALRVESMDRQSRLHDVLMELQKKQLQQLSAWLTLTEERIQKMETCPLDDDVKSLQKLLEEHKSLQSDLEAEQVKVNSLTHMVVIVDENSGESATAILEDQLQKLGERWTAVCRWTEERWNRLQEINILWQELLEEQCLLKAWLTEKEEALNKVQTSNFKDQKELSVSVRRLAILKEDMEMKRQTLDQLSEIGQDVGQLLDNSKASKKINSDSEELTQRWDSLVQRLEDSSNQVTQAVAKLGMSQIPQKDLLETVRVREQAITKKSKQELPPPPPPKKRQIHVDIEAKKKFDAISAELLNWILKWKTAIQTTEIKEYMKMQDTSEMKKKLKALEKEQRERIPRADELNQTGQILVEQMGKEGLPTEEIKNVLEKVSSEWKNVSQHLEDLERKIQLQEDINAYFKQLDELEKVIKTKEEWVKHTSISESSRQSLPSLKDSCQRELTNLLGLHPKIEMARASCSALMSQPSAPDFVQRGFDSFLGRYQAVQEAVEDRQQHLENELKGQPGHAYLETLKTLKDVLNDSENKAQVSLNVLNDLAKVEKALQEKKTLDEILENQKPALHKLAEETKALEKNVHPDVEKLYKQEFDDVQGKWNKLKVLVSKDLHLLEEIALTLRAFEADSTVIEKWMDGVKDFLMKQQAAQGDDAGLQRQLDQCSAFVNEIETIESSLKNMKEIETNLRSGPVAGIKTWVQTRLGDYQTQLEKLSKEIATQKSRLSESQEKAANLKKDLAEMQEWMTQAEEEYLERDFEYKSPEELESAVEEMKRAKEDVLQKEVRVKILKDNIKLLAAKVPSGGQELTSELNVVLENYQLLCNRIRGKCHTLEEVWSCWIELLHYLDLETTWLNTLEERMKSTEVLPEKTDAVNEALESLESVLRHPADNRTQIRELGQTLIDGGILDDIISEKLEAFNSRYEDLSHLAESKQISLEKQLQVLRETDQMLQVLQESLGELDKQLTTYLTDRIDAFQVPQEAQKIQAEISAHELTLEELRRNMRSQPLTSPESRTARGGSQMDVLQRKLREVSTKFQLFQKPANFEQRMLDCKRVLDGVKAELHVLDVKDVDPDVIQTHLDKCMKLYKTLSEVKLEVETVIKTGRHIVQKQQTDNPKGMDEQLTSLKVLYNDLGAQVTEGKQDLERASQLARKMKKEAASLSEWLSATETELVQKSTSEGLLGDLDTEISWAKNVLKDLEKRKADLNTITESSAALQNLIEGSEPILEERLCVLNAGWSRVRTWTEDWCNTLMNHQNQLEIFDGNVAHISTWLYQAEALLDEIEKKPTSKQEEIVKRLVSELDDANLQVENVRDQALILMNARGSSSRELVEPKLAELNRNFEKVSQHIKSAKLLIAQEPLYQCLVTTETFETGVPFSDLEKLENDIENMLKFVEKHLESSDEDEKMDEESAQIEEVLQRGEEMLHQPMEDNKKEKIRLQLLLLHTRYNKIKAIPIQQRKMGQLASGIRSSLLPTDYLVEINKILLCMDDVELSLNVPELNTAIYEDFSFQEDSLKNIKDQLDKLGEQIAVIHEKQPDVILEASGPEAIQIRDTLTQLNAKWDRINRMYSDRKGCFDRAMEEWRQFHCDLNDLTQWITEAEELLVDTCAPGGSLDLEKARIHQQELEVGISSHQPSFAALNRTGDGIVQKLSQADGSFLKEKLAGLNQRWDAIVAEVKDRQPRLKGESKQVMKYRHQLDEIICWLTKAEHAMQKRSTTELGENLQELRDLTQEMEVHAEKLKWLNRTELEMLSDKSLSLPERDKISESLRTVNMTWNKICREVPTTLKECIQEPSSVSQTRIAAHPNVQKVVLVSSASDIPVQSHRTSEISIPADLDKTITELADWLVLIDQMLKSNIVTVGDVEEINKTVSRMKITKADLEQRHPQLDYVFTWAQKLKNKASSSDMRTAITEKLERVKNQWDGTQHGVELRQQQLEDMIIDSLQWDDHREETEELMRKYEARLYILQQARRDPLTKQISVPNTASRTGSWRWYRMAFDNVLQKLLEEYGSDDTRNVKETTEYLKTSWINLKQSIADRQNALEAEWRTVQASRRDLENFLKWIQEAETTVNVLVDASHRENALQDSILARELKQQMQDIQAEIDAHNDIFKSIDGNRQKMVKALGNSEEATMLQHRLDDMNQRWNDLKAKSASIRAHLEASAEKWNRLLMSLEELIKWLNMKDEELKKQMPIGGDVPALQLQYDHCKALRRELKEKEYSVLNAVDQARVFLADQPIEAPEEPRRNLQSKTELTPEERAQKIAKAMRKQSSEVKEKWESLNAVTSNWQKQVDKALEKLRDLQGAMDDLDADMKEAESVRNGWKPVGDLLIDSLQDHIEKIMAFREEIAPINFKVKTVNDLSSQLSPLDLHPSLKMSRQLDDLNMRWKLLQVSVDDRLKQLQEAHRDFGPSSQHFLSTSVQLPWQRSISHNKVPYYINHQTQTTCWDHPKMTELFQSLADLNNVRFSAYRTAIKIRRLQKALCLDLLELSTTNEIFKQHKLNQNDQLLSVPDVINCLTTTYDGLEQMHKDLVNVPLCVDMCLNWLLNVYDTGRTGKIRVQSLKIGLMSLSKGLLEEKYRYLFKEVAGPTEMCDQRQLGLLLHDAIQIPRQLGEVAAFGGSNIEPSVRSCFQQNNNKPEISVKEFIDWMHLEPQSMVWLPVLHRVAAAETAKHQAKCNICKECPIVGFRYRSLKHFNYDVCQSCFFSGRTAKGHKLHYPMVEYCIPTTSGEDVRDFTKVLKNKFRSKKYFAKHPRLGYLPVQTVLEGDNLETPSQSPQLFHDDTHSRIEQYATRLAQMERTNGSFLTDSSSTTGSVEDEHALIQQYCQTLGGESPVSQPQSPAQILKSVEREERGELERIIADLEEEQRNLQVEYEQLKDQHLRRGLPVGSPPESIISPHHTSEDSELIAEAKLLRQHKGRLEARMQILEDHNKQLESQLHRLRQLLEQPESDSRINGVSPWASPQHSALSYSLDPDASGPQFHQAAGEDLLAPPHDTSTDLTEVMEQIHSTFPSCCPNVPSRPQAM

SEQ ID NO: 831869 - protein, 3307 aa, Homo sapiens
MSGLAATTFHWKKCRLDLPGHVALQACKRLPDEHNDVQKKTFTKWINARFSKSGKPPINDMFTDLKDGRKLLDLLEGLTGTSLPKERGSTRVHALNNVNRVLQVLHQNNVELVNIGGTDIVDGNHKLTLGLLWSIILHWQVKDVMKDVMSDLQQTNSEKILLSWVRQTTRPYSQVNVLNFTTSWTDGLAFNAVLHRHKPDLFSWDKVVKMSPIERLEHAFSKAQTYLGIEKLLDPEDVAVQLPDKKSIIMYLTSLFEVLPQQVTIDAIREVETLPRKYKKECEEEAINIQSTAPEEEHESPRAETPSTVTEVDMDLDSYQIALEEVLTWLLSAEDTFQEQDDISDDVEEVKDQFATHEAFMMELTAHQSSVGSVLQAGNQLITQGTLSDEEEFEIQEQMTLLNARWEALRVESMDRQSRLHDVLMELQKKQLQQLSAWLTLTEERIQKMETCPLDDDVKSLQKLLEEHKSLQSDLEAEQVKVNSLTHMVVIVDENSGESATAILEDQLQKLGERWTAVCRWTEERWNRLQEINILWQELLEEQCLLKAWLTEKEEALNKVQTSNFKDQKELSVSVRRLAILKEDMEMKRQTLDQLSEIGQDVGQLLDNSKASKKINSDSEELTQRWDSLVQRLEDSSNQVTQAVAKLGMSQIPQKDLLETVRVREQAITKKSKQELPPPPPPKKRQIHVDIEAKKKFDAISAELLNWILKWKTAIQTTEIKEYMKMQDTSEMKKKLKALEKEQRERIPRADELNQTGQILVEQMGKEGLPTEEIKNVLEKVSSEWKNVSQHLEDLERKIQLQEDINAYFKQLDELEKVIKTKEEWVKHTSISESSRQSLPSLKDSCQRELTNLLGLHPKIEMARASCSALMSQPSAPDFVQRGFDSFLGRYQAVQEAVEDRQQHLENELKGQPGHAYLETLKTLKDVLNDSENKAQVSLNVLNDLAKVEKALQEKKTLDEILENQKPALHKLAEETKALEKNVHPDVEKLYKQEFDDVQGKWNKLKVLVSKDLHLLEEIALTLRAFEADSTVIEKWMDGVKDFLMKQQAAQGDDAGLQRQLDQCSAFVNEIETIESSLKNMKEIETNLRSGPVAGIKTWVQTRLGDYQTQLEKLSKEIATQKSRLSESQEKAANLKKDLAEMQEWMTQAEEEYLERDFEYKSPEELESAVEEMKRAKEDVLQKEVRVKILKDNIKLLAAKVPSGGQELTSELNVVLENYQLLCNRIRGKCHTLEEVWSCWIELLHYLDLETTWLNTLEERMKSTEVLPEKTDAVNEALESLESVLRHPADNRTQIRELGQTLIDGGILDDIISEKLEAFNSRYEDLSHLAESKQISLEKQLQVLRETDQMLQVLQESLGELDKQLTTYLTDRIDAFQVPQEAQKIQAEISAHELTLEELRRNMRSQPLTSPESRTARGGSQMDVLQRKLREVSTKFQLFQKPANFEQRMLDCKRVLDGVKAELHVLDVKDVDPDVIQTHLDKCMKLYKTLSEVKLEVETVIKTGRHIVQKQQTDNPKGMDEQLTSLKVLYNDLGAQVTEGKQDLERASQLARKMKKEAASLSEWLSATETELVQKSTSEGLLGDLDTEISWAKNVLKDLEKRKADLNTITESSAALQNLIEGSEPILEERLCVLNAGWSRVRTWTEDWCNTLMNHQNQLEIFDGNVAHISTWLYQAEALLDEIEKKPTSKQEEIVKRLVSELDDANLQVENVRDQALILMNARGSSSRELVEPKLAELNRNFEKVSQHIKSAKLLIAQEPLYQCLVTTETFETGVPFSDLEKLENDIENMLKFVEKHLESSDEDEKMDEESAQIEEVLQRGEEMLHQPMEDNKKEKIRLQLLLLHTRYNKIKAIPIQQRKMGQLASGIRSSLLPTDYLVEINKILLCMDDVELSLNVPELNTAIYEDFSFQEDSLKNIKDQLDKLGEQIAVIHEKQPDVILEASGPEAIQIRDTLTQLNAKWDRINRMYSDRKGCFDRAMEEWRQFHCDLNDLTQWITEAEELLVDTCAPGGSLDLEKARIHQQELEVGISSHQPSFAALNRTGDGIVQKLSQADGSFLKEKLAGLNQRWDAIVAEVKDRQPRLKGESKQVMKYRHQLDEIICWLTKAEHAMQKRSTTELGENLQELRDLTQEMEVHAEKLKWLNRTELEMLSDKSLSLPERDKISESLRTVNMTWNKICREVPTTLKECIQEPSSVSQTRIAAHPNVQKVVLVSSASDIPVQSHRTSEISIPADLDKTITELADWLVLIDQMLKSNIVTVGDVEEINKTVSRMKITKADLEQRHPQLDYVFTWAQKLKNKASSSDMRTAITEKLERVKNQWDGTQHGVELRQQQLEDMIIDSLQWDDHREETEELMRKYEARLYILQQARRDPLTKQISVPNTASRTGSWRWYRMAFDNVLQKLLEEYGSDDTRNVKETTEYLKTSWINLKQSIADRQNALEAEWRTVQASRRDLENFLKWIQEAETTVNVLVDASHRENALQDSILARELKQQMQDIQAEIDAHNDIFKSIDGNRQKMVKALGNSEEATMLQHRLDDMNQRWNDLKAKSASIRAHLEASAEKWNRLLMSLEELIKWLNMKDEELKKQMPIGGDVPALQLQYDHCKALRRELKEKEYSVLNAVDQARVFLADQPIEAPEEPRRNLQSKTELTPEERAQKIAKAMRKQSSEVKEKWESLNAVTSNWQKQVDKALEKLRDLQGAMDDLDADMKEAESVRNGWKPVGDLLIDSLQDHIEKIMAFREEIAPINFKVKTVNDLSSQLSPLDLHPSLKMSRQLDDLNMRWKLLQVSVDDRLKQLQEAHRDFGPSSQHFLSTSVQLPWQRSISHNKVPYYINHQTQTTCWDHPKMTELFQSLADLNNVRFSAYRTAIKIRRLQKALCLDLLELSTTNEIFKQHKLNQNDQLLSVPDVINCLTTTYDGLEQMHKDLVNVPLCVDMCLNWLLNVYDTGRTGKIRVQSLKIGLMSLSKGLLEEKYRYLFKEVAGPTEMCDQRQLGLLLHDAIQIPRQLGEVAAFGGSNIEPSVRSCFQQNNNKPEISVKEFIDWMHLEPQSMVWLPVLHRVAAAETAKHQAKCNICKECPIVGFRYRSLKHFNYDVCQSCFFSGRTAKGHKLHYPMVEYCIPTTSGEDVRDFTKVLKNKFRSKKYFAKHPRLGYLPVQTVLEGDNLETPITLISMWPEHYDPSQSPQLFHDDTHSRIEQYATRLAQMERTNGSFLTDSSSTTGSVEDEHALIQQYCQTLGGESPVSQPQSPAQILKSVEREERGELERIIADLEEEQRNLQVEYEQLKDQHLRRGLPVGWRLGCRF

SEQ ID NO: 831870 - protein, 1078 aa, Homo sapiens
MRLDSIFFSKPDGIHSPNKFLCPILLQELGPGDGIVMAFDNVLQKLLEEYGSDDTRNVKETTEYLKTSWINLKQSIADRQNALEAEWRTVQASRRDLENFLKWIQEAETTVNVLVDASHRENALQDSILARELKQQMQDIQAEIDAHNDIFKSIDGNRQKMVKALGNSEEATMLQHRLDDMNQRWNDLKAKSASIRAHLEASAEKWNRLLMSLEELIKWLNMKDEELKKQMPIGGDVPALQLQYDHCKALRRELKEKEYSVLNAVDQARVFLADQPIEAPEEPRRNLQSKTELTPEERAQKIAKAMRKQSSEVKEKWESLNAVTSNWQKQVDKALEKLRDLQGAMDDLDADMKEAESVRNGWKPVGDLLIDSLQDHIEKIMAFREEIAPINFKVKTVNDLSSQLSPLDLHPSLKMSRQLDDLNMRWKLLQVSVDDRLKQLQEAHRDFGPSSQHFLSTSVQLPWQRSISHNKVPYYINHQTQTTCWDHPKMTELFQSLADLNNVRFSAYRTAIKIRRLQKALCLDLLELSTTNEIFKQHKLNQNDQLLSVPDVINCLTTTYDGLEQMHKDLVNVPLCVDMCLNWLLNVYDTGRTGKIRVQSLKIGLMSLSKGLLEEKYRYLFKEVAGPTEMCDQRQLGLLLHDAIQIPRQLGEVAAFGGSNIEPSVRSCFQQNNNKPEISVKEFIDWMHLEPQSMVWLPVLHRVAAAETAKHQAKCNICKECPIVGFRYRSLKHFNYDVCQSCFFSGRTAKGHKLHYPMVEYCIPTTSGEDVRDFTKVLKNKFRSKKYFAKHPRLGYLPVQTVLEGDNLETPITLISMWPEHYDPSQSPQLFHDDTHSRIEQYATRLAQMERTNGSFLTDSSSTTGSVEDEHALIQQYCQTLGGESPVSQPQSPAQILKSVEREERGELERIIADLEEEQRNLQVEYEQLKDQHLRRGLPVGSPPESIISPHHTSEDSELIAEAKLLRQHKGRLEARMQILEDHNKQLESQLHRLRQLLEQPESDSRINGVSPWASPQHSALSYSLDPDASGPQFHQAAGEDLLAPPHDTSTDLTEVMEQIHSTFPSCCPNVPSRPQAM

SEQ ID NO: 831871 - protein, 372 aa, Homo sapiens
MVWLPVLHRVAAAETAKHQAKCNICKECPIVGFRYRSLKHFNYDVCQSCFFSGRTAKGHKLHYPMVEYCIPTTSGEDVRDFTKVLKNKFRSKKYFAKHPRLGYLPVQTVLEGDNLETPSQSPQLFHDDTHSRIEQYATRLAQMERTNGSFLTDSSSTTGSVEDEHALIQQYCQTLGGESPVSQPQSPAQILKSVEREERGELERIIADLEEEQRNLQVEYEQLKDQHLRRGLPVGSPPESIISPHHTSEDSELIAEAKLLRQHKGRLEARMQILEDHNKQLESQLHRLRQLLEQPESDSRINGVSPWASPQHSALSYSLDPDASGPQFHQAAGEDLLAPPHDTSTDLTEVMEQIHSTFPSCCPNVPSRPQAM

SEQ ID NO: 831872 - protein, 345 aa, Homo sapiens
MLEEEEWYRSLKHFNYDVCQSCFFSGRTAKGHKLHYPMVEYCIPTTSGEDVRDFTKVLKNKFRSKKYFAKHPRLGYLPVQTVLEGDNLETPSQSPQLFHDDTHSRIEQYATRLAQMERTNGSFLTDSSSTTGSVEDEHALIQQYCQTLGGESPVSQPQSPAQILKSVEREERGELERIIADLEEEQRNLQVEYEQLKDQHLRRGLPVGSPPESIISPHHTSEDSELIAEAKLLRQHKGRLEARMQILEDHNKQLESQLHRLRQLLEQPESDSRINGVSPWASPQHSALSYSLDPDASGPQFHQAAGEDLLAPPHDTSTDLTEVMEQIHSTFPSCCPNVPSRPQAM

SEQ ID NO: 831873 - protein, 3457 aa, Homo sapiens
MSGLAATTFHWKKCRLDLPGHVALQACKRLPDEHNDVQKKTFTKWINARFSKSGKPPINDMFTDLKDGRKLLDLLEGLTGTSLPKERGSTRVHALNNVNRVLQVLHQNNVELVNIGGTDIVDGNHKLTLGLLWSIILHWQVKDVMKDVMSDLQQTNSEKILLSWVRQTTRPYSQVNVLNFTTSWTDGLAFNAVLHRHKPDLFSWDKVVKMSPIERLEHAFSKAQTYLGIEKLLDPEDVAVQLPDKKSIIMYLTSLFEVLPQQVTIDAIREVETLPRKYKKECEEEAINIQSTAPEEEHESPRAETPSTVTEVDMDLDSYQIALEEVLTWLLSAEDTFQEQDDISDDVEEVKDQFATHEAFMMELTAHQSSVGSVLQAGNQLITQGTLSDEEEFEIQEQMTLLNARWEALRVESMDRQSRLHDVLMELQKKQLQQLSAWLTLTEERIQKMETCPLDDDVKSLQKLLEEHKSLQSDLEAEQVKVNSLTHMVVIVDENSGESATAILEDQLQKLGERWTAVCRWTEERWNRLQEINILWQELLEEQCLLKAWLTEKEEALNKVQTSNFKDQKELSVSVRRLAILKEDMEMKRQTLDQLSEIGQDVGQLLDNSKASKKINSDSEELTQRWDSLVQRLEDSSNQVTQAVAKLGMSQIPQKDLLETVRVREQAITKKSKQELPPPPPPKKRQIHVDIEAKKKFDAISAELLNWILKWKTAIQTTEIKEYMKMQDTSEMKKKLKALEKEQRERIPRADELNQTGQILVEQMGKEGLPTEEIKNVLEKVSSEWKNVSQHLEDLERKIQLQEDINAYFKQLDELEKVIKTKEEWVKHTSISESSRQSLPSLKDSCQRELTNLLGLHPKIEMARASCSALMSQPSAPDFVQRGFDSFLGRYQAVQEAVEDRQQHLENELKGQPGHAYLETLKTLKDVLNDSENKAQVSLNVLNDLAKVEKALQEKKTLDEILENQKPALHKLAEETKALEKNVHPDVEKLYKQEFDDVQGKWNKLKVLVSKDLHLLEEIALTLRAFEADSTVIEKWMDGVKDFLMKQQAAQGDDAGLQRQLDQCSAFVNEIETIESSLKNMKEIETNLRSGPVAGIKTWVQTRLGDYQTQLEKLSKEIATQKSRLSESQEKAANLKKDLAEMQEWMTQAEEEYLERDFEYKSPEELESAVEEMKRAKEDVLQKEVRVKILKDNIKLLAAKVPSGGQELTSELNVVLENYQLLCNRIRGKCHTLEEVWSCWIELLHYLDLETTWLNTLEERMKSTEVLPEKTDAVNEALESLESVLRHPADNRTQIRELGQTLIDGGILDDIISEKLEAFNSRYEDLSHLAESKQISLEKQLQVLRETDQMLQVLQESLGELDKQLTTYLTDRIDAFQVPQEAQKIQAEISAHELTLEELRRNMRSQPLTSPESRTARGGSQMDVLQRKLREVSTKFQLFQKPANFEQRMLDCKRVLDGVKAELHVLDVKDVDPDVIQTHLDKCMKLYKTLSEVKLEVETVIKTGRHIVQKQQTDNPKGMDEQLTSLKVLYNDLGAQVTEGKQDLERASQLARKMKKEAASLSEWLSATETELVQKSTSEGLLGDLDTEISWAKNVLKDLEKRKADLNTITESSAALQNLIEGSEPILEERLCVLNAGWSRVRTWTEDWCNTLMNHQNQLEIFDGNVAHISTWLYQAEALLDEIEKKPTSKQEEIVKRLVSELDDANLQVENVRDQALILMNARGSSSRELVEPKLAELNRNFEKVSQHIKSAKLLIAQEPLYQCLVTTETFETGVPFSDLEKLENDIENMLKFVEKHLESSDEDEKMDEESAQIEEVLQRGEEMLHQPMEDNKKEKIRLQLLLLHTRYNKIKAIPIQQRKMGQLASGIRSSLLPTDYLVEINKILLCMDDVELSLNVPELNTAIYEDFSFQEDSLKNIKDQLDKLGEQIAVIHEKQPDVILEASGPEAIQIRDTLTQLNAKWDRINRMYSDRKGCFDRAMEEWRQFHCDLNDLTQWITEAEELLVDTCAPGGSLDLEKARIHQQELEVGISSHQPSFAALNRTGDGIVQKLSQADGSFLKEKLAGLNQRWDAIVAEVKDRQPRLKGESKQVMKYRHQLDEIICWLTKAEHAMQKRSTTELGENLQELRDLTQEMEVHAEKLKWLNRTELEMLSDKSLSLPERDKISESLRTVNMTWNKICREVPTTLKECIQEPSSVSQTRIAAHPNVQKVVLVSSASDIPVQSHRTSEISIPADLDKTITELADWLVLIDQMLKSNIVTVGDVEEINKTVSRMKITKADLEQRHPQLDYVFTWAQKLKNKASSSDMRTAITEKLERVKNQWDGTQHGVELRQQQLEDMIIDSLQWDDHREETEELMRKYEARLYILQQARRDPLTKQISVPNTASRTGSWRWYRMAFDNVLQKLLEEYGSDDTRNVKETTEYLKTSWINLKQSIADRQNALEAEWRTVQASRRDLENFLKWIQEAETTVNVLVDASHRENALQDSILARELKQQMQDIQAEIDAHNDIFKSIDGNRQKMVKALGNSEEATMLQHRLDDMNQRWNDLKAKSASIRAHLEASAEKWNRLLMSLEELIKWLNMKDEELKKQMPIGGDVPALQLQYDHCKALRRELKEKEYSVLNAVDQARVFLADQPIEAPEEPRRNLQSKTELTPEERAQKIAKAMRKQSSEVKEKWESLNAVTSNWQKQVDKALEKLRDLQGAMDDLDADMKEAESVRNGWKPVGDLLIDSLQDHIEKIMAFREEIAPINFKVKTVNDLSSQLSPLDLHPSLKMSRQLDDLNMRWKLLQVSVDDRLKQLQEAHRDFGPSSQHFLSTSVQLPWQRSISHNKVPYYINHQTQTTCWDHPKMTELFQSLADLNNVRFSAYRTAIKIRRLQKALCLDLLELSTTNEIFKQHKLNQNDQLLSVPDVINCLTTTYDGLEQMHKDLVNVPLCVDMCLNWLLNVYDTGRTGKIRVQSLKIGLMSLSKGLLEEKYRYLFKEVAGPTEMCDQRQLGLLLHDAIQIPRQLGEVAAFGGSNIEPSVRSCFQQNNNKPEISVKEFIDWMHLEPQSMVWLPVLHRVAAAETAKHQAKCNICKECPIVGFRYRSLKHFNYDVCQSCFFSGRTAKGHKLHYPMVEYCIPTTSGEDVRDFTKVLKNKFRSKKYFAKHPRLGYLPVQTVLEGDNLETPITLISMWPEHYDPSQSPQLFHDDTHSRIEQYATRLAQMERTNGSFLTDSSSTTGSVEDEHALIQQYCQTLGGESPVSQPQSPAQILKSVEREERGELERIIADLEEEQRNLQVEYEQLKDQHLRRGLPVGSPPESIISPHHTSEDSELIAEAKLLRQHKGRLEARMQILEDHNKQLESQLHRLRQLLEQPESDSRINGVSPWASPQHSALSYSLDPDASGPQFHQAAGEDLLAPPHDTSTDLTEVMEQIHSTFPSCCREYERLQHHSCTCSFPFSFSACGPSPSSLR

SEQ ID NO: 831874 - protein, 2395 aa, Homo sapiens
MSGLAATTFHWKKCRLDLPGHVALQACKRLPDEHNDVQKKTFTKWINARFSKSGKPPINDMFTDLKDGRKLLDLLEGLTGTSLPKERGSTRVHALNNVNRVLQVLHQNNVELVNIGGTDIVDGNHKLTLGLLWSIILHWQVKDVMKDVMSDLQQTNSEKILLSWVRQTTRPYSQVNVLNFTTSWTDGLAFNAVLHRHKPDLFSWDKVVKMSPIERLEHAFSKAQTYLGIEKLLDPEDVAVQLPDKKSIIMYLTSLFEVLPQQVTIDAIREVETLPRKYKKECEEEAINIQSTAPEEEHESPRAETPSTVTEVDMDLDSYQIALEEVLTWLLSAEDTFQEQDDISDDVEEVKDQFATHEAFMMELTAHQSSVGSVLQAGNQLITQGTLSDEEEFEIQEQMTLLNARWEALRVESMDRQSRLHDVLMELQKKQLQQLSAWLTLTEERIQKMETCPLDDDVKSLQKLLEEHKSLQSDLEAEQVKVNSLTHMVVIVDENSGESATAILEDQLQKLGERWTAVCRWTEERWNRLQEINILWQELLEEQCLLKAWLTEKEEALNKVQTSNFKDQKELSVSVRRLAILKEDMEMKRQTLDQLSEIGQDVGQLLDNSKASKKINSDSEELTQRWDSLVQRLEDSSNQVTQAVAKLGMSQIPQKDLLETVRVREQAITKKSKQELPPPPPPKKRQIHVDIEAKKKFDAISAELLNWILKWKTAIQTTEIKEYMKMQDTSEMKKKLKALEKEQRERIPRADELNQTGQILVEQMGKEGLPTEEIKNVLEKVSSEWKNVSQHLEDLERKIQLQEDINAYFKQLDELEKVIKTKEEWVKHTSISESSRQSLPSLKDSCQRELTNLLGLHPKIEMARASCSALMSQPSAPDFVQRGFDSFLGRYQAVQEAVEDRQQHLENELKGQPGHAYLETLKTLKDVLNDSENKAQVSLNVLNDLAKVEKALQEKKTLDEILENQKPALHKLAEETKALEKNVHPDVEKLYKQEFDDVQGKWNKLKVLVSKDLHLLEEIALTLRAFEADSTVIEKWMDGVKDFLMKQQAAQGDDAGLQRQLDQCSAFVNEIETIESSLKNMKEIETNLRSGPVAGIKTWVQTRLGDYQTQLEKLSKEIATQKSRLSESQEKAANLKKDLAEMQEWMTQAEEEYLERDFEYKSPEELESAVEEMKRAKEDVLQKEVRVKILKDNIKLLAAKVPSGGQELTSELNVVLENYQLLCNRIRGKCHTLEEVWSCWIELLHYLDLETTWLNTLEERMKSTEVLPEKTDAVNEALESLESVLRHPADNRTQIRELGQTLIDGGILDDIISEKLEAFNSRYEDLSHLAESKQISLEKQLQVLRETDQMLQVLQESLGELDKQLTTYLTDRIDAFQVPQEAQKIQAEISAHELTLEELRRNMRSQPLTSPESRTARGGSQMDVLQRKLREVSTKFQLFQKPANFEQRMLDCKRVLDGVKAELHVLDVKDVDPDVIQTHLDKCMKLYKTLSEVKLEVETVIKTGRHIVQKQQTDNPKGMDEQLTSLKVLYNDLGAQVTEGKQDLERASQLARKMKKEAASLSEWLSATETELVQKSTSEGLLGDLDTEISWAKNVLKDLEKRKADLNTITESSAALQNLIEGSEPILEERLCVLNAGWSRVRTWTEDWCNTLMNHQNQLEIFDGNVAHISTWLYQAEALLDEIEKKPTSKQEEIVKRLVSELDDANLQVENVRDQALILMNARGSSSRELVEPKLAELNRNFEKVSQHIKSAKLLIAQEPLYQCLVTTETFETGVPFSDLEKLENDIENMLKFVEKHLESSDEDEKMDEESAQIEEVLQRGEEMLHQPMEDNKKEKIRLQLLLLHTRYNKIKAIPIQQRKMGQLASGIRSSLLPTDYLVEINKILLCMDDVELSLNVPELNTAIYEDFSFQEDSLKNIKDQLDKLGEQIAVIHEKQPDVILEASGPEAIQIRDTLTQLNAKWDRINRMYSDRKGCFDRAMEEWRQFHCDLNDLTQWITEAEELLVDTCAPGGSLDLEKARIHQQELEVGISSHQPSFAALNRTGDGIVQKLSQADGSFLKEKLAGLNQRWDAIVAEVKDRQPRLKGESKQVMKYRHQLDEIICWLTKAEHAMQKRSTTELGENLQELRDLTQEMEVHAEKLKWLNRTELEMLSDKSLSLPERDKISESLRTVNMTWNKICREVPTTLKECIQEPSSVSQTRIAAHPNVQKVVLVSSASDIPVQSHRTSEISIPADLDKTITELADWLVLIDQMLKSNIVTVGDVEEINKTVSRMKITKADLEQRHPQLDYVFTWAQKLKNKASSSDMRTAITEKLERVKNQWDGTQHGVELRQQQLEDMIIDSLQWDDHREETEELMRKYEARLYILQQARRDPLTKQISVPISFEMGPDFITGE

SEQ ID NO: 831875 - protein, 2420 aa, Homo sapiens
MSGLAATTFHWKKCRLDLPGHVALQACKRLPDEHNDVQKKTFTKWINARFSKSGKPPINDMFTDLKDGRKLLDLLEGLTGTSLPKERGSTRVHALNNVNRVLQVLHQNNVELVNIGGTDIVDGNHKLTLGLLWSIILHWQVKDVMKDVMSDLQQTNSEKILLSWVRQTTRPYSQVNVLNFTTSWTDGLAFNAVLHRHKPDLFSWDKVVKMSPIERLEHAFSKAQTYLGIEKLLDPEDVAVQLPDKKSIIMYLTSLFEVLPQQVTIDAIREVETLPRKYKKECEEEAINIQSTAPEEEHESPRAETPSTVTEVDMDLDSYQIALEEVLTWLLSAEDTFQEQDDISDDVEEVKDQFATHEAFMMELTAHQSSVGSVLQAGNQLITQGTLSDEEEFEIQEQMTLLNARWEALRVESMDRQSRLHDVLMELQKKQLQQLSAWLTLTEERIQKMETCPLDDDVKSLQKLLEEHKSLQSDLEAEQVKVNSLTHMVVIVDENSGESATAILEDQLQKLGERWTAVCRWTEERWNRLQEINILWQELLEEQCLLKAWLTEKEEALNKVQTSNFKDQKELSVSVRRLAILKEDMEMKRQTLDQLSEIGQDVGQLLDNSKASKKINSDSEELTQRWDSLVQRLEDSSNQVTQAVAKLGMSQIPQKDLLETVRVREQAITKKSKQELPPPPPPKKRQIHVDIEAKKKFDAISAELLNWILKWKTAIQTTEIKEYMKMQDTSEMKKKLKALEKEQRERIPRADELNQTGQILVEQMGKEGLPTEEIKNVLEKVSSEWKNVSQHLEDLERKIQLQEDINAYFKQLDELEKVIKTKEEWVKHTSISESSRQSLPSLKDSCQRELTNLLGLHPKIEMARASCSALMSQPSAPDFVQRGFDSFLGRYQAVQEAVEDRQQHLENELKGQPGHAYLETLKTLKDVLNDSENKAQVSLNVLNDLAKVEKALQEKKTLDEILENQKPALHKLAEETKALEKNVHPDVEKLYKQEFDDVQGKWNKLKVLVSKDLHLLEEIALTLRAFEADSTVIEKWMDGVKDFLMKQQAAQGDDAGLQRQLDQCSAFVNEIETIESSLKNMKEIETNLRSGPVAGIKTWVQTRLGDYQTQLEKLSKEIATQKSRLSESQEKAANLKKDLAEMQEWMTQAEEEYLERDFEYKSPEELESAVEEMKRAKEDVLQKEVRVKILKDNIKLLAAKVPSGGQELTSELNVVLENYQLLCNRIRGKCHTLEEVWSCWIELLHYLDLETTWLNTLEERMKSTEVLPEKTDAVNEALESLESVLRHPADNRTQIRELGQTLIDGGILDDIISEKLEAFNSRYEDLSHLAESKQISLEKQLQVLRETDQMLQVLQESLGELDKQLTTYLTDRIDAFQVPQEAQKIQAEISAHELTLEELRRNMRSQPLTSPESRTARGGSQMDVLQRKLREVSTKFQLFQKPANFEQRMLDCKRVLDGVKAELHVLDVKDVDPDVIQTHLDKCMKLYKTLSEVKLEVETVIKTGRHIVQKQQTDNPKGMDEQLTSLKVLYNDLGAQVTEGKQDLERASQLARKMKKEAASLSEWLSATETELVQKSTSEGLLGDLDTEISWAKNVLKDLEKRKADLNTITESSAALQNLIEGSEPILEERLCVLNAGWSRVRTWTEDWCNTLMNHQNQLEIFDGNVAHISTWLYQAEALLDEIEKKPTSKQEEIVKRLVSELDDANLQVENVRDQALILMNARGSSSRELVEPKLAELNRNFEKVSQHIKSAKLLIAQEPLYQCLVTTETFETGVPFSDLEKLENDIENMLKFVEKHLESSDEDEKMDEESAQIEEVLQRGEEMLHQPMEDNKKEKIRLQLLLLHTRYNKIKAIPIQQRKMGQLASGIRSSLLPTDYLVEINKILLCMDDVELSLNVPELNTAIYEDFSFQEDSLKNIKDQLDKLGEQIAVIHEKQPDVILEASGPEAIQIRDTLTQLNAKWDRINRMYSDRKGCFDRAMEEWRQFHCDLNDLTQWITEAEELLVDTCAPGGSLDLEKARIHQQELEVGISSHQPSFAALNRTGDGIVQKLSQADGSFLKEKLAGLNQRWDAIVAEVKDRQPRLKGESKQVMKYRHQLDEIICWLTKAEHAMQKRSTTELGENLQELRDLTQEMEVHAEKLKWLNRTELEMLSDKSLSLPERDKISESLRTVNMTWNKICREVPTTLKECIQEPSSVSQTRIAAHPNVQKVVLVSSASDIPVQSHRTSEISIPADLDKTITELADWLVLIDQMLKSNIVTVGDVEEINKTVSRMKITKADLEQRHPQLDYVFTWAQKLKNKASSSDMRTAITEKLERVKNQWDGTQHGVELRQQQLEDMIIDSLQWDDHREETEELMRKYEARLYILQQARRDPLTKQISVPISMKWAQKLFGLCGASCLAEKAILGSRESENGKNLRDT

SEQ ID NO: 831876 - protein, 2421 aa, Homo sapiens
MSGLAATTFHWKKCRLDLPGHVALQACKRLPDEHNDVQKKTFTKWINARFSKSGKPPINDMFTDLKDGRKLLDLLEGLTGTSLPKERGSTRVHALNNVNRVLQVLHQNNVELVNIGGTDIVDGNHKLTLGLLWSIILHWQVKDVMKDVMSDLQQTNSEKILLSWVRQTTRPYSQVNVLNFTTSWTDGLAFNAVLHRHKPDLFSWDKVVKMSPIERLEHAFSKAQTYLGIEKLLDPEDVAVQLPDKKSIIMYLTSLFEVLPQQVTIDAIREVETLPRKYKKECEEEAINIQSTAPEEEHESPRAETPSTVTEVDMDLDSYQIALEEVLTWLLSAEDTFQEQDDISDDVEEVKDQFATHEAFMMELTAHQSSVGSVLQAGNQLITQGTLSDEEEFEIQEQMTLLNARWEALRVESMDRQSRLHDVLMELQKKQLQQLSAWLTLTEERIQKMETCPLDDDVKSLQKLLEEHKSLQSDLEAEQVKVNSLTHMVVIVDENSGESATAILEDQLQKLGERWTAVCRWTEERWNRLQEINILWQELLEEQCLLKAWLTEKEEALNKVQTSNFKDQKELSVSVRRLAILKEDMEMKRQTLDQLSEIGQDVGQLLDNSKASKKINSDSEELTQRWDSLVQRLEDSSNQVTQAVAKLGMSQIPQKDLLETVRVREQAITKKSKQELPPPPPPKKRQIHVDIEAKKKFDAISAELLNWILKWKTAIQTTEIKEYMKMQDTSEMKKKLKALEKEQRERIPRADELNQTGQILVEQMGKEGLPTEEIKNVLEKVSSEWKNVSQHLEDLERKIQLQEDINAYFKQLDELEKVIKTKEEWVKHTSISESSRQSLPSLKDSCQRELTNLLGLHPKIEMARASCSALMSQPSAPDFVQRGFDSFLGRYQAVQEAVEDRQQHLENELKGQPGHAYLETLKTLKDVLNDSENKAQVSLNVLNDLAKVEKALQEKKTLDEILENQKPALHKLAEETKALEKNVHPDVEKLYKQEFDDVQGKWNKLKVLVSKDLHLLEEIALTLRAFEADSTVIEKWMDGVKDFLMKQQAAQGDDAGLQRQLDQCSAFVNEIETIESSLKNMKEIETNLRSGPVAGIKTWVQTRLGDYQTQLEKLSKEIATQKSRLSESQEKAANLKKDLAEMQEWMTQAEEEYLERDFEYKSPEELESAVEEMKRAKEDVLQKEVRVKILKDNIKLLAAKVPSGGQELTSELNVVLENYQLLCNRIRGKCHTLEEVWSCWIELLHYLDLETTWLNTLEERMKSTEVLPEKTDAVNEALESLESVLRHPADNRTQIRELGQTLIDGGILDDIISEKLEAFNSRYEDLSHLAESKQISLEKQLQVLRETDQMLQVLQESLGELDKQLTTYLTDRIDAFQVPQEAQKIQAEISAHELTLEELRRNMRSQPLTSPESRTARGGSQMDVLQRKLREVSTKFQLFQKPANFEQRMLDCKRVLDGVKAELHVLDVKDVDPDVIQTHLDKCMKLYKTLSEVKLEVETVIKTGRHIVQKQQTDNPKGMDEQLTSLKVLYNDLGAQVTEGKQDLERASQLARKMKKEAASLSEWLSATETELVQKSTSEGLLGDLDTEISWAKNVLKDLEKRKADLNTITESSAALQNLIEGSEPILEERLCVLNAGWSRVRTWTEDWCNTLMNHQNQLEIFDGNVAHISTWLYQAEALLDEIEKKPTSKQEEIVKRLVSELDDANLQVENVRDQALILMNARGSSSRELVEPKLAELNRNFEKVSQHIKSAKLLIAQEPLYQCLVTTETFETGVPFSDLEKLENDIENMLKFVEKHLESSDEDEKMDEESAQIEEVLQRGEEMLHQPMEDNKKEKIRLQLLLLHTRYNKIKAIPIQQRKMGQLASGIRSSLLPTDYLVEINKILLCMDDVELSLNVPELNTAIYEDFSFQEDSLKNIKDQLDKLGEQIAVIHEKQPDVILEASGPEAIQIRDTLTQLNAKWDRINRMYSDRKGCFDRAMEEWRQFHCDLNDLTQWITEAEELLVDTCAPGGSLDLEKARIHQQELEVGISSHQPSFAALNRTGDGIVQKLSQADGSFLKEKLAGLNQRWDAIVAEVKDRQPRLKGESKQVMKYRHQLDEIICWLTKAEHAMQKRSTTELGENLQELRDLTQEMEVHAEKLKWLNRTELEMLSDKSLSLPERDKISESLRTVNMTWNKICREVPTTLKECIQEPSSVSQTRIAAHPNVQKVVLVSSASDIPVQSHRTSEISIPADLDKTITELADWLVLIDQMLKSNIVTVGDVEEINKTVSRMKITKADLEQRHPQLDYVFTWAQKLKNKASSSDMRTAITEKLERVKNQWDGTQHGVELRQQQLEDMIIDSLQWDDHREETEELMRKYEARLYILQQARRDPLTKQISVPISMKWAQKFSTCLDSIGLAELRDHRSAFYGVEFLLKISL

SEQ ID NO: 831877 - protein, 2199 aa, Homo sapiens
MSGLAATTFHWKKCRLDLPGHVALQACKRLPDEHNDVQKKTFTKWINARFSKSGKPPINDMFTDLKDGRKLLDLLEGLTGTSLPKERGSTRVHALNNVNRVLQVLHQNNVELVNIGGTDIVDGNHKLTLGLLWSIILHWQVKDVMKDVMSDLQQTNSEKILLSWVRQTTRPYSQVNVLNFTTSWTDGLAFNAVLHRHKPDLFSWDKVVKMSPIERLEHAFSKAQTYLGIEKLLDPEDVAVQLPDKKSIIMYLTSLFEVLPQQVTIDAIREVETLPRKYKKECEEEAINIQSTAPEEEHESPRAETPSTVTEVDMDLDSYQIALEEVLTWLLSAEDTFQEQDDISDDVEEVKDQFATHEAFMMELTAHQSSVGSVLQAGNQLITQGTLSDEEEFEIQEQMTLLNARWEALRVESMDRQSRLHDVLMELQKKQLQQLSAWLTLTEERIQKMETCPLDDDVKSLQKLLEEHKSLQSDLEAEQVKVNSLTHMVVIVDENSGESATAILEDQLQKLGERWTAVCRWTEERWNRLQEINILWQELLEEQCLLKAWLTEKEEALNKVQTSNFKDQKELSVSVRRLAILKEDMEMKRQTLDQLSEIGQDVGQLLDNSKASKKINSDSEELTQRWDSLVQRLEDSSNQVTQAVAKLGMSQIPQKDLLETVRVREQAITKKSKQELPPPPPPKKRQIHVDIEAKKKFDAISAELLNWILKWKTAIQTTEIKEYMKMQDTSEMKKKLKALEKEQRERIPRADELNQTGQILVEQMGKEGLPTEEIKNVLEKVSSEWKNVSQHLEDLERKIQLQEDINAYFKQLDELEKVIKTKEEWVKHTSISESSRQSLPSLKDSCQRELTNLLGLHPKIEMARASCSALMSQPSAPDFVQRGFDSFLGRYQAVQEAVEDRQQHLENELKGQPGHAYLETLKTLKDVLNDSENKAQVSLNVLNDLAKVEKALQEKKTLDEILENQKPALHKLAEETKALEKNVHPDVEKLYKQEFDDVQGKWNKLKVLVSKDLHLLEEIALTLRAFEADSTVIEKWMDGVKDFLMKQQAAQGDDAGLQRQLDQCSAFVNEIETIESSLKNMKEIETNLRSGPVAGIKTWVQTRLGDYQTQLEKLSKEIATQKSRLSESQEKAANLKKDLAEMQEWMTQAEEEYLERDFEYKSPEELESAVEEMKRAKEDVLQKEVRVKILKDNIKLLAAKVPSGGQELTSELNVVLENYQLLCNRIRGKCHTLEEVWSCWIELLHYLDLETTWLNTLEERMKSTEVLPEKTDAVNEALESLESVLRHPADNRTQIRELGQTLIDGGILDDIISEKLEAFNSRYEDLSHLAESKQISLEKQLQVLRETDQMLQVLQESLGELDKQLTTYLTDRIDAFQVPQEAQKIQAEISAHELTLEELRRNMRSQPLTSPESRTARGGSQMDVLQRKLREVSTKFQLFQKPANFEQRMLDCKRVLDGVKAELHVLDVKDVDPDVIQTHLDKCMKLYKTLSEVKLEVETVIKTGRHIVQKQQTDNPKGMDEQLTSLKVLYNDLGAQVTEGKQDLERASQLARKMKKEAASLSEWLSATETELVQKSTSEGLLGDLDTEISWAKNVLKDLEKRKADLNTITESSAALQNLIEGSEPILEERLCVLNAGWSRVRTWTEDWCNTLMNHQNQLEIFDGNVAHISTWLYQAEALLDEIEKKPTSKQEEIVKRLVSELDDANLQVENVRDQALILMNARGSSSRELVEPKLAELNRNFEKVSQHIKSAKLLIAQEPLYQCLVTTETFETGVPFSDLEKLENDIENMLKFVEKHLESSDEDEKMDEESAQIEEVLQRGEEMLHQPMEDNKKEKIRLQLLLLHTRYNKIKAIPIQQRKMGQLASGIRSSLLPTDYLVEINKILLCMDDVELSLNVPELNTAIYEDFSFQEDSLKNIKDQLDKLGEQIAVIHEKQPDVILEASGPEAIQIRDTLTQLNAKWDRINRMYSDRKGCFDRAMEEWRQFHCDLNDLTQWITEAEELLVDTCAPGGSLDLEKARIHQQELEVGISSHQPSFAALNRTGDGIVQKLSQADGSFLKEKLAGLNQRWDAIVAEVKDRQPRLKGESKQVMKYRHQLDEIICWLTKAEHAMQKRSTTELGENLQELRDLTQEMEVHAEKLKWLNRTELEMLSDKSLSLPERDKISRSRKLASSCFLKFYKAELKMLLEDGCVGVEEGS

SEQ ID NO: 831878 - protein, 254 aa, Homo sapiens
  misc_feature (239)..(239): Xaa can be any naturally occurring amino acid
  misc_feature (254)..(254): Xaa can be any naturally occurring amino acid
MSGLAATTFHWKKCRLDLPGHVALQACKRLPDEHNDVQKKTFTKWINARFSKSGKPPINDMFTDLKDGRKLLDLLEGLTGTSLPKERGSTRVHALNNVNRVLQVLHQNNVELVNIGGTDIVDGNHKLTLGLLWSIILHWQVKDVMKDVMSDLQQTNSEKILLSWVRQTTRPYSQVNVLNFTTSWTDGLAFNAVLHRHKPDLFSWDKVVKMSPIERLEHAFSKAQTYLGIEKLLDPDLEXCLPVQPSLEQRKSHX

SEQ ID NO: 831879 - protein, 107 aa, Homo sapiens
MRTAITEKLERVKNQWDGTQHGVELRQQQLEDMIIDSLQWDDHREETEELMRKYEARLYILQQARRDPLTKQISVPISMKWAQKFPMYFPHTGTASLIISIPHQSGC

SEQ ID NO: 831880 - protein, 3432 aa, Homo sapiens; identical to SEQ ID NO: 831861

SEQ ID NO: 831881 - protein, 3432 aa, Homo sapiens; identical to SEQ ID NO: 831861

SEQ ID NO: 831882 - protein, 3437 aa, Homo sapiens
MSGLAATTFHWKKCRLDLPGHVALQACKRLPDEHNDVQKKTFTKWINARFSKSGKPPINDMFTDLKDGRKLLDLLEGLTGTSLPKERGSTRVHALNNVNRVLQVLHQNNVELVNIGGTDIVDGNHKLTLGLLWSIILHWQVKDVMKDVMSDLQQTNSEKILLSWVRQTTRPYSQVNVLNFTTSWTDGLAFNAVLHRHKPDLFSWDKVVKMSPIERLEHAFSKAQTYLGIEKLLDPEDVAVQLPDKKSIIMYLTSLFEVLPQQVTIDAIREVETLPRKYKKECEEEAINIQSTAPEEEHESPRAETPSTVTEVDMDLDSYQIALEEVLTWLLSAEDTFQEQDDISDDVEEVKDQFATHEAFMMELTAHQSSVGSVLQAGNQLITQGTLSDEEEFEIQEQMTLLNARWEALRVESMDRQSRLHDVLMELQKKQLQQLSAWLTLTEERIQKMETCPLDDDVKSLQKLLEEHKSLQSDLEAEQVKVNSLTHMVVIVDENSGESATAILEDQLQKLGERWTAVCRWTEERWNRLQEINILWQELLEEQCLLKAWLTEKEEALNKVQTSNFKDQKELSVSVRRLAILKEDMEMKRQTLDQLSEIGQDVGQLLDNSKASKKINSDSEELTQRWDSLVQRLEDSSNQVTQAVAKLGMSQIPQKDLLETVRVREQAITKKSKQELPPPPPPKKRQIHVDIEAKKKFDAISAELLNWILKWKTAIQTTEIKEYMKMQDTSEMKKKLKALEKEQRERIPRADELNQTGQILVEQMGKEGLPTEEIKNVLEKVSSEWKNVSQHLEDLERKIQLQEDINAYFKQLDELEKVIKTKEEWVKHTSISESSRQSLPSLKDSCQRELTNLLGLHPKIEMARASCSALMSQPSAPDFVQRGFDSFLGRYQAVQEAVEDRQQHLENELKGQPGHAYLETLKTLKDVLNDSENKAQVSLNVLNDLAKVEKALQEKKTLDEILENQKPALHKLAEETKALEKNVHPDVEKLYKQEFDDVQGKWNKLKVLVSKDLHLLEEIALTLRAFEADSTVIEKWMDGVKDFLMKQQAAQGDDAGLQRQLDQCSAFVNEIETIESSLKNMKEIETNLRSGPVAGIKTWVQTRLGDYQTQLEKLSKEIATQKSRLSESQEKAANLKKDLAEMQEWMTQAEEEYLERDFEYKSPEELESAVEEMKRAKEDVLQKEVRVKILKDNIKLLAAKVPSGGQELTSELNVVLENYQLLCNRIRGKCHTLEEVWSCWIELLHYLDLETTWLNTLEERMKSTEVLPEKTDAVNEALESLESVLRHPADNRTQIRELGQTLIDGGILDDIISEKLEAFNSRYEDLSHLAESKQISLEKQLQVLRETDQMLQVLQESLGELDKQLTTYLTDRIDAFQVPQEAQKIQAEISAHELTLEELRRNMRSQPLTSPESRTARGGSQMDVLQRKLREVSTKFQLFQKPANFEQRMLDCKRVLDGVKAELHVLDVKDVDPDVIQTHLDKCMKLYKTLSEVKLEVETVIKTGRHIVQKQQTDNPKGMDEQLTSLKVLYNDLGAQVTEGKQDLERASQLARKMKKEAASLSEWLSATETELVQKSTSEGLLGDLDTEISWAKNVLKDLEKRKADLNTITESSAALQNLIEGSEPILEERLCVLNAGWSRVRTWTEDWCNTLMNHQNQLEIFDGNVAHISTWLYQAEALLDEIEKKPTSKQEEIVKRLVSELDDANLQVENVRDQALILMNARGSSSRELVEPKLAELNRNFEKVSQHIKSAKLLIAQEPLYQCLVTTETFETGVPFSDLEKLENDIENMLKFVEKHLESSDEDEKMDEESAQIEEVLQRGEEMLHQPMEDNKKEKIRLQLLLLHTRYNKIKAIPIQQRKMGQLASGIRSSLLPTDYLVEINKILLCMDDVELSLNVPELNTAIYEDFSFQEDSLKNIKDQLDKLGEQIAVIHEKQPDVILEASGPEAIQIRDTLTQLNAKWDRINRMYSDRKGCFDRAMEEWRQFHCDLNDLTQWITEAEELLVDTCAPGGSLDLEKARIHQQELEVGISSHQPSFAALNRTGDGIVQKLSQADGSFLKEKLAGLNQRWDAIVAEVKDRQPRLKGESKQVMKYRHQLDEIICWLTKAEHAMQKRSTTELGENLQELRDLTQEMEVHAEKLKWLNRTELEMLSDKSLSLPERDKISESLRTVNMTWNKICREVPTTLKECIQEPSSVSQTRIAAHPNVQKVVLVSSASDIPVQSHRTSEISIPADLDKTITELADWLVLIDQMLKSNIVTVGDVEEINKTVSRMKITKADLEQRHPQLDYVFTWAQKLKNKASSSDMRTAITEKLERVKNQWDGTQHGVELRQQQLEDMIIDSLQWDDHREETEELMRKYEARLYILQQARRDPLTKQISVPNTASRTGSWRWYRMAFDNVLQKLLEEYGSDDTRNVKETTEYLKTSWINLKQSIADRQNALEAEWRTVQASRRDLENFLKWIQEAETTVNVLVDASHRENALQDSILARELKQQMQDIQAEIDAHNDIFKSIDGNRQKMVKALGNSEEATMLQHRLDDMNQRWNDLKAKSASIRAHLEASAEKWNRLLMSLEELIKWLNMKDEELKKQMPIGGDVPALQLQYDHCKALRRELKEKEYSVLNAVDQARVFLADQPIEAPEEPRRNLQSKTELTPEERAQKIAKAMRKQSSEVKEKWESLNAVTSNWQKQVDKALEKLRDLQGAMDDLDADMKEAESVRNGWKPVGDLLIDSLQDHIEKIMAFREEIAPINFKVKTVNDLSSQLSPLDLHPSLKMSRQLDDLNMRWKLLQVSVDDRLKQLQEAHRDFGPSSQHFLSTSVQLPWQRSISHNKVPYYINHQTQTTCWDHPKMTELFQSLADLNNVRFSAYRTAIKIRRLQKALCLDLLELSTTNEIFKQHKLNQNDQLLSVPDVINCLTTTYDGLEQMHKDLVNVPLCVDMCLNWLLNVYDTGRTGKIRVQSLKIGLMSLSKGLLEEKYRYLFKEVAGPTEMCDQRQLGLLLHDAIQIPRQLGEVAAFGGSNIEPSVRSCFQQNNNKPEISVKEFIDWMHLEPQSMVWLPVLHRVAAAETAKHQAKCNICKECPIVGFRYRSLKHFNYDVCQSCFFSGRTAKGHKLHYPMVEYCIPTTSGEDVRDFTKVLKNKFRSKKYFAKHPRLGYLPVQTVLEGDNLETPITLISMWPEHYDPSQSPQLFHDDTHSRIEQYATRLAQMERTNGSFLTDSSSTTGSVEDEHALIQQYCQTLGGESPVSQPQSPAQILKSVEREERGELERIIADLEEEQRNLQVEYEQLKDQHLRRGLPVGSPPESIISPHHTSEDSELIAEAKLLRQHKGRLEARMQILEDHNKQLESQLHRLRQLLEQPESDSRINGVSPWASPQHSALSYSLDPDASGPQFHQAAGEDLLAPPHDTSTDLTEVMEQIHSTFPSCCPNVPSRPQAM

SEQ ID NO: 831883 - protein, 2392 aa, Homo sapiens
MSGLAATTFHWKKCRLDLPGHVALQACKRLPDEHNDVQKKTFTKWINARFSKSGKPPINDMFTDLKDGRKLLDLLEGLTGTSLPKERGSTRVHALNNVNRVLQVLHQNNVELVNIGGTDIVDGNHKLTLGLLWSIILHWQVKDVMKDVMSDLQQTNSEKILLSWVRQTTRPYSQVNVLNFTTSWTDGLAFNAVLHRHKPDLFSWDKVVKMSPIERLEHAFSKAQTYLGIEKLLDPEDVAVQLPDKKSIIMYLTSLFEVLPQQVTIDAIREVETLPRKYKKECEEEAINIQSTAPEEEHESPRAETPSTVTEVDMDLDSYQIALEEVLTWLLSAEDTFQEQDDISDDVEEVKDQFATHEAFMMELTAHQSSVGSVLQAGNQLITQGTLSDEEEFEIQEQMTLLNARWEALRVESMDRQSRLHDVLMELQKKQLQQLSAWLTLTEERIQKMETCPLDDDVKSLQKLLEEHKSLQSDLEAEQVKVNSLTHMVVIVDENSGESATAILEDQLQKLGERWTAVCRWTEERWNRLQEINILWQELLEEQCLLKAWLTEKEEALNKVQTSNFKDQKELSVSVRRLAILKEDMEMKRQTLDHRVRTWTEDWCNTLMNHQNQLEIFDGNVAHISTWLYQAEALLDEIEKKPTSKQEEIVKRLVSELDDANLQVENVRDQALILMNARGSSSRELVEPKLAELNRNFEKVSQHIKSAKLLIAQEPLYQCLVTTETFETGVPFSDLEKLENDIENMLKFVEKHLESSDEDEKMDEESAQIEEVLQRGEEMLHQPMEDNKKEKIRLQLLLLHTRYNKIKAIPIQQRKMGQLASGIRSSLLPTDYLVEINKILLCMDDVELSLNVPELNTAIYEDFSFQEDSLKNIKDQLDKLGEQIAVIHEKQPDVILEASGPEAIQIRDTLTQLNAKWDRINRMYSDRKGCFDRAMEEWRQFHCDLNDLTQWITEAEELLVDTCAPGGSLDLEKARIHQQELEVGISSHQPSFAALNRTGDGIVQKLSQADGSFLKEKLAGLNQRWDAIVAEVKDRQPRLKGESKQVMKYRHQLDEIICWLTKAEHAMQKRSTTELGENLQELRDLTQEMEVHAEKLKWLNRTELEMLSDKSLSLPERDKISESLRTVNMTWNKICREVPTTLKECIQEPSSVSQTRIAAHPNVQKVVLVSSASDIPVQSHRTSEISIPADLDKTITELADWLVLIDQMLKSNIVTVGDVEEINKTVSRMKITKADLEQRHPQLDYVFTWAQKLKNKASSSDMRTAITEKLERVKNQWDGTQHGVELRQQQLEDMIIDSLQWDDHREETEELMRKYEARLYILQQARRDPLTKQISVPNTASRTGPGDGIVMAFDNVLQKLLEEYGSDDTRNVKETTEYLKTSWINLKQSIADRQNALEAEWRTVQASRRDLENFLKWIQEAETTVNVLVDASHRENALQDSILARELKQQMQDIQAEIDAHNDIFKSIDGNRQKMVKALGNSEEATMLQHRLDDMNQRWNDLKAKSASIRAHLEASAEKWNRLLMSLEELIKWLNMKDEELKKQMPIGGDVPALQLQYDHCKALRRELKEKEYSVLNAVDQARVFLADQPIEAPEEPRRNLQSKTELTPEERAQKIAKAMRKQSSEVKEKWESLNAVTSNWQKQVDKALEKLRDLQGAMDDLDADMKEAESVRNGWKPVGDLLIDSLQDHIEKIMAFREEIAPINFKVKTVNDLSSQLSPLDLHPSLKMSRQLDDLNMRWKLLQVSVDDRLKQLQEAHRDFGPSSQHFLSTSVQLPWQRSISHNKVPYYINHQTQTTCWDHPKMTELFQSLADLNNVRFSAYRTAIKIRRLQKALCLDLLELSTTNEIFKQHKLNQNDQLLSVPDVINCLTTTYDGLEQMHKDLVNVPLCVDMCLNWLLNVYDTGRTGKIRVQSLKIGLMSLSKGLLEEKYRYLFKEVAGPTEMCDQRQLGLLLHDAIQIPRQLGEVAAFGGSNIEPSVRSCFQQNNNKPEISVKEFIDWMHLEPQSMVWLPVLHRVAAAETAKHQAKCNICKECPIVGFRYRSLKHFNYDVCQSCFFSGRTAKGHKLHYPMVEYCIPTTSGEDVRDFTKVLKNKFRSKKYFAKHPRLGYLPVQTVLEGDNLETPITLISMWPEHYDPSQSPQLFHDDTHSRIEQYATRLAQMERTNGSFLTDSSSTTGSVEDEHALIQQYCQTLGGESPVSQPQSPAQILKSVEREERGELERIIADLEEEQRNLQVEYEQLKDQHLRRGLPVGSPPESIISPHHTSEDSELIAEAKLLRQHKGRLEARMQILEDHNKQLESQLHRLRQLLEQPESDSRINGVSPWASPQHSALSYSLDPDASGPQFHQAAGEDLLAPPHDTSTDLTEVMEQIHSTFPSCCPNVPSRPQAM

SEQ ID NO: 831884 - protein, 1710 aa, Homo sapiens
RGPPTYSSLSKDRNLETVSQRIKSAKLLIAQEPLYQCLVTTETFETGVPFSDLEKLENDIENMLKFVEKHLESSDEDEKMDEESAQIEEVLQRGEEMLHQPMEDNKKEKIRLQLLLLHTRYNKIKAIPIQQRKMGQLASGIRSSLLPTDYLVEINKILLCMDDVELSLNVPELNTAIYEDFSFQEDSLKNIKDQLDKLGEQIAVIHEKQPDVILEASGPEAIQIRDTLTQLNAKWDRINRMYSDRKGCFDRAMEEWRQFHCDLNDLTQWITEAEELLVDTCAPGGSLDLEKARIHQQELEVGISSHQPSFAALNRTGDGIVQKLSQADGSFLKEKLAGLNQRWDAIVAEVKDRQPRLKGESKQVMKYRHQLDEIICWLTKAEHAMQKRSTTELGENLQELRDLTQEMEVHAEKLKWLNRTELEMLSDKSLSLPERDKISESLRTVNMTWNKICREVPTTLKECIQEPSSVSQTRIAAHPNVQKVVLVSSASDIPVQSHRTSEISIPADLDKTITELADWLVLIDQMLKSNIVTVGDVEEINKTVSRMKITKADLEQRHPQLDYVFTWAQKLKNKASSSDMRTAITEKLERVKNQWDGTQHGVELRQQQLEDMIIDSLQWDDHREETEELMRKYEARLYILQQARRDPLTKQISVPNTASRTGPGDGIVMAFDNVLQKLLEEYGSDDTRNVKETTEYLKTSWINLKQSIADRQNALEAEWRTVQASRRDLENFLKWIQEAETTVNVLVDASHRENALQDSILARELKQQMQDIQAEIDAHNDIFKSIDGNRQKMVKALGNSEEATMLQHRLDDMNQRWNDLKAKSASIRAHLEASAEKWNRLLMSLEELIKWLNMKDEELKKQMPIGGDVPALQLQYDHCKALRRELKEKEYSVLNAVDQARVFLADQPIEAPEEPRRNLQSKTELTPEERAQKIAKAMRKQSSEVKEKWESLNAVTSNWQKQVDKALEKLRDLQGAMDDLDADMKEAESVRNGWKPVGDLLIDSLQDHIEKIMAFREEIAPINFKVKTVNDLSSQLSPLDLHPSLKMSRQLDDLNMRWKLLQVSVDDRLKQLQEAHRDFGPSSQHFLSTSVQLPWQRSISHNKVPYYINHQTQTTCWDHPKMTELFQSLADLNNVRFSAYRTAIKIRRLQKALCLDLLELSTTNEIFKQHKLNQNDQLLSVPDVINCLTTTYDGLEQMHKDLVNVPLCVDMCLNWLLNVYDTGRTGKIRVQSLKIGLMSLSKGLLEEKYRYLFKEVAGPTEMCDQRQLGLLLHDAIQIPRQLGEVAAFGGSNIEPSVRSCFQQNNNKPEISVKEFIDWMHLEPQSMVWLPVLHRVAAAETAKHQAKCNICKECPIVGFRYRSLKHFNYDVCQSCFFSGRTAKGHKLHYPMVEYCIPTTSGEDVRDFTKVLKNKFRSKKYFAKHPRLGYLPVQTVLEGDNLETPITLISMWPEHYDPSQSPQLFHDDTHSRIEQYATRLAQMERTNGSFLTDSSSTTGSVEDEHALIQQYCQTLGGESPVSQPQSPAQILKSVEREERGELERIIADLEEEQRNLQVEYEQLKDQHLRRGLPVGSPPESIISPHHTSEDSELIAEAKLLRQHKGRLEARMQILEDHNKQLESQLHRLRQLLEQPESDSRINGVSPWASPQHSALSYSLDPDASGPQFHQAAGEDLLAPPHDTSTDLTEVMEQIHSTFPSCCPNVPSRPQAM

SEQ ID NO: 831885 - protein, 1412 aa, Homo sapiens
LFFKDLTINLINNLYVIVIIPDFKKQELASSCFLKEKLAGLNQRWDAIVAEVKDRQPRLKGESKQVMKYRHQLDEIICWLTKAEHAMQKRSTTELGENLQELRDLTQEMEVHAEKLKWLNRTELEMLSDKSLSLPERDKISESLRTVNMTWNKICREVPTTLKECIQEPSSVSQTRIAAHPNVQKVVLVSSASDIPVQSHRTSEISIPADLDKTITELADWLVLIDQMLKSNIVTVGDVEEINKTVSRMKITKADLEQRHPQLDYVFTWAQKLKNKASSSDMRTAITEKLERVKNQWDGTQHGVELRQQQLEDMIIDSLQWDDHREETEELMRKYEARLYILQQARRDPLTKQISVPNTASRTGPGDGIVMAFDNVLQKLLEEYGSDDTRNVKETTEYLKTSWINLKQSIADRQNALEAEWRTVQASRRDLENFLKWIQEAETTVNVLVDASHRENALQDSILARELKQQMQDIQAEIDAHNDIFKSIDGNRQKMVKALGNSEEATMLQHRLDDMNQRWNDLKAKSASIRAHLEASAEKWNRLLMSLEELIKWLNMKDEELKKQMPIGGDVPALQLQYDHCKALRRELKEKEYSVLNAVDQARVFLADQPIEAPEEPRRNLQSKTELTPEERAQKIAKAMRKQSSEVKEKWESLNAVTSNWQKQVDKALEKLRDLQGAMDDLDADMKEAESVRNGWKPVGDLLIDSLQDHIEKIMAFREEIAPINFKVKTVNDLSSQLSPLDLHPSLKMSRQLDDLNMRWKLLQVSVDDRLKQLQEAHRDFGPSSQHFLSTSVQLPWQRSISHNKVPYYINHQTQTTCWDHPKMTELFQSLADLNNVRFSAYRTAIKIRRLQKALCLDLLELSTTNEIFKQHKLNQNDQLLSVPDVINCLTTTYDGLEQMHKDLVNVPLCVDMCLNWLLNVYDTGRTGKIRVQSLKIGLMSLSKGLLEEKYRYLFKEVAGPTEMCDQRQLGLLLHDAIQIPRQLGEVAAFGGSNIEPSVRSCFQQNNNKPEISVKEFIDWMHLEPQSMVWLPVLHRVAAAETAKHQAKCNICKECPIVGFRYRSLKHFNYDVCQSCFFSGRTAKGHKLHYPMVEYCIPTTSGEDVRDFTKVLKNKFRSKKYFAKHPRLGYLPVQTVLEGDNLETPITLISMWPEHYDPSQSPQLFHDDTHSRIEQYATRLAQMERTNGSFLTDSSSTTGSVEDEHALIQQYCQTLGGESPVSQPQSPAQILKSVEREERGELERIIADLEEEQRNLQVEYEQLKDQHLRRGLPVGSPPESIISPHHTSEDSELIAEAKLLRQHKGRLEARMQILEDHNKQLESQLHRLRQLLEQPESDSRINGVSPWASPQHSALSYSLDPDASGPQFHQAAGEDLLAPPHDTSTDLTEVMEQIHSTFPSCCPNVPSRPQAM

SEQ ID NO: 831886 - protein, 1287 aa, Homo sapiens
MLSDKSLSLPERDKISESLRTVNMTWNKICREVPTTLKECIQEPSSVSQTRIAAHPNVQKVVLVSSASDIPVQSHRTSEISIPADLDKTITELADWLVLIDQMLKSNIVTVGDVEEINKTVSRMKITKADLEQRHPQLDYVFTWAQKLKNKASSSDMRTAITEKLERVKNQWDGTQHGVELRQQQLEDMIIDSLQWDDHREETEELMRKYEARLYILQQARRDPLTKQISVPNTASRTGPGDGIVMAFDNVLQKLLEEYGSDDTRNVKETTEYLKTSWINLKQSIADRQNALEAEWRTVQASRRDLENFLKWIQEAETTVNVLVDASHRENALQDSILARELKQQMQDIQAEIDAHNDIFKSIDGNRQKMVKALGNSEEATMLQHRLDDMNQRWNDLKAKSASIRAHLEASAEKWNRLLMSLEELIKWLNMKDEELKKQMPIGGDVPALQLQYDHCKALRRELKEKEYSVLNAVDQARVFLADQPIEAPEEPRRNLQSKTELTPEERAQKIAKAMRKQSSEVKEKWESLNAVTSNWQKQVDKALEKLRDLQGAMDDLDADMKEAESVRNGWKPVGDLLIDSLQDHIEKIMAFREEIAPINFKVKTVNDLSSQLSPLDLHPSLKMSRQLDDLNMRWKLLQVSVDDRLKQLQEAHRDFGPSSQHFLSTSVQLPWQRSISHNKVPYYINHQTQTTCWDHPKMTELFQSLADLNNVRFSAYRTAIKIRRLQKALCLDLLELSTTNEIFKQHKLNQNDQLLSVPDVINCLTTTYDGLEQMHKDLVNVPLCVDMCLNWLLNVYDTGRTGKIRVQSLKIGLMSLSKGLLEEKYRYLFKEVAGPTEMCDQRQLGLLLHDAIQIPRQLGEVAAFGGSNIEPSVRSCFQQNNNKPEISVKEFIDWMHLEPQSMVWLPVLHRVAAAETAKHQAKCNICKECPIVGFRYRSLKHFNYDVCQSCFFSGRTAKGHKLHYPMVEYCIPTTSGEDVRDFTKVLKNKFRSKKYFAKHPRLGYLPVQTVLEGDNLETPITLISMWPEHYDPSQSPQLFHDDTHSRIEQYATRLAQMERTNGSFLTDSSSTTGSVEDEHALIQQYCQTLGGESPVSQPQSPAQILKSVEREERGELERIIADLEEEQRNLQVEYEQLKDQHLRRGLPVGSPPESIISPHHTSEDSELIAEAKLLRQHKGRLEARMQILEDHNKQLESQLHRLRQLLEQPESDSRINGVSPWASPQHSALSYSLDPDASGPQFHQAAGEDLLAPPHDTSTDLTEVMEQIHSTFPSCCPNVPSRPQAM

SEQ ID NO: 831887 - protein, 385 aa, Homo sapiens
MVWLPVLHRVAAAETAKHQAKCNICKECPIVGFRYRSLKHFNYDVCQSCFFSGRTAKGHKLHYPMVEYCIPTTSGEDVRDFTKVLKNKFRSKKYFAKHPRLGYLPVQTVLEGDNLETPITLISMWPEHYDPSQSPQLFHDDTHSRIEQYATRLAQMERTNGSFLTDSSSTTGSVEDEHALIQQYCQTLGGESPVSQPQSPAQILKSVEREERGELERIIADLEEEQRNLQVEYEQLKDQHLRRGLPVGSPPESIISPHHTSEDSELIAEAKLLRQHKGRLEARMQILEDHNKQLESQLHRLRQLLEQPESDSRINGVSPWASPQHSALSYSLDPDASGPQFHQAAGEDLLAPPHDTSTDLTEVMEQIHSTFPSCCPNVPSRPQAM

SEQ ID NO: 831888 - protein, 278 aa, Homo sapiens
TFVSLSPLCSPITLISMWPEHYDPSQSPQLFHDDTHSRIEQYATRLAQMERTNGSFLTDSSSTTGSVEDEHALIQQYCQTLGGESPVSQPQSPAQILKSVEREERGELERIIADLEEEQRNLQVEYEQLKDQHLRRGLPVGSPPESIISPHHTSEDSELIAEAKLLRQHKGRLEARMQILEDHNKQLESQLHRLRQLLEQPESDSRINGVSPWASPQHSALSYSLDPDASGPQFHQAAGEDLLAPPHDTSTDLTEVMEQIHSTFPSCCPNVPSRPQAM

SEQ ID NO: 831889 - protein, 3046 aa, Homo sapiens
MSGLAATTFHWKKCRLDLPGHVALQACKRLPDEHNDVQKKTFTKWINARFSKSGKPPINDMFTDLKDGRKLLDLLEGLTGTSLPKERGSTRVHALNNVNRVLQVLHQNNVELVNIGGTDIVDGNHKLTLGLLWSIILHWQVKDVMKDVMSDLQQTNSEKILLSWVRQTTRPYSQVNVLNFTTSWTDGLAFNAVLHRHKPDLFSWDKVVKMSPIERLEHAFSKAQTYLGIEKLLDPEDVAVQLPDKKSIIMYLTSLFEVLPQQVTIDAIREVETLPRKYKKECEEEAINIQSTAPEEEHESPRAETPSTVTEVDMDLDSYQIALEEVLTWLLSAEDTFQEQDDISDDVEEVKDQFATHEAFMMELTAHQSSVGSVLQAGNQLITQGTLSDEEEFEIQEQMTLLNARWEALRVESMDRQSRLHDVLMELQKKQLQQLSAWLTLTEERIQKMETCPLDDDVKSLQKLLEEHKSLQSDLEAEQVKVNSLTHMVVIVDENSGESATAILEDQLQKLGERWTAVCRWTEERWNRLQEINILWQELLEEQCLLKAWLTEKEEALNKVQTSNFKDQKELSVSVRRLAILKEDMEMKRQTLDQLSEIGQDVGQLLDNSKASKKINSDSEELTQRWDSLVQRLEDSSNQVTQAVAKLGMSQIPQKDLLETVRVREQAITKKSKQELPPPPPPKKRQIHVDIEAKKKFDAISAELLNWILKWKTAIQTTEIKEYMKMQDTSEMKKKLKALEKEQRERIPRADELNQTGQILVEQMGKEGLPTEEIKNVLEKVSSEWKNVSQHLEDLERKIQLQEDINAYFKQLDELEKVIKTKEEWVKHTSISESSRQSLPSLKDSCQRELTNLLGLHPKIEMARASCSALMSQPSAPDFVQRGFDSFLGRYQAVQEAVEDRQQHLENELKGQPGHAYLETLKTLKDVLNDSENKAQVSLNVLNDLAKVEKALQEKKTLDEILENQKPALHKLAEETKALEKNVHPDVEKLYKQEFDDVQGKWNKLKVLVSKDLHLLEEIALTLRAFEADSTVIEKWMDGVKDFLMKQQAAQGDDAGLQRQLDQCSAFVNEIETIESSLKNMKEIETNLRSGPVAGIKTWVQTRLGDYQTQLEKLSKEIATQKSRLSESQEKAANLKKDLAEMQEWMTQAEEEYLERDFEYKSPEELESAVEEMKRAKEDVLQKEVRVKILKDNIKLLAAKVPSGGQELTSELNVVLENYQLLCNRIRGKCHTLEEVWSCWIELLHYLDLETTWLNTLEERMKSTEVLPEKTDAVNEALESLESVLRHPADNRTQIRELGQTLIDGGILDDIISEKLEAFNSRYEDLSHLAESKQISLEKQLQVLRETDQMLQVLQESLGELDKQLTTYLTDRIDAFQVPQEAQKIQAEISAHELTLEELRRNMRSQPLTSPESRTARGGSQMDVLQRKLREVSTKFQLFQKPANFEQRMLDCKRVLDGVKAELHVLDVKDVDPDVIQTHLDKCMKLYKTLSEVKLEVETVIKTGRHIVQKQQTDNPKGMDEQLTSLKVLYNDLGAQVTEGKQDLERASQLARKMKKEAASLSEWLSATETELVQKSTSEGLLGDLDTEISWAKNVLKDLEKRKADLNTITESSAALQNLIEGSEPILEERLCVLNAGWSRVRTWTEDWCNTLMNHQNQLEIFDGNVAHISTWLYQAEALLDEIEKKPTSKQEEIVKRLVSELDDANLQVENVRDQALILMNARGSSSRELVEPKLAELNRNFEKVSQHIKSAKLLIAQEPLYQCLVTTETFETGVPFSDLEKLENDIENMLKFVEKHLESSDEDEKMDEESAQIEEVLQRGEEMLHQPMEDNKKEKIRLQLLLLHTRYNKIKAIPIQQRKMGQLASGIRSSLLPTDYLVEINKILLCMDDVELSLNVPELNTAIYEDFSFQEDSLKNIKDQLDKLGEQIAVIHEKQPDVILEASGPEAIQIRDTLTQLNAKWDRINRMYSDRKGCFDRAMEEWRQFHCDLNDLTQWITEAEELLVDTCAPGGSLDLEKARIHQQELEVGISSHQPSFAALNRTGDGIVQKLSQADGSFLKEKLAGLNQRWDAIVAEVKDRQPRLKGESKQVMKYRHQLDEIICWLTKAEHAMQKRSTTELGENLQELRDLTQEMEVHAEKLKWLNRTELEMLSDKSLSLPERDKISESLRTVNMTWNKICREVPTTLKECIQEPSSVSQTRIAAHPNVQKVVLVSSASDIPVQSHRTSEISIPADLDKTITELADWLVLIDQMLKSNIVTVGDVEEINKTVSRMKITKADLEQRHPQLDYVFTWAQKLKNKASSSDMRTAITEKLERVKNQWDGTQHGVELRQQQLEDMIIDSLQWDDHREETEELMRKYEARLYILQQARRDPLTKQISVPNTASRTGSWRWYRMAFDNVLQKLLEEYGSDDTRNVKETTEYLKTSWINLKQSIADRQNALEAEWRTVQASRRDLENFLKWIQEAETTVNVLVDASHRENALQDSILARELKQQMQDIQAEIDAHNDIFKSIDGNRQKMVKALGNSEEATMLQHRLDDMNQRWNDLKAKSASIRAHLEASAEKWNRLLMSLEELIKWLNMKDEELKKQMPIGGDVPALQLQYDHCKALRRELKEKEYSVLNAVDQARVFLADQPIEAPEEPRRNLQSKTELTPEERAQKIAKAMRKQSSEVKEKWESLNAVTSNWQKQVDKALEKLRDLQGAMDDLDADMKEAESVRNGWKPVGDLLIDSLQDHIEKIMAFREEIAPINFKVKTVNDLSSQLSPLDLHPSLKMSRQLDDLNMRWKLLQVSVDDRLKQLQEAHRDFGPSSQHFLSTSVQLPWQRSISHNKVPYYINHQTQTTCWDHPKMTELFQSLADLNNVRFSAYRTAIKIRRLQKALCLDLLELSTTNEIFKQHKLNQNDQLLSVPDVINCLTTTYDGLEQMHKDLVNVPLCVDMCLNWLLNVYDTGRTGKIRVQSLKIGLMSLSKGLLEEKYRYLFKEVAGPTEMCDQRQLGLLLHDAIQIPRQLGEVAAFGGSNIEPSVRSCFQQVSMKDHWCVGCVGEGF

SEQ ID NO: 831890 - protein, 2836 aa, Homo sapiens
MSGLAATTFHWKKCRLDLPGHVALQACKRLPDEHNDVQKKTFTKWINARFSKSGKPPINDMFTDLKDGRKLLDLLEGLTGTSLPKERGSTRVHALNNVNRVLQVLHQNNVELVNIGGTDIVDGNHKLTLGLLWSIILHWQVKDVMKDVMSDLQQTNSEKILLSWVRQTTRPYSQVNVLNFTTSWTDGLAFNAVLHRHKPDLFSWDKVVKMSPIERLEHAFSKAQTYLGIEKLLDPEDVAVQLPDKKSIIMYLTSLFEVLPQQVTIDAIREVETLPRKYKKECEEEAINIQSTAPEEEHESPRAETPSTVTEVDMDLDSYQIALEEVLTWLLSAEDTFQEQDDISDDVEEVKDQFATHEAFMMELTAHQSSVGSVLQAGNQLITQGTLSDEEEFEIQEQMTLLNARWEALRVESMDRQSRLHDVLMELQKKQLQQLSAWLTLTEERIQKMETCPLDDDVKSLQKLLEEHKSLQSDLEAEQVKVNSLTHMVVIVDENSGESATAILEDQLQKLGERWTAVCRWTEERWNRLQEINILWQELLEEQCLLKAWLTEKEEALNKVQTSNFKDQKELSVSVRRLAILKEDMEMKRQTLDQLSEIGQDVGQLLDNSKASKKINSDSEELTQRWDSLVQRLEDSSNQVTQAVAKLGMSQIPQKDLLETVRVREQAITKKSKQELPPPPPPKKRQIHVDIEAKKKFDAISAELLNWILKWKTAIQTTEIKEYMKMQDTSEMKKKLKALEKEQRERIPRADELNQTGQILVEQMGKEGLPTEEIKNVLEKVSSEWKNVSQHLEDLERKIQLQEDINAYFKQLDELEKVIKTKEEWVKHTSISESSRQSLPSLKDSCQRELTNLLGLHPKIEMARASCSALMSQPSAPDFVQRGFDSFLGRYQAVQEAVEDRQQHLENELKGQPGHAYLETLKTLKDVLNDSENKAQVSLNVLNDLAKVEKALQEKKTLDEILENQKPALHKLAEETKALEKNVHPDVEKLYKQEFDDVQGKWNKLKVLVSKDLHLLEEIALTLRAFEADSTVIEKWMDGVKDFLMKQQAAQGDDAGLQRQLDQCSAFVNEIETIESSLKNMKEIETNLRSGPVAGIKTWVQTRLGDYQTQLEKLSKEIATQKSRLSESQEKAANLKKDLAEMQEWMTQAEEEYLERDFEYKSPEELESAVEEMKRAKEDVLQKEVRVKILKDNIKLLAAKVPSGGQELTSELNVVLENYQLLCNRIRGKCHTLEEVWSCWIELLHYLDLETTWLNTLEERMKSTEVLPEKTDAVNEALESLESVLRHPADNRTQIRELGQTLIDGGILDDIISEKLEAFNSRYEDLSHLAESKQISLEKQLQVLRETDQMLQVLQESLGELDKQLTTYLTDRIDAFQVPQEAQKIQAEISAHELTLEELRRNMRSQPLTSPESRTARGGSQMDVLQRKLREVSTKFQLFQKPANFEQRMLDCKRVLDGVKAELHVLDVKDVDPDVIQTHLDKCMKLYKTLSEVKLEVETVIKTGRHIVQKQQTDNPKGMDEQLTSLKVLYNDLGAQVTEGKQDLERASQLARKMKKEAASLSEWLSATETELVQKSTSEGLLGDLDTEISWAKNVLKDLEKRKADLNTITESSAALQNLIEGSEPILEERLCVLNAGWSRVRTWTEDWCNTLMNHQNQLEIFDGNVAHISTWLYQAEALLDEIEKKPTSKQEEIVKRLVSELDDANLQVENVRDQALILMNARGSSSRELVEPKLAELNRNFEKVSQHIKSAKLLIAQEPLYQCLVTTETFETGVPFSDLEKLENDIENMLKFVEKHLESSDEDEKMDEESAQIEEVLQRGEEMLHQPMEDNKKEKIRLQLLLLHTRYNKIKAIPIQQRKMGQLASGIRSSLLPTDYLVEINKILLCMDDVELSLNVPELNTAIYEDFSFQEDSLKNIKDQLDKLGEQIAVIHEKQPDVILEASGPEAIQIRDTLTQLNAKWDRINRMYSDRKGCFDRAMEEWRQFHCDLNDLTQWITEAEELLVDTCAPGGSLDLEKARIHQQELEVGISSHQPSFAALNRTGDGIVQKLSQADGSFLKEKLAGLNQRWDAIVAEVKDRQPRLKGESKQVMKYRHQLDEIICWLTKAEHAMQKRSTTELGENLQELRDLTQEMEVHAEKLKWLNRTELEMLSDKSLSLPERDKISESLRTVNMTWNKICREVPTTLKECIQEPSSVSQTRIAAHPNVQKVVLVSSASDIPVQSHRTSEISIPADLDKTITELADWLVLIDQMLKSNIVTVGDVEEINKTVSRMKITKADLEQRHPQLDYVFTWAQKLKNKASSSDMRTAITEKLERVKNQWDGTQHGVELRQQQLEDMIIDSLQWDDHREETEELMRKYEARLYILQQARRDPLTKQISVPNTASRTGSWRWYRMAFDNVLQKLLEEYGSDDTRNVKETTEYLKTSWINLKQSIADRQNALEAEWRTVQASRRDLENFLKWIQEAETTVNVLVDASHRENALQDSILARELKQQMQDIQAEIDAHNDIFKSIDGNRQKMVKALGNSEEATMLQHRLDDMNQRWNDLKAKSASIRAHLEASAEKWNRLLMSLEELIKWLNMKDEELKKQMPIGGDVPALQLQYDHCKALRRELKEKEYSVLNAVDQARVFLADQPIEAPEEPRRNLQSKTELTPEERAQKIAKAMRKQSSEVKEKWESLNAVTSNWQKQVDKALEKLRDLQGAMDDLDADMKEAESVRNGWKPVGDLLIDSLQDHIEKIMAFREEIAPINFKVKTVNDLSSQLSPLDLHPSLKMSRQLDDLNMRWKLLQVSVDDRLKQLQEAHRDFGPSSQHFLSTSVQLPWQRSISHNKVPYYIK

SEQ ID NO: 831891 - protein, 2176 aa, Homo sapiens
MSGLAATTFHWKKCRLDLPGHVALQACKRLPDEHNDVQKKTFTKWINARFSKSGKPPINDMFTDLKDGRKLLDLLEGLTGTSLPKERGSTRVHALNNVNRVLQVLHQNNVELVNIGGTDIVDGNHKLTLGLLWSIILHWQVKDVMKDVMSDLQQTNSEKILLSWVRQTTRPYSQVNVLNFTTSWTDGLAFNAVLHRHKPDLFSWDKVVKMSPIERLEHAFSKAQTYLGIEKLLDPEDVAVQLPDKKSIIMYLTSLFEVLPQQVTIDAIREVETLPRKYKKECEEEAINIQSTAPEEEHESPRAETPSTVTEVDMDLDSYQIALEEVLTWLLSAEDTFQEQDDISDDVEEVKDQFATHEAFMMELTAHQSSVGSVLQAGNQLITQGTLSDEEEFEIQEQMTLLNARWEALRVESMDRQSRLHDVLMELQKKQLQQLSAWLTLTEERIQKMETCPLDDDVKSLQKLLEEHKSLQSDLEAEQVKVNSLTHMVVIVDENSGESATAILEDQLQKLGERWTAVCRWTEERWNRLQEINILWQELLEEQCLLKAWLTEKEEALNKVQTSNFKDQKELSVSVRRLAILKEDMEMKRQTLDQLSEIGQDVGQLLDNSKASKKINSDSEELTQRWDSLVQRLEDSSNQVTQAVAKLGMSQIPQKDLLETVRVREQAITKKSKQELPPPPPPKKRQIHVDIEAKKKFDAISAELLNWILKWKTAIQTTEIKEYMKMQDTSEMKKKLKALEKEQRERIPRADELNQTGQILVEQMGKEGLPTEEIKNVLEKVSSEWKNVSQHLEDLERKIQLQEDINAYFKQLDELEKVIKTKEEWVKHTSISESSRQSLPSLKDSCQRELTNLLGLHPKIEMARASCSALMSQPSAPDFVQRGFDSFLGRYQAVQEAVEDRQQHLENELKGQPGHAYLETLKTLKDVLNDSENKAQVSLNVLNDLAKVEKALQEKKTLDEILENQKPALHKLAEETKALEKNVHPDVEKLYKQEFDDVQGKWNKLKVLVSKDLHLLEEIALTLRAFEADSTVIEKWMDGVKDFLMKQQAAQGDDAGLQRQLDQCSAFVNEIETIESSLKNMKEIETNLRSGPVAGIKTWVQTRLGDYQTQLEKLSKEIATQKSRLSESQEKAANLKKDLAEMQEWMTQAEEEYLERDFEYKSPEELESAVEEMKRAKEDVLQKEVRVKILKDNIKLLAAKVPSGGQELTSELNVVLENYQLLCNRIRGKCHTLEEVWSCWIELLHYLDLETTWLNTLEERMKSTEVLPEKTDAVNEALESLESVLRHPADNRTQIRELGQTLIDGGILDDIISEKLEAFNSRYEDLSHLAESKQISLEKQLQVLRETDQMLQVLQESLGELDKQLTTYLTDRIDAFQVPQEAQKIQAEISAHELTLEELRRNMRSQPLTSPESRTARGGSQMDVLQRKLREVSTKFQLFQKPANFEQRMLDCKRVLDGVKAELHVLDVKDVDPDVIQTHLDKCMKLYKTLSEVKLEVETVIKTGRHIVQKQQTDNPKGMDEQLTSLKVLYNDLGAQVTEGKQDLERASQLARKMKKEAASLSEWLSATETELVQKSTSEGLLGDLDTEISWAKNVLKDLEKRKADLNTITESSAALQNLIEGSEPILEERLCVLNAGWSRVRTWTEDWCNTLMNHQNQLEIFDGNVAHISTWLYQAEALLDEIEKKPTSKQEEIVKRLVSELDDANLQVENVRDQALILMNARGSSSRELVEPKLAELNRNFEKVSQHIKSAKLLIAQEPLYQCLVTTETFETGVPFSDLEKLENDIENMLKFVEKHLESSDEDEKMDEESAQIEEVLQRGEEMLHQPMEDNKKEKIRLQLLLLHTRYNKIKAIPIQQRKMGQLASGIRSSLLPTDYLVEINKILLCMDDVELSLNVPELNTAIYEDFSFQEDSLKNIKDQLDKLGEQIAVIHEKQPDVILEASGPEAIQIRDTLTQLNAKWDRINRMYSDRKGCFDRAMEEWRQFHCDLNDLTQWITEAEELLVDTCAPGGSLDLEKARIHQQELEVGISSHQPSFAALNRTGDGIVQKLSQADGSFLKEKLAGLNQRWDAIVAEVKDRQPRLKGESKQVMKYRHQLDEIICWLTKAEHAMQKRSTTELGENLQELRDLTQEMEVHAEKLKWLNRTELESAQIEEVLQRGEEMYINHEIGPSSIR

SEQ ID NO: 831892 - protein, 138 aa, Homo sapiens
MENMKPVLTMGRTNSVISLSPDLPSPTTGERDNGPLLLIPHSDQIPQLQSPAIGLHHQLNLIDKRFHHVAQAGLKLLGSSNPSTSASRSVGITGVSHHARLTLPTLALRKLKQTKEESRNFNTTSILNQNPPLALPYA

SEQ ID NO: 831893 - protein, 144 aa, Homo sapiens
MDIIETAKLEEHLENQPSDPTNTYARPAEPVEEENKNGNGKPKSLSSGLRKGTKKYPDYIQIAMPTESRNKFPLEWWKTGIAFIYAVFNLVLTTVMITVVHERVPPKELSPPLPDKFFDYIDRVKWAFSVSEINGIILVGLWIT

SEQ ID NO: 831894 - protein, 144 aa, Homo sapiens; identical to SEQ ID NO: 831893

SEQ ID NO: 831895 - protein, 144 aa, Homo sapiens; identical to SEQ ID NO: 831893

SEQ ID NO: 831896 - protein, 490 aa, Homo sapiens
MTSFSTSAQCSTSDSACRISPGQINQVRPKLPLLKILHAAGAQGEMFTVKEVMHYLGQYIMVKQLYDQQEQHMVYCGGDLLGELLGRQSFSVKDPSPLYDMLRKNLVTLATATTDAAQTLALAQDHSMDIPSQDQLKQSAEESSTSRKRTTEDDIPTLPTSEHKCIHSREDEDLIENLAQDETSRLDLGFEEWDVAGLPWWFLGNLRSNYTPRSNGSTDLQTNQDVGTAIVSDTTDDLWFLNESVSEQLGVGIKVEAADTEQTSEEVGKVSDKKVIEVGKNDDLEDSKSLSDDTDVEVTSEDEWQCTECKKFNSPSKRYCFRCWALRKDWYSDCSKLTHSLSTSDITAIPEKENEGNDVPDCRRTISAPVVRPKDAYIKKENSKLFDPCNSVEFLDLAHSSESQETISSMGEQLDNLSEQRTDTENMEDCQNLLKPCSLCEKRPRDGNIIHGRTGHLVTCFHCARRLKKAGASCPICKKEIQLVIKVFIA

SEQ ID NO: 831897 - protein, 490 aa, Homo sapiens; identical to SEQ ID NO: 831896

SEQ ID NO: 831898 - protein, 140 aa, Homo sapiens
MTSFSTSAQCSTSDSACRISPGQINQVRPKLPLLKILHAAGAQGEMFTVKEVMHYLGQYIMVKQLYDQQEQHMVYCGGDLLGELLGRQSFSVKDPSPLYDMLRKNLVTLATATTAKCRGKFHFQKKNYRRRYPHTAYLRA

SEQ ID NO: 831899 - protein, 490 aa, Homo sapiens; identical to SEQ ID NO: 831896

SEQ ID NO: 831900 - protein, 490 aa, Homo sapiens; identical to SEQ ID NO: 831896

SEQ ID NO: 831901 - protein, 131 aa, Homo sapiens
MTSFSTSAQCSTSDSACRISPGQINQVRPKLPLLKILHAAGAQGEMFTVKEVMHYLGQYIMVKQLYDQQEQHMVYCGGDLLGELLGRQSFSVKDPSPLYDMLRKNLVTLATATTEMGHLFCRISHALELAD

SEQ ID NO: 831902 - protein, 107 aa, Homo sapiens
MTSFSTSAQCSTSDSACRISPGQINQVRPKLPLLKILHAAGAQGEMFTVKEVMHYLGQYIMVKQLYDQQEQHMVYCGGDLLGELLGRQSFSVKDPSPLYDRFLHCIT

SEQ ID NO: 831903 - protein, 363 aa, Homo sapiens
MDIPSQDQLKQSAEESSTSRKRTTEDDIPTLPTSEHKCIHSREDEDLIENLAQDETSRLDLGFEEWDVAGLPWWFLGNLRSNYTPRSNGSTDLQTNQDVGTAIVSDTTDDLWFLNESVSEQLGVGIKVEAADTEQTSEEVGKVSDKKVIEVGKNDDLEDSKSLSDDTDVEVTSEDEWQCTECKKFNSPSKRYCFRCWALRKDWYSDCSKLTHSLSTSDITAIPEKENEGNDVPDCRRTISAPVVRPKDAYIKKENSKLFDPCNSVEFLDLAHSSESQETISSMGEQLDNLSEQRTDTENMEDCQNLLKPCSLCEKRPRDGNIIHGRTGHLVTCFHCARRLKKAGASCPICKKEIQLVIKVFIA

SEQ ID NO: 831904 - protein, 379 aa, Homo sapiens
MPNFVVDWRVYTDSLFLTVDFGLCAEQSAEESSTSRKRTTEDDIPTLPTSEHKCIHSREDEDLIENLAQDETSRLDLGFEEWDVAGLPWWFLGNLRSNYTPRSNGSTDLQTNQDVGTAIVSDTTDDLWFLNESVSEQLGVGIKVEAADTEQTSEEVGKVSDKKVIEVGKNDDLEDSKSLSDDTDVEVTSEDEWQCTECKKFNSPSKRYCFRCWALRKDWYSDCSKLTHSLSTSDITAIPEKENEGNDVPDCRRTISAPVVRPKDAYIKKENSKLFDPCNSVEFLDLAHSSESQETISSMGEQLDNLSEQRTDTENMEDCQNLLKPCSLCEKRPRDGNIIHGRTGHLVTCFHCARRLKKAGASCPICKKEIQLVIKVFIA

SEQ ID NO: 831905 - protein, 490 aa, Homo sapiens; identical to SEQ ID NO: 831896

SEQ ID NO: 831906 - protein, 299 aa, Homo sapiens
VSPTGCRPPRPSGGAGQTALHALQEEQARLKMRLWDLQQLRKELGDSPKDKVPFSVPKIPLVFRGHTQQDPEVPKSLVSNLRIHCPLLAGSALITFDDPKVAEQVLQQKEHTINMEECRLRVQVQPLELPMVTTIQVMVSSQLSGRRVLVTGFPASLRLSEEELLDKLEIFFGKTRNGGGDVDVRELLPGSVMLGFARDGVAQRLCQIGQFTVPLGGQQVPLRVSPYVNGEIQKAEIRSQPVPRSVLVLNIPDILDGPELHDVLEIHFQKPTRGGGEVEALTVVPQGQQGLAVFTSESG

SEQ ID NO: 831907 - protein, 288 aa, Homo sapiens
MSAPLDAALHALQEEQARLKMRLWDLQQLRKELGDSPKDKVPFSVPKIPLVFRGHTQQDPEVPKSLVSNLRIHCPLLAGSALITFDDPKVAEQVLQQKEHTINMEECRLRVQVQPLELPMVTTIQVMVSSQLSGRRVLVTGFPASLRLSEEELLDKLEIFFGKTRNGGGDVDVRELLPGSVMLGFARDGVAQRLCQIGQFTVPLGGQQVPLRVSPYVNGEIQKAEIRSQPVPRSVLVLNIPDILDGPELHDVLEIHFQKPTRGGGEVEALTVVPQGQQGLAVFTSESG

SEQ ID NO: 831908 - protein, 320 aa, Homo sapiens
LELSINSAFGASRIGPPSPGLVDSLEGRVEVLLFPSAPTALHALQEEQARLKMRLWDLQQLRKELGDSPKDKVPFSVPKIPLVFRGHTQQDPEVPKSLVSNLRIHCPLLAGSALITFDDPKVAEQVLQQKEHTINMEECRLRVQVQPLELPMVTTIQVMVSSQLSGRRVLVTGFPASLRLSEEELLDKLEIFFGKTRNGGGDVDVRELLPGSVMLGFARDGVAQRLCQIGQFTVPLGGQQVPLRVSPYVNGEIQKAEIRSQPVPRSVLVLNIPDILDGPELHDVLEIHFQKPTRGGGEVEALTVVPQGQQGLAVFTSESG

SEQ ID NO: 831909 - protein, 288 aa, Homo sapiens; identical to SEQ ID NO: 831907

SEQ ID NO: 831910 - protein, 288 aa, Homo sapiens; identical to SEQ ID NO: 831907

SEQ ID NO: 831911 - protein, 288 aa, Homo sapiens; identical to SEQ ID NO: 831907

SEQ ID NO: 831912 - protein, 265 aa, Homo sapiens
FLLGGSEEHSYPLPYFQVPFSVPKIPLVFRGHTQQDPEVPKSLVSNLRIHCPLLAGSALITFDDPKVAEQVLQQKEHTINMEECRLRVQVQPLELPMVTTIQVMVSSQLSGRRVLVTGFPASLRLSEEELLDKLEIFFGKTRNGGGDVDVRELLPGSVMLGFARDGVAQRLCQIGQFTVPLGGQQVPLRVSPYVNGEIQKAEIRSQPVPRSVLVLNIPDILDGPELHDVLEIHFQKPTRGGGEVEALTVVPQGQQGLAVFTSESG

SEQ ID NO: 831913 - protein, 665 aa, Homo sapiens
MEVSGPEDDPFLSQLHQVQCPVCQQMMPAAHINSHLDRCLLLHPAGHAEPAAGSHRAGERAKGPSPPGAKRRRLSESSALKQPATPTAAESSEGEGEEGDDGGETESRESYDAPPTPSGARLIPDFPVARSSSPGRKGSGKRPAAAAAAGSASPRSWDEAEAQEEEEAVGDGDGDGDADADGEDDPGHWDADAAEAATAFGASGGGRPHPRALAAEEIRQMLQGKPLADTMRPDTLQDYFGQSKAVGQDTLLRSLLETNEIPSLILWGPPGCGKTTLAHIIASNSKKHSIRFVTLSATNAKTNDVRDVIKQAQNEKSFFKRKTILFIDEIHRFNKSQQDTFLPHVECGTITLIGATTENPSFQVNAALLSRCRVIVLEKLPVEAMVTILMRAINSLGIHVLDSSRPTDPLSHSSNSSSEPAMFIEDKAVDTLAYLSDGDARAGLNGLQLAVLARLSSRKMFCKKSGQSYSPSRVLITENDVKEGLQRSHILYDRAGEEHYNCISALHKSMRGSDQNASLYWLARMLEGGEDPLYVARRLVRFASEDIGLADPSALTQAVAAYQGCHFIGMPECEVLLAQCVVYFARAPKSIEVYSAYNNVKACLRNHQGPLPPVPLHLRNAPTRLMKDLGYGKGYKYNPMYSEPVDQEYLPEELRGVDFFKQRRC

SEQ ID NO: 831914 - protein, 640 aa, Homo sapiens
MEVSGPEDDPFLSQLHQVQCPVCQQMMPAAHINSHLDRCLLLHPAGHAEPAAGSHRAGERAKGPSPPGAKRRRLSESSALKQPATPTAAESSEGEGEEGDDGGETESRESYDAPPTPSGARLIPDFPVARSSSPGRKGSGKRPAAAAAAGSASPRSWDEAEAQEEEEAVGDGDGDGDADADGEDDPGHWDADAAEAATAFGASGGGRPHPRALAAEEIRQMLQGKPLADTMRPDTLQDYFGQSKAVGQDTLLRSLLETNEIPSLILWGPPGCGKTTLAHIIASNSKKHSIRFVTLSATNAKTNDVRDVIKQAQNEKSFFKRKTILFIDEIHRFNKSQQVNAALLSRCRVIVLEKLPVEAMVTILMRAINSLGIHVLDSSRPTDPLSHSSNSSSEPAMFIEDKAVDTLAYLSDGDARAGLNGLQLAVLARLSSRKMFCKKSGQSYSPSRVLITENDVKEGLQRSHILYDRAGEEHYNCISALHKSMRGSDQNASLYWLARMLEGGEDPLYVARRLVRFASEDIGLADPSALTQAVAAYQGCHFIGMPECEVLLAQCVVYFARAPKSIEVYSAYNNVKACLRNHQGPLPPVPLHLRNAPTRLMKDLGYGKGYKYNPMYSEPVDQEYLPEELRGVDFFKQRRC

SEQ ID NO: 831915 - protein, 576 aa, Homo sapiens
MEVSGPEDDPFLSQLHQVQCPVCQQMMPAAHINSHLDRCLLLHPAGHAEPAAGSHRAGERAKGPSPPGAKRRRLSESSALKQPATPTAAESSEGEGEEGDDGGETESRESYDAPPTPSGARLIPDFPVARSSSPGRKGSGKRPAAAAAAGSASPRSWDEAEAQEEEEAVGDGDGDGDADADGEDDPGHWDADAAEAATAFGASGGGRPHPRALAAEEIRQMLQGKPLADTMRPDTLQDYFGQSKAVGQDTLLRSLLETNEIPSLILWGPPGCGKTTLAHIIASNSKKHSIRFVTLSATNAKTNDVRDVIKQAQNEKSFFKRKTILFIDEIHRFNKSQQDTFLPHVECGTITLIGATTENPSFQVNAALLSRCRVIVLEKLPVEAMVTILMRAINSLGIHVLDSSRPTDPLSHSSNSSSEPAMFIEDKAVDTLAYLSDGDARAGLNGLQLAVLARLSSRKMFCKKSGQSYSPSRVLITENDVKEGLQRSHILYDRAGEEHYNCISALHKSMRGSDQNASLYWLARMLEGGEDPLYVARRLVRFASEDIGLADPSALTQAVAAYQGCHFIGMPECEVK

SEQ ID NO: 831916 - protein, 206 aa, Homo sapiens
MFCKKSGQSYSPSRVLITENDVKEGLQRSHILYDRAGEEHYNCISALHKSMRGSDQNASLYWLARMLEGGEDPLYVARRLVRFASEDIGLADPSALTQAVAAYQGCHFIGMPECEVLLAQCVVYFARAPKSIEVYSAYNNVKACLRNHQGPLPPVPLHLRNAPTRLMKDLGYGKGYKYNPMYSEPVDQEYLPEELRGVDFFKQRRC

SEQ ID NO: 831917 - protein, 665 aa, Homo sapiens; identical to SEQ ID NO: 831913

SEQ ID NO: 831918 - protein, 497 aa, Homo sapiens
MEVSGPEDDPFLSQLHQVQCPVCQQMMPAAHINSHLDRCLLLHPAGHAEPAAGSHRAGERAKGPSPPGAKRRRLSESSALKQPATPTAAESSEGEGEEGDDGGETESRESYDAPPTPSGARLIPDFPVARSSSPGRKGSGKRPAAAAAAGSASPRSWDEAEAQEEEEAVGDGDGDGDADADGEDDPGHWDADAAEAATAFGASGGGRPHPRALAAEEIRQMLQGKPLADTMRPDTLQDYFGQSKAVGQDTLLRSLLETNEIPSLILWGPPGCGKTTLAHIIASNSKKHSIRFVTLSATNAKTNDVRDVIKQAQNEKSFFKRKTILFIDEIHRFNKSQQDTFLPHVECGTITLIGATTENPSFQVNAALLSRCRVIVLEKLPVEAMVTILMRAINSLGIHVLDSSRPTDPLSHSSNSSSEPAMFIEDKAVDTLAYLSDGDARAGLNGLQLAVLARLSSRKMFCKKSGQSYSPSRVLITENDVKEGLQRSHILYDRAGK

SEQ ID NO: 831919 - protein, 348 aa, Homo sapiens
MATGTRTRTARTTRGTGTRTLPKPPPPSGPVAGAARTPGRWLPRRSDRCYRASRWPTRCVLTRCRITSGRARPWARIPCCARSWRPTKSPRLSCGGRRAAARPAMFIEDKAVDTLAYLSDGDARAGLNGLQLAVLARLSSRKMFCKKSGQSYSPSRVLITENDVKEGLQRSHILYDRAGEEHYNCISALHKSMRGSDQNASLYWLARMLEGGEDPLYVARRLVRFASEDIGLADPSALTQAVAAYQGCHFIGMPECEVLLAQCVVYFARAPKSIEVYSAYNNVKACLRNHQGPLPPVPLHLRNAPTRLMKDLGYGKGYKYNPMYSEPVDQEYLPEELRGVDFFKQRRC

SEQ ID NO: 831920 - protein, 135 aa, Homo sapiens
GSASPRSWDEAEAQEEEEAVGDGDGDGDADADGEDDPGHWDADAAEAATAFGASGGGRPHPRALAAEEIRQMLQGKPLADTMRPDTLQDYFGQSKAVGQDTLLRSLLETNEIPSLILWGPPGCGKVSAALAVGLP

SEQ ID NO: 831921 - protein, 240 aa, Homo sapiens
MLRSCAARLRTLGALCRPPVGRRLPGSEPRPELRSFSSEEVILKDCSVPNPSWNKDLRLLFDQFMKKCEDGSWKRLPSYKRTPTEWIQDFKTHFLDPKLMKEEQMSQAQLFTRSFDDGLGFEYVMFYNDIEKRMVCLFQGGPYLEGPPGFIHGGAIATMIDATVGMCAMMAGGIVMTANLNINYKRPIPLCSVVMINSQLDKVEGRKFFVSCNVQSVDEKTLYSEATSLFIKLNPAKSLT

SEQ ID NO: 831922 - protein, 240 aa, Homo sapiens; identical to SEQ ID NO: 831921

SEQ ID NO: 831923 - protein, 208 aa, Homo sapiens
MRSFSSEEVILKDCSVPNPSWNKDLRLLFDQFMKKCEDGSWKRLPSYKRTPTEWIQDFKTHFLDPKLMKEEQMSQAQLFTRSFDDGLGFEYVMFYNDIEKRMVCLFQGGPYLEGPPGFIHGGAIATMIDATVGMCAMMAGGIVMTANLNINYKRPIPLCSVVMINSQLDKVEGRKFFVSCNVQSVDEKTLYSEATSLFIKLNPAKSLT

SEQ ID NO: 831924 - protein, 240 aa, Homo sapiens; identical to SEQ ID NO: 831921

SEQ ID NO: 831925 - protein, 240 aa, Homo sapiens; identical to SEQ ID NO: 831921

SEQ ID NO: 831926 - protein, 154 aa, Homo sapiens
MKEEQMSQAQLFTRSFDDGLGFEYVMFYNDIEKRMVCLFQGGPYLEGPPGFIHGGAIATMIDATVGMCAMMAGGIVMTANLNINYKRPIPLCSVVMINSQLDKVEGRKFFVSCNVQSVDEKTLYSEATSGISRSTAAASWLARHPGKKKKGKKI

SEQ ID NO: 831927 - protein, 141 aa, Homo sapiens
MKEEQMSQAQLFTRSFDDGLGFEYVMFYNDIEKRMVCLFQGGPYLEGPPGFIHGGAIATMIDATVGMCAMMAGGIVMTANLNINYKRPIPLCSVVMINSQLDKVEGRKFFVSCNVQSVDEKTLYSEATSLFIKLNPAKSLT

SEQ ID NO: 831928 - protein, 141 aa, Homo sapiens; identical to SEQ ID NO: 831927

SEQ ID NO: 831929 - protein, 141 aa, Homo sapiens; identical to SEQ ID NO: 831927

SEQ ID NO: 831930 - protein, 110 aa, Homo sapiens [sequence omitted]

SEQ ID NO: 831931 - protein, 704 aa, Homo sapiens
LRRALRHRTTAAPPMKRLPLLVVFSTWLNCSYTQNCTKTPCLPNAKCEIRNGIEACYCNMGFSGNGVTICEDDNECGNLTQSCGENANCTNTEGSYYCMCVPGFRSSSNQDRFITNDGTVCIENVNANCHLDNVCIAANINKTLTKIRSIKEPVALLQEVYRNSVTDLSPTDIITYIEILAESSSLLGYKNNTISAKDTLSNSTLTEFVKTVNNFVQRDTFVVWDKLSVNHRRTHLTKLMHTVEQATLRISQSFQKTTEFDTNSTDIALKVFFFDSYNMKHIHPHMNMDGDYINIFPKRKAAYDSNGNVAVAFLYYKSIGPLLSSSDNFLLKPQNYDNSEEEERVISSVISVSMSSNPPTLYELEKITFTLSHRKVTDRYRSLCAFWNYSPDTMNGSWSSEGCELTYSNETHTSCRCNHLTHFAILMSSGPSIGIKDYNILTRITQLGIIISLICLAICIFTFWFFSEIQSTRTTIHKNLCCSLFLAELVFLVGINTNTNKLFCSIIAGLLHYFFLAAFAWMCIEGIHLYLIVVGVIYNKGFLHKNFYIFGYLSPAVVVGFSAALGYRYYGTTKVCWLSTENNFIWSFIGPACLIILVNLLAFGVIIYKVFRHTAGLKPEVSCFENIRSCARGALALLFLLGTTWIFGVLHVVHASVVTAYLFTVSNAFQGMFIFLFLCVLSRKIQEEYYRLFKNVPCCFGCLR

SEQ ID NO: 831932 - protein, 705 aa, Homo sapiens
LRRALRHRTTAAPPMKRLPLLVVFSTWLNCSYTQNCTKTPCLPNAKCEIRNGIEACYCNMGFSGNGVTICEDDNECGNLTQSCGENANCTNTEGSYYCMCVPGFRSSSNQDRFITNDGTVCIENVNANCHLDNVCIAANINKTLTKIRSIKEPVALLQEVYRNSVTDLSPTDIITYIEILAESSSLLGYKNNTISAKDTLSNSTLTEFVKTVNNFVQRDTFVVWDKLSVNHRRTHLTKLMHTVEQATLRISQSFQKTTEFDTNSTDIALKVFFFDSYNMKHIHPHMNMDGDYINIFPKRKAAYDSNGNVAVAFLYYKSIGPLLSSSDNFLLKPQNYDNSEEEERVISSVISVSMSSNPPTLYELEKITFTLSHRKVTDRYRSLCAFWNYSPDTMNGSWSSEGCELTYSNETHTSCRCNHLTHFAILMSSGPSIGIKDYNILTRITQLGIIISLICLAICIFTFWFFSEIQSTRTTIHKNLCCSLFLAELVFLVGINTNTNKLFCSIIAGLLHYFFLAAFAWMCIEGIHLYLIVVGVIYNKGFLHKNFYIFGYLSPAVVVGFSAALGYRYYGTTKVCWLSTENNFIWSFIGPACLIILVNLLAFGVIIYKVFRHTAGLKPEVSCFENIRSCARGALALLFLLGTTWIFGVLHVVHASVVTAYLFTVSNAFQGMFIFLFLCVLSRKIQEEYYRLFKNVPCCFGCLSC

SEQ ID NO: 831933 - protein, 260 aa, Homo sapiens
IGPRRSPPSARPRPRGKEPGRTLGRSDAARGGGRGLVCGPLSAPRGSRRPTVPGTPACLARPAAQGFSAALPVRWTGRRAGPSRPVPIGTPSRAADPSQGEMSADAAAGAPLPRLCCLEKGPNGYGFHLHGEKGKLGQYIRLVEPGSPAEKAGLLAGDRLVEVNGENVEKETHQQVVSRIRAALNAVRLLVVDPETDEQLQKLGVQVREELLRAQEAPGQAEPPAAAEVQGAGNEKLNLRQRPNKKPPRKQPPSFPGPPA

SEQ ID NO: 831934 - protein, 459 aa, Homo sapiens
IGPRRSPPSARPRPRGKEPGRTLGRSDAARGGGRGLVCGPLSAPRGSRRPTVPGTPACLARPAAQGFSAALPVRWTGRRAGPSRPVPIGTPSRAADPSQGEMSADAAAGAPLPRLCCLEKGPNGYGFHLHGEKGKLGQYIRLVEPGSPAEKAGLLAGDRLVEVNGENVEKETHQQVVSRIRAALNAVRLLVVDPETDEQLQKLGVQVREELLRAQEAPGQAEPPAAAEVQGAGNENEPREADKSHPEQRELRPRLCTMKKGPSGYGFNLHSDKSKPGQFIRSVDPDSPAEASGLRAQDRIVEVNGVCMEGKQHGDVVSAIRAGGDETKLLVVDRETDEFFKKCRVIPSQEHLNGPLPVPFTNGEIQKENSREALAEAALESPRPALVRSASSDTSEELNSQDSPPKQDSTAPSSTSSSDPILDFNISLAMAKERAHQKRSSKRAPQMDWSKKNELFSNL

SEQ ID NO: 831935 - protein, 446 aa, Homo sapiens
TPPARASKNIARSRPGVNSGRGLVCGPLSAPRGSRRPTVPGTPACLARPAAQGFSAALPVRWTGRRAGPSRPVPIGTPSRAADPSQGEMSADAAAGAPLPRLCCLEKGPNGYGFHLHGEKGKLGQYIRLVEPGSPAEKAGLLAGDRLVEVNGENVEKETHQQVVSRIRAALNAVRLLVVDPETDEQLQKLGVQVREELLRAQEAPGQAEPPAAAEVQGAGNENEPREADKSHPEQRELRPRLCTMKKGPSGYGFNLHSDKSKPGQFIRSVDPDSPAEASGLRAQDRIVEVNGVCMEGKQHGDVVSAIRAGGDETKLLVVDRETDEFFKKCRVIPSQEHLNGPLPVPFTNGEIQKENSREALAEAALESPRPALVRSASSDTSEELNSQDSPPKQDSTAPSSTSSSDPILDFNISLAMAKERAHQKRSSKRAPQMDWSKKNELFSNL

SEQ ID NO: 831936 - protein, 360 aa, Homo sapiens
IGPRRSPPSARPRPRGKEPGRTLGRSDAARGGGRGLVCGPLSAPRGSRRPTVPGTPACLARPAAQGFSAALPVRWTGRRAGPSRPVPIGTPSRAADPSQGEMSADAAAGAPLPRLCCLEKGPNGYGFHLHGEKGKLGQYIRLVEPGSPAEKAGLLAGDRLVEVNGENVEKETHQQVVSRIRAALNAVRLLVVDPETDEQLQKLGVQVREELLRAQEAPGQAEPPAAAEVQGAGNENEPREADKSHPEQRELRPRLCTMKKGPSGYGFNLHSDKSKPGQFIRSVDPDSPAEASGLRAQDRIVEVNGVCMEGKQHGDVVSAIRAGGDETKLLVVDRETDEFFKKCRVIPSQEHLNALPSSPM

SEQ ID NO: 831937 - protein, 370 aa, Homo sapiens
IGPRRSPPSARPRPRGKEPGRTLGRSDAARGGGRGLVCGPLSAPRGSRRPTVPGTPACLARPAAQGFSAALPVRWTGRRAGPSRPVPIGTPSRAADPSQGEMSADAAAGAPLPRLCCLEKGPNGYGFHLHGEKGKLGQYIRLVEPGSPAEKAGLLAGDRLVEVNGENVEKETHQQVVSRIRAALNAVRLLVVDPETDEQLQKLGVQVREELLRAQEAPGQAEPPAAAEVQGAGNENEPREADKSHPEQRELRPRLCTMKKGPSGYGFNLHSDKSKPGQFIRSVDPDSPAEASGLRAQDRIVEVDGSAGWERWGRGAARAAGGPCAGAGAGVQSGGLGAEPLLRGSGAPMLTPGSRRNRSLQYGPGLALRP

SEQ ID NO: 831938 - protein, 85 aa, Homo sapiens
FGGLSWEFSSSLVSLEADLTRAGLGLSKAASAQDSTAPSSTSSSDPILDFNISLAMAKERAHQKRSSKRAPQMDWSKKNELFSNL

SEQ ID NO: 831939 - protein, 238 aa, Homo sapiens
MSADAAAGAPLPRLCCLEKGPNGYGFHLHGEKGKLGQYIRLVEPGSPAEKAGLLAGDRLVEVNGENVEKETHQQVVSRIRAALNAVRLLVVDPETDEQLQKLGVQVREELLRAQEAPGQAEPPAAAEVQGAGNENEPREADKSHPEQRELRPRLCTMKKGPSGYGFNLHSDKSKPGQFIRSVDPDSPAEASGLRAQDRIVEVYGGLLGGAPLRPVGPATGGGPAPARVWRGTRILPTS

SEQ ID NO: 831940 - protein, 248 aa, Homo sapiens
HTKVLRLPSPAARAHWGGPVPFWRNPRPEAPRRGDGPWKSLAGSGHWEVGYRLTLISQVHGNQVTQIIPFSTEGETKAQRSPSLPPRDLIRGRHSWNLDSTQLLGYCPLLPPPLHPAGPLPVPFTNGEIQKENSREALAEAALESPRPALVRSASSDTSEELNSQDSPPKQDSTAPSSTSSSDPILDFNISLAMAKERAHQKRSSKRAPQMDWSKKNENIQKTLRSQMTRPGDRQGETEYNPAITLTE

SEQ ID NO: 831941 - protein, 358 aa, Homo sapiens
MSADAAAGAPLPRLCCLEKGPNGYGFHLHGEKGKLGQYIRLVEPGSPAEKAGLLAGDRLVEVNGENVEKETHQQVVSRIRAALNAVRLLVVDPETDEQLQKLGVQVREELLRAQEAPGQAEPPAAAEVQGAGNENEPREADKSHPEQRELRPRLCTMKKGPSGYGFNLHSDKSKPGQFIRSVDPDSPAEASGLRAQDRIVEVNGVCMEGKQHGDVVSAIRAGGDETKLLVVDRETDEFFKKCRVIPSQEHLNGPLPVPFTNGEIQKENSREALAEAALESPRPALVRSASSDTSEELNSQDSPPKQDSTAPSSTSSSDPILDFNISLAMAKERAHQKRSSKRAPQMDWSKKNELFSNL

SEQ ID NO: 831942 - protein, 468 aa, Homo sapiens
IGPRRSPPSARPRPRGKEPGRTLGRSDAARGGGRGLVCGPLSAPRGSRRPTVPGTPACLARPAAQGFSAALPVRWTGRRAGPSRPVPIGTPSRAADPSQGEMSADAAAGAPLPRLCCLEKGPNGYGFHLHGEKGKLGQYIRLVEPGSPAEKAGLLAGDRLVEVNGENVEKETHQQVVSRIRAALNAVRLLVVDPETDEQLQKLGVQVREELLRAQEAPGQAEPPAAAEVQGAGNENEPREADKSHPEQRELRPRLCTMKKGPSGYGFNLHSDKSKPGQFIRSVDPDSPAEASGLRAQDRIVEVNGVCMEGKQHGDVVSAIRAGGDETKLLVVDRETDEFFKKCRVIPSQEHLNGPLPVPFTNGEIQKENSREALAEAALESPRPALVRSASSDTSEELNSQDSPPKQDSTAPSSTSSSDPILDFNISLAMAKERAHQKRSSKRAPQMDWSKGRASIPPHLFPSPQLLP

SEQ ID NO: 831943 - protein, 340 aa, Homo sapiens
IGPRRSPPSARPRPRGKEPGRTLGRSDAARGGGRGLVCGPLSAPRGSRRPTVPGTPACLARPAAQGFSAALPVRWTGRRAGPSRPVPIGTPSRAADPSQGEMSADAAAGAPLPRLCCLEKGPNGYGFHLHGEKGKLGQYIRLVEPGSPAEKAGLLAGDRLVEVNGENVEKETHQQVVSRIRAALNAVRLLVVDPETDEQLQKLGVQVREELLRAQEAPGQAEPPAAAEVQGAGNENEPREADKSHPEQENSREALAEAALESPRPALVRSASSDTSEELNSQDSPPKQDSTAPSSTSSSDPILDFNISLAMAKERAHQKRSSKRAPQMDWSKKNELFSNL

SEQ ID NO: 831944 - protein, 339 aa, Homo sapiens
IGPRRSPPSARPRPRGKEPGRTLGRSDAARGGGRGLVCGPLSAPRGSRRPTVPGTPACLARPAAQGFSAALPVRWTGRRAGPSRPVPIGTPSRAADPSQGEMSADAAAGAPLPRLCCLEKGPNGYGFHLHGEKGKLGQYIRLVEPGSPAEKAGLLAGDRLVEVNGENVEKETHQQVVSRIRAALNAVRLLVVDPETDEQLQKLGVQVREELLRAQEAPGQAEPPAAAEVQGAGNENEPREADKSHPEQRELRPRLCTMKKGPSGYGFNLHSDKSKPGQFIRSVDPDSPAEASGLRAQDRIVEVYGGLLGGAPLRPVGPATGGGPAPARVWRGTRILPTS

SEQ ID NO: 831945 - protein, 590 aa, Homo sapiens
GRDREHRPLRGRFGSSRDPTLSQPAQPAAAASAPRRQLSICTSLREPRERCAATMFSWLKRGGARGQQPEAIRTVTSALKELYRTKLLPLEEHYRFGAFHSPALEDADFDGKPMVLVAGQYSTGKTSFIQYLLEQEVPGSRVGPEPTTDCFVAVMHGDTEGTVPGNALVVDPDKPFRKLNPFGNTFLNRFMCAQLPNQVLESISIIDTPGILSGAKQRVSRGYDFPAVLRWFAERVDLIILLFDAHKLEISDEFSEAIGALRGHEDKIRVVLNKADMVETQQLMRVYGALMWALGKVVGTPEVLRVYIGSFWSQPLLVPDNRRLFELEEQDLFRDIQGLPRHAALRKLNDLVKRARLCDYLKKEMPSVFGKENKKKQLILKLPVIFAKIQLEHHISPGDFPDCQKMQELLMAHDFTKFHSLKPKLLEALDEMLTHDIAKLMPLLRQEELESTEVGVQGGAFEGTHMGPFVERGPDEAMEDGEEGSDDEAEWVVTKDKSKYDEIFYNLAPADGKLSGSKAKTWMVGTKLPNSVLGRIWKLSDVDRDGMLDDEEFALASHLIEAKLEGHGLPANLPRRLVPPSKRRHKGSAE

SEQ ID NO: 831946 - protein, 597 aa, Homo sapiens
GRDREHRPLRGRFGSSRDPTLSQPAQPAAAASAPRRQLSICTSLREPRERCAATMFSWLKRGGARGQQPEAIRTVTSALKELYRTKLLPLEEHYRFGAFHSPALEDADFDGKPMVLVAGQYSTGKTSFIQYLLEQEVPGSRVGPEPTTDCFVAVMHGDTEGTVPGNALVVDPDKPFRKLNPFGNTFLNRFMCAQLPNQVLESISIIDTPGILSGAKQRVSRGYDFPAVLRWFAERVDLIILLFDAHKLEISDEFSEAIGALRGHEDKIRVVLNKADMVETQQLMRVYGALMWALGKVVGTPEVLRVYIGSFWSQPLLVPDNRRLFELEEQDLFRDIQGLPRHAALRKLNDLVKRARLVRVHAYIISYLKKEMPSVFGKENKKKQLILKLPVIFAKIQLEHHISPGDFPDCQKMQELLMAHDFTKFHSLKPKLLEALDEMLTHDIAKLMPLLRQEELESTEVGVQGGAFEGTHMGPFVERGPDEAMEDGEEGSDDEAEWVVTKDKSKYDEIFYNLAPADGKLSGSKAKTWMVGTKLPNSVLGRIWKLSDVDRDGMLDDEEFALASHLIEAKLEGHGLPANLPRRLVPPSKRRHKGSAE

SEQ ID NO: 831947 - protein, 597 aa, Homo sapiens; identical to SEQ ID NO: 831946

SEQ ID NO: 831948 - protein, 269 aa, Homo sapiens
WNITCKKRLVGRIRDCDQLDDLNAVFAKIQLEHHISPGDFPDCQKMQELLMAHDFTKFHSLKPKLLEALDEMLTHDIAKLMPLLRQEELESTEVGVQGGAFEGTHMGPFVERGPDEAMEDGEEGSDDEAEWVVTKDKSKYDEIFYNLAPADGKLSGSKAKTWMVGTKLPNSVLGRIWKLSDVDRDACWMMRSSRWPATSSRPSWKATGCPPTCPVAWCHPPSDATRAPPRDPMEKMGKSKIHGDDAPSRMLAGIPTPTTVPHPMAGRGL

SEQ ID NO: 831949 - protein, 386 aa, Homo sapiens
GRDREHRPLRGRFGSSRDPTLSQPAQPAAAASAPRRQLSICTSLREPRERCAATMFSWLKRGGARGQQPEAIRTVTSALKELYRTKLLPLEEHYRFGAFHSPALEDADFDGKPMVLVAGQYSTGKTSFIQYLLEQEVPGSRVGPEPTTDCFVAVMHGDTEGTVPGNALVVDPDKPFRKLNPFGNTFLNRFMCAQLPNQVLESISIIDTPGILSGAKQRVSRGYDFPAVLRWFAERVDLIILLFDAHKLEISDEFSEAIGALRGHEDKIRVVLNKADMVETQQLMRVYGALMWALGKVVGTPEVLRVYIGSFWSQPLLVPDNRRLFELEEQDLFRDIQGLPRHAALRKLNDLVKRARLVRMESLSITQAGEQWHDLGSLQPLPPRLK

SEQ ID NO: 831950 - protein, 597 aa, Homo sapiens; identical to SEQ ID NO: 831946

SEQ ID NO: 831951 - protein, 513 aa, Homo sapiens
TCLRNPSPTWQLYLHSEPRPNAAQLLGKPMVLVAGQYSTGKTSFIQYLLEQEVPGSRVGPEPTTDCFVAVMHGDTEGTVPGNALVVDPDKPFRKLNPFGNTFLNRFMCAQLPNQVLESISIIDTPGILSGAKQRVSRGYDFPAVLRWFAERVDLIILLFDAHKLEISDEFSEAIGALRGHEDKIRVVLNKADMVETQQLMRVYGALMWALGKVVGTPEVLRVYIGSFWSQPLLVPDNRRLFELEEQDLFRDIQGLPRHAALRKLNDLVKRARLVRVHAYIISYLKKEMPSVFGKENKKKQLILKLPVIFAKIQLEHHISPGDFPDCQKMQELLMAHDFTKFHSLKPKLLEALDEMLTHDIAKLMPLLRQEELESTEVGVQGGAFEGTHMGPFVERGPDEAMEDGEEGSDDEAEWVVTKDKSKYDEIFYNLAPADGKLSGSKAKTWMVGTKLPNSVLGRIWKLSDVDRDGMLDDEEFALASHLIEAKLEGHGLPANLPRRLVPPSKRRHKGSAE

SEQ ID NO: 831952 - protein, 597 aa, Homo sapiens; identical to SEQ ID NO: 831946

SEQ ID NO: 831953 - protein, 636 aa, Homo sapiens
GRDREHRPLRGRFGSSRDPTLSQPAQPAAAASAPRRQLSICTSLREPRERCAATMFSWLKRGGARGQQPEAIRTVTSALKELYRTKLLPLEEHYRFGAFHSPALEDADFDGKPMVLVAGQYSTGKTSFIQYLLEQEVPGSRVGPEPTTDCFVAVMHGDTEGTVPGNALVVDPDKPFRKLNPFGNTFLNRFMCAQLPNQVLESISIIDTPGILSGAKQRVSRGYDFPAVLRWFAERVDLIILLFDAHKLEISDEFSEAIGALRGHEDKIRVVLNKADMVETQQLMRVYGALMWALGKVVGTPEVLRVYIGSFWSQPLLVPDNRRLFELEEQDLFRDIQGLPRHAALRKLNDLVKRARLVRVHAYIISYLKKEMPSVFGKENKKKQLILKLPVIFAKIQLEHHISPGDFPDCQKMQELLMAHDFTKFHSLKPKLLEALDEMLTHDIAKLMPLLRQEELESTEVGVQGGAFEGTHMGPFVERGPDEAMEDGEEGSDDEAEWVVTKDKSKYDEIFYNLAPADGKLSGSKAKTWMVGTKLPNSVLGRIWKLSDVDRDACWMMRSSRWPATSSRPSWKATGCPPTCPVAWCHPPSDATRAPPRDPMEKMGKSKIHGDDAPSRMLAGIPTPTTVPHPMAGRGL

SEQ ID NO: 831954 - protein, 1291 aa, Homo sapiens
MSTKFAIPCALILHCFFKRFPSSRMVPFHFPPSKCALWNPTPTGDFIYLHLSYYRNPKLVVTEKTIRLAYRHAKQNKKNSSCFLLGSLTADEDEEGVTLTVDRFDPGREVPECLEITPTASLPGDFLIPCKVHTQELCSREMIVHSVDDFSSALKALQCHICSKDSLDCGKLLSLRVHITSRESLDSVEFDLHWAAVTLANNFKCTPVKPIPIIPTALARNLSSNLNISQVQGTYKYGYLTMDETRKLLLLLESDPKVYSLPLVGIWLSGITHIYSPQVWACCLRYIFNSSVQERVFSESGNFIIVLYSMTHKEPEFYECFPCDGKIPDFRFQLLTSKETLHLFKNVEPPDKNPIRCELSAESQNAETEFFSKASKNFSIKRSSQKLSSGKMPIHDHDSGVEDEDFSPRPIPSPHPVSQKISKIQPSVPELSLVLDGNFIESNPLPTPLEMVNNENPPLINHLEHLKPLQPQLYDEKHSPEVEAGEPSLRGIPNQLNQDKPALLRHCKVRQPPAYKKGNPHTRNSIKPSSHNGPSHDIFEKLQTVSAGNVQNEEYPIRPSTLNSRQSSLAPQSQPHDFVFSPHNSGRPMELQIPTPPLPSYCSTNVCRCCQHHSHIQYSPLNSWQGANTVGSIQDVQSEALQKHSLFHPSGCPALYCNAFCSSSSPIALRPQGDMGSCSPHSNIEPSPVARPPSHMDLCNPQPCTVCMHTPKTESDNGMMGLSPDAYRFLTEQDRQLRLLQAQIQRLLEAQSLMPCSPKTTAVEDTVQAGRQMELVSVEAQSSPGLHMRKGVSIAVSTGASLFWNAAGEDQEPDSQMKQDDTKISSEDMNFSVDINNEVTSLPGSASSLKAVDIPSFEESNIAVEEEFNQPLSVSNSSLVVRKEPDVPVFFPSGQLAESVSMCLQTGPTGGASNNSETSEEPKIEHVMQPLLHQPSDNQKIYQDLLGQVNHLLNSSSKETEQPSTKAVIISHECTRTQNVYHTKKKTHHSRLVDKDCVLNATLKQLRSLGVKIDSPTKVKKNAHNVDHASVLACISPEAVISGLNCMSFANVGMSGLSPNGVDLSMEANAIALKYLNENQLSQLSVTRSNQNNCDPFSLLHINTDRSTVGLSLISPNNMSFATKKYMKRYGLLQSSDNSEDEEEPPDNADSKSEYLLNQNLRSIPEQLGGQKEPSKNDHEIINCSNCESVGTNADTPVLRNITNEVLQTKAKQQLTEKPAFLVKNLKPSPAVNLRTGKAEFTQHPEKENEGDITIFPESLQPSETLKQMNSMNSVGTFLDVKRLRQLPKLF

SEQ ID NO: 831955 - protein, 1097 aa, Homo sapiens
MSTKFAIPCALILHCFFKRFPSSRMVPFHFPPSKCALWNPTPTGDFIYLHLSYYRNPKLVVTEKTIRLAYRHAKQNKKNSSCFLLGSLTADEDEEGVTLTVDRFDPGREVPECLEITPTASLPGDFLIPCKVHTQELCSREMIVHSVDDFSSALKALQCHICSKDSLDCGKLLSLRVHITSRESLDSVEFDLHWAAVTLANNFKCTPVKPIPIIPTALARNLSSNLNISQVQGTYKYGYLTMDETRKLLLLLESDPKVYSLPLVGIWLSGITHIYSPQVWACCLRYIFNSSVQERVFSESGNFIIVLYSMTHKEPEFYECFPCDGKIPDFRFQLLTSKETLHLFKNVEPPDKNPIRCELSAESQNAETEFFSKASKNFSIKRSSQKLSSGKMPIHDHDSGVEDEDFSPRPIPSPHPVSQKISKIQPSVPELSLVLDGNFIESNPLPTPLEMVNNENPPLINHLEHLKPLQPQLYDEKHSPEVEAGEPSLRGIPNQLNQDKPALLRHCKPCTVCMHTPKTESDNGMMGLSPDAYRFLTEQDRQLRLLQAQIQRLLEAQSLMPCSPKTTAVEDTVQAGRQMELVSVEAQSSPGLHMRKGVSIAVSTGASLFWNAAGEDQEPDSQMKQDDTKISSEDMNFSVDINNEVTSLPGSASSLKAVDIPSFEESNIAVEEEFNQPLSVSNSSLVVRKEPDVPVFFPSGQLAESVSMCLQTGPTGGASNNSETSEEPKIEHVMQPLLHQPSDNQKIYQDLLGQVNHLLNSSSKETEQPSTKAVIISHECTRTQNVYHTKKKTHHSRLVDKDCVLNATLKQLRSLGVKIDSPTKVKKNAHNVDHASVLACISPEAVISGLNCMSFANVGMSGLSPNGVDLSMEANAIALKYLNENQLSQLSVTRSNQNNCDPFSLLHINTDRSTVGLSLISPNNMSFATKKYMKRYGLLQSSDNSEDEEEPPDNADSKSEYLLNQNLRSIPEQLGGQKEPSKNDHEIINCSNCESVGTNADTPVLRNITNEVLQTKAKQQLTEKPAFLVKNLKPSPAVNLRTGKAEFTQHPEKENEGDITIFPESLQPSETLKQMNSMNSVGTFLDVKRLRQLPKLF

SEQ ID NO: 831956 - protein, 1274 aa, Homo sapiens
MSTKFAIPCALILHCFFKRFPSSRMVPFHFPPSKCALWNPTPTGDFIYLHLSYYRNPKLVVTEKTIRLAYRHAKQNKKNSSCFLLGSLTADEDEEGVTLTVDRFDPGREVPECLEITPTASLPGDFLIPCKVHTQELCSREMIVHSVDDFSSALKALQCHICSKDSLDCGKLLSLRVHITSRESLDSVEFDLHWAAVTLANNFKCTPVKPIPIIPTALARNLSSNLNISQVQGTYKYGYLTMDETRKLLLLLESDPKVYSLPLVGIWLSGITHIYSPQVWACCLRYIFNSSVQERVFSESGNFIIVLYSMTHKEPEFYECFPCDGKIPDFRFQLLTSKETLHLFKNVEPPDKNPIRCELSAESQNAETEFFSKASKNFSIKRSSQKLSSGKMPIHDHDSGVEDEDFSPRPIPSPHPVSQKISKIQPSVPELSLVLDGNFIESNPLPTPLEMVNNENPPLINHLEHLKPLQPQLYDEKHSPEVEAGEPSLRGIPNQLNQDKPALLRHCKVRQPPAYKKGNPHTRNSIKPSSHNGPSHDIFEKLQTVSAGNVQNEEYPIRPSTLNSRQSSLAPQSQPHDFVFSPHNSGRPMELQIPTPPLPSYCSTNVCRCCQHHSHIQYSPLNSWQGANTVGSIQDVQSEALQKHSLFHPSGCPALYCNAFCSSSSPIALRPQGDMGSCSPHSNIEPSPVARPPSHMDLCNPQPCTVCMHTPKTESDNGMMGLSPDAYRFLTEQDRQLRLLQAQIQRLLEAQSLMPCSPKTTAVEDTVQAGRQMELVSVEAQSSPGLHMRKGVSIAVSTGASLFWNAAGEDQEPDSQMKQDDTKISSEDMNFSVDINNEVTSLPGSASSLKAVDIPSFEESNIAVEEEFNQPLSVSNGQLAESVSMCLQTGPTGGASNNSETSEEPKIEHVMQPLLHQPSDNQKIYQDLLGQVNHLLNSSSKETEQPSTKAVIISHECTRTQNVYHTKKKTHHSRLVDKDCVLNATLKQLRSLGVKIDSPTKVKKNAHNVDHASVLACISPEAVISGLNCMSFANVGMSGLSPNGVDLSMEANAIALKYLNENQLSQLSVTRSNQNNCDPFSLLHINTDRSTVGLSLISPNNMSFATKKYMKRYGLLQSSDNSEDEEEPPDNADSKSEYLLNQNLRSIPEQLGGQKEPSKNDHEIINCSNCESVGTNADTPVLRNITNEVLQTKAKQQLTEKPAFLVKNLKPSPAVNLRTGKAEFTQHPEKENEGDITIFPESLQPSETLKQMNSMNSVGTFLDVKRLRQLPKLF

SEQ ID NO: 831957 - protein, 810 aa, Homo sapiens
MSTKFAIPCALILHCFFKRFPSSRMVPFHFPPSKCALWNPTPTGDFIYLHLSYYRNPKLVVTEKTIRLAYRHAKQNKKNSSCFLLGSLTADEDEEGVTLTVDRFDPGREVPECLEITPTASLPGDFLIPCKVHTQELCSREMIVHSVDDFSSALKALQCHICSKDSLDCGKLLSLRVHITSRESLDSVEFDLHWAAVTLANNFKCTPVKPIPIIPTALARNLSSNLNISQVQGTYKYGYLTMDETRKLLLLLESDPKVYSLPLVGIWLSGITHIYSPQVWACCLRYIFNSSVQERVFSESGNFIIVLYSMTHKEPEFYECFPCDGKIPDFRFQLLTSKETLHLFKNVEPPDKNPIRCELSAESQNAETEFFSKASKNFSIKRSSQKLSSGKMPIHDHDSGVEDEDFSPRPIPSPHPVSQKISKIQPSVPELSLVLDGNFIESNPLPTPLEMVNNENPPLINHLEHLKPLQPQLYDEKHSPEVEAGEPSLRGIPNQLNQDKPALLRHCKVRQPPAYKKGNPHTRNSIKPSSHNGPSHDIFEKLQTVSAGNVQNEEYPIRPSTLNSRQSSLAPQSQPHDFVFSPHNSGRPMELQIPTPPLPSYCSTNVCRCCQHHSHIQYSPLNSWQGANTVGSIQDVQSEALQKHSLFHPSGCPALYCNAFCSSSSPIALRPQGDMGSCSPHSNIEPSPVARPPSHMDLCNPQPCTVCMHTPKTESDNGMMGLSPDAYRFLTEQDRQLRLLQAQIQRLLEAQSLMPCSPKTTAVEDTVQAGRQMELVSVEAQSSPGLHMRKGVSIAVSTGVSHCAQLYCIF

SEQ ID NO: 831958 - protein, 1287 aa, Homo sapiens
MEPIYPFARPQMNTRFPSSRMVPFHFPPSKCALWNPTPTGDFIYLHLSYYRNPKLVVTEKTIRLAYRHAKQNKKNSSCFLLGSLTADEDEEGVTLTVDRFDPGREVPECLEITPTASLPGDFLIPCKVHTQELCSREMIVHSVDDFSSALKALQCHICSKDSLDCGKLLSLRVHITSRESLDSVEFDLHWAAVTLANNFKCTPVKPIPIIPTALARNLSSNLNISQVQGTYKYGYLTMDETRKLLLLLESDPKVYSLPLVGIWLSGITHIYSPQVWACCLRYIFNSSVQERVFSESGNFIIVLYSMTHKEPEFYECFPCDGKIPDFRFQLLTSKETLHLFKNVEPPDKNPIRCELSAESQNAETEFFSKASKNFSIKRSSQKLSSGKMPIHDHDSGVEDEDFSPRPIPSPHPVSQKISKIQPSVPELSLVLDGNFIESNPLPTPLEMVNNENPPLINHLEHLKPLQPQLYDEKHSPEVEAGEPSLRGIPNQLNQDKPALLRHCKVRQPPAYKKGNPHTRNSIKPSSHNGPSHDIFEKLQTVSAGNVQNEEYPIRPSTLNSRQSSLAPQSQPHDFVFSPHNSGRPMELQIPTPPLPSYCSTNVCRCCQHHSHIQYSPLNSWQGANTVGSIQDVQSEALQKHSLFHPSGCPALYCNAFCSSSSPIALRPQGDMGSCSPHSNIEPSPVARPPSHMDLCNPQPCTVCMHTPKTESDNGMMGLSPDAYRFLTEQDRQLRLLQAQIQRLLEAQSLMPCSPKTTAVEDTVQAGRQMELVSVEAQSSPGLHMRKGVSIAVSTGASLFWNAAGEDQEPDSQMKQDDTKISSEDMNFSVDINNEVTSLPGSASSLKAVDIPSFEESNIAVEEEFNQPLSVSNSSLVVRKEPDVPVFFPSGQLAESVSMCLQTGPTGGASNNSETSEEPKIEHVMQPLLHQPSDNQKIYQDLLGQVNHLLNSSSKETEQPSTKAVIISHECTRTQNVYHTKKKTHHSRLVDKDCVLNATLKQLRSLGVKIDSPTKVKKNAHNVDHASVLACISPEAVISGLNCMSFANVGMSGLSPNGVDLSMEANAIALKYLNENQLSQLSVTRSNQNNCDPFSLLHINTDRSTVGLSLISPNNMSFATKKYMKRYGLLQSSDNSEDEEEPPDNADSKSEYLLNQNLRSIPEQLGGQKEPSKNDHEIINCSNCESVGTNADTPVLRNITNEVLQTKAKQQLTEKPAFLVKNLKPSPAVNLRTGKAEFTQHPEKENEGDITIFPESLQPSETLKQMNSMNSVGTFLDVKRLRQLPKLF

SEQ ID NO: 831959 - protein, 238 aa, Homo sapiens
MSTKFAIPCALILHCFFKRFPSSRMVPFHFPPSKCALWNPTPTGDFIYLHLSYYRNPKLVVTEKTIRLAYRHAKQNKKNSSCFLLGSLTADEDEEGVTLTVDRFDPGREVPECLEITPTASLPGDFLIPCKVHTQELCSREMIVHSVDDFSSALKALQCHICSKDSLDCGKLLSLRVHITSRESLDSVEFDLHWAAVTLANNFKCTPVKPIPIIPTALARNLSSNLNISQVQGTYKYG

SEQ ID NO: 831960 - protein, 91 aa, Homo sapiens
TLQPIVAFMVPMPAAVTHGSQHSLHPLPFAQATCTNLHTCLRPAFTAVSTTIPQQGVRLVQRGPTSGGLASVATKHLEHLRLLHIYLPSPE

SEQ ID NO: 831961 - protein, 710 aa, Homo sapiens
MLSLQYPDVYRDETAVQDYHGHKICDPYAWLEDPDSEQTKAFVEAQNKITVPFLEQCPIRGLYKERMTELYDYPKYSCHFKKGKRYFYFYNTGLQNQRVLYVQDSLEGEARVFLDPNILSDDGTVALRGYAFSEDGEYFAYGLSASGSDWVTIKFMKVDGAKELPDVLERVKFSCMAWTHDGKGMFYNSYPQQDGKSDGTETSTNLHQKLYYHVLGTDQSEDILCAEFPDEPKWMGGAELSDDGRYVLLSIREGCDPVNRLWYCDLQQESSGIAGILKWVKLIDNFEGEYDYVTNEGTVFTFKTNRQSPNYRVINIDFRDPEESKWKVLVPEHEKDVLEWIACVRSNFLVLCYLHDVKNILQLHDLTTGALLKTFPLDVGSIVGYSGQKKDTEIFYQFTSFLSPGIIYHCDLTKEELEPRVFREVTVKGIDASDYQTVQIFYPSKDGTKIPMFIVHKKGIKLDGSHPAFLYGYGGFNISITPNYSVSRLIFVRHMGGILAVANIRGGGEYGETWHKGGILANKQNCFDDFQCAAEYLIKEGYTSPKRLTINGGSNGGLLVAACANQRPDLFGCVIAQVGVMDMLKFHKYTIGHAWTTDYGCSDSKQHFEWLVKYSPLHNVKLPEADDIQYPSMLLLTADHDDRVVPLHSLKFIATLQYIVGRSRKQSNPLLIHVDTKAGHGAGKPTAKVIEEVSDMFAFIARCLNVDWIP

SEQ ID NO: 831962 - protein, 710 aa, Homo sapiens; identical to SEQ ID NO: 831961

SEQ ID NO: 831963 - protein, 259 aa, Homo sapiens [sequence omitted]

SEQ ID NO: 831964 - protein, 104 aa, Homo sapiens
  misc_feature (89)..(91): Xaa can be any naturally occurring amino acid
MLSLQYPDVYRDETAVQDYHGHKICDPYAWLEDPDSEQTKAFVEAQNKITVPFLEQCPIRGLYKERMTELYDYPKYSCHFKKGKRVIFXXXYTNNRVLAGTQAE

SEQ ID NO: 831965 - protein, 710 aa, Homo sapiens; identical to SEQ ID NO: 831961

SEQ ID NO: 831966 - protein, 449 aa, Homo sapiens
MLSLQYPDVYRDETAVQDYHGHKICDPYAWLEDPDSEQTKAFVEAQNKITVPFLEQCPIRGLYKERMTELYDYPKYSCHFKKGKRYFYFYNTGLQNQRVLYVQDSLEGEARVFLDPNILSDDGTVALRGYAFSEDGEYFAYGLSASGSDWVTIKFMKVDGAKELPDVLERVKFSCMAWTHDGKGMFYNSYPQQDGKSDGTETSTNLHQKLYYHVLGTDQSEDILCAEFPDEPKWMGGAELSDDGRYVLLSIREGCDPVNRLWYCDLQQESSGIAGILKWVKLIDNFEGEYDYVTNEGTVFTFKTNRQSPNYRVINIDFRDPEESKWKVLVPEHEKDVLEWIACVRSNFLVLCYLHDVKNILQLHDLTTGALLKTFPLDVGSIVGYSGQKKDTEIFYQFTSFLSPGIIYHCDLTKEELEPRVFREVTVKGIDASDYQTVQLPKGTESSRN

SEQ ID NO: 831967 - protein, 224 aa, Homo sapiens
LENFSVATEESAEPLSEDDFEMFYEVWEKFDPDATQFMEFEKLSQFAAALEPPLNLPQPNKLQLIAMDLPMVSGDRIHCLDILFAFTKRVLGESGEMDALRIQMEERFMASNPSKVSYQPITTTLKRKQEEVSAVIIQRAYRRHLLKRTVKQASFTYNKNKIKGGANLLIKEDMIIDRINENSITEKTDLTMSTAACPPSYDRVTKPIVEKHEQEGKDEKAKGK

SEQ ID NO: 831968 - protein, 525 aa, Homo sapiens [sequence omitted]

SEQ ID NO: 831969 - protein, 525 aa, Homo sapiens [sequence omitted]

SEQ ID NO: 831970 - protein, 525 aa, Homo sapiens [sequence omitted]

SEQ ID NO: 831971 - protein, 525 aa, Homo sapiens [sequence omitted]

SEQ ID NO: 831972 - protein, 200 aa, Homo sapiens
SLLRSHKNEKKFEEIDRKHSELSELNVKVLEALELYNKLVNEAPVYSVYSKLHPPAHYPPASSGVPMQTYPVQSHGGNYMGQSIHQVTVAQSYSLGPDQIGPLRSLPPNVNSSVTAQPAQTSYLSTGQDTVSNPTYMNQNSNLQSATGTTAYTQQMGMSVDMSSYQNTTSNLPQLAGFPVTVPAHPVAQQHTNYHQQPLL

SEQ ID NO: 831973 - protein, 114 aa, Homo sapiens
MPLFTANPFEQDVEKATNEYNTTEDWSLIMDICDKVGSTPNGAKDCLKAIMKRVNHKVPHVALQALTLLGACVANCGKIFHLEVCSRDAKVSHTYKQYEIGGLKYYFKETTVSP

SEQ ID NO: 831974 - protein, 342 aa, Homo sapiens
MPLFTANPFEQDVEKATNEYNTTEDWSLIMDICDKVGSTPNGAKDCLKAIMKRVNHKVPHVALQALTLLGACVANCGKIFHLEVCSRDFATEVRAVIKNKAHPKVCEKLKSLMVEWSEEFQKDPQFSLISATIKSMKEEGITFPPAGSQTVSAAAKNGTSSNKNKEDEDIAKAIELSLQEQKQQHTETKSLYPSSEIQLNNKVARKVRALYDFEAVEDNELTFKHGEIIIVLDDSDANWWKGENHRGIGLFPSNFVTTNLNIETEAAAVDKLNVIDDDVEEIKKSEPEPVYIDEDKMDRALQVLQSIDPTDSKPDSQDLLDLEDICQQMGPMIDEKLEEIDR

SEQ ID NO: 831975 - protein, 525 aa, Homo sapiens [sequence omitted]

SEQ ID NO: 831976 - protein, 535 aa, Homo sapiens
MPLFTANPFEQDVEKATNEYNTTEDWSLIMDICDKVGSTPNGAKDCLKAIMKRVNHKVPHVALQALTLLGACVANCGKIFHLEVCSRDFATEVRAVIKNKAHPKVCEKLKSLMVEWSEEFQKDPQFSLISATIKSMKEEGITFPPAGSQGWARWLTPVIPALWEAEVGSIMRSRDRDQPDQQAIELSLQEQKQQHTETKSLYPSSEIQLNNKVARKVRALYDFEAVEDNELTFKHGEIIIVLDDSDANWWKGENHRGIGLFPSNFVTTNLNIETEAAAVDKLNVIDDDVEEIKKSEPEPVYIDEDKMDRALQVLQSIDPTDSKPDSQDLLDLEDICQQMGPMIDEKLEEIDRKHSELSELNVKVLEALELYNKLVNEAPVYSVYSKLHPPAHYPPASSGVPMQTYPVQSHGGNYMGQSIHQVTVAQSYSLGPDQIGPLRSLPPNVNSSVTAQPAQTSYLSTGQDTVSNPTYMNQNSNLQSATGTTAYTQQMGMSVDMSSYQNTTSNLPQLAGFPVTVPAHPVAQQHTNYHQQPLL

SEQ ID NO: 831977 - protein, 235 aa, Homo sapiens
MPLFTANPFEQDVEKATNEYNTTEDWSLIMDICDKVGSTPNGAKDCLKAIMKRVNHKVPHVALQALTLLGACVANCGKIFHLEVCSRDFATEVRAVIKNKAHPKVCEKLKSLMVEWSEEFQKDPQFSLISATIKSMKEEGITFPPAGSQTVSAAAKNGTSSNKNKEDEDIAKAIELSLQEQKQQHTETKSLYPSSEIQLNNKVARKVRALYDFEAVEDNELTFKHGEIIIVLDDR

SEQ ID NO: 831978 - protein, 521 aa, Homo sapiens
MAENPSLENHRIKSFKNKGRDVETMRRHRNEVTVELRKNKRDEHLLKKRNVPQEESLEDSDVDADFKAQNVTLEAILQNATSDNPVVQLSAVQAARKLLSSDRNPPIDDLIKSGILPILVKCLERDDNPSLQFEAAWALTNIASGTSAQTQAVVQSNAVPLFLRLLRSPHQNVCEQAVWALGNIIGDGPQCRDYVISLGVVKPLLSFISPSIPITFLRNVTWVIVNLCRNKDPPPPMETVQEILPALCVLIYHTDINILVDTVWALSYLTDGGNEQIQMVIDSGVVPFLVPLLSHQEVKVQTAALRAVGNIVTGTDEQTQVVLNCDVLSHFPNLLSHPKEKINKEAVWFLSNITAGNQQQVQAVIDAGLIPMIIHQLAKGDFGTQKEAAWAISNLTISGRKDQVEYLVQQNVIPPFCNLLSVKDSQVVQVVLDGLKNILIMAGDEASTIAEIIEECGGLEKIEVLQQHENEDIYKLAFEIIDQYFSGDDIDEDPCLIPEATQGGTYNFDPTANLQTKEFNF

SEQ ID NO: 831979 - protein, 521 aa, Homo sapiens; identical to SEQ ID NO: 831978

SEQ ID NO: 831980 - protein, 521 aa, Homo sapiens; identical to SEQ ID NO: 831978

SEQ ID NO: 831981 - protein, 519 aa, Homo sapiens
MAENPSLENHRIKSFKNKGRDVETMRRHRNEVTVELRKNKRDEHLLKKRNVPQEESLEDSDVDADFKAQNVTLEAILQNATSDNPVVQLSAVQAARKLLSSDRNPPIDDLIKSGILPILVKCLERDDNPSLQFEAAWALTNIASGTSAQTQAVVQSNAVPLFLRLLRSPHQNVCEQAVWALGNIIGDGPQCRDYVISLGVVKPLLSFISPSIPITFLRNVTWVIVNLCRNKDPPPPMETVQEILPALCVLIYHTDINILVDTVWALSYLTDGGNEQIQMVIDSGVVPFLVPLLSHQEVKVQTAALRAVGNIVTGTDEQTQVVLNCDVLSHFPNLLSHPKEKINKEAVWFLSNITAGNQQQVQAVIDAGLIPMIIHQLAKGDFGTQKEAAWAISNLTISGRKDQVEYLVQQNVIPPFCNLLSVKDSQVVQVVLDGLKNILIMAGDEASTIAEIIEECGGLEKIEVLQQHENEDIYKLAFEIIDQYFSGDDIDEDPCLIPEATQGVPQADNCSLQFRINIP

SEQ ID NO: 831982 - protein, 521 aa, Homo sapiens; identical to SEQ ID NO: 831978

SEQ ID NO: 831983 - protein, 521 aa, Homo sapiens; identical to SEQ ID NO: 831978

SEQ ID NO: 831984 - protein, 132 aa, Homo sapiens
MRRHRNEVTVELRKNKRDEHLLKKRNVPQEESLEDSDVDADFKAQNVTLEAILQNATSDNPVVQLSAVQAARKLLSSDRNPPIDDLIKSGILPILVKCLERDDNPSLQFEAAWALTNIASGKWREPGRRSLQ

SEQ ID NO: 831985 - protein, 497 aa, Homo sapiens
MRRHRNEVTVELRKNKRDEHLLKKRNVPQEESLEDSDVDADFKAQNVTLEAILQNATSDNPVVQLSAVQAARKLLSSDRNPPIDDLIKSGILPILVKCLERDDNPSLQFEAAWALTNIASGTSAQTQAVVQSNAVPLFLRLLRSPHQNVCEQAVWALGNIIGDGPQCRDYVISLGVVKPLLSFISPSIPITFLRNVTWVIVNLCRNKDPPPPMETVQEILPALCVLIYHTDINILVDTVWALSYLTDGGNEQIQMVIDSGVVPFLVPLLSHQEVKVQTAALRAVGNIVTGTDEQTQVVLNCDVLSHFPNLLSHPKEKINKEAVWFLSNITAGNQQQVQAVIDAGLIPMIIHQLAKGDFGTQKEAAWAISNLTISGRKDQVEYLVQQNVIPPFCNLLSVKDSQVVQVVLDGLKNILIMAGDEASTIAEIIEECGGLEKIEVLQQHENEDIYKLAFEIIDQYFSGDDIDEDPCLIPEATQGGTYNFDPTANLQTKEFNF

SEQ ID NO: 831986 - protein, 281 aa, Homo sapiens
VSTRMFISVWYMRTHINILVDTVWALSYLTDGGNEQIQMVIDSGVVPFLVPLLSHQEVKVQTAALRAVGNIVTGTDEQTQVVLNCDVLSHFPNLLSHPKEKINKEAVWFLSNITAGNQQQVQAVIDAGLIPMIIHQLAKGDFGTQKEAAWAISNLTISGRKDQVEYLVQQNVIPPFCNLLSVKDSQVVQVVLDGLKNILIMAGDEASTIAEIIEECGGLEKIEVLQQHENEDIYKLAFEIIDQYFSGDDIDEDPCLIPEATQGGTYNFDPTANLQTKEFNF

SEQ ID NO: 831987 - protein, 268 aa, Homo sapiens
  misc_feature (245)..(245): Xaa can be any naturally occurring amino acid
  misc_feature (255)..(255): Xaa can be any naturally occurring amino acid
  misc_feature (265)..(265): Xaa can be any naturally occurring amino acid
MAENPSLENHRIKSFKNKGRDVETMRRHRNEVTVELRKNKRDEHLLKKRNVPQEESLEDSDVDADFKAQNVTLEAILQNATSDNPVVQLSAVQAARKLLSSDRNPPIDDLIKSGILPILVKCLERDDNPSLQFEAAWALTNIASGTSAQTQAVVQSNAVPLFLRLLRSPHQNVCEQAVWALGNIIGDGPQCRDYVISLGVVKPLLSFISPSIPITFLRNVTWVIVNLCRNKDPPPPMETVQEILXALWGPHFPFXILTIFGDHWXGLL

SEQ ID NO: 831988 - protein, 241 aa, Homo sapiens
RIGRRCAAQSGSKMAAQQRDCGGAAQLAGPAAEADPLGRFTCPVCLEVYEKPVQVPCGHVFCSACLQECLKPKKPVCGVCRSALAPGVRAVELERQIESTETSCHGCRKNFFLSKIRSHVATCSKYQNYIMEGVKATIKDASLQPRNVPNRYTFPCPYCPEKNFDQEGLVEHCKLFHSTDTKSVVCPICASMPWGDPNYRSANFREHIQRRHRFSYDTFVDYDVDEEDMMNQVLQRSIIDQ

SEQ ID NO: 831989 - protein, 241 aa, Homo sapiens; identical to SEQ ID NO: 831988

SEQ ID NO: 831990 - protein, 111 aa, Homo sapiens
MEGVKATIKDASLQPRNVPNRYTFPCPYCPEKNFDQEGLVEHCKLFHSTDTKSVVCPICASMPWGDPNYRSANFREHIQRRHRFSYDTFVDYDVDEEDMMNQVLQRSIIDQ

SEQ ID NO: 831991 - protein, 264 aa, Homo sapiens
MHPPPLGFKRFSCLSPLSNWNYRHVLPRLDNFCIFSRAAQQRDCGGAAQLAGPAAEADPLGRFTCPVCLEVYEKPVQVPCGHVFCSACLQECLKPKKPVCGVCRSALAPGVRAVELERQIESTETSCHGCRKNFFLSKIRSHVATCSKYQNYIMEGVKATIKDASLQPRNVPNRYTFPCPYCPEKNFDQEGLVEHCKLFHSTDTKSVVCPICASMPWGDPNYRSANFREHIQRRHRFSYDTFVDYDVDEEDMMNQVLQRSIIDQ

SEQ ID NO: 831992 - protein, 241 aa, Homo sapiens; identical to SEQ ID NO: 831988

SEQ ID NO: 831993 - protein, 111 aa, Homo sapiens; identical to SEQ ID NO: 831990

SEQ ID NO: 831994 - protein, 241 aa, Homo sapiens; identical to SEQ ID NO: 831988

SEQ ID NO: 831995 - protein, 166 aa, Homo sapiens
MHPPPLGFKRFSCLSPLSNWNYRHVLPRLDNFCIFSRAAQQRDCGGAAQLAGPAAEADPLGRFTCPVCLEVYEKPVQVPCGHVFCSACLQECLKPKKPVCGVCRSALAPGVRAVELERQIESTETSCHGCRKNCLPLLLTLFVTRSSSYWFSATSWSFCRLLWKII

SEQ ID NO: 831996 - protein, 74 aa, Homo sapiens
  misc_feature (3)..(3): Xaa can be any naturally occurring amino acid
  misc_feature (8)..(8): Xaa can be any naturally occurring amino acid
  misc_feature (10)..(10): Xaa can be any naturally occurring amino acid
  misc_feature (15)..(15): Xaa can be any naturally occurring amino acid
  misc_feature (27)..(29): Xaa can be any naturally occurring amino acid
  misc_feature (38)..(38): Xaa can be any naturally occurring amino acid
KVXSPQQXWXTCMPXGPPPPCPRERRXXXPGTPAQTPXGPLEKNSFFISISREDPKVKVSLFTVISGRSSLRPS

SEQ ID NO: 831997 - protein, 223 aa, Homo sapiens
SNRNRSYENRCPLLAAASLGRFTCPVCLEVYEKPVQVPCGHVFCSACLQECLKPKKPVCGVCRSALAPGVRAVELERQIESTETSCHGCRKNFFLSKIRSHVATCSKYQNYIMEGVKATIKDASLQPRNVPNRYTFPCPYCPEKNFDQEGLVEHCKLFHSTDTKSVVCPICASMPWGDPNYRSANFREHIQRRHRFSYDTFVDYDVDEEDMMNQVLQRSIIDQ

SEQ ID NO: 831998 - protein, 832 aa, Homo sapiens [sequence omitted]

SEQ ID NO: 831999 - protein, 670 aa, Homo sapiens
MFEASEDVAIGTKVGNVTAKDPEGLDISYSLRGDTRGWLKIDHVTGEIFSVAPLDREARNSFSDTTSVDIIVTENIWKAPKPVEMVENSTDPHPIKITQVRWNDPGAQYSLVDKEKLPRFPFSIDQEGDIYVTQPLDREEKDAYVFYAVAKDEYGKPLSYPLEIHVKVKDINDNPPTCPSPVTVFEVQENERLGNSIGTLTAHDRDEENTANSFLNYRIVEQTPKLPMDGLFLIQTYAGMLQLAKQSLKKQDTPQYNLTIEVSDKDFKTLCFVQINVIDINDQIPIFEKSDYGNLTLAEDTNIGSTILTIQATDADEPFTGSSKILYHIIKGDSEGRLGVDTDPHTNTGYVIIKKPLDFETAAVSNIVFKAENPEPLVFGVKYNASSFAKFTLIVTDVNEAPQFSQHVFQAKVSEDVAIGTKVGNVTAKDPEGLDISYSLRGDTRGWLKIDHVTGEIFSVAPLDREAGSPYRVQVVATEVGGSSLSSVSEFHLILMDVNDNPPRLAKDYTGLFFCHPLSAPGSLIFEATDDDQHLFRGPHFTFSLGSGSLQNDWEVSKINGTHARLSTRHTDFEEREYVVLIRINDGGRPPLEGIVSLPVTFCSCVEGSCFRPAGHQTGIPTVGMAVGILLTTLLVIGIILAVVFIRIKKDKGKDNVESAQASEVKPLRS

SEQ ID NO: 832000 - protein, 430 aa, Homo sapiens
MILQAHLHSLCLLMLYLATGYGQEGKFSGPLKPMTFSIYEGQEPSQIIFQFKANPPAVTFELTGETDNIFVIEREGLLYYNRALDRETRSTHNLQVAALDANGIIVEGPVPITIEVKDINDNRPTFLQSKYEGSVRQNSRPGKPFLYVNATDLDDPATPNGQLYYQIVIQLPMINNVMYFQINNKTGAISLTREGSQELNPAKNPSYNLVISVKDMGGQSENSFSDTTSVDIIVTENIWKAPKPVEMVENSTDPHPIKITQVRWNDPGAQYSLVDKEKLPRFPFSIDQEGDIYVTQPLDREEKDAYVFYAVAKDEYGKPLSYPLEIHVKVKDINDNPPTCPSPVTVFEVQENERLGNSIGTLTAHDRDEENTANSFLNYRIVEQTPKPLYFTPKLEAQDNSALEHNSWKQLLFQNQRLFNYDSTPGIGMG

SEQ ID NO: 832001 - protein, 674 aa, Homo sapiens
MILQAHLHSLCLLMLYLATGYGQEGKFSGPLKPMTFSIYEGQEPSQIIFQFKANPPAVTFELTGETDNIFVIEREGLLYYNRALDRETRSTHNLQVAALDANGIIVEGPVPITIEVKDINDNRPTFLQSKYEGSVRQNSRPGKPFLYVNATDLDDPATPNGQLYYQIVIQLPMINNVMYFQINNKTGAISLTREGSQELNPAKNPSYNLVISVKDMGGQSENSFSDTTSVDIIVTENIWKAPKPVEMVENSTDPHPIKITQVRWNDPGAQYSLVDKEKLPRFPFSIDQEGDIYVTQPLDREEKDAYVFYAVAKDEYGKPLSYPLEIHVKVKDINDNPPTCPSPVTVFEVQENERLGNSIGTLTAHDRDEENTANSFLNYRIVEQTPKLPMDGLFLIQTYAGMLQLAKQSLKKQDTPQYNLTIEVSDKDFKTLCFVQINVIDINDQIPIFEKSDYGNLTLAEDTNIGSTILTIQATDADEPFTGSSKILYHIIKGDSEGRLGVDTDPHTNTGYVIIKKPLDFETAAVSNIVFKAENPEPLVFGVKYNASSFAKFTLIVTDVNEAPQFSQHVFQAKVSEDVAIGTKVGNVTAKDPEGLDISYSLRGDTRGWLKIDHVTGEIFSVAPLDREAGSPYRVQVVATEVGGSSLSSVSEFHLILMDVNDNPPRLAKDCGQF

SEQ ID NO: 832002 - protein, 493 aa, Homo sapiens
MILQAHLHSLCLLMLYLATGYGQEGKFSGPLKPMTFSIYEGQEPSQIIFQFKANPPAVTFELTGETDNIFVIEREGLLYYNRALDRETRSTHNLQVAALDANGIIVEGPVPITIEVKDINDNRPTFLQSKYEGSVRQNSRPGKPFLYVNATDLDDPATPNGQLYYQIVIQLPMINNVMYFQINNKTGAISLTREGSQELNPAKNPSYNLVISVKDMGGQSENSFSDTTSVDIIVTENIWKAPKPVEMVENSTDPHPIKITQVRWNDPGAQYSLVDKEKLPRFPFSIDQEGDIYVTQPLDREEKDAYVFYAVAKDEYGKPLSYPLEIHVKVKDINDNPPTCPSPVTVFEVQENERLGNSIGTLTAHDRDEENTANSFLNYRIVEQTPKLPMDGLFLIQTYAGMLQLAKQSLKKQDTPQYNLTIEVSDKDFKTLCFVQINVIDINDQIPIFEKSDYGKLNCPHPIKITQVRWNDPGAQYSLVDKEKLPRFPFSID

SEQ ID NO: 832003 - protein, 492 aa, Homo sapiens
MATPARAPESPPSADPALVAGPAEEAECPPPRQPQPAQNVLAAPRLRAPSSRGLGAAEFGGAAGNVEAPGETFAQRVSWGPAESPPGSFSSSSLGAPLPSRTLFPSLEGDFDSVTFASVLRASGRRACCGRAVPLPGQARMPARIARIERLPGVAGSYVAPGKFICKLPDKGKKIFDSFAKLKAAIAECEEVRRKSELFNPVSLDCKLRQKAIAEVDVGTDKAQNSDPILDTSSLVPGCSSVDNIKSSQTSQNQGLGRPTLEGDEETSEVEYTVNKGPASSNRDRVPPSSEASEHHPRHRVSSQAEDTSSSFDNLFIDRLQRITIADQGEQQSEENASTKNLTGLSSGTEKKPHYMEVLEMRAKNPVPQLRKFKTNVLPFRQNDSSSHCQKSGSPISSEERRRRDKQHLDDITAARLLPLHHMPTQLLSIEESLALQKQQKQNYEEMQAKLAAQKLAERLNIKMRSYNPEGESSGRYREVRDEDDDWSSDEF

SEQ ID NO: 832004 - protein, 368 aa, Homo sapiens
MCSLPRGFEPQAPEDLAQRSLVELREMLKRQERLLRNEKFICKLPDKGKKIFDSFAKLKAAIAECEEVRRKSELFNPVSLDCKLRQKAIAEVDVGTDKAQNSDPILDTSSLVPGCSSVDNIKSSQTSQNQGLGRPTLEGDEETSEVEYTVNKGPASSNRDRVPPSSEASEHHPRHRVSSQAEDTSSSFDNLFIDRLQRITIADQGEQQSEENASTKNLTGLSSGTEKKPHYMEVLEMRAKNPVPQLRKFKTNVLPFRQNDSSSHCQKSGSPISSEERRRRDKQHLDDITAARLLPLHHMPTQLLSIEESLALQKQQKQNYEEMQAKLAAQKLAERLNIKMRSYNPEGESSGRYREVRDEDDDWSSDEF

SEQ ID NO: 832005 - protein, 211 aa, Homo sapiens
MCSLPRGFEPQAPEDLAQRSLVELREMLKRQERLLRNELQRITIADQGEQQSEENASTKNLTGLSSGTEKKPHYMEVLEMRAKNPVPQLRKFKTNVLPFRQNDSSSHCQKSGSPISSEERRRRDKQHLDDITAARLLPLHHMPTQLLSIEESLALQKQQKQNYEEMQAKLAAQKLAERLNIKMRSYNPEGESSGRYREVRDEDDDWSSDEF

SEQ ID NO: 832006 - protein, 368 aa, Homo sapiens; identical to SEQ ID NO: 832004

SEQ ID NO: 832007 - protein, 468 aa, Homo sapiens
MATPARAPESPPSADPALVAGPAEEAECPPPRQPQPAQNVLAAPRLRAPSSRGLGAAEFGGAAGNVEAPGETFAQRVSWGPAESPPGSFSSSSLGAPLPSRTLFPSLEGDFDSVTFASVLGRVDGGLAAAEPCLFLARKFICKLPDKGKKIFDSFAKLKAAIAECEEVRRKSELFNPVSLDCKLRQKAIAEVDVGTDKAQNSDPILDTSSLVPGCSSVDNIKSSQTSQNQGLGRPTLEGDEETSEVEYTVNKGPASSNRDRVPPSSEASEHHPRHRVSSQAEDTSSSFDNLFIDRLQRITIADQGEQQSEENASTKNLTGLSSGTEKKPHYMEVLEMRAKNPVPQLRKFKTNVLPFRQNDSSSHCQKSGSPISSEERRRRDKQHLDDITAARLLPLHHMPTQLLSIEESLALQKQQKQNYEEMQAKLAAQKLAERLNIKMRSYNPEGESSGRYREVRDEDDDWSSDEF

SEQ ID NO: 832008 - protein, 368 aa, Homo sapiens; identical to SEQ ID NO: 832004

SEQ ID NO: 832009 - protein, 368 aa, Homo sapiens; identical to SEQ ID NO: 832004

SEQ ID NO: 832010 - protein, 368 aa, Homo sapiens; identical to SEQ ID NO: 832004

SEQ ID NO: 832011 - protein, 231 aa, Homo sapiens
MEALLSTPINPNNFPAKLWRLVNSPRYRSIRWDGRGEGLLIDQPLFEAELLSPPGPGGGGGTAGAGAEPELFKTTSFTSFIRQLNLYGFRKVVLGGPGGGKPAGNGPLHHFHNPHFRRDQPQLLVHLKRLTSANKAKLAAGLEVPCRPTKRFQRLLITSASAATAPLQHQQPPPPAGPRPEPHGPVAVGQFHRSFRRDSLSPYSCVSTPSHDHSTYPLKGLDRTPVPHRIW

SEQ ID NO: 832012 - protein, 122 aa, Homo sapiens
SRYLLMQVSHKRKYLLLCMRCQSILNMAMFRCKKDIAIKYSRTLNKHFESSSKVAQAPSPCIARSTGTPSPLSPMPSPASSVGSQSSAGSVGSSGVAATISTPVTIQNMTSSYVTITSHVLT

SEQ ID NO: 832013 - protein, 510 aa, Homo sapiens
MTKGRPRAAASNEPKPAVPPSSEKKKHKSSLPAPSKALSGPEPAKGNVEDRTPEHFALVPLTESQGPPHSGSGSRTSGCRQAVVVQEDSRKDRLPLPLRDTKLLSPLRDTPPPQSLMVKITLDLLSRIPQPPGKGSRQRKAEDKQPPAGKKHSSEKRSSDSSSKLAKKRKGEAERDCDNKKIRLEKEIKSQSSSSSSSHKESSKTKPSRPSSQSSKKEMLPPPPVSSSSQKPAKPALKRSRREADTCGQDPPKSASSTKSNHKDSSIPKQRRVEGKGSRSSSEHKGSSGDTANPFPVPSLPNGNSKPGKPQVKFDKQQADLHMREAKKMKQKAELMTDRVGKAFKYLEAVLSFIECGIATESESQSSKSAYSVYSETVDLIKFIMSLKSFSDATAPTQEKIFAVLCMRCQSILNMAMFRCKKDIAIKYSRTLNKHFESSSKVAQAPSPCIARSTGTPSPLSPMPSPASSVGSQSSAGSVGSSGVAATISTPVTIQNMTSSYVTITSHVLT

SEQ ID NO: 832014 - protein, 135 aa, Homo sapiens
GCGPGSGKGVVGRRFIRSRRTGARGQLPTGGRPVRMTGLLQKSDTRGTERPRYGGFHRQGRSRAEVLLTSQTGRRGRGAPHISDDGRQGRDSPHFLDVMAAGKRLMCGFFSPLFIHSCIHLFNDILLRNLLKPGC

SEQ ID NO: 832015 - protein, 89 aa, Homo sapiens
GCGPGSGKGVVGRRFIRSRRTGARGQLPTGGRPVRMTGLLQKSDTRGTERPRYGGFHRLMCGFFSPLFIHSCIHLFNDILLRNLLKPGC

SEQ ID NO: 832016 - protein, 84 aa, Homo sapiens
GCGPGSGKGVVGRRFIRSRRTGARGQLPTGGRPVRMTGLLQKSDTRGTERPRYGGFHRLMCGFFSPLFIHSCIHLFNDILLRNI

SEQ ID NO: 832017 - protein, 89 aa, Homo sapiens; identical to SEQ ID NO: 832015

SEQ ID NO: 832018 - protein, 89 aa, Homo sapiens; identical to SEQ ID NO: 832015

SEQ ID NO: 832019 - protein, 133 aa, Homo sapiens
MWLALQATATAPWVTGPSVPPSPSHAAGASAVTVPKHCCPLLLVPEPSGAWSAYHMGWYPGLRLALPWPAGFYSLRTGVGRWGWPQCPPGQPARYLVVMEYGVCIHILPWRYVEPQFPHEVHLVGERHGGPWA

SEQ ID NO: 832020 - protein, 56 aa, Homo sapiens
MDRKGSEREHLIGDAVITTGIVKNMDTKYWWVSGMAGTHIHGRWELHPLEIISQFV

SEQ ID NO: 832021 - protein, 67 aa, Homo sapiens
ALLTAAARGSIADPEAVAVVRGGAVAGALAQPTQGLLRVREAGRSGGLGGPGVGKSVDPAGQWGGET

SEQ ID NO: 832022 - protein, 443 aa, Homo sapiens
AGDVPWGTPGHGWHCFGGSAAWQIQGGIVDSRHQRRRRWVAGQRETLGEEPLIPSVLQSPAHSATYTMCEEETTALVCDNGSGLCKAGFAGDDAPRAVFPSIVGRPRHQGVMVGMGQKDSYVGDEAQSKRGILTLKYPIEHGIITNWDDMEKIWHHSFYNELRVAPEEHPTLLTEAPLNPKANREKMTQIMFETFNVPAMYVAIQAVLSLYASGRTTGIVLDSGDGVTHNVPIYEGYALPHAIMRLDLAGRDLTDYLMKILTERGYSFVTTAEREIVRDIKEKLCYVALDFENEMATAASSSSLEKSYELPDGQVITIGNERFRCPETLFQPSFIGMESAGIHETTYNSIMKCDIDIRKDLYANNVLSGGTTMYPGIADRMQKEITALAPSTMKIKIIAPPERKYSVWIGGSILASLSTFQQMWISKPEYDEAGPSIVHRKCF

SEQ ID NO: 832023 - protein, 417 aa, Homo sapiens
RLWGFILLWYSCQRHTSPQSLGEEPLIPSVLQSPAHSATYTMCEEETTALVCDNGSGLCKAGFAGDDAPRAVFPSIVGRPRHQGVMVGMGQKDSYVGDEAQSKRGILTLKYPIEHGIITNWDDMEKIWHHSFYNELRVAPEEHPTLLTEAPLNPKANREKMTQIMFETFNVPAMYVAIQAVLSLYASGRTTGIVLDSGDGVTHNVPIYEGYALPHAIMRLDLAGRDLTDYLMKILTERGYSFVTTAEREIVRDIKEKLCYVALDFENEMATAASSSSLEKSYELPDGQVITIGNERFRCPETLFQPSFIGMESAGIHETTYNSIMKCDIDIRKDLYANNVLSGGTTMYPGIADRMQKEITALAPSTMKIKIIAPPERKYSVWIGGSILASLSTFQQMWISKPEYDEAGPSIVHRKCF

SEQ ID NO: 832024 - protein, 257 aa, Homo sapiens
MTQIMFETFNVPAMYVAIQAVLSLYASGRTTGIVLDSGDGVTHNVPIYEGYALPHAIMRLDLAGRDLTDYLMKILTERGYSFVTTAEREIVRDIKEKLCYVALDFENEMATAASSSSLEKSYELPDGQVITIGNERFRCPETLFQPSFIGMESAGIHETTYNSIMKCDIDIRKDLYANNVLSGGTTMYPGIADRMQKEITALAPSTMKIKIIAPPERKYSVWIGGSILASLSTFQQMWISKPEYDEAGPSIVHRKCF

SEQ ID NO: 832025 - protein, 417 aa, Homo sapiens; identical to SEQ ID NO: 832023

SEQ ID NO: 832026 - protein, 417 aa, Homo sapiens; identical to SEQ ID NO: 832023

SEQ ID NO: 832027 - protein, 446 aa, Homo sapiens
RLWGFILLWYSCQRHTSPQSLGEEPLIPSVLQSPAHSATYTMCEEETTALVCDNGSGLCKAGFAGDDAPRAVFPSIVGRPRHQGVMVGMGQKDSYVGDEAQSKRGILTLKYPIEHGIITNWDDMEKIWHHSFYNELRVAPEEHPTLLTEAPLNPKANREKMTQIMFETFNVPAMYVAIQAVLSLYASGRTTGIVLDSGDGVTHNVPIYEGYALPHAIMRLDLAGRDLTDYLMKILTERGYSFVTTAEREIVRDIKEKLCYVALDFENEMATAASSSSLEKSYELPDGQVITIGNERFRCPETLFQPSFIGMESAGIHETTYNSIMKCDIDIRKDLYANNVLSGGTTMYPGIADRMQKEITALAPSTMKIKIIAPPERKYSVWIGGSILASLSTFQQMWISKPEYDEAGPSIVQGDSHHLNPGRCLSCGQRHRGRAQLEWRRTWQGH

SEQ ID NO: 832028 - protein, 167 aa, Homo sapiens
LLLLIRGARLAISFSKSRATQQASSSSLEKSYELPDGQVITIGNERFRCPETLFQPSFIGMESAGIHETTYNSIMKCDIDIRKDLYANNVLSGGTTMYPGIADRMQKEITALAPSTMKIKIIAPPERKYSVWIGGSILASLSTFQQMWISKPEYDEAGPSIVHRKCF

SEQ ID NO: 832029 - protein, 232 aa, Homo sapiens
RLWGFILLWYSCQRHTSPQSLGEEPLIPSVLQSPAHSATYTMCEEETTALVCDNGSGLCKAGFAGDDAPRAVFPSIVGRPRHQGVMVGMGQKDSYVGDEAQSKRGILTLKYPIEHGIITNWDDMEKIWHHSFYNELRVAPEEHPTLLTEAPLNPKANREKMTQIMFETFNVPAMYVAIQAVLSLYASGRTTGIVLDSGDGVTHNVPIYEAGSASKVRTGSPRIPSRLLCYQS

SEQ ID NO: 832030 - protein, 232 aa, Homo sapiens; identical to SEQ ID NO: 832029

SEQ ID NO: 832031 - protein, 147 aa, Homo sapiens
  misc_feature (5)..(5): Xaa can be any naturally occurring amino acid
  misc_feature (8)..(8): Xaa can be any naturally occurring amino acid
  misc_feature (26)..(26): Xaa can be any naturally occurring amino acid
ITLPXLAXERFRWKRVSGQRKALIAXWVDNLPIWQPSFIGMESAGIHETTYNSIMKCDIDIRKDLYANNVLSGGTTMYPGIADRMQKEITALAPSTMKIKIIAPPERKYSVWIGGSILASLSTFQQMWISKPEYDEAGPSIVHRKCF

SEQ ID NO: 832032 - protein, 137 aa, Homo sapiens
RLWGFILLWYSCQRHTSPQSLGEEPLIPSVLQSPAHSATYTMCEEETTALVCDNGSGLCKAGFAGDDAPRAVFPSIVGRPRHQGVMVGMGQKDSYVGDEAQSKRGILTLKYPIEHGIITNWDDMEKVSVDFPLMSLL

SEQ ID NO: 832033 - protein, 220 aa, Homo sapiens
RLWGFILLWYSCQRHTSPQSLGEEPLIPSVLQSPAHSATYTMCEEETTALVCDNGSGLCKAGFAGDDAPRAVFPSIVGRPRHQGVMVGMGQKDSYVGDEAQSKRGILTLKYPIEHGIITNWDDMEKIWHHSFYNELRSYGQTLGQGRQPPSPSSQEAPLNPKAQSKGGQHSNGTQNHCSETFNVPDQWVTISPFKADALHFLIAFWASTTGHTSMGDYYQ

SEQ ID NO: 832034 - protein, 186 aa, Homo sapiens
RLWGFILLWYSCQRHTSPQSLGEEPLIPSVLQSPAHSATYTMCEEETTALVCDNGSGLCKAGFAGDDAPRAVFPSIVGRPRHQGVMVGMGQKDSYVGDEAQSKRGILTLKYPIEHGIITNWDDMEKQEVLLKSEQVLQGSPRDYSVTSHETLKPTSLIYSQNRSPQHPLETTLSPLMKHYNLQALH

SEQ ID NO: 832035 - protein, 417 aa, Homo sapiens; identical to SEQ ID NO: 832023

SEQ ID NO: 832036 - protein, 381 aa, Homo sapiens
MRSRCMCEEETTALVCDNGSGLCKAGFAGDDAPRAVFPSIVGRPRHQGVMVGMGQKDSYVGDEAQSKRGILTLKYPIEHGIITNWDDMEKIWHHSFYNELRVAPEEHPTLLTEAPLNPKANREKMTQIMFETFNVPAMYVAIQAVLSLYASGRTTGIVLDSGDGVTHNVPIYEGYALPHAIMRLDLAGRDLTDYLMKILTERGYSFVTTAEREIVRDIKEKLCYVALDFENEMATAASSSSLEKSYELPDGQVITIGNERFRCPETLFQPSFIGMESAGIHETTYNSIMKCDIDIRKDLYANNVLSGGTTMYPGIADRMQKEITALAPSTMKIKIIAPPERKYSVWIGGSILASLSTFQQMWISKPEYDEAGPSIVHRKCF

SEQ ID NO: 832037 - protein, 382 aa, Homo sapiens
MDSIVLVCESRGRDCSRAEATSRIDCPRTVIDLPLSLLWTLPLARSRCDDARTAREKDSYVGDEAQSKRGILTLKYPIEHGIITNWDDMEKIWHHSFYNELRVAPEEHPTLLTEAPLNPKANREKMTQIMFETFNVPAMYVAIQAVLSLYASGRTTGIVLDSGDGVTHNVPIYEGYALPHAIMRLDLAGRDLTDYLMKILTERGYSFVTTAEREIVRDIKEKLCYVALDFENEMATAASSSSLEKSYELPDGQVITIGNERFRCPETLFQPSFIGMESAGIHETTYNSIMKCDIDIRKDLYANNVLSGGTTMYPGIADRMQKEITALAPSTMKIKIIAPPERKYSVWIGGSILASLSTFQQMWISKPEYDEAGPSIVHRKCF

SEQ ID NO: 832038 - protein, 320 aa, Homo sapiens
RLWGFILLWYSCQRHTSPQSLGEEPLIPSIWHHSFYNELRVAPEEHPTLLTEAPLNPKANREKMTQIMFETFNVPAMYVAIQAVLSLYASGRTTGIVLDSGDGVTHNVPIYEGYALPHAIMRLDLAGRDLTDYLMKILTERGYSFVTTAEREIVRDIKEKLCYVALDFENEMATAASSSSLEKSYELPDGQVITIGNERFRCPETLFQPSFIGMESAGIHETTYNSIMKCDIDIRKDLYANNVLSGGTTMYPGIADRMQKEITALAPSTMKIKIIAPPERKYSVWIGGSILASLSTFQQMWISKPEYDEAGPSIVHRKCF

SEQ ID NO: 832039 - protein, 417 aa, Homo sapiens; identical to SEQ ID NO: 832023

SEQ ID NO: 832040 - protein, 378 aa, Homo sapiens
RLWGFILLWYSCQRHTSPQSLGEEPLIPSVLQSPAHSATYTMCEEETTALVCDNGSGLCKAGFAGDDAPRAVFPSIVGRPRHQGVMVGMGQKDSYVGDEAQSKRGILTLKYPIEHGIITNWDDMEKIWHHSFYNELRVAPEEHPTLLTEAPLNPKANREKMTQIMFETFNVPAMYVAIQAVLSLYASGRTTGIVLDSGDGVTHNVPIYEGYALPHAIMRLDLAGRDLTDYLMKILTERGYSFVTTAEREIVRDIKEKLCYVALDFENEMATAASSSSLEKSYELPDGQVITIGNERFRCPETLFQPSFIGMESAGIHETTYNSIMKCDIDIRKDLYANNVLSGGTTNWDDMEKIWHHSFYNELRVDLKSTPPCSQRLP

SEQ ID NO: 832041 - protein, 107 aa, Homo sapiens
MESAGIHETTYNSIMKCDIDIRKDLYANNVLSGGTTMYPGIADRMQKEITALAPSTMKIKIIAPPERKYSVWIGGSILASLSTFQQMWISKPEYDEAGPSIVHRKCF

SEQ ID NO: 832042 - protein, 211 aa, Homo sapiens
RLWGFILLWYSCQRHTSPQSLGEEPLIPSVLQSPAHSATYTMCEEETTALVCDNGSGLCKAGFAGDDAPRAVFPSIVGRPRHQGVMVGMGQKDSYVGDEAQSKRGILTLKYPIEHGIITNWDDMEKIWHHSFYNELRVAPEEHPTLLTEAPLNPKANREKMTQIMFETFNVPAMYVAIQAVLSLYASGRTTGIVLDFSDGVTHNGTWIGYR

SEQ ID NO: 832043 - protein, 187 aa, Homo sapiens
RLWGFILLWYSCQRHTSPQSLGEEPLIPSVLQSPAHSATYTMCEEETTALVCDNGSGLCKAGFAGDDAPRAVFPSIVGRPRHQGVMVGMGQKDSYVGDEAQSKRGILTLKYPIEHGIITNWDDMEKPHDHFSNLGCQHLSLDYCNGFLADFLVSCPHPTRINSLHCCKTDLSKHRSAHVTHLLRNLQ

SEQ ID NO: 832044 - protein, 178 aa, Homo sapiens
RGSVVLWDGVAGRLPGSSASSAAFVAPWGLSGSAAHCPHRGAWLGGGAEWSLSSCDFPDASPQSLGEEPLIPSVLQSPAHSATYTMCEEETTALVCDNGSGLCKAGFAGDDAPRAVFPSIVGRPRHQGVMVGMGQKDSYVGDEAQSKRGILTLKYPGSASKVRTGSPRIPSRLLCYQS

SEQ ID NO: 832045 - protein, 77 aa, Homo sapiens
RSSFFRQLPSSSFLRHRGVFLTPLLAMSSHKTFRIKRFLAKKQKQNRPIPQWIRMKTGNKIRYNSKRRHWRRTKLGL

SEQ ID NO: 832046 - protein, 74 aa, Homo sapiens
GSEFGSNVGSSRHRGVFLTPLLAMSSHKTFRIKRFLAKKQKQNRPIPQWIRMKTGNKIRYNSKRRHWRRTKLGL

SEQ ID NO: 832047 - protein, 77 aa, Homo sapiens; identical to SEQ ID NO: 832045

SEQ ID NO: 832048 - protein, 70 aa, Homo sapiens
RPPTTTKFAAASTLTPLLAMSSHKTFRIKRFLAKKQKQNRPIPQWIRMKTGNKIRYNSKRRHWRRTKLGL

SEQ ID NO: 832049 - protein, 97 aa, Homo sapiens
GDHDSPHNPGDHAWGVGLFPFFPVAASTITSSFLRHRGVFLTPLLAMSSHKTFRIKRFLAKKQKQNRPIPQWIRMKTGNKIRYNSKRRHWRRTKLGL

SEQ ID NO: 832050 - protein, 88 aa, Homo sapiens
GGRLLLLNSRPRRREKTTEGASSFLRHRGVFLTPLLAMSSHKTFRIKRFLAKKQKQNRPIPQWIRMKTGNKIRYNSKRRHWRRTKLGL

SEQ ID NO: 832051 - protein, 88 aa, Homo sapiens; identical to SEQ ID NO: 832050

SEQ ID NO: 832052 - protein, 88 aa, Homo sapiens; identical to SEQ ID NO: 832050

SEQ ID NO: 832053 - protein, 67 aa, Homo sapiens
GRVGPDPRVRLTPLLAMSSHKTFRIKRFLAKKQKQNRPIPQWIRMKTGNKIRYNSKRRHWRRTKLGL

SEQ ID NO: 832054 - protein, 88 aa, Homo sapiens; identical to SEQ ID NO: 832050

SEQ ID NO: 832055 - protein, 88 aa, Homo sapiens; identical to SEQ ID NO: 832050

SEQ ID NO: 832056 - protein, 123 aa, Homo sapiens
  misc_feature (12)..(12): Xaa can be any naturally occurring amino acid
HPSQKASSSREXVSKKQEAEGPGIQKSRVKSVRQPRRRTTRAHCRRPQSSPPEPLPSSFLRHRGVFLTPLLAMSSHKTFRIKRFLAKKQKQNRPIPQWIRMKTGNKIRYNSKRRHWRRTKLGL

SEQ ID NO: 832057 - protein, 123 aa, Homo sapiens; identical to SEQ ID NO: 832056
  misc_feature (12)..(12): Xaa can be any naturally occurring amino acid

SEQ ID NO: 832058 - protein, 70 aa, Homo sapiens; identical to SEQ ID NO: 832048

SEQ ID NO: 832059 - protein, 91 aa, Homo sapiens
  misc_feature (4)..(4): Xaa can be any naturally occurring amino acid
  misc_feature (7)..(7): Xaa can be any naturally occurring amino acid
IDPXWHXPRAIALIPANSAIMAGASSFLRHRGVFLTPLLAMSSHKTFRIKRFLAKKQKQNRPIPQWIRMKTGNKIRYNSKRRHWRRTKLGL

SEQ ID NO: 832060 - protein, 123 aa, Homo sapiens; identical to SEQ ID NO: 832056
  misc_feature (12)..(12): Xaa can be any naturally occurring amino acid

SEQ ID NO: 832061 - protein, 74 aa, Homo sapiens
RPPTTTKFAAASTRGVFLTPLLAMSSHKTFRIKRFLAKKQKQNRPIPQWIRMKTGNKIRYNSKRRHWRRTKLGL

SEQ ID NO: 832062 - protein, 67 aa, Homo sapiens; identical to SEQ ID NO: 832053

SEQ ID NO: 832063 - protein, 74 aa, Homo sapiens; identical to SEQ ID NO: 832046

SEQ ID NO: 832064 - protein, 88 aa, Homo sapiens; identical to SEQ ID NO: 832050

SEQ ID NO: 832065 - protein, 123 aa, Homo sapiens; identical to SEQ ID NO: 832056
  misc_feature (12)..(12): Xaa can be any naturally occurring amino acid

SEQ ID NO: 832066 - protein, 98 aa, Homo sapiens
PGRCRVGQGFRFPFACSELVLEAGGGRWQPPPKSWPDCGLPVACATWRSSHKTFRIKRFLAKKQKQNRPIPQWIRMKTGNKIRYNSKRRHWRRTKLGL

SEQ ID NO: 832067 - protein, 88 aa, Homo sapiens; identical to SEQ ID NO: 832050

SEQ ID NO: 832068 - protein, 88 aa, Homo sapiens; identical to SEQ ID NO: 832050

SEQ ID NO: 832069 - protein, 70 aa, Homo sapiens; identical to SEQ ID NO: 832048

SEQ ID NO: 832070 - protein, 109 aa, Homo sapiens
  misc_feature (12)..(12): Xaa can be any naturally occurring amino acid
HPSQKASSSREXVSKKQEAEGPGIQKSRVKSVRQPRRRTTRAHCRRPQSSPPEPLPSSFLRHRGVFLTPLLAMSSHKTFRIKRFLAKKQKQNRPIPQWIRMKTGNKISS

SEQ ID NO: 832071 - protein, 238 aa, Homo sapiens; identical to SEQ ID NO: 768096

SEQ ID NO: 832072 - protein, 238 aa, Homo sapiens; identical to SEQ ID NO: 768096

SEQ ID NO: 832073 - protein, 103 aa, Homo sapiens
TACSAWALPRGSGEEAVAVSGPGPVGVLLPSWLTPTPGTLAPRSRTTSTMAAAWPPPPCTSEWVRCPLSSASQPLVCTARPLEADFRLPRESGHLLGLTGSAH

SEQ ID NO: 832074 - protein, 194 aa, Homo sapiens
MADPDPRYPRSSIEDDFNYGSSVASATVHIRMAFLRKVYSILSLQVLLTTVTSTVFLYFESVRTFVHESPALILLFALGSLGLIFALILNRHKYPLNLYLLFGFTLLEALTVAVVVTFYDVYIILQAFILTTTVFFGLTVYTLQSKKDFSKFGAGLFALLWILCLSGFLKVSYVIMVNLKYNSGCVNINNLKKL

SEQ ID NO: 832075 - protein, 238 aa, Homo sapiens; identical to SEQ ID NO: 768096

SEQ ID NO: 832076 - protein, 113 aa, Homo sapiens
MADPDPRYPRSSIEDDFNYGSSVASATVHIRMGTLSPLQCLPAACLHCSASRSRLPASEGERPSPGTHRECSLSSRPSFSGYQAQKACGCPVCAPAPQRAPRCRKGQMETAAA

SEQ ID NO: 832077 - protein, 256 aa, Homo sapiens
TACSAWALPRGSGEEAVAVSGPGPVGVLLPSWLTPTPGTLAPRSRTTSTMAAAWPPPPCTSEWVLLTTVTSTVFLYFESVRTFVHESPALILLFALGSLGLIFALILNRHKYPLNLYLLFGFTLLEALTVAVVVTFYDVYIILQAFILTTTVFFGLTVYTLQSKKDFSKFGAGLFALLWILCLSGFLKFFFYSEIMELVLAAAGALLFCGFIIYDTHSLMHKLSPEEYVLAAISLYLDIINLFLHLLRFLEAVNKK

SEQ ID NO: 832078 - protein, 118 aa, Homo sapiens
MQGRGLSLSRFSWVGDERTSIGFLFRPSPHSPATFVFCSVSVASWPPFLSSRDLSAHSWDRAALSSTGEMKRGLPFRKVWSLASVPGTQPCKARSSSPRGFPGDVTGLPPREGATPRP

SEQ ID NO: 832079 - protein, 168 aa, Homo sapiens
PGFGYGGRASDYKSAHKGFKGVDAQGHRDTGILDSIGRFFGGDRGAPKRGSGKDSHHPARTAHYGSLPQKSHGRTQDENPVVHFFKNIVTPRTPPPSQGKGAEEPGDQDLATEAERPTINRLTRDSRESMPRARFPKFLSWEEEIVALDHPWLDAENPPGSGILSSAS

SEQ ID NO: 832080 - protein, 179 aa, Homo sapiens
PGFGYGGRASDYKSAHKGFKGVDAQGHRDTGILDSIGRFFGGDRGAPKRGSGKDSHHPARTAHYGSLPQKSHGRTQDENPVVHFFKNIVTPRTPPPSQGKGRGLSLSRFSWGAEEPGDQDLATEAERPTINRLTRDSRESMPRARFPKFLSWEEEIVALDHPWLDAENPPGSGILSSAS

SEQ ID NO: 832081 - protein, 179 aa, Homo sapiens; identical to SEQ ID NO: 832080

SEQ ID NO: 832082 - protein, 179 aa, Homo sapiens; identical to SEQ ID NO: 832080

SEQ ID NO: 832083 - protein, 179 aa, Homo sapiens; identical to SEQ ID NO: 832080

SEQ ID NO: 832084 - protein, 179 aa, Homo sapiens; identical to SEQ ID NO: 832080

SEQ ID NO: 832085 - protein, 179 aa, Homo sapiens; identical to SEQ ID NO: 832080

SEQ ID NO: 832086 - protein, 179 aa, Homo sapiens; identical to SEQ ID NO: 832080

SEQ ID NO: 832087 - protein, 179 aa, Homo sapiens; identical to SEQ ID NO: 832080

SEQ ID NO: 832088 - protein, 179 aa, Homo sapiens; identical to SEQ ID NO: 832080

SEQ ID NO: 832089 - protein, 179 aa, Homo sapiens; identical to SEQ ID NO: 832080

SEQ ID NO: 832090 - protein, 179 aa, Homo sapiens; identical to SEQ ID NO: 832080

SEQ ID NO: 832091 - protein, 179 aa, Homo sapiens; identical to SEQ ID NO: 832080

SEQ ID NO: 832092 - protein, 179 aa, Homo sapiens; identical to SEQ ID NO: 832080

SEQ ID NO: 832093 - protein, 179 aa, Homo sapiens; identical to SEQ ID NO: 832080

SEQ ID NO: 832094 - protein, 179 aa, Homo sapiens; identical to SEQ ID NO: 832080

SEQ ID NO: 832095 - protein, 179 aa, Homo sapiens; identical to SEQ ID NO: 832080

SEQ ID NO: 832096 - protein, 114 aa, Homo sapiens
MSVYESKLYYLVIPLICIQSLRSFFIQKQMWIKMYYKKKKLCYGVQSLGVVSAVDVSGEPVAAGSSKRWSLSAIQIADAVFYVMFRVFGGCVILERKKFFPKKSLVYWVFSHNL

SEQ ID NO: 832097 - protein, 179 aa, Homo sapiens; identical to SEQ ID NO: 832080

SEQ ID NO: 832098 - protein, 179 aa, Homo sapiens; identical to SEQ ID NO: 832080

SEQ ID NO: 832099 - protein, 84 aa, Homo sapiens
MALNDHFVKLISWYDNEFGYSNRVVDLMAHMASKEEDPWTTSPSKSTRGRERPSLLGSPCHTQSPTTLNLPSSQLPCRPLEEGR

SEQ ID NO: 832100 - protein, 216 aa, Homo sapiens
PGFGYGGRASDYKSAHKGFKGVDAQGHRDTGILDSIGRFFGGDRGAPKRGSGKDSHHPARTAHYGSLPQKSHGRTQDENPVVHFFKNIVTPRTPPPSQGKGRGLSLSRFSWVGDERTSIGFLFRPSPHSPATFVFCSVSVASWPPFLSSRDLSAHSWDRAALSSTGEMKRGLPFRKVWSLASVPGTQPCKARSSSPRGFPGDVTGLPPREGATPRP

SEQ ID NO: 832101 - protein, 72 aa, Homo sapiens
TPFSVVAAPWLLNHSPVQSGAWALPRGPGGSSQWLKQRAQHRGWRLSSVVFSCRGPKSQETRIWLRRQSVRL

SEQ ID NO: 832102 - protein, 179 aa, Homo sapiens; identical to SEQ ID NO: 832080

SEQ ID NO: 832103 - protein, 82 aa, Homo sapiens
PGFGYGGRASDYKSAHKGFKGVDAQGHRDTGILDSIGRFFGGDRGAPKRGSGKDSHHPARTAHYGSLPQKSHGRTQDENVRL

SEQ ID NO: 832104 - protein, 120 aa, Homo sapiens
PGFGYGGRASDYKSAHKGFKGVDAQGHRDTGILDSIGRFFGGDRGAPKRGSGKDSHHPARTAHYGSLPQKSHGRTQDENPVVHFFKNIRADDPSPNACGVVHVVGVRPRQPTGNFRPTVK

SEQ ID NO: 832105 - protein, 179 aa, Homo sapiens; identical to SEQ ID NO: 832080

SEQ ID NO: 832106 - protein, 179 aa, Homo sapiens; identical to SEQ ID NO: 832080

SEQ ID NO: 832107 - protein, 179 aa, Homo sapiens; identical to SEQ ID NO: 832080

SEQ ID NO: 832108 - protein, 179 aa, Homo sapiens; identical to SEQ ID NO: 832080

SEQ ID NO: 832109 - protein, 179 aa, Homo sapiens; identical to SEQ ID NO: 832080

SEQ ID NO: 832110 - protein, 114 aa, Homo sapiens; identical to SEQ ID NO: 832096

SEQ ID NO: 832111 - protein, 179 aa, Homo sapiens; identical to SEQ ID NO: 832080

SEQ ID NO: 832112 - protein, 179 aa, Homo sapiens; identical to SEQ ID NO: 832080

SEQ ID NO: 832113 - protein, 179 aa, Homo sapiens; identical to SEQ ID NO: 832080

SEQ ID NO: 832114 - protein, 75 aa, Homo sapiens
PGFGYGGRASDYKSAHKGFKGVDAQGHRDTGILDSIGRFFGGDRGAPKRGSGKKVSSEEERSFSLNGKSKGEISR

SEQ ID NO: 832115 - protein, 33 aa, Homo sapiens
MGRGSNCEGEEGCWPLLSSTQDVRTLGGGTGVI

SEQ ID NO: 832116 - protein, 198 aa, Homo sapiens
IRWEGTSGTLDRMLIFWTITLFLLGAAKGKEVCYEDLGCFSDTEPWGGTAIRPLKILPWSPEKIGTRFLLYTNENPNNFQILLLSDPSTIEASNFQMDRKTRFIIHGFIDKGDESWVTDMCKVGASSDPCGQLRPTLLLTSLHHFMHSRNLYILGNFMQLKCFSSQKLKCLSMFPHYICTLKQPHLLLEKYSYYLISG

SEQ ID NO: 832117 - protein, 467 aa, Homo sapiens
MLIFWTITLFLLGAAKGKEVCYEDLGCFSDTEPWGGTAIRPLKILPWSPEKIGTRFLLYTNENPNNFQILLLSDPSTIEASNFQMDRKTRFIIHGFIDKGDESWVTDMCKKLFEVEEVNCICVDWKKGSQATYTQAANNVRVVGAQVAQMLDILLTEYSYPPSKVHLIGHSLGAHVAGEAGSKTPGLSRITGLDPVEASFESTPEEVRLDPSDADFVDVIHTDAAPLIPFLGFGTNQQMGHLDFFPNGGESMPGCKKNALSQIVDLDGIWAGTRDFVACNHLRSYKYYLESILNPDGFAAYPCTSYKSFESDKCFPCPDQGCPQMGHYADKFAGRTSEEQQKFFLNTGEASNFARWRYGVSITLSGRTATGQIKVALFGNKGNTHQYSIFRGILKPGSTHSYEFDAKLDVGTIEKVKFLWNNNVINPTLPKVGATKITVQKGEEKTVYNFCSEDTVREDTLLTLTPC

SEQ ID NO: 832118 - protein, 358 aa, Homo sapiens
MKLFEVEEVNCICVDWKKGSQATYTQAANNVRVVGAQVAQMLDILLTEYSYPPSKVHLIGHSLGAHVAGEAGSKTPGLSRITGLDPVEASFESTPEEVRLDPSDADFVDVIHTDAAPLIPFLGFGTNQQMGHLDFFPNGGESMPGCKKNALSQIVDLDGIWAGTRDFVACNHLRSYKYYLESILNPDGFAAYPCTSYKSFESDKCFPCPDQGCPQMGHYADKFAGRTSEEQQKFFLNTGEASNFARWRYGVSITLSGRTATGQIKVALFGNKGNTHQYSIFRGILKPGSTHSYEFDAKLDVGTIEKVKFLWNNNVINPTLPKVGATKITVQKGEEKTVYNFCSEDTVREDTLLTLTPC

SEQ ID NO: 832119 - protein, 479 aa, Homo sapiens
IRWEGTSGTLDRMLIFWTITLFLLGAAKGKEVCYEDLGCFSDTEPWGGTAIRPLKILPWSPEKIGTRFLLYTNENPNNFQILLLSDPSTIEASNFQMDRKTRFIIHGFIDKGDESWVTDMCKKLFEVEEVNCICVDWKKGSQATYTQAANNVRVVGAQVAQMLDILLTEYSYPPSKVHLIGHSLGAHVAGEAGSKTPGLSRITGLDPVEASFESTPEEVRLDPSDADFVDVIHTDAAPLIPFLGFGTNQQMGHLDFFPNGGESMPGCKKNALSQIVDLDGIWAGTRDFVACNHLRSYKYYLESILNPDGFAAYPCTSYKSFESDKCFPCPDQGCPQMGHYADKFAGRTSEEQQKFFLNTGEASNFARWRYGVSITLSGRTATGQIKVALFGNKGNTHQYSIFRGILKPGSTHSYEFDAKLDVGTIEKVKFLWNNNVINPTLPKVGATKITVQKGEEKTVYNFCSEDTVREDTLLTLTPC

SEQ ID NO: 832120 - protein, 812 aa, Homo sapiens
MAVRALKLLTTLLAVVAAASQAEVESEAGWGMVTPDLLFAEGTAAYARGDWPGVVLSMERALRSRAALRALRLRCRTQCAADFPWELDPDWSPSPAQASGAAALRDLSFFGGLLRRAACLRRCLGPPAAHSLSEEMELEFRKRSPYNYLQVAYFKINKLEKAVAAAHTFFVGNPEHMEMQQNLDYYQTMSGVKEADFKDLETQPHMQEFRLGVRLYSEEQPQEAVPHLEAALQEYFVAYEECRALCEGPYDYDGYNYLEYNADLFQAITDHYIQVLNCKQNCVTELASHPSREKPFEDFLPSHYNYLQFAYYNIGNYTQAVECAKTYLLFFPNDEVMNQNLAYYAAMLGEEHTRSIGPREQGTWERCDPGKYSVSLPWSAKEYRQRSLLEKELLFFAYDVFGIPFVDPDSWTPEEVIPKRLQEKQKEDLEETAWLDQSDEALEASCSPGRCELLARGGQVQFGKSGWSPGLALECSPQSGCAHRSERETAVRISQEIGNLMKEIETLVEEKTKESLDVSRLTREGGPLLYEGISLTMNSKLLNGSQRVVMDGVISDHECQELQRLTNVAATSGDGYRGQTSPHTPNEKFYGVTVFKALKLGQEGKVPLQSAHLYYNVTEKVRRIMESYFRLDTPLYFSYSHLVCRTAIEEVQAERKDDSHPVHVDNCILNAETLVCVKEPPAYTFRDYSAILYLNGDFDGGNFYFTELDAKTVTAEVQPQCGRAVGFSSGTENPHGVKAVTRGQRCAIALWFTLDPRHSERDRVQADDLVKMLFSPEEMDLSQEQPLDAQQGPPEPAQESLSGSESKPKDEL

SEQ ID NO: 832121 - protein, 804 aa, Homo sapiens
MAVRALKLLTTLLAVVAAASQAEVESEAGWGMVTPDLLFAEGTAAYARGDWPGVVLSMERALRSRAALRALRLRCRTQCAADFPWELDPDWSPSPAQASGAAALRDLSFFGGLLRRAACLRRCLGPPAAHSLSEEMELEFRKRSPYNYLQVAYFKINKLEKAVAAAHTFFVGNPEHMEMQQNLDYYQTMSGVKEADFKDLETQPHMQEFRLGVRLYSEEQPQEAVPHLEAALQEYFVAYEECRALCEGPYDYDGYNYLEYNADLFQAITDHYIQVLNCKQNCVTELASHPSREKPFEDFLPSHYNYLQFAYYNIGNYTQAVECAKTYLLFFPNDEVMNQNLAYYAAMLGEEHTRSIGPRESAKEYRQRSLLEKELLFFAYDVFGIPFVDPDSWTPEEVIPKRLQEKQKSERETAVRISQEIGNLMKEIETLVEEKTKESLDVSRLTREGGPLLYEGISLTMNSKLLNGSQRVVMDGVISDHECQELQRLTNVAATSGDGYRGQTSPHTPNEKFYGVTVFKALKLGQEGKVPLQSAHLYYNVTEKVRRIMESYFRLDTPLYFSYSHLVCRTAIEEVQAERKDDSHPVHVDNCILNAETLVCVKEPPAYTFRDYSAILYLNGDFDGGNFYFTELDAKTVTAEVQPQCGRAVGFSSGTENPHGVKAVTRGQRCAIALWFTLDPRHSERVRAARAGESSWCCGDPFPERPWFAFLFPKSHCQWLRHERSTWDTSSNALSLWSHCLVLPGPAVNGIQVGKEVKTGSDAEFLVPSLGPTSAVLFQRVGPAGKEMSLGPLRNLPCPLGSSS

SEQ ID NO: 832122 - protein, 411 aa, Homo sapiens
DAWVDPRVREVMNQNLAYYAAMLGEEHTRSIGPRESAKEYRQRSLLEKELLFFAYDVFGIPFVDPDSWTPEEVIPKRLQEKQKSERETAVRISQEIGNLMKEIETLVEEKTKESLDVSRLTREGGPLLYEGISLTMNSKLLNGSQRVVMDGVISDHECQELQRLTNVAATSGDGYRGQTSPHTPNEKFYGVTVFKALKLGQEGKVPLQSAHLYYNVTEKVRRIMESYFRLDTPLYFSYSHLVCRTAIEEVQAERKDDSHPVHVDNCILNAETLVCVKEPPAYTFRDYSAILYLNGDFDGGNFYFTELDAKTVTAEVQPQCGRAVGFSSGTENPHGVKAVTRGQRCAIALWFTLDPRHSERDRVQADDLVKMLFSPEEMDLSQEQPLDAQQGPPEPAQESLSGSESKPKDEL

SEQ ID NO: 832123 - protein, 219 aa, Homo sapiens
MAVRALKLLTTLLAVVAAASQAEVESEAGWGMVTPDLLFAEGTAAYARGDWPGVVLSMERALRSRAALRALRLRCRTQCAADFPWELDPDWSPSPAQASGAAALRDLSFFGGLLRRAACLRRCLGPPAAHSLSEEMELEFRKRSPYNYLQVAYFKINKLEKAVAAAHTFFVGNPEHMEMQQNLDYYQTMSGVKEADFKDLETQPHMVKKTLSPSFFLSF

SEQ ID NO: 832124 - protein, 706 aa, Homo sapiens
MAVRALKLLTTLLAVVAAASQAEVESEAGWGMVTPDLLFAEGTAAYARGDWPGVVLSMERALRSRAALRALRLRCRTQCAADFPWELDPDWSPSPAQASGAAALRDLSFFGGLLRRAACLRRCLGPPAAHSLSEEMELEFRKRSPYNYLQVAYFKINKLEKAVAAAHTFFVGNPEHMEMQQNLDYYQTMSGVKEADFKDLETQPHMQEFRLGVRLYSEEQPQEAVPHLEAALQEYFVAYEECRALCEGPYDYDGYNYLEYNADLFQAITDHYIQVLNCKQNCVTELASHPSREKPFEDFLPSHYNYLQFAYYNIGNYTQAVECAKTYLLFFPNDEVMNQNLAYYAAMLGEEHTRSIGPREDSWTPEEVIPKRLQEKQKSERETAVRISQEIGNLMKEIETLVEEKTKESLDVSRLTREGGPLLYEGISLTMNSKLLNGSQRVVMDGVISDHECQELQRLTNVAATSGDGYRGQTSPHTPNEKFYGVTVFKALKLGQEGKVPLQSAHLYYNVTEKVRRIMESYFRLDTPLYFSYSHLVCRTAIEEVQAERKDDSHPVHVDNCILNAETLVCVKEPPAYTFRDYSAILYLNGDFDGGNFYFTELDAKTVTAEVQPQCGRAVGFSSGTENPHGVKAVTRGQRCAIALWFTLDPRHSERDRVQADDLVKMLFSPEEMDLSQEQPLDAQQGPPEPAQESLSGSESKPKDEL

SEQ ID NO: 832125 - protein, 701 aa, Homo sapiens
AGLGIRTSAAYARGDWPGVVLSMERALRSRAALRALRLRCRTQCAADFPWELDPDWSPSPAQASGAAALRDLSFFGGLLRRAACLRRCLGPPAAHSLSEEMELEFRKRSPYNYLQVAYFKINKLEKAVAAAHTFFVGNPEHMEMQQNLDYYQTMSGVKEADFKDLETQPHMQEFRLGVRLYSEEQPQEAVPHLEAALQEYFVAYEECRALCEGPYDYDGYNYLEYNADLFQAITDHYIQVLNCKQNCVTELASHPSREKPFEDFLPSHYNYLQFAYYNIGNYTQAVECAKTYLLFFPNDEVMNQNLAYYAAMLGEEHTRSIGPRESAKEYRQRSLLEKELLFFAYDVFGIPFVDPDSWTPEEVIPKRLQEKQKSERETAVRISQEIGNLMKEIETLVEEKTKESLDVSRLTREGGPLLYEGISLTMNSKLLNGSQRVVMDGVISDHECQELQRLTNVAATSGDGYRGQTSPHTPNEKFYGVTVFKALKLGQEGKVPLQSAHLYYNVTEKVRRIMESYFRLDTPLYFSYSHLVCRTAIEEVQAERKDDSHPVHVDNCILNAETLVCVKEPPAYTFRDYSAILYLNGDFDGGNFYFTELDAKTVTAEVQPQCGRAVGFSSGTENPHGVKAVTRGQRCAIALWFTLDPRHSERDRVQADDLVKMLFSPEEMDLSQEQPLDAQQGPPEPAQESLSGSESKPKDEL

SEQ ID NO: 832126 - protein, 720 aa, Homo sapiens
PGGGPSPGVGLRPWWRVAGGSVRSEGAMAVRALKLLTTLLAVVAAASQAEVESEAGWGMVTPDLLFAEGTAAYARGDWPGVVLSMERALRSRAALRALRLRCRTQCAADFPWELDPDWSPSPAQASGAAALRDLSFFGGLLRRAACLRRCLGPPAAHSLSEEMELEFRKRSPYNYLQVAYFKDLETQPHMQEFRLGVRLYSEEQPQEAVPHLEAALQEYFVAYEECRALCEGPYDYDGYNYLEYNADLFQAITDHYIQVLNCKQNCVTELASHPSREKPFEDFLPSHYNYLQFAYYNIGNYTQAVECAKTYLLFFPNDEVMNQNLAYYAAMLGEEHTRSIGPRESAKEYRQRSLLEKELLFFAYDVFGIPFVDPDSWTPEEVIPKRLQEKQKSERETAVRISQEIGNLMKEIETLVEEKTKESLDVSRLTREGGPLLYEGISLTMNSKLLNGSQRVVMDGVISDHECQELQRLTNVAATSGDGYRGQTSPHTPNEKFYGVTVFKALKLGQEGKVPLQSAHLYYNVTEKVRRIMESYFRLDTPLYFSYSHLVCRTAIEEVQAERKDDSHPVHVDNCILNAETLVCVKEPPAYTFRDYSAILYLNGDFDGGNFYFTELDAKTVTAEVQPQCGRAVGFSSGTENPHGVKAVTRGQRCAIALWFTLDPRHSERDRVQADDLVKMLFSPEEMDLSQEQPLDAQQGPPEPAQESLSGSESKPKDEL

SEQ ID NO: 832127 - protein, 804 aa, Homo sapiens; identical to SEQ ID NO: 832121

SEQ ID NO: 832128 - protein, 736 aa, Homo sapiens
MAVRALKLLTTLLAVVAAASQAEVESEAGWGMVTPDLLFAEGTAAYARGDWPGVVLSMERALRSRAALRALRLRCRTQCAADFPWELDPDWSPSPAQASGAAALRDLSFFGGLLRRAACLRRCLGPPAAHSLSEEMELEFRKRSPYNYLQVAYFKINKLEKAVAAAHTFFVGNPEHMEMQQNLDYYQTMSGVKEADFKDLETQPHMQEFRLGVRLYSEEQPQEAVPHLEAALQEYFVAYEECRALCEGPYDYDGYNYLEYNADLFQAITDHYIQVLNCKQNCVTELASHPSREKPFEDFLPSHYNYLQFAYYNIGNYTQAVECAKTYLLFFPNDEVMNQNLAYYAAMLGEEHTRSIGPRESAKEYRQRSLLEKELLFFAYDVFGIPFVDPDSWTPEEVIPKRLQEKQKSERETAVRISQEIGNLMKEIETLVEEKTKESLDVSRLTREGGPLLYEGISLTMNSKLLNGSQRVVMDGVISDHECQELQRLTNVAATSGDGYRGQTSPHTPNEKFYGVTVFKALKLGQEGKVPLQSAHLYYNVTEKVRRIMESYFRLDTPLYFSYSHLVCRTAIEEVQAERKDDSHPVHVDNCILNAETLVCVKEPPAYTFRDYSAILYLNGDFDGGNFYFTELDAKTVTAEVQPQCGRAVGFSSGTENPHGVKAVTRGQRCAIALWFTLDPRHSERDRVQADDLVKMLFSPEEMDLSQEQPLDAQQGPPEPAQESLSGSESKPKDEL

SEQ ID NO: 832129 - protein, 736 aa, Homo sapiens; identical to SEQ ID NO: 832128

SEQ ID NO: 832130 - protein, 722 aa, Homo sapiens
PGGGPSPGVGLRPWWRVAGGSVRSEGAMAVRALKLLTTLLAVVAAASQAEVESEAGWGMVTPDLLFAEGTAAYARGDWPGVVLSMERALRSRAALRALRLRCRTQCAADFPWELDPDWSPSPAQASGAAALRDLSFFGGLLRRAACLRRCLGPPAAHSLSEEMELEFRKRSPYNYLQVAYFKINKLEKAVAAAHTFFVGNPEHMEMQQNLDYYQTMSGVKEADFKDLETQPHMQEFRLGVRLYSEEQPQEAVPHLEAALQEYFVAYEECRALCEGPYDYDGYNYLEYNADLFQAITDHYIQVLNCKQNCVTELASHPSREKPFEDFLPSHYNYLQFAYYNIGNYTQAVECAKTYLLFFPNDEVMNQNLAYYAAMLGEEHTRSIGPRESAKEYRQRSLLEKELLFFAYDVFGIPFVDPDSWTPEEVIPKRLQEKQKSERETAVRISQEIGNLMKEIETLVEEKTKESLDVSRLTREGGPLLYEGISLTMNSKLLNGSQRVVMDGVISDHECQELQRLTNVAATSGDGYRGQTSPHTPNEKFYGVTVFKALKLGQEGKVPLQSAHLYYNVTEKVRRIMESYFRLDTPLYFSYSHLVCRTAIEEVQAERKDDSHPVHVDNCILNAETLVCVKEPPAYTFRDYSAILYLNGDFDGGNFYFTELDAKTVTAEVQPQCGRAVGFSSGTENPHGVKAVTREQPLDAQQGPPEPAQESLSGSESKPKDEL

SEQ ID NO: 832131 - protein, 559 aa, Homo sapiens
MAVRALKLLTTLLAVVAAASQAEVESEAGWGMVTPDLLFAEGTAAYARGDWPGVVLSMERALRSRAALRALRLRCRTQCAADFPWELDPDWSPSPAQASGAAALRDLSFFGGLLRRAACLRRCLGPPAAHSLSEEMELEFRKRSPYNYLQVAYFKINKLEKAVAAAHTFFVGNPEHMEMQQNLDYYQTMSGVKEADFKDLETQPHMQEFRLGVRLYSEEQPQEAVPHLEAALQEYFVAYEECRALCEGPYDYDGYNYLEYNADLFQAITDHYIQVLNCKQNCVTELASHPSREKPFEDFLPSHYNYLQFAYYNIGNYTQAVECAKTYLLFFPNDEVMNQNLAYYAAMLGEEHTRSIGPRESAKEYRQRSLLEKELLFFAYDVFGIPFVDPDSWTPEEVIPKRLQEKQKSERETAVRISQEIGNLMKEIETLVEEKTKESLDVSRLTREGGPLLYEGISLTMNSKLLNGSQRVVMDGVISDHECQELQRLTNVAATSGDGYRGQTSPHTPNEKFYGVTVFKALKLGQEGKVPLQSAHLYYNVTEKVRRIMESYFRLAGSG

SEQ ID NO: 832132 - protein, 504 aa, Homo sapiens
  misc_feature (491)..(491): Xaa can be any naturally occurring amino acid
MAVRALKLLTTLLAVVAAASQAEVESEAGWGMVTPDLLFAEGTAAYARGDWPGVVLSMERALRSRAALRALRLRCRTQCAADFPWELDPDWSPSPAQASGAAALRDLSFFGGLLRRAACLRRCLGPPAAHSLSEEMELEFRKRSPYNYLQVAYFKINKLEKAVAAAHTFFVGNPEHMEMQQNLDYYQTMSGVKEADFKDLETQPHMQEFRLGVRLYSEEQPQEAVPHLEAALQEYFVAYEECRALCEGPYDYDGYNYLEYNADLFQAITDHYIQVLNCKQNCVTELASHPSREKPFEDFLPSHYNYLQFAYYNIGNYTQAVECAKTYLLFFPNDEVMNQNLAYYAAMLGEEHTRSIGPRESAKEYRQRSLLEKELLFFAYDVFGIPFVDPDSWTPEEVIPKRLQEKQKSERETAVRISQEIGNLMKEIETLVEEKTKESLDVSRLTREGGPLLYEGISLTMNSKLLNGSQRVVMDGVISDPGSHLLRLLPXLVSLQLVHLVSST

SEQ ID NO: 832133 - protein, 206 aa, Homo sapiens
DTPLVHWAFRRLKHILGSTSPAKKKSYAVSRGAPLLTCVTLAPEVQAERKDDSHPVHVDNCILNAETLVCVKEPPAYTFRDYSAILYLNGDFDGGNFYFTELDAKTVTAEVQPQCGRAVGFSSGTENPHGVKAVTRGQRCAIALWFTLDPRHSERDRVQADDLVKMLFSPEEMDLSQEQPLDAQQGPPEPAQESLSGSESKPKDEL

SEQ ID NO: 832134 - protein, 736 aa, Homo sapiens; identical to SEQ ID NO: 832128

SEQ ID NO: 832135 - protein, 270 aa, Homo sapiens [sequence omitted]

SEQ ID NO: 832136 - protein, 736 aa, Homo sapiens; identical to SEQ ID NO: 832128

SEQ ID NO: 832137 - protein, 794 aa, Homo sapiens
MAVRALKLLTTLLAVVAAASQAEVESEAGWGMVTPDLLFAEGTAAYARGDWPGVVLSMERALRSRAALRALRLRCRTQCAADFPWELDPDWSPSPAQASGAAALRDLSFFGGLLRRAACLRRCLGPPAAHSLSEEMELEFRKRSPYNYLQVAYFKINKLEKAVAAAHTFFVGNPEHMEMQQNLDYYQTMSGVKEADFKDLETQPHMQEFRLGVRLYSEEQPQEAVPHLEAALQEYFVAYEECRALCEGPYDYDGYNYLEYNADLFQAITDHYIQVLNCKQNCVTELASHPSREKPFEDFLPSHYNYLQFAYYNIGNYTQAVECAKTYLLFFPNDEVMNQNLAYYAAMLGEEHTRSIGPRESAKEYRQRSLLEKELLFFAYDVFGIPFVDPDSWTPEEVIPKRLQEKQKLRTLKKLHGWISLMKHLRLLSPGRCELLARGGQVQFGKSGWSPGLALECSPQSGCAHRSERETAVRISQEIGNLMKEIETLVEEKTKESLDVSRLTREGGPLLYEGISLTMNSKLLNGSQRVVMDGVISDHECQELQRLTNVAATSGDGYRGQTSPHTPNEKFYGVTVFKALKLGQEGKVPLQSAHLYYNVTEKVRRIMESYFRLDTPLYFSYSHLVCRTAIEEVQAERKDDSHPVHVDNCILNAETLVCVKEPPAYTFRDYSAILYLNGDFDGGNFYFTELDAKTVTAEVQPQCGRAVGFSSGTENPHGVKAVTRGQRCAIALWFTLDPRHSERDRVQADDLVKMLFSPEEMDLSQEQPLDAQQGPPEPAQESLSGSESKPKDEL

SEQ ID NO: 832138 - protein, 742 aa, Homo sapiens
MLGVRSSLRRGTRVTVTLLAVVAAASQAEVESEAGWGMVTPDLLFAEGTAAYARGDWPGVVLSMERALRSRAALRALRLRCRTQCAADFPWELDPDWSPSPAQASGAAALRDLSFFGGLLRRAACLRRCLGPPAAHSLSEEMELEFRKRSPYNYLQVAYFKINKLEKAVAAAHTFFVGNPEHMEMQQNLDYYQTMSGVKEADFKDLETQPHMQEFRLGVRLYSEEQPQEAVPHLEAALQEYFVAYEECRALCEGPYDYDGYNYLEYNADLFQAITDHYIQVLNCKQNCVTELASHPSREKPFEDFLPSHYNYLQFAYYNIGNYTQAVECAKTYLLFFPNDEVMNQNLAYYAAMLGEEHTRSIGPRESAKEYRQRSLLEKELLFFAYDVFGIPFVDPDSWTPEEVIPKRLQEKQKSERETAVRISQEIGNLMKEIETLVEEKTKESLDVSRLTREGGPLLYEGISLTMNSKLLNGSQRVVMDGVISDHECQELQRLTNVAATSGDGYRGQTSPHTPNEKFYGVTVFKALKLGQEGKVPLQSAHLYYNVTEKVRRIMESYFRLDTPLYFSYSHLVCRTAIEEVQAERKDDSHPVHVDNCILNAETLVCVKEPPAYTFRDYSAILYLNGDFDGGNFYFTELDAKTVTAEVQPQCGRAVGFSSGTENPHGVKAVTRGQRCAIALWFTLDPRHSERDRVQADDLVKMLFSPEEMDLSQEQPLDAQQGPPEPAQESLSGSESKPKDEL

SEQ ID NO: 832139 - protein, 697 aa, Homo sapiens
MAVRALKLLTTLLAVVAAASQAEVESEAGWGMVTPDLLFAEGTAAYARGDWPGVVLSMERALRSRAALRALRLRCRTQCAADFPWELDPDWSPSPAQASGAAALRDLSFFGGLLRRAACLRRCLGPPAAHSLSEEMELEFRKRSPYNYLQVAYFKINKLEKAVAAAHTFFVGNPEHMEMQQNLDYYQTMSGVKEADFKDLETQPHMQEFRLGVRLYSEEQPQEAVPHLEAALQEYFVAYEECRALCEGPYDYDGYNYLEYNADLFQAITDHYIQVLNCKQNCVTELASHPSREKPFEDFLPSHYNYLQFAYYNIGNYTQAVECAKTYLLFFPNDEVMNQNLAYYAAMLGEEHTRSIGPRESAKEYRQRSLLEKELLFFAYDVFGIPFVDPDSWTPEEVIPKRLQEKQKSERETAVRISQEIGNLMKEIETLVEEKTKESLDVSRLTREGGPLLYEGISLTMNSKLLNGSQRVVMDGVISDHECQELQRLTNVAATSGDGYRGQTSPHTPNEKFYGVTVFKALKLGQEGKVPLQSAHLYYNVTEKVRRIMESYFRLDTPLYFSYSHLVCRTAIEEVQAERKDDSHPVHVDNCILNAETLVCVKEPPAYTFRDYSAILYLNGDFDGGNFYFTELDAKTVTAEVQPQCGRAVGFSSGTENPHGVKAVTRGQRCAIALWFTLDPRHSERVRAARAGQGAGR

SEQ ID NO: 832140 - protein, 769 aa, Homo sapiens
MAVRALKLLTTLLAVVAAASQAEVESEAGWGMVTPDLLFAEGTAAYARGDWPGVVLSMERALRSRAALRALRLRCRTQCAADFPWELDPDWSPSPAQASGAAALRDLSFFGGLLRRAACLRRCLGPPAAHSLSEEMELEFRKRSPYNYLQVAYFKINKLEKAVAAAHTFFVGNPEHMEMQQNLDYYQTMSGVKEADFKDLETQPHMQEFRLGVRLYSEEQPQEAVPHLEAALQEYFVAYEECRALCEGPYDYDGYNYLEYNADLFQAITDHYIQVLNCKQNCVTELASHPSREKPFEDFLPSHYNYLQFAYYNIGNYTQAVECAKTYLLFFPNDEVMNQNLAYYAAMLGEEHTRSIGPRESAKEYRQRSLLEKELLFFAYDVFGIPFVDPDSWTPEEVIPKRLQEKQKSERETAVRISQEIGNLMKEIETLVEEKTKESLDVSRLTREGGPLLYEGISLTMNSKLLNGSQRVVMDGVISDHECQELQRLTNVAATSGDGYRGQTSPHTPNEKFYGVTVFKALKFHVAGEASQSWWKAKRSKSILHGWQQAKRELLQLGQEGKVPLQSAHLYYNVTEKVRRIMESYFRLDTPLYFSYSHLVCRTAIEEVQAERKDDSHPVHVDNCILNAETLVCVKEPPAYTFRDYSAILYLNGDFDGGNFYFTELDAKTVTAEVQPQCGRAVGFSSGTENPHGVKAVTRGQRCAIALWFTLDPRHSERDRVQADDLVKMLFSPEEMDLSQEQPLDAQQGPPEPAQESLSGSESKPKDEL

SEQ ID NO: 832141 - protein, 801 aa, Homo sapiens
MAVRALKLLTTLLAVVAAASQAEVESEAGWGMVTPDLLFAEGTAAYARGDWPGVVLSMERALRSRAALRALRLRCRTQCAADFPWELDPDWSPSPAQASGAAALRDLSFFGGLLRRAACLRRCLGPPAAHSLSEEMELEFRKRSPYNYLQVAYFKINKLEKAVAAAHTFFVGNPEHMEMQQNLDYYQTMSGVKEADFKDLETQPHMQEFRLGVRLYSEEQPQEAVPHLEAALQEYFVAYEECRALCEGPYDYDGYNYLEYNADLFQAITDHYIQVLNCKQNCVTELASHPSREKPFEDFLPSHYNYLQFAYYNIGNYTQAVECAKTYLLFFPNDEVMNQNLAYYAAMLGEEHTRSIGPRESAKEYRQRSLLEKELLFFAYDVFGIPFVDPDSWTPEEVIPKRLQEKQKSERETAVRISQEIGNLMKEIETLVEEKTKESLDVSRLTREGGPLLYEGISLTMNSKLLNGSQRVVMDGVISDHECQELQRLTNVAATSGDGYRGQTSPHTPNEKFYGVTVFKALKRGVVLVRFHTADKDVPETGQFTKERGLLGLTVPCGWGSLTIMVEGKEEQVTSYMDEQQAKRELLQLGQEGKVPLQSAHLYYNVTEKVRRIMESYFRLDTPLYFSYSHLVCRTAIEEVQAERKDDSHPVHVDNCILNAETLVCVKEPPAYTFRDYSAILYLNGDFDGGNFYFTELDAKTVTAEVQPQCGRAVGFSSGTENPHGVKAVTRGQRCAIALWFTLDPRHSERDRVQADDLVKMLFSPEEMDLSQEQPLDAQQGPPEPAQESLSGSESKPKDEL

SEQ ID NO: 832142 - protein, 697 aa, Homo sapiens; identical to SEQ ID NO: 832139

SEQ ID NO: 832143 - protein, 641 aa, Homo sapiens
MAVRALKLLTTLLAVVAAASQAEVESEAGWGMVTPDLLFAEGTAAYARGDWPGVVLSMERALRSRAALRALRLRCRTQCAADFPWELDPDWSPSPAQASGAAALRDLSFFGGLLRRAACLRRCLGPPAAHSLSEEMELEFRKRSPYNYLQVAYFKINKLEKAVAAAHTFFVGNPEHMEMQQNLDYYQTMSGVKEADFKDLETQPHMQEFRLGVRLYSEEQPQEAVPHLEAALQEYFVAYEECRALCEGPYDYDGYNYLEYNADLFQAITDHYIQVLNCKQNCVTELASHPSREKPFEDFLPSHYNYLQFAYYNIGNYTQAVECAKTYLLFFPNDEVMNQNLAYYAAMLGEEHTRSIGPRESAKEYRQRSLLEKELLFFAYDVFGIPFVDPDSWTPEEVIPKRLQEKQKSERETAVRISQEIGNLMKEIETLVEEKTKESLDVSRLTREGGPLLYEGISLTMNSKLLNGSQRVVMDGVISDHECQELQRLTNVAATSGDGYRGQTSPHTPNEKFYGVTVFKALKLGQEGKVPLQSAHLYYNVTEKVRRIMESYFRLDTPLYFSYSHLVCRTAIEEVQAERKDDSHPVHVDNCILNAETLVCVKEPPAYTFRDYSAILYLNGDFDDRSPRMSYDSVQVRRMGD

SEQ ID NO: 832144 - protein, 296 aa, Homo sapiens
MAVRALKLLTTLLAVVAAASQAEVESEAGWGMVTPDLLFAEGTAAYARGDWPGVVLSMERALRSRAALRALRLRCRTQCAADFPWELDPDWSPSPAQASGAAALRDLSFFGGLLRRAACLRRCLGPPAAHSLSEEMELEFRKRSPYNYLQVAYFKINKLEKAVAAAHTFFVGNPEHMEMQQNLDYYQTMSGVKEADFKDLETQPHMQEFRLGVRLYSEEQPQEAVPHLEAALQEYFVAYEECRALCEGPYDYDGYNYLEYNADLFQAITDHYIQVLNCKQNCVTELASHPSREKAL

SEQ ID NO: 832145 - protein, 296 aa, Homo sapiens; identical to SEQ ID NO: 832144

SEQ ID NO: 832146 - protein, 188 aa, Homo sapiens
GFAKPRKYAQLVVYSTLDVPHMPGEEVQAERKDDSHPVHVDNCILNAETLVCVKEPPAYTFRDYSAILYLNGDFDGGNFYFTELDAKTVTAEVQPQCGRAVGFSSGTENPHGVKAVTRGQRCAIALWFTLDPRHSERDRVQADDLVKMLFSPEEMDLSQEQPLDAQQGPPEPAQESLSGSESKPKDEL

SEQ ID NO: 832147 - protein, 234 aa, Homo sapiens
DAWVDPRVREVMNQNLAYYAAMLGEEHTRSIGPRESAKEYRQRSLLEKELLFFAYDVFGIPFVDPDSWTPEEVIPKRLQEKQKSERETAVRISQEIGNLMKEIETLVEEKTKESLDVSRLTREGGPLLYEGISLTMNSKLLNGSQRVVMDGVISDHECQELQRLTNVAATSGDGYRGQTSPHTPNEKFYGVTVFKALKLGQEGKVPLQSAHLYYNVTEKVRRIMESYFRLAGSG

SEQ ID NO: 832148 - protein, 348 aa, Homo sapiens [sequence omitted]

SEQ ID NO: 832149 - protein, 177 aa, Homo sapiens
MNGTEGPNFYVPFSNATGVVRSPFEYPQYYLAEPWQFSMLAAYMFLLIVLGFPINFLTLYVTVQHKKLRTPLNYILLNLAVADLFMVLGGFTSTLYTSLHGYFVFGPTGCNLEGFFATLGGEIALWSLVVLAIERYVVVCKPMSNFRFGENHAIMGVAFTWVMALACAAPPLAGWSR

SEQ ID NO: 832150 - protein, 150 aa, Homo sapiens
  misc_feature (12)..(12): Xaa can be any naturally occurring amino acid
  misc_feature (19)..(19): Xaa can be any naturally occurring amino acid
  misc_feature (21)..(21): Xaa can be any naturally occurring amino acid
  misc_feature (24)..(24): Xaa can be any naturally occurring amino acid
  misc_feature (28)..(28): Xaa can be any naturally occurring amino acid
NRAILDPPLTGXRFSTIGXSXHEXFLHXVSSPQGAAAQQQESATTQKAEKEVTRMVIIMVIAFLICWVPYASVAFYIFTHQGSNFGPIFMTIPAFFAKSAAIYNPVIYIMMNKQFRNCMLTTICCGKNPLGDDEASATVSKTETSQVAPA

SEQ ID NO: 832151 - protein, 1007 aa, Homo sapiens
TGSGPSRLRSRRHSSLPSCCPPQEASMASPTSTNPAHAHFESFLQAQLCQDVLSSFQELCGALGLEPGGGLPQYHKIKDQLNYWSAKSLWTKLDKRAGQPVYQQGRACTSTKCLVVGAGPCGLRVAVELALLGARVVLVEKRTKFSRHNVLHLWPFTIHDLRALGAKKFYGRFCTGTLDHISIRQLQLLLLKVALLLGVEIHWGVTFTGLQPPPRKGSGWRAQLQPNPPAQLANYEFDVLISAAGGKFVPEGFKVREMRGKLAIGITANFVNGRTVEETQVPEISGVARIYNQSFFQSLLKATGIDLENIVYYKDDTHYFVMTAKKQCLLRLGVLRQPFWPLGTGVARGFLAAFDAAWMVKRWAEGAESLEVLAERESLYQLLSQTSPENMHRNVAQYGLDPATRYPNLNLRAVTPNQVRDLYDVLAKEPVQRNNDKTDTGMPATGSAGTQEELLRWCQEQTAGYPGVHVSDLSSSWADGLALCALVYRLQPGLLEPSELQGLGALEATAWALKVAENELGITPVVSAQAVVAGSDPLGLIAYLSHFHSAFKSMAHSPGPVSQASPGTSSAVLFLSKLQRTLQRSRAKENAEDAGGKKLRLEMEAETPSTEVPPDPEPGVPLTPPSQHQEAGAGDLCALCGEHLYVLERLCVNGHFFHRSCFRCHTCEATLWPGGYEQHPGDGHFYCLQHLPQTDHKEEGSDRGPESPELPTPSENSMPPGLSTPTASQEGAGPVPDPSQPTRRQIRLSSPERQRLSSLNLTPDPEMEPPPKPPRSCSALARHALESSFVGWGLPVQSPQALVAMEKEEKESPFSSEEEEEDVPLDSDVEQALQTFAKTSGTMNNYPTWRRTLLRRAKEEEMKRFCKAQTIQRRLNEIEAALRELEAEGVKLELALRRQSSSPEQQKKLWVGQLLQLVDKKNSLVAEEAELMITVQELNLEEKQWQLDQELRGYMNREENLKTAADRQAEDQVLRKLVDLVNQRDALIRFQEERRLSELALGTGAQG

SEQ ID NO: 832152 - protein, 1067 aa, Homo sapiens [sequence omitted]

SEQ ID NO: 832153 - protein, 1100 aa, Homo sapiens
GCASGETQLRSLGNHAWQVHSSLPSCCPPQEASMASPTSTNPAHAHFESFLQAQLCQDVLSSFQELCGALGLEPGGGLPQYHKIKDQLNYWSAKSLWTKLDKRAGQPVYQQGRACTSTKCLVVGAGPCGLRVAVELALLGARVVLVEKRTKFSRHNVLHLWPFTIHDLRALGAKKFYGRFCTGTLDHISIRQLQLLLLKVALLLGVEIHWGVTFTGLQPPPRKGSGWRAQLQPNPPAQLANYEFDVLISAAGGKFVPEGFKVREMRGKLAIGITANFVNGRTVEETQVPEISGVARIYNQSFFQSLLKATGIDLENIVYYKDDTHYFVMTAKKQCLLRLGVLRQDWPDTNRLLGSANVVPEALQRFTRAAADFATHGKLGKLEFAQDAHGQPDVSAFDFTSMMRAESSARVQEKHGARLLLGLVGDCLVEPFWPLGTGVARGFLAAFDAAWMVKRWAEGAESLEVLAERESLYQLLSQTSPENMHRNVAQYGLDPATRYPNLNLRAVTPNQVRDLYDVLAKEPVQRNNDKTDTGMPATGSAGTQEELLRWCQEQTAGYPGVHVSDLSSSWADGLALCALVYRLQPGLLEPSELQGLGALEATAWALKVAENELGITPVVSAQAVVAGSDPLGLIAYLSHFHSAFKSMAHSPGPVSQASPGTSSAVLFLSKLQRTLQRSRAKENAEDAGGKKLRLEMEAETPSTEVPPDPEPGVPLTPPSQHQEAGAGDLCALCGEHLYVLERLCVNGHFFHRSCFRCHTCEATLWPGGYEQHPGDGHFYCLQHLPQTDHKEEGSDRGPESPELPTPSENSMPPGLSTPTASQEGAGPVPDPSQPTRRQIRLSSPERQRLSSLNLTPDPEMEPPPKPPRSCSALARHALESSFVGWGLPVQSPQALVAMEKEEKESPFSSEEEEEDVPLDSDVEQALQTFAKTSGTMNNYPTWRRTLLRRAKEEEMKRFCKAQTIQRRLNEIEAALRELEAEGVKLELALRRQSSSPEQQKKLWVGQLLQLVDKKNSLVAEEAELMITVQELNLEEKQWQLDQELRGYMNREENLKTAADRQAEDQVLRKLVDLVNQRDALIRFQEERRLSELALGTGAQG

SEQ ID NO: 832154 - protein, 1275 aa, Homo sapiens
TGSGPSRLRSRRHSSLPSCCPPQEASMASPTSTNPAHAHFESFLQAQLCQDVLSSFQELCGALGLEPGGGLPQYHKIKDQLNYWSAKSLWTKLDKRAGQPVYQQGRACTSTKCLVVGAGPCGLRVAVELALLGARVVLVEKRTKFSRHNVLHLWPFTIHDLRALGAKKFYGRFCTGTLDHISIRQLQLLLLKVALLLGVEIHWGVTFTGLQPPPRKGSGWRAQLQPNPPAQLANYEFDVLISAAGGKFVPEGFKVREMRGKLAIGITANFVNGRTVEETQVPEISGVARIYNQSFFQSLLKATGQGPSAEFPLPLPDCGLAPASPFQTCPHCKELHTFLFFWSQQQRRRNLSPQGLSKHSPELITQHEKSWNLSEMNLCMGVLLKWYFKKVPLFTLVLHCHATRWCRSPKCHPPPSFPLCSKSSGLLGLGQMVVCVIRTRGVLCVEHSPQPKLGSQLRGQAMLGCLGKVMHYQETYLLSPALVPPGIDLENIVYYKDDTHYFVMTAKKQCLLRLGVLRQDWPDTNRLLGSANVVPEALQRFTRAAADFATHGKLGKLEFAQDAHGQPDVSAFDFTSMMRAESSARVQEKHGARLLLGLVGDCLVEPFWPLGTGVARGFLAAFDAAWMVKRWAEGAESLEVLAERESLYQLLSQTSPENMHRNVAQYGLDPATRYPNLNLRAVTPNQVRDLYDVLAKEPVQRNNDKTDTGMPATGSAGTQEELLRWCQEQTAGYPGVHVSDLSSSWADGLALCALVYRLQPGLLEPSELQGLGALEATAWALKVAENELGITPVVSAQAVVAGSDPLGLIAYLSHFHSAFKSMAHSPGPVSQASPGTSSAVLFLSKLQRTLQRSRAKENAEDAGGKKLRLEMEAETPSTEVPPDPEPGVPLTPPSQHQEAGAGDLCALCGEHLYVLERLCVNGHFFHRSCFRCHTCEATLWPGGYEQHPGDGHFYCLQHLPQTDHKEEGSDRGPESPELPTPSENSMPPGLSTPTASQEGAGPVPDPSQPTRRQIRLSSPERQRLSSLNLTPDPEMEPPPKPPRSCSALARHALESSFVGWGLPVQSPQALVAMEKEEKESPFSSEEEEEDVPLDSDVEQALQTFAKTSGTMNNYPTWRRTLLRRAKEEEMKRFCKAQTIQRRLNEIEAALRELEAEGVKLELALRRQSSSPEQQKKLWVGQLLQLVDKKNSLVAEEAELMITVQELNLEEKQWQLDQELRGYMNREENLKTAADRQAEDQVLRKLVDLVNQRDALIRFQEERRLSELALGTGAQG

SEQ ID NO: 832155 - protein, 1105 aa, Homo sapiens
TGSGPSRLRSRRHSSLPSCCPPQEASMASPTSTNPAHAHFESFLQAQLCQDVLSSFQELCGALGLEPGGGLPQYHKIKDQLNYWSAKSLWTKLDKRAGQPVYQQGRACTSTKCLVVGAGPCGLRVAVELALLGARVVLVEKRTKFSRHNVLHLWPFTIHDLRALGAKKFYGRFCTGTLDHISIRQLQLLLLKVALLLGVEIHWGVTFTGLQPPPRKGSGWRAQLQPNPPAQLANYEFDVLISAAGGKFVPEGFKVREMRGKLAIGITANFVNGRTVEETQVPEISGVARIYNQSFFQSLLKATGIDLENIVYYKDDTHYFVMTAKKQCLLRLGVLRQDWPDTNRLLGSANVVPEALQRFTRAAADFATHGKLGKLEFAQDAHGQPDVSAFDFTSMMRAESSARVQEKHGARLLLGLVGDCLVEPFWPLGTGVARGFLAAFDAAWMVKRWAEGAESLEVLAERESLYQLLSQTSPENMHRNVAQYGLDPATRYPNLNLRAVTPNQVRDLYDVLAKEPVQRNNDKTDTGMPATGSAGTQEELLRWCQEQTAGYPGVHVSDLSSSWADGLALCALVYRLQPGLLEPSELQGLGALEATAWALKVAENELGITPVVSAQAVVAGSDPLGLIAYLSHFHSAFKSMAHSPGPVSQASPGTSSAVLFLSKLQRTLQRSRAKENAEDAGGKKLRLEMEAETPSTEVPPDPEPGVPLTPPSQHQEAGAGDLCALCGEHLYVLERLCVNGHFFHRSCFRCHTCEATLWPGGYEQHPGDGHFYCLQHLPQTDHKEEGSDRGPESPELPTPSENSMPPGLSTPTASQEGAGPVPDPSQPTRRQIRLSSPERQRLSSLNLTPDPEMEPPPKPPRSCSALARHALESSFVGWGLPVQSPQGAGGSENVSVLLPLVAMEKEEKESPFSSEEEEEDVPLDSDVEQALQTFAKTSGTMNNYPTWRRTLLRRAKEEEMKRFCKAQTIQRRLNEIEAALRELEAEGVKLELALRRQSSSPEQQKKLWVGQLLQLVDKKNSLVAEEAELMITVQELNLEEKQWQLDQELRGYMNREENLKTAADRQAEDQVLRKLVDLVNQRDALIRFQEERRLSELALGTGAQG

SEQ ID NO: 832156 - protein, 528 aa, Homo sapiens
MVTARGVWDRLQPGLLEPSELQGLGALEATAWALKVAENELGITPVVSAQAVVAGSDPLGLIAYLSHFHSAFKSMAHSPGPVSQASPGTSSAVLFLSKLQRTLQRSRAKENAEDAGGKKLRLEMEAETPSTEVPPDPEPGVPLTPPSQHQEAGAGDLCALCGEHLYVLERLCVNGHFFHRSCFRCHTCEATLWPGGYEQHPGDGHFYCLQHLPQTDHKEEGSDRGPESPELPTPSENSMPPGLSTPTASQEGAGPVPDPSQPTRRQIRLSSPERQRLSSLNLTPDPEMEPPPKPPRSCSALARHALESSFVGWGLPVQSPQALVAMEKEEKESPFSSEEEEEDVPLDSDVEQALQTFAKTSGTMNNYPTWRRTLLRRAKEEEMKRFCKAQTIQRRLNEIEAALRELEAEGVKLELALRRQSSSPEQQKKLWVGQLLQLVDKKNSLVAEEAELMITVQELNLEEKQWQLDQELRGYMNREENLKTAADRQAEDQVLRKLVDLVNQRDALIRFQEERRLSELALGTGAQG

SEQ ID NO: 832157 - protein, 965 aa, Homo sapiens
TGSGPSRLRSRRHSSLPSCCPPQEASMASPTSTNPAHAHFESFLQAQLCQDVLSSFQELCGALGLEPGGGLPQYHKIKDQLNYWSAKSLWTKLDKRAGQPVYQQGRACTSTKCLVVGAGPCGLRVAVELALLGARVVLVEKRTKFSRHNVLHLWPFTIHDLRALGAKKFYGRFCTGTLDHISIRQLQLLLLKVALLLGVEIHWGVTFTGLQPPPRKGSGWRAQLQPNPPAQLANYEFDVLISAAGGKFVPEGFKVREMRGKLAIGITANFVNGRTVEETQVPEISGVARIYNQSFFQSLLKATGIDLENIVYYKDDTHYFVMTAKKQCLLRLGVLRQDWPDTNRLLGSANVVPEALQRFTRAAADFATHGKLGKLEFAQDAHGQPDVSAFDFTSMMRAESSARVQEKHGARLLLGLVGDCLVEPFWPLGTGVARGFLAAFDAAWMVKRWAEGAESLEVLAERESLYQLLSQTSPENMHRNVAQYGLDPATRYPNLNLRAVTPNQVRDLYDVLAKEPVQRNNDKTDTGMPATGSAGTQEELLRWCQEQTAGYPGVHVSDLSSSWADGLALCALVYRLQPGLLEPSELQGLGALEATAWALKVAENELGITPVVSAQAVVAGSDPLGLIAYLSHFHSAFKSMAHSPGPVSQASPGTSSAVLFLSKLQRTLQRSRAKENAEDAGGKKLRLEMEAETPSTEVPPDPEPGVPLTPPSQHQEAGAGDLCALCGEHLYVLERLCVNGHFFHRSCFRCHTCEATLWPGGYEQHPGDGHFYCLQHLPQTDHKEEGSDRGPESPELPTPSENSMPPGLSTPTASQEGAGPVPDPSQPTRRQIRLSSPERQRLSSLNLTPDPEMEPPPKPPRSCSALARHALESSFVGWGLPVQSPQALVAMEKEEKESPFSSEEEEEDVPLDSDVEQALQTFAKTSGTMNNYPTWRRTLLRRAKEEEMKRFCKAQVPQNSKRNYG

SEQ ID NO: 832158 - protein, 241 aa, Homo sapiens
MEPPPKPPRSCSALARHALESSFVGWGLPVQSPQALVAMEKEEKESPFSSEEEEEDVPLDSDVEQALQTFAKTSGTMNNYPTWRRTLLRRAKEEEMKRFCKAQTIQRRLNEIEAALRELEAEGVKLELALRRQSSSPEQQKKLWVGQLLQLVDKKNSLVAEEAELMITVQELNLEEKQWQLDQELRGYMNREENLKTAADRQAEDQVLRKLVDLVNQRDALIRFQEERRLSELALGTGAQG

SEQ ID NO: 832159 - protein, 157 aa, Homo sapiens
QPPTTTKFPAGRQRFCKAQTIQRRLNEIEAALRELEAEGVKLELALRRQSSSPEQQKKLWVGQLLQLVDKKNSLVAEEAELMITVQELNLEEKQWQLDQELRGYMNREENLKTAADRQAEDQVLRKLVDLVNQRDALIRFQEERRLSELALGTGAQG

SEQ ID NO: 832160 - protein, 539 aa, Homo sapiens
TGSGPSRLRSRRHSSLPSCCPPQEASMASPTSTNPAHAHFESFLQAQLCQDVLSSFQELCGALGLEPGGGLPQYHKIKDQLNYWSAKSLWTKLDKRAGQPVYQQGRACTSTKCLVVGAGPCGLRVAVELALLGARVVLVEKRTKFSRHNVLHLWPFTIHDLRALGAKKFYGRFCTGTLDHISIRQLQLLLLKVALLLGVEIHWGVTFTGLQPPPRKGSGWRAQLQPNPPAQLANYEFDVLISAAGGKFVPEGFKVREMRGKLAIGITANFVNGRTVEETQVPEISGVARIYNQSFFQSLLKATGIDLENIVYYKDDTHYFVMTAKKQCLLRLGVLRQDWPDTNRLLGSANVVPEALQRFTRAAADFATHGKLGKLEFAQDAHGQPDVSAFDFTSMMRAESSARVQEKHGARLLLGLVGDCLVEPFWPLGTGVARGFLAAFDAAWMVKRWAEGAESLEVLAERESLYQLLSQTSPENMHRNVAQYGLDPATRYPNLNLRAVTPNQVRDLYDVLAKEPVQRNNDKTDTGMPATGEQAFLPR

SEQ ID NO: 832161 - protein, 123 aa, Homo sapiens
KPPRAPFRWRGRGRQSEALSPEIPGRARPGAQGAGRGRGRSGRGEPGRGAPGCGRPPALPTAPWSRAHSQRKCFDHSASEIDPGLRSPVSRNILPPFVEAVWWREVEPTRTEAVSLSGGKHEC

SEQ ID NO: 832162 - protein, 1093 aa, Homo sapiens
TGSGPSRLRSRRHSSLPSCCPPQEASMASPTSTNPAHAHFESFLQAQLCQDVLSSFQELCGALGLEPGGGLPQYHKIKDQLNYWSAKSLWTKLDKRAGQPVYQQGRACTSTKCLVVGAGPCGLRVAVELALLGARVVLVEKRTKFSRHNVLHLWPFTIHDLRALGAKKFYGRFCTGTLDHISIRQLQLLLLKVALLLGVEIHWGVTFTGLQPPPRKGSGWRAQLQPNPPAQLANYEFDVLISAAGGKFVPEGFKVREMRGKLAIGITANFVNGRTVEETQVPEISGVARIYNQSFFQSLLKATGIDLENIVYYKDDTHYFVMTAKKQCLLRLGVLRQDWPDTNRLLGSANVVPEALQRFTRAAADFATHGKLGKLEFAQDAHGQPDVSAFDFTSMMRAESSARVQEKHGARLLLGLVGDCLVEPFWPLGTGVARGFLAAFDAAWMVKRWAEGAESLEVLAERESLYQLLSQTSPENMHRNVAQYGLDPATRYPNLNLRAVTPNQVRDLYDVLAKEPVQRNNDKTDTGMPATGSAGTQEELLRWCQEQTAGYPGVHVSDLSSSWADGLALCALVYRLQPGLLEPSELQGLGALEATAWALKVAENELGITPVVSAQAVVAGSDPLGLIAYLSHFHSAFKSMAHSPGPVSQASPGTSSAVLFLSKLQRTLQRSRAKENAEDAGGKKLRLEMEAETPSTEVPPDPEPGVPLTPPSQHQEAGAGDLCALCGEHLYVLERLCVNGHFFHRSCFRCHTCEATLWPGGYEQHPGDGHFYCLQHLPQTDHKEEGSDRGPESPELPTPSENSMPPGLSTPTASQEGAGPVPDPSQPTRRQIRLSSPERQRLSSLNLTPDPEMEPPPKPPRSCSALARHALESSFVGWGLPVQSPQALVAMEKEEKESPFSSEEEEEDVPLDSDVEQALQTFAKTSGTMNNYPTWRRTLLRRAKEEEMKRFCKAQTIQRRLNEIEAALRELEAEGVKLELALRRQSSSPEQQKKLWVGQLLQLVDKKNSLVAEEAELMITVQELNLEEKQWQLDQELRGYMNREENLKTAADRQAEDQVLRKLVDLVNQRDALIRFQEERRLSELALGTGAQG

SEQ ID NO: 832163 - protein, 130 aa, Homo sapiens
MEKEEKESPFSSEEEEEDVPLDSDVEQALQTFAKTSGTMNNYPTWRRTLLRRAKEEEMKRFCKAQTIQRRLNEIEAALRELEAEGVKLELALRRQSSSPEQQKKLWVGQLLQLVDKKNSLVAEEAELMIT

SEQ ID NO: 832164 - protein, 1233 aa, Homo sapiens
TGSGPSRLRSRRHSSLPSCCPPQEASMASPTSTNPAHAHFESFLQAQLCQDVLSSFQELCGALGLEPGGGLPQYHKIKDQLNYWSAKSLWTKLDKRAGQPVYQQGRACTSTKCLVVGAGPCGLRVAVELALLGARVVLVEKRTKFSRHNVLHLWPFTIHDLRALGAKKFYGRFCTGTLDHISIRQLQLLLLKVALLLGVEIHWGVTFTGLQPPPRKGSGWRAQLQPNPPAQLANYEFDVLISAAGGKFVPEGFKVREMRGKLAIGITANFVNGRTVEETQVPEISGVARIYNQSFFQSLLKATAKEKEPVPSGIKQAQPYLITQHEKSWNLSEMNLCMGVLLKWYFKKVPLFTLVLHCHATRWCRSPKCHPPPSFPLCSKSSGLLGLGQMVVCVIRTRGVLCVEHSPQPKLGSQLRGQAMLGCLGKVMHYQETYLLSPALVPPGIDLENIVYYKDDTHYFVMTAKKQCLLRLGVLRQDWPDTNRLLGSANVVPEALQRFTRAAADFATHGKLGKLEFAQDAHGQPDVSAFDFTSMMRAESSARVQEKHGARLLLGLVGDCLVEPFWPLGTGVARGFLAAFDAAWMVKRWAEGAESLEVLAERESLYQLLSQTSPENMHRNVAQYGLDPATRYPNLNLRAVTPNQVRDLYDVLAKEPVQRNNDKTDTGMPATGSAGTQEELLRWCQEQTAGYPGVHVSDLSSSWADGLALCALVYRLQPGLLEPSELQGLGALEATAWALKVAENELGITPVVSAQAVVAGSDPLGLIAYLSHFHSAFKSMAHSPGPVSQASPGTSSAVLFLSKLQRTLQRSRAKENAEDAGGKKLRLEMEAETPSTEVPPDPEPGVPLTPPSQHQEAGAGDLCALCGEHLYVLERLCVNGHFFHRSCFRCHTCEATLWPGGYEQHPGDGHFYCLQHLPQTDHKEEGSDRGPESPELPTPSENSMPPGLSTPTASQEGAGPVPDPSQPTRRQIRLSSPERQRLSSLNLTPDPEMEPPPKPPRSCSALARHALESSFVGWGLPVQSPQALVAMEKEEKESPFSSEEEEEDVPLDSDVEQALQTFAKTSGTMNNYPTWRRTLLRRAKEEEMKRFCKAQTIQRRLNEIEAALRELEAEGVKLELALRRQSSSPEQQKKLWVGQLLQLVDKKNSLVAEEAELMITVQELNLEEKQWQLDQELRGYMNREENLKTAADRQAEDQVLRKLVDLVNQRDALIRFQEERRLSELALGTGAQG

SEQ ID NO: 832165 - protein, 1186 aa, Homo sapiens
TGSGPSRLRSRRHSSLPSCCPPQEASMASPTSTNPAHAHFESFLQAQLCQDVLSSFQELCGALGLEPGGGLPQYHKIKDQLNYWSAKSLWTKLDKRAGQPVYQQGRACTSTKCLVVGAGPCGLRVAVELALLGARVVLVEKRTKFSRHNVLHLWPFTIHDLRALGAKKFYGRFCTGTLDHISIRQLQLLLLKVALLLGVEIHWGVTFTGLQPPPRKGSGWRAQLQPNPPAQLANYEFDVLISAAGGKFVPEGFKVREMRGKLAIGITANFVNGRTVEETQVPEISGVARIYNQSFFQSLLKATGIDLENIVYYKDDTHYFVMTAKKQCLLRLGVLRQDWPDTNRLLGSANVVPEALQRFTRAAADFATHGKLGKLEFAQDAHGQPDVSAFDFTSMMRAESSARVQEKHGARLLLGLVGDCLVEPFWPLGTGVARGFLAAFDAAWMVKRWAEGAESLEVLAERESLYQLLSQTSPENMHRNVAQYGLDPATRYPNLNLRAVTPNQVRDLYDVLAKEPVQRNNDKTDTGMPATGSAGTQEELLRWCQEQTAGYPGVHVSDLSSSWADGLALCALVYRLQPGLLEPSELQGLGALEATAWALKVAENELGITPVVSAQAVVAGSDPLGLIAYLSHFHSAFKSMAHSPGPVSQASPGTSSAVLFLSKLQRTLQRSRAKENAEDAGGKKLRLEMEAETPSTEVPPDPEPGVPLTPPSQHQEAGAGDLCALCGEHLYVLERLCVNGHFFHRSCFRCHTCEATLWPGGYEQHPGDGHFYCLQHLPQTDHKEEGSDRGPESPKDEGVYVYWGMGRGRGSRQTSALLGVTECRLLLACKLCEGRMPVCLHFLFSQVSKTQPDTVCKWFSVNECQGSPLLRRGGLTPRPHSTWWLFQELPTPSENSMPPGLSTPTASQEGAGPVPDPSQPTRRQIRLSSPERQRLSSLNLTPDPEMEPPPKPPRSCSALARHALESSFVGWGLPVQSPQALVAMEKEEKESPFSSEEEEEDVPLDSDVEQALQTFAKTSGTMNNYPTWRRTLLRRAKEEEMKRFCKAQTIQRRLNEIEAALRELEAEGVKLELALRRQSSSPEQQKKLWVGQLLQLVDKKNSLVAEEAELMITVQELNLEEKQWQLDQELRGYMNREENLKTAADRQAEDQVLRKLVDLVNQRDALIRFQEERRLSELALGTGAQG

SEQ ID NO: 832166 - protein, 1122 aa, Homo sapiens
TGSGPSRLRSRRHSSLPSCCPPQEASMASPTSTNPAHAHFESFLQAQLCQDVLSSFQELCGALGLEPGGGLPQYHKIKDQLNYWSAKSLWTKLDKRAGQPVYQQGRACTSTKCLVVGAGPCGLRVAVELALLGARVVLVEKRTKFSRHNVLHLWPFTIHDLRALGAKKFYGRFCTGTLDHISIRQLQLLLLKVALLLGVEIHWGVTFTGLQPPPRKGSGWRAQLQPNPPAQLANYEFDVLISAAGGKFVPEGFKVREMRGKLAIGITANFVNGRTVEETQVPEISGVARIYNQSFFQSLLKATGIDLENIVYYKDDTHYFVMTAKKQCLLRLGVLRQDWPDTNRLLGSANVVPEALQRFTRAAADFATHGKLGKLEFAQDAHGQPDVSAFDFTSMMRAESSARVQEKHGARLLLGLVGDCLVEPFWPLGTGVARGFLAAFDAAWMVKRWAEGAESLEVLAERESLYQLLSQTSPENMHRNVAQYGLDPATRYPNLNLRAVTPNQVRDLYDVLAKEPVQRNNDKTDTGMPATGSAGTQEELLRWCQEQTAGYPGVHVSDLSSSWADGLALCALVYRLQPGLLEPSELQGLGALEATAWALKVAENELGITPVVSAQAVVAGSDPLGLIAYLSHFHSAFKSMAHSPGPVSQASPGTSSAVLFLSKLQRTLQRSRAKENAEDAGGKKLRLEMEAETPSTEVPPDPEPGVPLTPPSQHQEAGAGDLCALCGEHLYVLERLCVNGHFFHRSCFRCHTCEATLWPGGYEQHPGDGHFYCLQHLPQTDHKEEGSDRGPESPELPTPSENSMPPGLSTPTASQEGAGPVPDPSQPTRRQIRLSSPERQRLSSLNLTPDPEMEPPPKPPRSCSALARHALESSFVGWGLPVQSPQDLQGLRHHHALCCLTGAGAGGSENVSVLLPLVAMEKEEKESPFSSEEEEEDVPLDSDVEQALQTFAKTSGTMNNYPTWRRTLLRRAKEEEMKRFCKAQTIQRRLNEIEAALRELEAEGVKLELALRRQSSSPEQQKKLWVGQLLQLVDKKNSLVAEEAELMITVQELNLEEKQWQLDQELRGYMNREENLKTAADRQAEDQVLRKLVDLVNQRDALIRFQEERRLSELALGTGAQG

SEQ ID NO: 832167 - protein, 405 aa, Homo sapiens [sequence omitted]

SEQ ID NO: 832168 - protein, 1170 aa, Homo sapiens
TGSGPSRLRSRRHSSLPSCCPPQEASMASPTSTNPAHAHFESFLQAQLCQDVLSSFQELCGALGLEPGGGLPQYHKIKDQLNYWSAKSLWTKLDKRAGQPVYQQGRACTSTKCLVVGAGPCGLRVAVELALLGARVVLVEKRTKFSRHNVLHLWPFTIHDLRALGAKKFYGRFCTGTLDHISIRQLQLLLLKVALLLGVEIHWGVTFTGLQPPPRKGSGWRAQLQPNPPAQLANYEFDVLISAAGGKFVPEGFKVREMRGKLAIGITANFVNGRTVEETQVPEISGVARIYNQSFFQSLLKATGIDLENIVYYKDDTHYFVMTAKKQCLLRLGVLRQDWPDTNRLLGSANVVPEALQRFTRAAADFATHGKLGKLEFAQDAHGQPDVSAFDFTSMMRAESSARVQEKHGARLLLGLVGDCLVEPFWPLGTGVARGFLAAFDAAWMVKRWAEGAESLEVLAERESLYQLLSQTSPENMHRNVAQYGLDPATRYPNLNLRAVTPNQVRDLYDVLAKEPVQRNNDKTDTGMPATGSAGTQEELLRWCQEQTAGYPGVHVSDLSSSWADGLALCALVYRLQPGLLEPSELQGLGALEATAWALKVAENELGITPVVSAQAVVAGSDPLGLIAYLSHFHSAFKSMAHSPGPVSQASPGTSSAVLFLSKLQRTLQRSRAKENAEDAGGKKLRLEMEAETPSTEVPPDPEPGVPLTPPSQHQEAGAGDLCALCGEHLYVLERLCVNGHFFHRSCFRCHTCEATLWPGGYEQHPGDGHFYCLQHLPQTDHKEEGSDRGPESPELPTPSENSMPPGLSTPTASQEGAGPVPDPSQPTRRQIRLSSPERQRLSSLNLTPDPEMEPPPKPPRSCSALARHALESSFVGWGLPVQSPQALVAMEKEEKESPFSSEEEEEDVPLDSDVEQALQTFAKTSGTMNNYPTWRRTLLRRAKEEEMKRFCKAQTIQRRLNEIEAALRELEAEGVKLELALRRQSMFPRETRQKRKHYGGWGPKVLGLTGLPAGDPKGTPNTNGPCCRPWDAKRRRPQLDPPGAQATISDILRRADHHGWAHALGPPGKANGRAHMLKPGGQEKTLKRNRSGLEYGARALEGTQCSLWREKAGGNSWSNPQMRIALNPGFQRGSRRASRRWLGLGENRGARGLDEGLGRPWFSVPQQRK

SEQ ID NO: 832169 - protein, 757 aa, Homo sapiens
TGSGPSRLRSRRHSSLPSCCPPQEASMASPTSTNPAHAHFESFLQAQLCQDVLSSFQELCGALGLEPGGGLPQYHKIKDQLNYWSAKSLWTKLDKRAGQPVYQQGRACTSTKCLVVGAGPCGLRVAVELALLGARVVLVEKRTKFSRHNVLHLWPFTIHDLRALGAKKFYGRFCTGTLDHISIRQLQLLLLKVALLLGVEIHWGVTFTGLQPPPRKGSGWRAQLQPNPPAQLANYEFDVLISAAGGKFVPEGFKVREMRGKLAIGITANFVNGRTVEETQVPEISGVARIYNQSFFQSLLKATGIDLENIVYYKDDTHYFVMTAKKQCLLRLGVLRQDWPDTNRLLGSANVVPEALQRFTRAAADFATHGKLGKLEFAQDAHGQPDVSAFDFTSMMRAESSARVQEKHGARLLLGLVGDCLVEPFWPLGTGVARGFLAAFDAAWMVKRWAEGAESLEVLAERESLYQLLSQTSPENMHRNVAQYGLDPATRYPNLNLRAVTPNQVRDLYDVLAKEPVQRNNDKTDTGMPATGSAGTQEELLRWCQEQTAGYPGVHVSDLSSSWADGLALCALVYRLQPGLLEPSELQGLGALEATAWALKVAENELGITPVVSAQAVVAGSDPLGLIAYLSHFHSAFKSMAHSPGPVSQASPGTSSAVLFLSKLQRTLQRSRAKENAEDAGGKKLRLEMEAETPSTEVPPDPEPGVPLTPPSQHQEAGAGDLCALCGEHLYVLERLCVKRGGPAQHFFFSLFFLPKP

SEQ ID NO: 832170 - protein, 129 aa, Homo sapiens
GVAGVPSSNPTPLPSWPTMNLTSLSRLQEVNSSLKVSDHFPQRSQHLWHILGLSRLLKPPPPAIVHLPPPLGFKVREMRGKLAIGITANFVNGRTVEETQVPEISGVARIYNQSFFQSLLKATGQGPSC

SEQ ID NO: 832171 - protein, 1118 aa, Homo sapiens
MALLKSAVYEVTGPSCGRGECIEEVGFGAFQEFLVDNRGTLTQTSKTFFSTSSFSHALPSSVSFCTQSRGGVYPCQCVSENVCSEKPVGSPRLLISSQNSVAQVLWSHPVHSLLLELFFQAISGKRFLPLALATSLLHTYHTSVLWRVSVRKSHTFLKMKQNVKGNVIRFGQSSPTDKKALGQAHTCNPKEHFGRLGREDCLSPGVQYLSGKHLISTKYKKVNWAWWSMPVVSATQEAEMRGSLEPEEVQATVSEITPLPSSLGDRVRPCSKKKKKPKKPQWLFAFEGGMKRTSTLRLYKTVKLVVGLTFIILGFGEAEAERLLEPEEFETGLGSIARPHLYIKKKMLKQEITETEHSHPVSSVTFSSRDGQLSEVRIISEVQQNKLFTINNSVENDVQMVKCGNVLDNSIFSLCFSLTILLGLTVEGHRCLNIERAVSHQFYCECEKVKAVADFGSRYTKIGMTQRRLAWPPARGRSADSCSIPYFFKKRLHCAPTWSKKEKHEVSCLLTIKINHSNNIIEHSTLKIINKTINETLEHTLKSTYTHESICVILCCLFYYPGFHTQMSISIRKSLKCLNCELIRRKMKYVSTLVTLFFTDIMISLQPYRTNEKLEAIPRTCDGVNPLLTVTHISAFEETQATWKLPMGGHNLNVPMSYRGEFNQNELKHGTITENLKRVYLAECVMPAIPALWEAKAGRSPEVRSLRPPGQHDETLVSIKNTKISQMWWHMPVIPVSREAEAGEYGTQEAEAAVNQDCATALQPGRRSETPISKNKKKNKLKIVDPGGHSKMFTIDDRETITVQNVEENSYDNHKICIRKTLQIYFAPCNFMNWQYFLKLGYSKRISLGNGNVKTRSNKKVVFLKGNATGLLFIGIDKARKEIKSQPNSIHCIYCILLIPSQQKSKSCLAKHIYSQRWANYICCQHDGIRNRNPPAVGKIARFIPSKCSSAPLPLHAHQTTAKSLVTEFLIQRFVSFCPYLKTKLFVCFEEKAKATKTPNHLKSNLNPIKKKSTSGTKQLSGLGCVVRHFCVCPTWSLVLWTIVTVKLWLNTVKDSKAPLCSQVQLRLHKYPTRMSQSSLLQLLSEQSARQHWLGFYFCSQLTLHQVYTVLAAFDFSS

SEQ ID NO: 832172 - protein, 889 aa, Homo sapiens
MPVVSATQEAEMRGSLEPEEVQATVSEITPLPSSLGDRVRPCSKKKKKPKKPQWLFAFEGGMKRTSTLRLYKTVKLVVGLTFIILGFGEAEAERLLEPEEFETGLGSIARPHLYIKKKMLKQEITETEHSHPVSSVTFSSRDGQLSEVRIISEVQQNKLFTINNSVENDVQMVKCGNVLDNSIFSLCFSLTILLGLTVEGHRCLNIERAVSHQFYCECEKVKAVADFGSRYTKIGMTQRRLAWPPARGRSADSCSIPYFFKKRLHCAPTWSKKEKHEVSCLLTIKINHSNNIIEHSTLKIINKTINETLEHTLKSTYTHESICVILCCLFYYPGFHTQMSISIRKSLKCLNCELIRRKMKYVSTLVTLFFTDIMISLQPYRTNEKLEAIPRTCDGVNPLLTVTHISAFEETQATWKLPMGGHNLNVPIHIEVNLIKMSYNMEQSLNNLKRVYLAECVMPAIPALWEAKAGRSPEVRSLRPPGQHDETLVSIKNTKISQMWWHMPVIPVSREAEAGEYGTQEAEAAVNQDCATALQPGRRSETPISKNKKKNKLKIVDPGGHSKMFTIDDRETITVQNVEENSYDNHKICIRKTLQIYFAPCNFMNWQYFLKLGYSKRISLGNGNVKTRSNKRLFFEGKCHRPAFIGIDKARKEIKSQPNSIHCIYCILLIPSQQKSKSCLAKHIYSQRWANYICCQHDGIRNRNPPAVGKIARFIPSKCSSAPLPLHAHQTTAKSLVTEFLIQRFVSFCPYLKTKLFVCFEEKAKATKTPNHLKSNLNPIKKNSTSGTKQLSGLGCVVRHFCVCPTWSLVLWTIVTVKLWLNTVKDSKAPLCSQVQLRLHKYPTRMSQSSLLQLLSEQSARQHWLGFYFCSQLTLHQVYTVLAAFDFSS

SEQ ID NO: 832173 - protein, 851 aa, Homo sapiens
MRPCSKKKKKPKKPQWLFAFEGGYEENVHFKALKDSEAGCRAHFYNPEDLGKLKQKDCLSLEFETGLGSIARPHLYIKKKMLKQEITETEHSHPVSSVTFSSRDGQLSEVRIISEVQQNKLFTINNSVENDVQMVKCGNVLDNSIFSLCFSLTILLGLTVEGHRCLNIERAVSHQFYCECEKVKAVADFGSRYTKIGMTQRRLAWPPARGRSADSCSIPYFFKKRLHCAPTWSYKEKHEVSCLLTIKINHSNNIIEHSTLKIINKTINETLEHTLKSTYTHESICVILCCLFYYPGFHTQMSISIRKSLKCLNCELIRRKMKYVSTLVTLFFTDIMISLQPYRTNEKLEAIPRTCDGVNPLLTVTHISAFEETQATWKLPMGGHNLNVPIHIEVNLIKMSYNMEQSLNNLKRVYLAECVMPAIPALWEAKAGRSPEVRSLRPPGQHDETLVSIKNTKISQMWWHMPVIPVSREAEAGEYGTQEAEAAVNQDCATALQPGRRSETPISKNKKKNKLKIVDPGGHSKMFTIDDRETITVQNVEENSYDNHKICIRKTLQIYFAPCNFMNWQYFLKLGYSKRISLGNGNVKTRSNKRLFFEGKCHRPAFIGIDKARKEIKSQPNSIHCIYCILLIPSQQKSKSCLAKHIYSQRWANYICCQHDGIRNRNPPAVGKIARFIPSKCSSAPLPLHAHQTTAKSLVTEFLIQRFVSFCPYLKTKLFVCFEEKAKATKTPNHLKSNLNPIKKKSTSGTKQLSGLGCVVRHFCVCPTWSLVLWTIVTVKLWLNTVKDSKAPLCSQVQLRLHKYPTRMSQSSLLQLLSEQSARQHWLGFYFCSQLTLHQVYTVLAAFDFSS

SEQ ID NO: 832174 - protein, 257 aa, Homo sapiens
MEAPGPAQAAAAESNSREVTEDAADWAPALCPSPEARSPEAPAYRLQDCDALVTMGTGTFGRVHLVKEKTAKHFFALKVMSIPDVIRRKQEQHVHNEKSVLKEVSHPFLIRLFWTWHEERFLYMLMEYVPGGELFSYLRNRGHFSSTTGLFYSAEIICAIEYLHSKEIVYRDLKPENILLDRDGHIKLTDFGFAKKLVDRQGLILSPKLKCRCTILSHYSLKLLGSSDPPSSASEVAGTTGMCHHTRLIFLFLILEM

SEQ ID NO: 832175 - protein, 1117 aa, Homo sapiens
MALLKSAVYEVTGPSCGRGECIEEVGFGAFQEFLVDNRGTLTQTSKTFFSTSSFSHALPSSVSFCTQSRGGVYPCQCVSENVCSEKPVGSPRLLISSQNSVAQVLWSHPVHSLLLELFFQAISGKRFLPLALATSLLHTYHTSVLWRVSVRKSHTFLKMKQNVKGNVIRFGQSSPTDKKALGQAHTCNPKEHFGRLGREDCLSPGVQYLSGKHLISTKYKKVNWAWWSMPVVSATQEAEMRGSLEPEEVQATVSEITPLPSSLGDRVRPCSKKKKKPKKPQWLFAFEGGMKRTSTLRLYKTVKLVVGLTFIILGFGEAEAERLLEPEEFETGLGSIARPHLYIKKKMLKQEITETEHSHPVSSVTFSSRDGQLSEVRIISEVQQNKLFTINNSVENDVQMVKCGNVLDNSIFSLCFSLTILLGLTVEGHRCLNIERAVSHQFYCECEKVKAVADFGSRYTKIGMTQRRLAWPPARGRSADSCSIPYFFKKRLHCAPTWSKKEKHEVSCLLTIKINHSNNIIEHSTLKIINKTINETLEHTLKSTYTHESICVILCCLFYYPGFHTQMSISIRKSLKCLNCELIRRKMKYVSTLVTLFFTDIMISLQPYRTNEKLEAIPRTCDGVNPLLTVTHISAFEETQATWKLPMGGHNLNVPMSYRGYFNQNELKHGTITENLKRVYLAECVMPAIPALWEAKAGRSPEVRSLRPPGQHDETLVSIKNTKISQMWWHMPVIPVSREAEAGEYGTQEAEAAVNQDCATALQPGRRSETPISKNKKKNEIKIVDPGGHSKMFTIDDRETITVQNVEENSYDNHKICIRKTLQIYFAPCNFMNWQYFLKLGYSKRISLGNGNVKTRSNKRLFFEGKCHRPAFIGIDKARKEIKSQPNSIHCIYRILLIPSQQKSKSCLAKHIYSQRWANYICCQHDGIRNRNPPAVGKIARFIPSKCSSAPLPLHAHQTTAKSLVTEFLIQRFVSFCPYLKTKLFVCFEEKAKATKTPNHLKSNLNPIKKKSTSGTKQLSGLGCVVRHFCVCPTWSLVLWTIVTVKLWLNTVKDSKAPLCSQVQLRLHKYPTRMSQSSLLQLLSEQSARQHWLGFYFCSQLTLHQVYTVLAAFDFSS

SEQ ID NO: 832176 - protein, 855 aa, Homo sapiens
MGDRVRPCSKKKKKPKKPQWLFAFEGGMKRTSTLRLYKTVKLVVGLTFIILGFGEAEAERLLEPEEFETGLGSIARPHLYIKKKMLKQEITETEHSHPVSSVTFSSRDGQLSEVRIISMVQQNKLFTINNSVENDVQMVKCGNVLDNSIFSLCFSLTILLGLTVEGHRCLNIERAVSHQFYCECEKVKAVADFGSRYTKIGMTQRRLAWPPARGRSADSCSIPYFFKKRLHCAPTWSKKEKHEVSCLLTIKINHSNNIIEHSTLKIINKTINETLEHTLKSTYTHESICVILCCLFYYPGFHTQMSISIRKSLKCLNCELIRRKMKYVSTLVTLFFTDIMISLQPYRTNEKLEAIPRTCDGVNPLLTVTHISAFEETQATWKLPMGGHNLNVPMSYRGYFNQNELKHGTITENLKRVYLAECVMPAIPALWEAKAGRSPEVRSLRPPGQHDETLVSIKNTKISQMWWHMPVIPVSREAEAGEYGTQEAEAAVNQDCATALQPGRRSETPISKNKKKNKLKIVDPGGHSKMFTIDDRETITVQNVEENSYDNHKICIRKTLQIYFAPCNFMNWQYFLKLGYSKRISLGNGNVKTRSNKRLFFEGKCHRPAFIGIDKARKEIKSQPNSIHCIYCILLIPSQQKSKSCLAKHIYSQRWANYICCQHDGIRNRNPPAVGKIARFIPSKCSSAPLPLHAHQTTAKSLVTEFLIQRFVSFCPYLKTKLFVCFEEKAKATKTPNHLKSNLNPIKKKSTSGTKQLSGLGCVVRHFCVCPTWSLVLWTIVTVKLWLNTVKDSKAPLCSQVQLRLHKYPTRMSQSSLLQLLSEQSARQHWLGFYFCSQLTLHQVYTVLAAFDFSS

SEQ ID NO: 832177 - protein, 41 aa, Homo sapiens
MVIFSQLFEDQILLSPGHCRRVEKSAATVNATVEDIILSSS

SEQ ID NO: 832178 - protein, 136 aa, Homo sapiens
GTVFSWEGGSPEPICSQNLVLERRLPPWLCLEDGTGIWGLVTAISLLLAQLVVISQHSTCVLCLQGRALIPPRMGLPPSGTLPGHSRVSVGRLSGSQPPLCPEVSCLSGVRVCHPPHGCREDAQTGLQPPCTHGGI

SEQ ID NO: 832179 - protein, 145 aa, Homo sapiens
SRIRHNGGALFPAGTMEGVEEKKKEVPAVPETLKKKRRNFAELKIKRLRKKFAQKMLRKARRKLIYEKAKHYHKEYRQMYRTEIRMARMARKAGNFYVPAEPKLAFVIRIRGINGVSPKVRKVLQLLRLRQIFNGTLCEAQQGFD

SEQ ID NO: 832180 - protein, 144 aa, Homo sapiens
KLMKKVFGKFFKATMEGVEEKKKEVPAVPETLKKKRRNFAELKIKRLRKKFAQKMLRKARRKLIYEKAKHYHKEYRQMYRTEIRMARMARKAGNFYVPAEPKLAFVIRIRGINGVSPKVRKVLQLLRLRQIFNGTLCEAQQGFD

SEQ ID NO: 832181 - protein, 137 aa, Homo sapiens
ARYEAGVCIGRGEKKKEVPAVPETLKKKRRNFAELKIKRLRKKFAQKMLRKARRKLIYEKAKHYHKEYRQMYRTEIRMARMARKAGNFYVPAEPKLAFVIRIRGINGVSPKVRKVLQLLRLRQIFNGTLCEAQQGFD

SEQ ID NO: 832182 - protein, 144 aa, Homo sapiens
SAGRGRVSIGRGWTMEGVEEKKKEVPAVPETLKKKRRNFAELKIKRLRKKFAQKMLRKARRKLIYEKAKHYHKEYRQMYRTEIRMARMARKAGNFYVPAEPKLAFVIRIRGINGVSPKVRKVLQLLRLRQIFNGTLCEAQQGFD

SEQ ID NO: 832183 - protein, 170 aa, Homo sapiens
MEPCVKLNKASINMLRIVEPYIAWGYPNLKSVNELIYKRGYGQSVVPNSSLLLSFYPLSLLITSLAYFWISFPPFSSNIMKCLALVNVYARHITAEAPRPTGKQLGAWKPGLLNFKPGFLQVVVWGGWSGDRIELKDYANEEVSQGGFEKGTHILQAKSRLGDLGYYALA

SEQ ID NO: 832184 - protein, 145 aa, Homo sapiens; identical to SEQ ID NO: 832179

SEQ ID NO: 832185 - protein, 145 aa, Homo sapiens; identical to SEQ ID NO: 832179

SEQ ID NO: 832186 - protein, 164 aa, Homo sapiens
  misc_feature (5)..(5): Xaa can be any naturally occurring amino acid
  misc_feature (18)..(18): Xaa can be any naturally occurring amino acid
SPLQXHWLTAALHPKVTXAICGKPANSAIMAGGTMEGVEEKKKEVPAVPETLKKKRRNFAELKIKRLRKKFAQKMLRKARRKLIYEKAKHYHKEYRQMYRTEIRMARMARKAGNFYVPAEPKLAFVIRIRGINGVSPKVRKVLQLLRLRQIFNGTLCEAQQGFD

SEQ ID NO: 832187 - protein, 332 aa, Homo sapiens
MPEGPLVRKFHHLVSPFVGQQVVKTGGSSKKLQPASLQSLWLQDTQVHGKKLFLRFDLDEEMGPPGSSPTPEPPQKEVQKEGAADPKQVGEPSGQKTLDGSSRSAELVPQGEDDSEYLERDAPAGDAGRWLRVSFGLFGSVWVNDFSRAKKANKRGDWRDPSPRLVLHFGGGGFLAFYNCQLSWSSSPVVTPTCDILSEKFHRGQALEALGQAQPVCYTLLDQRYFSGLGNIIKNEALYRAGIHPLSLGSVLSASRREVLVDHVVEFSTAWLQGKFQGRPQHTQVYQKEQCPAGHQVMKEAFGPEDGLQRLTWWCPQCQPQLSEEPEQCQFS

SEQ ID NO: 832188 - protein, 332 aa, Homo sapiens; identical to SEQ ID NO: 832187

SEQ ID NO: 832189 - protein, 141 aa, Homo sapiens
MRQRPLFPAGTMEGVEEKKKEVPAVPETLKKKRRNFAELKIKRLRKKFAQKMLRKARRKLIYEKAKHYHKEYRQMYRTEIRMARMARKAGNFYVPAEPKLAFVIRIRGINGVSPKVRKVLQLLRLRQIFNGTLCEAQQGFD

SEQ ID NO: 832190 - protein, 145 aa, Homo sapiens; identical to SEQ ID NO: 832179

SEQ ID NO: 832191 - protein, 145 aa, Homo sapiens; identical to SEQ ID NO: 832179

SEQ ID NO: 832192 - protein, 144 aa, Homo sapiens; identical to SEQ ID NO: 832180

SEQ ID NO: 832193 - protein, 144 aa, Homo sapiens; identical to SEQ ID NO: 832182

SEQ ID NO: 832194 - protein, 137 aa, Homo sapiens; identical to SEQ ID NO: 832181

SEQ ID NO: 832195 - protein, 151 aa, Homo sapiens
RGFFYIKSVVRRSGLSTASHEGVEKEEKKKEVPAVPETLKKKRRNFAELKIKRLRKKFAQKMLRKARRKLIYEKAKHYHKEYRQMYRTEIRMARMARKAGNFYVPAEPKLAFVIRIRGINGVSPKVRKVLQLLRLRQIFNGTLCEAQQGFD

SEQ ID NO: 832196 - protein, 332 aa, Homo sapiens; identical to SEQ ID NO: 832187

SEQ ID NO: 832197 - protein, 127 aa, Homo sapiens
VLGDLEDPEREKGRSVCRTLEKEGFESEISAEKSCQKMLRKARRKLIYEKAKHYHKEYRQMYRTEIRMARMARKAGNFYVPAEPKLAFVIRIRGINGVSPKVRKVLQLLRLRQIFNGTLCEAQQGFD

SEQ ID NO: 832198 - protein, 143 aa, Homo sapiens
LTYVKKQLVARIFPPPGGYRRHLTEVRERESACELESEIRKRDQAPEKKLPKKMLRKARRKLIYEKAKHYHKEYRQMYRTEIRMARMARKAGNFYVPAEPKLAFVIRIRGINGVSPKVRKVLQLLRLRQIFNGTLCEAQQGFD

SEQ ID NO: 832199 - protein, 141 aa, Homo sapiens; identical to SEQ ID NO: 832189

SEQ ID NO: 832200 - protein, 141 aa, Homo sapiens; identical to SEQ ID NO: 832189

SEQ ID NO: 832201 - protein, 332 aa, Homo sapiens; identical to SEQ ID NO: 832187

SEQ ID NO: 832202 - protein, 332 aa, Homo sapiens; identical to SEQ ID NO: 832187

SEQ ID NO: 832203 - protein, 339 aa, Homo sapiens
GGGAPQPPPTGASPKGTEAAWAAEPGNLRPQLERLCGLRSGAGSGRRATHPEPVHGKKLFLRFDLDEEMGPPGSSPTPEPPQKEVQKEGAADPKQVGEPSGQKTLDGSSRSAELVPQGEDDSEYLERDAPAGDAGRWLRVSFGLFGSVWVNDFSRAKKANKRGDWRDPSPRLVLHFGGGGFLAFYNCQLSWSSSPVVTPTCDILSEKFHRGQALEALGQAQPVCYTLLDQRYFSGLGNIIKNEALYRAGIHPLSLGSVLSASRREVLVDHVVEFSTAWLQGKFQGRPQHTQVYQKEQCPAGHQVMKEAFGPEDGLQRLTWWCPQCQPQLSEEPEQCQFS

SEQ ID NO: 832204 - protein, 73 aa, Homo sapiens
ELGTRVGSMQGCVCVGVCVQGCVRGFLAEPQLAYVIRIRGINGVSPKVRKVLQLLRLRQIFNGTLCEAQQGFD

SEQ ID NO: 832205 - protein, 80 aa, Homo sapiens
SRIRHNGGALFPAGTMEGVEEKKKEVPAVPETLKKKRRNFAELKIKRLRKKFAQKMLRKARRKLIYEKAKHYHKEYRQNQ

SEQ ID NO: 832206 - protein, 181 aa, Homo sapiens
MLRSILFLEWTREPEDSTDISSKSALQRLGHEVRPGCPLAAEQQYQPRGSLPAGPWARHASRCLKLTLLPTPKIGTPRGMDAATKRSDDKDLAERRKGCSLRLPRQGAGRAAKSDFELQLAVWNVAQEALIFLAGTVAAVLACGPGQPLPSRRAGEDWCMLGFVVRPHEARPGNIMGRNGA

SEQ ID NO: 832207 - protein, 145 aa, Homo sapiens; identical to SEQ ID NO: 832179

SEQ ID NO: 832208 - protein, 332 aa, Homo sapiens; identical to SEQ ID NO: 832187

SEQ ID NO: 832209 - protein, 145 aa, Homo sapiens; identical to SEQ ID NO: 832179

SEQ ID NO: 832210 - protein, 145 aa, Homo sapiens; identical to SEQ ID NO: 832179

SEQ ID NO: 832211 - protein, 145 aa, Homo sapiens; identical to SEQ ID NO: 832179

SEQ ID NO: 832212 - protein, 332 aa, Homo sapiens; identical to SEQ ID NO: 832187

SEQ ID NO: 832213 - protein, 339 aa, Homo sapiens; identical to SEQ ID NO: 832203

SEQ ID NO: 832214 - protein, 189 aa, Homo sapiens
MGYRGSPGGARSASPSCQRSQSSASSPKELVVLLMEPCRLGNLTSKCPHHSRRKLWLNHPLPSREKKKEVPAVPETLKKKRRNFAELKIKRLRKKFAQKMLRKARRKLIYEKAKHYHKEYRQMYRTEIRMARMARKAGNFYVPAEPKLAFVIRIRGINGVSPKVRKVLQLLRLRQIFNGTLCEAQQGFD

SEQ ID NO: 832215 - protein, 145 aa, Homo sapiens; identical to SEQ ID NO: 832179

SEQ ID NO: 832216 - protein, 145 aa, Homo sapiens; identical to SEQ ID NO: 832179

SEQ ID NO: 832217 - protein, 175 aa, Homo sapiens
LSHGRGRNLSPPRTSLRSSRPLPWGVLASACRARQSAEPRPSSSGRPVPTGPWLATFRKLEHSRPPRLRSGAAEDSPVGWSDDKDLAERRKGCSLRLPRQGAGRAAKSDFELQLAVWNVAQEALIFLAGTVAAVLACGPGQPLPSRRAGEDWCMLGFVVRPHEARPGNIMGRNGA

SEQ ID NO: 832218 - protein, 143 aa, Homo sapiens
NYVYVRGLGCYVTLEGVKEKKKEVPAVPETLKKKRRNFAELKIKRLRKKFAQKMLRKARRKLIYEKAKHYHKEYRQMYRTEIRMARMARKAGNFYVPAEPKLAFVIRIRGINGVSPKVRKVLQLLRLRQIFNGTLCEAQQGFD

SEQ ID NO: 832219 - protein, 145 aa, Homo sapiens; identical to SEQ ID NO: 832179

SEQ ID NO: 832220 - protein, 145 aa, Homo sapiens; identical to SEQ ID NO: 832179

SEQ ID NO: 832221 - protein, 90 aa, Homo sapiens
AGSYEWLVLCVEKAKHYHKEYRQMYRTEIRMARMARKAGNFYVPAEPKLAFVIRIRGINGVSPKVRKVLQLLRLRQIFNGTLCEAQQGFD

SEQ ID NO: 832222 - protein, 141 aa, Homo sapiens; identical to SEQ ID NO: 832189

SEQ ID NO: 832223 - protein, 147 aa, Homo sapiens
MEGVEEPKNAVLSVPTNTLSGKTRLNLHSLKIPRLLPDFCPNLYASDDGMVGRLSIAKEPSNLSHLHGILLGAKIGHMEDVMNSENGLEGMARKAGNFYVPAEPKLAFVIRIRGINGVSPKVRKVLQLLRLRQIFNGTLCEAQQGFD

SEQ ID NO: 832224 - protein, 107 aa, Homo sapiens
SRYCLLTNQLRKIIMVDTLVHSSNKPVDLVLPVASISTFYKMGGLFLSFHLVEKTFEAATGSYLPLAFVIRIRGINGVSPKVRKVLQLLRLRQIFNGTLCEAQQGFD

SEQ ID NO: 832225 - protein, 73 aa, Homo sapiens; identical to SEQ ID NO: 832204

SEQ ID NO: 832226 - protein, 332 aa, Homo sapiens; identical to SEQ ID NO: 832187

SEQ ID NO: 832227 - protein, 72 aa, Homo sapiens
PRARRNSARASINMLRIVEPYIAWGYPNLKSVNELIYKRGYGKINKKRIALTDNALMCSISVVNTASSAWRI

SEQ ID NO: 832228 - protein, 332 aa, Homo sapiens; identical to SEQ ID NO: 832187

SEQ ID NO: 832229 - protein, 332 aa, Homo sapiens; identical to SEQ ID NO: 832187

SEQ ID NO: 832230 - protein, 640 aa, Homo sapiens
SQWCGRQAAMAAVRGLRVSVKAEAPAGPALGLPSPEAESGVDRGEPEPMEVEEGELEIVPVRRSLKELIPDTSRRYENKAGSFITGIDVTSKEAIEKKEQRAKRFHFRSEVNLAQRNVALDRDMMKKAIPKVRLETIYICGVDEMSTQDVFSYFKEYPPAHIEWLDDTSCNVVWLDEMTATRALINMSSLPAQDKIRSRDASEDKSAEKRKKDKQEDSSDDDEAEEGEVEDENSSDVELDTLSQVEEESLLRNDLRPANKLAKGNRLFMRFATKAPGLGSIQDWVYDKKELGAARRSQYYMKYGNPNYGGMKGILSNSWKRRYHSRRIQRDVIKKRALIGDDVGLTSYKHRHSGLVNVPEEPIEEEEEEEEEEEEEEEEDQDMDADDRVVVEYHEELPALKQPRERSASRRSSASSSDSDEMDYDLELKMISTPSPKKSMKMTMYADEVESQLKNIRNSMRADSVSSSNIKNRIGNKLPPEKFADVRHLLDEKRQHSRPRPPVSSTKSDIRQRLGKRPHSPEKAFSSNPVVRREPSSDVHSRLGVPRQDSKGLYADTREKKSGNLWTRLGSAPKTKEKNTKKVDHRAPGAEEDDSELQRAWGALIKEKEQSRQKKSRLDNLPSLQIEVSRESSSGSEAES

SEQ ID NO: 832231 - protein, 283 aa, Homo sapiens
SQWCGRQAAMAAVRGLRVSVKAEAPAGPALGLPSPEAESGVDRGEPEPMEVEEGELEIVPVRRSLKELIPDTSRRYENKAGSFITGIDVTSKEAIEKKEQRAKRFHFRSEVNLAQRNVALDRDMMKKAIPKVRLETIYICGVDEMSTQDVFSYFKEYPPAHIEWLDDTSCNVVWLDEMTATRALINMSSLPAQDKIRSRDASEDKSAEKRKKDKQEDSSDDDEAEEGEVEDENSSDVELDTLSQVEEESLLRNDLRPANKLAKGNRLFMRFATKAPGLGSIQD

SEQ ID NO: 832232 - protein, 283 aa, Homo sapiens; identical to SEQ ID NO: 832231

SEQ ID NO: 832233 - protein, 75 aa, Homo sapiens
PLIYRNFEPRVPLRLWAQRFRGRVLMPLGPMAAALKPDILAQGGARSRNLPRRSWRPLAPAHTVTLRSCYFGKTS

SEQ ID NO: 832234 - protein, 283 aa, Homo sapiens; identical to SEQ ID NO: 832231

SEQ ID NO: 832235 - protein, 283 aa, Homo sapiens; identical to SEQ ID NO: 832231

SEQ ID NO: 832236 - protein, 340 aa, Homo sapiens
MKYGNPNYGGMKGILSNSWKRRYHSRRIQRDVIKKRALIGDDVGLTSYKHRHSGLVNVPEEPIEEEEEEEEEEEEEEEEDQDMDADDRVVVEYHEELPALKQPRERSASRRSSASSSDSDEMDYDLELKMISTPSPKKSMKMTMYADEVESQLKNIRNSMRADSVSSSNIKNRIGNKLPPEKFADVRHLLDEKRQHSRPRPPVSSTKSDIRQRLGKRPHSPEKAFSSNPVVRREPSSDVHSRLGVPRQDSKGLYADTREKKSGNLWTRLGSAPKTKEKNTKKVDHRAPGAEEDDSELQRAWGALIKEKEQSRQKKSRLDNLPSLQIEVSRESSSGSEAES

SEQ ID NO: 832237 - protein, 283 aa, Homo sapiens; identical to SEQ ID NO: 832231

SEQ ID NO: 832238 - protein, 283 aa, Homo sapiens; identical to SEQ ID NO: 832231

SEQ ID NO: 832239 - protein, 142 aa, Homo sapiens
ADRKILSSFLCLVFLAIPKVRLETIYICGVDEMSTQDVFSYFKEYPPAHIEWLDDTSCKYTRVSCEYAFVDDFSRVLAIRDGEWFWPILLVYAELLLLVQERKNCRAVKRSMPLPVCQLIPHSVPRQLRGGGQGSRRWVTGL

SEQ ID NO: 832240 - protein, 212 aa, Homo sapiens
MVSRMVSTMLSGLLFWLASGWTPAFAYSPRTPDRVSEADIQRLLHGVMEQLGIARPRVEYPAHQAMNLVGPQSIEGGAHEGLQHLGPFGNIPNIVAELTGDNIPKDFSEDQGYPDPPNPCPVGKTADDGCLENTPDTAEFSREFQLHQHLFDPEHDYPGLGKWNKKLLYEKMKGGERRKRRSVNPYLQGQRLDNVVAKKSVPHFSDEDKDPE

SEQ ID NO: 832241 - protein, 212 aa, Homo sapiens; identical to SEQ ID NO: 832240

SEQ ID NO: 832242 - protein, 212 aa, Homo sapiens; identical to SEQ ID NO: 832240

SEQ ID NO: 832243 - protein, 212 aa, Homo sapiens; identical to SEQ ID NO: 832240

SEQ ID NO: 832244 - protein, 212 aa, Homo sapiens; identical to SEQ ID NO: 832240

SEQ ID NO: 832245 - protein, 194 aa, Homo sapiens
MVSRMVSTMLSGLLFWLASGWTPAFAYSPRTPDRVSEADIQRLLHGVMEQLGIARPRVEYPAHQAMNLVGPQSIEGGAHEGLQHLGPFGNIPNIVAELTGDNIPKDFSEDQGYPDPPNPCPVGKTADDGCLENTPDTAEFSREFQLHQHLFDPEHDYPGLGKWSVNPYLQGQRLDNVVAKKSVPHFSDEDKDPE

SEQ ID NO: 832246 - protein, 242 aa, Homo sapiens
RSERRLLSLMPSERRYTINKLLITVSQYDDVITRMVSTMLSGLLFWLASGWTPAFAYSPRTPDRVSEADIQRLLHGVMEQLGIARPRVEYPAHQAMNLVGPQSIEGGAHEGLQHLGPFGNIPNIVAELTGDNIPKDFSEDQGYPDPPNPCPVGKTADDGCLENTPDTAEFSREFQLHQHLFDPEHDYPGLGKWNKKLLYEKMKGGERRKRRSVNPYLQGQRLDNVVAKKSVPHFSDEDKDPE

SEQ ID NO: 832247 - protein, 212 aa, Homo sapiens; identical to SEQ ID NO: 832240

SEQ ID NO: 832248 - protein, 226 aa, Homo sapiens
MVSRMVSTMLSGLLFWLASGWTPAFAYSPRTPDRVSEADIQRLLHGVMEQLGIARPRVEYPAHQAMNLVGPQSIEGGAHEGLQHLGPFGNIPNIVAELTGDNIPKDFSEDQGYPDPPNPCPVGKTADDGCLENTPDTAEFSREFQLHQHLFDPEHDYPGLGKWNKKLLYEKMKGGERRKRRVTRAWLDCCGDAWSFLSGAVNRLKPSLVGKSQNPPLCSPEKHWSM

SEQ ID NO: 832249 - protein, 272 aa, Homo sapiens
MPYEIKKVFASLPQVERGVSKIIGGDPKGNNFLYTNGKCVILRNIDNPALADIYTEHAHQVVVAKYAPSGFYIASGDVSGKLRIWDTTQKEHLLKYEYQPFAGKIKDIAWTEDSKRIAVVGEGREKFGAVFLWDSGSSVGEITGHNKVINSVDIKQSRPYRLATGSDDNCAAFFEGPPFKFKFTVGDHSRFVNCVRFSPDGNRFATASADGQIYIYDGKTGEKVCALGGSKARGGGFALVWVPQALWFGCGAPPGWGARDARGGLPWARLGT

SEQ ID NO: 832250 - protein, 606 aa, Homo sapiens [sequence omitted]

SEQ ID NO: 832251 - protein, 606 aa, Homo sapiens [sequence omitted]

SEQ ID NO: 832252 - protein, 606 aa, Homo sapiens [sequence omitted]

SEQ ID NO: 832253 - protein, 589 aa, Homo sapiens
MVGGGGVIGRGGNNFLYTNGKCVILRNIDNPALADIYTEHAHQVVVAKYAPSGFYIASGDVSGKLRIWDTTQKEHLLKYEYQPFAGKIKDIAWTEDSKRIAVVGEGREKFGAVFLWDSGSSVGEITGHNKVINSVDIKQSRPYRLATGSDDNCAAFFEGPPFKFKFTVGDHSRFVNCVRFSPDGNRFATASADGQIYIYDGKTGEKVCALGGSKAHDGGIYAISWSPDSTHLLSASGDKTSKIWDVSVNSVVSTFPMGSTVLDQQLGCLWQKDHLLSVSLSGYINYLDRNNPSKPLHVIKGHSKSIQCLTVHKNGGKSYIYSGSHDGHINYWDSETGENDSFAGKGHTNQVSRMTVDESGQLISCSMDDTVRYTSLMLRDYSGQGVVKLDVQPKCVAVGPGGYAVVVCIGQIVLLKDQRKCFSIDNPGYEPEVVAVHPGGDTVAIGGVDGNVRLYSILGTTLKDEGKLLEAKGPVTDVAYSHDGAFLAVCDASKVVTVFSVADGYSENNVFYGHHAKIVCLAWSPDNEHFASGGMDMMVYVWTLSDPETRVKIQDAHRLHHVSSLAWLDEHTLVTTSHDASVKEWTITY

SEQ ID NO: 832254 - protein, 606 aa, Homo sapiens [sequence omitted]

SEQ ID NO: 832255 - protein, 561 aa, Homo sapiens
MNPALADIYTEHAHQVVVAKYAPSGFYIASGDVSGKLRIWDTTQKEHLLKYEYQPFAGKIKDIAWTEDSKRIAVVGEGREKFGAVFLWDSGSSVGEITGHNKVINSVDIKQSRPYRLATGSDDNCAAFFEGPPFKFKFTVGDHSRFVNCVRFSPDGNRFATASADGQIYIYDGKTGEKVCALGGSKAHDGGIYAISWSPDSTHLLSASGDKTSKIWDVSVNSVVSTFPMGSTVLDQQLGCLWQKDHLLSVSLSGYINYLDRNNPSKPLHVIKGHSKSIQCLTVHKNGGKSYIYSGSHDGHINYWDSETGENDSFAGKGHTNQVSRMTVDESGQLISCSMDDTVRYTSLMLRDYSGQGVVKLDVQPKCVAVGPGGYAVVVCIGQIVLLKDQRKCFSIDNPGYEPEVVAVHPGGDTVAIGGVDGNVRLYSILGTTLKDEGKLLEAKGPVTDVAYSHDGAFLAVCDASKVVTVFSVADGYSENNVFYGHHAKIVCLAWSPDNEHFASGGMDMMVYVWTLSDPETRVKIQDAHRLHHVSSLAWLDEHTLVTTSHDASVKEWTITY

SEQ ID NO: 832256 - protein, 571 aa, Homo sapiens
  misc_feature (11)..(11): Xaa can be any naturally occurring amino acid
AICLAGWAGAXNPALADIYTEHAHQVVVAKYAPSGFYIASGDVSGKLRIWDTTQKEHLLKYEYQPFAGKIKDIAWTEDSKRIAVVGEGREKFGAVFLWDSGSSVGEITGHNKVINSVDIKQSRPYRLATGSDDNCAAFFEGPPFKFKFTVGDHSRFVNCVRFSPDGNRFATASADGQIYIYDGKTGEKVCALGGSKAHDGGIYAISWSPDSTHLLSASGDKTSKIWDVSVNSVVSTFPMGSTVLDQQLGCLWQKDHLLSVSLSGYINYLDRNNPSKPLHVIKGHSKSIQCLTVHKNGGKSYIYSGSHDGHINYWDSETGENDSFAGKGHTNQVSRMTVDESGQLISCSMDDTVRYTSLMLRDYSGQGVVKLDVQPKCVAVGPGGYAVVVCIGQIVLLKDQRKCFSIDNPGYEPEVVAVHPGGDTVAIGGVDGNVRLYSILGTTLKDEGKLLEAKGPVTDVAYSHDGAFLAVCDASKVVTVFSVADGYSENNVFYGHHAKIVCLAWSPDNEHFASGGMDMMVYVWTLSDPETRVKIQDAHRLHHVSSLAWLDEHTLVTTSHDASVKEWTITY

SEQ ID NO: 832257 - protein, 606 aa, Homo sapiens [sequence omitted]

SEQ ID NO: 832258 - protein, 542 aa, Homo sapiens
MPYEIKKVFASLPQVERGVSKIIGGDPKGNNFLYTNGKCVILRNIDNPALADIYTEHAHQVVVAKYAPSGFYIASGDVSGKLRIWDTTQKEHLLKYEYQPFAGKIKDIAWTEDSKRIAVVGEGREKFGAVFLWDSGSSVGEITGHNKVINSVDIKQSRPYRLATGSDDNCAAFFEGPPFKFKFTVGDHSRFVNCVRFSPDGNRFATASADGQIYIYDGKTGEKVCALGGSKAHDGGIYAISWSPDSTHLLSASGDKTSKIWDVSVNSVVSTFPMGSTVLDQQLGCLWQKDHLLSVSLSGYINYLDRNNPSKPLHVIKGHSKSIQCLTVHKNGGKSYIYSGSHDGHINILGLKEGGYAVVVCIGQIVLLKDQRKCFSIDNPGYEPEVVAVHPGGDTVAIGGVDGNVRLYSILGTTLKDEGKLLEAKGPVTDVAYSHDGAFLAVCDASKVVTVFSVADGYSENNVFYGHHAKIVCLAWSPDNEHFASGGMDMMVYVWTLSDPETRVKIQDAHRLHHVSSLAWLDEHTLVTTSHDASVKEWTITY

SEQ ID NO: 832259 - protein, 533 aa, Homo sapiens
MPYEIKKVFASLPQVERGVSKIIGGDPKGNNFLYTNGKCVILRNIDNPALADIYTEHAHQVVVAKYAPSGFYIASGDVSGKLRIWDTTQKEHLLKYEYQPFAGKIKDIAWTEDSKRIAVVGEGREKFGAVFLWDSGSSVGEITGHNKVINSVDIKQSRPYRLATGSDDNCAAFFEGPPFKFKFTVGDHSRFVNCVRFSPDGNRFATASADGQIYIYDGKTGEKVCALGGSKAHDGGIYAISWSPDSTHLLSASGDKTSKIWDVSVNSVVSTFPMGSTVLDQQLGCLWQKDHLLSVSLSGYINYLDRNNPSKPLHVIKGHSKSIQCLTVHKNGGKSYIYSGSHDGHINYWDSETGENDSFAGKGHTNQVSRMTVDESGQLISCSMDDTVRYTSLMLRDYSGQGVVKLDVQPKCVAVGPGGYAVVVCIGQIVLLKDQRKCFSIDNPGYEPEVVAVHPGGDTVAIGGVDGNVRLYSILGTTLKDEGKLLEAKGPVTDVAYSHDGAFLAVCDASKVVTVFSVADGYSSLHMKNKAST

SEQ ID NO: 832260 - protein, 597 aa, Homo sapiens
MPYEIKKVFASLPQVERGVSKIIGGDPKGNNFLYTNGKCVILRNIDNPALADIYTEHAHQVVVAKYAPSGFYIASGDVSGKLRIWDTTQKEHLLKYEYQPFAGKIKDIAWTEDSKRMFGAVFLWDSGSSVGEITGHNKVINSVDIKQSRPYRLATGSDDNCAAFFEGPPFKFKFTVGDHSRFVNCVRFSPDGNRFATASADGQIYIYDGKTGEKVCALGGSKAHDGGIYAISWSPDSTHLLSASGDKTSKIWDVSVNSVVSTFPMGSTVLDQQLGCLWQKDHLLSVSLSGYINYLDRNNPSKPLHVIKGHSKSIQCLTVHKNGGKSYIYSGSHDGHINYWDSETGENDSFAGKGHTNQVSRMTVDESGQLISCSMDDTVRYTSLMLRDYSGQGVVKLDVQPKCVAVGPGGYAVVVCIGQIVLLKDQRKCFSIDNPGYEPEVVAVHPGGDTVAIGGVDGNVRLYSILGTTLKDEGKLLEAKGPVTDVAYSHDGAFLAVCDASKVVTVFSVADGYSENNVFYGHHAKIVCLAWSPDNEHFASGGMDMMVYVWTLSDPETRVKIQDAHRLHHVSSLAWLDEHTLVTTSHDASVKEWTITY

SEQ ID NO: 832261 - protein, 594 aa, Homo sapiens [sequence omitted]

SEQ ID NO: 832262 - protein, 430 aa, Homo sapiens
DCGEGGSLIQDHSRFVNCVRFSPDGNRFATASADGQIYIYDGKTGEKVCALGGSKAHDGGIYAISWSPDSTHLLSASGDKTSKIWDVSVNSVVSTFPMGSTVLDQQLGCLWQKDHLLSVSLSGYINYLDRNNPSKPLHVIKGHSKSIQCLTVHKNGGKSYIYSGSHDGHINYWDSETGENDSFAGKGHTNQVSRMTVDESGQLISCSMDDTVRYTSLMLRDYSGQGVVKLDVQPKCVAVGPGGYAVVVCIGQIVLLKDQRKCFSIDNPGYEPEVVAVHPGGDTVAIGGVDGNVRLYSILGTTLKDEGKLLEAKGPVTDVAYSHDGAFLAVCDASKVVTVFSVADGYSENNVFYGHHAKIVCLAWSPDNEHFASGGMDMMVYVWTLSDPETRVKIQDAHRLHHVSSLAWLDEHTLVTTSHDASVKEWTITY

SEQ ID NO: 832263 - protein, 236 aa, Homo sapiens [sequence omitted]

SEQ ID NO: 832264 - protein, 300 aa, Homo sapiens
MPYEIKKVFASLPQVERGVSKIIGGDPKGNNFLYTNGKCVILRNIDNPALADIYTEHAHQVVVAKYAPSGFYIASGDVSGKLRIWDTTQKEHLLKYEYQPFAGKIKDIAWTEDSKRIAVVGEGREKFGAVFLWDSGSSVGEITGHNKVINSVDIKQSRPYRLATGSDDNCAAFFEGPPFKFKFTVGDHSRFVNCVRFSPDGNRFATASADGQIYIYDGKTGEKVCALGGSKAHDGGIYAISWSPDSTHLLSASGDKTSKIWDVSVNSVVTVSPSCFDVPLSFPLLLSRAKVNLRTKMKSL

SEQ ID NO: 832265 - protein, 174 aa, Homo sapiens
MTGPSCLLWWGGGMGARHRNREMTCSAAVKLYVPDSVHPEAGAGARSRDEGKLLEAKGPVTDVAYSHDGAFLAVCDASKVVTVFSVADGYSENNVFYGHHAKIVCLAWSPDNEHFASGGMDMMVYVWTLSDPETRVKIQDAHRLHHVSSLAWLDEHTLVTTSHDASVKEWTITY

SEQ ID NO: 832266 - protein, 112 aa, Homo sapiens
RYPLWNAAFLAVCDASKVVTVFSVADGYSENNVFYGHHAKIVCLAWSPDNEHFASGGMDMMVYVWTLSDPETRVKIQDAHRLHHVSSLAWLDEHTLVTTSHDASVKEWTITY

SEQ ID NO: 832267 - protein, 291 aa, Homo sapiens
RLGQPVLIGRGRNNPSKPLHVIKVTVNDGHSKSIQCLTVHKNGGKSYIYSGSHDGHINYWDSETGENDSFAGKGHTNQVSRMTVDESGQLISCSMDDTVRYTSLMLRDYSGQGVVKLDVQPKCVAVGPGGYAVVVCIGQIVLLKDQRKCFSIDNPGYEPEVVAVHPGGDTVAIGGVDGNVRLYSILGTTLKDEGKLLEAKGPVTDVAYSHDGAFLAVCDASKVVTVFSVADGYSENNVFYGHMHTGCTMSAAWPGWTSTRWSRPPMMPLSRSGQSPTEEPHPRLWMDRIRD

SEQ ID NO: 832268 - protein, 272 aa, Homo sapiens
MPYEIKKVFASLPQVERGVSKIIGGDPKGNNFLYTNGKCVILRNIDNPALADIYTEHAHQVVVAKYAPSGFYIASGDVSGKLRIWDTTQKEHLLKYEYQPFAGKIKDIAWTEDSKRIAVVGEGREKFGAVFLWDSGSSVGEITGHNKVINSVDIKQSRPYRLATGSDDNCAAFFEGPPFKFKFTVGDHSRFVNCVRFSPDGNRFATASADGQIYIYDGKTGEKVCALGGSKARGGGFALVWVPQALWFGCGAPPGLGARDARGGLPWARLGT

SEQ ID NO: 832269 - protein, 235 aa, Homo sapiens
MPYEIKKVFASLPQVERGVSKIIGGDPKGNNFLYTNGKCVILRNIDNPALADIYTEHAHQVVVAKYAPSGFYIASGDVSGKLRIWDTTQKEHLLKYEYQPFAGKIKDIAWTEDSKRIAVVGEGREKFGAVFLWDSGSSVGEITGHNKVINSVDIKQSRPYRLATGSDDNCAAFFEGPPFKFKFTVGDHSRFVNCVRFSPDGNRFATASADGQIYIYDGKTGDWCSVERSCSVERR

SEQ ID NO: 832270 - protein, 142 aa, Homo sapiens
  misc_feature (129)..(129): Xaa can be any naturally occurring amino acid
MPYEIKKVFASLPQVERGVSKIIGGDPKGNNFLYTNGKCVILRNIDNPALADIYTEHAHQVVVAKYAPSGFYIASGDVSGKLRIWDTTQKEHLLKYEYQPFAGKIKDIAWTEDSKRIAVVGEGRENLTXFLFYKGYLYVGRI

SEQ ID NO: 832271 - protein, 606 aa, Homo sapiens [sequence omitted]

SEQ ID NO: 832272 - protein, 606 aa, Homo sapiens [sequence omitted]

SEQ ID NO: 832273 - protein, 537 aa, Homo sapiens
MPYEIKKVFASLPQVERGVSKIIGGDPKGNNFLYTNGKCVILRNIDNPALADIYTEHAHQVVVAKYAPSGFYIASGDVSGKLRIWDTTQKEHLLKYEYQPFAGKIKDIAWTEDSKRIAVVGEGREKFGAVFLWDSGSSVGEITGHNKVINSVDIKQSRPYRLATGSDDNCAAFFEGPPFKFKFTVGDHSRFVNCVRFSPDGNRFATASADGQIYIYDGKTGEKVCALGGSKAHDGGIYAISWSPDSTHLLSASGDKTSKIWDVSVNSVVSTFPMGSTVLDQQLGCLWQKDHLLSVSLSGYINYLDRNNPSKPLHVIKGHSKSIQCLTVHKNGGKSYIYSGSHDGHINYWDSETGENDSFAGKGHTNQVSRMTVDESGQLISCSMDDTVRYTSLMLRDYSGQGVVKLDVQPKCVAVGPGGYAVVVCIGQIVLLKDQRKCFSIDNPGYEPEVVAVHPGGDTVAIGGVDGNVRLYSILGTTLKDEGKLLEAKGPVTDVAYSHDGAFLAVCDASKVVTVFSVADGYSENNVFYGHQFAHEK

SEQ ID NO: 832274 - protein, 184 aa, Homo sapiens
MGSTVLDQQLGCLWQKDHLLSVSLSGYINYLDRNNPSKPLHVIKGTEIYVSGKLRIWDTTQKEHLLKYEYQPFAGKIKDIAWTEDSKRIAVVGEGREKFGAVFLWDSGSSVGEITGHNKVINSVDIKQSRPYRLATGSDDNCAAFFEGPPFKFKFTVGDHSRFVNCVRFFSRAKVNLRTKMKSL

SEQ ID NO: 832275 - protein, 606 aa, Homo sapiens [sequence omitted]

SEQ ID NO: 832276 - protein, 607 aa, Homo sapiens
YNAKAIKKVFASLPQVERGVSKIIGGDPKGNNFLYTNGKCVILRNIDNPALADIYTEHAHQVVVAKYAPSGFYIASGDVSGKLRIWDTTQKEHLLKYEYQPFAGKIKDIAWTEDSKRIAVVGEGREKFGAVFLWDSGSSVGEITGHNKVINSVDIKQSRPYRLATGSDDNCAAFFEGPPFKFKFTVGDHSRFVNCVRFSPDGNRFATASADGQIYIYDGKTGEKVCALGGSKAHDGGIYAISWSPDSTHLLSASGDKTSKIWDVSVNSVVSTFPMGSTVLDQQLGCLWQKDHLLSVSLSGYINYLDRNNPSKPLHVIKGHSKSIQCLTVHKNGGKSYIYSGSHDGHINYWDSETGENDSFAGKGHTNQVSRMTVDESGQLISCSMDDTVRYTSLMLRDYSGQGVVKLDVQPKCVAVGPGGYAVVVCIGQIVLLKDQRKCFSIDNPGYEPEVVAVHPGGDTVAIGGVDGNVRLYSILGTTLKDEGKLLEAKGPVTDVAYSHDGAFLAVCDASKVVTVFSVADGYSENNVFYGHHAKIVCLAWSPDNEHFASGGMDMMVYVWTLSDPETRVKIQDAHRLHHVSSLAWLDEHTLVTTSHDASVKEWTITY

SEQ ID NO: 832277 - protein, 606 aa, Homo sapiens [sequence omitted]

SEQ ID NO: 832278 - protein, 588 aa, Homo sapiens
MPYEIKKVFASLPQVERGVSKIIGGDPKGNNFLYTNGKCVILRNIDNPALADIYTEHAHQVVVAKYAPSGFYIASGDVSGKLRIWDTTQKEHLLKYEYQPFAGKIKDIAWTEDSKRIAVVGEGREKFGAVFLWDSGSSVGEITGHNKVINSVDIKQSRPYRLATGSDDNCAAFFEGPPFKFKFTVGDHSRFVNCVRFSPDGNRFATASADGQIYIYDGKTGEKVCALGGSKAHDGGIYAISWSPDSTHLLSASGDKTSKIWDVSVNSVVSTFPMGSTVLDQQLGCLWQKDHLLSVSLSGYINYLDRNNPSKPLHVIKGHSKSIQCLTVHYWDSETGENDSFAGKGHTNQVSRMTVDESGQLISCSMDDTVRYTSLMLRDYSGQGVVKLDVQPKCVAVGPGGYAVVVCIGQIVLLKDQRKCFSIDNPGYEPEVVAVHPGGDTVAIGGVDGNVRLYSILGTTLKDEGKLLEAKGPVTDVAYSHDGAFLAVCDASKVVTVFSVADGYSENNVFYGHHAKIVCLAWSPDNEHFASGGMDMMVYVWTLSDPETRVKIQDAHRLHHVSSLAWLDEHTLVTTSHDASVKEWTITY

SEQ ID NO: 832279 - protein, 606 aa, Homo sapiens [sequence omitted]

SEQ ID NO: 832280 - protein, 562 aa, Homo sapiens
MCRSQRMCRSQRMCRSQRMCRSQRMCRSIASGDVSGKLRIWDTTQKEHLLKYEYQPFAGKIKDIAWTEDSKRIAVVGEGREKFGAVFLWDSGSSVGEITGHNKVINSVDIKQSRPYRLATGSDDNCAAFFEGPPFKFKFTVGDHSRFVNCVRFSPDGNRFATASADGQIYIYDGKTGEKVCALGGSKAHDGGIYAISWSPDSTHLLSASGDKTSKIWDVSVNSVVSTFPMGSTVLDQQLGCLWQKDHLLSVSLSGYINYLDRNNPSKPLHVIKGHSKSIQCLTVHKNGGKSYIYSGSHDGHINYWDSETGENDSFAGKGHTNQVSRMTVDESGQLISCSMDDTVRYTSLMLRDYSGQGVVKLDVQPKCVAVGPGGYAVVVCIGQIVLLKDQRKCFSIDNPGYEPEVVAVHPGGDTVAIGGVDGNVRLYSILGTTLKDEGKLLEAKGPVTDVAYSHDGAFLAVCDASKVVTVFSVADGYSENNVFYGHHAKIVCLAWSPDNEHFASGGMDMMVYVWTLSDPETRVKIQDAHRLHHVSSLAWLDEHTLVTTSHDASVKEWTITY

SEQ ID NO: 832281 - protein, 466 aa, Homo sapiens
MPYEIKKVFASLPQVERGVSKIIGGDPKGNNFLYTNGKCVILRNIDDHSRFVNCVRFSPDGNRFATASADGQIYIYDGKTGEKVCALGGSKAHDGGIYAISWSPDSTHLLSASGDKTSKIWDVSVNSVVSTFPMGSTVLDQQLGCLWQKDHLLSVSLSGYINYLDRNNPSKPLHVIKGHSKSIQCLTVHKNGGKSYIYSGSHDGHINYWDSETGENDSFAGKGHTNQVSRMTVDESGQLISCSMDDTVRYTSLMLRDYSGQGVVKLDVQPKCVAVGPGGYAVVVCIGQIVLLKDQRKCFSIDNPGYEPEVVAVHPGGDTVAIGGVDGNVRLYSILGTTLKDEGKLLEAKGPVTDVAYSHDGAFLAVCDASKVVTVFSVADGYSENNVFYGHHAKIVCLAWSPDNEHFASGGMDMMVYVWTLSDPETRVKIQDAHRLHHVSSLAWLDEHTLVTTSHDASVKEWTITY

SEQ ID NO: 832282 - protein, 592 aa, Homo sapiens
VLNSFVRRTQGSARPSHLPGPLHFKEAQAGLEEPVRSQRQGEAVLAKEAEFGSERTRCAGQRSRIRAVVMSWSRLCASSGRSSGAYTPVHPPPNRGSRSALPQALPPLPSLQPAPSCSSLGNCPVRPFDTGNVDPMDRHGQGTVGHVDTDRRWTPSANPDGNRPSVHDGSLMDHSRFVNCVRFSPDGNRFATASADGQIYIYDGKTGEKVCALGGSKAHDGGIYAISWSPDSTHLLSASGDKTSKIWDVSVNSVVSTFPMGSTVLDQQLGCLWQKDHLLSVSLSGYINYLDRNNPSKPLHVIKGHSKSIQCLTVHKNGGKSYIYSGSHDGHINYWDSETGENDSFAGKGHTNQVSRMTVDESGQLISCSMDDTVRYTSLMLRDYSGQGVVKLDVQPKCVAVGPGGYAVVVCIGQIVLLKDQRKCFSIDNPGYEPEVVAVHPGGDTVAIGGVDGNVRLYSILGTTLKDEGKLLEAKGPVTDVAYSHDGAFLAVCDASKVVTVFSVADGYSENNVFYGHHAKIVCLAWSPDNEHFASGGMDMMVYVWTLSDPETRVKIQDAHRLHHVSSLAWLDEHTLVTTSHDASVKEWTITY

SEQ ID NO: 832283 - protein, 580 aa, Homo sapiens
MPYEIKKVFASLPQVERGVSKIIGGDPKGNNFLYTNGKCVILRNIDNPALADIYTEHAHQVVVAKYAPSGFYIASGDVSGKLRIWDTTQKEHLLKYEYQPFAGKIKDIAWTEDSKRIAVVGEGREKFGAVFLWDSGSSVGEITGHNKVINSVDIKQSRPYRLATGSDDNCAAFFEGPPFKFKFTVGDHSRFVNCVRFSPDGNRFATASADGQIYIYDGKTGEKVCALGGSKAHDGGIYAISWSPDSTHLLSASGDKTSKIWDVSVNSVVSTFPMGSTVLDQQLGCLWQKDHLLSVSLSGYINYLDRNNPSKPLHVIKGHSKSIQCLTVHKNGGKSYIYSGSHDGHINYWDSETGENDSFAGKGHTNQVSRMTVDESGQLISCSMDDTVRYTSLMLRDYSGQGVVKLDVQPKCVAVGPGGYAVVVCIGQIVLLKDQRKCFSIDNPGYEPEVVAVHPGGDTVAIGGVDGNVRLYSILGTTLKDEGKLLEAKGPVTDVAYSHDGAFLAVCDASKVVTVFSVADGYSENNVFYGHMHTGCTMSAAWPGWTSTRWSRPPMMPLSRSGQSPTEEPHPRLWMDRIRD

SEQ ID NO: 832284 - protein, 483 aa, Homo sapiens
MPYEIKKVFASLPQVERGVSKIIGGDPKGNNFLYTNGKCVILRNIDNPALADIYTEHAHQVVVAKYAPSGFYIASGDVSGKLRIWDTTQKEHLLKYEYQPFAGKIKDIAWTEDSKRIAVVGEGREKFGAVFLWDSGSSVGEITGHNKVINSVDIKQSRPYRLATGSDDNCAAFFEGPPFKFKFTVGDHSRFVNCVRFSPDGNRFATASADGQIYIYDGKTGEKVCALGGSKAHDGGIYAISWSPDSTHLLSASGDKTSKIWDVSVNSVVSTFPMGSTVLDQQLGCLWQKDHLLSVSLSGYINYLDRNNPSKPLHVIKGHSKSIQCLTVHKNGGKSYIYSGSHDGHINYWDSETGENDSFAGKGHTNQVSRMTVDESGQLISCSMDDTVRYTSLMLRDYSGQGVVKLDVQPKCVAVGPGGYAVVVCIGQIVLLKDQRKCFSIDNPGYEPEVVAVHPGGDTVAIGGVRIRCVFAWTGRRGRRARG

SEQ ID NO: 832285 - protein, 335 aa, Homo sapiens
MPYEIKKVFASLPQVERGVSKIIGGDPKGNNFLYTNGKCVILRNIDNPALADIYTEHAHQVVVAKYAPSGFYIASGDVSGKLRIWDTTQKEHLLKYEYQPFAGKIKDIAWTEDSKRIAVVGEGREKFGAVFLWDSGSSVGEITGHNKVINSVDIKQSRPYRLATGSDDNCAAFFEGPPFKFKFTVGDHSRFVNCVRFSPDGNRFATASADGQIYIYDGKTGEKVCALGGSKAHDGGIYAISWSPDSTHLLSASGDKTSKIWDVSVNSVVSTFPMGSTVLDQQLGCLWQKDHLLSVSRHRCISGRQHWLWQICSHQERIHTVDKAAVDANCELELE

SEQ ID NO: 832286 - protein, 220 aa, Homo sapiens
MPYEIKKVFASLPQVERGVSKIIGGDPKGNNFLYTNGKCVILRNIDNPALADIYTEHAHQVVVAKYAPSGFYIASGDVSGKLRIWDTTQKEHLLKYEYQPFAGKIKDIAWTEDSKRIAVVGEGREKFGAVFLWDSGSSVGEITGHNKVINSVDIKQSRPYRLATGSDDNCAAFFEGPPFKFKFTVGDHSRFVNCVRFSPDGNRFATASADGQIYIYDGRH

SEQ ID NO: 832287 - protein, 212 aa, Homo sapiens
MPYEIKKVFASLPQVERGVSKIIGGDPKGNNFLYTNGKCVILRNIDNPALADIYTEHAHQVVVAKYAPSGFYIASGDVSGKLRIWDTTQKEHLLKYEYQPFAGKIKDIAWTEDSKRIAVVGEGREKFGAVFLWDSGSSVGEITGHNKVINSVDIKQSRPYRLATGSDDNCAAFFEGPPFKFKFTVGDHSRFVNCVRFFSRAKVNLRTKMKSL

SEQ ID NO: 832288 - protein, 177 aa, Homo sapiens
QGGDGVNSCSKDRWSLRWDVPFASSLLLGPGQQSLLLLLLCLWSVLVGQLKQLSSCLAVQGLGELVNRRRHFQPLIEDGSLPLQPDIAGPFHKAGEVSFGLDVLSNAKILRPFLKQGIHHFLSLLLLHDSWGRSHLLSLGLLSFRPLLLSRAKVMSKFLEPLLARPRCPGHRFTIML

SEQ ID NO: 832289 - protein, 142 aa, Homo sapiens
MPYEIKKVFASLPQVERGVSKIIGGDPKGNNFLYTNGKCVILRNIDNPALADIYTEHAHQVVVAKYAPSGFYIASGDVSGKLRIWDTTQKEHLLKYEYQPFAGKIKDIAWTEDSKRIAVVGEGREKFFFLVNLGILLPTPTL

SEQ ID NO: 832290 - protein, 60 aa, Homo sapiens
SVNSVVSTFPMGSTVLDQQLGCLWQKDHLLSVSLSGYINYLDRNNPSKPLHVIKVRPALG

SEQ ID NO: 832291 - protein, 158 aa, Homo sapiens
TSRDVNLAEEQTPTAIPKKPSAGDDFDLGDAVVDGENDDPRPPNPPKPMPNPNPNHPSSSGSFSDADLADGVSGGEGKGGSDGGGSHRKEGEEADAPGVIPGIVGAVVVAVAGAISSFIAYQKKKLCFKENAEQGEVDMESHRNANAEPAVQRTLLEK

SEQ ID NO: 832292 - protein, 163 aa, Homo sapiens
AAVVYRIPDDLDNENKKPTAIPKKPSAGDDFDLGDAVVDGENDDPRPPNPPKPMPNPNPNHPSSSGSFSDADLADGVSGGEGKGGSDGGGSHRKEGEEADAPGVIPGIVGAVVVAVAGAISSFIAYQKKKLCFKENAEQGEVDMESHRNANAEPAVQRTLLEK

SEQ ID NO: 832293 - protein, 116 aa, Homo sapiens
MEKMRPTTTEPTQTDAKSNPNHPSSSGSFSDADLADGVSGGEGKGGSDGGGSHRKEGEEADAPGVIPGIVGAVVVAVAGAISSFIAYQNLGCLQITCPSSTSETPGSPDFFLIKIR

SEQ ID NO: 832294 - protein, 248 aa, Homo sapiens
FCARVEARGGAGAAGAELAGPLPSPAPFESPGFAPPGPWGSICPAAFAHALHSGTVPARSGRTMARGAALALLLFGLLGVLVAAPDGGFDLSDALPDNENKKPTAIPKKPSAGDDFDLGDAVVDGENDDPRPPNPPKPMPNPNPNHPSSSGSFSDADLADGVSGGEGKGGSDGGGSHRKEGEEADAPGVIPGIVGAVVVAVAGAISSFIAYQKKKLCFKENAEQGEVDMESHRNANAEPAVQRTLLEK

SEQ ID NO: 832295 - protein, 215 aa, Homo sapiens
GRVGRPTRICPAAFAHALHSGTVPARSGRTMARGAALALLLFGLLGVLVAAPDGGFDLSDALPDNENKKPTAIPKKPSAGDDFDLGDAVVDGENDDPRPPNPPKPMPNPNPNHPSSSGSFSDADLADGVSGGEGKGGSDGGGSHRKEGEEADAPGVIPGIVGAVVVAVAGAISSFIAYQKKKLCFKENAEQGEVDMESHRNANAEPAVQRTLLEK

SEQ ID NO: 832296 - protein, 248 aa, Homo sapiens; identical to SEQ ID NO: 832294

SEQ ID NO: 832297 - protein, 248 aa, Homo sapiens; identical to SEQ ID NO: 832294

SEQ ID NO: 832298 - protein, 151 aa, Homo sapiens
  misc_feature (1)..(2): Xaa can be any naturally occurring amino acid
  misc_feature (7)..(8): Xaa can be any naturally occurring amino acid
XXNSADXXIPKKPSAGDDFDLGDAVVDGENDDPRPPNPPKPMPNPNPNHPSSSGSFSDADLADGVSGGEGKGGSDGGGSHRKEGEEADAPGVIPGIVGAVVVAVAGAISSFIAYQKKKLCFKENAEQGEVDMESHRNANAEPAVQRTLLEK

SEQ ID NO: 832299 - protein, 168 aa, Homo sapiens [sequence omitted]

SEQ ID NO: 832300 - protein, 170 aa, Homo sapiens
MVGVSDSNSSSSLLYDLTEYSHRESTAFPNRHSAGDDFDLGDAVVDGENDDPRPPNPPKPMPNPNPNHPSSSGSFSDADLADGVSGGEGKGGSDGGGSHRKEGEEADAPGVIPGIVGAVVVAVAGAISSFIAYQKKKLCFKENAEQGEVDMESHRNANAEPAVQRTLLEK

SEQ ID NO: 832301 - protein, 232 aa, Homo sapiens
FCARVEARGGAGAAGAELAGPLPSPAPFESPGFAPPGPWGSICPAAFAHALHSGTVPARSGRTMARGAALALLLFGLLGVLVAAPDGGFDLSDALPGDDFDLGDAVVDGENDDPRPPNPPKPMPNPNPNHPSSSGSFSDADLADGVSGGEGKGGSDGGGSHRKEGEEADAPGVIPGIVGAVVVAVAGAISSFIAYQKKKLCFKENAEQGEVDMESHRNANAEPAVQRTLLEK

SEQ ID NO: 832302 - protein, 248 aa, Homo sapiens; identical to SEQ ID NO: 832294

SEQ ID NO: 832303 - protein, 248 aa, Homo sapiens; identical to SEQ ID NO: 832294

SEQ ID NO: 832304 - protein, 204 aa, Homo sapiens
FCARVEARGGAGAAGAELAGPLPSPAPFESPGFAPPGPWGSICPAAFAHALHSGTVPARSGRTMARGAALALLLFGLLGVLVAAPDGGFDLSDALPDNENKKPTAIPKKPSAGDDFDLGDAVVDGENDDPRPPNPPKPMPNPNPNHPSSSGSFSDADLADGVSGGEGKGGSDGGGSHRKEGEEADAPGVIPGIVGAVVVAVAGA

SEQ ID NO: 832305 - protein, 248 aa, Homo sapiens; identical to SEQ ID NO: 832294

SEQ ID NO: 832306 - protein, 163 aa, Homo sapiens; identical to SEQ ID NO: 832292

SEQ ID NO: 832307 - protein, 175 aa, Homo sapiens
RRRRRRRRRRRRRGGFDLSDVLPDNENKKPTAIPKKPSAGDDFDLGDAVVDGENDDPRPPNPPKPMPNPNPNHPSSSGSFSDADLADGVSGGEGKGGSDGGGSHRKEGEEADAPGVIPGIVGAVVVAVAGAISSFIAYQKKKLCFKENAEQGEVDMESHRNANAEPAVQRTLLEK

SEQ ID NO: 832308 - protein, 158 aa, Homo sapiens; identical to SEQ ID NO: 832291

SEQ ID NO: 832309 - protein, 168 aa, Homo sapiens
FCARVEARGGAGAAGAELAGPLPSPAPFESPGFAPPGPWGSICPAAFAHALHSGTVPARSGRTMARGAALALLLFGLLGVLVAAPDGGFDLSDALPDNENKKPTAIPKKPSAGDDFDLGDAVVDGENDDPRPPNPPKPMPNPNPNHPSSSGFSDANAEPAVQRTLLEK

SEQ ID NO: 832310 - protein, 247 aa, Homo sapiens
FCARVEARGGAGAAGAELAGPLPSPAPFESPGFAPPGPWGSICPAAFAHALHSGTVPARSGRTMARGAALALLLFGLLGVLVAAPDGGFDLSDALPDNENKKPTAIPKKPSAGDDFDLGDAVVDGENDDPRPPNPPKPMPNPNPNHPSSSGSFSDADLADGVSGGEGKGGSDGGGSHRKEGEEADAPGVIPGIVGAVVVAVAGAISSFIAYQKKKLCFKENAEQGEVDMESHRNANAEPAGKKDGER

SEQ ID NO: 832311 - protein, 237 aa, Homo sapiens
FCARVEARGGAGAAGAELAGPLPSPAPFESPGFAPPGPWGSICPAAFAHALHSGTVPARSGRTMARGAALALLLFGLLGVLVAAPDGGFDLSDALPDNENKKPTAIPKKPSAGDDFDLGDAVVDGENDDPRPPNPPKPMPNPNPNHPSSSGSFSDADLADGVSGGEGKGGSDGGGSHRKEGEEADAPGVIPGIVGAVVVAVAGAISSFIAYQKKKLCFKENGQLAGSLGPCIGIRRE

SEQ ID NO: 832312 - protein, 144 aa, Homo sapiens
MAPKKAKKRAGGANSNVFSMFEQTQIQEFKEAFTIMDQNRDGFIDKNDLRDTFAALGRVNVKNEEIDEMIKEAPGPINFTVFLTMFGEKLKGADPEETILNAFKVFDPEGKGVLKADYVREMLTTQAERFSKEEVDQMFAAFPP

SEQ ID NO: 832313 - protein, 162 aa, Homo sapiens
  misc_feature (6)..(6): Xaa can be any naturally occurring amino acid
GLQEFXNFVGRQCWVLSTMAPKKAKKRAGGANSNVFSMFEQTQIQEFKEAFTIMDQNRDGFIDKNDLRDTFAALGRVNVKNEEIDEMIKEAPGPINFTVFLTMFGEKLKGADPEETILNAFKVFDPEGKGVLKADYVREMLTTQAERFSKEEVDQMFAAFPP

SEQ ID NO: 832314 - protein, 119 aa, Homo sapiens
MAPKKAKKRAGGANSNVFSMFEQTQIQEFKEAFTIMDQNRDGFIDKNDLRDTFAALGRVNVKNEEIDEMIKEAPGPINFTVFLTMFGEKLKGADPEETILNAFKVFDPEGKGVLKADYT

SEQ ID NO: 832315 - protein, 118 aa, Homo sapiens
MTAKSGHGVIFKHGEEVFIVPGLQRAGRSVEFFSGGSAGSFPPWHLRKQRREPGAPTPTCSPCSNRPKSRNLRRWVQLLNHPPGWKSHPRGRTFFLFHIPSRDLSLDASILQTIPNSA

SEQ ID NO: 832316 - protein, 144 aa, Homo sapiens; identical to SEQ ID NO: 832312

SEQ ID NO: 832317 - protein, 144 aa, Homo sapiens; identical to SEQ ID NO: 832312

SEQ ID NO: 832318 - protein, 104 aa, Homo sapiens
MGVGVFVECGGIIWLPWRVNVKNEEIDEMIKEAPGPINFTVFLTMFGEKLKGADPEETILNAFKVFDPEGKGVLKADYVREMLTTQAERFSKEEVDQMFAAFPP

SEQ ID NO: 832319 - protein, 130 aa, Homo sapiens
MAPKKAKKRAGGANSNVFSMFEQTQIQEFKELGVPECVFPTLGRVNVKNEEIDEMIKEAPGPINFTVFLTMFGEKLKGADPEETILNAFKVFDPEGKGVLKADYVREMLTTQAERFSKEEVDQMFAAFPP

SEQ ID NO: 832320 - protein, 180 aa, Homo sapiens
SCASVETACRAGTCWVLATVDNLVTSKKYSLVDVTIALENCRSPPCYRSQQAEESRDVSGRPPGSHGTRNRAWIHPTGSDLKRRTIAALCRERRVNVKNEEIDEMIKEAPGPINFTVFLTMFGEKLKGADPEETILNAFKVFDPEGKGVLKADYVREMLTTQAERFSKEEVDQMFAAFPP

SEQ ID NO: 832321 - protein, 125 aa, Homo sapiens
  misc_feature (63)..(63): Xaa can be any naturally occurring amino acid
  misc_feature (66)..(66): Xaa can be any naturally occurring amino acid
MAPKKAKKRAGGANSNVFSMFEQTQIQEFKEAFTIMDQNRDGFIDKNDLRDTFAALGSEREKXLTXFGEKLKGADPEETILNAFKVFDPEGKGVLKADYVREMLTTQAERFSKEEVDQMFAAFPP

SEQ ID NO: 832322 - protein, 144 aa, Homo sapiens; identical to SEQ ID NO: 832312

SEQ ID NO: 832323 - protein, 103 aa, Homo sapiens
MVSTRAPGGDDAGWARRGSHYKRGTTAEGEEGGPQSLQPLVEKAPLTARAQRNPNQCPDRPQITAALGDSQTQNKRVGFFMACLLTSRGINNSQDLQNGIECF

SEQ ID NO: 832324 - protein, 144 aa, Homo sapiens; identical to SEQ ID NO: 832312

SEQ ID NO: 832325 - protein, 144 aa, Homo sapiens; identical to SEQ ID NO: 832312

SEQ ID NO: 832326 - protein, 162 aa, Homo sapiens; identical to SEQ ID NO: 832313
  misc_feature (6)..(6): Xaa can be any naturally occurring amino acid

SEQ ID NO: 832327 - protein, 131 aa, Homo sapiens
TTASGSACMGIPKSMGLRAFTIMDQNRDGFIDKNDLRDTFAALGRVNVKNEEIDEMIKEAPGPINFTVFLTMFGEKLKGADPEETILNAFKVFDPEGKGVLKADYVREMLTTQAERFSKEEVDQMFAAFPP

SEQ ID NO: 832328 - protein, 102 aa, Homo sapiens
TPGFSKSDVCKNAGRLIEKRLPKGRIGNGPPPRSQFGTSFLGAAYGGGSHLLLGIMAALRPLVKPQDRQKENPRSSSGTQSDRYVKIKRNWRKPRGIDNRVP

SEQ ID NO: 832329 - protein, 82 aa, Homo sapiens
TRKATGTQCWNTLGFARTVKLRINVGRCSHLLLGIMAALRPLVKPQDRQKENPRSSSGTQSDRYVKIKRNWRKPRGIDNRVP

SEQ ID NO: 832330 - protein, 56 aa, Homo sapiens
MPVLKRQSAVARGYKGLGLVNLASWNFGEETLLLGVDLIGHLPRDLTVQEYTSVIG

SEQ ID NO: 832331 - protein, 105 aa, Homo sapiens
LPCPAAGSAAPWESFRAGAGFGPGSAARPTRSTPGDSRGALRRPGLLGAGPRAAVGPTGFRRRFKGQILMPNIGYGSNKKTKHMLAQWLSGSSWVHNVKELGSAA

SEQ ID NO: 832332 - protein, 79 aa, Homo sapiens
RYSSAPRYSSAPSQTDMSKLSVTGGNPEALTTGFRRRFKGQILMPNIGYGSNKKTKHMLAQWLSGSSWVHNVKELGSAA

SEQ ID NO: 832333 - protein, 75 aa, Homo sapiens
AAPTTTKLTRSTFLGAAYGGGSHLLLGIMAALRPLVKPQDRQKENPRSSSGTQSDRYVKIKRNWRKPRGIDNRVP

SEQ ID NO: 832334 - protein, 102 aa, Homo sapiens; identical to SEQ ID NO: 832328

SEQ ID NO: 832335 - protein, 76 aa, Homo sapiens
TTHQPLRATVPSLFLGAAYGGGSHLLLGIMAALRPLVKPQDRQKENPRSSSGTQSDRYVKIKRNWRKPRGIDNRVP

SEQ ID NO: 832336 - protein, 76 aa, Homo sapiens; identical to SEQ ID NO: 832335

SEQ ID NO: 832337 - protein, 76 aa, Homo sapiens; identical to SEQ ID NO: 832335

SEQ ID NO: 832338 - protein, 134 aa, Homo sapiens
AGFFQVRRLENAGRLIEKRLPKGRIGNGPPLGPNSARASSALPTEVAAISFSVSVNPWQSAFLRDSSGPVAQWCGGLPFSAVVSVGIVIVSLLERVQEQNEAAELIGLCVPEPPALRLYSELRAACLFLGGGGC

SEQ ID NO: 832339 - protein, 134 aa, Homo sapiens; identical to SEQ ID NO: 832338

SEQ ID NO: 832340 - protein, 112 aa, Homo sapiens
MANWERAPPRSQFGTSFLGAAYGGGSHLLLAGDWKTLCDSVQSLGRKASFQDSSSPGAASSPKGIMAALRPLVKPQDRQKENPRSSSGTQSDRYVKIKRNWRKPRGIDNRVP

SEQ ID NO: 832341 - protein, 82 aa, Homo sapiens; identical to SEQ ID NO: 832329

SEQ ID NO: 832342 - protein, 76 aa, Homo sapiens; identical to SEQ ID NO: 832335

SEQ ID NO: 832343 - protein, 82 aa, Homo sapiens; identical to SEQ ID NO: 832329

SEQ ID NO: 832344 - protein, 76 aa, Homo sapiens; identical to SEQ ID NO: 832335

SEQ ID NO: 832345 - protein, 76 aa, Homo sapiens; identical to SEQ ID NO: 832335

SEQ ID NO: 832346 - protein, 76 aa, Homo sapiens; identical to SEQ ID NO: 832335

SEQ ID NO: 832347 - protein, 102 aa, Homo sapiens; identical to SEQ ID NO: 832328

SEQ ID NO: 832348 - protein, 120 aa, Homo sapiens
MGRAPKRRGGNKFQNGGYPQNKQESKKKAEEARHGTAEPKRGGPPGTTAGRRDKRDPATDTARPNQNKQRETEHKQHHTTAKSRPATTKDNSTRNRHLRTGNNTKSNEHPTPSHAATRAD

SEQ ID NO: 832349 - protein, 82 aa, Homo sapiens; identical to SEQ ID NO: 832329

SEQ ID NO: 832350 - protein, 102 aa, Homo sapiens; identical to SEQ ID NO: 832328

SEQ ID NO: 832351 - protein, 102 aa, Homo sapiens; identical to SEQ ID NO: 832328

SEQ ID NO: 832352 - protein, 125 aa, Homo sapiens
MSKLSVTGGNPEALTTGFRRRFKGQILMPNIGYGSNKKTKHMLAQWLSGSSWVHNVKELAGWRLAPQVPSEAFLGEETPFMRNEFAWVTLAMLGVRVHPLTPPSSLPNPQLRVVSNMALMINGFT

SEQ ID NO: 832353 - protein, 76 aa, Homo sapiens; identical to SEQ ID NO: 832335

SEQ ID NO: 832354 - protein, 74 aa, Homo sapiens
KNRLGSEAGWFFLGAAYGGGSHLLLGIMAALRPLVKPQDRQKENPRSSSGTQSDRYVKIKRNWRKPRGIDNRVP

SEQ ID NO: 832355 - protein, 76 aa, Homo sapiens; identical to SEQ ID NO: 832335

SEQ ID NO: 832356 - protein, 94 aa, Homo sapiens
AAPTTTKLTTLDWKQQKNKAHACPVAFRKFLGPQRQGAGKCCLMCNKIFTCCRDRFTSVFPPRNRKAIRGKGAAQLGHQSSPTPMPSACAVEEQ

SEQ ID NO: 832357 - protein, 103 aa, Homo sapiens
MTKPLICTLQLGDKWGQEGSSCREKKKTRDIHCDILGTLSQSCPLDHRHCTDLREWQVQVPLLGGDEKGERARGTKRMRRHEFRDDPTGPSEFTNPNAQRVRS

SEQ ID NO: 832358 - protein, 76 aa, Homo sapiens; identical to SEQ ID NO: 832335

SEQ ID NO: 832359 - protein, 76 aa, Homo sapiens; identical to SEQ ID NO: 832335

SEQ ID NO: 832360 - protein, 76 aa, Homo sapiens; identical to SEQ ID NO: 832335

SEQ ID NO: 832361 - protein, 76 aa, Homo sapiens; identical to SEQ ID NO: 832335

SEQ ID NO: 832362 - protein, 134 aa, Homo sapiens; identical to SEQ ID NO: 832338

SEQ ID NO: 832363 - protein, 74 aa, Homo sapiens; identical to SEQ ID NO: 832354

SEQ ID NO: 832364 - protein, 76 aa, Homo sapiens; identical to SEQ ID NO: 832335

SEQ ID NO: 832365 - protein, 120 aa, Homo sapiens; identical to SEQ ID NO: 832348

SEQ ID NO: 832366 - protein, 76 aa, Homo sapiens; identical to SEQ ID NO: 832335

SEQ ID NO: 832367 - protein, 76 aa, Homo sapiens; identical to SEQ ID NO: 832335

SEQ ID NO: 832368 - protein, 71 aa, Homo sapiens
AAPTTTKLTTLDSVTGGNPEALTTGFRRRFKGQILMPNIGYGSNKKTKHMLAQWLSGSSWVHNVKELGSAA

SEQ ID NO: 832369 - protein, 91 aa, Homo sapiens
SGARPGAPPGRAAPPRGARRREARATGAGADAAAAPRRHPGAAAGFRRRFKGQILMPNIGYGSNKKTKHMLAQWLSGSSWVHNVKELGSAA

SEQ ID NO: 832370 - protein, 102 aa, Homo sapiens; identical to SEQ ID NO: 832328

SEQ ID NO: 832371 - protein, 134 aa, Homo sapiens; identical to SEQ ID NO: 832338

SEQ ID NO: 832372 - protein, 863 aa, Homo sapiens
ALDQFLKAFTDFLAFMVLFNYIIPVSMYVTVEMQKFLGSYFITWDEDMFDEETGEGPLVNTSDLNEELGQVEYIFTDKTGTLTENNMEFKECCIEGHVYVPHVICNGQVLPESSGIDMIDSSPSVNGREREELFFRALCLCHTVQVKDDDSVDGPRKSPDGGKSCVYISSSPDEVALVEGVQRLGFTYLRLKDNYMEILNRENHIERFELLEILSFDSVRRRMSVIVKSATGEIYLFCKGADSSIFPRVIEGKVDQIRARVERNAVEGLRTLCVAYKRLIQEEYEGICKLLQAAKVALQDREKKLAEAYEQIEKDLTLLGATAVEDRLQEKAADTIEALQKAGIKVWVLTGDKMETAAATCYACKLFRRNTQLLELTTKRIEEQSLHDVLFELSKTVLRHSGSLTRDNLSGLSADMQDYGLIIDGAALSLIMKPREDGSSGNYRELFLEICRSCSAVLCCRMAPLQKAQIVKLIKFSKEHPITLAIGDGANDVSMILEAHVGIGVIGKEGRQAARNSDYAIPKFKHLKKMLLVHGHFYYIRISELVQYFFYKNVCFIFPQFLYQFFCGFSQQTLYDTAYLTLYNISFTSLPILLYSLMEQHVGIDVLKRDPTLYRDVAKNALLRWRVFIYWTLLGLFDALVFFFGAYFVFENTTVTSNGQIFGNWTFGTLVFTVMVFTVTLKLALDTHYWTWINHFVIWGSLLFYVVFSLLWGGVIWPFLNYQRMYYVFIQMLSSGPAWLAIVLLVTISLLPDVLKKVLCRQLWPTATERVQTKSQCLSVEQSTIFMLSQTSSSLSFCWNKSPGYQSTCPSAAWYSSHSQQVTLAAWKEKVSTEPPPILGGSHHHCSSIPSHSCPRSRVGMLV

SEQ ID NO: 832373 - protein, 754 aa, Homo sapiens
ALDQFLKAFTDFLAFMVLFNYIIPVSMYVTVEMQKFLGSYFITWDEDMFDEETGEGPLVNTSDLNEELGQVEYIFTDKTGTLTENNMEFKECCIEGHVYVPHVICNGQVLPESSGIDMIDSSPSVNGREREELFFRALCLCHTVQVKDDDSVDGPRKSPDGGKSCVYISSSPDEVALVEGVQRLGFTYLRLKDNYMEILNRENHIERFELLEILSFDSVRRRMSVIVKSATGEIYLFCKGADSSIFPRVIEGKVDQIRARVERNAVEGLRTLCVAYKRLIQEEYEGICKLLQAAKVALQDREKKLAEAYEQIEKDLTLLGATAVEDRLQEKAADTIEALQKAGIKVWVLTGDKMETAAATCYACKLFRRNTQLLELTTKRIEEQSLHDVLFELSKTVLRHSGSLTRDNLSGLSADMQDYGLIIDGAALSLIMKPREDGSSGNYRELFLEICRSCSAVLCCRMAPLQKAQIVKLIKFSKEHPITLAIGDGANDVSMILEAHVGIGVIGKEGRQAARNSDYAIPKFKHLKKMLLVHGHFYYIRISELVQYFFYKNVCFIFPQFLYQFFCGFHNRDVAKNALLRWRVFIYWTLLGLFDALVFFFGAYFVFENTTVTSNGQIFGNWTFGTLVFTVMVFTVTLKLALDTHYWTWINHFVIWGSLLFYVVFSLLWGGVIWPFLNYQRMYYVFIQMLSSGPAWLAIVLLVTISLLPDVLKKVLCRQLWPTATERVQTKSQCLSVEQSTIFMLSQTSSSLSF

SEQ ID NO: 832374 - protein, 854 aa, Homo sapiens
ALDQFLKAFTDFLAFMVLFNYIIPVSMYVTVEMQKFLGSYFITWDEDMFDEETGEGPLVNTSDLNEELGQVEYIFTDKTGTLTENNMEFKECCIEGHVYVPHVICNGQVLPESSGIDMIDSSPSVNGREREELFFRALCLCHTVQVKDDDSVDGPRKSPDGGKSCVYISSSPDEVALVEGVQRLGFTYLRLKDNYMEILNRENHIERFELLEILSFDSVRRRMSVIVKSATGEIYLFCKGADSSIFPRVIEGKVDQIRARVERNAVEGLRTLCVAYKRLIQEEYEGICKLLQAAKVALQDREKKLAEAYEQIEKDLTLLGATAVEDRLQEKAADTIEALQKAGIKVWVLTGDKMETAAATCYACKLFRRNTQLLELTTKRIEEQSLHDVLFELSKTVLRHSGSLTRDNLSGLSADMQDYGLIIDGAALSLIMKPREDGSSGNYRELFLEICRSCSAVLCCRMAPLQKAQIVKLIKFSKEHPITLAIGDGANDVSMILEAHVGIGVIGKEGRQAARNSDYAIPKFKHLKKMLLVHGHFYYIRISELVQYFFYKNVCFIFPQFLYQFFCGFSQQTLYDTAYLTLYNISFTSLPILLYSLMEQHVGIDVLKRDPTLYRDVAKNALLRWRVFIYWTLLGLFDALVFFFGAYFVFENTTVTSNGQIFGNWTFGTLVFTVMVFTVTLKLALDTHYWTWINHFVIWGSLLFYVVFSLLWGGVIWPFLNYQRMYYVFIQMLSSGPAWLAIVLLVTISLLPDVLKKVLCRQLWPTATERVQNGCAQPRDRDSEFTPLASLQSPGYQSTCPSAAWYSSHSQQVTLAAWKEKVSTEPPPILGGSHHHCSSIPSHSCPRSRVGMLV

SEQ ID NO: 832375 - protein, 793 aa, Homo sapiens
ALDQFLKAFTDFLAFMVLFNYIIPVSMYVTVEMQKFLGSYFITWDEDMFDEETGEGPLVNTSDLNEELGQVEYIFTDKTGTLTENNMEFKECCIEGHVYVPHVICNGQVLPESSGIDMIDSSPSVNGREREELFFRALCLCHTVQVKDDDSVDGPRKSPDGGKSCVYISSSPDEVALVEGVQRLGFTYLRLKDNYMEILNRENHIERFELLEILSFDSVRRRMSVIVKSATGEIYLFCKGADSSIFPRVIEGKVDQIRARVERNAVAAGESCRHHRGPAEGRDQSLGSHGRQDGDGRGTCYACKLFRRNTQLLELTTKRIEEQSLHDVLFELSKTVLRHSGSLTRDNLSGLSADMQDYGLIIDGAALSLIMKPREDGSSGNYRELFLEICRSCSAVLCCRMAPLQKAQIVKLIKFSKEHPITLAIGDGANDVSMILEAHVGIGVIGKEGRQAARNSDYAIPKFKHLKKMLLVHGHFYYIRISELVQYFFYKNVCFIFPQFLYQFFCGFSQQTLYDTAYLTLYNISFTSLPILLYSLMEQHVGIDVLKRDPTLYRDVAKNALLRWRVFIYWTLLGLFDALVFFFGAYFVFENTTVTSNGQIFGNWTFGTLVFTVMVFTVTLKLALDTHYWTWINHFVIWGSLLFYVVFSLLWGGVIWPFLNYQRMYYVFIQMLSSGPAWLAIVLLVTISLLPDVLKKVLCRQLWPTATERVQNGCAQPRDRDSEFTPLASLQSPGYQSTCPSAAWYSSHSQQVTLAAWKEKVSTEPPPILGGSHHHCSSIPSHSCPRSRVGMLV

SEQ ID NO: 832376 - protein, 854 aa, Homo sapiens; identical to SEQ ID NO: 832374

SEQ ID NO: 832377 - protein, 854 aa, Homo sapiens; identical to SEQ ID NO: 832374

SEQ ID NO: 832378 - protein, 854 aa, Homo sapiens; identical to SEQ ID NO: 832374

SEQ ID NO: 832379 - protein, 476 aa, Homo sapiens
ALDQFLKAFTDFLAFMVLFNYIIPVSMYVTVEMQKFLGSYFITWDEDMFDEETGEGPLVNTSDLNEELGQVEYIFTDKTGTLTENNMEFKECCIEGHVYVPHVICNGQVLPESSGIDMIDSSPSVNGREREELFFRALCLCHTVQVKDDDSVDGPRKSPDGGKSCVYISSSPDEVALVEGVQRLGFTYLRLKDNYMEILNRENHIERFELLEILSFDSVRRRMSVIVKSATGEIYLFCKGADSSIFPRVIEGKVDQIRARVERNAVEGLRTLCVAYKRLIQEEYEGICKLLQAAKVALQDREKKLAEAYEQIEKDLTLLGATAVEDRLQEKAADTIEALQKAGIKVWVLTGDKMETAAATCYACKLFRRNTQLLELTTKRIEEQSLHDVLFELSKTVLRHSGSLTRDNLSGLSADMQDYGLIIDGAALSLIMKPREDGSSGNYRELFLEICRSCSAVLCCRMAPLQKAQVLPARPR

SEQ ID NO: 832380 - protein, 93 aa, Homo sapiens
RPCPVCGVQKAFLQLLHLRLLGVIGKEGRQAARNSDYAIPKFKHLKKMLLVHGHFYYIRISELVQYFFYKVGGSPLPLTVLATGHAQGGTTLV

SEQ ID NO: 832381 - protein, 124 aa, Homo sapiens
MVLSLWRLCTCLFLAPSRQGGGSQALPSSMAPWPPGPSTVVVEPHQWPLGIRLNAGGTFCWPTLRAVMQRPFPQACVFTHLPSLAFAVTGREEPSRDPWWPTCGCHMLLFPACPATTHALHRVR

SEQ ID NO: 832382 - protein, 797 aa, Homo sapiens
ALDQFLKAFTDFLAFMVLFNYIIPVSMYVTVEMQKFLGSYFITWDEDMFDEETGEGPLVNTSDLNEELGQVEYIFTDKTGTLTENNMEFKECCIEGHVYVPHVICNGQVLPESSGIDMIDSSPSVNGREREELFFRALCLCHTVQVKDDDSVDGPRKSPDGGKSCVYISSSPDEVALVEGVQRLGFTYLRLKDNYMEILNRENHIERFELLEILSFDSVRRRMSVIVKSATGEIYLFCKGADSSIFPRVIEGKVDQIRARVERNAVEGLRTLCVAYKRLIQEEYEGICKLLQAAKVALQDREKKLAEAYEQIEKDLTLLGATAVEDRLQEKAADTIEALQKAGIKVWVLTGDKMETAAATCYACKLFRRNTQLLELTTKRIEEQSLHDVLFELSKTVLRHSGSLTRDNLSGLSADMQDYGLIIDGAALSLIMKPREDGSSGNYRELFLEICRSCSAVLCCRMAPLQKAQIVKLIKFSKEHPITLAIGDGANDVSMILEAHVGIGVIGKEGRQAARNSDYAIPKFKHLKKMLLVHGHFYYIRISELVQYFFYKNVCFIFPQFLYQFFCGFSQQTLYDTAYLTLYNISFTSLPILLYSLMEQHVGIDVLKRDPTLYRDVAKNALLRWRVFIYWTLLGLFDALVFFFGAYFVFENTTVTSNGQIFGNWTFGTLVFTVMVFTVTLKLALDTHYWTWINHFVIWGSLLFYVVFSLLWGGVIWPFLNYQRMYYVFIQMLSSGPAWLAIVLLVTISLLPDVLKKVLCRQLWPTATERVQTKSQCLSVEQSTIFMLSQTSSSLSF

SEQ ID NO: 832383 - protein, 854 aa, Homo sapiens; identical to SEQ ID NO: 832374

SEQ ID NO: 832384 - protein, 854 aa, Homo sapiens; identical to SEQ ID NO: 832374

SEQ ID NO: 832385 - protein, 116 aa, Homo sapiens
WEDTPHPAALCVSPEEGPGLPQPFCCGELHSYQMESREHPCGRCDLLHFSFRFELLEILSFDSVRRRMSVIVKSATGKISFSFDLLSYTWWLCFILMTKFYRSFKDLGFKNDLFFF

SEQ ID NO: 832386 - protein, 121 aa, Homo sapiens
LSGHPWEDTPHPAALCVSPEEGPGLPQPFCCGELHSYQMESREHPCGRCDLLHFSFRFELLEILSFDSVRRRMSVIVKSATGKISFSFDLLSYTWWLCFILMTKFYRSFKDLGFKNDLFFF

SEQ ID NO: 832387 - protein, 165 aa, Homo sapiens
IGDGANDVSMILEAHVGIGELRPCCWHILVARSPLRYDKGPWQHAGAFRTPPSPPSCVTGKAHDDGFIRSSPRPCPVCGVQKAFLQLLHLRLLGVIGKEGRQAARNSDYAIPKFKHLKKMLLVHGHFYYIRISELVQYFFYKVGGSPLPLTVLATGHAQGGTTLV

SEQ ID NO: 832388 - protein, 517 aa, Homo sapiens
MAALGPSSQNVTEYVVRVPKNTTKKYNIMAFNAADKVNFATWNQARLERDLSNKKIYQEEEMPESGAGSEFNRKLREEARRKKYGIVLKEFRPEDQPWLLRVNGKSGRKFKGIKKGGVTENTSYYIFTQCPDGAFEAFPVHNWYNFTPLARHRTLTAEEAEEEWERRNKVLNHFSIMQQRRLKDQDQDEDEEEKEKRGRRKASELRIHDLEDDLEMSSDASDASGEEGGRVPKAKKKAPLAKGGRKKKKKKGSDDEAFEDSDDGDFEGQEVDYMSDGSSSSQEEPESKAKAPQQEEGPKGVDEQSDSSEESEEEKPPEEDKEEEEEKKAPTPQEKKRRKDSSEESDSSEESDIDSEASSALFMAKKKTPPKRERKPSGGSSRGNSRPGTPSAEGGSTSSTLRAAASKLEQGKRVSEMPAAKRLRLDTGPQSLSGKSTPQPPSGKTTPNSGDVQVTEDAVRRYLTRKPMTTKDLLKKFQTKKTGLSSEQTVNVLAQILKRLNPERKMINDKMHFSLKE

SEQ ID NO: 832389 - protein, 517 aa, Homo sapiens; identical to SEQ ID NO: 832388

SEQ ID NO: 832390 - protein, 517 aa, Homo sapiens; identical to SEQ ID NO: 832388

SEQ ID NO: 832391 - protein, 499 aa, Homo sapiens
MAALGPSSQNVTEYVVRVPKNTTKKYNIMAFNAADKVNFATWNQARLERDLSNKKIYQEEEMPESGAGSEFNRKLREEARRKKYGIVLKEFRPEDQPWLLRVNGKSGRKFKGIKKGGVTENTSYYIFTQCPDGAFEAFPVHNWYNFTPLARHRTLTAEEAEEEWERRNKVLNHFSIMQQRRLKDQDQDEDEEEKEKRGRRKASELRIHDLEDDLEMSSDASDASGEEGGRVPKAKKKAPLAKGGRKKKKKKGSDDEAFEDSDDGDFEGQEVDYMSDGSSSSQEEPESKAKAPQQEEGPKGVDEQSDSSEESEEEKPPEEDKEEEEEKKAPTPQEKKRRKDSSEESDSSEESDIDSEASSALFMAKKKTPPKRERKPSGGSSRGNSRPGTPSAEWVGHAPSLQTLLGWAAQGAQKKKKTLFFPHERGTHTNKNRRRRTHTPKRREKRCGEAGGDAGGKKKTTPRRPQDGERGRERFFFAGQTAEAPHRGGNKDAGGTQRF

SEQ ID NO: 832392 - protein, 585 aa, Homo sapiens
MAALGPSSQNVTEYVVRVPKNTTKKYNIMAFNAADKVNFATWNQARLERDLSNKKIYQEEEMPESGAGSEFNRKLREEARRKKYGIVLKEFRPEDQPWLLRVNGKSGRKFKGIKKGGVTENTSYYIFTQCPDGAFEAFPVHNWYNFTPLARHRTLTAEEAEEEWERRNKVLNHFSIMQQRRLKDQDQDEDEEEKEKRGRRKASELRIHDLEDDLEMSSDASDASGEEGGRVPKAKKKAPLAKGGRKKKKKKGSDDEAFEDSDDGDFEGQEVDYMSDGSSSSQEEPESKAKAPQQEEGPKGVIEQSDSSEREQGTPPRHDTRSAGQTAARSRDSSQRERTLPREALLSPLHADQPRPPTTERRGRRRRGSSKESNTSDTAIPQRAAQGGTTLHHTLQAACQATPPSQGRSRDDRRCPYNTNETQKMDHRGPRAGLTEARLNNPSPPNQGQRNTPTTVRSYTVHVHDCQGPIPHSGKPRPARPAVKRPHRRPRSQDTLPTSLNTTTYNNHTHQHRYPTTPHQQQLSHIEYHKKSRSLLLPSRTTRHSSPTTKQLARIHTHLTQRPFLSYTTLPVAPTNTKPYLHTPP

SEQ ID NO: 832393 - protein, 490 aa, Homo sapiens
MAALGPSSQNVTEYVVRVPKNTTKKYNIMAFNAADKVNFATWNQARLERDLSNKKIYQEEEMPESGAGSEFNRKLREEARRKFKGIKKGGVTENTSYYIFTQCPDGAFEAFPVHNWYNFTPLARHRTLTAEEAEEEWERRNKVLNHFSIMQQRRLKDQDQDEDEEEKEKRGRRKASELRIHDLEDDLEMSSDASDASGEEGGRVPKAKKKAPLAKGGRKKKKKKGSDDEAFEDSDDGDFEGQEVDYMSDGSSSSQEEPESKAKAPQQEEGPKGVDEQSDSSEESEEEKPPEEDKEEEEEKKAPTPQEKKRRKDSSEESDSSEESDIDSEASSALFMAKKKTPPKRERKPSGGSSRGNSRPGTPSAEGGSTSSTLRAAASKLEQGKRVSEMPAAKRLRLDTGPQSLSGKSTPQPPSGKTTPNSGDVQVTEDAVRRYLTRKPMTTKDLLKKFQTKKTGLSSEQTVNVLAQILKRLNPERKMINDKMHFSLKE

SEQ ID NO: 832394 - protein, 504 aa, Homo sapiens
IFFFRCESYIMKNQTVPIQVFHCFLKANVEQARLERDLSNKKIYQEEEMPESGAGSEFNRKLREEARRKKYGIVLKEFRPEDQPWLLRVNGKSGRKFKGIKKGGVTENTSYYIFTQCPDGAFEAFPVHNWYNFTPLARHRTLTAEEAEEEWERRNKVLNHFSIMQQRRLKDQDQDEDEEEKEKRGRRKASELRIHDLEDDLEMSSDASDASGEEGGRVPKAKKKAPLAKGGRKKKKKKGSDDEAFEDSDDGDFEGQEVDYMSDGSSSSQEEPESKAKAPQQEEGPKGVDEQSDSSEESEEEKPPEEDKEEEEEKKAPTPQEKKRRKDSSEESDSSEESDIDSEASSALFMAKKKTPPKRERKPSGGSSRGNSRPGTPSAEGGSTSSTLRAAASKLEQGKRVSEMPAAKRLRLDTGPQSLSGKSTPQPPSGKTTPNSGDVQVTEDAVRRYLTRKPMTTKDLLKKFQTKKTGLSSEQTVNVLAQILKRLNPERKMINDKMHFSLKE

SEQ ID NO: 832395 - protein, 162 aa, Homo sapiens
MAALGPSSQNVTEYVVRVPKNTTKKYNIMAFNAADKVNFATWNQARLERDLSNKKIYQEEEMPESGAGSEFNRKLREEARRKKYGIVLKEFRPEDQPWLLRVNGKSGRKFKGIKKGGVTENTSYYIFTQCPDGAFEAFPVHNWYNFTPLARHRTLTAEPDST

SEQ ID NO: 832396 - protein, 172 aa, Homo sapiens
MAALGPSSQNVTEYVVRVPKNTTKKYNIMAFNAADKVNFATWNQARLERDLSNKKIYQEEEMPESGAGSEFNRKLREEARRKKYGIVLKEFRPEDQPWLLRVNGKSGRKFKGIKKGGVTENTSYYIFTQCPDGAFEAFPLTLTKGLCCPLGNFYSSPFHFPKSLFSCDLSTT

SEQ ID NO: 832397 - protein, 517 aa, Homo sapiens; identical to SEQ ID NO: 832388

SEQ ID NO: 832398 - protein, 130 aa, Homo sapiens
PFGVGGGNEPQTDPWGAKRRFDPTRVGLGCYGDAAFWAPQVQSGKAHAQSAWEPARGIRLPLPTQDAPRSLGADVTREGGPPFDEVNRVIYKSASDRGPLVYLRLGLGLLSLKRDRGGPFEVTIAAEEHK

SEQ ID NO: 832399 - protein, 517 aa, Homo sapiens; identical to SEQ ID NO: 832388

SEQ ID NO: 832400 - protein, 542 aa, Homo sapiens
MAALGPSSQNVTEYVVRVPKNTTKKYNIMAFNAADKVNFATWNQARLERDLSNKKIYQEEEMPESGAGSEFNRKLREEARRKKYGIVLKEFRPEDQPWLLRVNGKSGRKFKGIKKGGVTENTSYYIFTQCPDGAFEAFPVHNWYNFTPLARHRTLTAEEAEEEWERRNKVLNHFSIMQQRRLKDQDQDEDEEEKEKRGRRKASELRIHDLEDDLEMSSDASDASGEEGGRVPKAKKKAPLAKGGRKKKKKKGSDDEAFEDSDDGDFEGQEVDYMSDGSSSSQEEPESKAKAPQQEEGPKGRRWLGGPGRWGRCFPALAHTLPLPGVDEQSDSSEESEEEKPPEEDKEEEEEKKAPTPQEKKRRKDSSEESDSSEESDIDSEASSALFMAKKKTPPKRERKPSGGSSRGNSRPGTPSAEGGSTSSTLRAAASKLEQGKRVSEMPAAKRLRLDTGPQSLSGKSTPQPPSGKTTPNSGDVQVTEDAVRRYLTRKPMTTKDLLKKFQTKKTGLSSEQTVNVLAQILKRLNPERKMINDKMHFSLKE

SEQ ID NO: 832401 - protein, 517 aa, Homo sapiens; identical to SEQ ID NO: 832388

SEQ ID NO: 832402 - protein, 334 aa, Homo sapiens
MAALGPSSQNVTEYVVRVPKNTTKKYNIMAFNAADKVNFATWNQARLERDLSNKKIYQEEEMPESGAGSEFNRKLREEARRKKYGIVLKEFRPEDQPWLLRVNGKSGRKFKGIKKGGVTENTSYYIFTQCPDGAFEAFPVHNWYNFTPLARHRTLTAEEAEEEWERRNKVLNHFSIMQQRRLKDQDQDEDEEEKEKRGRRKASELRIHDLEDDLEMSSDASDASGEEGKRVSEMPAAKRLRLDTGPQSLSGKSTPQPPSGKTTPNSGDVQVTEDAVRRYLTRKPMTTKDLLKKFQTKKTGLSSEQTVNVLAQILKRLNPERKMINDKMHFSLKE

SEQ ID NO: 832403 - protein, 274 aa, Homo sapiens
MAALGPSSQNVTEYVVRVPKNTTKKYNIMAFNAADKVNFATWNQARLERDLSNKKIYQEEEMPESGAGSEFNRKLREEARRKKYGIVLKEFRPEDQPWLLRVNGKSGRKFKGIKKGGVTENTSYYIFTQCPDGAFEAFPVHNWYNFTPLARHRTLTAEEAEEEWERRNKVLNHFSIMQQRRLKDQDQDEDEEEKEKRGRRKASELRIHDLEDDLEMSSDASDASGEEGAESPRPRRRRLVEYSGATMAHCELNLLGSSKFPKSHPTATQRGTEL

SEQ ID NO: 832404 - protein, 175 aa, Homo sapiens [sequence omitted]

SEQ ID NO: 832405 - protein, 167 aa, Homo sapiens
YPRKVRLTSYKMAKEAIFQDTMRKFLEQECNVLPLKLLMPQCNQVLDDYFPLVIDYFQNQTVRAASSPPACLPTQAPVPTHGEPHTQHPSQPDTHTHTHTHSTQAGQTQTHSTPASRNTHTHTHNTPAGRTHTHTVPQLAGHTHTQHPIQTHTHTQYPSQLETHTHT

SEQ ID NO: 832406 - protein, 221 aa, Homo sapiens
MDEMGQVGLVGSCMCLGVLCWPLPKRTSPLELGASPTHVSSTLGPLHPQDDLCQECEDIVHILNKMAKEAIFQDTMRKFLEQECNVLPLKLLMPQCNQVLDDYFPLVIDYFQNQTVRAASSPPACLPTQAPVPTHGEPHTQHPSQPDTHTHTHTHSTQAGQTQTHSTPASRNTHTHTHNTPAGRTHTHTVPQLAGHTHTQHPIQTHTHTQYPSQLETHTHT

SEQ ID NO: 832407 - protein, 393 aa, Homo sapiens
MHQAGYPGCRGAMAESHLLQWLLLLLPTLCGPGTAAWTTSSLACAQGPEFWCQSLEQALQCRALGHCLQEVWGHVGADDLCQECEDIVHILNKMAKEAIFQDTMRKFLEQECNVLPLKLLMPQCNQVLDDYFPLVIDYFQNQTDSNGICMHLGLCKSRQPEPEQEPGMSDPLPKPLRDPLPDPLLDKLVLPVLPGALQARPGPHTQDLSEQQFPIPLPYCWLCRALIKRIQAMIPKGALAVAVAQVCRVVPLVAGGICQCLAERYSVILLDTLLGRMLPQLVCRLVLRCSMDDSAGPRSPTGEWLPRDSECHLCMSVTTQAGNSSEQAIPQAMLQACVGSWLDREKCKQFVEQHTPQLLTLVPRGWDAHTTCQALGVCGTMSSPLQCIHSPDL

SEQ ID NO: 832408 - protein, 393 aa, Homo sapiens; identical to SEQ ID NO: 832407

SEQ ID NO: 832409 - protein, 244 aa, Homo sapiens
MHLGLCKSRQPEPEQEPGMSDPLPKPLRDPLPDPLLDKLVLPVLPGALQARPGPHTQDLSEQQFPIPLPYCWLCRALIKRIQAMIPKGALAVAVAQVCRVVPLVAGGICQCLAERYSVILLDTLLGRMLPQLVCRLVLRCSMDDSAGPRSPTGEWLPRDSECHLCMSVTTQAGNSSEQAIPQAMLQACVGSWLDREKCKQFVEQHTPQLLTLVPRGWDAHTTCQALGVCGTMSSPLQCIHSPDL

SEQ ID NO: 832410 - protein, 393 aa, Homo sapiens; identical to SEQ ID NO: 832407

SEQ ID NO: 832411 - protein, 117 aa, Homo sapiens
MLPQLVCRLVLRCSMDDSAGPRSPTGEWLPRDSECHLCMSVTTQAGNSSEQAIPQAMLQACVGSWLDREKCKQFVEQHTPQLLTLVPRGWDAHTTCQALGVCGTMSSPLQCIHSPDL

SEQ ID NO: 832412 - protein, 142 aa, Homo sapiens [sequence omitted]

SEQ ID NO: 832413 - protein, 142 aa, Homo sapiens [sequence omitted]

SEQ ID NO: 832414 - protein, 142 aa, Homo sapiens [sequence omitted]

SEQ ID NO: 832415 - protein, 393 aa, Homo sapiens; identical to SEQ ID NO: 832407

SEQ ID NO: 832416 - protein, 393 aa, Homo sapiens; identical to SEQ ID NO: 832407

SEQ ID NO: 832417 - protein, 194 aa, Homo sapiens
MDEMGQVGLVGSCMCLGVLCWPLPKRTSPLELGASPTHVSSTLGPLHPQDDLCQECEDIVHILNKMAKEAIFQDTMRKFLEQECNVLPLKLLMPQCNQVLDDYFPLVIDYFQNQTDSNGICMHLGLCKSRQPEPEQEPGMSDPLPKPLRDPLPDPLDLHFTGCGGLPHLCVRPRPRLEGPGQHREDELVQGTEL

SEQ ID NO: 832418 - protein, 393 aa, Homo sapiens; identical to SEQ ID NO: 832407

SEQ ID NO: 832419 - protein, 393 aa, Homo sapiens; identical to SEQ ID NO: 832407

SEQ ID NO: 832420 - protein, 393 aa, Homo sapiens; identical to SEQ ID NO: 832407

SEQ ID NO: 832421 - protein, 244 aa, Homo sapiens; identical to SEQ ID NO: 832409

SEQ ID NO: 832422 - protein, 450 aa, Homo sapiens
MHQAGYPGCRGAMAESHLLQWLLLLLPTLCGPGTAAWTTSSLACAQGPEFWCQSLEQALQCRALGHCLQEVWGHVGADDLCQECEDIVHILNKMAKEAIFQDTMRKFLEQECNVLPLKLLMPQCNQVLDDYFPLVIDYFQNQTDSNGICMHLGLCKSRQPEPEQEPGMSDPLPKPLRDPLPDPLLDKLVLPVLPGALQARPGPHTQDLSEQQFPIPLPYCWLCRALIKRIQAMIPKGALAVAVAQVCRVVPLVAGGICQCLAERYSVILLDTLLGRMLPQLVCRLVLRCSMDDSAGPSEPTAPSLAQCLLSSSPYPATAYPLPLWSHCNAPRRTETKHLCRVALPAFPLMLTSPGSPTGEWLPRDSECHLCMSVTTQAGNSSEQAIPQAMLQACVGSWLDREKCKQFVEQHTPQLLTLVPRGWDAHTTCQALGVCGTMSSPLQCIHSPDL

SEQ ID NO: 832423 - protein, 232 aa, Homo sapiens [sequence omitted]

SEQ ID NO: 832424 - protein, 170 aa, Homo sapiens
SLGLLLPLLQAMQFGWKAFILMVLHGDCMVTRLFPCSLALASCQAEKKPQLPHRPPHRPSSAVTSTGGPRAPSPVSALSVSAQPQSDTRAHFHPLWCEAQRGQHLEELCSLHTYHDLPGLGSGKTSHCFTGQGVEAEPRLTPTPMHSKIGFYSYLQFKIQKNKKWEHTEL

SEQ ID NO: 832425 - protein, 393 aa, Homo sapiens; identical to SEQ ID NO: 832407

SEQ ID NO: 832426 - protein, 319 aa, Homo sapiens
MHQAGYPGCRGAMAESHLLQWLLLLLPTLCGPGTAAWTTSSLACAQGPEFWCQSLEQALQCRALGHCLQEVWGHVGADDLCQECEDIVHILNKMAKEAIFQDTMRKFLEQECNVLPLKLLMPQCNQVLDDYFPLVIDYFQNQTDSNGICMHLGLCKSRQPEPEQEPGMSDPLPKPLRDPLPDPLLDKLVLPVLPGALQARPGPHTQDLSEQQFPIPLPYCWLCRALIKRIQAMIPKGALAVAVAQVCRVVPLVAGGICQCLAERYSVILLDTLLGRMLPQLVCRLVLRCSMDDSAGPSEPTAPSLAQCLLSSSPYPATA

SEQ ID NO: 832427 - protein, 145 aa, Homo sapiens
MHQAGYPGCRGAMAESHLLQWLLLLLPTLCGPGTAAWTTSSLACAQGPEFWCQSLEQALQCRALGHCLQEVWGHVGADDLCQECEDIVHILNKMAKEAIFQDTMRKFLEQECNVLPLKLLMPQCNQVLDDYFPLVIGSHMSPDFL

SEQ ID NO: 832428 - protein, 104 aa, Homo sapiens
GIFSICCWLNPQMQNPRIWRAKEAFTEEGQCRFMKTKEGDLKQEDLIHSFKGCKGGKLKKRLRGHVKVIKHHPERNSAEQSVQNPCFHYQKPKTLSQYDMNLPI

SEQ ID NO: 832429 - protein, 758 aa, Homo sapiens
MSARTPLPTVNERDTENHTSVDGYTEPHIQPTKSSSRQNIPRCRNSITSATDEQPHIGNYRLQKTIGKGNFAKVKLARHVLTGREVAVKIIDKTQLNPTSLQKLFREVRIMKILNHPNIGEVFDYLVAHGRMKEKEARAKFRQIVSAVQYCHQKYIVHRDLKAENLLLDGDMNIKIADFGFSNEFTVGNKLDTFCGSPPYAAPELFQGKKYDGPEVDVWSLGVILYTLVSGSLPFDGQNLKELRERVLRGKYRIPFYMSTDCENLLKKLLVLNPIKRGSLEQIMKDRWMNVGHEEEELKPYTEPDPDFNDTKRIDIMVTMGFARDEINDALINQKYDEVMATYILLGRKPPEFEGGESLSSGNLCQRSRPSSDLNNSTLQSPAHLKVQRSISANQKQRRFSDHAGPSIPPAVSYTKRPQANSVESEQKEEWDKDVARKLGSTTVGSKSEMTASPLVGPERKKSSTIPSNNVYSGGSMARRNTYVCERTTDRYVALQNGKDSSLTEMSVSSISSAGSSVASAVPSARPRHQKSMSTSGHPIKVTLPTIKDGSEAYRPGTTQRVPAASPSAHSISTATPDRTRFPRGSSSRSTFHGEQLRERRSVAYNGPPASPSHETGAFAHARRGTSTGIISKITSKFVRRSTSGEPKERDKEEGKDSKPRSLRFTWSMKTTSSMDPNDMMREIRKVLDANNCDYEQKERFLLFCVHGDARQDSLVQWEMEVCKLPRLSLNGVRFKRISGTSIAFKNIASKIANELKL

SEQ ID NO: 832430 - protein, 795 aa, Homo sapiens
MSARTPLPTVNERDTENHTSVDGYTEPHIQPTKSSSRQNIPRCRNSITSATDEQPHIGNYRLQKTIGKGNFAKVKLARHVLTGREVAVKIIDKTQLNPTSLQKLFREVRIMKILNHPNIVKLFEVIETEKTLYLVMEYASGGEVFDYLVAHGRMKEKEARAKFRQIVSAVQYCHQKYIVHRDLKAENLLLDGDMNIKIADFGFSNEFTVGNKLDTFCGSPPYAAPELFQGKKYDGPEVDVWSLGVILYTLVSGSLPFDGQNLKELRERVLRGKYRIPFYMSTDCENLLKKLLVLNPIKRGSLEQIMKDRWMNVGHEEEELKPYTEPDPDFNDTKRIDIMVTMGFARDEINDALINQKYDEVMATYILLGRKPPEFEGGESLSSGNLCQRSRPSSDLNNSTLQSPAHLKVQRSISANQKQRRFSDHAGPSIPPAVSYTKRPQANSVESEQKEEWDKDVARKLGSTTVGSKSEMTASPLVGPERKKSSTIPSNNVYSGGSMARRNTYVCERTTDRYVALQNGKDSSLTEMSVSSISSAGSSVASAVPSARPRHQKSMSTSGHPIKVTLPTIKDGSEAYRPGTTQRVPAASPSAHSISTATPDRTRFPRGSSSRSTFHGEQLRERRSVAYNGPPASPSHETGAFAHARRGTSTGIISKITSKFVRRDPSEGEASGRTDTSRSTSGEPKERDKEEGKDSKPRSLRFTWSMKTTSSMDPNDMMREIRKVLDANNCDYEQKERFLLFCVHGDARQDSLVQWEMEVCKLPRLSLNGVRFKRISGTSIAFKNIASKIANELKL

SEQ ID NO: 832431 - protein, 670 aa, Homo sapiens
MKILNHPNIVKLFEVIETEKTLYLVMEYASGGEVFDYLVAHGRMKEKEARAKFRQIVSAVQYCHQKYIVHRDLKAENLLLDGDMNIKIADFGFSNEFTVGNKLDTFCGSPPYAAPELFQGKKYDGPEVDVWSLGVILYTLVSGSLPFDGQNLKELRERVLRGKYRIPFYMSTDCENLLKKLLVLNPIKRGSLEQIMKDRWMNVGHEEEELKPYTEPDPDFNDTKRIDIMVTMGFARDEINDALINQKYDEVMATYILLGRKPPEFEGGESLSSGNLCQRSRPSSDLNNSTLQSPAHLKVQRSISANQKQRRFSDHAGPSIPPAVSYTKRPQANSVESEQKEEWDKDVARKLGSTTVGSKSEMTASPLVGPERKKSSTIPSNNVYSGGSMARRNTYVCERTTDRYVALQNGKDSSLTEMSVSSISSAGSSVASAVPSARPRHQKSMSTSGHPIKVTLPTIKDGSEAYRPGTTQRVPAASPSAHSISTATPDRTRFPRGSSSRSTFHGEQLRERRSVAYNGPPASPSHETGAFAHARRGTSTGIISKITSKFVRRSTSGEPKERDKEEGKDSKPRSLRFTWSMKTTSSMDPNDMMREIRKVLDANNCDYEQKERFLLFCVHGDARQDSLVQWEMEVCKLPRLSLNGVRFKRISGTSIAFKNIASKIANELKL

SEQ ID NO: 832432 - protein, 780 aa, Homo sapiens
MSARTPLPTVNERDTENHTSVDGYTEPHIQPTKSSSRQNIPRCRNSITSATDEQPHIGNYRLQKTIGKGNFAKVKLARHVLTGREVAVKIIDKTQLNPTSLQKLFREVRIMKILNHPNIVKLFEVIETEKTLYLVMEYASGGEVFDYLVAHGRMKEKEARAKFRQIVSAVQYCHQKYIVHRDLKAENLLLDGDMNIKIADFGFSNEFTVGNKLDTFCGSPPYAAPELFQGKKYDGPEVDVWSLGVILYTLVSGSLPFDGQNLKELRERVLRGKYRIPFYMSTDCENLLKKLLVLNPIKRGSLEQIMKDRWMNVGHEEEELKPYTEPDPDFNDTKRIDIMVTMGFARDEINDALINQKYDEVMATYILLGRKPPEFEGGESLSSGNLCQRSRPSSDLNNSTLQSPAHLKVQRSISANQKQRRFSDHAGPSIPPAVSYTKRPQANSVESEQKEEWDKDVARKLGSTTVGSKSEMTASPLVGPERKKSSTIPSNNVYSGGSMARRNTYVCERTTDRYVALQNGKDSSLTEMSVSSISSAGSSVASAVPSARPRHQKSMSTSGHPIKVTLPTIKDGSEAYRPGTTQRVPAASPSAHSISTATPDRTRFPRGSSSRSTFHGEQLRERRSVAYNGPPASPSHETGAFAHARRGTSTGIISKITSKFVRRSTSGEPKERDKEEGKDSKPRSLRFTWSMKTTSSMDPNDMMREIRKVLDANNCDYEQKERFLLFCVHGDARQDSLVQWEMEVCKLPRLSLNGVRFKRISGTSIAFKNIASKIANELKL

SEQ ID NO: 832433 - protein, 780 aa, Homo sapiens; identical to SEQ ID NO: 832432

SEQ ID NO: 832434 - protein, 780 aa, Homo sapiens; identical to SEQ ID NO: 832432

SEQ ID NO: 832435 - protein, 860 aa, Homo sapiens
MGEVTAEEVEKFLDSNIGFAKQYYNLHYRAKLISDLLGAKEAAVDFSNYHSPSSMEESEIIFDLLRDFQENLQTEKCIFNVMKKLCFLLQADRMSLFMYRTRNGIAELATRLFNVHKDAVLEDCLVMPDQEIVFPLDMGIVGHVAHSKKIANVPNTEEDEHFCDFVDILTEYKTKNILASPIMNGKDVVAIIMAVNKVDGSHFTKRDEEILLKYLNFANLIMKVYHLSYLHNCETRRGQILLWSGSKVFEELTDIERQFHKALYTVRAFLNCDRYSVGLLDMTKQKEFFDVWPVLMGEVPPYSGPRTPDGREINFYKVIDYILHGKEDIKVIPNPPPDHWALVSGLPAYVAQNGLICNIMNAPAEDFFAFQKEPLDESGWMIKNVLSMPIVNKKEEIVGVATFYNRKDGKPFDEMDETLMESLTQFLGWSVLNPDTYESMNKLENRKDIFQDIVKYHVKCDNEEIQKILKTREVYGKEPWECEEEELAEILQAELPDADKYEINKFHFSDLPLTELELVKCGIQMYYELKVVDKFHIPQEALVRFMYSLSKGYRKITYHNWRHGFNVGQTMFSLLVTGKLKRYFTDLEALAMVTAAFCHDIDHRGTNNLYQMKSQNPLAKLHGSSILERHHLEFGKTLLRDESLNIFQNLNRRQHEHAIHMMDIAIIATDLALYFKKRTMFQKIVDQSKTYESEQEWTQYMMLEQTRKEIVMAMMMTACDLSAITKPWEVQSQVALLVAAEFWEQGDLERTVLQQNPIPMMDRNKADELPKLQVGFIDFVCTFVYKEFSRFHEEITPMLDGITNNRKEWKALADEYDAKMKVQEEKKQKQQSAKSAAAGNQPGGNPSPGGATTSKSCCIQ

SEQ ID NO: 832436 - protein, 543 aa, Homo sapiens
ECECLGQEHGVSENGIQCFTGHPLRPNHTFIIPLHCSQICNIMNAPAEDFFAFQKEPLDESGWMIKNVLSMPIVNKKEEIVGVATFYNRKDGKPFDEMDETLMESLTQFLGWSVLNPDTYESMNKLENRKDIFQDIVKYHVKCDNEEIQKILKTREVYGKEPWECEEEELAEILQAELPDADKYEINKFHFSDLPLTELELVKCGIQMYYELKVVDKFHIPQEALVRFMYSLSKGYRKITYHNWRHGFNVGQTMFSLLVTGKLKRYFTDLEALAMVTAAFCHDIDHRGTNNLYQMKSQNPLAKLHGSSILERHHLEFGKTLLRDESLNIFQNLNRRQHEHAIHMMDIAIIATDLALYFKKRTMFQKIVDQSKTYESEQEWTQYMMLEQTRKEIVMAMMMTACDLSAITKPWEVQSQVALLVAAEFWEQGDLERTVLQQNPIPMMDRNKADELPKLQVGFIDFVCTFVYKEFSRFHEEITPMLDGITNNRKEWKALADEYDAKMKVQEEKKQKQQSAKSAAAGNQPGGNPSPGGATTSKSCCIQ

SEQ ID NO: 832437 - protein, 315 aa, Homo sapiens
MGEVTAEEVEKFLDSNIGFAKQYYNLHYRAKLISDLLGAKEAAVDFSNYHSPSSMEESEIIFDLLRDFQENLQTEKCIFNVMKKLCFLLQADRMSLFMYRTRNGIAELATRLFNVHKDAVLEDCLVMPDQEIVFPLDMGIVGHVAHSKKIANVPNTEEDEHFCDFVDILTEYKTKNILASPIMNGKDVVAIIMAVNKVDGSHFTKRDEEILLKYLNFANLIMKVYHLSYLHNCETRRGQILLWSGSKVFEELTDIERQFHKALYTVRAFLNCDRYSVGLLDMTKQKEFFDVWPVLMGEVPPYSGPRTPDGRVRSL

SEQ ID NO: 832438 - protein, 269 aa, Homo sapiens
MVTAAFCHDIDHRGTNNLYQMKSQNPLAKLHGSSILERHHLEFGKTLLRDESLNIFQNLNRRQHEHAIHMMDIAIIATDLALYFKKRTMFQKIVDQSKTYESEQEWTQYMMLEQTRKEIVMAMMMTACDLSAITKPWEVQSQVALLVAAEFWEQGDLERTVLQQNPIPMMDRNKADELPKLQVGFIDFVCTFVYKEFSRFHEEITPMLDGITNNRKEWKALADEYDAKMKVQEEKKQKQQSAKSAAAGNQPGGNPSPGGATTSKSCCIQ

SEQ ID NO: 832439 - protein, 734 aa, Homo sapiens
MGEVTAEEVEKFLDSNIGFAKQYYNLHYRAKLISDLLGAKEAAVDFSNYHSPSSMEESEIIFDLLRDFQENLQTEKCIFNVMKKLCFLLQADRMSLFMYRTRNGIAELATRLFNVHKDAVLEDCLVMPDQEIVFPLDMGIVGHVAHSKKIANVPNTEEDEHFCDFVDILTEYKTKNILASPIMNGKDVVAIIMAVNKVDGSHFTKRDEEILLKYLNFANLIMKVYHLSYLHNCETRRGQILLWSGSKVFEELTDIERQFHKALYTVRAFLNCDRYSVGLLDMTKQKEFFDVWPVLMGEVPPYSGPRTPDGREINFYKVIDYILHGKEDIKVIPNPPPDHWALVSGLPAYVAQNGLICNIMNAPAEDFFAFQKEPLDESGWMIKNVLSMPIVNKKEEIVGVATFYNRKDGKPFDEMDETLMESLTQFLGWSVLNPDTYESMNKLENRKDIFQDIVKYHVKCDNEEIQKILKTREVYGKEPWECEEEELAEILQAELPDADKYEINKFHFSDLPLTELELVKCGIQMYYELKVVDKFHIPQEALVRFMYSLSKGYRKITYHNWRHGFNVGQTMFSLLVTGKLKRYFTDLEALAMVTAAFCHDIDHRGTNNLYQMKSQNPLAKLHGSSILERHHLEFGKTLLRDESLNIFQNLNRRQHEHAIHMMDIAIIATDLALYFKKRTMFQKIVDQSKTYESEQEWTQYMMLEQTRKEIVMAMMMTACDLSAITKPWEVQSQV

SEQ ID NO: 832440 - protein, 94 aa, Homo sapiens
ENLQTEKCIFNVMKKLCFLLQADRMSLFMYRTRNGIAELATRLFNVHKDAVLEDCLVMPDQEIVFPLDMGIVGHVAHSKKIANVPNTEEVLSSP

SEQ ID NO: 832441 - protein, 463 aa, Homo sapiens
LVPEAGSAESFPREAARLCSPVSGVPLRPARVSVSTCVRAPAVSSARPRGAVGGGAPGAPPPPMAAEIQPKPLTRKPILLQRMEGSQEVVNMAVIVPKEEGVISVSEDRTVRVWLKRDSGQYWPSVYHAMPSPCSCMSFNPETRRLSIGLDNGTISEFILSEDYNKMTPVKNYQAHQSRVTMILFVLELEWVLSTGQDKQFAWHCSESGQRLGGYRTSAVASGLQFDVETRHVFIGDHSGQVTILKLEQENCTLVTTFRGHTGGVTALCWDPVQRVLFSGSSDHSVIMWDIGGRKGTAIELQGHNDRVQALSYAQHTRQLISCGGDGGIVVWNMDVERQETPEWLDSDSCQKCDQPFFWNFKQMWDSKKIGLRQHHCRKCGKAVCGKCSSKRSSIPLMGFEFEVRVCDSCHEAITDEERAPTATFHDSKHNIVHVHFDATRGWLLTSGTDKVIKLWDMTPVVS

SEQ ID NO: 832442 - protein, 353 aa, Homo sapiens
LVPEAGSAESFPREAARLCSPVSGVPLRPARVSVSTCVRAPAVSSARPRGAVGGGAPGAPPPPMAAEIQPKPLTRKPILLQRMEGSQEVVNMAVIVPKEEGVISVSEDRTVRVWLKRDSGQYWPSVYHAMPSPCSCMSFNPETRRLSIGLDNGTISEFILSEDYNKMTPVKNYQAHQSRVTMILFVLELEWVLSTGQDKQFAWHCSESGQRLGGYRTSAVASGLQFDVETRHVFIGDHSGQVTILKLEQENCTLVTTFRGHTGGVTALCWDPVQRVLFSGSSDHSVIMWDIGGRKGTAIELQGHNDRVQALSYAQHTRQLISCGGDGGIVVWNMDVERQEPLWSCFVVMISAV

SEQ ID NO: 832443 - protein, 469 aa, Homo sapiens
LVPEAGSAESFPREAARLCSPVSGVPLRPARVSVSTCVRAPAVSSARPRGAVGGGAPGAPPPPMAAEIQPKPLTRKPILLQRMEGSQEVVNMAVIVPKEEGVISVSEDRTVRVWLKRDSGQYWPSVYHAMPSPCSCMSFNPETRRLSIGLDNGTISEFILSEDYNKMTPVKNYQAHQSRVTMILFVLELEWVLSTGQDKQFAWHCSESGQRLGGYRTSAVASGLQFDVETRHVFIGDHSGQVTILKLEQENCTLVTTFRGHTGGVTALCWDPVQRVLFSGSSDHSVIMWDIGGRKGTAIELQGHNDRVQALSYAQHTRQLISCGGDGGIVVWNMDVERQETPEWLDSDSCQKCDQPFFWNFKQMWDSKKIGLRQHHCRKCGKAVCGKCSSKRSSIPLMGFEFEVRVCDSCHEAITDEERAPTATFHDSKHNIVHVHFDATRGWLLTSGTDKVIKVRCHLIKKLSIFGLI

SEQ ID NO: 832444 - protein, 463 aa, Homo sapiens; identical to SEQ ID NO: 832441

SEQ ID NO: 832445 - protein, 418 aa, Homo sapiens
LVPEAGSAESFPREAARLCSPVSGVPLRPARVSVSTCVRAPAVSSARPRGAVGGGAPGAPPPPMAAEIQPKPLTRKPILLQRMEGSQEVVNMAVIVPKEEGVISVSEDRTVRVWLKRDSGQYWPSVYHAMPSPCSCMSFNPETRRLSIGLDNGTISEFILSEDYNKMTPVKNYQAHQSRVTMILFVLELEWVLSTGQDKQFAWHCSESGQRLGGYRTSAVASGLQFDVETRHVFIGDHSGQVTILKLEQENCTLVTTFRGHTGGVTALCWDPVQRVLFSGSSDHSVIMWDIGGRKGTAIELQGHNDRVQALSYAQHTRQLISCGGDGGIVVWNMDVERQETPEWLDSDSCQKCDQPFFWNFKQMWDSKKIGLRQHHCRKCGKAVCGKCSSKRSSIPLMGFEFEVRVCDSCHEAITDEE

SEQ ID NO: 832446 - protein, 471 aa, Homo sapiens
LVPEAGSAESFPREAARLCSPVSGVPLRPARVSVSTCVRAPAVSSARPRGAVGGGAPGAPPPPMAAEIQPKPLTRKPILLQRMEGSQEVVNMAVIVPKEEGVISVSEDRTVRVWLKRDSGQYWPSVYHAMPSPCSCMSFNPETRRLSIGLDNGTISEFILSEDYNKMTPVKNYQAHQSRVTMILFVLELEWVLSTGQDKQFAWHCSESGQRLGGYRTSAVASGLQFDVETRHVFIGDHSGQVTILKLEQENCTLVTTFRGHTGGVTALCWDPVQRVLFSGSSDHSVIMWDIGGRKGTAIELQGHNDRVQALSYAQHTRQLISCGGDGGIVVWNMDVERQETPEWLDSDSCQKCDQPFFWNFKQMWDSKKIGLRQHHCRKCGKAVCGKCSSKRSSIPLMGFEFEVRVCDSCHEAITDEERAPTATFHDSKHNIVHVHFDATRGWLLTSGTDKVIKVLSFCKRKSLYEMGTEL

SEQ ID NO: 832447 - protein, 1286 aa, Homo sapiens
SINNLQAELNKIFALRKQLEQDVLSYQNLRKTLEEQISEIRRREEESFSLYSDQTSYLSICLEENNRFQVEHFSQEELKKKVSDLIQLVKELYTDNQHLKKTIFDLSCMGFQGNGFPDRLASTEQTEIMKDLSKGGCKNGYLRHTESKISDCDGAHAPGCLEEGAFINLLAPLFNEKATLLLESRPDLLKVVRELLLGQLFLTEQEVSGEHLDGKTEKTPKQKGELVHFVQTNSFSKPHDELKLSCEAQLVKAGEVPKVGLKDASVQTVATEGDLLRFKHEATREAWEEKPINTALSAEHRPENLHGVPGWQAALLSLPGITNREAKKSRLPILIKPSRSLGNMYRLPATQEVVTQLQSQILELQGELKEFKTCNKQLHQKLILAEAVMEGRPTPDKTLLNAQPPVGAAYQDSPGEQKGIKTTSSVWRDKEMDSDQQRSYEIDSEICPPDDLASLPSCKENPEDVLSPTSVATYLSSKSQPSAKVSVMGTDQSESINTSNETEYLKQKIHDLETELEGYQNFIFQLQKHSQCSEAIITVLCGTEGAQDGLSKPKNGSDGEEMTFSSLHQVRYVKHVKILGPLAPEMIDSRVLENLKQQLEEQEYKLQKEQNLNMQLFSEIHNLQNKFRDLSPPRYDSLVQSQARELSLQRQQIKDGHGICVISRQHMNTMIKAFEELLQASDVDYCVAEGFQEQLNQCAELLEKLEKLFLNGKSVGVEMNTQNELMERIEEDNLTYQHLLPESPEPSASHALSDYETSEKSFFSRDQKQDNETEKTSVMVNSFSQDLLMEHIQEIRTLRKRLEESIKTNEKLRKQLERQGSEFVQGSTSIFASGSELHSSLTSEIHFLRKQNQALNAMLIKGSRDKQKENDKLRESLSRKTVSLEHLQREYASVKEENERLQKEGSEKERHNQQLIQEVRCSGQELSRVQEELKLRQQLLSQNDKLLQSLRVELKAYEKLDEEHRRLREASGEGWKGQDPFRDLHSLLMEIQALRLQLERSIETSSTLQSRLKEQLARGAEKAQEGALTLAVQAVSIPEVPLQPDKHDGDKYPMESDNSFDLFDSSQAVTPKSVSETPPLSGNDTDSLSCDSGSSATSTPCVSRLVTGHHLWASKNGRHVLGLIEDYEALLKQISQGQRLLAEMDIQTQEAPSSTSQELGTKGPHPAPLSKFVSSVSTAKLTLEEAYRRLKLLWRVSLPEDGQCPLHCEQIGEMKAEVTKLHKKLFEQEKKLQNTMKLLQLSKRQEKVIFDQLVVTHKILRKARGNLELRPGGAHPGTCSPSRPGS

SEQ ID NO: 832448 - protein, 143 aa, Homo sapiens [sequence omitted]

SEQ ID NO: 832449 - protein, 1245 aa, Homo sapiens
SINNLQAELNKIFALRKQLEQDVLSYQNLRKTLEEQISEIRRREEESFSLYSDQTSYLSICLEENNRFQVEHFSQEELKKKVSDLIQLVKELYTDNQHLKKTIFDLSCMGFQGNGFPDRLASTEQTEIMKDLSKGGCKNGYLRHTESKISDCDGAHAPGCLEEGAFINLLAPLFNEKATLLLESRPDLLKVVRELLLGQLFLTEQEVSGEHLDGKTEKTPKQKGELVHFVQTNSFSKPHDELKLSCEAQLVKAGEVPKVGLKDASVQTVATEGDLLRFKHEATREAWEEKPINTALSAEHRPENLHGVPGWQAALLSLPGITNREAKKSRLPILIKPSRSLGNMYRLPATQEVVTQLQSQILELQGELKEFKTCNKQLHQKLILAEAVMEGRPTPDKTLLNDSEICPPDDLASLPSCKENPEDVLSPTSVATYLSSKSQPSAKVSVMGTDQSESINTSNETEYLKQKIHDLETELEGYQNFIFQLQKHSQCSEAIITVLCGTEGAQDGLSKPKNGSDGEEMTFSSLHQVRYVKHVKILGPLAPEMIDSRVLENLKQQLEEQEYKLQKEQNLNMQLFSEIHNLQNKFRDLSPPRYDSLVQSQARELSLQRQQIKDGHGICVISRQHMNTMIKAFEELLQASDVDYCVAEGFQEQLNQCAELLEKLEKLFLNGKSVGVEMNTQNELMERIEEDNLTYQHLLPESPEPSASHALSDYETSEKSFFSRDQKQDNETEKTSVMVNSFSQDLLMEHIQEIRTLRKRLEESIKTNEKLRKQLERQGSEFVQGSTSIFASGSELHSSLTSEIHFLRKQNQALNAMLIKGSRDKQKENDKLRESLSRKTVSLEHLQREYASVKEENERLQKEGSEKERHNQQLIQEVRCSGQELSRVQEELKLRQQLLSQNDKLLQSLRVELKAYEKLDEEHRRLREASGEGWKGQDPFRDLHSLLMEIQALRLQLERSIETSSTLQSRLKEQLARGAEKAQEGALTLAVQAVSIPEVPLQPDKHDGDKYPMESDNSFDLFDSSQAVTPKSVSETPPLSGNDTDSLSCDSGSSATSTPCVSRLVTGHHLWASKNGRHVLGLIEDYEALLKQISQGQRLLAEMDIQTQEAPSSTSQELGTKGPHPAPLSKFVSSVSTAKLTLEEAYRRLKLLWRVSLPEDGQCPLHCEQIGEMKAEVTKLHKKLFEQEKKLQNTMKLLQLSKRQEKVIFDQLVVTHKILRKARGNLELRPGGAHPGTCSPSRPGS

SEQ ID NO: 832450 - protein, 1245 aa, Homo sapiens; identical to SEQ ID NO: 832449

SEQ ID NO: 832451 - protein, 522 aa, Homo sapiens
IPIGTQGAEKSNSVMVNSFFQDLLMEHIQEIRTLRKRLEESIKTNEKLRKQLERQGSEFVQGSTSIFASGSELHSSLTSEIHFLRKQNQALNAMLIKGSRDKQKENDKLRESLSRKTVSLEHLQREYASVKEENERLQKEGSEKERHNQQLIQEVRCSGQELSRVQEELKLRQQLLSQNDKLLQSLRVELKAYEKLDEEHRRLREASGEGWKGQDPFRDLHSLLMEIQALRLQLERSIETSSTLQSRLKEQLARGAEKAQEGALTLAVQAVSIPEVPLQPDKHDGDKYPMESDNSFDLFDSSQAVTPKSVSETPPLSGNDTDSLSCDSGSSATSTPCVSRLVTGHHLWASKNGRHVLGLIEDYEALLKQISQGQRLLAEMDIQTQEAPSSTSQELGTKGPHPAPLSKFVSSVSTAKLTLEEAYRRLKLLWRVSLPEDGQCPLHCEQIGEMKAEVTKLHKKLFEQEKKLQNTMKLLQLSKRQEKVIFDQLVVTHKILRKARGNLELRPGGAHPGTCSPSRPGS

SEQ ID NO: 832452 - protein, 1245 aa, Homo sapiens; identical to SEQ ID NO: 832449

SEQ ID NO: 832453 - protein, 1245 aa, Homo sapiens; identical to SEQ ID NO: 832449

SEQ ID NO: 832454 - protein, 143 aa, Homo sapiens [sequence omitted]

SEQ ID NO: 832455 - protein, 468 aa, Homo sapiens
SINNLQAELNKIFALRKQLEQDVLSYQNLRKTLEEQISEIRRREEESFSLYSDQTSYLSICLEENNRFQVEHFSQEELKKKVSDLIQLVKELYTDNQHLKKTIFDLSCMGFQGNGFPDRLASTEQTEIMKDLSKGGCKNGYLRHTESKISDCDGAHAPGCLEEGAFINLLAPLFNEKATLLLESRPDLLKVVRELLLGQLFLTEQEVSGEHLDGKTEKTPKQKGELVHFVQTNSFSKPHDELKLSCEAQLVKAGEVPKVGLKDASVQTVATEGDLLRFKHEATREAWEEKPINTALSAEHRPENLHGVPGWQAALLSLPGITNREAKKSRLPILIKPSRSLGNMYRLPATQEVVTQLQSQILELQGELKEFKTCNKQLHQKLILAEAVMEGRPTPDKTLLNAQPPVGAAYQDSPGEQKGIKTTSSVWRDKEMDSDQQRSYEIGQNSAPVCIEQLPCARHHLDVLSKNY

SEQ ID NO: 832456 - protein, 155 aa, Homo sapiens
SINNLQAELNKIFALRKQLEQDVLSYQNLRKTLEEQISEIRRREEESFSLYSDQTSYLSICLEENNRFQVEHFSQEELKKKVSDLIQLVKELYTDNQHLKKTIFDLSCMGFQGNGFPDRLASTEQTELLASKEDEDTIKIGEDDEINFLSDQHLQ

SEQ ID NO: 832457 - protein, 143 aa, Homo sapiens [sequence omitted]

SEQ ID NO: 832458 - protein, 799 aa, Homo sapiens [sequence omitted]

SEQ ID NO: 832459 - protein, 1166 aa, Homo sapiens
SINNLQAELNKIFALRKQLEQDVLSYQNLRKTLEEQISEIRRREEESFSLYSDQTSYLSICLEENNRFQVEHFSQEELKKKVSDLIQLVKELYTDNQHLKKTIFDLSCMGFQGNGFPDRLASTEQTEIMKDLSKGGCKNGYLRHTESKISDCDGAHAPGCLEEGAFINLLAPLFNEKATLLLESRPDLLKVVRELLLGQLFLTEQEVSGEHLDGKTEKTPKQKGELVHFVQTNSFSKPHDELKLSCEAQLVKAGEVPKVGLKDASVQTVATEGDLLRFKHEATREAWEEKPINTALSAEHRPENLHGVPGWQAALLSLPGITNREAKKSRLPILIKPSRSLGNMYRLPATQEVVTQLQSQILELQGELKEFKTCNKQLHQKLILAEAVMEGRPTPDKTLLNDSEICPPDDLASLPSCKENPEDVLSPTSVATYLSSKSQPSAKVSVMGTDQSESINTSNETEYLKQKIHDLETELEGYQNFIFQLQKHSQCSEAIITVLCGTEGAQDGLSKPKNGSDGEEMTFSSLHQVRYVKHVKILGPLAPEMIDSRVLENLKQQLEEQEYKLQKEQNLNMQLFSEIHNLQNKFRDLSPPRYDSLVQSQARELSLQRQQIKDGHGICVISRQHMNTMIKAFEELLQASDVDYCVAEGFQEQLNQCAELLEKLEKLFLNGKSVGVEMNTQNELMERIEEDNLTYQHLLPESPEPSASHALSDYETSEKSFFSRDQKQDNETEKTSVMVNSFSQDLLMEHIQEIRTLRKRLEESIKTNEKLRKQLERQGSEFVQGSTSIFASGSELHSSLTSEIHFLRKQNQALNAMLIKGSRDKQKENDKLRESLSRKTVSLEHLQREYASVKEENERLQKEGSEKERHNQQLIQEVRCSGQELSRVQEELKLRQQLLSQNDKLLQSLRVELKAYEKLDEEHRRLRDGDKYPMESDNSFDLFDSSQAVTPKSVSETPPLSGNDTDSLSCDSGSSATSTPCVSRLVTGHHLWASKNGRHVLGLIEDYEALLKQISQGQRLLAEMDIQTQEAPSSTSQELGTKGPHPAPLSKFVSSVSTAKLTLEEAYRRLKLLWRVSLPEDGQCPLHCEQIGEMKAEVTKLHKKLFEQEKKLQNTMKLLQLSKRQEKVIFDQLVVTHKILRKARGNLELRPGGAHPGTCSPSRPGS

SEQ ID NO: 832460 - protein, 1245 aa, Homo sapiens; identical to SEQ ID NO: 832449

SEQ ID NO: 832461 - protein, 143 aa, Homo sapiens [sequence omitted]

SEQ ID NO: 832462 - protein, 1010 aa, Homo sapiens
SINNLQAELNKIFALRKQLEQDVLSYQNLRKTLEEQISEIRRREEESFSLYSDQTSYLSICLEENNRFQVEHFSQEELKKKVSDLIQLVKELYTDNQHLKKTIFDLSCMGFQGNGFPDRLASTEQTEIMKDLSKGGCKNGYLRHTESKISDCDGAHAPGCLEEGAFINLLAPLFNEKATLLLESRPDLLKVVRELLLGQLFLTEQEVSGEHLDGKTEKTPKQKGELVHFVQTNSFSKPHDELKLSCEAQLVKAGEVPKVGLKDASVQTVATEGDLLRFKHEATREAWEEKPINTALSAEHRPENLHGVPGWQAALLSLPGITNREAKKSRLPILIKPSRSLGNMYRLPATQEVVTQLQSQILELQGELKEFKTCNKQLHQKLILAEAVMEGRPTPDKTLLNDSEICPPDDLASLPSCKENPEDVLSPTSVATYLSSKSQPSAKVSVMGTDQSESINTSNETEYLKQKIHDLETELEGYQNFIFQLQKHSQCSEAIITVLCGTEGAQDGLSKPKNGSDGEEMTFSSLHQVRYVKHVKILGPLAPEMIDSRVLENLKQQLEEQEYKLQKEQNLNMQLFSEIHNLQNKFRDLSPPRYDSLVQSQARELSLQRQQIKDGHGICVISRQHMNTMIKAFEELLQASDVDYCVAEGFQEQLNQCAELLEKLEKLFLNGKSVGVEMNTQNELMERIEEDNLTYQHLLPESPEPSASHALSDYETSEKSFFSRDQKQDNETEKTSVMVNSFSQDLLMEHIQEIRTLRKRLEESIKTNEKLRKQLERQGSEFVQGSTSIFASGSELHSSLTSEIHFLRKQNQALNAMLIKGSRDKQKENDKLRESLSRKTVSLEHLQREYASVKEENERLQKEGSEKERHNQQLIQEVRCSGQELSRVQEELKLRQQLLSQNDKLLQSLRVELKAYEKLDEEHRRLREASGEGWKGQDPFRDLHSLLMEIQALRLQLERSIETSSTLQSRLKEQLARGAEKAQEGALTLAVQRSSWRPLAEKRWAIPRRV

SEQ ID NO: 832463 - protein, 176 aa, Homo sapiens [sequence omitted]

SEQ ID NO: 832464 - protein, 176 aa, Homo sapiens [sequence omitted]

SEQ ID NO: 832465 - protein, 176 aa, Homo sapiens [sequence omitted]

SEQ ID NO: 832466 - protein, 176 aa, Homo sapiens [sequence omitted]

SEQ ID NO: 832467 - protein, 282 aa, Homo sapiens
MKASGTLREYKVVGRCLPTPKCHTPPLYRMRIFAPNHVVAKSRFWYFVSQLKKMKKSSGEIVYCGQVFEKAPPCGLGKNFGDLGRALLTPGSGHPQHMLPGNTGDLGPTAGGLFTQLLYPRNNWGCPATVGPRGPLPFSDSWNGLEEIRGPAKLPPAGMVQGSFHELQDQVPACPTGSWRRQATSHASTTKEGPTTFPSRVAGPLRFRGWCPPKINNLRRKRAPGGTTQTEKKKCVADSRRKTLLNNRGGRPQVVTGQGGENGRRGVTKEPGTGETRWPVTA

SEQ ID NO: 832468 - protein, 254 aa, Homo sapiens
MKASGTLREYKVVGRCLPTPKCHTPPLYRMRIFAPNHVVAKSRFWYFVSQLKKMKKSSGEIVYCGQVFEKAPPCGVGKNFGDLGRALWTPGSGHPQHMLPGNTGDLGPTAGGLFTQLLYPRNHWGCPATVGPGGPLPFSDSLNGLEEIRGPAKLPPAGIVQGSFHELQDQVPACPTGSWRRQATSHASTTKEGPTTFSSRVAGTLRYRGWCPQRINSLRRKRAPAEKKHKNKKKKKKKKKKPGPFFGGGEKAVL

SEQ ID NO: 832469 - protein, 321 aa, Homo sapiens
MKASGTLREYKVVGRCLPTPKCHTPPLYRMRIFAPNHVVAKSRFWYFVSQLKKMKKSSGEIVYCGQVFEKAPPCGLGKNFGDLGRALLTPGSGHPQHMLPGNTGDLGPTAGGLFTQLLYPRNNWGCPATVGPRGPLPFSDSWNGLEEIRGPAKLPPAGMVQGSFHELQDQVPACPTGSWRRQATSHASTTKEGPTTFPSRVAGPLRFRGWCPPKINNLRRKRAPGENTHNRHGLLFNQHIMPRSNSILIKTPWKFTGASQFSYSPRGLHPHYYSGLESPEYRTHSQGRIIISLKASNCIPLIVLGTLGGLVLRLTPFNSAG

SEQ ID NO: 832470 - protein, 329 aa, Homo sapiens
GRVGRPTRRTHASRTRVPFAGGGRTRKEHAMKASGTLREYKVVGRCLPTPKCHTPPLYRMRIFAPNHVVAKSRFWYFVSQLKKMKKSSGEIVYCGQVFEKAPPCGLGKNFGDLGRALLTPGSGHPQHMLPGNTGDLGPTAGGLFTQLLYPRNNWGCPATVGPRGPLPFSDSWNGLEEIRGPAKLPPAGMVQGSFHELQDQVPACPTGSWRRQATSHASTTKEGPTTFPSRVAGPLRFRGWCPPKINNLRRKRAPGDPTPPPPTPPPPPTPPTHPPPPPTPRHPPPPPQAPPHPPPPPHHRPTAHTTHPHHPPPSPPPTPPPSPPTPHPP

SEQ ID NO: 832471 - protein, 208 aa, Homo sapiens
MLPGNTGDLGPTAGGLFTQLLYPRNNWGCPATVGPRGPLPFSDSWNGLEEIRGPAKLPPAGMVQGSFHELQDQVPACPTGSWRRQATSHASTTKEGPTTFPSRVAGPLRFRGWCPPKINNLRRKRAPAAVLAACFLCTLQSSKGCYERPAQSAPGVQLSCHFFVLGGVFSANKQTLTSSCPGVGPPGAPTPELPLAWSVLSPAGSPGL

SEQ ID NO: 832472 - protein, 153 aa, Homo sapiens
GRLLLLLLEFKLLTMYGDVTGEYRGPWTHRRRLVHPVAYRDMGEIASFDKAKLKKTETQEKNTLPTKETIEQEKRSEISYDPGGFPTPVLFETPVVMWRKSHLKMDTSHKLHCEPGALAPMPPACGSLKGPPPNRTAKFSGLPRDIIENYLYE

SEQ ID NO: 832473 - protein, 256 aa, Homo sapiens
  misc_feature (6)..(6): Xaa can be any naturally occurring amino acid
SARARXNSCTTSGTLREYKVVGRCLPTPKCHTPPLYRMRIFAPNHVVAKSRFWYFVSQLKKMKKSSGEIVYCGQVFEKAPPCGLGKNFGDLGRALLTPGSGHPQHMLPGNTGDLGPTAGGLFTQLLYPRNNWGCPATVGPRGPLPFSDSWNGLEEIRGPAKLPPAGMVQGSFHELQDQVPACPTGSLRRQATSHASTTKEGPTTFPSRVAGPLRFRGWCPPKINNLRRKRAPGVSEPVVGVVWCWCGLGGGGGCGG

SEQ ID NO: 832474 - protein, 253 aa, Homo sapiens
SGGSCWARKAGKTFFSAIIAHARNPGDAWWRGSASPRHWPAAPRARVYCASGQSPPPPPAWPSGSCSSVASAAVGRRSEVRGCAPRPRLRRSARRMDPVPGTDSAPLAGLAWSSASAPPPRGFSAISCTVEGAPASFGKSFAQKSGYFLCLSSLGSLENPQENVVADIQIVVDKSPLPLGFSPVCDPMDSSFAHAASSAWGTFSLLFVAHSPSSVRCHLHPSLPLLFWAHNPSAALGDRVRLCLKKKRKENRP

SEQ ID NO: 832475 - protein, 408 aa, Homo sapiens
SGGSCWARKAGKTFFSAIIAHARNPGDAWWRGSASPRHWPAAPRARVYCASGQSPPPPPAWPSGSCSSVASAAVGRRSEVRGCAPRPRLRRSARRMDPVPGTDSAPLAGLAWSSASAPPPRGFSAISCTVEGAPASFGKSFAQKSGYFLCLSSLGSLENPQENVVADIQIVVDKSPLPLGFSPVCDPMDSKASVSKKKRMCVKLLPLGATDTAVFDVRLSGKTKTVPGYLRIGDMGGFAIWCKKAKAPRPVPKPRGLSRDMQGLSLDAASQPSKGGLLERTASRLGSRASTLRRNDSIYEASSLYGISAMDGVPFTLHPRFEGKSCSPLAFSAFGDLTIKSLADIEEEYNYGSWWRRRGWPAAPKFIVLTFEKRPNTPNGHTPQILGLTSVYQGNRGEKENTHRVDKM

SEQ ID NO: 832476 - protein, 368 aa, Homo sapiens
SGGSCWARKAGKTFFSAIIAHARNPGDAWWRGSASPRHWPAAPRARVYCASGQSPPPPPAWPSGSCSSVASAAVGRRSEVRGCAPRPRLRRSARRMDPVPGTDSAPLAGLAWSSASAPPPRGFSAISCTVEGAPASFGKSFAQKSGYFLCLSSLGSLENPQENVVADIQIVVDKSPLPLGFSPVCDPMDSKASVSKKKRMCVKLLPLGATDTAVFDVRLSGKTKTVPGYLRIGDMGGFAIWCKKAKAPRPVPKPRGLSRDMQGLSLDAASQPSKGGLLERTASRLGSRASTLRRNDSIYEASSLYGISAMDGVPFTLHPRFEGKSCSPLAFSAFGDLTIKSLADIEEEYNYGFVVEKTAAARLPPSVS

SEQ ID NO: 832477 - protein, 294 aa, Homo sapiens
ILIKCLKKEPRKGVFVFNKLYKITERGEHAMKASGTLREYKVVGRCLPTPKCHTPPLYRMRIFAPNHVVAKSRFWYFVSQLKKMKKSSGEIVYCGQVFEKAPPCGLGKNFGDLGRALWTPGSGHPQHMLPGNTGDLGPTAGGLFTQLLYPRNHWGCPATVGPGGPLPFSDSLNGLEEIRGPAKLPPAGIVQGSFHELQDQVPACPTGSWRRQATSHASTTKEGPTTFSSRVAGPLRYRGWCPQRINNLRRKRAPAEKKKKKKKQKKKKKKKTKKKQQTKGGHGTKKYTAGGANR

SEQ ID NO: 832478 - protein, 399 aa, Homo sapiens
ILIKCLKKEPRKGVFVFNKLYKITERGEHAMKASGTLREYKVVGRCLPTPKCHTPPLYRMRIFAPNHVVAKSRFWYFVSQLKKMKKSSGEIVYCGQVFEKAPPCGLGKNFGDLGRALWTPGSGHPQHMLPGNTGDLGPTAGGLFTQLLYPRNHWGCPATVGPGGPLPFSDSLNGLEEIRGPAKLPPAGIVQGSFHELQDQVPACPTGSWRRQATSHASTTKEGPTTFSSRVAGPLRYRGWCPQRINNLRRKRAPAEKKKKKKKQKKKKKKKTKKKKKKTRGERRHSETSAEERGICGRADVAGGAQGGGGRVKGAEGWRDMGGHGGRCKEGAPGHEGGGGEKETVGRSHGRRQPNRQRGTTTNRGRYHEAGAGHREGHKRAVHSRAGKHGTWTEKSTRV

SEQ ID NO: 832479 - protein, 328 aa, Homo sapiens
  misc_feature (297)..(297): Xaa can be any naturally occurring amino acid
ILIKCLKKEPRKGVFVFNKLYKITERGEHAMKASGTLREYKVVGRCLPTPKCHTPPLYRMRIFAPNHVVAKSRFWYFVSQLKKMKKSSGEIVYCGQVFEKAPPCGLGKNFGDLGRALWTPGSGHPQHMLPGNTGDLGPTAGGLFTQLLYPRNHWGCPATVGPGGPLPFSDSLNGLEEIRGPAKLPPAGIVQGSFHELQDQVPACPTGSWRRQATSHASTTKEGPTTFSSRVAGPLRYRGWCPQRINNLRRKRAPAEKKKKKKKPPGASLYSGGAEKKRGIKRAPWAPKGVFLVNPRXFSCVTKVGETRGRGTPIRGRRRINIAENAAG

SEQ ID NO: 832480 - protein, 311 aa, Homo sapiens
ILIKCLKKEPRKGVFVFNKLYKITERGEHAMKASGTLREYKVVGRCLPTPKCHTPPLYRMRIFAPNHVVAKSRFWYFVSQLKKMKKSSGEIVYCGQVFEKAPPCGLGKNFGDLGRALWTPGSGHPQHMLPGNTGDLGPTAGGLFTQLLYPRNHWGCPATVGPGGPLPFSDSLNGLEEIRGPAKLPPAGIVQGSFHELQDQVPACPTGSWRRQATSHASTTKEGPTTFSSRVAGPLRYRGWCPQRINNLRRKRAPAEKTKKKKNKKKKKKKKNKKKGGGGQKTNTPGGATKRETHTIILEKKRGATKGAAKK

SEQ ID NO: 832481 - protein, 284 aa, Homo sapiens
ILIKCLKKEPRKGVFVFNKLYKITERGEHAMKASGTLREYKVVGRCLPTPKCHTPPLYRMRIFAPNHVVAKSRFWYFVSQLKKMKKSSGEIVYCGQVFEKAPPCGLGKNFGDLGRALWTPGSGHPQHMLPGNTGDLGPTAGGLFTQLLYPRNHWGCPATVGPGGPLPFSDSLNGLEEIRGPAKLPPAGIVQGSFHELQDQVPACPTGSWRRQATSHASTTKEGPTTFSSRVAGPLRYRGWCPQRINNLRRKRAPAEKKHKNKKKKKKKKKKPGPFFGGGEKAVL

SEQ ID NO: 832482 - protein, 316 aa, Homo sapiens
ILIKCLKKEPRKGVFVFNKLYKITERGEHAMKASGTLREYKVVGRCLPTPKCHTPPLYRMRIFAPNHVVAKSRFWYFVSQLKKMKKSSGEIVYCGQVFEKAPPCGLGKNFGDLGRALWTPGSGHPQHMLPGNTGDLGPTAGGLFTQLLYPRNHWGCPATVGPGGPLPFSDSLNGLEEIRGPAKLPPAGIVQGSFHELQDQVPACPTGSWRRQATSHASTTKEGPTTFSSRVAGPLRYRGWCPQRINNLRRKRAPAEKKHKQRDNKKKKQNKKKKRGRKRTKRTRSRPEVAEDTREERERGGEKRGKQRGLGRESGR

SEQ ID NO: 832483 - protein, 321 aa, Homo sapiens; identical to SEQ ID NO: 832469

SEQ ID NO: 832484 - protein, 292 aa, Homo sapiens
MKASGTLREYKVVGRCLPTPKCHTPPLYRMRIFAPNHVVAKSRFWYFVSQLKKMKKSSGEIVYCGQVFEKAPPCGLGKNFGDLGRALLTPGSGHPQHMLPGNTGDLGPTAGGLFTQLLYPRNNWGCPATVGPRGPLPFSDSWNGLEEIRGPAKLPPAGMVQGSFHELQDQVPACPTGSWRRQATSHASTTKEGPTTFPSRVAGPLRFRGWCPPKINNLRRKRAPAAKNRTQTKTKTVWGPWPWEKFINHLWGRAPQGKTEDKGPQEQGRQGGVHNKSGDRGLTTERPGKGSR

SEQ ID NO: 832485 - protein, 250 aa, Homo sapiens
MKASGTLREYKVVGRCLPTPKCHTPPLYRMRIFAPNHVVAKSRFWYFVSQLKKMKKSSGEIVYCGQVFEKAPPCGLGKNFGDLGRALLTPGSGHPQHMLPGNTGDLGPTAGGLFTQLLYPRNNWGCPATVGPRGPLPFSDSWNGLEEIRGPAKLPPAGMVQGSFHELQDQVPACPTGSWRRQATSHASTTKEGPTTFPSRVAGPLRFRGWCPPKINNLRRKRAPGEKKKQKQEQKQKTGAFFSGGGKSGF

SEQ ID NO: 832486 - protein, 321 aa, Homo sapiens
ILIKCLKKEPRKGVFVFNKLYKITERGEHAMKASGTLREYKVVGRCLPTPKCHTPPLYRMRIFAPNHVVAKSRFWYFVSQLKKMKKSSGEIVYCGQVFEKAPPCGLGKNFGDLGRALWTPGSGHPQHMLPGNTGDLGPTAGGLFTQLLYPRNHWGCPATVGPGGPLPFSDSLNGLEEIRGPAKLPPAGIVQGSFHELQDQVPACPTGSWRRQATSHASTTKEGPTTFSSRVAGPLRYRGWCPQRINNLRRKRAPAVTKKKTKKIKKKKKKKKKNKKKKKKKKQKKRGGGPKNKYPRGGHQKRNTHHYIGEKEGRHKGSGKK

SEQ ID NO: 832487 - protein, 254 aa, Homo sapiens
MKASGTLREYKVVGRCLPTPKCHTPPLYRMRIFAPNHVVAKSRFWYFVSQLKKMKKSSGEIVYCGQVFEKAPPCGLGKNFGDLGRALWTPGSGHPQHMLPGNTGDLGPTAGGLFTQLLYPRNHWGCPATVGPGGPLPFSDSLNGLEEIRGPAKLPPAGIVQGSFHELQDQVPACPTGSWRRQATSHASTTKEGPTTFSSRVAGTLRYRGWCPQRINSLRRKRAPAEKKHKNKKKKKKKKKKPGPFFGGGEKAVL

SEQ ID NO: 832488 - protein, 280 aa, Homo sapiens
GRVGRPTRRTHASRTRVPFAGGGRTRKEHAMKASGTLREYKVVGRCLPTPKCHTPPLYRMRIFAPNHVVAKSRFWYFVSQLKKMKKSSGEIVYCGQVFEKAPPCGLGKNFGDLGRALLTPGSGHPQHMLPGNTGDLGPTAGGLFTQLLYPRNNWGCPATVGPRGPLPFSDSWNGLEEIRGPAKLPPAGMVQGSFHELQDQVPACPTGSWRRQATSHASTTKEGPTTFPSRVAGPLRFRGWCPPKINNLRRKRAPGEKKKQKQEQKQKTGAFFSGGGKSGF

SEQ ID NO: 832489 - protein, 292 aa, Homo sapiens
MKASGTLREYKVVGRCLPTPKCHTPPLYRMRIFAPNHVVAKSRFWYFVSQLKKMKKSSGEIVYCGQVFEKAPPCGLGKNFGDLGRALLTPGSGHPQHMLPGNTGDLGPTAGGLFTQLLYPRNNWGCPATVGPRGPLPFSDSWNGLEEIRGPAKLPPAGMVQGSFHELQDQVPACPTGSWRRQATSHASTTKEGPTTFPSRVAGPLRFRGWCPPKINNLRRKRAPAAKNRTQTKTKTVWGPWPREKFINHLWGRAPQGKTEDKGPQEQGRQGGVHNKSGDRGLTTERPGKGSR

SEQ ID NO: 832490 - protein, 299 aa, Homo sapiens
MKASGTLREYKVVGRCLPTPKCHTPPLYRMRIFAPNHVVAKSRFWYFVSQLKKMKKSSGEIVYCGQVFEKAPPCGLGKNFGDLGRALLTPGSGHPQHMLPGNTGDLGPTAGGLFTQLLYPRNNWGCPATVGPRGPLPFSDSWNGLEEIRGPAKLPPAGMVQGSFHELQDQVPACPTGSWRRQATSHASTTKEGPTTFPSRVAGPLRFRGWCPPKINNLRRKRAPGDPTPPPPTPPPPPTPPTHPPPPPTPRHPPPPPQAPPHPPPPPHHRPTAHTTHPHHPPPSPPPTPPPSPPTPHPP

SEQ ID NO: 832491 - protein, 260 aa, Homo sapiens
  misc_feature (229)..(230): Xaa can be any naturally occurring amino acid
MKASGTLREYKVVGRCLPTPKCHTPPLYRMRIFAPNHVVAKSRFWYFVSQLKKMKKSSGEIVYCGQVFEKAPPCGLGKNFGDLGRALLTPGSGHPQHMLPGNTGDLGPTAGGLFTQLLYPRNNWGCPATVGPRGPLPFSDSWNGLEEIRGPAKLPPAGMVQGSFHELQDQVPACPTGSWRRQATSHASTTKEGPTTFPSRVAGPLRFRGWCPPKINNLRRKRAPAAQKXXHSTTGHSPIGAIHYCRVTRDWNLATLMLVP

SEQ ID NO: 832492 - protein, 201 aa, Homo sapiens
MKASGTLREYKVVGRCLPTPKCHTPPLYRMRIFAPNHVVAKSRFWYFVSQLKKMKKSSGEIVYCGQVFEKAPPCGLGKNFGDLGRALLTPGSGHPQHMLPGNTGDLGPTAGGLFTQLLYPRNNWGCPATVGPRGPLPFSDSWNGLEEIRGPAKLPPAGMVQGSFHELQDQVPACPTGSWRRQATSHASTTKDEFRHDHDEL

SEQ ID NO: 832493 - protein, 189 aa, Homo sapiens
MKASGTLREYKVVGRCLPTPKCHTPPLYRMRIFAPNHVVAKSRFWYFVSQLKKMKKSSGEIVYCGQVFEKAPPCGLGKNFGDLGRALLTPGSGHPQHMLPGNTGDLGPTAGGLFTQLLYPRNNWGCPATVGPRGPLPFSDSWNGLEEIRGPAKLPPAGMVQGSFHCSNDHSSPLPPPVSLRLSSTQPRL

SEQ ID NO: 832494 - protein, 252 aa, Homo sapiens
MRIFAPNHVVAKSRFWYFVSQLKKMKKSSGEIVYCGQVFEKAPPCGLGKNFGDLGRALWTPGSGHPQHMLPGNTGDLGPTAGGLFTQLLYPRNHWGCPATVGPGGPLPFSDSLNGLEEIRGPAKLPPAGIVQGSFHELQDQVPACPTGSWRRQATSHASTTKEGPTTFSSRVAGTLRYRGWCPQRINSLRRKRAPAEKTKKKKNKKKKKKKKNKKKGGGGQKTNTPGGATKRETHTIILEKKRGATKGAAKK

SEQ ID NO: 832495 - protein, 141 aa, Homo sapiens
MKASGTLREYKVVGRCLPTPKCHTPPLYRMRIFAPNHVVAKSRFWYFVSQLKKMKKSSGEIVYCGQVFEKAPPCGLGKNFGDLGRALLTPGSGHPQHMLPGNTGDLGPTAGGLFTQLLYPRNNWGCPATVGPRGPLPFSDS

SEQ ID NO: 832496 - protein, 218 aa, Homo sapiens
GRVGRPTRRTHASRTRVPFAGGGRTRKEHAMKASGTLREYKVVGRCLPTPKCHTPPLYRMRIFAPNHVVAKSRFWYFVSQLKKMKKSSGEIVYCGQVFEKAPPCGLGKNFGDLGRALLTPGSGHPQHMLPGNTGDLGPTAGGLFTQLLRRARSPTSIFRFMERFGGDSRASKVAAGRHGSRQFPRTPRSSSRLPHRVLAPSGNKPRFNHQGGPNNLSF

SEQ ID NO: 832497 - protein, 274 aa, Homo sapiens
GGAQGSLINLIPPPPPRFPFAGGGRTRKEHAMKASGTLREYKVVGRCLPTPKCHTPPLYRMRIFAPNHVVAKSRFWYFVSQLKKMKKSSGEIVYCGQVFEKAPPCGLGKNFGDLGRALLTPGSGHPQHMLPGNTGDLGPTAGGLFTQLLYPRNNWGCPATVGPRGPLPFSDSWNGLEEIRGPAKLPPAGMVQGSFHELQDQVPACPTGSWRRQATSHASTTKEGPTTFPSRVAGPLRFRGWCPPKINNLRRKRAPGEKNNNKTTPPQNKHNTQE

SEQ ID NO: 832498 - protein, 254 aa, Homo sapiens
MYEAWWFERGEHAMKASGTLREYKVVGRCLPTPKCHTPPLYRMRIFAPNHVVAKSRFWYFVSQLKKMKKSSGEIVYCGQVFEKAPPCGLGKNFGDLGRALLTPGSGHPQHMLPGNTGDLGPTAGGLFTQLLYPRNNWGCPATVGPRGPLPFSDSWNGLEEIRGPAKLPPAGMVQGSFHELQDQVPACPTGSWRRQATSHASTTKEGPTTFPSRVAGPLRFRGWCPPKINNLRRKRAPGEKKESRRGREFSSSSR

SEQ ID NO: 832499 - protein, 281 aa, Homo sapiens
MEHAMKASGTLREYKVVGRCLPTPKCHTPPLYRMRIFAPNHVVAKSRFWYFVSQLKKMKKSSGEIVYCGQVFEKAPPCGLGKNFGDLGRALLTPGSGHPQHMLPGNTGDLGPTAGGLFTQLLYPRNNWGCPATVGPRGPLPFSDSWNGLEEIRGPAKLPPAGMVQGSFHELQDQVPACPTGSWRRQATSHASTTKEGPTTFPSRVAGPLRFRGWCPPKINNLRRKRAPGETKNKHKQNKKLRGLPMGGGGKRGSGRGLGAKRVSWTKFSGPKGEIRRAPYW

SEQ ID NO: 832500 - protein, 112 aa, Homo sapiens
MDSRERAPTTYVTGEYRGPWTHRRRLVHPVALPEEQLGLPGNRRARSPTSIFRFMERFGGDSRASKVAAGRHGSRQFPRTPRSSSRLPHRVLAPSGNKPRFNHQGGPNNLSF

SEQ ID NO: 832501 - protein, 75 aa, Homo sapiens
RPPTTTTARIQASNDVRGERFGGDSRASKVAAGRHGSRQFPRTPRSSSRLPHRVLAPSGNKPRFNHQGGPNNLSF

SEQ ID NO: 832502 - protein, 153 aa, Homo sapiens
TSAAEYDSTSQRQDLSHCCNSLSESIRPCTMTSVRESLACAMDSRERAPTTYVTGEYRGPWTHRRRLVHPVALPEEQLGLPGNRRAPSPTSIFRFMERFGGDSRASKVAAGRHGSRQFPRTPRSSSRLPHRVLAPSGNKPRFNHQGGPNNLSF

SEQ ID NO: 832503 - protein, 181 aa, Homo sapiens
MAKLLVLRPQSVHFHVITSQFHIFVRYLLISSPILVTRSCELEDKYITRKKMKKSSGEIVYCGQVFEKAPPCGLGKNFGDLGRALWTPGSGHPQHMLPGNTGDLGPTAGGLFTQLLYPRNHWGCPATVGPGGPLPFSDSLNGLEEIRGPAKLPPAGIVQGSFHISKIKSPHNSQDPVDHRS

SEQ ID NO: 832504 - protein, 368 aa, Homo sapiens; identical to SEQ ID NO: 832476

SEQ ID NO: 832505 - protein, 233 aa, Homo sapiens
SGGSCWARKAGKTFFSAIIAHARNPGDAWWRGSASPRHWPAAPRARVYCASGQSPPPPPAWPSGSCSSVASAAVGRRSEVRGCAPRPRLRRSARRMDPVPGTDSAPLAGLAWSSASAPPPRGFSAISCTVEGAPASFGKSFAQKSGYFLCLSSLGSLENPQENVVADIQIVVDKSPLPLGFSPVCDPMDSKASVSKKKRMCVKLLPLGATDTAVFDVRLSGKTKTVPGYLRIG

SEQ ID NO: 832506 - protein, 311 aa, Homo sapiens
ILIKCLKKEPRKGVFVFNKLYKITERGEHAMKASGTLREYKVVGRCLPTPKCHTPPLYRMRIFAPNHVVAKSRFWYFVSQLKKMKKSSGEIVYCGQVFEKAPPCGLGKNFGDLGRALWTPGSGHPQHMLPGNTGDLGPTAGGLFTQLLYPRNHWGCPATVGPGGPLPFSDSLNGLEEIRGPAKLPPAGIVQGSFHELQDQVPACPTGSWRRQATSHASTTKEGPTTFSSRVAGPLRYRGWCPQRINNLRRKRAPAEKKKKKKKQKKKKKKKTKKKGGGAKKQIPQGGPPKEKHTPLYWRKRGAPQRERQKR

SEQ ID NO: 832507 - protein, 243 aa, Homo sapiens
MKASGTLREYKVVGRCLPTPKCHTPPLYRMRIFAPNHVVAKSRFWYFVSQLKKMKKSSGEIVYCGQVFEKAPPCGLGKNFGDLGRALLTPGSGHPQHMLPGNTGDLGPTAGGLFTQLLYPRNNWGCPATVGPRGPLPFSDSWNGLEEIRGPAKLPPAGMVQGSFHELQDQVPACPTGSWRRQATSHASTTKEGPTTFPSRVAGPLRFRGWCPPKINNLRRKRAPGEKNNNKTTPPQNKHNTQE

SEQ ID NO: 832508 - protein, 379 aa, Homo sapiens
ILIKCLKKEPRKGVFVFNKLYKITERGEHAMKASGTLREYKVVGRCLPTPKCHTPPLYRMRIFAPNHVVAKSRFWYFVSQLKKMKKSSGEIVYCGQVFEKAPPCGLGKNFGDLGRALWTPGSGHPQHMLPGNTGDLGPTAGGLFTQLLYPRNHWGCPATVGPGGPLPFSDSLNGLEEIRGPAKLPPAGIVQGSFHELQDQVPACPTGSWRRQATSHASTTKEGPTTFSSRVAGPLRYRGWCPQRINNLRRKRAPAEKKKKKKKTKKKGGGGEKKFPGGGPNFAGPPFFFVTTGVPPIGGGGIYKAQGQRARGVNTPVVDGQTWLRLDLSGEGPLTCGAVALPRGRTSWGFNARGIYNCGGTVAPPHLLALEMCHGFSDI

SEQ ID NO: 832509 - protein, 271 aa, Homo sapiens
ILIKCLKKEPRKGVFVFNKLYKITERGEHAMKASGTLREYKVVGRCLPTPKCHTPPLYRMRIFAPNHVVAKSRFWYFVSQLKKMKKSSGEIVYCGQVFEKAPPCGLGKNFGDLGRALWTPGSGHPQHMLPGNTGDLGPTAGGLFTQLLYPRNHWGCPATVGPGGPLPFSDSLNGLEEIRGPAKLPPAGIVQGSFHELQDQVPACPTGSWRRQATSHASTTKEGPTTFSSRVAGPLRYRGWCPQRINNLRRKRAPAEKKESRRGREFSSSSR

SEQ ID NO: 832510 - protein, 241 aa, Homo sapiens
MKASGTLREYKVVGRCLPTPKCHTPPLYRMRIFAPNHVVAKSRFWYFVSQLKKMKKSSGEIVYCGQVFEKAPPCGLGKNFGDLGRALLTPGSGHPQHMLPGNTGDLGPTAGGLFTQLLYPRNNWGCPATVGPRGPLPFSDSWNGLEEIRGPAKLPPAGMVQGSFHELQDQVPACPTGSWRRQATSHASTTKEGPTTFPSRVAGPLRFRGWCPPKINNLRRKRAPGAKLRNAPVKNHRYTQY

SEQ ID NO: 832511 - protein, 276 aa, Homo sapiens
ILIKCLKKEPRKGVFVFNKLYKITERGEHAMKASGTLREYKVVGRCLPTPKCHTPPLYRMRIFAPNHVVAKSRFWYFVSQLKKMKKSSGEIVYCGQVFEKAPPCGLGKNFGDLGRALWTPGSGHPQHMLPGNTGDLGPTAGGLFTQLLYPRNHWGCPATVGPGGPLPFSDSLNGLEEIRGPAKLPPAGIVQGSFHELQDQVPACPTGSWRRQATSHASTTKEGPTTFSSRVAGPLRYRGWCPQRINNLRRKRAPAVKFFFFFECRLAAFFVVVWAR

SEQ ID NO: 832512 - protein, 284 aa, Homo sapiens
ILIKCLKKEPRKGVFVFNKLYKITERGEHAMKASGTLREYKVVGRCLPTPKCHTPPLYRMRIFAPNHVVAKSRFWYFVSQLKKMKKSSGEIVYCGQVFEKAPPCGLGKNFGDLGRALWTPGSGHPQHMLPGNTGDLGPTAGGLFTQLLYPRNHWGCPATVGPGGPLPFSDSLNGLEEIRGPAKLPPAGIVQGSFHELQDQVPACPTGSWRRQATSHASTTKEGPTTFSSRVAGPLRYRGWCPQRINNLRRKRAPAEKKKKKNSKKTKKQQQNNTTTKQTQHTRK

SEQ ID NO: 832513 - protein, 276 aa, Homo sapiens
MKASGTLREYKVVGRCLPTPKCHTPPLYRMRIFAPNHVVAKSRFWYFVSQLKKMKKSSGEIVYCGQVFEKAPPCGLGKNFGDLGRALLTPGSGHPQHMLPGNTGDLGPTAGGLFTQLLYPRNNWGCPATVGPRGPLPFSDSWNGLEEIRGPAKLPPAGMVQGSFHELQDQVPACPTGSWRRQATSHASTTKEGPTTFPSRVAGPLRFRGWCPPKINNLRRKRAPGEKKKKKFRGHPMSEFANKRGPDIGPWVIAGTVTKFLGPTGVNLADPQLERR

SEQ ID NO: 832514 - protein, 286 aa, Homo sapiens
MKASGTLREYKVVGRCLPTPKCHTPPLYRMRIFAPNHVVAKSRFWYFVSQLKKMKKSSGEIVYCGQVFEKAPPCGLGKNFGDLGRALWTPGSGHPQHMLPGNTGDLGPTAGGLFTQLLYPRNHWGCPATVGPGGPLPFSDSLNGLEEIRGPAKLPPAGIVQGSFHELQDQVPACPTGSWRRQATSHASTTKEGPTTFSSRVAGTLRYRGWCPQRINSLRRKRAPAEKKHKQRDNKKKKQNKKKKRGRKRTKRTRSRPEVAEDTREERERGGEKRGKQRGLGRESGR

SEQ ID NO: 832515 - protein, 241 aa, Homo sapiens; identical to SEQ ID NO: 832510

SEQ ID NO: 832516 - protein, 245 aa, Homo sapiens
MKASGTLREYKVVGRCLPTPKCHTPPLYRMRIFAPNHVVAKSRFWYFVSQLKKMKKSSGEIVYCGQVFEKAPPCGLGKNFGDLGRALLTPGSGHPQHMLPGNTGDLGPTAGGLFTQLLYPRNNWGCPATVGPRGPLPFSDSWNGLEEIRGPAKLPPAGMVQGSFHELQDQVPACPTGSWRRQATSHASTTKEGPTTFPSRVAGPLRFRGWCPPKINNLRRKRAPGVSGTAPIQLLQAYSNAAPIR

SEQ ID NO: 832517 - protein, 213 aa, Homo sapiens
ILIKCLKKEPRKGVFVFNKLYKITERGEHAMKASGTLREYKVVGRCLPTPKCHTPPLYRMRIFAPNHVVAKSRFWYFVSQLKKMKKSSGEIVYCGQVFEKAPPCGLGKNFGDLGRALWTPGSGHPQHMLPGNTGDLGPTAGGLFTQLLYPRNHWGCPATVGPGGPLPFSDSLNGLEEIRGPAKLPPAGIVQGSFHISKIKSPHNSQDPVDHRS

SEQ ID NO: 832518 - protein, 134 aa, Homo sapiens
GGAQGSLIILIPPPPPRFPFAGGGRTRKEHAMKASGTLREYKVVGRCLPTPKCHTPPLYRMRIFAPNHVVAKSRFWYFVSQLKKMKKSSGEIVYCGQVWRGRGYVGSGVDLRLLGHRASQELIRHRTGAVAQRL

SEQ ID NO: 832519 - protein, 134 aa, Homo sapiens; identical to SEQ ID NO: 832518

SEQ ID NO: 832520 - protein, 176 aa, Homo sapiens [sequence omitted]

SEQ ID NO: 832521 - protein, 176 aa, Homo sapiens [sequence omitted]

SEQ ID NO: 832522 - protein, 442 aa, Homo sapiens
MQPPPSLCGRALVALVLACGLSRIWGEERGFPPDRATPLLQTAEIMTPPTKTLWPKGSNASLARSLAPAEVPKGDRTAGSPPRTISPPPCQGPIEIKETFKYINTVVSCLVFVLGIIGNSTLLRIIYKNKCMRNGPNILIASLALGDLLHIVIDIPINVYKLLAEDWPFGAEMCKLVPFIQKASVGITVLSLCALSIDRYRAVASWSRIKGIGVPKWTAVEIVLIWVVSVVLAVPEAIGFDIITMDYKGSYLRICLLHPVQKTAFMQFYKTAKDWWLFSFYFCLPLAITAFFYTLMTCEMLRKKSGMQIALNDHLKQRREVAKTVFCLVLVFALCWLPLHLSRILKLTLYNQNDPNRCELLSFLLVLDYIGINMASLNSCINPIALYLVSKRFKNCFKSCLCCWCQSFEEKQSLEEKQSCLKFKANDHGYDNFRSSNKYSSS

SEQ ID NO: 832523 - protein, 442 aa, Homo sapiens; identical to SEQ ID NO: 832522

SEQ ID NO: 832524 - protein, 442 aa, Homo sapiens; identical to SEQ ID NO: 832522

SEQ ID NO: 832525 - protein, 442 aa, Homo sapiens; identical to SEQ ID NO: 832522

SEQ ID NO: 832526 - protein, 442 aa, Homo sapiens; identical to SEQ ID NO: 832522

SEQ ID NO: 832527 - protein, 409 aa, Homo sapiens
MQPPPSLCGRALVALVLACGLSRIWGEERGFPPDRATPLLQTAEIMTPPTKTLWPKGSNASLARSLAPAEVPKGDRTAGSPPRTISPPPCQGPIEIKETFKYINTVVSCLVFVLGIIGNSTLLRIIYKNKCMRNGPNILIASLALGDLLHIVIDIPINVYKLLAEDWPFGAEMCKLVPFIQKASVGITVLSLCALSIDRYRAVASWSRIKGIGVPKWTAVEIVLIWVVSVVLAVPEAIGFDIITMDYKGSYLRICLLHPVQKTAFMQFYKTAKDWWLFSFYFCLPLAITAFFYTLMTCEMLRKKSGMQIALNDHLKQRREVAKTVFCLVLVFALCWLPLHLSRILKLTLYNQNDPNRCELLSFLLVLDYIGINMASLNSCINPIALYLVSKRFKNCFKVRDYPKIKSSL

SEQ ID NO: 832528 - protein, 336 aa, Homo sapiens [sequence omitted]

SEQ ID NO: 832529 - protein, 155 aa, Homo sapiens
  misc_feature (154)..(154): Xaa can be any naturally occurring amino acid
MQPPPSLCGRALVALVLACGLSRIWGEERGFPPDRATPLLQTAEIMTPPTKTLWPKGSNASLARSLAPAEVPKGDRTAGSPPRTISPPPCQGPIEIKETFKYINTVVSCLVFVLGIIGNSTLLRIIYKNKCMRNGPNILIASLALGKPGLEQSXN

SEQ ID NO: 832530 - protein, 532 aa, Homo sapiens
MNKSTCLMAAETPSKRWRLHCLAFSQRFVRAGPACSSREACSSPRAGWNPAGFRLPGRWSPFVALHLVCQIREALKLRSGHRTPSGAGSSMQPPPSLCGRALVALVLACGLSRIWGEERGFPPDRATPLLQTAEIMTPPTKTLWPKGSNASLARSLAPAEVPKGDRTAGSPPRTISPPPCQGPIEIKETFKYINTVVSCLVFVLGIIGNSTLLRIIYKNKCMRNGPNILIASLALGDLLHIVIDIPINVYKLLAEDWPFGAEMCKLVPFIQKASVGITVLSLCALSIDRYRAVASWSRIKGIGVPKWTAVEIVLIWVVSVVLAVPEAIGFDIITMDYKGSYLRICLLHPVQKTAFMQFYKTAKDWWLFSFYFCLPLAITAFFYTLMTCEMLRKKSGMQIALNDHLKQRREVAKTVFCLVLVFALCWLPLHLSRILKLTLYNQNDPNRCELLSFLLVLDYIGINMASLNSCINPIALYLVSKRFKNCFKSCLCCWCQSFEEKQSLEEKQSCLKFKANDHGYDNFRSSNKYSSS

SEQ ID NO: 832531 - protein, 442 aa, Homo sapiens; identical to SEQ ID NO: 832522

SEQ ID NO: 832532 - protein, 436 aa, Homo sapiens
MQPPPSLCGRALVALVLACGLSRIWGEERGFPPDRATPLLQTAEIMTPPTKTLWPKGSNASLARSLAPAEVPKGDRTAGSPPRTISPPPCQGPIEIKETFKYINTVVSCLVFVLGIIGNSTLLRIIYKNKCMRNGPNILIASLALGDLLHIVIDIPINVYKLLAEDWPFGAEMCKLVPFIQKASVGITVLSLCALSIDRYRAVASWSRIKGIGVPKWTAVEIVLIWVVSVVLAVPEAIGFDIITMDYKGSYLRICLLHPVQKTAFMQFYKTAKDWWLFSFYFCLPLAITAFFYTLMTCEMLRKKSGMQIALNDHLKQRREVAKTVFCLVLVFALCWLPLHLSRILKLTLYNQNDPNRCELLSFLLVLDYIGINMASLNSCINPIALYLVSKRFKNCFKAGPHVGNKLVMLFSVNIECDGTVNQNPTMWPERKSNNN

SEQ ID NO: 832533 - protein, 442 aa, Homo sapiens; identical to SEQ ID NO: 832522

SEQ ID NO: 832534 - protein, 169 aa, Homo sapiens
MQPPPSLCGRALVALVLACGLSRIWGEERGFPPDRATPLLQTAEIMTPPTKTLWPKGSNASLARSLAPAEVPKGDRTAGSPPRTISPPPCQGPIEIKETFKYINTVVSCLVFVLGIIGNSTLLRIIYKNKCMRNGPNILIASLALGDLLHIVIDIPINVYKLLAEDLPF

SEQ ID NO: 832535 - protein, 225 aa, Homo sapiens
ETQEEMTEPVWVPARSRSPGHTLRLDAAATAASLSPRGCRLRTPSSDMSPSGRLCLLTIVGLILPTRGQTLKDTTSSSSADSTIMDIQVPTRAPDAVYTELQPTSPTPTWPADETPQPQTQTQQLEGTDGPLVTDPETHKSTKAAHPTDDTTTLSERPSPSTDVQTDPQTLKPSGFHEDDPFFYDEHTLRKRGLLVAAVLFITGIIILTSGKCRQLSRLCRNHCR

SEQ ID NO: 832536 - protein, 143 aa, Homo sapiens
ETQEEMTEPVWVPARSRSPGHTLRLDAAATAASLSPRGCRLRTPSSDMSPSGRLCLLTIVGLILPTRGQTLKDTTSSSSADSTIMDIQVPTRAPDAVYTELQPTSPTPTWPADGAYITAYGVTHFLMNMLAVSSFFCLHTAPQ

SEQ ID NO: 832537 - protein, 142 aa, Homo sapiens
ETQEEMTEPVWVPARSRSPGHTLRLDAAATAASLSPRGCRLRTPSSDMSPSGRLCLLTIVGLILPTRGQTLKDTTSSSSADSTIMDIQVPTRAPGEERDTSIKILSLQITTATKIPNLDQTREFMDLCNEKVQEESPLMGPR

SEQ ID NO: 832538 - protein, 245 aa, Homo sapiens
ETQEEMTEPVWVPARSRSPGHTLRLDAAATAASLSPRGCRLRTPSSDVSPSRAPPPSAAPLPTGRAQMSPSGRLCLLTIVGLILPTRGQTLKDTTSSSSADSTIMDIQVPTRAPDAVYTELQPTSPTPTWPADETPQPQTQTQQLEGTDGPLVTDPETHKSTKAAHPTDDTTTLSERPSPSTDVQTDPQTLKPSGFHEDDPFFYDEHTLRKRGLLVAAVLFITGIIILTSGKCRQLSRLCRNHCR

SEQ ID NO: 832539 - protein, 225 aa, Homo sapiens; identical to SEQ ID NO: 832535

SEQ ID NO: 832540 - protein, 140 aa, Homo sapiens
MSPSGRLCLLTIVGLILPTRGQTLKDTTSSSSADSTIMDIQVPTRAPVTDPETHKSTKAAHPTDDTTTLSERPSPSTDVQTDPQTLKPSGFHEDDPFFYDEHTLRKRGLLVAAVLFITGIIILTSGKCRQLSRLCRNHCR

SEQ ID NO: 832541 - protein, 194 aa, Homo sapiens
ETQEEMTEPVWVPARSRSPGHTLRLDAAATAASLSPRGCRLRTPSSDMSPSGRLCLLTIVGLILPTRGQTLKDTTSSSSADSTIMDIQVPTRAPDAVYTELQPTSPTPTWPADAHPTDDTTTLSERPSPSTDVQTDPQTLKPSGFHEDDPFFYDEHTLRKRGLLVAAVLFITGIIILTSGKCRQLSRLCRNHCR

SEQ ID NO: 832542 - protein, 225 aa, Homo sapiens; identical to SEQ ID NO: 832535

SEQ ID NO: 832543 - protein, 225 aa, Homo sapiens; identical to SEQ ID NO: 832535

SEQ ID NO: 832544 - protein, 159 aa, Homo sapiens
ETQEEMTEPVWVPARSRSPGHTLRLDAAATAASLSPRGCRLRTPSSDMSPSGRLCLLTIVGLILPTRGQTLKDTTSSSSADSTIMDIQVPTRAPDAVYTELQPTSPTPTWPADETPQPQTQTQQLEGTDGPLVTDPETHKSTKAAHPTDDTTTLSERPS

SEQ ID NO: 832545 - protein, 149 aa, Homo sapiens
ETQEEMTEPVWVPARSRSPGHTLRLDAAATAASLSPRGCRLRTPSSDMSPSGRLCLLTIVGLILPTRGQTLKDTTSSSSADSTIMDIQVPTRAPDAVYTELQPTSPTPTWPADETPQPQTQTQQLEGTDGPLVTDPETHKSTKAGIAWD

SEQ ID NO: 832546 - protein, 225 aa, Homo sapiens; identical to SEQ ID NO: 832535

SEQ ID NO: 832547 - protein, 115 aa, Homo sapiens [sequence omitted]

SEQ ID NO: 832548 - protein, 178 aa, Homo sapiens [sequence omitted]

SEQ ID NO: 832549 - protein, 269 aa, Homo sapiens
ETQEEMTEPVWVPARSRSPGHTLRLDAAATAASLSPRGCRLRTPSSDMSPSGRLCLLTIVGLILPTRGWNRLWGRRQEQGAQEGGCWDVQAGGYRGRTRMGAVELSSTDHNGQTLKDTTSSSSADSTIMDIQVPTRAPDAVYTELQPTSPTPTWPADETPQPQTQTQQLEGTDGPLVTDPETHKSTKAAHPTDDTTTLSERPSPSTDVQTDPQTLKPSGFHEDDPFFYDEHTLRKRGLLVAAVLFITGIIILTSGKCRQLSRLCRNHCR

SEQ ID NO: 832550 - protein, 170 aa, Homo sapiens
ETQEEMTEPVWVPARSRSPGHTLRLDAAATAASLSPRGCRLRTPSSDMSPSGRLCLLTIVGLILPTRGQTLKDTTSSSSADSTIMDIQVPTRAPGEERDTSIKILSLQITTATKIPNLDQTREFMDLCNEKVQMQSTQNSSPPLQPQPGLLMKHHNPRPRPSNWKERMGL

SEQ ID NO: 832551 - protein, 225 aa, Homo sapiens; identical to SEQ ID NO: 832535

SEQ ID NO: 832552 - protein, 225 aa, Homo sapiens; identical to SEQ ID NO: 832535

SEQ ID NO: 832553 - protein, 185 aa, Homo sapiens
ETQEEMTEPVWVPARSRSPGHTLRLDAAATAASLSPRGCRLRTPSSDMSPSGRLCLLTIVGLILPTRGQTLKDTTSSSSADSTIMDIQVPTRAPDAVYTELQPTSPTPTWPADETPQPQTQTQQLEGTDGPLVTDPETHKSTKADEHTLRKRGLLVAAVLFITGIIILTSGKCRQLSRLCRNHCR

SEQ ID NO: 832554 - protein, 104 aa, Homo sapiens
MSPSGRLCLLTIVGLILPTRGQTLKDTTSSSSADSTIMDIQVPTRAPDAVYTELQPTSPTPTWPADAGQYYKSEQMQPFSAFTDDMSPSPASRGRGGRLKVTLR

SEQ ID NO: 832555 - protein, 333 aa, Homo sapiens
KDKRESISLDSWLNLFNNNNILKKKKKGGRRAMLALRVARGSWGALRGAAWAPGTRPSKRRACWALLPPVPCCLGCLAERWRLRPAALGLRLPGIGQRNHCSGAGKAAPRPAAGAGAAAEAPGGQWGPASTPSLYENPWTIPNMLSMTRIGLAPVLGYLIIEEDFNIALGVFALAGLTDLLDGFIARNWANQRSALGSALDPLADKILISILYVSLTYADLIPVPLTYMIISRDVMLIAAVFYVRYRTLPTPRTLAKYFNPCYATARLKPTFISKVNTAVQLILVAASLAAPVFNYADSIYLQILWCFTAFTTAASAYSYYHYGRKTVQVIKD

SEQ ID NO: 832556 - protein, 301 aa, Homo sapiens
MLALRVARGSWGALRGAAWAPGTRPSKRRACWALLPPVPCCLGCLAERWRLRPAALGLRLPGIGQRNHCSGAGKAAPRPAAGAGAAAEAPGGQWGPASTPSLYENPWTIPNMLSMTRIGLAPVLGYLIIEEDFNIALGVFALAGLTDLLDGFIARNWANQRSALGSALDPLADKILISILYVSLTYADLIPVPLTYMIISRDVMLIAAVFYVRYRTLPTPRTLAKYFNPCYATARLKPTFISKVNTAVQLILVAASLAAPVFNYADSIYLQILWCFTAFTTAASAYSYYHYGRKTVQVIKD

SEQ ID NO: 832557 - protein, 193 aa, Homo sapiens
MLALRVARGSWGALRGAAWAPGTRPSKRRACWALLPPVPCCLGCLAERWRLRPAALGLRLPGIGQRNHCSGAGKAAPRPAAGAGAAAEAPGGQWGPASTPSLYENPWTIPNMLSMTRIGLAPVLGYLIIEEDFNIALGVFALAGLTDLLDGFIARNWANQRSALGSALDPLADKILISILYVSLTYADLIPGA

SEQ ID NO: 832558 - protein, 301 aa, Homo sapiens; identical to SEQ ID NO: 832556

SEQ ID NO: 832559 - protein, 301 aa, Homo sapiens; identical to SEQ ID NO: 832556

SEQ ID NO: 832560 - protein, 190 aa, Homo sapiens
MLSMTRIGLAPVLGYLIIEEDFNIALGVFALAGLTDLLDGFIARNWANQRSALGSALDPLADKILISILYVSLTYADLIPVPLTYMIISRDVMLIAAVFYVRYRTLPTPRTLAKYFNPCYATARLKPTFISKVNTAVQLILVAASLAAPVFNYADSIYLQILWCFTAFTTAASAYSYYHYGRKTVQVIKD

SEQ ID NO: 832561 - protein, 352 aa, Homo sapiens
MLALRVARGSWGALRGAAWAPGTRPSKRRACWALLPPVPCCLGCLAERWRLRPAALGLRLPGIGQRNHCSGAGKAAPRPAAGAGAAAEAPGGQWGPASTPSLKLLAGHSVGMNFRVTSGVHLTVSVVKLEILSSPFYLHPLLEGPPLHIALIKYENPWTIPNMLSMTRIGLAPVLGYLIIEEDFNIALGVFALAGLTDLLDGFIARNWANQRSALGSALDPLADKILISILYVSLTYADLIPVPLTYMIISRDVMLIAAVFYVRYRTLPTPRTLAKYFNPCYATARLKPTFISKVNTAVQLILVAASLAAPVFNYADSIYLQILWCFTAFTTAASAYSYYHYGRKTVQVIKD

SEQ ID NO: 832562 - protein, 190 aa, Homo sapiens; identical to SEQ ID NO: 832560

SEQ ID NO: 832563 - protein, 190 aa, Homo sapiens; identical to SEQ ID NO: 832560

SEQ ID NO: 832564 - protein, 190 aa, Homo sapiens; identical to SEQ ID NO: 832560

SEQ ID NO: 832565 - protein, 105 aa, Homo sapiens [sequence omitted]

SEQ ID NO: 832566 - protein, 193 aa, Homo sapiens; identical to SEQ ID NO: 832557

SEQ ID NO: 832567 - protein, 301 aa, Homo sapiens; identical to SEQ ID NO: 832556

SEQ ID NO: 832568 - protein, 301 aa, Homo sapiens; identical to SEQ ID NO: 832556

SEQ ID NO: 832569 - protein, 333 aa, Homo sapiens; identical to SEQ ID NO: 832555

SEQ ID NO: 832570 - protein, 301 aa, Homo sapiens; identical to SEQ ID NO: 832556

SEQ ID NO: 832571 - protein, 301 aa, Homo sapiens; identical to SEQ ID NO: 832556

SEQ ID NO: 832572 - protein, 301 aa, Homo sapiens; identical to SEQ ID NO: 832556

SEQ ID NO: 832573 - protein, 301 aa, Homo sapiens; identical to SEQ ID NO: 832556

SEQ ID NO: 832574 - protein, 301 aa, Homo sapiens; identical to SEQ ID NO: 832556

SEQ ID NO: 832575 - protein, 190 aa, Homo sapiens; identical to SEQ ID NO: 832560

SEQ ID NO: 832576 - protein, 282 aa, Homo sapiens
MLALRVARGSWGALRGAAWAPGTRPSKRRACWALLPPVPCCLGCLAERWRLRPAALGLRLPGIGQRNHCSGAGKAAPRPAAGAGAAAEAPGGQWGPASTPSLPVLGYLIIEEDFNIALGVFALAGLTDLLDGFIARNWANQRSALGSALDPLADKILISILYVSLTYADLIPVPLTYMIISRDVMLIAAVFYVRYRTLPTPRTLAKYFNPCYATARLKPTFISKVNTAVQLILVAASLAAPVFNYADSIYLQILWCFTAFTTAASAYSYYHYGRKTVQVIKD

SEQ ID NO: 832577 - protein, 153 aa, Homo sapiens
MLALRVARGSWGALRGAAWAPGTRPSKRRACWALLPPVPCCLGCLAERWRLRPAALGLRLPGIGQRNHCSGAGKAAPRPAAGAGAAAEAPGGQWGPASTPSLYENPWTIPNMLSMTRIGLAPVLGYLIIEEDFNIALGVFALAGLTDLFHLLT

SEQ ID NO: 832578 - protein, 244 aa, Homo sapiens
VPAASQNPLSLMRAPPLCQGRREARRRRCRKSVAKASALGGFLPPYENPWTIPNMLSMTRIGLAPVLGYLIIEEDFNIALGVFALAGLTDLLDGFIARNWANQRSALGSALDPLADKILISILYVSLTYADLIPVPLTYMIISRDVMLIAAVFYVRYRTLPTPRTLAKYFNPCYATARLKPTFISKVNTAVQLILVAASLAAPVFNYADSIYLQILWCFTAFTTAASAYSYYHYGRKTVQVIKD

SEQ ID NO: 832579 - protein, 143 aa, Homo sapiens
PGCRIQHELDGFIARNWANQRSALGSALDPLADKILISILYVSLTYADLIPVPLTYMIISRDVMLIAAVFYVRYRTLPTPRTLAKYFNPCYATARLASLAAPVFNYADSIYLQILWCFTAFTTAASAYSYYHYGRKTVQVIKD

SEQ ID NO: 832580 - protein, 110 aa, Homo sapiens
MAAPMPVAATGAADDDEAETSCPSCAQTLHELAMSSSTLAINDMIGDGRALVDRVMAVAILTGYSICVMQADLFRGWNALETLLQAMMGPVAGTGPSLIFSDILHYVFRV

SEQ ID NO: 832581 - protein, 298 aa, Homo sapiens
SGSARKTHALAACAALSAAPARGGPVGLSAGFEISPGACAAAAMAAEEEEVDSADTGERSGWLTGWLPTWCPTSISHLKEAEEKMLKCVPCTYKKEPVRISNGNKIWTLKFSHNISNKTPLVLLHGFGGGLGLWALNFGDLCTNRPVYAFDLLGFGRSSRPRFDSDAEEVENQFVESIEEWRCALGLDKMILLGHNLGGFLAAAYSLKYPSRVNHLILVEPWGFPERPDLADQDRPIPVWIRALGAALTPFNPLAGLRIAGPFVSSAVTGDPAGSRVRNVTNIPYVTWACIWVGASMV

SEQ ID NO: 832582 - protein, 392 aa, Homo sapiens
SGSARKTHALAACAALSAAPARGGPVGLSAGFEISPGACAAAAMAAEEEEVDSADTGERSGWLTGWLPTWCPTSISHLKEAEEKMLKCVPCTYKKEPVRISNGNKIWTLKFSHNISNKTPLVLLHGFGGGLGLWALNFGDLCTNRPVYAFDLLGFGRSSRPRFDSDAEEVENQFVESIEEWRCALGLDKMILLGHNLGGFLAAAYSLKYPSRVNHLILVEPWGFPERPDLADQDRPIPVWIRALGAALTPFNPLAGLRIAGPFGLSLVQRLRPDFKRKYSSMFEDDTVTEYIYHCNVQTPSGETAFKNMTIPYGWAKRPMLQRIGKMHPDIPVSVIFGARSCIDGNSGTSIQSLRPHSYVKTIAILGAGHYVYADQPEEFNQKVKEICDTVD

SEQ ID NO: 832583 - protein, 317 aa, Homo sapiens
SGSARKTHALAACAALSAAPARGGPVGLSAGFEISPGACAAAAMAAEEEEVDSADTGERSGWLTGWLPTWCPTSISHLKEAEEKMLKCVPCTYKKEPVRISNGNKIWTLKFSHNISNKTPLVLLHGFGGGLGLWALNFGDLCTNRPVYAFDLLGFGRSSRPRFDSDAEEVENQFVESIEEWRCALGLDKMILLGHNLGGFLAAAYSLKYPSRVNHLILVEPWGFPERPDLADQDRPIPVWIRALGAALTPFNPLAGLRIAGPFGLSLVQRLRPDFKRKYSSMFEDDTVTEYIYHCNVQTPSGETAFKNMTIPYGWAQ

SEQ ID NO: 832584 - protein, 365 aa, Homo sapiens
SGSARKTHALAACAALSAAPARGGPVGLSAGFEISPGACAAAAMAAEEEEVDSADTGERSGWLTGWLPTWCPTSISHLKEAEEKMLKCVPCTYKKEPVRISNGNKIWTLKFSHNISNKTPLVLLHGFGGGLGLWALNFGDLCTNRPVYAFDLLGFGRSSRPRFDSDAEEVENQFVESIEEWRCALGLDKMILLGHNLGGFLAAAYSLKYPSRVNHLILVEPWGFPERPDLADQDRPIPVWIRALGAALTPFNPLAGLRIAGPFGLSLVQRLRPDFKRKYSSMFEDDTVTEYIYHCNVQTPSSDLWRPILHRWQFWHQHPVLTTTFICEDNSYSWGRTLCICRSTRRIQPESKGDLRHCGLNTLKL

SEQ ID NO: 832585 - protein, 308 aa, Homo sapiens
MLKCVPCTYKKEPVRISNGNKIWTLKFSHNISNKTPLVLLHGFGGGLGLWALNFGDLCTNRPVYAFDLLGFGRSSRPRFDSDAEEVENQFVESIEEWRCALGLDKMILLGHNLGGFLAAAYSLKYPSRVNHLILVEPWGFPERPDLADQDRPIPVWIRALGAALTPFNPLAGLRIAGPFGLSLVQRLRPDFKRKYSSMFEDDTVTEYIYHCNVQTPSGETAFKNMTIPYGWAKRPMLQRIGKMHPDIPVSVIFGARSCIDGNSGTSIQSLRPHSYVKTIAILGAGHYVYADQPEEFNQKVKEICDTVD

SEQ ID NO: 832586 - protein, 392 aa, Homo sapiens; identical to SEQ ID NO: 832582

SEQ ID NO: 832587 - protein, 212 aa, Homo sapiens
SGSARKTHALAACAALSAAPARGGPVGLSAGFEISPGACAAAAMAAEEEEVDSADTGERSGWLTGWLPTWCPTSISHLKEAEEKMLKCVPCTYKKEPVRISNGNKIWTLKFSHNISNKTPLVLLHGFGGGLGLWALNFGDLCTNRPVYAFDLLGFGRSSRPRFDSDAEEVENQFVESIEEWRCALGLDKMILLGHNLGGFLAAAYSLKYPSR

SEQ ID NO: 832588 - protein, 365 aa, Homo sapiens; identical to SEQ ID NO: 832584

SEQ ID NO: 832589 - protein, 589 aa, Homo sapiens
MAAADGDDSLYPIAVLIDELRNEDVQLRLNSIKKLSTIALALGVERTRSELLPFLTDTIYDEDEVLLALAEQLGTFTTLVGGPEYVHCLLPPLESLATVEETVVRDKAVESLRAISHEHSPSDLEAHFVPLVKRLAGGDWFTSRTSACGLFSVCYPRVSSAVKAELRQYFRNLCSDDTPMVRRAAASKLGEFAKVLELDNVKSEIIPMFSNLASDEQDSVRLLAVEACVNIAQLLPQEDLEALVMPTLRQAAEDKSWRVRYMVADKFTELQKAVGPEITKTDLVPAFQNLMKDCEAEVRAAASHKVKEFCENLSADCRENVIMSQILPCIKELVSDANQHVKSALASVIMGLSPILGKDNTIEHLLPLFLAQLKDECPEVRLNIISNLDCVNEVIGIRQLSQSLLPAIVELAEDAKWRVRLAIIEYMPLLAGQLGVEFFDEKLNSLCMAWLVDHVYAIREAATSNLKKLVEKFGKEWAHATIIPKVLAMSGDPNYLHRMTTLFCINVLSEVCGQDITTKHMLPTVLRMAGDPVANVRFNVAKSLQKIGPILDNSTLQSEVKPILEKLTQDQDVDVKYFAQEALTVLSLA

SEQ ID NO: 832590 - protein, 307 aa, Homo sapiens
MAAADGDDSLYPIAVLIDELRNEDVQLRLNSIKKLSTIALALGVERTRSELLPFLTDTIYDEDEVLLALAEQLGTFTTLVGGPEYVHCLLPPLESLATVEETVVRDKAVESLRAISHEHSPSDLEAHFVPLVKRLAGGDWFTSRTSACGLFSVCYPRVSSAVKAELRQYFRNLCSDDTPMVRRAAASKLGEFAKVLELDNVKSEIIPMFSNLASDEQDSVRLLAVEACVNIAQLLPQEDLEALVMPTLRQAAEEEWVQSESEGGLVQKTVCSTVDWGGGGSRSVGSGGMFALRGGPTFVALVLESRG

SEQ ID NO: 832591 - protein, 177 aa, Homo sapiens
LTAAVLSVDVYTILAAASNVLKIRVAKYGPAFYHATIIPKVLAMSGDPNYLHRMTTLFCINVLSEVCGQDITTKHMLPTVLRMAGDPVANVRFNVASVRTDATSTTDRHCARYQRSIGRRYGWRMAQNRRSHSSPAQQIRHPADALCMQALDVYPLRRIGHAGGFRIFAAGSCGPVY

SEQ ID NO: 832592 - protein, 589 aa, Homo sapiens; identical to SEQ ID NO: 832589

SEQ ID NO: 832593 - protein, 589 aa, Homo sapiens; identical to SEQ ID NO: 832589

SEQ ID NO: 832594 - protein, 589 aa, Homo sapiens; identical to SEQ ID NO: 832589

SEQ ID NO: 832595 - protein, 589 aa, Homo sapiens; identical to SEQ ID NO: 832589

SEQ ID NO: 832596 - protein, 589 aa, Homo sapiens; identical to SEQ ID NO: 832589

SEQ ID NO: 832597 - protein, 587 aa, Homo sapiens
MAAADGDDSLYPIAVLIDELRNEDVQLRLNSIKKLSTIALALGVERTRSELLPFLTDTIYDEDEVLLALAEQLGTFTTLVGGPEYVHCLLPPLESLATVEETVVRDKAVESLRAISHEHSPSDLEAHFVPLVKRLAGGDWFTSRTSACGLFSVCYPRVSSAVKAELRQYFRNLCSDDTPMVRRAAASKLGEFAKVLELDNVKSEIIPMFSNLASDEQDSVRLLAVEACVNIAQLLPQEDLEALVMPTLRQAAEDKSWRVRYMVADKFTELQKAVGPEITKTDLVPAFQNLMKDCEAEVRAAASHKVKEFCENLSADCRENVIMSQILPCIKELVSDANQHVKSALASVIMGLSPILGKDNTIEHLLPLFLAQLKDECPEVRLNIISNLDCVNEVIGIRQLSQSLLPAIVELAEDAKWRVRLAIIEYMPLLAGQLGVEFFDEKLNSLCMAWLVDHVYAIREAATSNLKKLVEKFGKEWAHATIIPKVLAMSGDPNYLHRMTTLFCINVLSEVCGQDITTKHMLPTVLRMAGDPVANVRFNVAKSLQKIGPILDNSTLQSEVKPILEKLTQDQDVDVKYFAQEALTGKT

SEQ ID NO: 832598 - protein, 109 aa, Homo sapiens
MRTFSFASTASRSCPPSPWPLGLKGPEVSFCLSLQIPSMMKMRSSWPWQNSWEPSLPWWEAQSTCTACCHRWSRWPQWRRQWCGTRQWSPYGPSHTSTRPLTWRRTLCR

SEQ ID NO: 832599 - protein, 399 aa, Homo sapiens
MAAADGDDSLYPIAVLIDELRNEDVQLRLNSIKKLSTIALALGVERTRSELLPFLTDTIYDEDEVLLALAEQLGTFTTLVGGPEYVHCLLPPLESLATVEETVVRDKAVESLRAISHEHSPSDLEAHFVPLVKRLAGGDWFTSRTSACGLFSVCYPRVSSAVKAELRQYFRNLCSDDTPMVRRAAASKLGEFAKVLELDNVKSEIIPMFSNLASDEQDSVRLLAVEACVNIAQLLPQEDLEALVMPTLRQAAEDKSWRVRYMVADKFTELQKAVGPEITKTDLVPAFQNLMKDCEAEVRAAASHKVKEFCENLSADCRENVIMSQILPCIKELVSDANQHVKSALASVIMGLSPILGKDNTIEHLLPLFLAQLKDECPEVRLNIISNLDSPCRVKSSPS

SEQ ID NO: 832600 - protein, 521 aa, Homo sapiens
MAAADGDDSLYPIAVLIDELRNEDVQLRLNSIKKLSTIALALGVERTRSELLPFLTDTIYDEDEVLLALAEQLGTFTTLVGGPEYVHCLLPPLESLATVEETVVRDKAVESLRAISHEHSPSDLEAHFVPLVKRLAGGDWFTSRTSACGLFSVCYPRVSSAVKAELRQYFRNLCSDDTPMVRRAAASKLGEFAKVLELDNVKSEIIPMFSNLASDEQDSVRLLAVEACVNIAQLLPQEDLEALVMPTLRQAAEDKSWRVRYMVADKFTELQKAVGPEITKTDLVPAFQNLMKDCEAEVRAAASHKVKEFCENLSADCRENVIMSQILPCIKELVSDANQHVKSALASVIMGLSPILGKDNTIEHLLPLFLAQLKDECPEVRLNIISNLDCVNEVIGIRQLSQSLLPAIVELAEDAKWRVRLAIIEYMPLLAGQLGVEFFDEKLNSLCMAWLVDHVFAIGRGTEPEDFGNWRVGLPNSQGWLSGTYCRGYLGKVWAGGNPQVRWVGRPLFSNTRPRGQHSGT

SEQ ID NO: 832601 - protein, 629 aa, Homo sapiens
MAAADGDDSLYPIAVLIDELRNEDVQLRLNSIKKLSTIALALGVERTRSELLPFLTDTIYDEDEVLLALAEQLGTFTTLVGGPEYVHCLLPPLESLATVEETVVRDKAVESLRAISHEHSPSDLEAHFVPLVKRLAGGDWFTSRTSACGLFSVCYPRVSSAVKAELRQYFRNLCSDDTPMVRRAAASKLGEFAKVLELDNVKSEIIPMFSNLASDEQVSFASWPSALPSFWWFLPMKENPRAQQGLCCPPTVPLLSLDSVRLLAVEACVNIAQLLPQEDLEALVMPTLRQAAEDKSWRVRYMVADKFTELQKAVGPEITKTDLVPAFQNLMKDCEAEVRAAASHKVKEFCENLSADCRENVIMSQILPCIKELVSDANQHVKSALASVIMGLSPILGKDNTIEHLLPLFLAQLKDECPEVRLNIISNLDCVNEVIGIRQLSQSLLPAIVELAEDAKWRVRLAIIEYMPLLAGQLGVEFFDEKLNSLCMAWLVDHVYAIREAATSNLKKLVEKFGKEWAHATIIPKVLAMSGDPNYLHRMTTLFCINVLSEVCGQDITTKHMLPTVLRMAGDPVANVRFNVAKSLQKIGPILDNSTLQSEVKPILEKLTQDQDVDVKYFAQEALTVLSLA

SEQ ID NO: 832602 - protein, 592 aa, Homo sapiens
MKKGGESFTVCPAIRAAGFGSHTPSVLALLRLNSIKKLSTIALALGVERTRSELLPFLTDTIYDEDEVLLALAEQLGTFTTLVGGPEYVHCLLPPLESLATVEETVVRDKAVESLRAISHEHSPSDLEAHFVPLVKRLAGGDWFTSRTSACGLFSVCYPRVSSAVKAELRQYFRNLCSDDTPMVRRAAASKLGEFAKVLELDNVKSEIIPMFSNLASDEQDSVRLLAVEACVNIAQLLPQEDLEALVMPTLRQAAEDKSWRVRYMVADKFTELQKAVGPEITKTDLVPAFQNLMKDCEAEVRAAASHKVKEFCENLSADCRENVIMSQILPCIKELVSDANQHVKSALASVIMGLSPILGKDNTIEHLLPLFLAQLKDECPEVRLNIISNLDCVNEVIGIRQLSQSLLPAIVELAEDAKWRVRLAIIEYMPLLAGQLGVEFFDEKLNSLCMAWLVDHVYAIREAATSNLKKLVEKFGKEWAHATIIPKVLAMSGDPNYLHRMTTLFCINVLSEVCGQDITTKHMLPTVLRMAGDPVANVRFNVAKSLQKIGPILDNSTLQSEVKPILEKLTQDQDVDVKYFAQEALTVLSLA

SEQ ID NO: 832603 - protein, 478 aa, Homo sapiens
MAAADGDDSLYPIAVLIDELRNEDVQLRLNSIKKLSTIALALGVERTPSAVKAELRQYFRNLCSDDTPMVRRAAASKLGEFAKVLELDNVKSEIIPMFSNLASDEQDSVRLLAVEACVNIAQLLPQEDLEALVMPTLRQAAEDKSWRVRYMVADKFTELQKAVGPEITKTDLVPAFQNLMKDCEAEVRAAASHKVKEFCENLSADCRENVIMSQILPCIKELVSDANQHVKSALASVIMGLSPILGKDNTIEHLLPLFLAQLKDECPEVRLNIISNLDCVNEVIGIRQLSQSLLPAIVELAEDAKWRVRLAIIEYMPLLAGQLGVEFFDEKLNSLCMAWLVDHVYAIREAATSNLKKLVEKFGKEWAHATIIPKVLAMSGDPNYLHRMTTLFCINVLSEVCGQDITTKHMLPTVLRMAGDPVANVRFNVAKSLQKIGPILDNSTLQSEVKPILEKLTQDQDVDVKYFAQEALTVLSLA

SEQ ID NO: 832604 - protein, 361 aa, Homo sapiens
ASTDQVCLGDLRPHCFLELCELVSHHVADAPGLVFSGLAQSGHHQGLQILLGQKLVPAFQNLMKDCEAEVRAAASHKVKEFCENLSADCRENVIMSQILPCIKELVSDANQHVKSALASVIMGLSPILGKDNTIEHLLPLFLAQLKDECPEVRLNIISNLDCVNEVIGIRQLSQSLLPAIVELAEDAKWRVRLAIIEYMPLLAGQLGVEFFDEKLNSLCMAWLVDHVYAIREAATSNLKKLVEKFGKEWAHATIIPKVLAMSGDPNYLHRMTTLFCINVLSEVCGQDITTKHMLPTVLRMAGDPVANVRFNVAKSLQKIGPILDNSTLQSEVKPILEKLTQDQDVDVKYFAQEALTVLSLA

SEQ ID NO: 832605 - protein, 281 aa, Homo sapiens
MAAADGDDSLYPIAVLIDELRNEDVQLRLNSIKKLSTIALALGVERTRSELLPFLTDTIYDEDEVLLALAEQLGTFTTLVGGPEYVHCLLPPLESLATVEETVVRDKAVESLRAISHEHSPSDLEAHFVPLVKRLAGGDWFTSRTSACGLFSVCYPRVSSAVKAELRQYFRNLCSDDTPMVRRAAASKLGEFAKVLELDNVKSEIIPMFSNLASDEQDSVRLLAVEACVNIAQLLPQEDLEALVMPTLRQAAEERNRMRAVRGSQPNTRRRETTPGGQRNG

SEQ ID NO: 832606 - protein, 307 aa, Homo sapiens
MAAADGDDSLYPIAVLIDELRNEDVQLRLNSIKKLSTIALALGVERTRSELLPFLTDTIYDEDEVLLALAEQLGTFTTLVGGPEYVHCLLPPLESLATVEETVVRDKAVESLRAISHEHSPSDLEAHFVPLVKRLAGGDWFTSRTSACGLFSVCYPRVSSAVKAELRQYFRNLCSDDTPMVRRAAASKLGEFAKVLELDNVKSEIIPMFSNLASDEQDSVRLLAVEACVNIAQLLPQEDLEALVMPTLRQAAEEYMGAVRVRRWAGPEDCLLDCRLGRGGLQVSGLRGDVCPPRGAHVVALVLESRG

SEQ ID NO: 832607 - protein, 249 aa, Homo sapiens
NKSGIGKTTKPRIPPAGQDNTIEHLLPLFLAQLKDECPEVRLNIISNLDCVNEVIGIRQLSQSLLPAIVELAEDAKWRVRLAIIEYMPLLAGQLGVEFFDEKLNSLCMAWLVDHVYAIREAATSNLKKLVEKFGKEWAHATIIPKVLAMSGDPNYLHRMTTLFCINVLSEVCGQDITTKHMLPTVLRMAGDPVANVRFNVAKSLQKIGPILDNSTLQSEVKPILEKLTQDQDVDVKYFAQEALTVLSLA

SEQ ID NO: 832608 - protein, 351 aa, Homo sapiens
MAAADGDDSLYPIAVLIDELRNEDVQLRLNSIKKLSTIALALGVERTRSELLPFLTDTIYDEDEVLLALAEQLGTFTTLVGGPEYVHCLLPPLESLATVEETVVRDKAVESLRAISHEHSPSDLEAHFVPLVKRLAGGDWFTSRTSACGLFSVCYPRVSSAVKAELRQYFRNLCSDDTPMVRRAAASKLGEFAKVLELDNVKSEIIPMFSNLASDEQDSVRCWRGSVVNIAKLGPRGPGGPGNGTLAKQMRKVWERPNTGVCTRPRDPERHEGREITKEKPEPGHSNGNRTVAHHVYATPTREKERWTHTRMNKITHKKPTSKETRHTKLGRIQQMHMHRDDNSNNSREIE

SEQ ID NO: 832609 - protein, 132 aa, Homo sapiens
MAAADGDDSLYPIAVLIDELRNEDVQRRGFTMLARLGRELLTSSDPPASASQSVGITGVTTAPSPDEHSWLWDEVTQGSEPAGVGLRTVRTASPPPTCCVTLCKLLHRFGSLCSIKYGLIVVLVLLEGLVRD

SEQ ID NO: 832610 - protein, 216 aa, Homo sapiens
QLNEDIIVIILLAHFPDECPEVRLNIISNLDCVNEVIGIRQLSQSLLPAIVELAEDAKWRVRLAIIEYMPLLAGQLGVEFFDEKLNSLCMAWLVDHVYAIREAATSNLKKLVEKFGKEWAHATIIPKVLAMSGDPNYLHRMTTLFCINVLSEVCGQDITTKHMLPTVLRMAGDPVANVRFNVAKSLQKIGPILDNSTLQSESAHPSSVRIRYEYLS

SEQ ID NO: 832611 - protein, 589 aa, Homo sapiens; identical to SEQ ID NO: 832589

SEQ ID NO: 832612 - protein, 310 aa, Homo sapiens
MAAADGDDSLYPIAVLIDELRNEDVQLRLNSIKKLSTIALALGVERTRSELLPFLTDTIYDEDEVLLALAEQLGTFTTLVGGPEYVHCLLPPLESLATVEETVVRDKAVESLRAISHEHSPSDLEAHFVPLVKRLAGGDWFTSRTSACGLFSVCYPRVSSAVKAELRQYFRNLCSDDTPMVRRAAASKLGEFAKVLELDNVKSEIIPMFSNLASDEQDSVRLLAVEACVNIAQLLPQEDLEALVMPTLRQAAEDKSWRVRYMVADKFTELQKAVGPEITKTDLVPAFQNLMKDCEAESSVKTSQLTVGRM

SEQ ID NO: 832613 - protein, 589 aa, Homo sapiens; identical to SEQ ID NO: 832589

SEQ ID NO: 832614 - protein, 589 aa, Homo sapiens; identical to SEQ ID NO: 832589

SEQ ID NO: 832615 - protein, 571 aa, Homo sapiens
MAAADGDDSLYPIAVLIDELRNEDVQLRLNSIKKLSTIALALGVERTRSELLPFLTDTIYDEDEVLLALAEQLGTFTTLVGGPEYVHCLLPPLESLATVEETVVRDKAVESLRAISHEHSPSDLEAHFVPLVKRLAGGDWFTSRTSACGLFSVCYPRVSSAVKAELRQYFRNLCSDDTPMVRRAAASKLGEFAKVLELDNVKSEIIPMFSNLASDEQDSVRLLAVEACVNIAQLLPQEDLEALVMPTLRQAAEDKSWRVRYMVADKFTELQKAVGPEITKTDLVPAFQNLMKDCEAEVRAAASHKVKEFCENLSADCRENVIMSQILPCIKELVSDANQHVKSALASVIMGLSPILGKDNTIEHLLPLFLAQLKDECPEVRLNIISNLDCVNEVIGIRQLSQSLLPAIVELAEDAKWRVRLAIIEYMPLLAGQLGVEFFDEKLNSLCMAWLVDHVYAIREAATSNLKKLVVSGDPNYLHRMTTLFCINVLSEVCGQDITTKHMLPTVLRMAGDPVANVRFNVAKSLQKIGPILDNSTLQSEVKPILEKLTQDQDVDVKYFAQEALTVLSLA

SEQ ID NO: 832616 - protein, 569 aa, Homo sapiens
MAAADGDDSLYPIAVLIDELRNEDVQLRLNSIKKLSTIALALGVERTRSELLPFLTDTIYDEDEVLLALAEQLGTFTTLVGGPEYVHCLLPPLESLATVEETVVRDKAVESLRAISHEHSPSDLEAHFVPLVKRLAGGDWFTSRTSACGLFSVCYPRVSSAVKAELRQYFRNLCSDDTPMVRRAAASKLGEFAKVLELDNVKSEIIPMFSNLASDEQDSVRLLAVEACVNIAQLLPQEDLEALVMPTLRQAAEDKSWRVRYMVADKFTELQKAVGPEITKTDLVPAFQNLMKDCEAEVRAAASHKVKEFCENLSADCRENVIMSQILPCIKELVSDANQHVKSALASVIMGLSPILGKDNTIEHLLPLFLAQLKDECPEVRLNIISNLDCVNEVIGIRQLSQSLLPAIVELAEDAKWRVRLAIIEYMPLLAGQLGVEFFDEKLNSLCMAWLVDHVYAIREAATSNLKKLVEKFGKEWAHATIIPKVLAMSGDPNYLHRMTTLFCINVLSEVCGQDITTKHMLPTVLRMAGDPVANVRFNVAKSLQKIGPILDNSTLQSESAHPSSVRIR

SEQ ID NO: 832617 - protein, 559 aa, Homo sapiens
  misc_feature (520)..(520): Xaa can be any naturally occurring amino acid
  misc_feature (541)..(541): Xaa can be any naturally occurring amino acid
  misc_feature (547)..(547): Xaa can be any naturally occurring amino acid
  misc_feature (550)..(550): Xaa can be any naturally occurring amino acid
  misc_feature (557)..(557): Xaa can be any naturally occurring amino acid
MAAADGDDSLYPIAVLIDELRNEDVQLRLNSIKKLSTIALALGVERTRSELLPFLTDTIYDEDEVLLALAEQLGTFTTLVGGPEYVHCLLPPLESLATVEETVVRDKAVESLRAISHEHSPSDLEAHFVPLVKRLAGGDWFTSRTSACGLFSVCYPRVSSAVKAELRQYFRNLCSDDTPMVRRAAASKLGEFAKVLELDNVKSEIIPMFSNLASDEQDSVRLLAVEACVNIAQLLPQEDLEALVMPTLRQAAEDKSWRVRYMVADKFTELQKAVGPEITKTDLVPAFQNLMKDCEAEVRAAASHKVKEFCENLSADCRENVIMSQILPCIKELVSDANQHVKSALASVIMGLSPILGKDNTIEHLLPLFLAQLKDECPEVRLNIISNLDCVNEVIGIRQLSQSLLPAIVELAEDAKWRVRLAIIEYMPLLAGQLGVEFFDEKLNSLCMAWLVDHVYAIREAATSNLKKLVEKFGKEWAHATIIPKVLAMSGDPNYLHRMTTLFCINVLSEVCWGRTSPPXPHCLPHRFLPHWLGGTPVCPXFPFQLXGQXSPAKKKXGG

SEQ ID NO: 832618 - protein, 496 aa, Homo sapiens
MAAADGDDSLYPIAVLIDELRNEDVQLRLNSIKKLSTIALALGVERTRSELLPFLTDTIYDEDEVLLALAEQLGTFTTLVGGPEYVHCLLPPLESLATVEETVVRDKAVESLRAISHEHSPSDLEAHFVPLVKRLAGGDWFTSRTSACGLFSVCYPRVSSAVKAELRQYFRNLCSDDTPMVRRAAASKLGEFAKVLELDNVKSEIIPMFSNLASDEQDSVRLLAVEACVNIAQLLPQEDLEALVMPTLRQAAEDKSWRVRYMVADKFTELQKAVGPEITKTDLVPAFQNLMKDCEAEVRAAASHKVKEFCENLSADCRENVIMSQILPCIKELVSDANQHVKSALASVIMGLSPILGKDNTIEHLLPLFLAQLKDECPEVRLNIISNLDCVNEVIGIRQLSQSLLPAIVELAEDAKWRVRLAIIEYMPLLAGQLGVEFFDEKLNSLCMAWLVDHVCAIREAAIKKTASRMGGRGKMRGKVQPSLAMLPMHGERLTS

SEQ ID NO: 832619 - protein, 573 aa, Homo sapiens
NRVVLESATELRLNSIKKLSTIALALGVERTRSELLPFLTDTIYDEDEVLLALAEQLGTFTTLVGGPEYVHCLLPPLESLATVEETVVRDKAVESLRAISHEHSPSDLEAHFVPLVKRLAGGDWFTSRTSACGLFSVCYPRVSSAVKAELRQYFRNLCSDDTPMVRRAAASKLGEFAKVLELDNVKSEIIPMFSNLASDEQDSVRLLAVEACVNIAQLLPQEDLEALVMPTLRQAAEDKSWRVRYMVADKFTELQKAVGPEITKTDLVPAFQNLMKDCEAEVRAAASHKVKEFCENLSADCRENVIMSQILPCIKELVSDANQHVKSALASVIMGLSPILGKDNTIEHLLPLFLAQLKDECPEVRLNIISNLDCVNEVIGIRQLSQSLLPAIVELAEDAKWRVRLAIIEYMPLLAGQLGVEFFDEKLNSLCMAWLVDHVYAIREAATSNLKKLVEKFGKEWAHATIIPKVLAMSGDPNYLHRMTTLFCINVLSEVCGQDITTKHMLPTVLRMAGDPVANVRFNVAKSLQKIGPILDNSTLQSEVKPILEKLTQDQDVDVKYFAQEALTVLSLA

SEQ ID NO: 832620 - protein, 500 aa, Homo sapiens
MRNLRSVSHTLFSFKPHADLWGRYCYYQLRFIGLGRQRGGHHLPKVIQLKPGPTQLQSLCLLLSAILPAASGSPSPTPRYFRNLCSDDTPMVRRAAASKLGEFAKVLELDNVKSEIIPMFSNLASDEQDSVRLLAVEACVNIAQLLPQEDLEALVMPTLRQAAEDKSWRVRYMVADKFTELQKAVGPEITKTDLVPAFQNLMKDCEAEVRAAASHKVKEFCENLSADCRENVIMSQILPCIKELVSDANQHVKSALASVIMGLSPILGKDNTIEHLLPLFLAQLKDECPEVRLNIISNLDCVNEVIGIRQLSQSLLPAIVELAEDAKWRVRLAIIEYMPLLAGQLGVEFFDEKLNSLCMAWLVDHVYAIREAATSNLKKLVEKFGKEWAHATIIPKVLAMSGDPNYLHRMTTLFCINVLSEVCGQDITTKHMLPTVLRMAGDPVANVRFNVAKSLQKIGPILDNSTLQSEVKPILEKLTQDQDVDVKYFAQEALTVLSLA

SEQ ID NO: 832621 - protein, 319 aa, Homo sapiens
MAAADGDDSLYPIAVLIDELRNEDVQLRLNSIKKLSTIALALGVERTRSELLPFLTDTIYDEDEVLLALAEQLGTFTTLVGGPEYVHCLLPPLESLATVEETVVRDKAVESLRAISHEHSPSDLEAHFVPLVKRLAGGDWFTSRTSACGLFSVCYPRVSSAVKAELRQYFRNLCSDDTPMVRRAAASKLGEFAKVLELDNVKSEIIPMFSNLASDEQDSVRLLAVEACVNIAQLLPQEDLEALVMPTLRQAAEEGEKKRGARKGAQRHNPKTGAGTRRRAAPSWRRGAGRAPGKGTTPRETAAPQSAATNNALVARNNT

SEQ ID NO: 832622 - protein, 263 aa, Homo sapiens
NRLGTRLGLNRPQHVKSALASVIMGLSPILGKDNTIEHLLPLFLAQLKDECPEVRLNIISNLDCVNEVIGIRQLSQSLLPAIVELAEDAKWRVRLAIIEYMPLLAGQLGVEFFDEKLNSLCMAWLVDHVYAIREAATSNLKKLVEKFGKEWAHATIIPKVLAMSGDPNYLHRMTTLFCINVLSEVCGQDITTKHMLPTVLRMAGDPVANVRFNVAKSLQKIGPILDNSTLQSEVKPILEKLTQDQDVDVKYFAQEALTVLSLA

SEQ ID NO: 832623 - protein, 144 aa, Homo sapiens
LTAAVLSVDVYTILAAASNVLKIRVAKYGPAFYHATIIPKVLAMSGDPNYLHRMTTLFCINVLSEVCGQDITTKHMLPTVLRMAGDPVANVRFNVAKSLQKIGPILDNSTLQSEVKPILEKLTQDQDVDVKYFAQEALTVLSLA

SEQ ID NO: 832624 - protein, 168 aa, Homo sapiens
MAAADGDDSLYPIAVLIDELRNEDVQLRLNSIKKLSTIALALGVERTRSELLPFLTDTIYDEDEVLLALAEQLGTFTTLVGGPEYVHCLLPPLESLATVEETVVRDKAVESLRAISHEHSPSDLEAHFVPLVKRLAGGDWFTSRTSACGLFSVCYPRVSSAVKAELRQ

SEQ ID NO: 832625 - protein, 1880 aa, Homo sapiens [sequence omitted]

SEQ ID NO: 832626 - protein, 1853 aa, Homo sapiens
MAASELYTKFARVWIPDPEEVWKSAELLKDYKPGDKVLLLHLEEGKDLEYHLDPKTKELPHLRNPDILVGENDLTALSYLHEPAVLHNLRVRFIDSKLIYTYCGIVLVAINPYEQLPIYGEDIINAYSGQNMGDMDPHIFAVAEEAYKQMARDERNQSIIVSGESGAGKTVSAKYAMRYFATVSGSASEANVEEKVLASNPIMESIGNAKTTRNDNSSRFGKYIEIGFDKRYRIIGANMRTYLLEKSRVVFQAEEERNYHIFYQLCASAKLPEFKMLRLGNADNFNYTKQGGSPVIEGVDDAKEMAHTRQACTLLGISESHQMGIFRILAGILHLGNVGFTSRDADSCTIPPKHEPLCIFCDLMGVDYEEMCHWLCHRKLATATETYIKPISKLQATNARDALAKHIYAKLFNWIVDNVNQALHSAVKQHSFIGVLDIYGFETFEINSFEQFCINYANEKLQQQFNMHVFKLEQEEYMKEQIPWTLIDFYDNQPCINLIESKLGILDLLDEECKMPKGTDDTWAQKLYNTHLNKCALFEKPRLSNKAFIIQHFADKVEYQCEGFLEKNKDTVFEEQIKVLKSSKFKMLPELFQDDEKAISPTSATSSGRTPLTRTPAKPTKGRPGQMAKEHKKTVGHQFRNSLHLLMETLNATTPHYVRCIKPNDFKFPFTFDEKRAVQQLRACGVLETIRISAAGFPSRWTYQEFFSRYRVLMKQKDVLSDRKQTCKNVLEKLILDKDKYQFGKTKIFFRAGQVAYLEKLRADKLRAACIRIQKTIRGWLLRKKYLRMRKAAITMQRYVRGYQARCYAKFLRRTKAATIIQKYWRMYVVRRRYKIRRAATIVLQSYLRGFLARNRYRKILREHKAVIIQKRVRGWLARTHYKRSMHAIIYLQCCFRRMMAKRELKKLKIEARSVERYKKLHIGMENKIMQLQRKVDEQNKDYKCLVEKLTNLEGIYNSETEKLRSDLERLQLSEEEAKVATGRVLSLQEEIAKLRKDLEQTRSEKKCIEEHADRYKQETEQLVSNLKEENTLLKQEKEALNHRIVQQAKEMTETMEKKLVEETKQLELDLNDERLRYQNLLNEFSRLEERYDDLKEEMTLMVHVPKPGHKRTDSTHSSNESEYIFSSEIAEMEDIPSRTEEPSEKKVPLDMSLFLKLQKRVTELEQEKQVMQDELDRKEEQVLRSKAKEEERPQIRGAELEYESLKRQELESENKKLKNELNELRKALSEKSAPEVTAPGAPAYRVLMEQLTSVSEELDVRKEEVLILRSQLVSQKEAIQPKDDKNTMTDSTILLEDVQKMKDKGEIAQAYIGLKETNRLLESQLQSQKRSHENEAEALRGEIQSLKEENNRQQQLLAQNLQLPPEARIEASLQHEITRLTNENLYFEELYADDPKKYQSYRISLYKRMIDLMEQLEKQDKTVRKLKKQLKVFAKKIGELEVGQMENISPGQIIDEPIRPVNIPRKEKDFQGMLEYKKEDEQKLVKNLILELKPRGVAVNLIPGLPAYILFMCVRHADYLNDDQKVRSLLTSTINSIKKVLKKRGDDFETVSFWLSNTCRFLHCLKQYSGEEGFMKHNTSRQNEHCLTNFDLAEYRQVLSDLAIQIYQQLVRVLENILQPMIVSGMLEHETIQGVSGVKPTGLRKRTSSIADEGTYTLDSILRQLNSFHSVMCQHGMDPELIKQVVKQMFYIIGAITLNNLLLRKDMCSWSKGMQIRYNVSQLEEWLRDKNLMNSGAKETLEPLIQAAQLLQVKKKTDDDAEAICSMCNALTTAQIVKVLNLYTPVNEFEERVSVSFIRTIQMRLRDRKDSPQLLMDAKHIFPVTFPFNPSSLALETIQIPASLGLGFISRV

SEQ ID NO: 832627 - protein, 1642 aa, Homo sapiens
MRTYLLEKSRVVFQAEEERNYHIFYQLCASAKLPEFKMLRLGNADNFNYTKQGGSPVIEGVDDAKEMAHTRQACTLLGISESHQMGIFRILAGILHLGNVGFTSRDADSCTIPPKHEPLCIFCDLMGVDYEEMCHWLCHRKLATATETYIKPISKLQATNARDALAKHIYAKLFNWIVDNVNQALHSAVKQHSFIGVLDIYGFETFEINSFEQFCINYANEKLQQQFNMHVFKLEQEEYMKEQIPWTLIDFYDNQPCINLIESKLGILDLLDEECKMPKGTDDTWAQKLYNTHLNKCALFEKPRLSNKAFIIQHFADKVEYQCEGFLEKNKDTVFEEQIKVLKSSKFKMLPELFQDDEKAISPTSATSSGRTPLTRTPAKPTKGRPGQMAKEHKKTVGHQFRNSLHLLMETLNATTPHYVRCIKPNDFKFPFTFDEKRAVQQLRACGVLETIRISAAGFPSRWTYQEFFSRYRVLMKQKDVLSDRKQTCKNVLEKLILDKDKYQFGKTKIFFRAGQVAYLEKLRADKLRAACIRIQKTIRGWLLRKKYLRMRKAAITMQRYVRGYQARCYAKFLRRTKAATIIQKYWRMYVVRRRYKIRRAATIVLQSYLRGFLARNRYRKILREHKAVIIQKRVRGWLARTHYKRSMHAIIYLQCCFRRMMAKRELKKLKIEARSVERYKKLHIGMENKIMQLQRKVDEQNKDYKCLVEKLTNLEGIYNSETEKLRSDLERLQLSEEEAKVATGRVLSLQEEIAKLRKDLEQTRSEKKCIEEHADRYKQETEQLVSNLKEENTLLKQEKEALNHRIVQQAKEMTETMEKKLVEETKQLELDLNDERLRYQNLLNEFSRLEERYDDLKEEMTLMVHVPKPGHKRTDSTHSSNESEYIFSSEIAEMEDIPSRTEEPSEKKVPLDMSLFLKLQKRVTELEQEKQVMQDELDRKEEQVLRSKAKEEERPQIRGAELEYESLKRQELESENKKLKNELNELRKALSEKSAPEVTAPGAPAYRVLMEQLTSVSEELDVRKEEVLILRSQLVSQKEAIQPKDDKNTMTDSTILLEDVQKMKDKGEIAQAYIGLKETNRSSALDYHELNEDGELWLVYEGLKQANRLLESQLQSQKRSHENEAEALRGEIQSLKEENNRQQQLLAQNLQLPPEARIEASLQHEITRLTNENLYFEELYADDPKKYQSYRISLYKRMIDLMEQLEKQDKTVRKLKKQLKVFAKKIGELEVGQMENISPGQIIDEPIRPVNIPRKEKDFQGMLEYKKEDEQKLVKNLILELKPRGVAVNLIPGLPAYILFMCVRHADYLNDDQKVRSLLTSTINSIKKVLKKRGDDFETVSFWLSNTCRFLHCLKQYSGEEGFMKHNTSRQNEHCLTNFDLAEYRQVLSDLAIQIYQQLVRVLENILQPMIVSGMLEHETIQGVSGVKPTGLRKRTSSIADEGTYTLDSILRQLNSFHSVMCQHGMDPELIKQVVKQMFYIIGAITLNNLLLRKDMCSWSKGMQIRYNVSQLEEWLRDKNLMNSGAKETLEPLIQAAQLLQVKKKTDDDAEAICSMCNALTTAQIVKVLNLYTPVNEFEERVSVSFIRTIQMRLRDRKDSPQLLMDAKHIFPVTFPFNPSSLALETIQIPASLGLGFISRV

SEQ ID NO: 832628 - protein, 1830 aa, Homo sapiens
MAASELYTKFARVWIPDPEEVWKSAELLKDYKPGDKVLLLHLEEGKDLEYHLDPKTKELPHLRNPDILVGENDLTALSYLHEPAVLHNLRVRFIDSKLIYTYCGIVLVAINPYEQLPIYGEDIINAYSGQNMGDMDPHIFAVAEEAYKQMARDERNQSIIVSGESGAGKTVSAKYAMRYFATVSGSASEANVEEKVLASNPIMESIGNAKTTRNDNSSRFGKYIEIGFDKRYRIIGANMRTYLLEKSRVVFQAEEERNYHIFYQLCASAKLPEFKMLRLGNADNFNYTKQGGSPVIEGVDDAKEMAHTRQACTLLGISESHQMGIFRILAGILHLGNVGFTSRDADSCTIPPKHEPLCIFCDLMGVDYEEMCHWLCHRKLATATETYIKPISKLQATNARDALAKHIYAKLFNWIVDNVNQALHSAVKQHSFIGVLDIYGFETFEINSFEQFCINYANEKLQQQFNMHVFKLEQEEYMKEQIPWTLIDFYDNQPCINLIESKLGILDLLDEECKMPKGTDDTWAQKLYNTHLNKCALFEKPRLSNKAFIIQHFADKVEYQCEGFLEKNKDTVFEEQIKVLKSSKFKMLPELFQDDEKAISPTSATSSGRTPLTRTPAKPTKGRPGQMAKEHKKTVGHQFRNSLHLLMETLNATTPHYVRCIKPNDFKFPFTFDEKRAVQQLRACGVLETIRISAAGFPSRWTYQEFFSRYRVLMKQKDVLSDRKQTCKNVLEKLILDKDKYQFGKTKIFFRAGQVAYLEKLRADKLRAACIRIQKTIRGWLLRKKYLRMRKAAITMQRYVRGYQARCYAKFLRRTKAATIIQKYWRMYVVRRRYKIRRAATIVLQSYLRGFLARNRYRKILREHKAVIIQKRVRGWLARTHYKRSMHAIIYLQCCFRRMMAKRELKKLKIEARSVERYKKLHIGMENKIMQLQRKVDEQNKDYKCLVEKLTNLEGIYNSETEKLRSDLERLQLSEEEAKVATGRVLSLQEEIAKLRKDLEQTRSEKKCIEEHADRYKQETEQLVSNLKEENTLLKQEKEALNHRIVQQAKEMTETMEKKLVEETKQLELDLNDERLRYQNLLNEFSRLEERYDDLKEEMTLMVHVPKPGHKRTDSTHSSNESEYIFSSEIAEMEDIPSRTEEPSEKKVPLDMSLFLKLQKRVTELEQEKQVMQDELDRKEEQVLRSKAKEEERPQIRGAELEYESLKRQELESENKKLKNELNELRKALSEKSAPEVTAPGAPAYRVLMEQLTSVSEELDVRKEEVLILRSQLVSQKEAIQPKDDKNTMTDSTILLEDVQKMKDKGEIAQAYIGLKETNRSSALDYHELNEDGELWLVYEGLKQANRLLESQLQSQKRSHENEAEALRGEIQSLKEENNRQQQLLAQNLQLPPEARIEASLQHEITRLTNENLYFEELYADDPKKYQSYRISLYKRMIDLMEQLEKQDKTVRKLKKQLKVFAKKIGELEVGQMENISPGQIIDEPIRPVNIPRKEKDFQGMLEYKKEDEQKLVKNLILELKPRGVAVNLIPGLPAYILFMCVRHADYLNDDQKVRSLLTSTINSIKKVLKKRGDDFETVSFWLSNTCRFLHCLKQYSGEEGFMKHNTSRQNEHCLTNFDLAEYRQVLSDLAIQIYQQLVRVLENILQPMIVSGMLEHETIQGVSGVKPTGLRKRTSSIADEGTYTLDSILRQLNSFHSVMCQHGMDPELIKQVVKQMFYIIGAITLNNLLLRKDMCSWSKGMQIRYNVSQLEEWLRDKNLMNSGAKETLEPLIQAAQLLQVKKKTDDDAEAICSMCNALTTAQIVKVLNLYTPVNEFEERVSVSFIRTIQ

SEQ ID NO: 832629 - protein, 217 aa, Homo sapiens
MAASELYTKFARVWIPDPEEVWKSAELLKDYKPGDKVLLLHLEEGKDLEYHLDPKTKELPHLRNPDILVGENDLTALSYLHEPAVLHNLRVRFIDSKLIYTYCGIVLVAINPYEQLPIYGEDIINAYSGQNMGDMDPHIFAVAEEAYKQMARDERNQSIIVSGESGAGKTVSAKYAMRYFATVSGSASEANVEEKVLASNPIMEVRQRVFGFLPIFS

SEQ ID NO: 832630 - protein, 1855 aa, Homo sapiens
MAASELYTKFARVWIPDPEEVWKSAELLKDYKPGDKVLLLHLEEGKDLEYHLDPKTKELPHLRNPDILVGENDLTALSYLHEPAVLHNLRVRFIDSKLIYTYCGIVLVAINPYEQLPIYGEDIINAYSGQNMGDMDPHIFAVAEEAYKQMARDERNQSIIVSGESGAGKTVSAKYAMRYFATVSGSASEANVEEKVLASNPIMESIGNAKTTRNDNSSRFGKYIEIGFDKRYRIIGANMRTYLLEKSRVVFQAEEERNYHIFYQLCASAKLPEFKMLRLGNADNFNYTKQGGSPVIEGVDDAKEMAHTRQACTLLGISESHQMGIFRILAGILHLGNVGFTSRDADSCTIPPKHEPLCIFCDLMGVDYEEMCHWLCHRKLATATETYIKPISKLQATNARDALAKHIYAKLFNWIVDNVNQALHSAVKQHSFIGVLDIYGFETFEINSFEQFCINYANEKLQQQFNMHVFKLEQEEYMKEQIPWTLIDFYDNQPCINLIESKLGILDLLDEECKMPKGTDDTWAQKLYNTHLNKCALFEKPRLSNKAFIIQHFADKVEYQCEGFLEKNKDTVFEEQIKVLKSSKFKMLPELFQDDEKAISPTSATSSGRTPLTRTPAKPTKGRPGQMAKEHKKTVGHQFRNSLHLLMETLNATTPHYVRCIKPNDFKFPFTFDEKRAVQQLRACGVLETIRISAAGFPSRWTYQEFFSRYRVLMKQKDVLSDRKQTCKNVLEKLILDKDKYQFGKTKIFFRAGQVAYLEKLRADKLRAACIRIQKTIRGWLLRKKYLRMRKAAITMQRYVRGYQARCYAKFLRRTKAATIIQKYWRMYVVRRRYKIRRAATIVLQSYLRGFLARNRYRKILREHKAVIIQKRVRGWLARTHYKRSMHAIIYLQCCFRRMMAKRELKKLKIEARSVERYKKLHIGMENKIMQLQRKVDEQNKDYKCLVEKLTNLEGIYNSETEKLRSDLERLQLSEEEAKVATGRVLSLQEEIAKLRKDLEQTRSEKKCIEEHADRYKQETEQLVSNLKEENTLLKQEKEALNHRIVQQAKEMTETMEKKLVEETKQLELDLNDERLRYQNLLNEFSRLEERYDDLKEEMTLMVHVPKPGHKRTDSTHSSNESEYIFSSEIAEMEDIPSRTEEPSEKKVPLDMSLFLKLQKRVTELEQEKQVMQDELDRKEEQVLRSKAKEEERPQIRGAELEYESLKRQELESENKKLKNELNELRKALSEKSAPEVTAPGAPAYRVLMEQLTSVSEELDVRKEEVLILRSQLVSQKEAIQPKDDKNTMTDSTILLEDVQKMKDKGEIAQAYIGLKETNRSSALDYHELNEDGELWLVYEGLKQANRLLESQLQSQKRSHENEAEALRGEIQSLKEENNRQQQLLAQNLQLPPEARIEASLQHEITRLTNENLDLMEQLEKQDKTVRKLKKQLKVFAKKIGELEVGQMENISPGQIIDEPIRPVNIPRKEKDFQGMLEYKKEDEQKLVKNLILELKPRGVAVNLIPGLPAYILFMCVRHADYLNDDQKVRSLLTSTINSIKKVLKKRGDDFETVSFWLSNTCRFLHCLKQYSGEEGFMKHNTSRQNEHCLTNFDLAEYRQVLSDLAIQIYQQLVRVLENILQPMIVSGMLEHETIQGVSGVKPTGLRKRTSSIADEGTYTLDSILRQLNSFHSVMCQHGMDPELIKQVVKQMFYIIGAITLNNLLLRKDMCSWSKGMQIRYNVSQLEEWLRDKNLMNSGAKETLEPLIQAAQLLQVKKKTDDDAEAICSMCNALTTAQIVKVLNLYTPVNEFEERVSVSFIRTIQMRLRDRKDSPQLLMDAKHIFPVTFPFNPSSLALETIQIPASLGLGFISRV

SEQ ID NO: 832631 - protein, 1828 aa, Homo sapiens
MAASELYTKFARVWIPDPEEVWKSAELLKDYKPGDKVLLLHLEEGKDLEYHLDPKTKELPHLRNPDILVGENDLTALSYLHEPAVLHNLRVRFIDSKLIYTYCGIVLVAINPYEQLPIYGEDIINAYSGQNMGDMDPHIFAVAEEAYKQMARDERNQSIIVSGESGAGKTVSAKYAMRYFATVSGSASEANVEEKVLASNPIMESIGNAKTTRNDNSSRFGKYIEIGFDKRYRIIGANMRTYLLEKSRVVFQAEEERNYHIFYQLCASAKLPEFKMLRLGNADNFNYTKQGGSPVIEGVDDAKEMAHTRQACTLLGISESHQMGIFRILAGILHLGNVGFTSRDADSCTIPPKHEPLCIFCDLMGVDYEEMCHWLCHRKLATATETYIKPISKLQATNARDALAKHIYAKLFNWIVDNVNQALHSAVKQHSFIGVLDIYGFETFEINSFEQFCINYANEKLQQQFNMHVFKLEQEEYMKEQIPWTLIDFYDNQPCINLIESKLGILDLLDEECKMPKGTDDTWAQKLYNTHLNKCALFEKPRLSNKAFIIQHFADKVEYQCEGFLEKNKDTVFEEQIKVLKSSKFKMLPELFQDDEKAISPTSATSSGRTPLTRTPAKPTKGRPGQMAKEHKKTVGHQFRNSLHLLMETLNATTPHYVRCIKPNDFKFPFTFDEKRAVQQLRACGVLETIRISAAGFPSRWTYQEFFSRYRVLMKQKDVLSDRKQTCKNVLEKLILDKDKYQFGKTKIFFRAGQVAYLEKLRADKLRAACIRIQKTIRGWLLRKKYLRMRKAAITMQRYVRGYQARCYAKFLRRTKAATIIQKYWRMYVVRRRYKIRRAATIVLQSYLRGFLARNRYRKILREHKAVIIQKRVRGWLARTHYKRSMHAIIYLQCCFRRMMAKRELKKLKIEARSVERYKKLHIGMENKIMQLQRKVDEQNKDYKCLVEKLTNLEGIYNSETEKLRSDLERLQLSEEEAKVATGRVLSLQEEIAKLRKDLEQTRSEKKCIEEHADRYKQETEQLVSNLKEENTLLKQEKEALNHRIVQQAKEMTETMEKKLVEETKQLELDLNDERLRYQNLLNEFSRLEERYDDLKEEMTLMVHVPKPGHKRTDSTHSSNESEYIFSSEIAEMEDIPSRTEEPSEKKVPLDMSLFLKLQKRVTELEQEKQVMQDELDRKEEQVLRSKAKEEERPQIRGAELEYESLKRQELESENKKLKNELNELRKALSEKSAPEVTAPGAPAYRVLMEQLTSVSEELDVRKEEVLILRSQLVSQKEAIQPKDDKNTMTDSTILLEDVQKMKDKGEIAQAYIGLKETNRLLESQLQSQKRSHENEAEALRGEIQSLKEENNRQQQLLAQNLQLPPEARIEASLQHEITRLTNENLDLMEQLEKQDKTVRKLKKQLKVFAKKIGELEVGQMENISPGQIIDEPIRPVNIPRKEKDFQGMLEYKKEDEQKLVKNLILELKPRGVAVNLIPGLPAYILFMCVRHADYLNDDQKVRSLLTSTINSIKKVLKKRGDDFETVSFWLSNTCRFLHCLKQYSGEEGFMKHNTSRQNEHCLTNFDLAEYRQVLSDLAIQIYQQLVRVLENILQPMIVSGMLEHETIQGVSGVKPTGLRKRTSSIADEGTYTLDSILRQLNSFHSVMCQHGMDPELIKQVVKQMFYIIGAITLNNLLLRKDMCSWSKGMQIRYNVSQLEEWLRDKNLMNSGAKETLEPLIQAAQLLQVKKKTDDDAEAICSMCNALTTAQIVKVLNLYTPVNEFEERVSVSFIRTIQMRLRDRKDSPQLLMDAKHIFPVTFPFNPSSLALETIQIPASLGLGFISRV

SEQ ID NO: 832632 - protein, 1855 aa, Homo sapiens
MAASELYTKFARVWIPDPEEVWKSAELLKDYKPGDKVLLLHLEEGKDLEYHLDPKTKELPHLRNPDILVGENDLTALSYLHEPAVLHNLRVRFIDSKLIYTYCGIVLVAINPYEQLPIYGEDIINAYSGQNMGDMDPHIFAVAEEAYKQMARDERNQSIIVSGESGAGKTVSAKYAMRYFATVSGSASEANVEEKVLASNPIMESIGNAKTTRNDNSSRFGKYIEIGFDKRYRIIGANMRTYLLEKSRVVFQAEEERNYHIFYQLCASAKLPEFKMLRLGNADNFNYTKQGGSPVIEGVDDAKEMAHTRQACTLLGISESHQMGIFRILAGILHLGNVGFTSRDADSCTIPPKHEPLCIFCDLMGVDYEEMCHWLCHRKLATATETYIKPISKLQATNARDALAKHIYAKLFNWIVDNVNQALHSAVKQHSFIGVLDIYGFETFEINSFEQFCINYANEKLQQQFNMHVFKLEQEEYMKEQIPWTLIDFYDNQPCINLIESKLGILDLLDEECKMPKGTDDTWAQKLYNTHLNKCALFEKPRLSNKAFIIQHFADKVEYQCEGFLEKNKDTVFEEQIKVLKSSKFKMLPELFQDDEKAISPTSATSSGRTPLTRTPAKPTKGRPGQMAKEHKKTVGHQFRNSLHLLMETLNATTPHYVRCIKPNDFKFPFTFDEKRAVQQLRACGVLETIRISAAGFPSRWTYQEFFSRYRVLMKQKDVLSDRKQTCKNVLEKLILDKDKYQFGKTKIFFRAGQVAYLEKLRADKLRAACIRIQKTIRGWLLRKKYLRMRKAAITMQRYVRGYQARCYAKFLRRTKAATIIQKYWRMYVVRRRYKIRRAATIVLQSYLRGFLARNRYRKILREHKAVIIQKRVRGWLARTHYKRSMHAIIYLQCCFRRMMAKRELKKLKIEARSVERYKKLHIGMENKIMQLQRKVDEQNKDYKCLVEKLTNLEGIYNSETEKLRSDLERLQLSEEEAKVATGRVLSLQEEIAKLRKDLEQTRSEKKCIEEHADRYKQETEQLVSNLKEENTLLKQEKEALNHRIVQQAKEMTETMEKKLVEETKQLELDLNDERLRYQNLLNEFSRLEERYDDLKEEMTLMVHVPKPGHKRTDSTHSSNESEYIFSSEIAEMEDIPSRTEEPSEKKVPLDMSLFLKLQKRVTELEQEKQVMQDELDRKEEQVLRSKAKEEERPQIRGAELEYESLKRQELESENKKLKNELNELRKALSEKSAPEVTAPGAPAYRVLMEQLTSVSEELDVRKEEVLILRSQLVSQKEAIQPKDDKNTMTDSTILLEDVQKMKDKGEIAQAYIGLKETNRSSALDYHELNEDGELWLVYEGLKQANRLLESQLQSQKRSHENEAEALRGEIQSLKEENNRQQQLLAQNLQLPPEARIEASLQHEITRLTNENLYFEELYADDPKKYQSYRISLYKRMIDLMEQLEKQDKTVRKLKKQLKVFAKKIGELEVGQMENISPGQIIDEPIRPVNIPRKEKDFQGMLEYKKEDEQKLVKNLILELKPRGVAVNLIPGLPAYILFMCVRHADYLNDDQKVRSLLTSTINSIKKVLKKRGDDFETVSFWLSNTCRFLHCLKQYSGEEGFMKHNTSRQNEHCLTNFDLAEYRQVLSDLAIQIYQQLVRVLENILQPMIVSGMLEHETIQGVSGVKPTGLRKRTSSIADEGTYTLDSILRQLNSFHSVMCQHGMDPELIKQVVKQMFYIIGAITLNNLLLRKDMCSWSKGMQIRYNVSQLEEWLRDKKTDDDAEAICSMCNALTTAQIVKVLNLYTPVNEFEERVSVSFIRTIQMRLRDRKDSPQLLMDAKHIFPVTFPFNPSSLALETIQIPASLGLGFISRV

SEQ ID NO: 832633 - protein, 1450 aa, Homo sapiens
MAASELYTKFARVWIPDPEEVWKSAELLKDYKPGDKVLLLHLEEGKDLEYHLDPKTKELPHLRNPDILVGENDLTALSYLHEPAVLHNLRVRFIDSKLIYTYCGIVLVAINPYEQLPIYGEDIINAYSGQNMGDMDPHIFAVAEEAYKQMARDERNQSIIVSGESGAGKTVSAKYAMRYFATVSGSASEANVEEKVLASNPIMESIGNAKTTRNDNSSRFGKYIEIGFDKRYRIIGANMRTYLLEKSRVVFQAEEERNYHIFYQLCASAKLPEFKMLRLGNADNFNYTKQGGSPVIEGVDDAKEMAHTRQACTLLGISESHQMGIFRILAGILHLGNVGFTSRDADSCTIPPKHEPLCIFCDLMGVDYEEMCHWLCHRKLATATETYIKPISKLQATNARDALAKHIYAKLFNWIVDNVNQALHSAVKQHSFIGVLDIYGFETFEINSFEQFCINYANEKLQQQFNMHVFKLEQEEYMKEQIPWTLIDFYDNQPCINLIESKLGILDLLDEECKMPKGTDDTWAQKLYNTHLNKCALFEKPRLSNKAFIIQHFADKVEYQCEGFLEKNKDTVFEEQIKVLKSSKFKMLPELFQDDEKAISPTSATSSGRTPLTRTPAKPTKGRPGQMAKEHKKTVGHQFRNSLHLLMETLNATTPHYVRCIKPNDFKFPFTFDEKRAVQQLRACGVLETIRISAAGFPSRWTYQEFFSRYRVLMKQKDVLSDRKQTCKNVLEKLILDKDKYQFGKTKIFFRAGQVAYLEKLRADKLRAACIRIQKTIRGWLLRKKYLRMRKAAITMQRYVRGYQARCYAKFLRRTKAATIIQKYWRMYVVRRRYKIRRAATIVLQSYLRGFLARNRYRKILREHKAVIIQKRVRGWLARTHYKRSMHAIIYLQCCFRRMMAKRELKKLKIEARSVERYKKLHIGMENKIMQLQRKVDEQNKDYKCLVEKLTNLEGIYNSETEKLRSDLERLQLSEEEAKVATGRVLSLQEEIAKLRKDLEQTRSEKKCIEEHADRYKQETEQLVSNLKEENTLLKQEKEALNHRIVQQAKEMTETMEKKLVEETKQLELDLNDERLRYQNLLNEFSRLEERYDDLKEEMTLMVHVPKPGHKRTDSTHSSNESEYIFSSEIAEMEDIPSRTEEPSEKKVPLDMSLFLKLQKRVTELEQEKQVMQDELDRKEEQVLRSKAKEEERPQIRGAELEYESLKRQELESENKKLKNELNELRKALSEKSAPEVTAPGAPAYRVLMEQLTSVSEELDVRKEEVLILRSQLVSQKEAIQPKDDKNTMTDSTILLEDVQKMKDKGEIAQAYIGLKETNRLLESQLQSQKRSHENEAEALRGEIQSLKEENNRQQQLLAQNLQLPPEARIEASLQHEITRLTNENLDLMEQLEKQDKTVRKLKKQLKVFAKKIGELEVGQMENISPGQIIDEPIRPVSVLCACCVSVTVR

SEQ ID NO: 832634 - protein, 139 aa, Homo sapiens
RPPRRGAASAQAGGRRRAGPAMAASELYTKVRHPAAGVEDWGCAALAASCQAGEGAGAPGPGEPHQRHPLQRLRTLGPTSRSPAAAPSSFGRDGEGGGRWPASGVSQAPAALLELGAERASEWKGGPCGFSRAGVPPLL

SEQ ID NO: 832635 - protein, 91 aa, Homo sapiens
MGLEDEQKMLTESGDPEEEEEEEEELVDPLTTVREQCEQLEKCVKARERLELCDERDSSRSHTEEDCTEELFDFLHARDHCVAHKLFNNLK

SEQ ID NO: 832636 - protein, 91 aa, Homo sapiens; identical to SEQ ID NO: 832635

SEQ ID NO: 832637 - protein, 91 aa, Homo sapiens; identical to SEQ ID NO: 832635

SEQ ID NO: 832638 - protein, 415 aa, Homo sapiens
ARGAALPALEPRCRSRPPPEEEVEGAGGARRGGGGGGKMADFLPSRSVLSVCFPGCLLTSGEAEQQRKSKEIDKCLSREKTYVKRLVKILLLGAGESGKSTFLKQMRIIHGQDFDQRAREEFRPTIYSNVIKGMRVLVDAREKLHIPWGDNSNQQHGDKMMSFDTRAPMAAQGMVETRVFLQYLPAIRALWADSGIQNAYDRRREFQLGESVKYFLDNLDKLGEPDYIPSQQDILLARRPTKGIHEYDFEIKNVPFKMVDVGGQRSERKRWFECFDSVTSILFLVSSSEFDQVLMEDRLTNRLTESLNIFETIVNNRVFSNVSIILFLNKTDLLEEKVQIVSIKDYFLEFEGDPHCLRDVQKFLVECFRNKRRDQQQKPLYHHFTTAINTENIRLVFRDVKDTILHDNLKQLMLQ

SEQ ID NO: 832639 - protein, 91 aa, Homo sapiens; identical to SEQ ID NO: 832635

SEQ ID NO: 832640 - protein, 91 aa, Homo sapiens
MGLEDEQKMLTESGDPEEEEEEEEELVDPLTTVREQCEQLEKCVKARERLELCDERVSSRSHTEEDCTEELFDFLHARDHCVAHKLFNNLK

SEQ ID NO: 832641 - protein, 91 aa, Homo sapiens; identical to SEQ ID NO: 832640

SEQ ID NO: 832642 - protein, 91 aa, Homo sapiens; identical to SEQ ID NO: 832635

SEQ ID NO: 832643 - protein, 415 aa, Homo sapiens; identical to SEQ ID NO: 832638

SEQ ID NO: 832644 - protein, 102 aa, Homo sapiens
MGLEDEQKMLTESGDPEEEEEEEEELVIGLRLSVHTGNLGRQECETFPYYLASELNGRPHSAISGGSVALPAGLLHGSPNNSERAMRAVGEMCKGPGAARAL

SEQ ID NO: 832645 - protein, 102 aa, Homo sapiens; identical to SEQ ID NO: 832644

SEQ ID NO: 832646 - protein, 33 aa, Homo sapiens
MICKKNNNKTERHEKGAQTDAKTTTRRHNTTKG

SEQ ID NO: 832647 - protein, 102 aa, Homo sapiens; identical to SEQ ID NO: 832644

SEQ ID NO: 832648 - protein, 107 aa, Homo sapiens
  misc_feature (2)..(2): Xaa can be any naturally occurring amino acid
  misc_feature (10)..(10): Xaa can be any naturally occurring amino acid
  misc_feature (25)..(25): Xaa can be any naturally occurring amino acid
  misc_feature (35)..(35): Xaa can be any naturally occurring amino acid
  misc_feature (61)..(61): Xaa can be any naturally occurring amino acid
IXRYEVSCTXMCRRLLAQGQRSPPXQALSSKSRAXRLLMAMGSSALVYPTGSVKQQKGHAXPATGQLVPNSARAGLGAAVAARVESRTVARHGTGGRAKDAYRIRRS

SEQ ID NO: 832649 - protein, 91 aa, Homo sapiens; identical to SEQ ID NO: 832635

SEQ ID NO: 832650 - protein, 91 aa, Homo sapiens; identical to SEQ ID NO: 832640

SEQ ID NO: 832651 - protein, 91 aa, Homo sapiens; identical to SEQ ID NO: 832635

SEQ ID NO: 832652 - protein, 91 aa, Homo sapiens; identical to SEQ ID NO: 832635

SEQ ID NO: 832653 - protein, 91 aa, Homo sapiens; identical to SEQ ID NO: 832635

SEQ ID NO: 832654 - protein, 91 aa, Homo sapiens; identical to SEQ ID NO: 832640

SEQ ID NO: 832655 - protein, 119 aa, Homo sapiens
MKVLISSLLLLLPLMLMSMVSSSLNPGVARGHRDRGQASRRWLQEGGQECECKDWFLRAPRRKFMTVSGLPKKQCPCDHFKGNVKKTRHQRHHRKPNKHSRACQQFLKQCQLRSFALPL

SEQ ID NO: 832656 - protein, 227 aa, Homo sapiens
MARTKQTARKSTGGKAPRKQLATKAARKSAPSTGGVKKPHRYRPGTVALREIRRYQKSTELLIRKLPFQRLVREIAQDYNCAESHSHNSLRNDFLTCAQREPVHLGLQVRLQAQQASNLGGFRVDDSSSHEIRRIRINFFKKCRTKSYDLGFGDFCVHWVLCFEDVLHFLLLNCFATLKEILRSHFCRLEEFVESDGQLHRHVLEGAPIPELNVEDAPPEVDTLYVP

SEQ ID NO: 832657 - protein, 136 aa, Homo sapiens; identical to SEQ ID NO: 778873

SEQ ID NO: 832658 - protein, 136 aa, Homo sapiens; identical to SEQ ID NO: 778873

SEQ ID NO: 832659 - protein, 136 aa, Homo sapiens; identical to SEQ ID NO: 778873

SEQ ID NO: 832660 - protein, 136 aa, Homo sapiens; identical to SEQ ID NO: 778873

SEQ ID NO: 832661 - protein, 136 aa, Homo sapiens; identical to SEQ ID NO: 778873

SEQ ID NO: 832662 - protein, 136 aa, Homo sapiens; identical to SEQ ID NO: 778873

SEQ ID NO: 832663 - protein, 136 aa, Homo sapiens; identical to SEQ ID NO: 778873

SEQ ID NO: 832664 - protein, 136 aa, Homo sapiens; identical to SEQ ID NO: 778873

SEQ ID NO: 832665 - protein, 136 aa, Homo sapiens; identical to SEQ ID NO: 778873

SEQ ID NO: 832666 - protein, 69 aa, Homo sapiens
VPPSFRSFNEQGMDEELERDEKVFLLGEEVAQYDGAYKVSRGLWKKYGFQYVFVAFLSYSRFHPFTILF

SEQ ID NO: 832667 - protein, 136 aa, Homo sapiens; identical to SEQ ID NO: 778873

SEQ ID NO: 832668 - protein, 136 aa, Homo sapiens; identical to SEQ ID NO: 778873

SEQ ID NO: 832669 - protein, 136 aa, Homo sapiens; identical to SEQ ID NO: 778873

SEQ ID NO: 832670 - protein, 136 aa, Homo sapiens; identical to SEQ ID NO: 778873

SEQ ID NO: 832671 - protein, 136 aa, Homo sapiens; identical to SEQ ID NO: 778873

SEQ ID NO: 832672 - protein, 701 aa, Homo sapiens
PASGRAPQPGRCTCQGNKLEEQDPRPLQPIPGLMEGNKLEEQDSSPPQSTPGLMKGNKREEQGLGPEPAAPQQPTAEEEALIEFHRSYRELFEFFCNNTTIHGAIRLVCSQHNRMKTAFWAVLWLCTFGMMYWQFGLLFGEYFSYPVSLNINLNSDKLVFPAVTICTLNPYRYPEIKEELEELDRITEQTLFDLYKYSSFTTLVAGSRSRRDLRGTLPHPLQRLRVPPPPHGARRARSVASSLRDNNPQVDWKDWKIGFQLCNQNKSDCFYQTYSSGVDAVREWYRFHYINILSRLPETLPSLEEDTLGNFIFACRFNQVSSTRNYSHFHHPMYGNCYTFNDKNNSNLWMSSMPGINNGLSLMLRAEQNDFIPLLSTVTGARVMVHGQDEPAFMDDGGFNLRPGVETSISMRKETLDRLGGDYGDCTKNGSDVPVENLYPSKYTQQVCIHSCFQESMIKECGCAYIFYPRPQNVEYCDYRKHSSWGYCYYKLQVDFSSDHLGCFTKCRKPCSVTSYQLSAGYSRWPSVTSQEWVFQMLSRQNNYTVNNKRNGVAKVNIFFKELNYKTNSESPSVTMVTLLSNLGSQWSLWFGSSVLSVVEMAELVFDLLVIMFLMLLRRFRSRYWSPGRGGRGAQEVASTLASSPPSHFCPHPMSLSLSQPGPAPSPALTAPPPAYATLGPRPSPGGSAGASSSTCPLGGP

SEQ ID NO: 832673 - protein, 727 aa, Homo sapiens
MGMARGSLTRVPGVMGEGTQGPELSLDPDPCSPQSTPGLMKGNKLEEQDPRPLQPIPGLMEGNKLEEQDSSPPQSTPGLMKGNKREEQGLGPEPAAPQQPTAEEEALIEFHRSYRELFEFFCNNTTIHGAIRLVCSQHNRMKTAFWAVLWLCTFGMMYWQFGLLFGEYFSYPVSLNINLNSDKLVFPAVTICTLNPYRYPEIKEELEELDRITEQTLFDLYKYSSFTTLVAGSRSRRDLRGTLPHPLQRLRVPPPPHGARRARSVASSLRDNNPQVDWKDWKIGFQLCNQNKSDCFYQTYSSGVDAVREWYRFHYINILSRLPETLPSLEEDTLGNFIFACRFNQVSSTRNYSHFHHPMYGNCYTFNDKNNSNLWMSSMPGINNGLSLMLRAEQNDFIPLLSTVTGARVMVHGQDEPAFMDDGGFNLRPGVETSISMRKETLDRLGGDYGDCTKNGSDVPVENLYPSKYTQQVCIHSCFQESMIKECGCAYIFYPRPQNVEYCDYRKHSSWGYCYYKLQVDFSSDHLGCFTKCRKPCSVTSYQLSAGYSRWPSVTSQEWVFQMLSRQNNYTVNNKRNGVAKVNIFFKELNYKTNSESPSVTMVTLLSNLGSQWSLWFGSSVLSVVEMAELVFDLLVIMFLMLLRRFRSRYWSPGRGGRGAQEVASTLASSPPSHFCPHPMSLSLSQPGPAPSPALTAPPPAYATLGPRPSPGGSAGASSSTCPLGGP

SEQ ID NO: 832674 - protein, 674 aa, Homo sapiens
RHSSRKATDTRLRGSGRDDLGTAVTPRPRPSPFPSLGKGRQVPGSLLGPGEGESAPQTTGASCLSPSINSPQCPGWARRGLRLPGGHTCLPFTAGRPGGATTTPAPPRLLRDGPASRGTDEDPDPGGARHSLQGPWLTLFPSPFRYPEIKEELEELDRITEQTLFDLYKYSSFTTLVAGSRSRRDLRGTLPHPLQRLRVPPPPHGARRARSVASSLRDNNPQVDWKDWKIGFQLCNQNKSDCFYQTYSSGVDAVREWYRFHYINILSRLPETLPSLEEDTLGNFIFACRFNQVSSTRNYSHFHHPMYGNCYTFNDKNNSNLWMSSMPGINNGLSLMLRAEQNDFIPLLSTVTGARVMVHGQDEPAFMDDGGFNLRPGVETSISMRKETLDRLGGDYGDCTKNGSDVPVENLYPSKYTQQVCIHSCFQESMIKECGCAYIFYPRPQNVEYCDYRKHSSWGYCYYKLQVDFSSDHLGCFTKCRKPCSVTSYQLSAGYSRWPSVTSQEWVFQMLSRQNNYTVNNKRNGVAKVNIFFKELNYKTNSESPSVTMVTLLSNLGSQWSLWFGSSVLSVVEMAELVFDLLVIMFLMLLRRFRSRYWSPGRGGRGAQEVASTLASSPPSHFCPHPMSLSLSQPGPAPSPALTAPPPAYATLGPRPSPGGSAGASSSTCPLGGP

SEQ ID NO: 832675 - protein, 380 aa, Homo sapiens
MAWNYSHFHHPMYGNCYTFNDKNNSNLWMSSMPGINNGLSLMLRAEQNDFIPLLSTVTGARVMVHGQDEPAFMDDGGFNLRPGVETSISMRKETLDRLGGDYGDCTKNGSDVPVENLYPSKYTQQVCIHSCFQESMIKECGCAYIFYPRPQNVEYCDYRKHSSWGYCYYKLQVDFSSDHLGCFTKCRKPCSVTSYQLSAGYSRWPSVTSQEWVFQMLSRQNNYTVNNKRNGVAKVNIFFKELNYKTNSESPSVTMVTLLSNLGSQWSLWFGSSVLSVVEMAELVFDLLVIMFLMLLRRFRSRYWSPGRGGRGAQEVASTLASSPPSHFCPHPMSLSLSQPGPAPSPALTAPPPAYATLGPRPSPGGSAGASSSTCPLGGP

SEQ ID NO: 832676 - protein, 727 aa, Homo sapiens; identical to SEQ ID NO: 832673

SEQ ID NO: 832677 - protein, 727 aa, Homo sapiens; identical to SEQ ID NO: 832673

SEQ ID NO: 832678 - protein, 100 aa, Homo sapiens
TDVHKMSGAATDTRVRCVHIWMWHTQESTHVSLLPWDHGTRKLEKLWAWNFPKKPLITRTKHNQGYTQACTGFLPSDGLSQPPTGLATLLSSSTDVCSSS

SEQ ID NO: 832679 - protein, 466 aa, Homo sapiens
MGMARGSLTRVPGVMGEGTQGPELSLDPDPCSPQSTPGLMKGNKLEEQDPRPLQPIPGLMEGNKLEEQDSSPPQSTPGLMKGNKREEQGLGPEPAAPQQPTAEEEALIEFHRSYRELFEFFCNNTTIHGAIRLVCSQHNRMKTAFWAVLWLCTFGMMYWQFGLLFGEYFSYPVSLNINLNSDKLVFPAVTICTLNPYRYPEIKEELEELDRITEQTLFDLYKYSSFTTLVAGSRSRRDLRGTLPHPLQRLRVPPPPHGARRARSVASSLRDNNPQVDWKDWKIGFQLCNQNKSDCFYQTYSSGVDAVREWYRFHYINILSRLPETLPSLEEDTLGNFIFACRFNQVSSTRNYSHFHHPMYGNCYTFNDKNNSNLWMSSMPGINNGLSLMLRAEQNDFIPLLSTVTGARVMVHGQDEPAFMDDGGFNLRPGVETSISMRKETLDRLGGDYGDCTPAWVTARLGLKKK

SEQ ID NO: 832680 - protein, 204 aa, Homo sapiens
MGMARGSLTRVPGVMGEGTQGPELSLDPDPCSPQSTPGLMKGNKLEEQDPRPLQPIPGLMEGNKLEEQDSSPPQSTPGLMKGNKREEQGLGPEPAAPQQPTAEEEALIEFHRSYRELFEFFCNNTTIHGAIRLVCSQHNRMKTAFWAVLWLCTFGMMYWQFGLLFGEYFSYPVSLNINLNSDKLVFPAVTICTLNPYRSVSPSA

SEQ ID NO: 832681 - protein, 64 aa, Homo sapiens
MVTLLSNLGSQWSLWFGSSVLSVVEMAELVFDLLVIMFLMLLRRFRSRYWSPGRGGRGAQEVAS

SEQ ID NO: 832682 - protein, 154 aa, Homo sapiens
MGMARGSLTRVPGVMGEGTQGPELSLDPDPCSPQSTPGLMKGNKLEEQDPRPLQPIPGLMEGNKLEEQDSSPPQSTPGLMKGNKREEQGLGPEPAAPQQPTAEEEALLIRVSKRFLTEEGSLEGSFLGKKEPAIPTGGPFPPLGVGPPGTETGT

SEQ ID NO: 832683 - protein, 380 aa, Homo sapiens; identical to SEQ ID NO: 832675

SEQ ID NO: 832684 - protein, 318 aa, Homo sapiens
MVHGQDEPAFMDDGGFNLRPGVETSISMRKETLDRLGGDYGDCTKNGSDVPVENLYPSKYTQQVCIHSCFQESMIKECGCAYIFYPRPQNVEYCDYRKHSSWGYCYYKLQVDFSSDHLGCFTKCRKPCSVTSYQLSAGYSRWPSVTSQEWVFQMLSRQNNYTVNNKRNGVAKVNIFFKELNYKTNSESPSVTMVTLLSNLGSQWSLWFGSSVLSVVEMAELVFDLLVIMFLMLLRRFRSRYWSPGRGGRGAQEVASTLASSPPSHFCPHPMSLSLSQPGPAPSPALTAPPPAYATLGPRPSPGGSAGASSSTCPLGGP

SEQ ID NO: 832685 - protein, 281 aa, Homo sapiens
MGMARGSLTRVPGVMGEGTQGPELSLDPDPCSPQSTPGLMKGNKLEEQDPRPLQPIPGLMEGNKLEEQDSSPPQSTPGLMKGNKREEQGLGPEPAAPQQPTAEEEALIEFHRSYRELFEFFCNNTTIHGAIRLVCSQHNRMKTALARLKDVQGFLSEPPKLPLMCGGEARWVRAQEVAPRTVADEAAQKCLGSSPVPLGTASEHSGFPTQLRLSLFFPWISQAKLGALTRNFPKKPLITRTKHNQGYTQACTGFLPSDGLSQPPTGLATLLSSSTDVCSSS

SEQ ID NO: 832686 - protein, 522 aa, Homo sapiens
MGMARGSLTRVPGVMGEGTQGPELSLDPDPCSPQSTPGLMKGNKLEEQDPRPLQPIPGLMEGNKLEEQDSSPPQSTPGLMKGNKREEQGLGPEPAAPQQPTAEEEALIEFHRSYRELFEFFCNNTTIHGAIRLVCSQHNRMKTAFWAVLWLCTFGMMYWQFGLLFGEYFSYPVSLNINLNSDKLVFPAVTICTLNPYRYPEIKEELEELDRITEQTLFDLYKYSSFTTLVAGSRSRRDLRGTLPHPLQRLRVPPPPHGARRARSVASSLRDNNPQVDWKDWKIGFQLCNQNKSDCFYQTYSSGVDAVREWYRFHYINILSRLPETLPSLEEDTLGNFIFACRFNQVSSTRNYSHFHHPMYGNCYTFNDKNNSNLWMSSMPGINNGLSLMLRAEQNDFIPLLSTVTGARVMVHGQDEPAFMDDGGFNLRPGVETSISMRKETLDRLGGDYGDCTKNGSDVPVENLYPSKYTQQVCIHSCFQESMIKECGCAYIFYPRPQNVEYCDYRKHSSWGETPGSPHPAP

SEQ ID NO: 832687 - protein, 238 aa, Homo sapiens
PASGRAPQPGRCTCQVRGRRGLAARFNWKGTSPSPAATWEWEAGGSPDLLEPCSPGAETESGHSSRNYSHFHHPMYGNCYTFNDKNNSNLWMSSMPGINNGLSLMLRAEQNDFIPLLSTVTGARVMVHGQDEPAFMDDGGFNLRPGVETSISMRKETLDRLGGDYGDCTKNGSDVPVENLYPSKYTQQVCIHSCFQESMIKECGCAYIFYPRPQNVEYCDYRKHSSWGETPGSPHPAP

SEQ ID NO: 832688 - protein, 103 aa, Homo sapiens
TQKPPLLLRQFPFPDSRGLGLEQTRVSKGRPRAPLASYPCPHRAMPRHLCPVSFIPLHVCLRYFLSLKVSPTICQRTPMHPLEPCSDTITFVNASATSCLPQN

SEQ ID NO: 832689 - protein, 375 aa, Homo sapiens [sequence omitted]

SEQ ID NO: 832690 - protein, 133 aa, Homo sapiens
CGACLGGLKGSGWSTEVSQPLSFGQVMPQPQPDFLLLLVELFPNGQSVGEKIFKTAGFVKPFTEAQLLCTQAGGQLASPRSAAENAALQQLVVAKNEAAFLSMTDSKTEGKFTYPTGESLVYSNWAPGEPNDD

SEQ ID NO: 832691 - protein, 612 aa, Homo sapiens
MASPSPPPESKEEWDYLDPAQRSLYKDVMMENYGNLVSLDVLNRDKDEEPTVKQEIEEIEEEVEPQGVIVTRIKSEIDQDPMGRETFELVGRLDKQRGIFLWEIPRESLTQEQRMFRENTNIIRKRPNSEEKCHKCEECGKGFVRKAHFIQHQRVHTGEKPFQCNECGKSFSRSSFVIEHQRIHTGERPYECNYCGKTFSVSSTLIRHQRIHTGERPYQCNQCKQSFSQRRSLVKHQRIHTGEKPHKCSDCGKAFSWKSHLIEHQRTHTGEKPYHCTKCKKSFSRNSLLVEHQRIHTGERPHKCGECGKAFRLSTYLIQHQKIHTGEKPFLCIECGKSFSRSSFLIEHQRIHTGERPYQCKECGKSFSQLCNLTRHQRIHTGDKPHKCEECGKAFSRSSGLIQHQRIHTREKTYPYNETKESFDPNCSLVIQQEVYPKEKSYKCDECGKTFSVSAHLVQHQRIHTGEKPYLCTVCGKSFSRSSFLIEHQRIHTGERPYLCRQCGKSFSQLCNLIRHQGVHTGNKPHKCDECGKAFSRNSGLIQHQRIHTGEKPYKCEKCDKSFSQQRSLVNHQMIHAEVKTQETHECDACGEAFNCRISLIQHQKLHTAWMQ

SEQ ID NO: 832692 - protein, 626 aa, Homo sapiens
MASPSPPPESKGLLTFEDVAVFFTQEEWDYLDPAQRSLYKDVMMENYGNLVSLDVLNRDKDEEPTVKQEIEEIEEEVEPQGVIVTRIKSEIDQDPMGRETFELVGRLDKQRGIFLWEIPRESLTQEQRMFRENTNIIRKRPNSEEKCHKCEECGKGFVRKAHFIQHQRVHTGEKPFQCNECGKSFSRSSFVIEHQRIHTGERPYECNYCGKTFSVSSTLIRHQRIHTGERPYQCNQCKQSFSQRRSLVKHQRIHTGEKPHKCSDCGKAFSWKSHLIEHQRTHTGEKPYHCTKCKKSFSRNSLLVEHQRIHTGERPHKCGECGKAFRLSTYLIQHQKIHTGEKPFLCIECGKSFSRSSFLIEHQRIHTGERPYQCKECGKSFSQLCNLTRHQRIHTGDKPHKCEECGKAFSRSSGLIQHQRIHTREKTYPYNETKESFDPNCSLVIQQEVYPKEKSYKCDECGKTFSVSAHLVQHQRIHTGEKPYLCTVCGKSFSRSSFLIEHQRIHTGERPYLCRQCGKSFSQLCNLIRHQGVHTGNKPHKCDECGKAFSRNSGLIQHQRIHTGEKPYKCEKCDKSFSQQRSLVNHQMIHAEVKTQETHECDACGEAFNCRISLIQHQKLHTAWMQ

SEQ ID NO: 832693 - protein, 531 aa, Homo sapiens
MGRETFELVGRLDKQRGIFLWEIPRESLTQEQRMFRENTNIIRKRPNSEEKCHKCEECGKGFVRKAHFIQHQRVHTGEKPFQCNECGKSFSRSSFVIEHQRIHTGERPYECNYCGKTFSVSSTLIRHQRIHTGERPYQCNQCKQSFSQRRSLVKHQRIHTGEKPHKCSDCGKAFSWKSHLIEHQRTHTGEKPYHCTKCKKSFSRNSLLVEHQRIHTGERPHKCGECGKAFRLSTYLIQHQKIHTGEKPFLCIECGKSFSRSSFLIEHQRIHTGERPYQCKECGKSFSQLCNLTRHQRIHTGDKPHKCEECGKAFSRSSGLIQHQRIHTREKTYPYNETKESFDPNCSLVIQQEVYPKEKSYKCDECGKTFSVSAHLVQHQRIHTGEKPYLCTVCGKSFSRSSFLIEHQRIHTGERPYLCRQCGKSFSQLCNLIRHQGVHTGNKPHKCDECGKAFSRNSGLIQHQRIHTGEKPYKCEKCDKSFSQQRSLVNHQMIHAEVKTQETHECDACGEAFNCRISLIQHQKLHTAWMQ

SEQ ID NO: 832694 - protein, 584 aa, Homo sapiens
MMENYGNLVSLDVLNRDKDEEPTVKQEIEEIEEEVEPQGVIVTRIKSEIDQDPMGRETFELVGRLDKQRGIFLWEIPRESLTQEQRMFRENTNIIRKRPNSEEKCHKCEECGKGFVRKAHFIQHQRVHTGEKPFQCNECGKSFSRSSFVIEHQRIHTGERPYECNYCGKTFSVSSTLIRHQRIHTGERPYQCNQCKQSFSQRRSLVKHQRIHTGEKPHKCSDCGKAFSWKSHLIEHQRTHTGEKPYHCTKCKKSFSRNSLLVEHQRIHTGERPHKCGECGKAFRLSTYLIQHQKIHTGEKPFLCIECGKSFSRSSFLIEHQRIHTGERPYQCKECGKSFSQLCNLTRHQRIHTGDKPHKCEECGKAFSRSSGLIQHQRIHTREKTYPYNETKESFDPNCSLVIQQEVYPKEKSYKCDECGKTFSVSAHLVQHQRIHTGEKPYLCTVCGKSFSRSSFLIEHQRIHTGERPYLCRQCGKSFSQLCNLIRHQGVHTGNKPHKCDECGKAFSRNSGLIQHQRIHTGEKPYKCEKCDKSFSQQRSLVNHQMIHAEVKTQETHECDACGEAFNCRISLIQHQKLHTAWMQ

SEQ ID NO: 832695 - protein, 531 aa, Homo sapiens; identical to SEQ ID NO: 832693

SEQ ID NO: 832696 - protein, 151 aa, Homo sapiens
SYVDSEGSPVGVVQLTFLRLLQRPGGPPGLPGPAGPKGAKGATGPGGPKGEKGVQGPPGHPGPPGEVIQPLPIQMPKKTRRSVDGSRLMQEDEAIPTGGAPGSPGGLEEIFGSLDSLREEIEQMRRPTGTQGRNGIVWGVCRAASRRWLEY

SEQ ID NO: 832697 - protein, 1620 aa, Homo sapiens
PVDVLRALRFPSLPDGVRRAKGICPADVAYRVARPAQLSAPTRQLFPGGFPKDFSLLTVVRTRPGLQAPLLTLYSAQGVRQLGLELGRPVRFLYEDQTGRPQPPSQPVFRGLSLADGKWHRVAVAVKGQSVTLIVDCKKRVTRPLPRSARPVLDTHGVIIFGARILDEEVFEGDVQELAIVPGVQAAYESCEQKELECEGGQRERPQNQQPHRAQRSPQQQPSRLHRPQNQEPQSQDPTPGEEEEILESSLLPPLEEAAHGPRGLKGEKGEPAVLEPGMLVEGPPGPEGPAGLIGPPGIQGNPGPVGDPGERGPPGRAGLPGSDGAPGPPGTSLMLPFRFGSGGGDKGPVVAAQEAQAQAILQQARLALRGPPGPMGYTGRPGPLGQPGSPGLKGESGDLGPQGPRGPQGLTGPPGKAGRRGRAGADGARGMPGDPGVKGDRGFDGLPGLPGEKGHRGDTGAQGLPGPPGEDGERGDDGEIGPRGLPGESGPRGLLGPKGPPGIPGPPGVRGMDGPQGPKGSLGPQGEPGPPGQQGTPGTQGLPGPQGAIGPHGEKGPQGKPGLPGMPGSDGPPGHPGKEGPPGTKGNQGPSGPQGPLGYPGPRGVKGVDGIRGLKGHKGEKGEDGFPGFKGDIGVKGDRGEVGVPGSRGEDGPEGPKGRTGPTGDPGPPGLMGEKGKLGVPGLPGYPGRQGPKGSLGFPGFPGASGEKGARGLSGKSGPRGERGPTGPRGQRGPRGATGKSGAKGTSGGDGPHGPPGERGLPGPQGPNGFPGPKGPPGPPGKDGLPGHPGQRGEVGFQGKTGPPGPPGVVGPQGAAGETGPMGERGHPGPPGPPGEQGLPGTAGKEGTKGDPGPPGAPGKDGPAGLRGFPGERGLPGTAGGPGLKGNEGPSGPPGPAGSPGERGAAGSGGPIGPPGRPGPQGPPGAAGEKGVPGEKGPIGPTGRDGVQGPVGLPGPAGPPGVAGEDGDKGEVGDPGQKGTKGNKGEHGPPGPPGPIGPVGQPGAAGADGEPGARGPQGHFGAKGDEGTRGFNGPPGPIGLQGLPGPSGEKGETGDVGPMGPPGPPGPRGPAGPNGADGPQGPPGGVGNLGPPGEKGEPGESGSPGIQGEPGVKGPRGERGEKGESGQPGEPGPPGPKGPTGDDGPKGNPGPVGFPGDPGPPGEGGPRGQDGAKGDRGEDGEPGQPGSPGPTGENGPPGPLGKRGPAGSPGSEGRQGGKGAKGDPGAIGAPGKTGPVGPAGPAGKPGPDGLRGLPGSVGQQGRPGATGQAGPPGPVGPPGLPGLRGDAGAKGEKGHPGLIGLIGPPGEQGEKGDRGLPGPQGSPGQKGEMGIPGASGPIGPGGPPGLPGPAGPKGAKGATGPGGPKGEKGVQGPPGHPGPPGEVIQPLPIQMPKKTRRSVDGSRLMQEDEAIPTGGAPGSPGGLEEIFGSLDSLREEIEQMRRPTGTQDSPARTCQDLKLCHPELPDGEYWVDPNQGCARDAFRVFCNFTAGGETCVTPRDDVTQFSYVDSEGSPVGVVQLTFLRLLSVSAHQDVSYPCSGAARDGPLRLRGANEDELSPETSPYVKEFRDGCQTQQGRTVLEVRTPVLEQLPVLDASFSDLGAPPRRGGVLLGPVCFMG

SEQ ID NO: 832698 - protein, 260 aa, Homo sapiens
PVDVLRALRFPSLPDGVRRAKGICPADVAYRVARPAQLSAPTRQLFPGGFPKDFSLLTVVRTRPGLQAPLLTLYSAQGVRQLGLELGRPVRFLYEDQTGRPQPPSQPVFRGLSLADGKWHRVAVAVKGQSVTLIVDCKKRVTRPLPRSARPVLDTHGVIIFGARILDEEVFEGDVQELAIVPGVQAAYESCEQKELECEGGQRERPQNQQPHRAQRSPQQQPSRLHRPQNQEPQSQVRELGEPPSAAHPREGRHPGISPP

SEQ ID NO: 832699 - protein, 103 aa, Homo sapiens
ERESRERERERERESARYRDCPPGSSTPLEAMKGPREEIVYLPCIYRNTGTEAPDYLATVDVDPKSPQYCQVIEPKDIHAKCELAFLHTSHCLASGAFRFISW

SEQ ID NO: 832700 - protein, 235 aa, Homo sapiens
MPNLKDELHHSGWNTCSSCFGDSTKSRTKLVLPSLISSRIYVVDVGSEPRAPKLHKVIEPKDIHAKCELAFLHTSHCLASGEVMISSLGDVKGNGKGGFVLLDGETFEVKGTWERPGGAAPLGYDFWYQPRHNVMISTEWAAPNVLRDGFNPADVEAGLYGSHLYVWDWQRHEIVQTLSLKDGLIPLEIRFLHNPDAAQGFVGCALSSTIQRFYKNEVTYALWPSPPSSLVSSST

SEQ ID NO: 832701 - protein, 393 aa, Homo sapiens
MPNLKDELHHSGWNTCSSCFGDSTKSRTKLVLPSLISSRIYVVDVGSEPRAPKLHKVIEPKDIHAKCELAFLHTSHCLASGEVMISSLGDVKGNGKGGFVLLDGETFEVKGTWERPGGAAPLGYDFWYQPRHNVMISTEWAAPNVLRDGFNPADVEAGLYGSHLYVWDWQRHEIVQTLSLKDGLIPLEIRFLHNPDAAQGFVGCALSSTIQRFYKNEGGTWSVEKVIQVPPKKVKGWLLPEMPGLITDILLSLDDRFLYFSNWLHGDLRQYDISDPQRPRLTGQLFLGGSIVKGGPVQVLEDEELKSQPEPLVVKGKRVAGGPQMIQLSLDGKRLYITTSLYSAWDKQFYPDLIREGSVMLQVDVDTVKGGLKLNPNFLVDFGKEPLGPALAH

SEQ ID NO: 832702 - protein, 375 aa, Homo sapiens
MPNLKDELHHSGWNTCSSCFGDSTKSRTKLVLPSLISSRIYVVDVGSEPRAPKLHKVIEPKDIHAKCELAFLHTSHCLASGEVMISSLGDVKGNGKGGFVLLDGETFEVKGTWERPGGAAPLGYDFWYQPRHNVMISTEWAAPNVLRDGFNPADVEAGLYGSHLYVWDWQRHEIVQTLSLQGFVGCALSSTIQRFYKNEGGTWSVEKVIQVPPKKVKGWLLPEMPGLITDILLSLDDRFLYFSNWLHGDLRQYDISDPQRPRLTGQLFLGGSIVKGGPVQVLEDEELKSQPEPLVVKGKRVAGGPQMIQLSLDGKRLYITTSLYSAWDKQFYPDLIREGSVMLQVDVDTVKGGLKLNPNFLVDFGKEPLGPALAH

SEQ ID NO: 832703 - protein, 309 aa, Homo sapiens
MRLVARGPRYVEVEASESVTRPRGMIAGVYELVAVLFIHHIKKRPGINRCVLSIIHDVTTQWVITGCMLGGSPCRSYDIYMIVAWQRHEIVQTLSLKDGLIPLEIRFLHNPDAAQGFVGCALSSTIQRFYKNEGGTWSVEKVIQVPPKKVKGWLLPEMPGLITDILLSLDDRFLYFSNWLHGDLRQYDISDPQRPRLTGQLFLGGSIVKGGPVQVLEDEELKSQPEPLVVKGKRVAGGPQMIQLSLDGKRLYITTSLYSAWDKQFYPDLIREGSVMLQVDVDTVKGGLKLNPNFLVDFGKEPLGPALAH

SEQ ID NO: 832704 - protein, 393 aa, Homo sapiens; identical to SEQ ID NO: 832701

SEQ ID NO: 832705 - protein, 151 aa, Homo sapiens
RIPTVRRRGDVEALPIQAELDHLRASSHPFSLDPQRPRLTGQLFLGGSIVKGGPVQVLEDEELKSQPEPLVVKGKRVAGGPQMIQLSLDGKRLYITTSLYSAWDKQFYPDLIREGSVMLQVDVDTVKGGLKLNPNFLVDFGKEPLGPALAH

SEQ ID NO: 832706 - protein, 375 aa, Homo sapiens
MPNLKDELHHSGWNTCSSCFGDSTKSRTKLVLPSLISSRIYVVDVGSEPRAPKLHKVIEPKDIHAKCELAFLHTSHCLASGEVMISSLGDVKGNGKGGFVLLDGETFEVKGTWERPGGAAPLGYDFWYQPRHNVMISTEWAAPNVLRDGFNPADVEAGLYGSHLYVWDWQRHEIVQTLSLKDGLIPLEIRFLHNPDAAQGFVGCALSSTIQRFYKNEGGTWSVEKVIQVPPKKVKGWLLPEMPGLITDILLSLDDRFLYFSNWLHGDLRQYDISDPQRPRLTGQLFLGGSIVKGGPVQVLEDEELKSQPEPLVVKRLYITTSLYSAWDKQFYPDLIREGSVMLQVDVDTVKGGLKLNPNFLVDFGKEPLGPALAH

SEQ ID NO: 832707 - protein, 391 aa, Homo sapiens
MPNLKDELHHSGWNTCSSCFGDSTKSRTKLVLPSLISSRIYVVDVGSEPRAPKLHKVIEPKDIHAKCELAFLHTSHCLASGEVMISSLGDVKGNGKGGFVLLDGETFEVKGTWERPGGAAPLGYDFWYQPRHNVMISTEWAAPNVLRDGFNPADVEAGLYGSHLYVWDWQRHEIVQTLSLKDGLIPLEIRFLHNPDAAQGFVGCALSSTIQRFYKNEGGTWSVEKVIQVPPKKVKGWLLPEMPGLITDILLSLDDRFLYFSNWLHGDLRQYDISDPQRPRLTGQLFLGGSIVKGGPVQVLEDEELKSQPEPLVVKGKRVAGGPQMIQLSLDGKRLYITTSLYSAWDKQFYPDLIREGSVMLQVDVDTSPLAQPLPIELRYPGGDCSSDIWI

SEQ ID NO: 832708 - protein, 339 aa, Homo sapiens
MPNLKDELHHSGWNTCSSCFGDSTKSRTKLVLPSLISSRIYVVDVGSEPRAPKLHKVIEPKDIHAKCELAFLHTSHCLASGEVMISSLGDVKGNGKGGFVLLDGETFEVKGTWERPGGAAPLGYDFWYQPRHNVMISTEWAAPNVLRDGFNPADVEAGLYGSHLYVWDWQRHEIVQTLSLKDGLIPLEIRFLHNPDAAQGFVGCALSSTIQRFYKNEGGTWSVEKVIQVPPKKVKGWLLPEMPGLITDILLSLDDRFLYFSNWLHGDLRQYDISDPQRPRLTGQLFLGGSIVKGGPVQVLEDEELKSQPEPLVVKSPLAQPLPIELRYPGGDCSSDIWI

SEQ ID NO: 832709 - protein, 150 aa, Homo sapiens
PSLLSGEQRPLTPAQQTRRDQSVPVGSMATKCGNCGPGYSTPLEAMKGNCPWSESQRPTTDSTAGGGGTSDLAPTLWHTQHFPYLSFPPCRPCCLLSTVQDPGKRSSTCPAFTETQALRPQIIWPLWMLTPSLPSIARLGGAWAPATLRP

SEQ ID NO: 832710 - protein, 208 aa, Homo sapiens
MSSIRFLHNPDAAQGFVGCALSSTIQRFYKNEGGTWSVEKVIQVPPKKVKGWLLPEMPGLITDILLSLDDRFLYFSNWLHGDLRQYDISDPQRPRLTGQLFLGGSIVKGGPVQVLEDEELKSQPEPLVVKGKRVAGGPQMIQLSLDGKRLYITTSLYSAWDKQFYPDLIREGSVMLQVDVDTVKGGLKLNPNFLVDFGKEPLGPALAH

SEQ ID NO: 832711 - protein, 393 aa, Homo sapiens; identical to SEQ ID NO: 832701

SEQ ID NO: 832712 - protein, 482 aa, Homo sapiens
MPNLKDELHHSGWNTCSSCFGDSTKSRTKLVLPSLISSRIYVVDVGSEPRAPKLHKVIEPKDIHAKCELAFLHTSHCLASGEVMISSLGDVKGNGKGGFVLLDGETFEVKGTWERPGGAAPLGYDFWYQPRHNVMISTEWAAPNVLRDGFNPADVEAGENPPMCQQEPWAYIPLLSAPNLPPPHFPPVAPESKRDGIGCTACSDCSSVFLIPPIHFLTFCPDGGPVFAHAFQPLMLSLSSGPTPTPGLYGSHLYVWDWQRHEIVQTLSLKDGLIPLEIRFLHNPDAAQGFVGCALSSTIQRFYKNEGGTWSVEKVIQVPPKKVKGWLLPEMPGLITDILLSLDDRFLYFSNWLHGDLRQYDISDPQRPRLTGQLFLGGSIVKGGPVQVLEDEELKSQPEPLVVKGKRVAGGPQMIQLSLDGKRLYITTSLYSAWDKQFYPDLIREGSVMLQVDVDTVKGGLKLNPNFLVDFGKEPLGPALAH

SEQ ID NO: 832713 - protein, 261 aa, Homo sapiens
MPNLKDELHHSGWNTCSSCFGDSTKSRTKLVLPSLISSRIYVVDVGSEPRAPKLHKVIEPKDIHAKCELAFLHTSHCLASGEVMISSLGDVKGNGKGGFVLLDGETFEVKGTWERPGGAAPLGYDFWYQPRHNVMISTEWAAPNVLRDGFNPADVEAGENPPMCQQEPWAYIPLLSAPNLPPPHFPPVAPESKRDGIGCTACSDCSSVFLIPPIHFLTFCPDWWPSLCPCLPTSDAEPILRPHSHPRTVREPLICMGLAAP

SEQ ID NO: 832714 - protein, 393 aa, Homo sapiens; identical to SEQ ID NO: 832701

SEQ ID NO: 832715 - protein, 393 aa, Homo sapiens; identical to SEQ ID NO: 832701

SEQ ID NO: 832716 - protein, 159 aa, Homo sapiens
CTKCNIKIHETQPLLNLKLDRVMQDIVYELVPGLQDSEEKRIREFYQSRGLDRVTQPTGEEPALSNLGLHFVGSAAHEVVKGKRVAGGPQMIQLSLDGKRLYITTSLYSAWDKQFYPDLIREGSVMLQVDVDTVKGGLKLNPNFLVDFGKEPLGPALAH

SEQ ID NO: 832717 - protein, 382 aa, Homo sapiens
MPNLKDELHHSGWNTCSSCFGDSTKSRTKLVLPSLISSRIYVVDVGSEPRAPKLHKVIEPKDIHAKCELAFLHTSHCLASGEVMISSLGDVKGNGKGGFVLLDGETFEVKGTWERPGGAAPLGYDFWYQPRHNVMISTEWAAPNVLRDGFNPADVEAGLYGSHLYVWDWQRHEIVQTLSLKDGLIPLEIRFLHNPDAAQGFVGCALSSTIQRFYKNEGGTWSVEKVIQVPPKKVKGWLLPEMPGLITDILLSLDDRFLYFSNWLHGDLRQYDISDPQRPRLTGQLFLGGSIVKGGPVQVLEDEELKSQPEPLVVKLSGVRSDQGTYEDYVGGLRVFDKEGNGTVMGAEIRHVLVTLGEKMTEEEVEMLLAGHEDSNGCINYM

SEQ ID NO: 832718 - protein, 110 aa, Homo sapiens
MPNLKDELHHSGWNTCSSCFGDSTKSRTKLVLPSLISSRIYVVDVGSEPRAPKLHKVIEPKDIHAKCELAFSTIQRFYKNEGGTWSVEKVIQVPIELRYPGGDCSSDIWI

SEQ ID NO: 832719 - protein, 1483 aa, Homo sapiens
MAPLLGRKPFPLVKPLPGEEPLFTIPHTQEAFRTREEYEARLERYSERIWTCKSTGSSQLTHKEAWEEEQEVAELLKEEFPAWYEKLVLEMVHHNTASLEKLVDTAWLEIMTKYAVGEECDFEVGKEKMLKVKIVKIHPLEKVDEEATEKKSDGACDSPSSDKENSSQIAQDHQKKETVVKEDEGRRESINDRARRSPRKLPTSLKKGERKWAPPKFLPHKYDVKLQNEDKIISNVPADSLIRTERPPNKEIVRYFIRHNALRAGTGENAPWVVEDELVKKYSLPSKFSDFLLDPYKYMTLNPSTKRKNTGSPDRKPSKKSKTDNSSLSSPLNPKLWCHVHLKKSLSGSPLKVKNSKNSKSPEEHLEEMMKMMSPNKLHTNFHIPKKGPPAKKPGKHSDKPLKAKGRSKGILNGQKSTGNSKSPKKGLKTPKTKMKQMTLLDMAKGTQKMTRAPRNSGGTPRTSSKPHKHLPPAALHLIAYYKENKDREDKRSALSCVISKTARLLSSEDRARLPEELRSLVQKRYELLEHKKRWASMSEEQRKEYLKKKREELKKKLKEKAKERREKEMLERLEKQKRYEDQELTGKNLPAFRLVDTPEGLPNTLFGDVAMVVEFLSCYSGLLLPDAQYPITAVSLMEALSADKGGFLYLNRVLVILLQTLLQDEIAEDYGELGMKLSEIPLTLHSVSELVRLCLRRSDVQEESEGSDTDDNKDSAAFEDNEVQDEFLEKLETSEFFELTSEEKLQILTALCHRILMTYSVQDHMETRQQMSAELWKERLAVLKEENDKKRAEKQKRKEMEAKNKENGKVENGLGKTDRKKEIVKFEPQVDTEAEDMISAVKSRRLLAIQAKKEREIQEREMKVKLERQAEEERIRKHKAAAEKAFQEGIAKAKLVMRRTPIGTDRNHNRYWLFSDEVPGLFIEKGWVHDSIDYRFNHHCKDHTVSGDEDYCPRSKKANLGKNASMNTQHGTATEVAVETTTPKQGQNLWFLCDSQKELDELLNCLHPQGIRESQLKERLEKRYQDIIHSIHLARKPNLGLKSCDGNQELLNFLRSDLIEVATRLQKGGLGYVEETSEFEARVISLEKLKDFGECVIALQASVIKKFLQGFMAPKQKRRKLQSEDSAKTEEVDEEKKMVEEAKVASALEKWKTAIREAQTFSRMHVLLGMLDACIKWDMSAENARCKVCRKKGEDDKLILCDECNKAFHLFCLRPALYEVPDGEWQCPACQPATARRNSRGRNYTEESASEDSEDDESDEEEEEEEEEEEEEDYEVAGLRLRPRKTIRGKHSVIPPAARSGRRPGKKPHSTRRSQPKAPPVDDAEVDELVLQTKRSSRRQSLELQKCEEILHKIVKYRFSWPFREPVTRDEAEDYYDVITHPMDFQTVQNKCSCGSYRSVQEFLTDMKQVFTNAEVYNCRGSHVLSCMVKTEQCLVALLHKHLPGHPYVRRKRKKFPDRLAEDEGDSEPEAVGQSRGRRQKK

SEQ ID NO: 832720 - protein, 1483 aa, Homo sapiens; identical to SEQ ID NO: 832719

SEQ ID NO: 832721 - protein, 1510 aa, Homo sapiens
MAPLLGRKPFPLVKPLPGEEPLFTIPHTQEAFRTREEYEARLERYSERIWTCKSTGSSQLTHKEAWEEEQEVAELLKEEFPAWYEKLVLEMVHHNTASLEKLVDTAWLEIMTKYAVGEECDFEVGKEKMLKVKIVKIHPLEKVDEEATEKKSDGACDSPSSDKENSSQIAQDHQKKETVVKEDEGRRESINDRARRSPRKLPTSLKKGERKWAPPKFLPHKYDVKLQNEDKIISNVPADSLIRTERPPNKEIVRYFIRHNALRAGTGENAPWVVEDELVKKYSLPSKFSDFLLDPYKYMTLNPSTKRKNTGSPDRKPSKKSKTDNSSLSSPLNPKLWCHVHLKKSLSGSPLKVKNSKNSKSPEEHLEEMMKMMSPNKLHTNFHIPKKGPPAKKPGKHSDKPLKAKGRSKGILNGQKSTGNSKSPKKGLKTPKTKMKQMTLLDMAKGTQKMTRAPRNSGGTPRTSSKPHKHLPPAALHLIAYYKENKDREDKRSALSCVISKTARLLSSEDRARLPEELRSLVQKRYELLEHKKRWASMSEEQRKEYLKKKREELKKKLKEKAKERREKEMLERLEKQKRYEDQELTGKNLPAFRLVDTPEGLPNTLFGDVAMVVEFLSCYSGLLLPDAQYPITAVSLMEALSADKGGFLYLNRVLVILLQTLLQDEIAEDYGELGMKLSEIPLTLHSVSELVRLCLRRSDVQEESEGSDTDDNKDSAAFEDNEVQDEFLEKLETSEFFELTSEEKLQILTALCHRILMTYSVQDHMETRQQMSAELWKERLAVLKEENDKKRAEKQKRKEMEAKNKENGKVENGLGKTDRKKEIVKFEPQVDTEAEDMISAVKSRRLLAIQAKKEREIQEREMKVKLERQAEEERIRKHKAAAEKAFQEGIAKAKLVMRRTPIGTDRNHNRYWLFSDEVPGLFIEKGWVHDSIDYRFNHHCKDHTVSGDEDYCPRSKKANLGKNASMNTQHGTATEVAVETTTPKQGQNLWFLCDSQKELDELLNCLHPQGIRESQLKERLEKRYQDIIHSIHLARKPNLGLKSCDGNQELLNFLRSDLIEVATRLQKGGLGYVEETSEFEARVDVKLKKRSVKQEDASGQEFETSLRNIVISLEKLKDFGECVIALQASVIKKFLQGFMAPKQKRRKLQSEDSAKTEEVDEEKKMVEEAKVASALEKWKTAIREAQTFSRMHVLLGMLDACIKWDMSAENARCKVCRKKGEDDKLILCDECNKAFHLFCLRPALYEVPDGEWQCPACQPATARRNSRGRNYTEESASEDSEDDESDEEEEEEEEEEEEEDYEVAGLRLRPRKTIRGKHSVIPPAARSGRRPGKKPHSTRRSQPKAPPVDDAEVDELVLQTKRSSRRQSLELQKCEEILHKIVKYRFSWPFREPVTRDEAEDYYDVITHPMDFQTVQNKCSCGSYRSVQEFLTDMKQVFTNAEVYNCRGSHVLSCMVKTEQCLVALLHKHLPGHPYVRRKRKKFPDRLAEDEGDSEPEAVGQSRGRRQKK

SEQ ID NO: 832722 - protein, 698 aa, Homo sapiens
MATSPNRVLVILLQTLLQDEIAEDYGELGMKLSEIPLTLHSVSELVRLCLRRSDVQEESEGSDTDDNKDSAAFEDNEVQDEFLEKLEEERIRKHKAAAEKAFQEGIAKAKLVMRRTPIGTDRNHNRYWLFSDEVPGLFIEKGWVHDSIDYRFNHHCKDHTVSGDEDYCPRSKKANLGKNASMNTQHGTATEVAVETTTPKQGQNLWFLCDSQKELDELLNCLHPQGIRESQLKERLEKRYQDIIHSIHLARKPNLGLKSCDGNQELLNFLRSDLIEVATRLQKGGLGYVEETSEFEARVISLEKLKDFGECVIALQASVIKKFLQGFMAPKQKRRKLQSEDSAKTEEVDEEKKMVEEAKVASALEKWKTAIREAQTFSRMHVLLGMLDACIKWDMSAENARCKVCRKKGEDDKLILCDECNKAFHLFCLRPALYEVPDGEWQCPACQPATARRNSRGRNYTEESASEDSEDDESDEEEEEEEEEEEEEDYEVAGLRLRPRKTIRGKHSVIPPAARSGRRPGKKPHSTRRSQPKAPPVDDAEVDELVLQTKRSSRRQSLELQKCEEILHKIVKYRFSWPFREPVTRDEAEDYYDVITHPMDFQTVQNKCSCGSYRSVQEFLTDMKQVFTNAEVYNCRGSHVLSCMVKTEQCLVALLHKHLPGHPYVRRKRKKFPDRLAEDEGDSEPEAVGQSRGRRQKK

SEQ ID NO: 832723 - protein, 154 aa, Homo sapiens
  misc_feature (13)..(13): Xaa can be any naturally occurring amino acid
  misc_feature (15)..(15): Xaa can be any naturally occurring amino acid
  misc_feature (21)..(21): Xaa can be any naturally occurring amino acid
  misc_feature (26)..(26): Xaa can be any naturally occurring amino acid
  misc_feature (35)..(37): Xaa can be any naturally occurring amino acid
  misc_feature (39)..(39): Xaa can be any naturally occurring amino acid
  misc_feature (41)..(41): Xaa can be any naturally occurring amino acid
  misc_feature (46)..(46): Xaa can be any naturally occurring amino acid
  misc_feature (50)..(50): Xaa can be any naturally occurring amino acid
  misc_feature (55)..(56): Xaa can be any naturally occurring amino acid
  misc_feature (61)..(62): Xaa can be any naturally occurring amino acid
  misc_feature (64)..(66): Xaa can be any naturally occurring amino acid
  misc_feature (71)..(71): Xaa can be any naturally occurring amino acid
  misc_feature (75)..(75): Xaa can be any naturally occurring amino acid
  misc_feature (80)..(80): Xaa can be any naturally occurring amino acid
  misc_feature (82)..(82): Xaa can be any naturally occurring amino acid
  misc_feature (84)..(84): Xaa can be any naturally occurring amino acid
  misc_feature (93)..(94): Xaa can be any naturally occurring amino acid
  misc_feature (96)..(96): Xaa can be any naturally occurring amino acid
  misc_feature (98)..(98): Xaa can be any naturally occurring amino acid
MSSLGASFVQIKXEXLQFFEXCGGRXFGSVYRAKXXXEXKXVAVKXLLKXKKKAXXINVLXXKXXXQFYGXILEXPNYGXVXKXASLGSLYDXXNXNXSGRWWRFFFFNLYLLYSLVSLSPYSVSSPVFLSGDSISECHTELCIHQHHETVVVF

SEQ ID NO: 832724 - protein, 1483 aa, Homo sapiens; identical to SEQ ID NO: 832719

SEQ ID NO: 832725 - protein, 1372 aa, Homo sapiens
  misc_feature (1372)..(1372): Xaa can be any naturally occurring amino acid
MAPLLGRKPFPLVKPLPGEEPLFTIPHTQEAFRTREEYEARLERYSERIWTCKSTGSSQLTHKEAWEEEQEVAELLKEEFPAWYEKLVLEMVHHNTASLEKLVDTAWLEIMTKYAVGEECDFEVGKEKMLKVKIVKIHPLEKVDEEATEKKSDGACDSPSSDKENSSQIAQDHQKKETVVKEDEGRRESINDRARRSPRKLPTSLKKGERKWAPPKFLPHKYDVKLQNEDKIISNVPADSLIRTERPPNKEIVRYFIRHNALRAGTGENAPWVVEDELVKKYSLPSKFSDFLLDPYKYMTLNPSTKRKNTGSPDRKPSKKSKTDNSSLSSPLNPKLWCHVHLKKSLSGSPLKVKNSKNSKSPEEHLEEMMKMMSPNKLHTNFHIPKKGPPAKKPGKHSDKPLKAKGRSKGILNGQKSTGNSKSPKKGLKTPKTKMKQMTLLDMAKGTQKMTRAPRNSGGTPRTSSKPHKHLPPAALHLIAYYKENKDREDKRSALSCVISKTARLLSSEDRARLPEELRSLVQKRYELLEHKKRWASMSEEQRKEYLKKKREELKKKLKEKAKERREKEMLERLEKQKRYEDQELTGKNLPAFRLVDTPEGLPNTLFGDVAMVVEFLSCYSGLLLPDAQYPITAVSLMEALSADKGGFLYLNRVLVILLQTLLQDEIAEDYGELGMKLSEIPLTLHSVSELVRLCLRRSDVQEESEGSDTDDNKDSAAFEDNEVQDEFLEKLETSEFFELTSEEKLQILTALCHRILMTYSVQDHMETRQQMSAELWKERLAVLKEENDKKRAEKQKRKEMEAKNKENGKVENGLGKTDRKKEIVKFEPQVDTEAEDMISAVKSRRLLAIQAKKEREIQEREMKVKLERQAEEERIRKHKAAAEKAFQEGIAKAKLVMRRTPIGTDRNHNRYWLFSDEVPGLFIEKGWVHDSIDYRFNHHCKDHTVSGDEDYCPRSKKANLGKNASMNTQHGTATEVAVETTTPKQGQNLWFLCDSQKELDELLNCLHPQGIRESQLKERLEKRYQDIIHSIHLARKPNLGLKSCDGNQELLNFLRSDLIEVATRLQKGGLGYVEETSEFEARVISLEKLKDFGECVIALQASVIKKFLQGFMAPKQKRRKLQSEDSAKTEEVDEEKKMVEEAKVASALEKWKTAIREAQTFSRMHVLLGMLDACIKWDMSAENARCKVCRKKGEDDKLILCDECNKAFHLFCLRPALYEVPDGEWQCPACQPATARRNSRGRNYTEESASEDSEDDESDEEEEEEEEEEEEEDYEVAGLRLRPRKTIRGKHSVIPPAARSGRRPGKKPHSTRRSQPKAPPVDDAEVDELVLQTKRSSRRQSLELQKCEEILHKIVKYPPPRGLQLALQGAX

SEQ ID NO: 832726 - protein, 1483 aa, Homo sapiens; identical to SEQ ID NO: 832719

SEQ ID NO: 832727 - protein, 1483 aa, Homo sapiens; identical to SEQ ID NO: 832719

SEQ ID NO: 832728 - protein, 1483 aa, Homo sapiens; identical to SEQ ID NO: 832719

SEQ ID NO: 832729 - protein, 827 aa, Homo sapiens
MSVKTELNIFIINPDELVIDRAIPVDDGTNSFSPGKSQVKRINSKIFQGSEEETDDNKDSAAFEDNEVQDEFLEKLETSEFFELTSEEKLQILTALCHRILMTYSVQDHMETRQQMSAELWKERLAVLKEENDKKRAEKQKRKEMEAKNKENGKVENGLGKTDRKKEIVKFEPQVDTEAEDMISAVKSRRLLAIQAKKEREIQEREMKVKLERQAEEERIRKHKAAAEKAFQEGIAKAKLVMRRTPIGTDRNHNRYWLFSDEVPGLFIEKGWVHDSIDYRFNHHCKDHTVSGDEDYCPRSKKANLGKNASMNTQHGTATEVAVETTTPKQGQNLWFLCDSQKELDELLNCLHPQGIRESQLKERLEKRYQDIIHSIHLARKPNLGLKSCDGNQELLNFLRSDLIEVATRLQKGGLGYVEETSEFEARVISLEKLKDFGECVIALQASVIKKFLQGFMAPKQKRRKLQSEDSAKTEEVDEEKKMVEEAKVASALEKWKTAIREAQTFSRMHVLLGMLDACIKWDMSAENARCKVCRKKGEDDKLILCDECNKAFHLFCLRPALYEVPDGEWQCPACQPATARRNSRGRNYTEESASEDSEDDESDEEEEEEEEEEEEEDYEVAGLRLRPRKTIRGKHSVIPPAARSGRRPGKKPHSTRRSQPKAPPVDDAEVDELVLQTKRSSRRQSLELQKCEEILHKIVKYRFSWPFREPVTRDEAEDYYDVITHPMDFQTVQNKCSCGSYRSVQEFLTDMKQVFTNAEVYNCRGSHVLSCMVKTEQCLVALLHKHLPGHPYVRRKRKKFPDRLAEDEGDSEPEAVGQSRGRRQKK

SEQ ID NO: 832730 - protein, 1483 aa, Homo sapiens; identical to SEQ ID NO: 832719

SEQ ID NO: 832731 - protein, 1483 aa, Homo sapiens; identical to SEQ ID NO: 832719

SEQ ID NO: 832732 - protein, 1206 aa, Homo sapiens
MAPLLGRKPFPLVKPLPGEEPLFTIPHTQEAFRTREEYEARLERYSERIWTCKSTGSSQLTHKEAWEEEQEVAELLKEEFPAWYEKLVLEMVHHNTASLEKLVDTAWLEIMTKYAVGEECDFEVGKEKMLKVKIVKIHPLEKVDEEATEKKSDGACDSPSSDKENSSQIAQDHQKKETVVKEDEGRRESINDRARRSPRKLPTSLKKGERKWAPPKFLPHKYDVKLQNEDKIISNVPADSLIRTERPPNKEIVRYFIRHNALRAGTGENAPWVVEDELVKKYSLPSKFSDFLLDPYKYMTLNPSTKRKNTGSPDRKPSKKSKTDNSSLSSPLNPKLWCHVHLKKSLSGSPLKVKNSKNSKSPEEHLEEMMKMMSPNKLHTNFHIPKKGPPAKKPGKHSDKPLKAKGRSKGILNGQKSTGNSKSPKKGLKTPKTKMKQMTLLDMAKGTQKMTRAPRNSGGTPRTSSKPHKHLPPAALHLIAYYKENKDREDKRSALSCVISKTARLLSSEDRARLPEELRSLVQKRYELLEHKKRWASMSEEQRKEYLKKKREELKKKLKEKAKERREKEMLERLEKQKRYEDQELTGKNLPAFRLVDTPEGLPNTLFGDVAMVVEFLSCYSGLLLPDAQYPITAVSLMEALSADKGGFLYLNRVLVILLQTLLQDEIAEDYGELGMKLSEIPLTLHSVSELVRLCLRRSDVQEESEGSDTDDNKDSAAFEDNEVQDEFLEKLETSEFFELTSEEKLQILTALCHRILMTYSVQDHMETRQQMSAELWKERLAVLKEENDKKRAEKQKRKEMEAKNKENGKVENGLGKTDRKKEIVKFEPQVDTEAEDMISAVKSRRLLAIQAKKEREIQEREMKVKLERQAEEERIRKHKAAAEKAFQEGIAKAKLVMRRTPIGTDRNHNRYWLFSDEVPGLFIEKGWVHDSIDYRFNHHCKDHTVSGDEDYCPRSKKANLGKNASMNTQHGTATEVAVETTTPKQGQNLWFLCDSQKELDELLNCLHPQGIRESQLKERLEKRYQDIIHSIHLARKPNLGLKSCDGNQELLNFLRSDLIEVATRLQKGGLGYVEETSEFEARVISLEKLKDFGECVIALQASVIKKFLQGFMAPKQKRRKLQSEDSAKTEEVDEEKKMVEEAKKEKDEERKKNKEEEEREERRRKGRRGRKKKEEEEEEELRRRRGKKKKKKIEDGRRKKRKKNK

SEQ ID NO: 832733 - protein, 97 aa, Homo sapiens
RGESARGQDQGEKENPMRELRIRKLCLNICVGESGDRLTRAAKVLEQLTGQTPVFSKARYTVRSFGIRRNEKIAVHCTVRGAKAEEILEKGLKVQGV

SEQ ID NO: 832734 - protein, 109 aa, Homo sapiens
SLIKLSIPPPPLFLLSIMAQDQGEKENPMRELRIRKLCLNICVGESGDRLTRAAKVLEQLTGQTPVFSKARYTVRSFGIRRNEKIAVHCTVRGAKAEEILEKGLKVQGV

SEQ ID NO: 832735 - protein, 95 aa, Homo sapiens
SWRRSVVVCGGRLSLMVEAARKLCLNICVGESGDRLTRAAKVLEQLTGQTPVFSKARYTVRSFGIRRNEKIAVHCTVRGAKAEEILEKGLKVQGV

SEQ ID NO: 832736 - protein, 109 aa, Homo sapiens; identical to SEQ ID NO: 832734

SEQ ID NO: 832737 - protein, 107 aa, Homo sapiens
KALGRKLRFLFLLSIMAQDQGEKENPMRELRIRKLCLNICVGESGDRLTRAAKVLEQLTGQTPVFSKARYTVRSFGIRRNEKIAVHCTVRGAKAEEILEKGLKVQGV

SEQ ID NO: 832738 - protein, 109 aa, Homo sapiens; identical to SEQ ID NO: 832734

SEQ ID NO: 832739 - protein, 109 aa, Homo sapiens; identical to SEQ ID NO: 832734

SEQ ID NO: 832740 - protein, 107 aa, Homo sapiens; identical to SEQ ID NO: 832737

SEQ ID NO: 832741 - protein, 103 aa, Homo sapiens
MVQKVHSHSAEMEAQLSQALEELGGQKQRADMLEMELKMPKSQSSSAEQSFLFSREEADTLRLKVEELEGERSRLEEEKRMLEAQLERRALQGGEHIDLGYQI

SEQ ID NO: 832742 - protein, 91 aa, Homo sapiens
APIPERIRTLLELEKAEQSRESGSGRALERRRRRKVDRGGEGDDPAREELEPKRVRSSGPEAEEVQEEEKLEEETGGEGPPAPIPTTGSAG

SEQ ID NO: 832743 - protein, 95 aa, Homo sapiens; identical to SEQ ID NO: 832735

SEQ ID NO: 832744 - protein, 103 aa, Homo sapiens
GRLLLLNSRPRRRQDQGEKENPMRELRIRKLCLNICVGESGDRLTRAAKVLEQLTGQTPVFSKARYTVRSFGIRRNEKIAVHCTVRGAKAEEILEKGLKVQGV

SEQ ID NO: 832745 - protein, 164 aa, Homo sapiens
AGTWICFPLSVAIHGRPSLRGLLRPQPEEYGARNACWPKTSRAVRAKDAGLNSVTFPAIVLGAAPGTCRVLRSTQDQGEKENPMRELRIRKLCLNICVGESGDRLTRAAKVLEQLTGQTPVFSKARYTVRSFGIRRNEKIAVHCTVRGAKAEEILEKGLKVQGV

SEQ ID NO: 832746 - protein, 109 aa, Homo sapiens; identical to SEQ ID NO: 832734

SEQ ID NO: 832747 - protein, 161 aa, Homo sapiens
MGFPEGRPPKFYSNFGNLGPGVFRDSVASNNYKLHRVFFSCCGYAPAFSRPGPFSTGLKGEETPGPSCIMAQDQGEKENPMRELRIRKLCLNICVGESGDRLTRAAKVLEQLTGQTPVFSKARYTVRSFGIRRNEKIAVHCTVRGAKAEEILEKGLKVQGV

SEQ ID NO: 832748 - protein, 109 aa, Homo sapiens; identical to SEQ ID NO: 832734

SEQ ID NO: 832749 - protein, 111 aa, Homo sapiens
MVGTTHPSRELKRRGGDYYKPLGGVYRGGNPHEGHFLSRRGKNFGAPGRFSDSAEPIFTDEGVEIRNGSAPAHSHLQPRTTNPCPLTQPRTPHASTLTRASAVRHHTSRPT

SEQ ID NO: 832750 - protein, 99 aa, Homo sapiens
  misc_feature (18)..(18): Xaa can be any naturally occurring amino acid
VFIPHFFEGSGRNPGYAXNPPLCTRKLCLNICVGESGDRLTRAAKVLEQLTGQTPVFSKARYTVRSFGIRRNEKIAVHCTVRGAKAEEILEKGLKVQGV

SEQ ID NO: 832751 - protein, 109 aa, Homo sapiens; identical to SEQ ID NO: 832734

SEQ ID NO: 832752 - protein, 109 aa, Homo sapiens; identical to SEQ ID NO: 832734

SEQ ID NO: 832753 - protein, 109 aa, Homo sapiens; identical to SEQ ID NO: 832734

SEQ ID NO: 832754 - protein, 109 aa, Homo sapiens; identical to SEQ ID NO: 832734

SEQ ID NO: 832755 - protein, 109 aa, Homo sapiens; identical to SEQ ID NO: 832734

SEQ ID NO: 832756 - protein, 109 aa, Homo sapiens; identical to SEQ ID NO: 832734

SEQ ID NO: 832757 - protein, 109 aa, Homo sapiens; identical to SEQ ID NO: 832734

SEQ ID NO: 832758 - protein, 109 aa, Homo sapiens; identical to SEQ ID NO: 832734

SEQ ID NO: 832759 - protein, 107 aa, Homo sapiens; identical to SEQ ID NO: 832737

SEQ ID NO: 832760 - protein, 97 aa, Homo sapiens; identical to SEQ ID NO: 832733

SEQ ID NO: 832761 - protein, 103 aa, Homo sapiens
AWYRPESLGSIMAQDQGEKENPMRELRIRKLCLNICVGESGDRLTRAAKVLEQLTGQTPVFSKARYTVRSFGIRRNEKIAVHCTVRGAKAEEILEKGLKVQGV

SEQ ID NO: 832762 - protein, 109 aa, Homo sapiens; identical to SEQ ID NO: 832734

SEQ ID NO: 832763 - protein, 103 aa, Homo sapiens; identical to SEQ ID NO: 832761

SEQ ID NO: 832764 - protein, 103 aa, Homo sapiens; identical to SEQ ID NO: 832761

SEQ ID NO: 832765 - protein, 103 aa, Homo sapiens; identical to SEQ ID NO: 832761

SEQ ID NO: 832766 - protein, 103 aa, Homo sapiens; identical to SEQ ID NO: 832761

SEQ ID NO: 832767 - protein, 103 aa, Homo sapiens
SGTSKLFLLSIMAQDQGEKENPMRELRIRKLCLNICVGESGDRLTRAAKVLEQLTGQTPVFSKARYTVRSFGIRRNEKIAVHCTVRGAKAEEILEKGLKVQGV

SEQ ID NO: 832768 - protein, 103 aa, Homo sapiens; identical to SEQ ID NO: 832761

SEQ ID NO: 832769 - protein, 103 aa, Homo sapiens; identical to SEQ ID NO: 832761

SEQ ID NO: 832770 - protein, 75 aa, Homo sapiens
SLIKLSIPPPPLFLLSIMAQDQGEKENPMRELRIRKLCLNICVGESGDRLTRAAKVLEQLTGQTPVFSKGAGSMS

SEQ ID NO: 832771 - protein, 126 aa, Homo sapiens
AWYRPESLGSIMAQDQGEKENPMRELRIRKLCLNICVGESGDRLTRAAKVLEQLTGQTPVFSKARYTVRSFGIRRNEKIAVHCTVRGAKAEEILEKGLKREYELRFIGRGDKPTEPGDSWLSKIES

SEQ ID NO: 832772 - protein, 103 aa, Homo sapiens; identical to SEQ ID NO: 832761

SEQ ID NO: 832773 - protein, 161 aa, Homo sapiens; identical to SEQ ID NO: 832747

SEQ ID NO: 832774 - protein, 106 aa, Homo sapiens
TGLSRGRVESAEAIMAQDQGEKENPMRELRIRKLCLNICVGESGDRLTRAAKVLEQLTGQTPVFSKARYTVRSFGIRRNEKIAVHCTVRGAKAEEILEKGLKVQGV

SEQ ID NO: 832775 - protein, 102 aa, Homo sapiens
WYVIFNSTGGRLIVHCHALWFSYSTCARKLCLNICVGESGDRLTRAAKVLEQLTGQTPVFSKARYTVRSFGIRRNEKIAVHCTVRGAKAEEILEKGLKVQGV

SEQ ID NO: 832776 - protein, 105 aa, Homo sapiens
GSYIMSRDLCEVQNPEWLVTWHTGHSGSPVLQLAESEEVQLPASHIVEIDIHYCAGPWFIRIYDIARYTVRSFGIRRNEKIAVHCTVRGAKAEEILEKGLKVQGV

SEQ ID NO: 832777 - protein, 112 aa, Homo sapiens
GRLLLLNSRPRRRGNTSIWGIKYDPSIGIYGLDFYVVLGRPGFSIADKKRRTGCIGAKHRISKEEAMRWFQQKYDGIILPGQIKFPVSIQKRAINKFSGEILQNKKVDAAAN

SEQ ID NO: 832778 - protein, 102 aa, Homo sapiens
LVAWLIVWLLEITESQSADAEPPPPQEAAGCIGAKHRISKEEAMRWFQQKYDGIILPGQIKFPVSIQKRAINKFSGEIVQPNEPRQEPHKEPPDEPLYSARN

SEQ ID NO: 832779 - protein, 103 aa, Homo sapiens; identical to SEQ ID NO: 832767

SEQ ID NO: 832780 - protein, 106 aa, Homo sapiens; identical to SEQ ID NO: 832774

SEQ ID NO: 832781 - protein, 109 aa, Homo sapiens; identical to SEQ ID NO: 832734

SEQ ID NO: 832782 - protein, 88 aa, Homo sapiens
AEQASSSCSPSWRRKLCLNICVGESGDRLTRAAKVLEQLTGQTPVFSKARYTVRSFGIRRNEKIAVHCTVRGAKAEEILEKGLKVQGV

SEQ ID NO: 832783 - protein, 109 aa, Homo sapiens; identical to SEQ ID NO: 832734

SEQ ID NO: 832784 - protein, 109 aa, Homo sapiens; identical to SEQ ID NO: 832734

SEQ ID NO: 832785 - protein, 103 aa, Homo sapiens; identical to SEQ ID NO: 832761

SEQ ID NO: 832786 - protein, 103 aa, Homo sapiens; identical to SEQ ID NO: 832761

SEQ ID NO: 832787 - protein, 103 aa, Homo sapiens; identical to SEQ ID NO: 832761

SEQ ID NO: 832788 - protein, 103 aa, Homo sapiens; identical to SEQ ID NO: 832761

SEQ ID NO: 832789 - protein, 164 aa, Homo sapiens; identical to SEQ ID NO: 832745

SEQ ID NO: 832790 - protein, 120 aa, Homo sapiens
AWYRPESLGSIMAQDQGEKENPMRELRIRKLCLNICVGESGDRLTRAAKVLEQLTGQTPVFSKARYTVRSFGIRRNEKIAVHCTVRGAKAEEILEKGLKGPEFSYEPPLVLTWFGRPMSC

SEQ ID NO: 832791 - protein, 116 aa, Homo sapiens
MEEYHRHCDEVGFNAEEAHNIVKECVDGVLGGEDYNHNNINQWTASIVEQSLTHLVKLGKAYKYIVTCAVVQKSAYGFHTASSCFWDTTSDGTCTVRWENRTMNCIVNVFAIAIVL

SEQ ID NO: 832792 - protein, 141 aa, Homo sapiens
AGTVLSRIIGALPACRSAPGRAGATMEEYHRHCDEVGFNAEEAHNIVKECVDGVLGGEDYNHNNINQWTASIVEQSLTHLVKLGKAYKYIVTCAVVQKSAYGFHTASSCFWDTTSDGTCTVRWENRTMNCIVNVFAIAIVL

SEQ ID NO: 832793 - protein, 118 aa, Homo sapiens
GNKYHSFAIRYKYSSDYDHTRLLRRYPVVYVESDAWKLPIKRMPDAGRGNCNCWYPDGAQESYKLGSHASGRHRYRRPIQIAVSPDPAHSMWNKHLSDAYYGHMSLLSTIVVNVLCKC

SEQ ID NO: 832794 - protein, 116 aa, Homo sapiens; identical to SEQ ID NO: 832791

SEQ ID NO: 832795 - protein, 116 aa, Homo sapiens; identical to SEQ ID NO: 832791

SEQ ID NO: 832796 - protein, 174 aa, Homo sapiens
MRIPETLADELVGGGGRADANMQIFVKTLTGKTITLEVEPSDTIENVKAKIQDKEGIPPDQQRLIFAGKQLEDGRTLSDYNIQKESTLHLGVAPAKVALLSLLSASLPRNTTADKMILPQVLCFAFHPRAVQLAARRSVVHTNNLRSQEEGSNKVVLSLKGSLLAPGPVALEPQ

SEQ ID NO: 832797 - protein, 200 aa, Homo sapiens
MCVVGDGFPSRLAAGAACADQDLAAVEEGGTAFREDGSSKMMPKDANMQIFVKTLTGKTITLEVEPSDTIENVKAKIQDKEGIPPDQQRLIFAGKQLEDGRTLSDYNIQKESTLHLGVAPAKVALLSLLSASLPRNTTADKMILPQVLCFAFHPRAVQLAARRSVVHTNNLRSQEEGSNKVVLSLKGSLLAPGPVALEPQ

SEQ ID NO: 832798 - protein, 153 aa, Homo sapiens
MQIFVKTLTGKTITLEVEPSDTIENVKAKIQDKEGIPPDQQRLIFAGKQLEDGRTLSDYNIQKESTLHLGVAPAKVALLSLLSASLPRNTTADKMILPQVLCFAFHPRAVQLAARRSVVHTNNLRSQEEGSNKVVLSLKGSLLAPGPVALEPQ

SEQ ID NO: 832799 - protein, 111 aa, Homo sapiens
MQIFVKTLTGKTITLEVEPSDTIENVKAKIQDKEGIPPDQQRLIFAGKQLEDGRTLSDYNIQKESTLHLGVAPAKVALLSLLSASLPRNTTADKMILPQAMLAFTLVPGTE

SEQ ID NO: 832800 - protein, 153 aa, Homo sapiens; identical to SEQ ID NO: 832798

SEQ ID NO: 832801 - protein, 121 aa, Homo sapiens
LYRIFVLVTPWTPDLDAIFFFFSEAAELVGGGGRAGSRRAESGLGAAGGCRGLGGRRGGPELAHAGQSRQGGWAGLARPRLGAQTGAQEASAVLERSLPALPASVTPRGLGREEVLGADPS

SEQ ID NO: 832802 - protein, 153 aa, Homo sapiens; identical to SEQ ID NO: 832798

SEQ ID NO: 832803 - protein, 121 aa, Homo sapiens; identical to SEQ ID NO: 832801

SEQ ID NO: 832804 - protein, 191 aa, Homo sapiens
LYRIFVLVTPWTPDLDAIFFFFSEAAELVGGGGRADANMQIFVKTLTGKTITLEVEPSDTIENVKAKIQDKEGIPPDQQRLIFAGKQLEDGRTLSDYNIQKESTLHLGVAPAKVALLSLLSASLPRNTTADKMILPQVLCFAFHPRAVQLAARRSVVHTNNLRSQEEGSNKVVLSLKGSLLAPGPVALEPQ

SEQ ID NO: 832805 - protein, 153 aa, Homo sapiens; identical to SEQ ID NO: 832798

SEQ ID NO: 832806 - protein, 153 aa, Homo sapiens; identical to SEQ ID NO: 832798

SEQ ID NO: 832807 - protein, 153 aa, Homo sapiens; identical to SEQ ID NO: 832798

SEQ ID NO: 832808 - protein, 153 aa, Homo sapiens; identical to SEQ ID NO: 832798

SEQ ID NO: 832809 - protein, 121 aa, Homo sapiens; identical to SEQ ID NO: 832801

SEQ ID NO: 832810 - protein, 121 aa, Homo sapiens; identical to SEQ ID NO: 832801

SEQ ID NO: 832811 - protein, 128 aa, Homo sapiens
VKAKIQDKEGIPPDQQRLIFAGKQLEDGRTLSDYNIQKESTLHLGVAPAKVALLSLLSASLPRNTTADKMILPQVLCFAFHPRAVQLAARRSVVHTNNLRSQEEGSNKVVLSLKGSLLAPGPVALEPQ

SEQ ID NO: 832812 - protein, 184 aa, Homo sapiens
CSVRKRFRRRLGGFRFRYLLFLQRGGRADANMQIFVKTLTGKTITLEVEPSDTIENVKAKIQDKEGIPPDQQRLIFAGKQLEDGRTLSDYNIQKESTLHLGVAPAKVALLSLLSASLPRNTTADKMILPQVLCFAFHPRAVQLAARRSVVHTNNLRSQEEGSNKVVLSLKGSLLAPGPVALEPQ

SEQ ID NO: 832813 - protein, 181 aa, Homo sapiens
MQIFVKTLTGKTITLEVEPSDTIENVKAKIQDKEGIPPDQQRLIFAGKQLEDGRTLSDYNIQKESTLHLGVAPAKVALLSLLSASLPRNTTADKMILPQVCVLRCLGGCGGCRSRGMPSPTPPVSVQVLCFAFHPRAVQLAARRSVVHTNNLRSQEEGSNKVVLSLKGSLLAPGPVALEPQ

SEQ ID NO: 832814 - protein, 115 aa, Homo sapiens
MQIFVKTLTGKTITLEVEPSDTIENVKAKIQDKEGIPPDQQRLIFAGKQLEDGRTLSDYNIQKESTLHLGVAPAKVALLSLLSASLPRNTTADKMILPQKCGSHQQPAFPRRRFK

SEQ ID NO: 832815 - protein, 181 aa, Homo sapiens; identical to SEQ ID NO: 832813

SEQ ID NO: 832816 - protein, 153 aa, Homo sapiens; identical to SEQ ID NO: 832798

SEQ ID NO: 832817 - protein, 186 aa, Homo sapiens
  misc_feature (1)..(1): Xaa can be any naturally occurring amino acid
XHGIWDAGGREDANMQIFVKTLTGKTITLEVEPSDTIENVKAKIQDKEGIPPDQQRLIFAGKQLEDGRTLSDYNIQKESTLHLGVAPAKVALLSLLSASLPRNTTADKMILPQVLCFAFHPRAVQLAARRSVVHTNNLRSQEEGSNKTWSRYVAQNGFALGPSSSAAASQSAGITGVRHLAGPCFD

SEQ ID NO: 832818 - protein, 153 aa, Homo sapiens; identical to SEQ ID NO: 832798

SEQ ID NO: 832819 - protein, 153 aa, Homo sapiens; identical to SEQ ID NO: 832798

SEQ ID NO: 832820 - protein, 153 aa, Homo sapiens; identical to SEQ ID NO: 832798

SEQ ID NO: 832821 - protein, 153 aa, Homo sapiens; identical to SEQ ID NO: 832798

SEQ ID NO: 832822 - protein, 153 aa, Homo sapiens; identical to SEQ ID NO: 832798

SEQ ID NO: 832823 - protein, 153 aa, Homo sapiens; identical to SEQ ID NO: 832798

SEQ ID NO: 832824 - protein, 153 aa, Homo sapiens; identical to SEQ ID NO: 832798

SEQ ID NO: 832825 - protein, 184 aa, Homo sapiens; identical to SEQ ID NO: 832812

SEQ ID NO: 832826 - protein, 172 aa, Homo sapiens
MQIFVKTLTGKTITLEVEPSDTIENVKAKIQDKEGIPPDQQRLIFAGKQLEDGRTLSDYNIQKESTLHLGVAPAKVALLSLLSASLPRNTTADKMILPQVLCFAFHPRAVQLAARRSVVHTNNLRSQEEGSNKTWSRYVAQNGFALGPSSSAAASQSAGITGVRHLAGPCFD

SEQ ID NO: 832827 - protein, 174 aa, Homo sapiens; identical to SEQ ID NO: 832796

SEQ ID NO: 832828 - protein, 173 aa, Homo sapiens
LYRIFVLVTPWTPDLDAIFFFFSEAAELVGGGGRADANMQIFVKTLTGKTITLEVEPSDTIENVKAGKQLEDGRTLSDYNIQKESTLHLGVAPAKVALLSLLSASLPRNTTADKMILPQVLCFAFHPRAVQLAARRSVVHTNNLRSQEEGSNKVVLSLKGSLLAPGPVALEPQ

SEQ ID NO: 832829 - protein, 121 aa, Homo sapiens; identical to SEQ ID NO: 832801

SEQ ID NO: 832830 - protein, 69 aa, Homo sapiens
  misc_feature (68)..(68): Xaa can be any naturally occurring amino acid
LYRIFVLVTPWTPDLDAIFFFFSEAAELVGGGGRADANMQIFVKTLTGKTITLEVEPSDTIENVKCGXL

SEQ ID NO: 832831 - protein, 203 aa, Homo sapiens
CCVARINFGSWIAIPPVEKMVCEGKRSASCPCFFLLTAKFYWILTMMQRTHSQEYAHSIRVDGDIILGGLFPVHAKGERGVPCGELKKEKGIHRLEAMLYAIDQINKDPDLLSNITLGVRILDTCSRDTYALEQSLTFVQALIEKDASDVKCANGDPPIFTKPDKISGVIGAAASSVSIMVANILRLFKVGKGIVFLTIVKEQ

SEQ ID NO: 832832 - protein, 927 aa, Homo sapiens
CCVARINFGSWIAIPPVEKMVCEGKRSASCPCFFLLTAKFYWILTMMQRTHSQEYAHSIRVDGDIILGGLFPVHAKGERGVPCGELKKEKGIHRLEAMLYAIDQINKDPDLLSNITLGVRILDTCSRDTYALEQSLTFVQALIEKDASDVKCANGDPPIFTKPDKISGVIGAAASSVSIMVANILRLFKIPQISYASTAPELSDNTRYDFFSRVVPPDSYQAQAMVDIVTALGWNYVSTLASEGNYGESGVEAFTQISREIGGVCIAQSQKIPREPRPGEFEKIIKRLLETPNARAVIMFANEDDIRRILEAAKKLNQSGHFLWIGSDSWGSKIAPVYQQEEIAEGAVTILPKRASIDGFDRYFRSRTLANNRRNVWFAEFWEENFGCKLGSHGKRNSHIKKCTGLERIARDSSYEQEGKVQFVIDAVYSMAYALHNMHKDLCPGYIGLCPRMSTIDGKELLGYIRAVNFNGSAGTPVTFNENGDAPGRYDIFQYQITNKSTEYKVIGHWTNQLHLKVEDMQWAHREHTHPASVCSLPCKPGERKKTVKGVPCCWHCERCEGYNYQVDELSCELCPLDQRPNMNRTGCQLIPIIKLEWHSPWAVVPVFVAILGIIATTFVIVTFVRYNDTPIVRASGRELSYVLLTGIFLCYSITFLMIAAPDTIICSFRRVFLGLGMCFSYAALLTKTNRIHRIFEQGKKSVTAPKFISPASQLVITFSLISVQLLGVFVWFVVDPPHIIIDYGEQRTLDPEKARGVLKCDISDLSLICSLGYSILLMVTCTVYAIKTRGVPETFNEAKPIGFTMYTTCIIWLAFIPIFFGTAQSAEKMYIQTTTLTVSMSLSASVSLGMLYMPKVYIIIFHPEQNVQKRKRSFKAVVTAATMQSKLIQKGNDRPNGEVKSELCESLETNSKSSVEFPMVKSGSTS

SEQ ID NO: 832833 - protein, 109 aa, Homo sapiens
DSSLFPPLQMYMYIQTTTLTVSMSLSASVSLGMLYMPKVYIIIFHPEQNVQKRKRSFKAVVTAATMQSKLIQKGNDRPNGEVKSELCESLETNTSSTKTTYISYSNHSI

SEQ ID NO: 832834 - protein, 117 aa, Homo sapiens
  misc_feature (18)..(18): Xaa can be any naturally occurring amino acid
TYKQLPTINTPANKVKSXPMYIQTTTLTVSMSLSASVSLGMLYMPKVYIIIFHPEQNVQKRKRSFKAVVTAATMQSKLIQKGNDRPNGEVKSELCESLETNSKSSVEFPMVKSGSTS

SEQ ID NO: 832835 - protein, 117 aa, Homo sapiens
  misc_feature (11)..(12): Xaa can be any naturally occurring amino acid
GGGTTPINRKXXYSHPEYFMYIQTTTLTVSMSLSASVSLGMLYMPKVYIIIFHPEQNVQKRKRSFKAVVTAATMQSKLIQKGNDRPNGEVKSELCESLETNSKSSVEFPMVKSGSTS

SEQ ID NO: 832836 - protein, 927 aa, Homo sapiens
CCVARINFGSWIAIPPVEKMVCEGKRSASCPCFFLLTAKFYWILTMMQRTHSQEYAHSIRVDGDIILGGLFPVHAKGERGVPCGELKKEKGIHRLEAMLYAIDQINKDPDLLSNITLGVRILDTCSRDTYALEQSLTFVQALIEKDASDVKCANGDPPIFTKPDKISGVIGAAASSVSIMVANILRLFKIPQISYASTAPELSDNTRYDFFSRVVPPDSYQAQAMVDIVTALGWNYVSTLASEGNYGESGVEAFTQISREIGGVCIAQSQKIPREPRPGEFEKIIKRLLETPNARAVIMFANEDDIRRILEAAKKLNQSGHFLWIGSDSWGSKIAPVYQQEEIAEGAVTILPKRASIDGFDRYFRSRTLANNRRNVWFAEFWEENFGCKLGSHGKRNSHIKKCTGLERIARDSSYEQEGKVQFVIDAVYSMAYALHNMHKDLCPGYIGLCPRMSTIDGKELLGYIRAVNFNGSAGTPVTFNENGDAPGRYDIFQYQITNKSTEYKVIGHWTNQLHLKVEDMQWAHREHTHPASVCSLPCKPGERKKTVKGVPCCWHCERCEGYNYQVDELSCELCPLDQRPNMNRTGCQLIPIIKLEWHSPWAVVPVFVAILGIIATTFVIVTFVRYNDTPIVRASGRELSYVLLTGIFLCYSITFLMIAAPDTIICSFRRVFLGLGMCFSYAALLTKTNRIHRIFEQGKKSVTAPKFISPASQLVITFSLISVQLLGVFVWFVVDPPHIIIDYGEQRTLDPEKARGVLKCDISDLSLICSLGYSILLMVTCTVYAIKTRGVPETFNEAKPIGFTMYTTCIIWLAFIPIFFGTAQSAEKMYIQTTTLTVSMSLSASVSLGMLYMPKVYIIIFHPEQNVQKRKRSFKAVVTAATMQSKLIQKGNDRPNGEVKSELCESLETNTSSTKTTYISYSNHSI

SEQ ID NO: 832837 - protein, 951 aa, Homo sapiens
CCVARINFGSWIAIPPVEKMVCEGKRSASCPCFFLLTAKFYWILTMMQRTHSQEYAHSIRVDGDIILGGLFPVHAKGERGVPCGELKKEKGIHRLEAMLYAIDQINKDPDLLSNITLGVRILDTCSRDTYALEQSLTFVQALIEKDASDVKCANGDPPIFTKPDKISGVIGAAASSVSIMVANILRLFKIPQISYASTAPELSDNTRYDFFSRVVPPDSYQAQAMVDIVTALGWNYVSTLASEGNYGESGVEAFTQISREIGGVCIAQSQKIPREPRPGEFEKIIKRLLETPNARAVIMFANEDDIRRILEAAKKLNQSGHFLWIGSDSWGSKIAPVYQQEEIAEGAVTILPKRASIDGFDRYFRSRTLANNRRNVWFAEFWEENFGCKLGSHGKRNSHIKKCTGLERIARDSSYEQEGKVQFVIDAVYSMAYALHNMHKDLCPGYIGLCPRMSTIDGKELLGYIRAVNFNGCRRGIQMSLPWPTLFTPSFSSSVGSAGTPVTFNENGDAPGRYDIFQYQITNKSTEYKVIGHWTNQLHLKVEDMQWAHREHTHPASVCSLPCKPGERKKTVKGVPCCWHCERCEGYNYQVDELSCELCPLDQRPNMNRTGCQLIPIIKLEWHSPWAVVPVFVAILGIIATTFVIVTFVRYNDTPIVRASGRELSYVLLTGIFLCYSITFLMIAAPDTIICSFRRVFLGLGMCFSYAALLTKTNRIHRIFEQGKKSVTAPKFISPASQLVITFSLISVQLLGVFVWFVVDPPHIIIDYGEQRTLDPEKARGVLKCDISDLSLICSLGYSILLMVTCTVYAIKTRGVPETFNEAKPIGFTMYTTCIIWLAFIPIFFGTAQSAEKMYIQTTTLTVSMSLSASVSLGMLYMPKVYIIIFHPEQNVQKRKRSFKAVVTAATMQSKLIQKGNDRPNGEVKSELCESLETNTSSTKTTYISYSNHSI

SEQ ID NO: 832838 - protein, 120 aa, Homo sapiens
LFCIWLGIGGGGGVFRVTPDTFMYIQTTTLTVSMSLSASVSLGMLYMPKVYIIIFHPEQNVQKRKRSFKAVVTAATMQSKLIQKGNDRPNGEVKSELCESLETNTSSTKTTYISYSNHSI

SEQ ID NO: 832839 - protein, 300 aa, Homo sapiens
CCVARINFGSWIAIPPVEKMVCEGKRSASCPCFFLLTAKFYWILTMMQRTHSQEYAHSIRVDGDIILGGLFPVHAKGERGVPCGELKKEKGIHRLEAMLYAIDQINKDPDLLSNITLGVRILDTCSRDTYALEQSLTFVQALIEKDASDVKCANGDPPIFTKPDKISGVIGAAASSVSIMVANILRLFKIPQISYASTAPELSDNTRYDFFSRVVPPDSYQAQAMVDIVTALGWNYVSTLASEGNYGESGVEAFTQISREIGYPSLFGIQGCLHECFAILCQVVYQFLLLMQLSDAQTVY

SEQ ID NO: 832840 - protein, 203 aa, Homo sapiens
MLKAGRDRGGLPAGKMALAMLVLVVSPWSAARGVLRNYWERLLRKLPQSRPGFPSPPWGPALAVQGPAMFTEPANDTSGSKENSSLLDSIFWMAAPKNRRTIEVNRCRRRNPQKLIKVKNNIDVCPECGHLKQKHVLCAYCYEKVCKETAEIRRQIGKQEGGPFKAPTIETVVLYTGETPSEQDQGKRIIERDRKRPSWFTQN

SEQ ID NO: 832841 - protein, 135 aa, Homo sapiens
RPPTTTKFAAASTENSSLLDSIFWMAAPKNRRTIEVNRCRRRNPQKLIKVKNNIDVCPECGHLKQKHVLCAYCYEKVCKETAEIRRQIGKQEGGPFKAPTIETVVLYTGETPSEQDQGKRIIERDRKRPSWFTQN

SEQ ID NO: 832842 - protein, 185 aa, Homo sapiens
MLKAGRDRGGLPAGKMALAMLVLVVSPWSAARGVLRNYWERLLRKLPQSRPGFPSPPWGPALAVQGPAMFTEPANDTSGSKENSSLLDSIFWMAAPKNRRTIEVNRCRRRNPQKLIKVKNNIDVCPECGHLKQKHVLCAYCYGGPFKAPTIETVVLYTGETPSEQDQGKRIIERDRKRPSWFTQN

SEQ ID NO: 832843 - protein, 138 aa, Homo sapiens
MLKAGRDRGGLPAGKMALAMLVLVVSPWSAARGVLRNYWERLLRKLPQSRPGFPSPPWGPALAVQGPAMFTEPANDTSGSKENSSLLDSIFWMAAPKNRRTIEVNRCRRRNPQKLIKVKVFSLPVKVRWNWMVYDDLM

SEQ ID NO: 832844 - protein, 254 aa, Homo sapiens
MDNYADLSDTELTTLLRRYNIPHGPVVGSTRRLYEKKIFEYETQRRRLSPPSSSAASSYSFSDLNSTRGDADMYDLPKKEDALLYQSKGYNDDYYEESYFTTRTYGEPESAGPSRAVRQSVTSFPDADAFHHQVHDDDLLSSSEEECKDRERPMYGRDSAYQSITHYRPVSASRSSLDLSYYPTSSSTSFMSSSSSSSSWLTRRAIRPENRAPGAGLGQDRQVPLWGQLLLFLVFVIVLFFIYHFMQAEEGNPF

SEQ ID NO: 832845 - protein, 254 aa, Homo sapiens; identical to SEQ ID NO: 832844

SEQ ID NO: 832846 - protein, 254 aa, Homo sapiens; identical to SEQ ID NO: 832844

SEQ ID NO: 832847 - protein, 182 aa, Homo sapiens [sequence omitted]

SEQ ID NO: 832848 - protein, 219 aa, Homo sapiens
MDNYADLSDTELTTLLRRYNIPHGPVVDLNSTRGDADMYDLPKKEDALLYQSKGYNDDYYEESYFTTRTYGEPESAGPSRAVRQSVTSFPDADAFHHQVHDDDLLSSSEEECKDRERPMYGRDSAYQSITHYRPVSASRSSLDLSYYPTSSSTSFMSSSSSSSSWLTRRAIRPENRAPGAGLGQDRQVPLWGQLLLFLVFVIVLFFIYHFMQAEEGNPF

SEQ ID NO: 832849 - protein, 325 aa, Homo sapiens
MDNYADLSDTELTTLLRRYNIPHGPVVGSTRRLYEKKIFEYETQRRRLSPPSSSAASSYSFSDLNSTRGDADMYDLPKKEDALLYQSKGKAGVGGHAGTFTRLRQGPRSQGGPETSVPTTPAALGGRNCYRSRNGIQIRAIRPGGAHRCPLCYRCPPSQGYNDDYYEESYFTTRTYGEPESAGPSRAVRQSVTSFPDADAFHHQVHDDDLLSSSEEECKDRERPMYGRDSAYQSITHYRPVSASRSSLDLSYYPTSSSTSFMSSSSSSSSWLTRRAIRPENRAPGAGLGQDRQVPLWGQLLLFLVFVIVLFFIYHFMQAEEGNPF

SEQ ID NO: 832850 - protein, 191 aa, Homo sapiens
MDNYADLSDTELTTLLRRYNIPHGPVVGSTRRLYEKKIFEYETQRRRLSPPSSSAASSYSFSDLNSTRGDADMYDLPKKEDALLYQSKGYNDDYYEESYFTTRTYGEPESAGPSRAVRQSVTSFPDADAFHHQVHDDDLLSSSEEECKDRERPMYGRDSAYQSITHYRPVSASRSSLDLSYYPTSSSLSFC

SEQ ID NO: 832851 - protein, 192 aa, Homo sapiens
MVRGLVVNRPTQIFDLPEEDALLYRAGYNDDYYEESYFTTRTYGEPESAGPSRAVRQSVTSFPDADAFHHQVHDDDLLSSSEEECKDRERPMYGRDSAYQSITHYRPVSASRSSLDLSYYPTSSSTSFMSSSSSSSSWLTRRAIRPENRAPGAGLGQDRQVPLWGQLLLFLVFVIVLFFIYHFMQAEEGNPF

SEQ ID NO: 832852 - protein, 173 aa, Homo sapiens
  misc_feature (11)..(11): Xaa can be any naturally occurring amino acid
FLLGGRWASQXECLLPLPCPTRTYGEPESAGPSRAVRQSVTSFPDADAFHHQVHDDDLLSSSEEECKDRERPMYGRDSAYQSITHYRPVSASRSSLDLSYYPTSSSTSFMSSSSSSSSWLTRRAIRPENRAPGAGLGQDRQVPLWGQLLLFLVFVIVLFFIYHFMQAEEGNPF

SEQ ID NO: 832853 - protein, 175 aa, Homo sapiens
MDNYADLSDTELTTLLRRYNIPHGPVVGSTRRLYEKKIFEYETQRRRLSPPSSSAASSYSFSDLNSTRGDADMYDLPKKEDALLYQSKGYNDDYYEESYFTTRTYGEPESAGPSRAVRQSVTSFPDADAFHHQVHDDDLLSSSEEECKDSVLLGLGWARIARSRSGASCCFSWSL

SEQ ID NO: 832854 - protein, 137 aa, Homo sapiens
MVALPASPLALTLFLQVHDDDLLSSSEEECKDRERPMYGRDSAYQSITHYRPVSASRSSLDLSYYPTSSSTSFMSSSSSSSSWLTRRAIRPENRAPGAGLGQDRQVPLWGQLLLFLVFVIVLFFIYHFMQAEEGNPF

SEQ ID NO: 832855 - protein, 302 aa, Homo sapiens
MDNYADLSDTELTTLLRRYNIPHGPVVGSTRRLYEKKIFEYETQRRRLSPPSSSAASSYSFSDLNSTRGDADMYDLPKKEDALLYQSKGYNDDYYEESYFTTRTYGEPESAGPSRAVRQSVTSFPDADAFHHQVHDDDLLSSSEEECKDRERPMYGRDSAYQSITHYRPVSASRSSLDLSYYPTSSSTSFMSSSSSSSSWLTRRAIRPENRAPGAGLGQDRQVPLWGQLLLFLVFVIVLFFIYHFMQVRGPLKGQRAWAKPGGEPVSSTGGGPRGLFVGRHPKFPFSGGTRLLAFGGNPFAS

SEQ ID NO: 832856 - protein, 254 aa, Homo sapiens; identical to SEQ ID NO: 832844

SEQ ID NO: 832857 - protein, 182 aa, Homo sapiens [sequence omitted]

SEQ ID NO: 832858 - protein, 289 aa, Homo sapiens
  misc_feature (53)..(53): Xaa can be any naturally occurring amino acid
IALVYVERVRCARAAPAVSRSVSRCSRRAGLRLSPHRQTYRFRIDDTCWRRYXHPARACSRYRSTRRRSSERLPREPKERRRLSPPSSSAASSYSFSDLNSTRGDADMYDLPKKEDALLYQSKGYNDDYYEESYFTTRTYGEPESAGPSRAVRQSVTSFPDADAFHHQVHDDDLLSSSEEECKDRERPMYGRDSAYQSITHYRPVSASRSSLDLSYYPTSSSTSFMSSSSSSSSWLTRRAIRPENRAPGAGLGQDRQVPLWGQLLLFLVFVIVLFFIYHFMQAEEGNPF

SEQ ID NO: 832859 - protein, 303 aa, Homo sapiens
MDNYADLSDTELTTLLRRYNIPHGPVVGSTRRLYEKKIFEYETQRRRLSPPSSSAASSYSFSGESLACGDSLGRGEDGVARVWQGGRSRAALEKGEGSLGGQTVLSPPFNPDLNSTRGDADMYDLPKKEDALLYQSKGYNDDYYEESYFTTRTYGEPESAGPSRAVRQSVTSFPDADAFHHQVHDDDLLSSSEEECKDRERPMYGRDSAYQSITHYRPVSASRSSLDLSYYPTSSSTSFMSSSSSSSSWLTRRAIRPENRAPGAGLGQDRQVPLWGQLLLFLVFVIVLFFIYHFMQAEEGNPF

SEQ ID NO: 832860 - protein, 280 aa, Homo sapiens
MDNYADLSDTELTTLLRRYNIPHGPVVGSTRRLYEKKIFEYETQRRRLSPPSSSAASSYSFSDLNSTRGDADMYDLPKKEDALLYQSKGYNDDYYEESYFTTRTYGEPESAGPSRAVRQSVTSFPDADAFHHQVHDDDLLSSSEEECKDRCVVGEPRDGLVLGPAPGPLAPLFCLRERPMYGRDSAYQSITHYRPVSASRSSLDLSYYPTSSSTSFMSSSSSSSSWLTRRAIRPENRAPGAGLGQDRQVPLWGQLLLFLVFVIVLFFIYHFMQAEEGNPF

SEQ ID NO: 832861 - protein, 351 aa, Homo sapiens
MDNYADLSDTELTTLLRRYNIPHGPVVGSTRRLYEKKIFEYETQRRRLSPPSSSAASSYSFSDLNSTRGDADMYDLPKKEDALLYQSKGKAGVGGHAGTFTRLRQGPRSQGGPETSVPTTPAALGGRNCYRSRNGIQIRAIRPGGAHRCPLCYRCPPSQGYNDDYYEESYFTTRTYGEPESAGPSRAVRQSVTSFPDADAFHHQVHDDDLLSSSEEECKDRCVVGEPRDGLVLGPAPGPLAPLFCLRERPMYGRDSAYQSITHYRPVSASRSSLDLSYYPTSSSTSFMSSSSSSSSWLTRRAIRPENRAPGAGLGQDRQVPLWGQLLLFLVFVIVLFFIYHFMQAEEGNPF

SEQ ID NO: 832862 - protein, 282 aa, Homo sapiens
MQICMIFPRKRTLYSTRARVRQGLGGHAGTFTRLRQGPRSQGGPETSVPTTPAALGGRNCYRSRNGIQIRAIRPGGAHRCPLCYRCPPSQGYNDDYYEESYFTTRTYGEPESAGPSRAVRQSVTSFPDADAFHHQVHDDDLLSSSEEECKDRCVVGEPRDGLVLGPAPGPLAPLFCLRERPMYGRDSAYQSITHYRPVSASRSSLDLSYYPTSSSTSFMSSSSSSSSWLTRRAIRPENRAPGAGLGQDRQVPLWGQLLLFLVFVIVLFFIYHFMQAEEGNPF

SEQ ID NO: 832863 - protein, 217 aa, Homo sapiens
MDNYADLSDTELTTLLRRYNIPHGPVVGSTRRLYEKKIFEYETQRRRLSPPSSSAASSYSFSDLNSTRGDADMYDLPKKEDALLYQSKGKAGVGGHAGTFTRLRQGPRSQGGPETSVPTTPAALGGRNCYRSRNGIQIRAIRPGGAHRCPLCYRCPPSQGYNDDYYEESYFTTRTYGEPESAGPSRAVRQSVTSFPDADAFHHQVSWLAGVLYLGTT

SEQ ID NO: 832864 - protein, 115 aa, Homo sapiens
MVRGFDTSPLLGSPHLESRVLTIPLSSEDLEPSSSAVLVGRVITTFPVILAIVFVYFFFDNDIHRALALQVPLIFDSQGEHIGPHLQPSHSSNTAVSILELHPIRSLCFFPGDMR

SEQ ID NO: 832865 - protein, 1127 aa, Homo sapiens
GGGVSGRRRCPGRLRREVAVRVGSPHYLLPLPPPPPGEGSEGWGSPSPWTRRRRRPPRAGAPLCGPEPRVLVLPVWRAMEKRLGVKPNPASWILSGYYWQTSAKWLRSLYLFYTCFCFSVLWLSTDASESRCQQGKTQFGVGLRSGGENHLWLLEGTPSLQSCWAACCQDSACHVFWWLEGMCIQADCSRPQSCRAFRTHSSNSMLVFLKKFQTADDLGFLPEDDVPHLLGLGWNWASWRQSPPRAALRPAVSSSDQQSLIRKLQKRGSPSDVVTPIVTQHSKVNDSNELGGLTTSGSAEVHKAITISSPLTTDLTAELSGGPKNVSVQPEISEGLATTPSTQQVKSSEKTQIAVPQPVAPSYSYATPTPQASFQSTSAPYPVIKELVVSAGESVQITLPKNEVQLNAYVLQEPPKGETYTYDWQLITHPRDYSGEMEGKHSQILKLSKLTPGLYEFKVIVEGQNAHGEGYVNVTVKPEPRKNRPPIAIVSPQFQEISLPTTSTVIDGSQSTDDDKIVQYHWEELKGPLREEKISEDTAILKLSKLVPGNYTFSLTVVDSDGATNSTTANLTVNKAVDYPPVANAGPNQVITLPQNSITLFGNQSTDDHGITSYEWSLSPSSKGKVVEMQGVRTPTLQLSAMQEGDYTYQLTVTDTIGQQATAQVTVIVQPENNKPPQADAGPDKELTLPVDSTTLDGSKSSDDQKIISYLWEKTQGPDGVQLENANSSVATVTGLQVGTYVFTLTVKDERNLQSQSSVNVIVKEEINKPPIAKITGNVVITLPTSTAELDGSKSSDDKGIVSYLWTRDEGSPAAGEVLNHSDHHPILFLSNLVEGTYTFHLKVTDAKGESDTDRTTVEVKPDPRKNNLVEIILDINVSQLTERLKGMFIRQIGVLLGVLDSDIIVQKIQPYTEQSTKMVFFVQNEPPHQIFKGHEVAAMLKSELRKQKADFLIFRALEVNTVTCQLNCSDHGHCDSFTKRCICDPFWMENFIKVQLRDGDSNCEWSVLYVIIATFVIVVALGILSWTVICCCKRQKGKPKRKSKYKILDATDQESLELKPTSRAGIKQKGLLLSSSLMHSESELDSDDAIFTWPDREKGKLLHGQNGSVPNGQTPLKARSPREEIL

SEQ ID NO: 832866 - protein, 1073 aa, Homo sapiens
MRSGAGAPLCGPEPRVLVLPVWRAMEKRLGVKPNPASWILSGYYWQTSAKWLRSLYLFYTCFCFSVLWLSTDASESRCQQGKTQFGVGLRSGGENHLWLLEGTPSLQSCWAACCQDSACHVFWWLEGMCIQADCSRPQSCRAFRTHSSNSMLVFLKKFQTADDLGFLPEDDVPHLLGLGWNWASWRQSPPRAALRPAVSSSDQQSLIRKLQKRGSPSDVVTPIVTQHSKVNDSNELGGLTTSGSAEVHKAITISSPLTTDLTAELSGGPKNVSVQPEISEGLATTPSTQQVKSSEKTQIAVPQPVAPSYSYATPTPQASFQSTSAPYPVIKELVVSAGESVQITLPKNEVQLNAYVLQEPPKGETYTYDWQLITHPRDYSGEMEGKHSQILKLSKLTPGLYEFKVIVEGQNAHGEGYVNVTVKPEPRKNRPPIAIVSPQFQEISLPTTSTVIDGSQSTDDDKIVQYHWEELKGPLREEKISEDTAILKLSKLVPGNYTFSLTVVDSDGATNSTTANLTVNKAVDYPPVANAGPNQVITLPQNSITLFGNQSTDDHGITSYEWSLSPSSKGKVVEMQGVRTPTLQLSAMQEGDYTYQLTVTDTIGQQATAQVTVIVQPENNKPPQADAGPDKELTLPVDSTTLDGSKSSDDQKIISYLWEKTQGPDGVQLENANSSVATVTGLQVGTYVFTLTVKDERNLQSQSSVNVIVKEEINKPPIAKITGNVVITLPTSTAELDGSKSSDDKGIVSYLWTRDEGSPAAGEVLNHSDHHPILFLSNLVEGTYTFHLKVTDAKGESDTDRTTVEVKPDPRKNNLVEIILDINVSQLTERLKGMFIRQIGVLLGVLDSDIIVQKIQPYTEQSTKMVFFVQNEPPHQIFKGHEVAAMLKSELRKQKADFLIFRALEVNTVTCQLNCSDHGHCDSFTKRCICDPFWMENFIKVQLRDGDSNCEWSVLYVIIATFVIVVALGILSWTVICCCKRQKGKPKRKSKYKILDATDQESLELKPTSRAGIKQKGLLLSSSLMHSESELDSDDAIFTWPDREKGKLLHGQNGSVPNGQTPLKARSPREEIL

SEQ ID NO: 832867 - protein, 691 aa, Homo sapiens
MEGKHSQILKLSKLTPGLYEFKVIVEGQNAHGEGYVNVTVKPEPRKNRPPIAIVSPQFQEISLPTTSTVIDGSQSTDDDKIVQYHWEELKGPLREEKISEDTAILKLSKLVPGNYTFSLTVVDSDGATNSTTANLTVNKAVDYPPVANAGPNQVITLPQNSITLFGNQSTDDHGITSYEWSLSPSSKGKVVEMQGVRTPTLQLSAMQEGDYTYQLTVTDTIGQQATAQVTVIVQPENNKPPQADAGPDKELTLPVDSTTLDGSKSSDDQKIISYLWEKTQGPDGVQLENANSSVATVTGLQVGTYVFTLTVKDERNLQSQSSVNVIVKEEINKPPIAKITGNVVITLPTSTAELDGSKSSDDKGIVSYLWTRDEGSPAAGEVLNHSDHHPILFLSNLVEGTYTFHLKVTDAKGESDTDRTTVEVKPDPRKNNLVEIILDINVSQLTERLKGMFIRQIGVLLGVLDSDIIVQKIQPYTEQSTKMVFFVQNEPPHQIFKGHEVAAMLKSELRKQKADFLIFRALEVNTVTCQLNCSDHGHCDSFTKRCICDPFWMENFIKVQLRDGDSNCEWSVLYVIIATFVIVVALGILSWTVICCCKRQKGKPKRKSKYKILDATDQESLELKPTSRAGIKQKGLLLSSSLMHSESELDSDDAIFTWPDREKGKLLHGQNGSVPNGQTPLKARSPREEIL

SEQ ID NO: 832868 - protein, 486 aa, Homo sapiens
MQEGDYTYQLTVTDTIGQQATAQVTVIVQPENNKPPQADAGPDKELTLPVDSTTLDGSKSSDDQKIISYLWEKTQGPDGVQLENANSSVATVTGLQVGTYVFTLTVKDERNLQSQSSVNVIVKEEINKPPIAKITGNVVITLPTSTAELDGSKSSDDKGIVSYLWTRDEGSPAAGEVLNHSDHHPILFLSNLVEGTYTFHLKVTDAKGESDTDRTTVEVKPDPRKNNLVEIILDINVSQLTERLKGMFIRQIGVLLGVLDSDIIVQKIQPYTEQSTKMVFFVQNEPPHQIFKGHEVAAMLKSELRKQKADFLIFRALEVNTVTCQLNCSDHGHCDSFTKRCICDPFWMENFIKVQLRDGDSNCEWSVLYVIIATFVIVVALGILSWTVICCCKRQKGKPKRKSKYKILDATDQESLELKPTSRAGIKQKGLLLSSSLMHSESELDSDDAIFTWPDREKGKLLHGQNGSVPNGQTPLKARSPREEIL

SEQ ID NO: 832869 - protein, 1049 aa, Homo sapiens
MEKRLGVKPNPASWILSGYYWQTSAKWLRSLYLFYTCFCFSVLWLSTDASESRCQQGKTQFGVGLRSGGENHLWLLEGTPSLQSCWAACCQDSACHVFWWLEGMCIQADCSRPQSCRAFRTHSSNSMLVFLKKFQTADDLGFLPEDDVPHLLGLGWNWASWRQSPPRAALRPAVSSSDQQSLIRKLQKRGSPSDVVTPIVTQHSKVNDSNELGGLTTSGSAEVHKAITISSPLTTDLTAELSGGPKNVSVQPEISEGLATTPSTQQVKSSEKTQIAVPQPVAPSYSYATPTPQASFQSTSAPYPVIKELVVSAGESVQITLPKNEVQLNAYVLQEPPKGETYTYDWQLITHPRDYSGEMEGKHSQILKLSKLTPGLYEFKVIVEGQNAHGEGYVNVTVKPEPRKNRPPIAIVSPQFQEISLPTTSTVIDGSQSTDDDKIVQYHWEELKGPLREEKISEDTAILKLSKLVPGNYTFSLTVVDSDGATNSTTANLTVNKAVDYPPVANAGPNQVITLPQNSITLFGNQSTDDHGITSYEWSLSPSSKGKVVEMQGVRTPTLQLSAMQEGDYTYQLTVTDTIGQQATAQVTVIVQPENNKPPQADAGPDKELTLPVDSTTLDGSKSSDDQKIISYLWEKTQGPDGVQLENANSSVATVTGLQVGTYVFTLTVKDERNLQSQSSVNVIVKEEINKPPIAKITGNVVITLPTSTAELDGSKSSDDKGIVSYLWTRDEGSPAAGEVLNHSDHHPILFLSNLVEGTYTFHLKVTDAKGESDTDRTTVEVKPDPRKNNLVEIILDINVSQLTERLKGMFIRQIGVLLGVLDSDIIVQKIQPYTEQSTKMVFFVQNEPPHQIFKGHEVAAMLKSELRKQKADFLIFRALEVNTVTCQLNCSDHGHCDSFTKRCICDPFWMENFIKVQLRDGDSNCEWSVLYVIIATFVIVVALGILSWTVICCCKRQKGKPKRKSKYKILDATDQESLELKPTSRAGIKQKGLLLSSSLMHSESELDSDDAIFTWPDREKGKLLHGQNGSVPNGQTPLKARSPREEIL

SEQ ID NO: 832870 - protein, 1202 aa, Homo sapiens
MEKRLGVKPNPASWILSGYYWQTSAKWLRSLYLFYTCFCFSVLWLSTDASESRCQQGKTQFGVGLRSGGENHLWLLEGTPSLQSCWAACCQDSACHVFWWLEGMCIQADCSRPQSCRAFRTHSSNSMLVFLKKFQTADDLGFLPEDDVPHLLGLGWNWASWRQSPPRAALRPAVSSSDQQSLIRKLQKRGSPSDVVTPIVTQHSKVNDSNELGGLTTSGSAEVHKAITISSPLTTDLTAELSGGPKNVSVQPEISEGLATTPSTQQVKSSEKTQIAVPQPVAPSYSYATPTPQASFQSTSAPYPVIKELVVSAGESVQITLPKNEVQLNAYVLQEPPKGETYTYDWQLITHPRDYSGEMEGKHSQILKLSKLTPGLYEFKVIVEGQNAHGEGYVNVTVKPEPRKNRPPIAIVSPQFQEISLPTTSTVIDGSQSTDDDKIVQYHWEELKGPLREEKISEDTAILKLSKLVPGNYTFSLTVVDSDGATNSTTANLTVNKAVDYPPVANAGPNQVITLPQNSITLFGNQSTDDHGITSYEWSLSPSSKGKVVEMQGVRTPTLQLSAMQEGDYTYQLTVTDTIGQQATAQVTVIVQPENNKPPQADAGPDKELTLPVDSTTLDGSKSSDDQKIISYLWEKTQGPDGVQLENANSSVATVTGLQVGTYVFTLTVKDERNLQSQSSVNVIVKEEINKPPIAKITGNVVITLPTSTAELDGSKSSDDKGIVSYLWTRDEGSPAAGEVLNHSDHHPILFLSNLVEGTYTFHLKVTDAKGESDTDRTTVEVKPDPRKNNLVEIILDINVSQLTERLKGMFIRQIGVLLGVLDSDIIVQKIQPYTEQSTKMVFFVQNEPPHQIFKGHEVAAMLKSELRKQKADFLIFRALEVNTVTCQLNCSDHGHCDSFTKRCICDPFWMENFIKVQLRDGDSNCEWSVLYVIIATFVIVVALGILSWTVICCCKRQKGKPKRKSKYKILDATDQESLELKPTSRAGGALGARASRSVHSLCGRLLSLAPPECVTEQPTVLAKHFVPFCLMKTEGQICPELHWTKCLQDPLRVLLPLGGGAGPVVFLCLGILLMFPTWSSAFPTAPGSQGQGPWTCLLLLTSLCFMGRDETQARVCQLTTFQPALFSCLPIFIIWQVLSFCQCLRADRRAFPCTNSKMTLSDGTGRSGQVVGLPSSAGLGHLARVSLIMDAMGQVSLVYES

SEQ ID NO: 832871 - protein, 917 aa, Homo sapiens
MIISALVPKEGDGVLGQGDHLVGACVGHRGESTALFTVRFAVVELVAPSESTTVKLKGSPSDVVTPIVTQHSKVNDSNELGGLTTSGSAEVHKAITISSPLTTDLTAELSGGPKNVSVQPEISEGLATTPSTQQVKSSEKTQIAVPQPVAPSYSYATPTPQASFQSTSAPYPVIKELVVSAGESVQITLPKNEVQLNAYVLQEPPKGETYTYDWQLITHPRDYSGEMEGKHSQILKLSKLTPGLYEFKVIVEGQNAHGEGYVNVTVKPEPRKNRPPIAIVSPQFQEISLPTTSTVIDGSQSTDDDKIVQYHWEELKGPLREEKISEDTAILKLSKLVPGNYTFSLTVVDSDGATNSTTANLTVNKAVDYPPVANAGPNQVITLPQNSITLFGNQSTDDHGITSYEWSLSPSSKGKVVEMQGVRTPTLQLSAMQEGDYTYQLTVTDTIGQQATAQVTVIVQPENNKPPQADAGPDKELTLPVDSTTLDGSKSSDDQKIISYLWEKTQGPDGVQLENANSSVATVTGLQVGTYVFTLTVKDERNLQSQSSVNVIVKEEINKPPIAKITGNVVITLPTSTAELDGSKSSDDKGIVSYLWTRDEGSPAAGEVLNHSDHHPILFLSNLVEGTYTFHLKVTDAKGESDTDRTTVEVKPDPRKNNLVEIILDINVSQLTERLKGMFIRQIGVLLGVLDSDIIVQKIQPYTEQSTKMVFFVQNEPPHQIFKGHEVAAMLKSELRKQKADFLIFRALEVNTVTCQLNCSDHGHCDSFTKRCICDPFWMENFIKVQLRDGDSNCEWSVLYVIIATFVIVVALGILSWTVICCCKRQKGKPKRKSKYKILDATDQESLELKPTSRAGIKQKGLLLSSSLMHSESELDSDDAIFTWPDREKGKLLHGQNGSVPNGQTPLKARSPREEIL

SEQ ID NO: 832872 - protein, 498 aa, Homo sapiens
GGGVSGRRRCPGRLRREVAVRVGSPHYLLPLPPPPPGEGSEGWGSPSPWTRRRRRPPRAGAPLCGPEPRVLVLPVWRAMEKRLGVKPNPASWILSGYYWQTSAKWLRSLYLFYTCFCFSVLWLSTDASESRCQQGKTQFGVGLRSGGENHLWLLEGTPSLQSCWAACCQDSACHVFWWLEGMCIQADCSRPQSCRAFRTHSSNSMLVFLKKFQTADDLGFLPEDDVPHLLGLGWNWASWRQSPPRAALRPAVSSSDQQSLIRKLQKRGSPSDVVTPIVTQHSKVNDSNELGGLTTSGSAEVHKAITISSPLTTDLTAELSGGPKNVSVQPEISEGLATTPSTQQVKSSEKTQIAVPQPVAPSYSYATPTPQASFQSTSAPYPVIKELVVSAGESVQITLPKNEVQLNAYVLQEPPKGETYTYDWQLITHPRDYSGEMEGKHSQILKLSKLTPGLYEFKVIVEGQNAHGEGYVNVTVKPGSTPHGNCQDLRLAPSEATA

SEQ ID NO: 832873 - protein, 337 aa, Homo sapiens
MNPESSIFIEDYLKYFQDQVSRENLLQLLTDDEAWNGFVAAAELPRDEADELRKALNKLASHMVMKDKNRHDKDQQHRQWFLKEFPRLKRELEDHIRKLRALAEEVEQVHRGTTIANVVSNSVGTTSGILTLLGLGLAPFTEGISFVLLDTGMGLGAAAAVAGITCSVVELVNKLRARAQARNLDQSGTNVAKVMKEFVGGNTPNVLTLVDNWYQVTQGIGRNIRAIRRARANPQLGAYAPPPHVIGRISAEGGEQVERVVEGPAQAMSRGTMIVGAATGGILLLLDVVSLAYESKHLLEGAKSESAEELKKRAQELEGKLNFLTKIHEMLQPGQDQ

SEQ ID NO: 832874 - protein, 337 aa, Homo sapiens; identical to SEQ ID NO: 832873

SEQ ID NO: 832875 - protein, 415 aa, Homo sapiens [sequence omitted]

SEQ ID NO: 832876 - protein, 337 aa, Homo sapiens; identical to SEQ ID NO: 832873

SEQ ID NO: 832877 - protein, 116 aa, Homo sapiens
MNIRAIRRARANPQLGAYAPPPHVIGRISAEGGEQVERVVEGPAQAMSRGTMIVGAATGGILLLLDVVSLAYESKHLLEGAKSESAEELKKRAQELEGKLNFLTKIHEMLQPGQDQ

SEQ ID NO: 832878 - protein, 449 aa, Homo sapiens
VLGSSVFTVLGHELLGSCDFHFPFRIPGYIWEAGGRVWLLHRCTAGRGIHTAQNSWILLSLCQRKIPWTRGPCLGVRVREEEAGTRVKENLPVWTVTGELQGKPLGNPAAGTMNPESSIFIEDYLKYFQDQVSRENLLQLLTDDEAWNGFVAAAELPRDEADELRKALNKLASHMVMKDKNRHDKDQQHRQWFLKEFPRLKRELEDHIRKLRALAEEVEQVHRGTTIANVVSNSVGTTSGILTLLGLGLAPFTEGISFVLLDTGMGLGAAAAVAGITCSVVELVNKLRARAQARNLDQSGTNVAKVMKEFVGGNTPNVLTLVDNWYQVTQGIGRNIRAIRRARANPQLGAYAPPPHVIGRISAEGGEQVERVVEGPAQAMSRGTMIVGAATGGILLLLDVVSLAYESKHLLEGAKSESAEELKKRAQELEGKLNFLTKIHEMLQPGQDQ

SEQ ID NO: 832879 - protein, 337 aa, Homo sapiens; identical to SEQ ID NO: 832873

SEQ ID NO: 832880 - protein, 232 aa, Homo sapiens
KGSRHDVEDPPSSAVESVGTTSGILTLLGLGLAPFTEGISFVLLDTGMGLGAAAAVAGITCSVVELVNKLRARAQARNLDQSGTNVAKVMKEFVGGNTPNVLTLVDNWYQVTQGIGRNIRAIRRARANPQLGAYAPPPHVIGRISAEGGEQVERVVEGPAQAMSRGTMIVGAATGGILLLLDVVSLAYESKHLLEGAKSESAEELKKRAQELEGKLNFLTKIHEMLQPGQDQ

SEQ ID NO: 832881 - protein, 120 aa, Homo sapiens
SDSKTGAEPGIALRLESDFSPPPAVPLNCRDRGGGWGASGSDGFKKLPRLNSGSDCLRHGQLTQQTLNPEDVRQGISGRPEDVSGYYTDAQLDVGSTQLRTVGSCSVSVRGRSLGKLGIV

SEQ ID NO: 832882 - protein, 190 aa, Homo sapiens
MVEKGPEVSGKRRGRNNAAASASAAAASAAASAACASPAATAASGAAASSASAAAASAAAAPNNGQNKSLAAAAPNGNSSSNSWEEGSSGSSSDEEHGGGGMRVGPQYQAVVPDFDPAKLARRSQERDNLGMLVCYAIGPLLIFGLAPGFVHWVFVFLADFPASFFFLSSLGGIAKLENSSRHRSLVKIL

SEQ ID NO: 832883 - protein, 482 aa, Homo sapiens
MVEKGPEVSGKRRGRNNAAASASAAAASAAASAACASPAATAASGAAASSASAAAASAAAAPNNGQNKSLAAAAPNGNSSSNSWEEGSSGSSSDEEHGGGGMRVGPQYQAVVPDFDPAKLARRSQERDNLGMLVWSPNQNLSEAKLDEYIAIAKEKHGYNMEQALGMLFWHKHNIEKSLADLPNFTPFPDEWTVEDKVLFEQAFSFHGKTFHRIQQMLPDKSIASLVKFYYSWKKTRTKTSVMDRHARKQKREREESEDELEEANGNNPIDIEVDQNKESKKEVPPTETVPQVKKEKHSTQAKNRAKRKPPKGMFLSQEDVEAVSANATAATTVLRQLDMELVSVKRQIQNIKQTNSALKEKLDGGIEPYRLPEVIQKCNARWTTEEQLLAVQAIRKYGRDFQAISDVIGNKSVVQVKNFFVNYRRRFNIDEVLQEWEAEHGKEETNGPSNQKPVKSPDNSIKMPEEEDEAPVLDVRYASAS

SEQ ID NO: 832884 - protein, 388 aa, Homo sapiens
MVEKGPEVSGKRRGRNNAAASASAAAASAAASAACASPAATAASGAAASSASAAAASAAAAPNNGQNKSLAAAAPNGNSSSNSWEEGSSGSSSDEEHGGGGMRVGPQYQAVVPDFDPAKLARRSQERDNLGMLVWSPNQNLSEAKLDEYIAIAKEKHGYNMEQALGMLFWHKHNIEKSLADLPNFTPFPDEWTVEDKVLFEQAFSFHGKTFHRIQQMLPDKSIASLVKFYYSWKKTRTKTSVMDRHARKQKREREESEDELEEANGNNPIDIEVDQNKESKKEVPPTETVPQVKKEKHSTQAKNRAKRKPPKGMFLSQEDVEAVSANATAATTVLRQLDMELVSVKRQIQNIKQTNSALKEKLDGGIEPYRLPEPSGNMAEIFRQSQT

SEQ ID NO: 832885 - protein, 120 aa, Homo sapiens
TQKRHPFQEKYFASINPKLLIPPTLSLSPWAAIRKYGRDFQAISDVIGNKSVVQVKNFFVNYRRRFNIDEVLQEWEAEHGKEETNGPSNQKPVKSPDNSIKMPEEEDEAPVLDVRYASAS

SEQ ID NO: 832886 - protein, 399 aa, Homo sapiens
MVEKGPEVSGKRRGRNNAAASASAAAASAAASAACASPAATAASGAAASSASAAAASAAAAPNNGQNKSLAAAAPNGNSSSNSWEEGSSGSSSDEEHGGGGMRVGPQYQAVVPDFDPAKLARRSQERDNLGMLVWSPNQNLSEAKLDEYIAIAKEKHGYNMEQALGMLFWHKHNIEKSLADLPNFTPFPDEWTVEDKVLFEQAFSFHGKTFHRIQQMLPDKSIASLVKFYYSWKKTRTKTSVMDRHARKQKREREESEDELEEANGNNPIDIEVDQNKESKKEVPPTETVPQVKKEKHSTQAKNRAKRKPPKGMFLSQEDVEAVSANATAATTVLRQLDMELVSVKRQIQNIKQTNSALKEKLDGGIEPYRLPEVIQKCNARWTTEEQLLAVQGRGKFF

SEQ ID NO: 832887 - protein, 482 aa, Homo sapiens; identical to SEQ ID NO: 832883

SEQ ID NO: 832888 - protein, 169 aa, Homo sapiens [sequence omitted]

SEQ ID NO: 832889 - protein, 482 aa, Homo sapiens; identical to SEQ ID NO: 832883

SEQ ID NO: 832890 - protein, 378 aa, Homo sapiens
MVEKGPEVSGKRRGRNNAAASASAAAASAAASAACASPAATAASGAAASSASAAAASAAAAPNNGQNKSLAAAAPNGNSSSNSWEEGSSGSSSDEEHGGGGMRVGPQYQAVVPDFDPAKLARRSQERDNLGMLVWSPNQNLSEAKLDEYIAIAKEKHGYNMEQALGMLFWHKHNIEKSLADLPNFTPFPDEWTVEDKVLFEQAFSFHGKTFHRIQQMLPDKSIASLVKFYYSWKKTRTKTSVMDRHARKQKREREESEDELEEANGNNPIDIEVDQNKESKKEVPPTETVPQVKKEKHSTQAKNRAKRKPPKGMFLSQEDVEAVSANATAATTVLRQLDMELVSVKRQIQNIKQTNSALKEKLDGGIEPYRLPEVGLC

SEQ ID NO: 832891 - protein, 205 aa, Homo sapiens
GARFLTNHRLCLPVRPLATQAFSTIGTSMTSYSYRQSSATSSFGGLGGGSVRFGPGVAFRAPSIHGGSGGRGVSVSSARFVSSSSSGGYGGGYGGVLTASDGLLAGNEKLTMQNLNDRLASYLDKVRALEAANGELEVKIRDWYQKQGPGPSRDYSHYYTTIQDLRDKILVVPPLRTPGLSCRSTTPVWLQMTSEPSLRRNRLCA

SEQ ID NO: 832892 - protein, 177 aa, Homo sapiens
MTSYSYRQSSATSSFGGLGGGSVRFGPGVAFRAPSIHGGSGGRGVSVSSARFVSSSSSGGYGGGYGGVLTASDGLLAGNEKLTMQNLNDRLASYLDKVRALEAANGELEVKIRDWYQKQGPGPSRDYSHYYTTIQDLRDKILVVPPLRTPGLSCRSTTPVWLQMTSEPSLRRNRLCA

SEQ ID NO: 832893 - protein, 177 aa, Homo sapiens; identical to SEQ ID NO: 832892

SEQ ID NO: 832894 - protein, 177 aa, Homo sapiens; identical to SEQ ID NO: 832892

SEQ ID NO: 832895 - protein, 177 aa, Homo sapiens; identical to SEQ ID NO: 832892

SEQ ID NO: 832896 - protein, 177 aa, Homo sapiens; identical to SEQ ID NO: 832892

SEQ ID NO: 832897 - protein, 177 aa, Homo sapiens; identical to SEQ ID NO: 832892

SEQ ID NO: 832898 - protein, 177 aa, Homo sapiens; identical to SEQ ID NO: 832892

SEQ ID NO: 832899 - protein, 177 aa, Homo sapiens; identical to SEQ ID NO: 832892

SEQ ID NO: 832900 - protein, 177 aa, Homo sapiens; identical to SEQ ID NO: 832892

SEQ ID NO: 832901 - protein, 177 aa, Homo sapiens; identical to SEQ ID NO: 832892

SEQ ID NO: 832902 - protein, 146 aa, Homo sapiens
MRSWPSRTRKDAEAWFTSRTEELNREVAGHTEQLQMSRSEVTDLRRTLQGLEIELQSQLSMKAALEDTLAETEARFGAPAWRISQALISGIEAQLGDVRADSERQNQEYQRLMDIKSRLEQEIATYRSLLEGQEDHYNNLSASKVL

SEQ ID NO: 832903 - protein, 146 aa, Homo sapiens; identical to SEQ ID NO: 832902

SEQ ID NO: 832904 - protein, 177 aa, Homo sapiens; identical to SEQ ID NO: 832892

SEQ ID NO: 832905 - protein, 188 aa, Homo sapiens
MTSYSYRQSSATSSFGGLGGGSVRFGPGVAFRAPSIHGGSGGRGVSVSSARFVSSSSSGGYGGGYGGVLTASDGLLAGNEKLTMQNLNDRLASYLDKVRALEAANGELEVKIRDWYQKQGPGPSRDYSHYYTTIQDLRDKILVVPPLRTPGLSCRSTTPVWLQMTSEPSECLCPGGCRSQDWGRGWGV

SEQ ID NO: 832906 - protein, 177 aa, Homo sapiens; identical to SEQ ID NO: 832892

SEQ ID NO: 832907 - protein, 177 aa, Homo sapiens; identical to SEQ ID NO: 832892

SEQ ID NO: 832908 - protein, 177 aa, Homo sapiens; identical to SEQ ID NO: 832892

SEQ ID NO: 832909 - protein, 177 aa, Homo sapiens; identical to SEQ ID NO: 832892

SEQ ID NO: 832910 - protein, 125 aa, Homo sapiens
MRSWPSRTRKDAEAWFTSRTEELNREVAGHTEQLQMSRSEVTDLRRTLQGLEIELQSQLSMKAALEDTLAETEVGDVRADSERQNQEYQRLMDIKSRLEQEIATYRSLLEGQEDHYNNLSASKVL

SEQ ID NO: 832911 - protein, 177 aa, Homo sapiens; identical to SEQ ID NO: 832892

SEQ ID NO: 832912 - protein, 183 aa, Homo sapiens
  misc_feature (9)..(10): Xaa can be any naturally occurring amino acid
DRLLLYYLXXHSTLWIPNPCAAPGTDLAKILSDMRSQYEVMAEQNRKDAEAWFTSRTEELNREVAGHTEQLQMSRSEVTDLRRTLQGLEIELQSQLSMKAALEDTLAETEARFGAQLAHIQALISGIEAQLGDVRADSERQNQEYQRLDIVDSRSGAPILAKILSDIAEGQYEVMAEQNPEGC

SEQ ID NO: 832913 - protein, 196 aa, Homo sapiens
MCNRRDEIRITSVVDSAVTMTSYSYRQSSATSSFGGLGGGSVRFGPGVAFRAPSIHGGSGGRGVSVSSARFVSSSSSGGYGGGYGGVLTASDGLLAGNEKLTMQNLNDRLASYLDKVRALEAANGELEVKIRDWYQKQGPGPSRDYSHYYTTIQDLRDKILVVPPLRTPGLSCRSTTPVWLQMTSEPSLRRNRLCA

SEQ ID NO: 832914 - protein, 66 aa, Homo sapiens
LEDLPCRHSRTAGQDSCGATIENSRIVLQIDNARLAADDFRTKFETEQALRMSVEADIQRPAQGAG

SEQ ID NO: 832915 - protein, 177 aa, Homo sapiens; identical to SEQ ID NO: 832892

SEQ ID NO: 832916 - protein, 177 aa, Homo sapiens; identical to SEQ ID NO: 832892

SEQ ID NO: 832917 - protein, 177 aa, Homo sapiens; identical to SEQ ID NO: 832892

SEQ ID NO: 832918 - protein, 177 aa, Homo sapiens; identical to SEQ ID NO: 832892

SEQ ID NO: 832919 - protein, 177 aa, Homo sapiens; identical to SEQ ID NO: 832892

SEQ ID NO: 832920 - protein, 177 aa, Homo sapiens; identical to SEQ ID NO: 832892

SEQ ID NO: 832921 - protein, 177 aa, Homo sapiens; identical to SEQ ID NO: 832892

SEQ ID NO: 832922 - protein, 177 aa, Homo sapiens; identical to SEQ ID NO: 832892

SEQ ID NO: 832923 - protein, 177 aa, Homo sapiens; identical to SEQ ID NO: 832892

SEQ ID NO: 832924 - protein, 177 aa, Homo sapiens; identical to SEQ ID NO: 832892

SEQ ID NO: 832925 - protein, 177 aa, Homo sapiens; identical to SEQ ID NO: 832892

SEQ ID NO: 832926 - protein, 146 aa, Homo sapiens; identical to SEQ ID NO: 832902

SEQ ID NO: 832927 - protein, 177 aa, Homo sapiens; identical to SEQ ID NO: 832892

SEQ ID NO: 832928 - protein, 177 aa, Homo sapiens; identical to SEQ ID NO: 832892

SEQ ID NO: 832929 - protein, 146 aa, Homo sapiens; identical to SEQ ID NO: 832902

SEQ ID NO: 832930 - protein, 177 aa, Homo sapiens; identical to SEQ ID NO: 832892

SEQ ID NO: 832931 - protein, 177 aa, Homo sapiens; identical to SEQ ID NO: 832892

SEQ ID NO: 832932 - protein, 177 aa, Homo sapiens; identical to SEQ ID NO: 832892

SEQ ID NO: 832933 - protein, 158 aa, Homo sapiens
MTSYSYRQSSATSSFGGLGGGSVRFGPGVAFRAPSIHGGSGGRGVSVSSARFVSSSSSGGYGGGYGGVLTASVRAPPRHDFLQLSPVVGHVVLRRPGRRLRPGPSRDYSHYYTTIQDLRDKILVVPPLRTPGLSCRSTTPVWLQMTSEPSLRRNRLCA

SEQ ID NO: 832934 - protein, 207 aa, Homo sapiens
MTSYSYRQSSATSSFGGLGGGSVRFGPGVAFRAPSIHGGSGGRGVSVSSARFVSSSSSGGYGGGYGGVLTASDGLLAGNEKLTMQNLNDRLASYLDKVRALEAANGELEVKIRDWYQKQGPGPSRDYSHYYTTIQDLRDKGGRRPGRGKCSAPAAETQPRGPGEVPGGAAGRSPLGRGKVHRWGRVKGDRRRAGQDLGAGCRGRGGG

SEQ ID NO: 832935 - protein, 422 aa, Homo sapiens
WYAPDVRDPGRRTVPAAGSQRDLNSFLWTIRRDPPAYLFGTIHVPYTRVWDFIPDNSKAAFQASTRVYFELDLTDPYTISALASCQLLPHGENLQDVLPHELYWRLKRHLDYVKLMMPSWMTPAQRGKGLYADYLFNAIAGNWERKRPVWVMLMVNSLTERDVRFRGVPVLDLYLAQQAEKMKKTTGAVEQVEEQCHPLNNGLNFSQVLFALNQTLLQQESVRAGSLQASYTTEDLIKHYNCGDLSAVIFNHDTSQLPNFINTTLPPHEQVTAQEIDSYFRQELIYKRNERMGKRVMALLRENEDKICFFAFGAGHFLGNNTVIDILRQAGLEVDHTPAGQAIHSPAPQSPAPSPEGTSTSPAPVTPAAAVPEAPSVTPTAPPEDEDPALSPHLLLPDSLSQLEEFGRQRKWHKRQSTHQRP

SEQ ID NO: 832936 - protein, 379 aa, Homo sapiens
MHAALAGPLLAALLATARARPQPPDGGQCRPPGSQRDLNSFLWTIRRDPPAYLFGTIHVPYTRVWDFIPDNSKAAFQASTRVYFELDLTDPYTISALASCQLLPHGENLQDVLPHELYWRLKRHLDYVKLMMPSWMTPAQRGKGLYADYLFNAIAGNWERKRPVWVMLMVNSLTERDVRFRGVPVLDLYLAQQAEKMKKTTGAVEQVEEQCHPLNNGLNFSQVLFALNQTLLQQEECAGREPAGLLHHGGPHQALQLRRPQRSHLQPRHIPGHFLGNNTVIDILRQAGLEVDHTPAGQAIHSPAPQSPAPSPEGTSTSPAPVTPAAAVPEAPSVTPTAPPEDEDPALSPHLLLPDSLSQLEEFGRQRKWHKRQSTHQRP

SEQ ID NO: 832937 - protein, 437 aa, Homo sapiens
MHAALAGPLLAALLATARARPQPPDGGQCRPPGSQRDLNSFLWTIRRDPPAYLFGTIHVPYTRVWDFIPDNSKAAFQASTRVYFELDLTDPYTISALASCQLLPHGENLQDVLPHELYWRLKRHLDYVKLMMPSWMTPAQRGKGLYADYLFNAIAGNWERKRPVWVMLMVNSLTERDVRFRGVPVLDLYLAQQAEKMKKTTGAVEQVEEQCHPLNNGLNFSQVLFALNQTLLQQESVRAGSLQASYTTEDLIKHYNCGDLSAVIFNHDTSQLPNFINTTLPPHEQVTAQEIDSYFRQELIYKRNERMGKRVMALLRENEDKICFFAFGAGHFLGNNTVIDILRQAGLEVDHTPAGQAIHSPAPQSPAPSPEGTSTSPAPVTPAAAVPEAPSVTPTAPPEDEDPALSPHLLLPDSLSQLEEFGRQRKWHKRQSTHQRP

SEQ ID NO: 832938 - protein, 336 aa, Homo sapiens
MHAALAGPLLAALLATARARPQPPDGGQCRPPGSQRDLNSFLWTIRRDPPAYLFGTIHVPYTRVWDFIPDNSKAAFQASTRVYFELDLTDPYTISALASCQLLPHGENLQDVLPHELYWRLKRHLDYVKLMMPSWMTPAQRGKGLYADYLFNAIAGNWERKRPVWVMLMVNSLTERDVRFRGVPVLDLYLAQQAEKMKKTTGAVEQVEEQCHPLNNGLNFSQVGMQCPSPELTALGTWVLFSDCLSSPRGRGRQPESGPFSGRRGSAGQRGSTWLLWWYQLRVAYTGIWGKSLRVCFYFSSITCWGCTLLTCCACLGRKNFPQSIRESLQVPSSIL

SEQ ID NO: 832939 - protein, 95 aa, Homo sapiens
SPGTAFESGATPSCDALWEALNPQPSSRVCSRVGTPPLSSTKEKIAIVVLTSDVLRGLLGVFSPNHFNFFLDSRSCMPPPSFFPCQFPGDSYQLS

SEQ ID NO: 832940 - protein, 631 aa, Homo sapiens
QQLRLPRPPHQKAMVSPRMSGLLSQTVILALIFLPQTRPAGVFELQIHSFGPGPGPGAPRSPCSARLPCRLFFRVCLKPGLSEEAAESPCALGAALSARGPVYTEQPGAPAPDLPLPDGLLQVPFRDAWPGTFSFIIETWREELGDQIGGPAWSLLARVAGRRRLAAGGPWARDIQRAGAWELRFSYRARCEPPAVGTACTRLCRPRSAPSRCGPGLRPCAPLEDECEAPLVCRAGCSPEHGFCEQPGECRCLEGWTGPLCTVPVSTSSCLSPRGPSSATTGCLVPGPGPCDGNPCANGGSCSETPRSFECTCPRGFYGLRCEVSGVTCADGPCFNGGLCVGGADPDSAYICHCPPGFQGSNCEKRVDRCSLQPCRNGGLCLDLGHALRCRCRAGFAGPRCEHDLDDCAGRACANGGTCVEGGGAHRCSCALGFGGRDCRERADPCAARPCAHGGRCYAHFSGLVCACAPGYMGARCEFPVHPDGASALPAAPPGLRPGDPQRYLLPPALGLLVAAGVAGAALLLVHVRRRGHSQDAGSRLLAGTPEPSVHALPDALNNLRTQEGSGDGPSSSVDWNRPEDVDPQGIYVISAPSIYAREVATPLFPPLHTGRAGQRQHLLFPYPSSILSVK

SEQ ID NO: 832941 - protein, 600 aa, Homo sapiens
QQLRLPRPPHQKAMVSPRMSGLLSQTVILALIFLPQTRPAGVFELQIHSFGPGPGPGAPRSPCSARLPCRLFFRVCLKPGLSEEAAESPCALGAALSARGPVYTEQPGAPAPDLPLPDGLLQVPFRDAWPGTFSFIIETWREELGDQIGGPAWSLLARVAGRRRLAAGGPWARDIQRAGAWELRFSYRARCEPPAVGTACTRLCRPRSAPSRCGPGLRPCAPLEDECEAPLVCRAGCSPEHGFCEQPGECRCLEGWTGPLCTVPVSTSSCLSPRGPSSATTGCLVPGPGPCDGNPCANGGSCSETPRSFECTCPRGFYGLRCEVSGVTCADGPCFNGGLCVGGADPDSAYICHCPPGFQGSNCEKRVDRCSLQPCRNGGLCLDLGHALRCRCRAGFAGPRCEHDLDDCAGRACANGGTCVEGGGAHRCSCALGFGGRDCRERADPCAARPCAHGGRCYAHFSGLVCACAPGYMGARCEFPVHPDGASALPAAPPGLRPGDPQRYLLPPALGLLVAAGVAGAALLLVHVRRRGHSQDAGSRLLAGTPEPSVHALPDALNNLRTQEGSGDGPSSSVDWNRPEDVDPQGIYVISAPSIYAREA

SEQ ID NO: 832942 - protein, 372 aa, Homo sapiens
QQLRLPRPPHQKAMVSPRMSGLLSQTVILALIFLPQTRPAGVFELQIHSFGPGPGPGAPRSPCSARLPCRLFFRVCLKPGLSEEAAESPCALGAALSARGPVYTEQPGAPAPDLPLPDGLLQVPFRDAWPGTFSFIIETWREELGDQIGGGLCLDLGHALRCRCRAGFAGPRCEHDLDDCAGRACANGGTCVEGGGAHRCSCALGFGGRDCRERADPCAARPCAHGGRCYAHFSGLVCACAPGYMGARCEFPVHPDGASALPAAPPGLRPGDPQRYLLPPALGLLVAAGVAGAALLLVHVRRRGHSQDAGSRLLAGTPEPSVHALPDALNNLRTQEGSGDGPSSSVDWNRPEDVDPQGIYVISAPSIYAREA

SEQ ID NO: 832943 - protein, 571 aa, Homo sapiens
QQLRLPRPPHQKAMVSPRMSGLLSQTVILALIFLPQTRPAGVFELQIHSFGPGPGPGAPRSPCSARLPCRLFFRVCLKPGLSEEAAESPCALGAALSARGPVYTEQPGAPAPDLPLPDGLLQVPFRDAWPGTFSFIIETWREELGDQIGGPAWSLLARVAGRRRLAAGGPWARDIQRAGAWELRFSYRARCEPPAVGTACTRLCRPRSAPSRCGPGLRPCAPLEDECEAPLVCRAGCSPEHGFCEQPGECRCLEGWTGPLCTVPVSTSSCLSPRGPSSATTGCLVPGPGPCDGNPCANGGSCSETPRSFECTCPRGFYGLRCEVSGVTCADGPCFNGGLCVGGADPDSAYICHCPPGFQGSNCEKRVDRCSLQPCRNGGLCLDLGHALRCRCRAGFAGPRCEHDLDDCAGRACANGGTCVEGGGAHRCSCALGFGGRDCRERADPCAARPCAHGGRCYAHFSGLVCACAPGYMGARCEFPVHPDGASALPAAPPGLRPGDPQRYLLPPALGLLVAAGVAGAALLLVHVRRRGHSQDAGSRLLAGTPEPSVHALPDALNNLRTQEGSGDGPR

SEQ ID NO: 832944 - protein, 240 aa, Homo sapiens
QQLRLPRPPHQKAMVSPRMSGLLSQTVILALIFLPQTRPAGVFELQIHSFGPGPGPGAPRSPCSARLPCRLFFRVCLKPGLSEEAAESPCALGAALSARGPVYTEQPGAPAPDLPLPDGLLQVPFRDAWPGTFSFIIETWREELGDQIGGPAWSLLARVAGRRRLAAGGPWARDIQRAGAWELRFSYRARCEPPAVGTACTRLCRPRSAPSRCGPGLRPCAPLEDECEAPRESCVRPHPV

SEQ ID NO: 832945 - protein, 591 aa, Homo sapiens
PAAATPETPPPEGHGLPTDVRAPLPDCDPSAHFPPPDTARWRLRAADPLFRAGSRPRLPCRLFFRVCLKPGLSEEAAESPCALGAALSARGPVYTEQPGAPAPDLPLPDGLLQVPFRDAWPGTFSFIIETWREELGDQIGGPAWSLLARVAGRRRLAAGGPWARDIQRAGAWELRFSYRARCEPPAVGTACTRLCRPRSAPSRCGPGLRPCAPLEDECEAPLVCRAGCSPEHGFCEQPGECRCLEGWTGPLCTVPVSTSSCLSPRGPSSATTGCLVPGPGPCDGNPCANGGSCSETPRSFECTCPRGFYGLRCEVSGVTCADGPCFNGGLCVGGADPDSAYICHCPPGFQGSNCEKRVDRCSLQPCRNGGLCLDLGHALRCRCRAGFAGPRCEHDLDDCAGRACANGGTCVEGGGAHRCSCALGFGGRDCRERADPCAARPCAHGGRCYAHFSGLVCACAPGYMGARCEFPVHPDGASALPAAPPGLRPGDPQRYLLPPALGLLVAAGVAGAALLLVHVRRRGHSQDAGSRLLAGTPEPSVHALPDALNNLRTQEGSGDGPSSSVDWNRPEDVDPQGIYVISAPSIYAREA

SEQ ID NO: 832946 - protein, 271 aa, Homo sapiens
QQLRLPRPPHQKAMVSPRMSGLLSQTVILALIFLPQTRPAGVFELQIHSFGPGPGPGAPRSPCSARLPCRLFFRVCLKPGLSEEAAESPCALGAALSARGPVYTEQPGAPAPDLPLPDGLLQVPFRDAWPGTFSFIIETWREELGDQIGGPAWSLLARVAGRRRLAAGGPWARDIQRAGAWELRFSYRARCEPPAVGTACTRLCRPRSAPSRCGPGLRPCAPLEDECEAPRCASRLSPEHGSCDRPVMPMLRGGWPSAGLFHRVARRASWS

SEQ ID NO: 832947 - protein, 1170 aa, Homo sapiens
MNMFLYFQTIIKEGMLTKQNNSFQRSKRRYFKLRGRTLYYAKTAKSIIFDEVDLTDASVAESSTKNVNNSFTVITPCRKLILCADNRKEMEDWIAALKTVQNREHFEPTQYSMDHFSGMHNWYACSHARPTYCNVCREALSGVTSHGLSCEVCKFKAHKRCAVRATNNCKWTTLASIGKDIIEDADGIAMPHQWLEGNLPVSAKCTVCDKTCGSVLRLQDWRCLWCKAMVHTSCKESLLTKCPLGLCKVSVIPPTALNSIDSDGFWKASCPPSCTSPLLVFVNSKSGDNQGVKFLRRFKQLLNPAQVFDLMNGGPHLGLRLFQKFDTFRILVCGGDGSVGWVLSEIDSLNLHKQCQLGVLPLGTGNDLARVLGWGSACDDDTQLPQILEKLERASTKMLDRWSVMAYEAKLPRQASSSTVTEDFSEDSEVQQILFYEDSVAAHLSKILTSDQHSVVISSAKVLCETVKDFVARVGKAYEKTTESSEESEVMAKKCSVLKEKLDSLLKTLDDESQASSSLPNPPPTIAEEAEDGDGSGSICGSTGDRLVASACPARPQIFRPREQLMLRANSLKKAIRQIIEHTEKAVDEQNAQTQEQEGFVLGLSESEEKMDHRVCPPLSHSESFGVPKGRSQRKVSKSPCEKLISKGSLSLGSSASLPPQPGSRDGLPALNTKILYPNVRAGMSGSLPGGSVISRLLINADPFNSEPETLEYYTEKCVMNNYFGIGLDAKISLDFNNKRDEHPEKCRSRTKNMMWYGVLGTKELLHRTYKNLEQKVLLECDGRPIPLPSLQGIAVLNIPSYAGGTNFWGGTKEDDTFAAPSFDDKILEVVAVFGSMQMAVSRVIRLQHHRIAQCRTVKISILGDEGVPVQVDGEAWVQPPGYIRIVHKNRAQTLTRDRAFESTLKSWEDKQKCELPRPPSCSLHPEMLSEEEATQMDQFGQAAGVLIHSIREIAQSHRDMEQELAHAVNASSKSMDRVYGKPRTTEGLNCSFVLEMVNNFRALRSETELLLSGKMALQLDPPQKEQLGSALAEMDRQLRRLADTPWLCQSAEPGDEESVMLDLAKRSRSGKFRLVTKFKKEKNNKNKEAHSSLGAPVHLWGTEEVAAWLEHLSLCEYKDIFTRHDIRGSELLHLERRDLKDLGVTKVGHMKRILCGIKELSRSAPAVEA

SEQ ID NO: 832948 - protein, 1219 aa, Homo sapiens
RGPGSMAAAAGAPPPGPPQPPPPPPPEESSDSEPEAEPGSPQKLIRKVSTSGQIRQKTIIKEGMLTKQNNSFQRSKRRYFKLRGRTLYYAKTAKSIIFDEVDLTDASVAESSTKNVNNSFTVITPCRKLILCADNRKEMEDWIAALKTVQNREHFEPTQYSMDHFSGMHNWYACSHARPTYCNVCREALSGVTSHGLSCEVCKFKAHKRCAVRATNNCKWTTLASIGKDIIEDADGIAMPHQWLEGNLPVSAKCTVCDKTCGSVLRLQDWRCLWCKAMVHTSCKESLLTKCPLGLCKVSVIPPTALNSIDSDGFWKASCPPSCTSPLLVFVNSKSGDNQGVKFLRRFKQLLNPAQVFDLMNGGPHLGLRLFQKFDTFRILVCGGDGSVGWVLSEIDSLNLHKQCQLGVLPLGTGNDLARVLGWGSACDDDTQLPQILEKLERASTKMLDRWSVMAYEAKLPRQASSSTVTEDFSEDSEVQQILFYEDSVAAHLSKILTSDQHSVVISSAKVLCETVKDFVARVGKAYEKTTESSEESEVMAKKCSVLKEKLDSLLKTLDDESQASSSLPNPPPTIAEEAEDGDGSGSICGSTGDRLVASACPARPQIFRPREQLMLRANSLKKAIRQIIEHTEKAVDEQNAQTQEQEGFVLGLSESEEKMDHRVCPPLSHSESFGVPKGRSQRKVSKSPCEKLISKGSLSLGSSASLPPQPGSRDGLPALNTKILYPNVRAGMSGSLPGGSVISRLLINADPFNSEPETLEYYTEKCVMNNYFGIGLDAKISLDFNNKRDEHPEKCRSRTKNMMWYGVLGTKELLHRTYKNLEQKVLLECDGRPIPLPSLQGIAVLNIPSYAGGTNFWGGTKEDDTFAAPSFDDKILEVVAVFGSMQMAVSRVIRLQHHRIAQCRTVKISILGDEGVPVQVDGEAWVQPPGYIRIVHKNRAQTLTRDRAFESTLKSWEDKQKCELPRPPSCSLHPEMLSEEEATQMDQFGQAAGVLIHSIREIAQSHRDMEQELAHAVNASSKSMDRVYGKPRTTEGLNCSFVLEMVNNFRALRSETELLLSGKMALQLDPPQKEQLGSALAEMDRQLRRLADTPWLCQSAEPGDEESVMLDLAKRSRSGKFRLVTKFKKEKNNKNKEAHSSLGAPVHLWGTEEVAAWLEHLSLCEYKDIFTRHDIRGSELLHLERRDLKDLGVTKVGHMKRILCGIKELSRSAPAVEA

SEQ ID NO: 832949 - protein, 1179 aa, Homo sapiens
RGPGSMAAAAGAPPPGPPQPPPPPPPEESSDSEPEAEPGSPQKLIRKVSTSGQIRQKTIIKEGMLTKQNNSFQRSKRRYFKLRGRTLYYAKTAKSIIFDEVDLTDASVAESSTKNVNNSFTVITPCRKLILCADNRKEMEDWIAALKTVQNREHFEPTQYSMDHFSGMHNWYACSHARPTYCNVCREALSGVTSHGLSCEVCKFKAHKRCAVRATNNCKWTTLASIGKDIIEDADGIAMPHQWLEGNLPVSAKCTVCDKTCGSVLRLQDWRCLWCKAMVHTSCKESLLTKCPLGLCKVSVIPPTALNSIDSDGFWKASCPPSCTSPLLVFVNSKSGDNQGVKFLRRFKQLLNPAQVFDLMNGGPHLGLRLFQKFDTFRILVCGGDGSVGWVLSEIDSLNLHKQCQLGVLPLGTGNDLARVLGWGSACDDDTQLPQILEKLERASTKMLDRWSVMAYEAKLPRQASSSTVTEDFSEDSEVQQILFYEDSVAAHLSKILTSDQHSVVISSAKVLCETVKDFVARVGKAYEKTTESSEESEVMAKKCSVLKEKLDSLLKTLDDESQASSSLPNPPPTIAEEAEDGDGSGSICGSTGDRLVASACPARPQIFRPREQLMLRANSLKKAIRQIIEHTEKAVDEQNAQTQEQEGFVLGLSESEEKMDHRVCPPLSHSESFGVPKGRSQRKVSKSPCEKLISKGSLSLGSSASLPPQPGSRDGLPALNTKILYPNVRAGMSGSLPGGSVISRLLINADPFNSEPETLEYYTEKCVMNNYFGIGLDAKISLDFNNKRDEHPEKCRSRTKNMMWYGVLGTKELLHRTYKNLEQKVLLECDGRPIPLPSLQGIAVLNIPSYAGGTNFWGGTKEDDTFAAPSFDDKILEVVAVFGSMQMAVSRVIRLQHHRIAQCRTVKISILGDEGVPVQVDGEAWVQPPGYIRIVHKNRAQTLTRDRFGQAAGVLIHSIREIAQSHRDMEQELAHAVNASSKSMDRVYGKPRTTEGLNCSFVLEMVNNFRALRSETELLLSGKMALQLDPPQKEQLGSALAEMDRQLRRLADTPWLCQSAEPGDEESVMLDLAKRSRSGKFRLVTKFKKEKNNKNKEAHSSLGAPVHLWGTEEVAAWLEHLSLCEYKDIFTRHDIRGSELLHLERRDLKDLGVTKVGHMKRILCGIKELSRSAPAVEA

SEQ ID NO: 832950 - protein, 773 aa, Homo sapiens
MLDRWSVMAYEAKLPRQASSSTVTEDFSEDSEVQQILFYEDSVAAHLSKILTSDQHSVVISSAKVLCETVKDFVARVGKAYEKTTESSEESEVMAKKCSVLKEKLDSLLKTLDDESQASSSLPNPPPTIAEEAEDGDGSGSICGSTGDRLVASACPARPQIFRPREQLMLRANSLKKAIRQIIEHTEKAVDEQNAQTQEQEGFVLGLSESEEKMDHRVCPPLSHSESFGVPKGRSQRKVSKSPCEKLISKGSLSLGSSASLPPQPGSRDGLPALNTKILYPNVRAGMSGSLPGGSVISRLLINADPFNSEPETLEYYTEKCVMNNYFGIGLDAKISLDFNNKRDEHPEKCRSRTKNMMWYGVLGTKELLHRTYKNLEQKVLLECDGRPIPLPSLQGIAVLNIPSYAGGTNFWGGTKEDDTFAAPSFDDKILEVVAVFGSMQMAVSRVIRLQHHRIAQCRTVKISILGDEGVPVQVDGEAWVQPPGYIRIVHKNRAQTLTRDRAFESTLKSWEDKQKCELPRPPSCSLHPEMLSEEEATQMDQFGQAAGVLIHSIREIAQSHRDMEQELAHAVNASSKSMDRVYGKPRTTEGLNCSFVLEMVNNFRALRSETELLLSGKMALQLDPPQKEQLGSALAEMDRQLRRLADTPWLCQSAEPGDEESVMLDLAKRSRSGKFRLVTKFKKEKNNKNKEAHSSLGAPVHLWGTEEVAAWLEHLSLCEYKDIFTRHDIRGSELLHLERRDLKDLGVTKVGHMKRILCGIKELSRSAPAVEA

SEQ ID NO: 832951 - protein, 742 aa, Homo sapiens
MVQQILFYEDSVAAHLSKILTSDQHSVVISSAKVLCETVKDFVARVGKAYEKTTESSEESEVMAKKCSVLKEKLDSLLKTLDDESQASSSLPNPPPTIAEEAEDGDGSGSICGSTGDRLVASACPARPQIFRPREQLMLRANSLKKAIRQIIEHTEKAVDEQNAQTQEQEGFVLGLSESEEKMDHRVCPPLSHSESFGVPKGRSQRKVSKSPCEKLISKGSLSLGSSASLPPQPGSRDGLPALNTKILYPNVRAGMSGSLPGGSVISRLLINADPFNSEPETLEYYTEKCVMNNYFGIGLDAKISLDFNNKRDEHPEKCRSRTKNMMWYGVLGTKELLHRTYKNLEQKVLLECDGRPIPLPSLQGIAVLNIPSYAGGTNFWGGTKEDDTFAAPSFDDKILEVVAVFGSMQMAVSRVIRLQHHRIAQCRTVKISILGDEGVPVQVDGEAWVQPPGYIRIVHKNRAQTLTRDRAFESTLKSWEDKQKCELPRPPSCSLHPEMLSEEEATQMDQFGQAAGVLIHSIREIAQSHRDMEQELAHAVNASSKSMDRVYGKPRTTEGLNCSFVLEMVNNFRALRSETELLLSGKMALQLDPPQKEQLGSALAEMDRQLRRLADTPWLCQSAEPGDEESVMLDLAKRSRSGKFRLVTKFKKEKNNKNKEAHSSLGAPVHLWGTEEVAAWLEHLSLCEYKDIFTRHDIRGSELLHLERRDLKDLGVTKVGHMKRILCGIKELSRSAPAVEA

SEQ ID NO: 832952 - protein, 369 aa, Homo sapiens
RGCVEWWSALTCPLQTFAAPSFDDKILEVVAVFGSMQMAVSRVIRLQHHRIAQCRTVKISILGDEGVPVQVDGEAWVQPPGYIRIVHKNRAQTLTRDRAFESTLKSWEDKQKCELPRPPSCSLHPEMLSEEEATQMDQFGQAAGVLIHSIREIAQSHRDMEQELAHAVNASSKSMDRVYGKPRTTEGLNCSFVLEMVNNFRALRSETELLLSGKMALQLDPPQKEQLGSALAEMDRQLRRLADTPWLCQSAEPGDEESVMLDLAKRSRSGKFRLVTKFKKEKNNKNKEAHSSLGAPVHLWGTEEVAAWLEHLSLCEYKDIFTRHDIRGSELLHLERRDLKDLGVTKVGHMKRILCGIKELSRSAPAVEA

SEQ ID NO: 832953 - protein, 450 aa, Homo sapiens
RGPGSMAAAAGAPPPGPPQPPPPPPPEESSDSEPEAEPGSPQKLIRKVSTSGQIRQKTIIKEGMLTKQNNSFQRSKRRYFKLRGRTLYYAKTAKSIIFDEVDLTDASVAESSTKNVNNSFTVITPCRKLILCADNRKEMEDWIAALKTVQNREHFEPTQYSMDHFSGMHNWYACSHARPTYCNVCREALSGVTSHGLSCEVCKFKAHKRCAVRATNNCKWTTLASIGKDIIEDADGIAMPHQWLEGNLPVSAKCTVCDKTCGSVLRLQDWRCLWCKAMVHTSCKESLLTKCPLGLCKVSVIPPTALNSIDSDGFWKASCPPSCTSPLLVFVNSKSGDNQGVKFLRRFKQLLNPAQVFDLMNGGPHLGLRLFQKFDTFRILVCGGDGSVGWVLSEIDSLNLHKQCQLGVLPLGTGNDLARVLGWGSACDDDTQLPQILEKLERASTKMLDR

SEQ ID NO: 832954 - protein, 103 aa, Homo sapiens
MEQELAHAVNASSKSMDRVYGKPRTTEVAILAFSVLASSQCLPPSALPVRVHSPASPVHVRPSQCLFPAPNRACSAPRPHAYLPGFFQGLNCSFVLEMVNNFR

SEQ ID NO: 832955 - protein, 67 aa, Homo sapiens
DLAKRSRSGKFRLVTKFKKEKNNKNKEAHSSLGAPGTCLSPACVSGRPRLLDRPRSPGLCFLPWPCS

SEQ ID NO: 832956 - protein, 1219 aa, Homo sapiens; identical to SEQ ID NO: 832948

SEQ ID NO: 832957 - protein, 167 aa, Homo sapiens
RGPGSMAAAAGAPPPGPPQPPPPPPPEESSDSEPEAEPGSPQKLIRKVSTSGQIRQKVITPCRKLILCADNRKEMEDWIAALKTVQNREHFEPTQYSMDHFSGMHNWYACSHARPTYCNVCREALSGVTSHGLSCEVCKFKAHKRCAVRATNNCKWTTLASKGDGHT

SEQ ID NO: 832958 - protein, 1155 aa, Homo sapiens
RGPGSMAAAAGAPPPGPPQPPPPPPPEESSDSEPEAEPGSPQKLIRKVSTSGQIRQKVITPCRKLILCADNRKEMEDWIAALKTVQNREHFEPTQYSMDHFSGMHNWYACSHARPTYCNVCREALSGVTSHGLSCEVCKFKAHKRCAVRATNNCKWTTLASIGKDIIEDADGIAMPHQWLEGNLPVSAKCTVCDKTCGSVLRLQDWRCLWCKAMVHTSCKESLLTKCPLGLCKVSVIPPTALNSIDSDGFWKASCPPSCTSPLLVFVNSKSGDNQGVKFLRRFKQLLNPAQVFDLMNGGPHLGLRLFQKFDTFRILVCGGDGSVGWVLSEIDSLNLHKQCQLGVLPLGTGNDLARVLGWGSACDDDTQLPQILEKLERASTKMLDRWSVMAYEAKLPRQASSSTVTEDFSEDSEVQQILFYEDSVAAHLSKILTSDQHSVVISSAKVLCETVKDFVARVGKAYEKTTESSEESEVMAKKCSVLKEKLDSLLKTLDDESQASSSLPNPPPTIAEEAEDGDGSGSICGSTGDRLVASACPARPQIFRPREQLMLRANSLKKAIRQIIEHTEKAVDEQNAQTQEQEGFVLGLSESEEKMDHRVCPPLSHSESFGVPKGRSQRKVSKSPCEKLISKGSLSLGSSASLPPQPGSRDGLPALNTKILYPNVRAGMSGSLPGGSVISRLLINADPFNSEPETLEYYTEKCVMNNYFGIGLDAKISLDFNNKRDEHPEKCRSRTKNMMWYGVLGTKELLHRTYKNLEQKVLLECDGRPIPLPSLQGIAVLNIPSYAGGTNFWGGTKEDDTFAAPSFDDKILEVVAVFGSMQMAVSRVIRLQHHRIAQCRTVKISILGDEGVPVQVDGEAWVQPPGYIRIVHKNRAQTLTRDRAFESTLKSWEDKQKCELPRPPSCSLHPEMLSEEEATQMDQFGQAAGVLIHSIREIAQSHRDMEQELAHAVNASSKSMDRVYGKPRTTEGLNCSFVLEMVNNFRALRSETELLLSGKMALQLDPPQKEQLGSALAEMDRQLRRLADTPWLCQSAEPGDEESVMLDLAKRSRSGKFRLVTKFKKEKNNKNKEAHSSLGAPVHLWGTEEVAAWLEHLSLCEYKDIFTRHDIRGSELLHLERRDLKDLGVTKVGHMKRILCGIKELSRSAPAVEA

SEQ ID NO: 832959 - protein, 759 aa, Homo sapiens
MELAVTETNSPGHLGWLQVQQILFYEDSVAAHLSKILTSDQHSVVISSAKVLCETVKDFVARVGKAYEKTTESSEESEVMAKKCSVLKEKLDSLLKTLDDESQASSSLPNPPPTIAEEAEDGDGSGSICGSTGDRLVASACPARPQIFRPREQLMLRANSLKKAIRQIIEHTEKAVDEQNAQTQEQEGFVLGLSESEEKMDHRVCPPLSHSESFGVPKGRSQRKVSKSPCEKLISKGSLSLGSSASLPPQPGSRDGLPALNTKILYPNVRAGMSGSLPGGSVISRLLINADPFNSEPETLEYYTEKCVMNNYFGIGLDAKISLDFNNKRDEHPEKCRSRTKNMMWYGVLGTKELLHRTYKNLEQKVLLECDGRPIPLPSLQGIAVLNIPSYAGGTNFWGGTKEDDTFAAPSFDDKILEVVAVFGSMQMAVSRVIRLQHHRIAQCRTVKISILGDEGVPVQVDGEAWVQPPGYIRIVHKNRAQTLTRDRAFESTLKSWEDKQKCELPRPPSCSLHPEMLSEEEATQMDQFGQAAGVLIHSIREIAQSHRDMEQELAHAVNASSKSMDRVYGKPRTTEGLNCSFVLEMVNNFRALRSETELLLSGKMALQLDPPQKEQLGSALAEMDRQLRRLADTPWLCQSAEPGDEESVMLDLAKRSRSGKFRLVTKFKKEKNNKNKEAHSSLGAPVHLWGTEEVAAWLEHLSLCEYKDIFTRHDIRGSELLHLERRDLKDLGVTKVGHMKRILCGIKELSRSAPAVEA

SEQ ID NO: 832960 - protein, 136 aa, Homo sapiens
MDRQLRRLADTPWLCQSAEPGDEESVMLDLAKRSRSGKFRLVTKFKKEKNNKNKEAHSSLGAPVHLWGTEEVAAWLEHLSLCEYKDIFTRHDIRGSELLHLERRDLKDLGVTKVGHMKRILCGIKELSRSAPAVEA

SEQ ID NO: 832961 - protein, 1219 aa, Homo sapiens; identical to SEQ ID NO: 832948

SEQ ID NO: 832962 - protein, 425 aa, Homo sapiens
RGPGSMAAAAGAPPPGPPQPPPPPPPEESSDSEPEAEPGSPQKLIRKVSTSGQIRQKTIIKEGMLTKQNNSFQRSKRRYFKLRGRTLYYAKTAKSIIFDEVDLTDASVAESSTKNVNNSFTVITPCRKLILCADNRKEMEDWIAALKTVQNREHFEPTQYSMDHFSGMHNWYACSHARPTYCNVCREALSGVTSHGLSCEVCKFKAHKRCAVRATNNCKWTTLASIGKDIIEDADGIAMPHQWLEGNLPVSAKCTVCDKTCGSVLRLQDWRCLWCKAMVHTSCKESLLTKCPLGLCKVSVIPPTALNSIDSDGFWKASCPPSCTSPLLVFVNSKSGDNQGVKFLRRFKQLLNPAQVFDLMNGGPHLGLRLFQKFDTFRILVCGGDGSVGWVLSEIDSLNLHKQVPGQEGAQPGAERVRRLEGNHA

SEQ ID NO: 832963 - protein, 68 aa, Homo sapiens
RGLYIFFCSFLRPGFWKASCPPSCTSPLLVFVNSKSGDNQGVKFLRRFKQLLNPAQVFDLMNGGPHLG

SEQ ID NO: 832964 - protein, 558 aa, Homo sapiens
MRAAEQAGCMVSASRAGQPEAGPWSCSGVILSRSPGLVLCHGGIFVPFLRAGSEVLAAAGAVFLPGDSCRDDLRLHVQWAPTAAGPGGGAERGRPGLCTPQCASLEPGPPAPSRGRPLQPRLPAELLLLLSCPAFWAHFARLFGDEAAEQWRFSSAARDDEVSEDEEADQLRALGWFALLGVRLGQEEVEEERGPAMAVSPLGGRAKGAPLLVCGSPFGAFCPDIFLNTLSCGVLSNVAGPLLLTDARCLPGTEGGGVFTARPAGALVALVVAPLCWKAGEWVGFTLLCAAAPLFRAARDALHRLPHSTAALAALLPPEVGVPWGLPLRDSGPLWAAAAVLVECGTVWGSGVAVAPRLVVTCRHVSPREAARVLVRSTTPKSVAIWGRVVFATQETCPYDIAVVSLEEDLDDVPIPVPAEHFHEGEAVSVVGFGVFGQSCGPSVTSGILSAVVQVNGTPVMLQTTCAVHSGSSGGPLFSNHSGNLLGIITSNTRDNNTGATYPHLNFSIPITVLQPALQQYSQTQDLGGLRELDRAAEPVRVVWRLQRPLAEAPRSKL

SEQ ID NO: 832965 - protein, 186 aa, Homo sapiens
MSFVSLAPRSVAIWGRVVFATQETCPYDIAVVSLEEDLDDVPIPVPAEHFHEGEAVSVVGFGVFGQSCGPSVTSGILSAVVQVNGTPVMLQTTCAVHSGSSGGPLFSNHSGNLLGIITSNTRDNNTGATYPHLNFSIPITVLQPALQQYSQTQDLGGLRELDRAAEPVRVVWRLQRPLAEAPRSKL

SEQ ID NO: 832966 - protein, 195 aa, Homo sapiens
QAVLVWNFRMREAAQPDGSVAIWGRVVFATQETCPYDIAVVSLEEDLDDVPIPVPAEHFHEGEAVSVVGFGVFGQSCGPSVTSGILSAVVQVNGTPVMLQTTCAVHSGSSGGPLFSNHSGNLLGIITSNTRDNNTGATYPHLNFSIPITVLQPALQQYSQTQDLGGLRELDRAAEPVRVVWRLQRPLAEAPRSKL

SEQ ID NO: 832967 - protein, 117 aa, Homo sapiens
MSPSLCPLSTSMKVNGTPVMLQTTCAVHSGSSGGPLFSNHSGNLLGIITSNTRDNNTGATYPHLNFSIPITVLQPALQQYSQTQDLGGLRELDRAAEPVRVVWRLQRPLAEAPRSKL

SEQ ID NO: 832968 - protein, 84 aa, Homo sapiens
PSVTSGILSAVVQVNGTPVMLQTTCAVHSGSSGGPLFSNHSGNLLGNQLFGPLPPSHLPEPQSHPMSACGQPQCTLCLGKWWAL

SEQ ID NO: 832969 - protein, 452 aa, Homo sapiens
MRAAEQAGCMVSASRAGQPEAGPWSCSGVILSRSPGLVLCHGGIFVPFLRAGSEVLAAAGAVFLPGDSCRDDLRLHVQWAPTAAGPGGGAERGRPGLCTPQCASLEPGPPAPSRGRPLQPRLPAELLLLLSCPAFWAHFARLFGDEAAEQWRFSSAARDDEVSEDEEADQLRALGWFALLGVRLGQEEVEEERGPAMAVSPLGGRAKGAPLLVCGSPFGAFCPDIFLNTLSCGVLSNVAGPLLLTDARCLPGTEGGGVFTARPAGALVALVVAPLCWKAGEWVGFTLLCAAPPFSAPPATRFTACRTAPLPWPPFCRQRWASRGVCPPRLRAPVGSRGSVGGVRHRMGLRSGCGTPPCSDLVGTCPLGKQPGSWCAPPPPSIITSNTRDNNTGATYPHLNFSIPITVLQPALQQYSQTQDLGGLRELDRAAEPVRVVWRLQRPLAEAPRSKL

SEQ ID NO: 832970 - protein, 207 aa, Homo sapiens
PIGLDEEDGVRACASRFQLWVALGSFSRTGSVAIWGRVVFATQETCPYDIAVVSLEEDLDDVPIPVPAEHFHEGEAVSVVGFGVFGQSCGPSVTSGILSAVVQVNGTPVMLQTTCAVHSGSSGGPLFSNHSGNLLGIITSNTRDNNTGATYPHLNFSIPITVLQPALQQYSQTQDLGGLRELDRAAEPVRVVWRLQRPLAEAPRSKL

SEQ ID NO: 832971 - protein, 558 aa, Homo sapiens; identical to SEQ ID NO: 832964

SEQ ID NO: 832972 - protein, 408 aa, Homo sapiens
ARCGLWGFSARGRGTGKMAAVVENVVKLLGEQYYKDAMEQCHNYNARLCAERSVRLPFLDSQTGVAQSNCYIWMEKRHRGPGLASGQLYSYPARRWRKKRRAHPPEDPRLSFPSIKPDTDQTLKKEGLISQDGSSLEALLRTDPLEKRGAPDPRVDDDSLGEFPVTNSRARKRILEPDDFLDDLDDEDYEEDTPKRRGKGKSKGKGVGSARKKLDASILEDRDKPYACDICGKRYKNRPGLSYHYAHSHLAEEEGEDKEDSQPPTPVSQRSEEQKSKKGPDGLALPNNYCDFCLGDSKINKKTGQPEELVSCSDCGRSGHPSCLQFTPVMMAAVKTYRWQCIECKCCNICGTSENDDQLLFCDDCDRGYHMYCLTPSMSEPPEGSWSCHLCLDLLKEKASIYQNQNSS

SEQ ID NO: 832973 - protein, 179 aa, Homo sapiens
ARCGLWGFSARGRGTGKMAAVVENVVKLLGEQYYKDAMEQCHNYNARLCAERSVRLPFLDSQTGVAQSNCYIWMEKRHRGPGLASGQLYSYPARRWRKKRRAHPPEDPRLSFPSIKPDTDQTLKKEGLISQDGSSLEALLRTDPLEKRGAPDPRVDDDSLGEFPVTNSRARKVQDYPCG

SEQ ID NO: 832974 - protein, 226 aa, Homo sapiens
MHIFLPMLTLLSTQRILEPDDFLDDLDDEDYEEDTPKRRGKGKSKGKGVGSARKKLDASILEDRDKPYACDSECLTSGWVDLALDPAPALDMRGGRVVFLPRVLKQTWALVLPADCFRLRPLGGLGPCYMTGGTCMLWERFLPSSGVGLLVGATAGRVGLSTDGLQVSWPQLSQGPRGLTLSFSTSVLFFFLSALPHFCPSTLGAPSPLGFLSRLLCFPAAAAPVS

SEQ ID NO: 832975 - protein, 408 aa, Homo sapiens; identical to SEQ ID NO: 832972

SEQ ID NO: 832976 - protein, 408 aa, Homo sapiens; identical to SEQ ID NO: 832972

SEQ ID NO: 832977 - protein, 422 aa, Homo sapiens
ARCGLWGFSARGRGTGKMAAVVENVVKLLGEQYYKDAMEQCHNYNARLCAERSVRLPFLDSQTGVAQSNCYIWMEKRHRGPGLASGQLYSYPARRWRKKRRAHPPEDPRLSFPSIKPDTDQTLKKEGLISQDGSSLEALLRTDPLEKRGAPDPRVDDDSLGEFPVTNSRARKRILEPDDFLDDLDDEDYEEDTPKRRGKGKSKGKGVGSARKKLDASILEDRDKPYACDNSFKQKHTSKAPQRVCGKRYKNRPGLSYHYAHSHLAEEEGEDKEDSQPPTPVSQRSEEQKSKKGPDGLALPNNYCDFCLGDSKINKKTGQPEELVSCSDCGRSGHPSCLQFTPVMMAAVKTYRWQCIECKCCNICGTSENDDQLLFCDDCDRGYHMYCLTPSMSEPPEGSWSCHLCLDLLKEKASIYQNQNSS

SEQ ID NO: 832978 - protein, 349 aa, Homo sapiens
MTICSKTKKNEKSPNNKTRVEKGDITSDTTEIQRIISSYYKQQYTNTLENLKETDTFLDTDQTLKKEGLISQDGSSLEALLRTDPLEKRGAPDPRVDDDSLGEFPVTNSRARKRILEPDDFLDDLDDEDYEEDTPKRRGKGKSKGKGVGSARKKLDASILEDRDKPYACDICGKRYKNRPGLSYHYAHSHLAEEEGEDKEDSQPPTPVSQRSEEQKSKKGPDGLALPNNYCDFCLGDSKINKKTGQPEELVSCSDCGRSGHPSCLQFTPVMMAAVKTYRWQCIECKCCNICGTSENDDQLLFCDDCDRGYHMYCLTPSMSEPPEGSWSCHLCLDLLKEKASIYQNQNSS

SEQ ID NO: 832979 - protein, 108 aa, Homo sapiens
MWPPTCSPTYLRLFLSSTSYFIPIFPFFLLSFTNPENLGVVVPACLWQLQAEVAALTTSGPRPSGRKEQHTAPRRACGPVSLCSPLSAFTLLALGPAPGDHRVQTVSS

SEQ ID NO: 832980 - protein, 384 aa, Homo sapiens
ARCGLWGFSARGRGTGKMAAVVENVVKLLGEQYYKDAMEQCHNYNARLCAERSVRLPFLDSQTGVAQSNCYIWMEKRHRGPGLASGQLYSYPARRWRKKRRAHPPEDPRLSFPSIKPDTDQTLKKEGLISQDGSSLEALLRTDPLEKRGAPDPRVDDDSLGEFPVTNSRARKRILEPDDFLDDLDDEDYEEDTPKRRGKGKSKGKGVGSARKKLDASILEDRDKPYACDSECLTSGWVDLALDPAPALDMRGGRVVFLPRVLKQTWALVLPADCFRLRPLGGLGPCYMTGGTCMLWERFLPSSGVGLLVGATAGRVGLSTDGLQVSWPQLSQGPRGLTLSFSTSVLFFFLSALPHFCPSTLGAPSPLGFLSRLLCFPAAAAPVS

SEQ ID NO: 832981 - protein, 247 aa, Homo sapiens
ARCGLWGFSARGRGTGKMAAVVENVVKLLGEQYYKDAMEQCHNYNARLCAERSVRLPFLDSQTGVAQSNCYIWMEKRHRGPGLASGQLYSYPARRWRKKRRAHPPEDPRLSFPSIKPDTDQTLKKEGLISQDGSSLEALLRTDPLEKRGAPDPRVDDDSLGEFPVTNSRARKRILEPDDFLDDLDDEDYEEDTPKRRGKGKSKGKGVGSARKKLDASILEDRDKPYACDICGNVTGTTGLSTYAIHW

SEQ ID NO: 832982 - protein, 35 aa, Homo sapiens
MRSRVTAREALGRQVSSAVTTPPTGLVGPSGSAAA

SEQ ID NO: 832983 - protein, 408 aa, Homo sapiens; identical to SEQ ID NO: 832972

SEQ ID NO: 832984 - protein, 324 aa, Homo sapiens
ARCGLWGFSARGRGTGKMAAVVENVVKLLGEQYYKDAMEQCHNYNARLCAERSVRLPFLDSQTGVAQSNCYIWMEKRHRGPGLASGQLYSYPARRWRKKRRAHPPEDPRLSFPSIKPDTDQTLKKEGLISQDGSSLEALLRTDPLEKRGAPDPRVDDDSLGEFPVTNSRARKRILEPDDFLDDLDDEDYEEDTPKRRGKGKSKGKGVGSARKKLDASILEDRDKPYACDICGKRYKNRPGLSYHYAHSHLAEEEGEDKEDSQPPTPVSQRSEEQKSKKGPDGLALPNNYCDFCLGDSKINKKTGQPEELVSCSDCGRSGPVALL

SEQ ID NO: 832985 - protein, 408 aa, Homo sapiens; identical to SEQ ID NO: 832972

SEQ ID NO: 832986 - protein, 161 aa, Homo sapiens
KTSPQPKEPWVQKAPTFSVSPPPPLSPGKLELPPVSGPVERESFHLPEPELLLMWPPTCSPTYLRLFLSSTSYFIPIFPFFLLSFTNPENLGVVVPACLWQLQAEVAALTTSGPRPSGRKEQHTAPRRACGPVSLCSPLSAFTLLALGPAPGDHRVQTVSS

SEQ ID NO: 832987 - protein, 47 aa, Homo sapiens
TYTPDFYLPCSLGEQYYKDAMEQCHNYNARLCAERSVRLPFLDSQTG

SEQ ID NO: 832988 - protein, 474 aa, Homo sapiens
MATNWGSLLQDKQQLEELARQAVDRALAEGVLLRTSQEPTSSEVVSYAPFTLFPSLVPSALLEQAYAVQMDFNLLVDAVSQNAAFLEQTLSSTIKQDDFTARLFDIHKQVLKEGIAQTVFLGLNRSDYMFQRSADGSPALKQIEINTISASFGGLASRTPAVHRHVLSVLSKTKEAGKILSNNPSKGLALGIAKAWELYGSPNALVLLIAQEKERNIFDQRAIENELLARNIHVIRRTFEDISEKGSLDQDRRLFVDGQEIAVVYFRDGYMPRQYSLQNWEARLLLERSHAAKCPDIATQLAGTKKVQQELSRPGMLEMLLPGQPEAVARLRATFAGLYSLDVGEEGDQAIAEALAAPSRFVLKPQREGGGNNLYGEEMVQALKQLKDSEERASYILMEKIEPEPFENCLLRPGSPARVVQCISELGIFGVYVRQEKTLVMNKHVGHLLRTKAIEHADGGVAAGVAVLDNPYPV

SEQ ID NO: 832989 - protein, 474 aa, Homo sapiens; identical to SEQ ID NO: 832988

SEQ ID NO: 832990 - protein, 474 aa, Homo sapiens; identical to SEQ ID NO: 832988

SEQ ID NO: 832991 - protein, 474 aa, Homo sapiens; identical to SEQ ID NO: 832988

SEQ ID NO: 832992 - protein, 434 aa, Homo sapiens [sequence omitted]

SEQ ID NO: 832993 - protein, 376 aa, Homo sapiens
MATNWGSLLQDKQQLEELARQAVDRALAEGVLLRTSQEPTSSEVVSYAPFTLFPSLVPSALLEQAYAVQMDFNLLVDAVSQNAAFLEQTLSSTIKQDDFTARLFDIHKQVLKEGIAQTVFLGLNRSDYMFQRSADGSPALKQIEINTISASFGGLASRTPAVHRHVLSVLSKTKEAGKILSNNPSKGLALGIAKAWELYGSPNALVLLIAQEKERNIFDQRAIENELLARNIHVIRRTFEDISEKGSLDQDRRLFVDGQEIAVVYFRDGYMPRQYSLQNWEARLLLERSHAAKCPDIATQLAGTKKVQQELSRPGMLEMLLPGQPEAVARLRATFAGLYSLDVGEEGDQAIAEALAAPSRFVLKPQREGGGRKRHS

SEQ ID NO: 832994 - protein, 346 aa, Homo sapiens
MFQRSADGSPALKQIEINTISASFGGLASRTPAVHRHVLSVLSKTKEAGKILSNNPSKGLALGIAKAWELYGSPNALVLLIAQEKERNIFDQRAIENELLARNIHVIRRTFEDISEKGSLDQDRRLFVDGQEIAVVYFRDGYMPRQYSLQNWEARLLLERSHAAKCPDIATQLAGTKKVQQELSRPGMLEMLLPGQPEAVARLRATFAGLYSLDVGEEGDQAIAEALAAPSRFVLKPQREGGGNNLYGEEMVQALKQLKDSEERASYILMEKIEPEPFENCLLRPGSPARVVQCISELGIFGVYVRQEKTLVMNKHVGHLLRTKAIEHADGGVAAGVAVLDNPYPV

SEQ ID NO: 832995 - protein, 456 aa, Homo sapiens
KLECELLMQWKGLGLNINQQGAGFHVVSYAPFTLFPSLVPSALLEQAYAVQMDFNLLVDAVSQNAAFLEQTLSSTIKQDDFTARLFDIHKQVLKEGIAQTVFLGLNRSDYMFQRSADGSPALKQIEINTISASFGGLASRTPAVHRHVLSVLSKTKEAGKILSNNPSKGLALGIAKAWELYGSPNALVLLIAQEKERNIFDQRAIENELLARNIHVIRRTFEDISEKGSLDQDRRLFVDGQEIAVVYFRDGYMPRQYSLQNWEARLLLERSHAAKCPDIATQLAGTKKVQQELSRPGMLEMLLPGQPEAVARLRATFAGLYSLDVGEEGDQAIAEALAAPSRFVLKPQREGGGNNLYGEEMVQALKQLKDSEERASYILMEKIEPEPFENCLLRPGSPARVVQCISELGIFGVYVRQEKTLVMNKHVGHLLRTKAIEHADGGVAAGVAVLDNPYPV

SEQ ID NO: 832996 - protein, 390 aa, Homo sapiens
MFSVSSSSTIKQDDFTARLFDIHKQVLKEGIAQTVFLGLNRSDYMFQRSADGSPALKQIEINTISASFGGLASRTPAVHRHVLSVLSKTKEAGKILSNNPSKGLALGIAKAWELYGSPNALVLLIAQEKERNIFDQRAIENELLARNIHVIRRTFEDISEKGSLDQDRRLFVDGQEIAVVYFRDGYMPRQYSLQNWEARLLLERSHAAKCPDIATQLAGTKKVQQELSRPGMLEMLLPGQPEAVARLRATFAGLYSLDVGEEGDQAIAEALAAPSRFVLKPQREGGGNNLYGEEMVQALKQLKDSEERASYILMEKIEPEPFENCLLRPGSPARVVQCISELGIFGVYVRQEKTLVMNKHVGHLLRTKAIEHADGGVAAGVAVLDNPYPV

SEQ ID NO: 832997 - protein, 203 aa, Homo sapiens
PSPAVDVLPNSVTVLTRSHAAKCPDIATQLAGTKKVQQELSRPGMLEMLLPGQPEAVARLRATFAGLYSLDVGEEGDQAIAEALAAPSRFVLKPQREGGGNNLYGEEMVQALKQLKDSEERASYILMEKIEPEPFENCLLRPGSPARVVQCISELGIFGVYVRQEKTLVMNKHVGHLLRTKAIEHADGGVAAGVAVLDNPYPV

SEQ ID NO: 832998 - protein, 474 aa, Homo sapiens; identical to SEQ ID NO: 832988

SEQ ID NO: 832999 - protein, 119 aa, Homo sapiens
EEVGRGSRGLASFIAGNNLYGEEMVQALKQLKDSEERASYILMEKIEPEPFENCLLRPGSPARVVQCISELGIFGVYVRQEKTLVMNKHVGHLLRTKAIEHADGGVAAGVAVLDNPYPV

SEQ ID NO: 833000 - protein, 108 aa, Homo sapiens
MATNWGSLLQDKQQLEELARQAVDRALAEGVLLRTSQEPTSSEVVSYAPFTLFPSLVPSALLEQAYAVQMDFNLLVDAVSQNAAFLEQTLSSTKSKSLHFQLSFGGRT

SEQ ID NO: 833001 - protein, 474 aa, Homo sapiens; identical to SEQ ID NO: 832988

SEQ ID NO: 833002 - protein, 288 aa, Homo sapiens
MATNWGSLLQDKQQLEELARQAVDRALAEGVLLRTSQEPTSSEVVSYAPFTLFPSLVPSALLEQAYAVQMDFNLLVDAVSQNAAFLEQTLSSTIKQDDFTARLFDIHKQVLKEGIAQTVFLGLNRSDYMFQRSADGSPALKQIEINTISASFGGLASRTPAVHRHVLSVLSKTKEAGKILSNNPSKGLALGIAKAWELYGSPNALVLLIAQEKERNIFDQRAIENELLARNIHVIRRTFEDISEKGSLDQDRRLFVIGKHVYCWRGHMLPSAQTLPPSWLGLRRCSRS

SEQ ID NO: 833003 - protein, 519 aa, Homo sapiens
RRPRWSPPLLPKVHPPGCSRRTPNAKAALSSTAPSWPRLSAKGVGMATNWGSLLQDKQQLEELARQAVDRALAEGVLLRTSQEPTSSEVVSYAPFTLFPSLVPSALLEQAYAVQMDFNLLVDAVSQNAAFLEQTLSSTIKQDDFTARLFDIHKQVLKEGIAQTVFLGLNRSDYMFQRSADGSPALKQIEINTISASFGGLASRTPAVHRHVLSVLSKTKEAGKILSNNPSKGLALGIAKAWELYGSPNALVLLIAQEKERNIFDQRAIENELLARNIHVIRRTFEDISEKGSLDQDRRLFVDGQEIAVVYFRDGYMPRQYSLQNWEARLLLERSHAAKCPDIATQLAGTKKVQQELSRPGMLEMLLPGQPEAVARLRATFAGLYSLDVGEEGDQAIAEALAAPSRFVLKPQREGGGNNLYGEEMVQALKQLKDSEERASYILMEKIEPEPFENCLLRPGSPARVVQCISELGIFGVYVRQEKTLVMNKHVGHLLRTKAIEHADGGVAAGVAVLDNPYPV

SEQ ID NO: 833004 - protein, 297 aa, Homo sapiens
MATNWGSLLQDKQQLEELARQAVDRALAEGVLLRTSQEPTSSEVVSYAPFTLFPSLVPSALLEQAYAVQMDFNLLVDAVSQNAAFLEQTLSSTIKQDDFTARLFDIHKQVLKEGIAQTVFLGLNRSDYMFQRSADGSPALKQIEINTISASFGGLASRTPAVHRHVLSVLSKTKEAGKILSNNPSKGLALGIAKAWELYGSPNALVLLIAQEKERNIFDQRAIENELLARNIHVIRRTFEDIWMARKLLWFTSGMATCLVSTVYRIGKHVYCWRGHMLPSAQTLPPSWLGLRRCSRS

SEQ ID NO: 833005 - protein, 456 aa, Homo sapiens
MATNWGSLLQDKQQLEELARQAVDRALAEGVLLRTSQEPTSSEVVSYAPFTLFPSLVPSALLEQAYAVQMDFNLLVDAVSQNAAFLEQTLSSTIKQDDFTARLFDIHKQVMFQRSADGSPALKQIEINTISASFGGLASRTPAVHRHVLSVLSKTKEAGKILSNNPSKGLALGIAKAWELYGSPNALVLLIAQEKERNIFDQRAIENELLARNIHVIRRTFEDISEKGSLDQDRRLFVDGQEIAVVYFRDGYMPRQYSLQNWEARLLLERSHAAKCPDIATQLAGTKKVQQELSRPGMLEMLLPGQPEAVARLRATFAGLYSLDVGEEGDQAIAEALAAPSRFVLKPQREGGGNNLYGEEMVQALKQLKDSEERASYILMEKIEPEPFENCLLRPGSPARVVQCISELGIFGVYVRQEKTLVMNKHVGHLLRTKAIEHADGGVAAGVAVLDNPYPV

SEQ ID NO: 833006 - protein, 328 aa, Homo sapiens
RTRGSGRVGRSRTPAVHRHVLSVLSKTKEAGKILSNNPSKGLALGIAKAWELYGSPNALVLLIAQEKERNIFDQRAIENELLARNIHVIRRTFEDISEKGSLDQDRRLFVDGQEIAVVYFRDGYMPRQYSLQNWEARLLLERSHAAKCPDIATQLAGTKKVQQELSRPGMLEMLLPGQPEAVARLRATFAGLYSLDVGEEGDQAIAEALAAPSRFVLKPQREGGGNNLYGEEMVQALKQLKDSEERASYILMEKIEPEPFENCLLRPGSPARVVQCISELGIFGVYVRQEKTLVMNKHVGHLLRTKAIEHADGGVAAGVAVLDNPYPV

SEQ ID NO: 833007 - protein, 474 aa, Homo sapiens; identical to SEQ ID NO: 832988

SEQ ID NO: 833008 - protein, 474 aa, Homo sapiens; identical to SEQ ID NO: 832988

SEQ ID NO: 833009 - protein, 108 aa, Homo sapiens
LGIEEKGASFPFPSFIHSFILRRSPALLPRLECNGMISAHRNLCLPGSGDSPASASQIAGTTGTYHHAWLIFVFLVEMGVSLCWPGWSRTPDLMIHTPRPPKVLRLQA

SEQ ID NO: 833010 - protein, 269 aa, Homo sapiens
GGRGWWGFWTEPLRVRADPVSGCGGKMAELRVLVAVKRVIDYAVKIRVKPDRTGVVTDGVKHSMNPFCEIAVEEAVRLKEKKLVKEVIAVSCGPAQCQETIRTALAMGADRGIHVEVPPAEAERLGPLQVARVLAKLAEKEKVDLVLLGKQAIDDDCNQTGQMTAGFLDWPQGTFASQVTLEGDKLKVEREIDGGLETLRLKLPAVVTADLRLNEPRYATLPNIMKAKKKKIEVIKPGDLGVDLTSKLSVISVEDRQGTRVSGTLRLWQ

SEQ ID NO: 833011 - protein, 167 aa, Homo sapiens
MGVKRSLQSGGILLSLVANVLMVLSTATNYWTRQQEGHSGLWQECNHGICSSIPCQTTLAVTVACMVLAVGVGVVGMVMGLRIRCDEGESLRGQTTSAFLFLGGLLLLTALIGYTVKNAWKNNVFFSWSYFSGWLALPFSILAGFCFLLADMIMQSTDAISGFPVCL

SEQ ID NO: 833012 - protein, 218 aa, Homo sapiens
MNPFCEIAVEEAVRLKEKKLVKEVIAVSCGPAQCQETIRTALAMGADRGIHVEVPPAEAERLGPLQVARVLAKLAEKEKVDLVLLGKQAIDDDCNQTGQMTAGFLDWPQGTFASQVTLEGDKLKVEREIDGGLETLRLKLPAVVTADLRLNEPRYATLPNIMKAKKKKIEVIKPGDLGVDLTSKLSVISVEDPPQRTAGVKVETTEDLVAKLKEIGRI

SEQ ID NO: 833013 - protein, 346 aa, Homo sapiens
MYLSLWVTINTVNLRNTLSGLRGAVTTVGMIKSDVPGTQEWLDERRRQGDLPLPTNSNPVLSLELCDPGQGPAPFQAVVVLIQPGRGLALRPPPSCLFPPDPTPSPPAGQIRVKPDRTGVVTDGVKHSMNPFCEIAVEEAVRLKEKKLVKEVIAVSCGPAQCQETIRTALAMGADRGIHVEVPPAEAERLGPLQVARVLAKLAEKEKVDLVLLGKQAIDDDCNQTGQMTAGFLDWPQGTFASQVTLEGDKLKVEREIDGGLETLRLKLPAVVTADLRLNEPRYATLPNIMKAKKKKIEVIKPGDLGVDLTSKLSVISVEDPPQRTAGVKVETTEDLVAKLKEIGRI

SEQ ID NO: 833014 - protein, 137 aa, Homo sapiens
GGRGWWGFWTEPLRVRADPVSGCGGKMAELRVLVAVKRVIDYAVKIRVKPDRTGVVTDGVKHSMNPFCEIAVEEAVRLKEKKLVKEVIAVSCGPAQCQETIRTALAMGADRGIHVEVPPAEAERLGPLQVARVCGDS

SEQ ID NO: 833015 - protein, 176 aa, Homo sapiens
GGRGWWGFWTEPLRVRADPVSGCGGKMAELRVLVAVKRVIDYAVKIRVKPDRTGVVTDGVKHSMNPFCEIAVEEAVRLKEKKLVKEVIAVSCGPAQCQETIRTALAMGADRGIHVEVPPAEAERLGPLQVARVLAKLAEKEKVDLVLLGKQAIDDDCNQTGQMTAGFLDWPQGISQ

SEQ ID NO: 833016 - protein, 322 aa, Homo sapiens
MVWREEVVDPQAGLLREGGLQVPRSRDLRQEYQGRSVEEAGSSAGGLGVGKAWAHPALVAPGCSLSGMGVKRSLQSGGILLSLVANVLMVLSTATNYWTRQQEGHSGLWQECNHGICSSIPCQTTLAVTVACMVLAVGVGVVGMVMGLRIRCDEGESLRGQTTSAFLFLGGLLLLTALIGYTVKNAWKNNVFFSWSYFSGWLALPFSILAGKLDSGKRVEETAQKTLTPEAPQLPSQETPGTSRGLPNTLTTPADPAETPLEPQTPVPGALPAIRPRAHLPLPAPHPRPPRLLLSAGRHDHAEHRRHQWIPRVSVTAACLGQ

SEQ ID NO: 833017 - protein, 87 aa, Homo sapiens
GGRGWWGFWTEPLRVRADPVSGCGGKMAELRVLVAVKRVIDYAVKIRVKPDRTGVVTDGVKHSMNPFCEIACGGPAPAHGRRQGGDH

SEQ ID NO: 833018 - protein, 281 aa, Homo sapiens
GGRGWWGFWTEPLRVRADPVSGCGGKMAELRVLVAVKRVIDYAVKIRVKPDRTGVVTDGVKHSMNPFCEIAVEEAVRLKEKKLVKEVIAVSCGPAQCQETIRTALAMGADRGIHVEVPPAEAERLGPLQVARVLAKLAEKEKVDLVLLGKQAIDDDCNQTGQMTAGFLDWPQGTFASQVTLEGDKLKVEREIDGGLETLRLKLPAVVTADLRLNEPRYATLPNIMKAKKKKIEVIKPGDLGVDLTSKLSVISVEDPPQRTAGVKVETTEDLVAKLKEIGRI

SEQ ID NO: 833019 - protein, 281 aa, Homo sapiens; identical to SEQ ID NO: 833018

SEQ ID NO: 833020 - protein, 262 aa, Homo sapiens
GGRGWWGFWTEPLRVRADPVSGCGGKIRVKPDRTGVVTDGVKHSMNPFCEIAVEEAVRLKEKKLVKEVIAVSCGPAQCQETIRTALAMGADRGIHVEVPPAEAERLGPLQVARVLAKLAEKEKVDLVLLGKQAIDDDCNQTGQMTAGFLDWPQGTFASQVTLEGDKLKVEREIDGGLETLRLKLPAVVTADLRLNEPRYATLPNIMKAKKKKIEVIKPGDLGVDLTSKLSVISVEDPPQRTAGVKVETTEDLVAKLKEIGRI

SEQ ID NO: 833021 - protein, 119 aa, Homo sapiens
MTAGFLDWPQGTFASQVTLEGDKLKVEREIDGGLETLRLKLPAVVTADLRLNEPRYATLPNIMKAKKKKIEVIKPGDLGVDLTSKLSVISVEDPPQRTAGVKVETTEDLVAKLKEIGRI

SEQ ID NO: 833022 - protein, 155 aa, Homo sapiens
GGRGWWGFWTEPLRVRADPVSGCGGKMAELRVLVAVKRVIDYAVKIRVKPDRTGVVTDGVKHSMNPFCEIAVEEAVRLKEKKLVKEVIAVSCGPAQCQETIRTALAMGADRGIHVEVPPAEAERLGPLQVARVLAKLAEKEKVDLVAKLKEIGRI

SEQ ID NO: 833023 - protein, 180 aa, Homo sapiens
MGVKRSLQSGGILLSLVANVLMVLSTATNYWTRQQEGHSGLWQECNHGICSSIPCQTTLAVTVACMVLAVGVGVVGMVMGLRIRCDEGESLRGQTTSAFLFLGGETADRPRGSPAALPGNPGDLSGTPQHTNDSRRPGRDPLGAPNPSPRGPPGHPPQGPPSSPCSAPPSPQASAFCWQT

SEQ ID NO: 833024 - protein, 234 aa, Homo sapiens
LAVTVACMVLAVGVGVVGMVMGLRIRCDEGESLRGQTTSAFLFLGGETADRPRRAGRGGPWVMEGPGRQGRGLRYSARIRGAGLEEAERGGRGSRQSSEREEQEGAWARGGLRGDRRGLIEGGGSEGAWPGCSPHQAQLAHLAAGRGPGLLLLTALIGYTVKNAWKNNVFFSWSYFSGWLALPFSILAGKLDSGKRVEETAQKTLTPEAPQLPSQETPGTSRGLPNTLTTPADP

SEQ ID NO: 833025 - protein, 198 aa, Homo sapiens
GRSERFERERRGLLPSTGSCEARGTAFSGLPRSQPFAPGPGSPSRSRGTGRQHPLRRVMGPRRRSRKPEAPRRRSPSPTPTPGPSRRGPSLGASSHQHSRRRQGWLKEIRKLQKSTHLLIRKLPFSRLAREICVKFTRGVDFNWQAQALLALQEAAEAFLVHLFEDAYLLTLHAGRVTLFPKDVQLARRIRGLEEGLG

SEQ ID NO: 833026 - protein, 133 aa, Homo sapiens
ARKRSRRRPRVTGPGAANWSEPQRPPTWPGPSTSCSWPGSCLLPAPSTRSRQSASSHQHSRRRQGWLKEIRKLQKSTHLLIRKLPFSRLAAEAFLVHLFEDAYLLTLHAGRVTLFPKDVQLARRIRGLEEGLG

SEQ ID NO: 833027 - protein, 371 aa, Homo sapiens
MAWTKYQLFLAGLMLVTGSINTLSAKWADNFMAEGCGGSKEHSFQHPFLQAVGMFLGEFSCLAAFYLLRCRAAGQSDSSVDPQQPFNPLLFLPPALCDMTGTSLMYVALNMTSASSFQMLRGAVIIFTGLFSVAFLGRRLVLSQWLGILATIAGLVVVGLADLLSKHDSQHKLSEVITGDLLIIMAQIIVAIQMVLEEKFVYKHNVHPLRAVGTEGLFGFVILSLLLVPMYYIPAGSFSGNPRGTLEDALDAFCQVGQQPLIAVALLGNISSIAFFNFAGISVTKELSATTRMVLDSLRTVVIWALSLALGWEAFHALQILGFLILLIGTALYNGLHRPLLGRLSRGRPLAEESEQERLLGGTRTPINDAS

SEQ ID NO: 833028 - protein, 371 aa, Homo sapiens; identical to SEQ ID NO: 833027

SEQ ID NO: 833029 - protein, 371 aa, Homo sapiens; identical to SEQ ID NO: 833027

SEQ ID NO: 833030 - protein, 198 aa, Homo sapiens; identical to SEQ ID NO: 833025

SEQ ID NO: 833031 - protein, 371 aa, Homo sapiens; identical to SEQ ID NO: 833027

SEQ ID NO: 833032 - protein, 110 aa, Homo sapiens
WHCWHAPQEPGNQGQAVVTVPMNYRGPCRGQGLACLVAVAMLSWPPAPVQPCSHLGPSFPTGDLLIIMAQIIVAIQMVLEEKFVYKHNVHPLRAVGTEGVCGHRGLEGVG

SEQ ID NO: 833033 - protein, 172 aa, Homo sapiens
GRSERFERERRGLLPSTGSCEARGTAFSGLPRSQPFAPGPGSPSRSRGTGRQHPLRRVMGPRRRSRKPEAPRRRSPSPTPTPGPSRRGPSLGASSHQHSRRRQGWLKEIRKLQKSTHLLIRKLPFSRLAAEAFLVHLFEDAYLLTLHAGRVTLFPKDVQLARRIRGLEEGLG

SEQ ID NO: 833034 - protein, 198 aa, Homo sapiens; identical to SEQ ID NO: 833025

SEQ ID NO: 833035 - protein, 288 aa, Homo sapiens
MGGQFHGRGLWREQGAQLPASLPPALNMTSASSFQMLRGAVIIFTGLFSVAFLGRRLVLSQWLGILATIAGLVVVGLADLLSKHDSQHKLSEVITGDLLIIMAQIIVAIQMVLEEKFVYKHNVHPLRAVGTEGLFGFVILSLLLVPMYYIPAGSFSGNPRGTLEDALDAFCQVGQQPLIAVALLGNISSIAFFNFAGISVTKELSATTRMVLDSLRTVVIWALSLALGWEAFHALQILGFLILLIGTALYNGLHRPLLGRLSRGRPLAEESEQERLLGGTRTPINDAS

SEQ ID NO: 833036 - protein, 371 aa, Homo sapiens; identical to SEQ ID NO: 833027

SEQ ID NO: 833037 - protein, 78 aa, Homo sapiens
DTQLSPSQYSILDCATTKIATKEKEDYKQDKDPQVVWDSSRLLQLVGGGRVHSTSFESQGPLSFTGPQCLSQEEANGQ

SEQ ID NO: 833038 - protein, 325 aa, Homo sapiens
MDMWTALLILQALLLPSLADGATPALRFVAVGDWGGVPNAPFHTAREMANAKEIARTVQILGADFILSLGDNFYFTGVQDINDKRFQETFEDVFSDRSLRKVPWYVLAGNHDHLGNVSAQIAYSKISKRWNFPSPFYRLHFKIPQTNVSVAIFMLDTVTLCGNSDDFLSQQPERPRDVKLARTQLSWLKKQLAAAREDYVLVAGHYPVWSIAEHGPTHCLVKQLRPLLATYGVTAYLCGHDHNLQYLQDENGVGYVLSGAGNFMDPSKRHQRKVPNGYLRFHYGTEDSLGGFAYVEISSKEMTVTYIEASGKSLFKTRLPRRARP

SEQ ID NO: 833039 - protein, 323 aa, Homo sapiens [sequence omitted]

SEQ ID NO: 833040 - protein, 323 aa, Homo sapiens [sequence omitted]

SEQ ID NO: 833041 - protein, 407 aa, Homo sapiens
LQKHLAELNHQKQLESNKIPELDMTEVVAPFMANIPLLLYPQDGPRSKPQPKDNGDVCQDCIQMVTDIQTAVRTNSTFVQALMDMWTALLILQALLLPSLADGATPALRFVAVGDWGGVPNAPFHTAREMANAKEIARTVQILGADFILSLGDNFYFTGVQDINDKRFQETFEDVFSDRSLRKVPWYVLAGNHDHLGNVSAQIAYSKISKRWNFPSPFYRLHFKIPQTNVSVAIFMLDTVTLCGNSDDFLSQQPERPRDVKLARTQLSWLKKQLAAAREDYVLVAGHYPVWSIAEHGPTHCLVKQLRPLLATYGVTAYLCGHDHNLQYLQDENGVGYVLSGAGNFMDPSKRHQRKVPNGYLRFHYGTEDSLGGFAYVEISSKEMTVTYIEASGKSLFKTRLPRRARP

SEQ ID NO: 833042 - protein, 271 aa, Homo sapiens
APGAFSVSLILTWWEDRHSTDPREEACPICLLQETFEDVFSDRSLRKVPWYVLAGNHDHLGNVSAQIAYSKISKRWNFPSPFYRLHFKIPQTNVSVAIFMLDTVTLCGNSDDFLSQQPERPRDVKLARTQLSWLKKQLAAAREDYVLVAGHYPVWSIAEHGPTHCLVKQLRPLLATYGVTAYLCGHDHNLQYLQDENGVGYVLSGAGNFMDPSKRHQRKVPNGYLRFHYGTEDSLGGFAYVEISSKEMTVTYIEASGKSLFKTRLPRRARP

SEQ ID NO: 833043 - protein, 111 aa, Homo sapiens
MWTALLILQALLLPSLADGATPALRFVAVGDWGGVPNAPFHTAREMANAKEIARTVQILGADFILSLGDNFYFTGVQDINDKRFQETFEDVFSDRSLRQEGETQLMNCGAT

SEQ ID NO: 833044 - protein, 323 aa, Homo sapiens [sequence omitted]

SEQ ID NO: 833045 - protein, 323 aa, Homo sapiens [sequence omitted]

SEQ ID NO: 833046 - protein, 323 aa, Homo sapiens [sequence omitted]

SEQ ID NO: 833047 - protein, 374 aa, Homo sapiens
  misc_feature (5)..(5): Xaa can be any naturally occurring amino acid
  misc_feature (9)..(10): Xaa can be any naturally occurring amino acid
  misc_feature (13)..(15): Xaa can be any naturally occurring amino acid
  misc_feature (19)..(20): Xaa can be any naturally occurring amino acid
RTNFXSVTXXETXXXVLKXXAGVCRIWISQDAVYSEPQLSDSVTAVSSLMDMWTALLILQALLLPSLADGATPALRFVAVGDWGGVPNAPFHTAREMANAKEIARTVQILGADFILSLGDNFYFTGVQDINDKRFQETFEDVFSDRSLRKVPWYVLAGNHDHLGNVSAQIAYSKISKRWNFPSPFYRLHFKIPQTNVSVAIFMLDTVTLCGNSDDFLSQQPERPRDVKLARTQLSWLKKQLAAAREDYVLVAGHYPVWSIAEHGPTHCLVKQLRPLLATYGVTAYLCGHDHNLQYLQDENGVGYVLSGAGNFMDPSKRHQRKVPNGYLRFHYGTEDSLGGFAYVEISSKEMTVTYIEASGKSLFKTRLPRRARP

SEQ ID NO: 833048 - protein, 290 aa, Homo sapiens
GDEIENYSGHTVISLWTQLVLSSDTYAKSRENMRGHQSLCGGASKYMFDFLDEQADKHQIHDADVRHTWKSNCLPLRFWVNVIKNPQFVFDIHKNSITDACLSVVAQTFMDSCSTSEHKLGKDSPSNKLLYAKDIPNYKSWVERYYADIAKMPAISDQDMSAYLAEQSRLHLSQFNSMSALHEIYSYITKYKDEIPGSPGEEMKEGAGGSRIADAKLEQGRRKRKDLKQVEPQNVINPSNEDSDKGTVEQQTRGQTINPCMVKCTEVAQSSRNNTSKTPPRHNRTKPTSE

SEQ ID NO: 833049 - protein, 1873 aa, Homo sapiens
MWAEAGLPRAGGGSQPPFRTFSASDWGLTHLVVHEQTGEVYVGAVNRIYKLSGNLTLLRAHVTGPVEDNEKCYPPPSVQSCPHGLGSTDNVNKLLLLDYAANRLLACGSASQGICQFLRLDDLFKLGEPHHRKEHYLSSVQEAGSMAGVLIAGPPGQGQAKLFVGTPIDGKSEYFPTLSSRRLMANEEDADMFGFVYQDEFVSSQLKIPSDTLSKFPAFDIYYVYSFRSEQFVYYLTLQLDTQLTSPDAAGEHFFTSKIVRLCVDDPKFYSYVEFPIGCEQAGVEYRLVQDAYLSRPGRALAHQLGLAEDEDVLFTVFAQGQKNRVKPPKESALCLFTLRAIKEKIKERIQSCYRGEGKLSLPWLLNKELGCINSPLQIDDDFCGQDFNQPLGGTVTIEGTPLFVDKDDGLTAVAAYDYRGRTVVFAGTRSGRIRKILVDLSNPGGRPALAYESVVAQEGSPILRDLVLSPNHQYLYAMTEKQVTRVPVESCVQYTSCELCLGSRDPHCGWCVLHSICSRRDACERADEPQRFAADLLQCVQLTVQPRNVSVTMSQVPLVLQAWNVPDLSAGVNCSFEDFTESESVLEDGRIHCRSPSAREVAPITRGQGDQRVVKLYLKSKETGKKFASVDFVFYNCSVHQSCLSCVNGSFPCHWCKYRHVCTHNVADCAFLEGRVNVSEDCPQILPSTQIYVPVGVVKPITLAARNLPQPQSGQRGYECLFHIPGSPARVTALRFNSSSLQCQNSSYSYEGNDVSDLPVNLSVVWNGNFVIDNPQNIQAHLYKCPALRESCGLCLKADPRFECGWCVAERRCSLRHHCAADTPASWMHARHGSSRCTDPKILKLSPETGPRQGGTRLTITGENLGLRFEDVRLGVRVGKVLCSPVESEYISAEQIVCEIGDASSVRAHDALVEVCVRDCSPHYRALSPKRFTFVTPTFYRVSPSRGPLSGGTWIGIEGSHLNAGSDVAVSVGGRPCSFSWRNSREIRCLTPPGQSPGSAPIIININRAQLTNPEVKYNYTEDPTILRIDPEWSINSGGTLLTVTGTNLATVREPRIRAKYGGIERENGCLVYNDTTMVCRAPSVANPVRSPPELGERPDELGFVMDNVRSLLVLNSTSFLYYPDPVLEPLSPTGLLELKPSSPLILKGRNLLPPAPGNSRLNYTVLIGSTPCTLTVSETQLLCEAPNLTGQHKVTVRAGGFEFSPGTLQVYSDSLLTLPAIVGIGGGGGLLLLVIVAVLIAYKRKSRDADRTLKRLQLQMDNLESRVALECKEAFAELQTDIHELTNDLDGAGIPFLDYRTYAMRVLFPGIEDHPVLKEMEVQANVEKSLTLFGQLLTKKHFLLTFIRTLEAQRSFSMRDRGNVASLIMTALQGEMEYATGVLKQLLSDLIEKNLESKNHPKLLLRRTESVAEKMLTNWFTFLLYKFLKECAGEPLFMLYCAIKQQMEKGPIDAITGEARYSLSEDKLIRQQIDYKTLTLNCVNPENENAPEVPVKGLDCDTVTQAKEKLLDAAYKGVPYSQRPKAADMDLEWRQGRMARIILQDEDVTTKIDNDWKRLNTLAHYQVTDGSSVALVPKQTSAYNISNSSTFTKSLSRYESMLRTASSPDSLRSRTPMITPDLESGTKLWHLVKNHDHLDQREGDRGSKMVSEIYLTRLLATKGTLQKFVDDLFETIFSTAHRGSALPLAIKYMFDFLDEQADKHQIHDADVRHTWKSNCLPLRFWVNVIKNPQFVFDIHKNSITDACLSVVAQTFMDSCSTSEHKLGKDSPSNKLLYAKDIPNYKSWVERYYADIAKMPAISDQDMSAYLAEQSRLHLSQFNSMSALHEIYSYITKYKDEILAALEKDEQARRQRLRSKLEQVVDTMALSS

SEQ ID NO: 833050 - protein, 1036 aa, Homo sapiens
YPSLCLPQLSPETGPRQGGTRLTITGENLGLRFEDVRLGVRVGKVLCSPVESEYISAEQIVCEIGDASSVRAHDALVEVCVRDCSPHYRALSPKRFTFVTPTFYRVSPSRGPLSGGTWIGIEGSHLNAGSDVAVSVGGRPCSFSWRNSREIRCLTPPGQSPGSAPIIININRAQLTNPEVKYNYTEDPTILRIDPEWSINSGGTLLTVTGTNLATVREPRIRAKYGGIERENGCLVYNDTTMVCRAPSVANPVRSPPELGERPDELGFVMDNVRSLLVLNSTSFLYYPDPVLEPLSPTGLLELKPSSPLILKGRNLLPPAPGNSRLNYTVLIGSTPCTLTVSETQLLCEAPNLTGQHKVTVRAGGFEFSPGTLQVYSDSLLTLPAIVGIGGGGGLLLLVIVAVLIAYKRKSRDADRTLKRLQLQMDNLESRVALECKEAFAELQTDIHELTNDLDGAGIPFLDYRTYAMRVLFPGIEDHPVLKEMEVQANVEKSLTLFGQLLTKKHFLLTFIRTLEAQRSFSMRDRGNVASLIMTALQGEMEYATGVLKQLLSDLIEKNLESKNHPKLLLRRTESVAEKMLTNWFTFLLYKFLKECAGEPLFMLYCAIKQQMEKGPIDAITGEARYSLSEDKLIRQQIDYKTLTLNCVNPENENAPEVPVKGLDCDTVTQAKEKLLDAAYKGVPYSQRPKAADMDLEWRQGRMARIILQDEDVTTKIDNDWKRLNTLAHYQVTDGSSVALVPKQTSAYNISNSSTFTKSLSRYESMLRTASSPDSLRSRTPMITPDLESGTKLWHLVKNHDHLDQREGDRGSKMVSEIYLTRLLATKGTLQKFVDDLFETIFSTAHRGSALPLAIKYMFDFLDEQADKHQIHDADVRHTWKSNCLPLRFWVNVIKNPQFVFDIHKNSITDACLSVVAQTFMDSCSTSEHKLGKDSPSNKLLYAKDIPNYKSWVERYYADIAKMPAISDQDMSAYLAEQSRLHLSQFNSMSALHEIYSYITKYKDEILAALEKDEQARRQRLRSKLEQVVDTMALSS

SEQ ID NO: 833051 - protein, 168 aa, Homo sapiens
SSSVRIYVRQTWKSSCLPLRFWVNVIKNPQFVFDIHKNSITDACLSVVAQTFMDSCSTSEHKLGKDSPSNKLLYAKDIPNYKSWVERYYADIAKMPAISDQDMSAYLAEQSRLHLSQFNSMSALHEIYSYITKYKDEILAALEKDEQARRQRLRSKLEQVVDTMALSS

SEQ ID NO: 833052 - protein, 1873 aa, Homo sapiens; identical to SEQ ID NO: 833049

SEQ ID NO: 833053 - protein, 395 aa, Homo sapiens
YPSLCLPQLSPETGPRQGGTRLTITGENLGLRFEDVRLGVRVGKVLCSPVESEYISAEQIVCEIGDASSVRAHDALVEVCVRDCSPHYRALSPKRFTFVTPTFYRVSPSRGPLSGGTWIGIEGSHLNAGSDVAVSVGGRPCSFSWRNSREIRCLTPPGQSPGSAPIIININRAQLTNPEVKYNYTEDPTILRIDPEWSINSGGTLLTVTGTNLATVREPRIRAKYGGIERENGCLVYNDTTMVCRAPSVANPVRSPPELGERPDELGFVMDNVRSLLVLNSTSFLYYPDPVLEPLSPTGLLELKPSSPLILKGRNLLPPAPGNSRLNYTVLIGSTPCTLTVSETQLLCEAPNLTGQHKVTVRLSTGGAELGEPCPTCGPCPTSTAPALTLPETHP

SEQ ID NO: 833054 - protein, 784 aa, Homo sapiens
MWAEAGLPRAGGGSQPPFRTFSASDWGLTHLVVHEQTGEVYVGAVNRIYKLSGNLTLLRAHVTGPVEDNEKCYPPPSVQSCPHGLGSTDNVNKLLLLDYAANRLLACGSASQGICQFLRLDDLFKLGEPHHRKEHYLSSVQEAGSMAGVLIAGPPGQGQAKLFVGTPIDGKSEYFPTLSSRRLMANEEDADMFGFVYQDEFVSSQLKIPSDTLSKFPAFDIYYVYSFRSEQFVYYLTLQLDTQLTSPDAAGEHFFTSKIVRLCVDDPKFYSYVEFPIGCEQAGVEYRLVQDAYLSRPGRALAHQLGLAEDEDVLFTVFAQGQKNRVKPPKESALCLFTLRAIKEKIKERIQSCYRGEGKLSLPWLLNKELGCINSPLQIDDDFCGQDFNQPLGGTVTIEGTPLFVDKDDGLTAVAAYDYRGRTVVFAGTRSGRIRKILVDLSNPGGRPALAYESVVAQEGSPILRDLVLSPNHQYLYAMTEKQVTRVPVESCVQYTSCELCLGSRDPHCGWCVLHSICSRRDACERADEPQRFAADLLQCVQLTVQPRNVSVTMSQVPLVLQAWNVPDLSAGVNCSFEDFTESESVLEDGRIHCRSPSAREVAPITRGQGDQRVVKLYLKSKETGKKFASVDFVFYNCSVHQSCLSCVNGSFPCHWCKYRHVCTHNVADCAFLEGRVNVSEDCPQILPSTQIYVPVGVVKPITLAARNLPQPQSGQRGYECLFHIPGSPARVTALRFNSSSLQCQNSSVRWPGQGLGAVSRNGPVILTALGPGVCLFIKGSARA

SEQ ID NO: 833055 - protein, 1873 aa, Homo sapiens; identical to SEQ ID NO: 833049

SEQ ID NO: 833056 - protein, 334 aa, Homo sapiens [sequence omitted]

SEQ ID NO: 833057 - protein, 128 aa, Homo sapiens
RGMQIRLSRGAVNRPRLHSEHKLGKDSPSNKLLYAKDIPNYKSWVERYYADIAKMPAISDQDMSAYLAEQSRLHLSQFNSMSALHEIYSYITKYKDEILAALEKDEQARRQRLRSKLEQVVDTMALSS

SEQ ID NO: 833058 - protein, 828 aa, Homo sapiens
MWAEAGLPRAGGGSQPPFRTFSASDWGLTHLVVHEQTGEVYVGAVNRIYKLSGNLTLLRAHVTGPVEDNEKCYPPPSVQSCPHGLGSTDNVNKLLLLDYAANRLLACGSASQGICQFLRLDDLFKLGEPHHRKEHYLSSVQEAGSMAGVLIAGPPGQGQAKLFVGTPIDGKSEYFPTLSSRRLMANEEDADMFGFVYQDEFVSSQLKIPSDTLSKFPAFDIYYVYSFRSEQFVYYLTLQLDTQLTSPDAAGEHFFTSKIVRLCVDDPKFYSYVEFPIGCEQAGVEYRLVQDAYLSRPGRALAHQLGLAEDEDVLFTVFAQGQKNRVKPPKESALCLFTLRAIKEKIKERIQSCYRGEGKLSLPWLLNKELGCINSPLQIDDDFCGQDFNQPLGGTVTIEGTPLFVDKDDGLTAVAAYDYRGRTVVFAGTRSGRIRKILVDLSNPGGRPALAYESVVAQEGSPILRDLVLSPNHQYLYAMTEKQVTRVPVESCVQYTSCELCLGSRDPHCGWCVLHSICSRRDACERADEPQRFAADLLQCVQLTVQPRNVSVTMSQVPLVLQAWNVPDLSAGVNCSFEDFTESESVLEDGRIHCRSPSAREVAPITRGQGDQRVVKLYLKSKETGKKFASVDFVFYNCSVHQSCLSCVNGSFPCHWCKYRHVCTHNVADCAFLEGRVNVSEDCPQILPSTQIYVPVGVVKPITLAARNLPQPQSGQRGYECLFHIPGSPARVTALRFNSSSLQCQNSSYSYEGNDVSDLPVNLSVVWNGNFVIDNPQNIQAHLYKCPALRESCGLCLKADPRFECGWCVAERRCSLRHHCAAGTTGHA

SEQ ID NO: 833059 - protein, 186 aa, Homo sapiens
GRGIPLPIQTFLWRQTSAFLRPKLGKQYEASCVSFERVLVENKLHGLSPALSEAIQSISRWELVQAALPHVLHCTATLLSNRNKLGHQDKLGVAETKLLHTLHWMLLEAPQDCNNERFGGTDRGSSWGGSSSAFIHQVENQGSPGQPCQSSSNDEEENNRRKIFQNSMATVELFVFLFAPLVHRIK

SEQ ID NO: 833060 - protein, 169 aa, Homo sapiens
PRHPPAHPDLPVAANQSFERVLVENKLHGLSPALSEAIQSISRWELVQAALPHVLHCTATLLSNRNKLGHQDKLGVAETKLLHTLHWMLLEAPQDCNNERFGGTDRGSSWGGSSSAFIHQVENQGSPGQPCQSSSNDEEENNRRKIFQNSMATVELFVFLFAPLVHRIK

SEQ ID NO: 833061 - protein, 104 aa, Homo sapiens
MTVEPNPFQRKVLWRALSPQDNKCLLRATDGKKKISTVVSSKEVNKFQMAYSNLLRANMDGLKKRDKKNKTKKTKAAAAAAAAAPAAAATAATTAATTAATAAQ

SEQ ID NO: 833062 - protein, 104 aa, Homo sapiens; identical to SEQ ID NO: 833061

SEQ ID NO: 833063 - protein, 152 aa, Homo sapiens
MVLLESEQFLTELTRLFQKCRTSGSVYITLKKYDGRTKPIPKKGTVEGFEPAGQQVSVKSYRWEEEDQHCEPREKTQCHLSKGFQEVSSKEVNKFQMAYSNLLRANMDGLKKRDKKNKTKKTKAAAAAAAAAPAAAATAATTAATTAATAAQ

SEQ ID NO: 833064 - protein, 104 aa, Homo sapiens; identical to SEQ ID NO: 833061

SEQ ID NO: 833065 - protein, 104 aa, Homo sapiens; identical to SEQ ID NO: 833061

SEQ ID NO: 833066 - protein, 104 aa, Homo sapiens; identical to SEQ ID NO: 833061

SEQ ID NO: 833067 - protein, 104 aa, Homo sapiens; identical to SEQ ID NO: 833061

SEQ ID NO: 833068 - protein, 104 aa, Homo sapiens; identical to SEQ ID NO: 833061

SEQ ID NO: 833069 - protein, 152 aa, Homo sapiens; identical to SEQ ID NO: 833063

SEQ ID NO: 833070 - protein, 160 aa, Homo sapiens
  misc_feature (1)..(2): Xaa can be any naturally occurring amino acid
XXHKNMSPEEMPETLRGNQISHDLTIAEKVITRGDHHTTQITSQETESFYDQRTLRHPGHDKQVSVKSYRWEEEDQHCEPREKTQCHLSKGFQEVSSKEVNKFQMAYSNLLRANMDGLKKRDKKNKTKKTKAAAAAAAAAPAAAATAATTAATTAATAAQ

SEQ ID NO: 833071 - protein, 108 aa, Homo sapiens
MTVEPNPFQRKVLWRALSPQDNKCLLRATDGKKKISTVVSSKEVNKFQMAYSNLLRANMDGLKKRDKKNKTKKTKAAAAAAAAAPAQQQQQQQQQQHSKGHTFPAFTN

SEQ ID NO: 833072 - protein, 78 aa, Homo sapiens
DMRKLLRKISTVVSSKEVNKFQMAYSNLLRANMDGLKKRDKKNKTKKTKAAAAAAAAAPAAAATAATTAATTAATAAQ

SEQ ID NO: 833073 - protein, 108 aa, Homo sapiens; identical to SEQ ID NO: 833071

SEQ ID NO: 833074 - protein, 104 aa, Homo sapiens; identical to SEQ ID NO: 833061

SEQ ID NO: 833075 - protein, 104 aa, Homo sapiens; identical to SEQ ID NO: 833061

SEQ ID NO: 833076 - protein, 82 aa, Homo sapiens
IRLGTRLGLNRPRRELVSSKEVNKFQMAYSNLLRANMDGLKKRDKKNKTKKTKAAAAAAAAAPAAAATAATTAATTAATAAQ

SEQ ID NO: 833077 - protein, 104 aa, Homo sapiens; identical to SEQ ID NO: 833061

SEQ ID NO: 833078 - protein, 78 aa, Homo sapiens; identical to SEQ ID NO: 833072

SEQ ID NO: 833079 - protein, 110 aa, Homo sapiens
MHFFLQMTVEPNPFQRKVLWRALSPQDNKCLLRATDGKKKISTVVSSKEVNKFQMAYSNLLRANMDGLKKRDKKNKTKKTKAAAAAAAAAPAAAATAATTAATTAATAAQ

SEQ ID NO: 833080 - protein, 68 aa, Homo sapiens
SDLGSAVSLFFRWAYSNLLRANMDGLKKRDKKNKTKKTKAAAAAAAAAPAAAATAATTAATTAATAAQ

SEQ ID NO: 833081 - protein, 104 aa, Homo sapiens; identical to SEQ ID NO: 833061

SEQ ID NO: 833082 - protein, 106 aa, Homo sapiens
MTVEPNPFQRKVLWRALSPQDNKCLLRATDGKKKISTVVSSKEVNKFQMAYSNLLRANMDGLKKRDKKNKTKKTKAAAQQQQQQQQQQQQQQQQHSKGHTFPAFTN

SEQ ID NO: 833083 - protein, 148 aa, Homo sapiens
MVLLESEQFLTELTRLFQKCRTSGSVYITLKKYDGRTKPIPKKGTVEGFEPAGQQVSVKSYRWEEEDQHCDDLVDETPRQVNTRFRWAYCNTFLRANSGVGYDMKKMTNIEELNSKEGPTYAWKPSQVTRWSEAPCRHVSNKQANIPM

SEQ ID NO: 833084 - protein, 194 aa, Homo sapiens
MKIWTSEHVFDHPWETVTTAAMQKYPNPMNPSVVGVDVLDRHIDPSGKLHSHRLLSTEWGLPSIVKSLIGAARTKTYVQEHSVVDPVEKTMELKSTNISFTNMVSVDERLIYKPHPQDPEKTVLTQEAIITVKGVSLSSYLEGLMASTISSNASKGREAMEWVIHKLNAEIEELTASARGTIRTPMAAAAFAEK

SEQ ID NO: 833085 - protein, 194 aa, Homo sapiens; identical to SEQ ID NO: 833084

SEQ ID NO: 833086 - protein, 194 aa, Homo sapiens; identical to SEQ ID NO: 833084

SEQ ID NO: 833087 - protein, 194 aa, Homo sapiens; identical to SEQ ID NO: 833084

SEQ ID NO: 833088 - protein, 194 aa, Homo sapiens; identical to SEQ ID NO: 833084

SEQ ID NO: 833089 - protein, 194 aa, Homo sapiens; identical to SEQ ID NO: 833084

SEQ ID NO: 833090 - protein, 164 aa, Homo sapiens
MKIWTSEHVFDHPWETVTTAAMQKYPNPMNPSVVGVDVLDRHIDPSGKLHSHRLLSTEWGLPSIVKSISFTNMVSVDERLIYKPHPQDPEKTVLTQEAIITVKGVSLSSYLEGLMASTISSNASKGREAMEWVIHKLNAEIEELTASARGTIRTPMAAAAFAEK

SEQ ID NO: 833091 - protein, 194 aa, Homo sapiens; identical to SEQ ID NO: 833084

SEQ ID NO: 833092 - protein, 176 aa, Homo sapiens
MKIWTSEHVFDHPWETVTTAAMQKYPNPMNPSVVGVDVLDRHIDPSGKLHSHRLLSTEWGLPSIVKSLIGAARTKTYVQEHSVVDPVEKTMELKSTNISFTNMVSVDERLIYKPHPQDPENYLEGLMASTISSNASKGREAMEWVIHKLNAEIEELTASARGTIRTPMAAAAFAEK

SEQ ID NO: 833093 - protein, 194 aa, Homo sapiens; identical to SEQ ID NO: 833084

SEQ ID NO: 833094 - protein, 96 aa, Homo sapiens
  misc_feature (4)..(4): Xaa can be any naturally occurring amino acid
GLLXSLDVVSEVSFVVLVVCYFGPMWNIPSGETRHILTTNRVLRTDDGHDRGENAEYFVCINIRVSVTYRHMPDRHYAGIWGRWGRTSIMVGGGLA

SEQ ID NO: 833095 - protein, 194 aa, Homo sapiens; identical to SEQ ID NO: 833084

SEQ ID NO: 833096 - protein, 104 aa, Homo sapiens
MELKSTNISFTNMVSVDERLIYKPHPQDPEKTVLTQEAIITVKGVSLSSYLEGLMASTISSNASKGREAMEWVIHKLNAEIEELTASARGTIRTPMAAAAFAEK

SEQ ID NO: 833097 - protein, 179 aa, Homo sapiens
MKIWTSEHVFDHPWETVTTAAMQKYPNPMNPSVVGVDVLDRHIDPSGKLHSHRLLSTEWGLPSIVKSLIGAARTKTYVQEHSVVDPVEKTMELKSTNKPHPQDPEKTVLTQEAIITVKGVSLSSYLEGLMASTISSNASKGREAMEWVIHKLNAEIEELTASARGTIRTPMAAAAFAEK

SEQ ID NO: 833098 - protein, 184 aa, Homo sapiens
MKIWTSEHVFDHPWETVTTAAMQKYPNPMNPSVVGVDVLDRHIDPSGKLHSHRLLSTEWGLPSIVKSLIGAARTKTYVQEHSVVDPVEKTMELKSTNISFTNMVSVDERLIYKPHPQDPEKTVLTQEAIITVKGVSLSSYLEGLMGREAMEWVIHKLNAEIEELTASARGTIRTPMAAAAFAEK

SEQ ID NO: 833099 - protein, 194 aa, Homo sapiens; identical to SEQ ID NO: 833084

SEQ ID NO: 833100 - protein, 131 aa, Homo sapiens
FTVRVRDLGLRMRSRVLWGAARWLWPRRAVGPARRPLSSGSPPLEELFARGGPLRTFLERQAGSEAHLKVRRPELLAVIKLLNEKEQELRETEHLLHDENEDLRKLAENEITLCQKEITQLKHQVWYFCKE

SEQ ID NO: 833101 - protein, 238 aa, Homo sapiens
MLFTSEIFDMYQQYAAFKRWHFETLEYFPSELGGLRHASASIGGSEAYRHMKFEGGVHRVQRVPKTEKQGRVHTSTMTVAILPQPTEINLVINPKDLRIDTKRASGAGGQHVNTTDSAVRIVHLPTGVVSECQQERSQLKNKELAMTKLRAKLYSMHLEEEINKRQNARKIQIGSKGRSEKIRTYNFPQNRVTDHRINKTLHDLETFMQGDYLLDELVQSLKEYADYESLVEIISQKV

SEQ ID NO: 833102 - protein, 282 aa, Homo sapiens
FTVRVRDLGLRMRSRVLWGAARWLWPRRAVGPARRPLSSGSPPLEELFARGGPLRTFLERQAGSEAHLKVRRPELLAVIKLLNEKEQELRETEHLLHDENEDLRKLAENEITLCQKEITQLKHQIILLLVPSEETDENDLILEVTAGVGGQEAMLFTSEIFDMYQQYAAFKRWHFETLEYFPSELGGLRHASASIGGSEAYRHMKFEGGVHRVQRVPKTEKQGRVHTSTMTVAILPQPTEINLVINPKDLRIDTKRASGAGGQHVNTTDSAVRIVHLPTDWK

SEQ ID NO: 833103 - protein, 246 aa, Homo sapiens
FTVRVRDLGLRMRSRVLWGAARWLWPRRAVGPARRPLSSGSPPLEELFARGGPLRTFLERQAGSEAHLKVRRPELLAVIKLLNEKEQELRETEHLLHDENEDLRKLAENEITLCQKEITQLKHQIILLLVPSEETDENDLILEVTAGVGGGLRHASASIGGSEAYRHMKFEGGVHRVQRVPKTEKQGRVHTSTMTVAILPQPTEINLVINPKDLRIDTKRASGAGGQHVNTTDSAVRIVHLPTDWK

SEQ ID NO: 833104 - protein, 259 aa, Homo sapiens
FTVRVRDLGLRMRSRVLWGAARWLWPRRAVGPARRPLSSGSPPLEELFARGGPLRTFLERQAGSEAHLKVRRPELLAVIKLLNEKEQELRETEHLLHDENEDLRKLAENEITLCQKEITQLKHQIILLLVPSEETDENDLILEVTAGVGGQEAMLFTSEIFDMYQQYAAFKRWHFETLEYFPSELGGLRHASASIGGSEAYRHMKFEGGVHRVQRVPKTEKQGRVHTSTMTVAILPQPTEINLVINPKDLRIDTKSSSA

SEQ ID NO: 833105 - protein, 111 aa, Homo sapiens
FTVRVRDLGLRMRSRVLWGAARWLWPRRAVGPARRPLSSGSPPLEELFARGGPLRTFLERQAGSEAHLKVRRPELLAVIKLLNEKEQELRETEHLLHGKGRARGRGVRAHS

SEQ ID NO: 833106 - protein, 391 aa, Homo sapiens
FTVRVRDLGLRMRSRVLWGAARWLWPRRAVGPARRPLSSGSPPLEELFARGGPLRTFLERQAGSEAHLKVRRPELLAVIKLLNEKEQELRETEHLLHDENEDLRKLAENEITLCQKEITQLKHQIILLLVPSEETDENDLILEVTAGVGGQEAMLFTSEIFDMYQQYAAFKRWHFETLEYFPSELGGLRHASASIGGSEAYRHMKFEGGVHRVQRVPKTEKQGRVHTSTMTVAILPQPTEINLVINPKDLRIDTKRASGAGGQHVNTTDSAVRIVHLPTGVVSECQQERSQLKNKELAMTKLRAKLYSMHLEEEINKRQNARKIQIGSKGRSEKIRTYNFPQNRVTDHRINKTLHDLETFMQGDYLLDELVQSLKEYADYESLVEIISQKV

SEQ ID NO: 833107 - protein, 355 aa, Homo sapiens
FTVRVRDLGLRMRSRVLWGAARWLWPRRAVGPARRPLSSGSPPLEELFARGGPLRTFLERQAGSEAHLKVRRPELLAVIKLLNEKEQELRETEHLLHDENEDLRKLAENEITLCQKEITQLKHQIILLLVPSEETDENDLILEVTAGVGGGLRHASASIGGSEAYRHMKFEGGVHRVQRVPKTEKQGRVHTSTMTVAILPQPTEINLVINPKDLRIDTKRASGAGGQHVNTTDSAVRIVHLPTGVVSECQQERSQLKNKELAMTKLRAKLYSMHLEEEINKRQNARKIQIGSKGRSEKIRTYNFPQNRVTDHRINKTLHDLETFMQGDYLLDELVQSLKEYADYESLVEIISQKV

SEQ ID NO: 833108 - protein, 131 aa, Homo sapiens
FTVRVRDLGLRMRSRVLWGAARWLWPRRAVGPARRPLSSGSPPLEELFARGGPLRTFLERQAGSEAHLKVRRPELLAVIKLLNEKEQELRETEHLLHDENEDLRKLAENEITLCQKEITQLKHQKKQMKMI

SEQ ID NO: 833109 - protein, 177 aa, Homo sapiens
AYNVSNTAVSYINDSLTVAILPQPTEINLVINPKDLRIDTKRASGAGGQHVNTTDSAVRIVHLPTGVVSECQQERSQLKNKELAMTKLRAKLYSMHLEEEINKRQNARKIQIGSKGRSEKIRTYNFPQNRVTDHRINKTLHDLETFMQGDYLLDELVQSLKEYADYESLVEIISQKV

SEQ ID NO: 833110 - protein, 391 aa, Homo sapiens; identical to SEQ ID NO: 833106

SEQ ID NO: 833111 - protein, 263 aa, Homo sapiens
SAIPVWMATYMAGTLKVSNMYVAIQAVLSLYASGRTTGIVLDSGDGVTHNVPIYEGYALPHAIMRLDLAGRDLTDYLMKILTERGYSFVTTAEREIVRDIKEKLCYVALDFENEMATAASSSSLEKSYELPDGQVITIGNERFRCPETLFQPSFIGMESAGIHETTYNSIMKCDIDIRKDLYANNVLSGGTTMYPGIADRMQKEITALAPSTMKIKIIAPPERKYSVWIGGSILASLSTFQQMWISKQEYDEAGPSIVHRKCF

SEQ ID NO: 833112 - protein, 337 aa, Homo sapiens
MCDDEETTALVCDNGSGLVKAGFAGDDAPRAVFPSIVGRPRHQGVMVGMGQKDSYVGDEAQSKRGILTLKYPIEHGIITNWDDMEKIWHHTFYNELRVAPEEHPTLLTEAPLNPKANRDGVTHNVPIYEGYALPHAIMRLDLAGRDLTDYLMKILTERGYSFVTTAEREIVRDIKEKLCYVALDFENEMATAASSSSLEKSYELPDGQVITIGNERFRCPETLFQPSFIGMESAGIHETTYNSIMKCDIDIRKDLYANNVLSGGTTMYPGIADRMQKEITALAPSTMKIKIIAPPERKYSVWIGGSILASLSTFQQMWISKQEYDEAGPSIVHRKCF

SEQ ID NO: 833113 - protein, 377 aa, Homo sapiens
MCDDEETTALVCDNGSGLVKAGFAGDDAPRAVFPSIVGRPRHQGVMVGMGQKDSYVGDEAQSKRGILTLKYPIEHGIITNWDDMEKIWHHTFYNELRVAPEEHPTLLTEAPLNPKANREKMTQIMFETFNVPAMYVAIQAVLSLYASGRTTGIVLDSGDGVTHNVPIYEGYALPHAIMRLDLAGRDLTDYLMKILTERGYSFVTTAEREIVRDIKEKLCYVALDFENEMATAASSSSLEKSYELPDGQVITIGNERFRCPETLFQPSFIGMESAGIHETTYNSIMKCDIDIRKDLYANNVLSGGTTMYPGIADRMQKEITALAPSTMKIKIIAPPERKYSVWIGGSILASLSTFQQMWISKQEYDEAGPSIVHRKCF

SEQ ID NO: 833114 - protein, 264 aa, Homo sapiens
MCDDEETTALVCDNGSGLVKAGFAGDDAPRAVFPSIVGRPRHQGVMVGMGQKDSYVGDEAQSKRGILTLKYPIEHGIITNWDDMEKIWHHTFYNELRVAPEEHPTLLTEAPLNPKANREKMTQIMFETFNVPAMYVAIQAVLSLYASGRTTGIVLDSGDGVTHNVPIYEGYALPHAIMRLDLAGRDLTDYLMKILTERGYSFVTTAEREIVRDIKEKLCYVALDFENEMATAASSSSLEKSYELPDGQVITIGNERFRSPSDPS

SEQ ID NO: 833115 - protein, 173 aa, Homo sapiens
MCDDEETTALVCDNGSGLVKAGFAGDDAPRAVFPSIVGRPRHQGVMVGMGQKDSYVGDEAQSKRGILTLKYPIEHGIITNWDDMEKIWHHTFYNELRVAPEEHPTLLTEAPLNPKANREKMTQIMFETFNVPAMYVAIQAVLSLYASGRTTGIVLDSGDGVTHNVPIYERSLS

SEQ ID NO: 833116 - protein, 69 aa, Homo sapiens
MPVSHTAPRAAPPPPVRDALSHGSTNTLRAASTRLGGRSTPTKLEVLSEPDGRPNRSRGDPPRSRPTDP

SEQ ID NO: 833117 - protein, 377 aa, Homo sapiens; identical to SEQ ID NO: 833113

SEQ ID NO: 833118 - protein, 377 aa, Homo sapiens; identical to SEQ ID NO: 833113

SEQ ID NO: 833119 - protein, 295 aa, Homo sapiens
MCDDEETTALVCDNGSGLVKAGFAGDDAPRAVFPSIVGRPRHQGVMVGMGQKDSYVGDEAQSKRGILTLKYPIEHGIITNWDDMEKIWHHTFYNELRVAPEEHPTLLTEAPLNPKANREKMTQIMFETFNVPAMYVAIQAVLSLYASGRTTGIVLDSGDGVTHNVPIYEGYALPHAIMRLDLAGRDLTDYLMKILTERGYSFVTTAEREIVRDIKEKLCYVALDFENEMATAASSSSLEKSYELPDGQVITIGNERFRCPETLFQPSFIGMESAGIHETTYNSIMKCDIDIPRVR

SEQ ID NO: 833120 - protein, 266 aa, Homo sapiens
MCDDEETTALVCDNGSGLVKAGFAGDDAPRAVFPSIVGRPRHQGVMVGMGQKDSYVGDEAQSKRGILTLKYPIEHGIITNWDDMEKIWHHTFYNELRVAPEEHPTLLTEAPLNPKANREKMTQIMFETFNVPAMYVAIQAVLSLYASGRTTGIVLDSGDGVTHNVPIYEGYALPHAIMRLDLAGRDLTDYLMKILTERGYSFVTTAEREIVRDIKEKLCYVALDFENEMATAASSSSLEKSYELPDGHVHGRDILGVQRGLCEQGG

SEQ ID NO: 833121 - protein, 98 aa, Homo sapiens
RLLLLLNSRPRRQGVLLITMNVLLGSVVIFATFVTLCNASCYFIPNEGVPGDSTRKCMDLKGNKHPINSEWQTDNCETCTVLRNRNFMLHPCFYTCGL

SEQ ID NO: 833122 - protein, 114 aa, Homo sapiens
MNVLLGSVVIFATFVTLCNASCYFIPNEGVPGDSTRKCMDLKGNKHPINSEWQTDNCETCTCYETEISCCTLVSTPVGYDKDNCQRIFKKEDCKYIVVEKKDPKKTCSVSEWII

SEQ ID NO: 833123 - protein, 114 aa, Homo sapiens; identical to SEQ ID NO: 833122

SEQ ID NO: 833124 - protein, 95 aa, Homo sapiens
AYYYSPGGGRVDLLITMNVLLGSVVIFATFVTLCNASCYFIPNEGVPGDSTRKCMDLKGNKHPINSEWQTDNCETCTVLRNRNFMLHPCFYTCGL

SEQ ID NO: 833125 - protein, 49 aa, Homo sapiens
MGQGAKGGPEENPGNRRGGSPHKKPREPRRPSRVRDTAYTGHSEIAAEG

SEQ ID NO: 833126 - protein, 116 aa, Homo sapiens
RLKGEKLVVPARARSGIPGVDKLLNFRPGRQGVLLITMNVLLGSVVIFATFVTLCNASCYFIPNEGVPGDSTRKCMDLKGNKHPINSEWQTDNCETCTVLRNRNFMLHPCFYTCGL

SEQ ID NO: 833127 - protein, 114 aa, Homo sapiens; identical to SEQ ID NO: 833122

SEQ ID NO: 833128 - protein, 114 aa, Homo sapiens; identical to SEQ ID NO: 833122

SEQ ID NO: 833129 - protein, 94 aa, Homo sapiens
RRLLLLNSRPRRQGVLLITMNVLLGSVVIFATFVTLCNASCYFIPNEGVPGDSTRMFLHLWVMTKTTAKESSRRRTASISWWRRRTQKKTCSGQ

SEQ ID NO: 833130 - protein, 116 aa, Homo sapiens; identical to SEQ ID NO: 833126

SEQ ID NO: 833131 - protein, 94 aa, Homo sapiens; identical to SEQ ID NO: 833129

SEQ ID NO: 833132 - protein, 117 aa, Homo sapiens
MNVLLGSVVIFATFVTLCNASCYFIPNEGVPGDSTRKCMDLKGNKHPINSEWQTDNCETCTVLRNRNFMLHPCFYNLVGGFNLDQKGNKSWPKSNSFKKGRTGKVYSCVEKKDPKKD

SEQ ID NO: 833133 - protein, 84 aa, Homo sapiens
  misc_feature (3)..(3): Xaa can be any naturally occurring amino acid
  misc_feature (21)..(21): Xaa can be any naturally occurring amino acid
  misc_feature (23)..(23): Xaa can be any naturally occurring amino acid
  misc_feature (31)..(31): Xaa can be any naturally occurring amino acid
  misc_feature (38)..(38): Xaa can be any naturally occurring amino acid
GTXFYYRTSVLITSDMFFRVXTXVVESFVGXKPFFFRXLGKPFFFKTLGPQKIGAIFNAISYLMREFQEIQPGNAWISKETNTQ

SEQ ID NO: 833134 - protein, 114 aa, Homo sapiens; identical to SEQ ID NO: 833122

SEQ ID NO: 833135 - protein, 114 aa, Homo sapiens; identical to SEQ ID NO: 833122

SEQ ID NO: 833136 - protein, 114 aa, Homo sapiens; identical to SEQ ID NO: 833122

SEQ ID NO: 833137 - protein, 118 aa, Homo sapiens
KCPVQDFFLLHLPLGLTLDLGGLGFRERLQGPGRCSVLPWCSSWLVLGMAFPPGWLLYKHLQSHLVPVPWSEPDICAHPKASPALPSSKTHQCPSLPCVKIFGFSVETIQGAASSPAS

SEQ ID NO: 833138 - protein, 106 aa, Homo sapiens
HFPSPRGGSGVASLERAESSSTEPAKAIKPIDRKSVHQICSGPVVLSLSTAVKKIVGNSLDAGATNIDLKLKDYGMDLIEVSGNGCGVEEENFEGLISFSSETSHI

SEQ ID NO: 833139 - protein, 122 aa, Homo sapiens
MGGTWPRRVGGRLVEAPERHPQRPSDPVPIRCALKPSTEPAKAIKPIDRKSVHQICSGPVVLSLSTAVKKIVGNSLDAGATNIDLKLKDYGMDLIEVSGNGCGVEEENFEGLISFSSETSHI

SEQ ID NO: 833140 - protein, 32 aa, Homo sapiens
MVQVLLDDLHQWFLSSFLMSAISIGIKFLLKI

SEQ ID NO: 833141 - protein, 106 aa, Homo sapiens; identical to SEQ ID NO: 833138

SEQ ID NO: 833142 - protein, 113 aa, Homo sapiens
CRGFLQRIKTARGPRTASPTGTMKVSAAALAVILIATALCAPASASPYSSDTTPCCFAYIARPLPRAHIKEYFYTSGKCSNPAVVFVTRKNRQVCANPEKKWVREYINSLEMS

SEQ ID NO: 833143 - protein, 113 aa, Homo sapiens; identical to SEQ ID NO: 833142

SEQ ID NO: 833144 - protein, 113 aa, Homo sapiens; identical to SEQ ID NO: 833142

SEQ ID NO: 833145 - protein, 113 aa, Homo sapiens; identical to SEQ ID NO: 833142

SEQ ID NO: 833146 - protein, 273 aa, Homo sapiens
MLKPALEPRGGFSFENCQRNASLERVLPGLKVPHARKTGTTIAGLVFQDGVILGADTRATNDSVVADKSCEKIHFIAPKIYCCGAGVAADAEMTTRMVASKMELHALSTGREPRVATVTRILRQTLFRYQGHVGASLIVGGVDLTGPQLYGVHPHGSYSRLPFTALGSGQDAALAVLEDRFQPNMTLEAAQGLLVEAVTAGILGDLGSGGNVDACVITKTGAKLLRTLSSPTEPVKRSGRYHFVPGTTAVLTQTVKPLTLELVEETVQAMEVE

SEQ ID NO: 833147 - protein, 113 aa, Homo sapiens
MLLLPSGSGQDAALAVLEDRFQPNMTLEAAQGLLVEAVTAGILGDLGSGGNVDACVITKTGAKLLRTLSSPTEPVKRSGRYHFVPGTTAVLTQTVKPLTLELVEETVQAMEVE

SEQ ID NO: 833148 - protein, 115 aa, Homo sapiens
MCTRELGEHRTLAQCGWLRLVGGGDHRRLEAAQGLLVEAVTAGILGDLGSGGNVDACVITKTGAKLLRTLSSPTEPVKRSGRYHFVPGTTAVLTQTVKPLTLELVEETVQAMEVE

SEQ ID NO: 833149 - protein, 159 aa, Homo sapiens
MAPACGRPRPSSSRYQGHVGASLIVGGVDLTGPQLYGVHPHGSYSRLPFTALGSGQDAALAVLEDRFQPNMTLEAAQGLLVEAVTAGILGDLGSGGNVDACVITKTGAKLLRTLSSPTEPVKRSGRYHFVPGTTAVLTQTVKPLTLELVEETVQAMEVE

SEQ ID NO: 833150 - protein, 273 aa, Homo sapiens; identical to SEQ ID NO: 833146

SEQ ID NO: 833151 - protein, 273 aa, Homo sapiens; identical to SEQ ID NO: 833146

SEQ ID NO: 833152 - protein, 310 aa, Homo sapiens
MLKPALEPRGGFSFENCQRNASLERVLPGLKVPHARKTGTTIAGLVFQDGVILGADTRATNDSVVADKSCEKIHFIAPKIYVRLPSPVPVRKKERPPRSHSGPRTSQPCHTDPPFCLSCCGAGVAADAEMTTRMVASKMELHALSTGREPRVATVTRILRQTLFRYQGHVGASLIVGGVDLTGPQLYGVHPHGSYSRLPFTALGSGQDAALAVLEDRFQPNMTLEAAQGLLVEAVTAGILGDLGSGGNVDACVITKTGAKLLRTLSSPTEPVKRSGRYHFVPGTTAVLTQTVKPLTLELVEETVQAMEVE

SEQ ID NO: 833153 - protein, 223 aa, Homo sapiens [sequence omitted]

SEQ ID NO: 833154 - protein, 190 aa, Homo sapiens
  misc_feature (154)..(154): Xaa can be any naturally occurring amino acid
  misc_feature (170)..(170): Xaa can be any naturally occurring amino acid
  misc_feature (185)..(185): Xaa can be any naturally occurring amino acid
MLKPALEPRGGFSFENCQRNASLERVLPGLKVPHARKTGTTIAGLVFQDGVILGADTRATNDSVVADKSCEKIHFIAPKIYCCGAGVAADAKSFSLNLGKDDNNLCLHFNPRFEAHGDINTIVCNSKDGGAWGAEQRESAFPFQPGSVAEVCVXFHETDLTIKLPDGYEXSVPQPAQPWMASTTXGCSGD

SEQ ID NO: 833155 - protein, 159 aa, Homo sapiens; identical to SEQ ID NO: 833149

SEQ ID NO: 833156 - protein, 159 aa, Homo sapiens; identical to SEQ ID NO: 833149

SEQ ID NO: 833157 - protein, 273 aa, Homo sapiens; identical to SEQ ID NO: 833146

SEQ ID NO: 833158 - protein, 299 aa, Homo sapiens
EQVSNTHAVIVSRTSWLWGAEMGSNEHGVCIVNQAGWSNEPIGQRNASLERVLPGLKVPHARKTGTTIAGLVFQDGVILGADTRATNDSVVADKSCEKIHFIAPKIYCCGAGVAADAEMTTRMVASKMELHALSTGREPRVATVTRILRQTLFRYQGHVGASLIVGGVDLTGPQLYGVHPHGSYSRLPFTALGSGQDAALAVLEDRFQPNMTLEAAQGLLVEAVTAGILGDLGSGGNVDACVITKTGAKLLRTLSSPTEPVKRSGRYHFVPGTTAVLTQTVKPLTLELVEETVQAMEVE

SEQ ID NO: 833159 - protein, 258 aa, Homo sapiens
MLKPALEPRGGFSFENCQRNASLERVLPGLKVPHARKTGTTIAGLVFQDGVILGADTRATNDSVVADKSCEKIHFIAPKIYCCGAGVAADAEMTTRMVASKMELHALSTGREPRVATVTRILRQTLFRYQGHVGASLIVGGVDLTGPQLYGVHPHGSYSRLPFTALGSGQDAALAVLEDRFQPNMTLEAAQGLLVEAVTAGILGDLGSGGNVDACVITKTGAKLLRTLSSPTEPVKRGCPSSLPGLAATTLCLEPQLS

SEQ ID NO: 833160 - protein, 223 aa, Homo sapiens [sequence omitted]

SEQ ID NO: 833161 - protein, 246 aa, Homo sapiens
FSCSLAPLVWPTHPPATPNPLCLPQDAEASPGAPRGLLLRELPKVKRGRGGRSLLSRLCLLVAFFPGWGWGRVCWSTWVPGLPRKMRETGTRLGEATGVLKAEPNMGALLRFQKCIIGTRPPGAQGPSRTQDRDHHRGPGVPSEQRGGTGSWRGAESIEQALKLRSLPLLRTGSFWAPIREPLTIRSWRTRAARRSTSSPPKSSETPEPSSRTQKRTAPSFPLRSPHVPALPTPILPFASAAVGLE

SEQ ID NO: 833162 - protein, 113 aa, Homo sapiens
MKLQNQRGGRIFLQDIKKPDCDDWESGLNAMECALHLEKNVNQSLLELHKLATDKNDPHLCDFIETHYLNEQVKAIKELGDHVTNLRKMGAPESGLAEYLFDKHTLGDSDNES

SEQ ID NO: 833163 - protein, 113 aa, Homo sapiens; identical to SEQ ID NO: 833162

SEQ ID NO: 833164 - protein, 113 aa, Homo sapiens; identical to SEQ ID NO: 833162

SEQ ID NO: 833165 - protein, 1274 aa, Homo sapiens
MASGSGDSVTRRSVASQFFTQEEGPGIDGMTTSERVVDLLNQAALITNDSKITVLKQVQELIINKDPTLLDNFLDEIIAFQADKSIEVRKFVIGFIEEACKRDIELLLKLIANLNMLLRDENVNVVKKAILTMTQLYKVALQWMVKSRVISELQEACWDMVSAMAGDIILLLDSDNDGIRTHAIKFVEGLIVTLSPRMADSEIPRRQEHDISLDRIPRDHPYIQYNVLWEEGKAALEQLLKFMVHPAISSINLTTALGSLANIARQRPMFMSEVIQAYETLHANLPPTLAKSQVSSVRKNLKLHLLSVLKHPASLEFQAQITTLLVDLGTPQAEIARNMPSSKDTRKRPRDDSDSTLKKMKLEPNLGEDDEDKDLEPGPSGTSKASAQISGQSDTDITAEFLQPLLTPDNVANLVLISMVYLPEAMPASFQAIYTPVESAGTEAQIKHLARLMATQMTAAGLGPGVEQTKQCKEEPKEEKVVKTESVLIKRRLSAQGQAISVVGSLSSMSPLEEEAPQAKRRPEPIIPVTQPRLAGAGGRKKIFRLSDVLKPLTDAQVEAMKLGAVKRILRAEKAVACSGAAQVRIKILASLVTQFNSGLKAEVLSFILEDVRARLDLAFAWLYQEYNAYLAAGASGSLDKYEDCLIRLLSGLQEKPDQKDGIFTKVVLEAPLITESALEVVRKYCEDESRTYLGMSTLRDLIFKRPSRQFQYLHVLLDLSSHEKDKVRSQALLFIKRMYEKEQLREYVEKFALNYLQLLVHPNPPSVLFGADKDTEVAAPWTEETVKQCLYLYLALLPQNHKLIHELAAVYTEAIADIKRTVLRVIEQPIRGMGMNSPELLLLVENCPKGAETLVTRCLHSLTDKVPPSPELVKRVRDLYHKRLPDVRFLIPVLNGLEKKEVIQALPKLIKLNPIVVKEVFNRLLGTQHGEGNSALSPLNPGELLIALHNIDSVKCDMKSIIKATNLCFAERNVYTSEVLAVVMQQLMEQSPLPMLLMRTVIQSLTMYPRLGGFVMNILSRLIMKQVWKYPKVWEGFIKCCQRTKPQSFQVILQLPPQQLGAVFDKCPELREPLLAHVRSFTPHQQAHIPNSIMTILEASGKQEPEAKEAPAGPLEEDDLEPLTLAPAPAPRPPQDLIGLRLAQEKALKRQLEEEQKLKPGGVGAPSSSSPSPSPSARPGPPPSEEAMDFREEGPECETPGIFISMDDDSGLTEAALLDSSLEGPLPKETAAGGLTLKEERSPQTLAPVGEDAMKTPSPAAEDAREPEAKGNS

SEQ ID NO: 833166 - protein, 1274 aa, Homo sapiens; identical to SEQ ID NO: 833165

SEQ ID NO: 833167 - protein, 1216 aa, Homo sapiens
MASGSGDSVTRRSVASQFFTQEEGPGIDGMTTSERVVDLLNQAALITNDSKITVLKQVQELIINKDPTLLDNFLDEIIAFQADKSIEVRKFVIGFIEEACKRDIELLLKLIANLNMLLRDENVNVVKKAILTMTQLYKVALQWMVKSRVISELQEACWDMVSAMAGDIILLLDSDNDGIRTHAIKFVEGLIVTLSPRMADSEIPRRQEHDISLDRIPRDHPYIQYNVLWEEGKAALEQLLKFMVHPAISSINLTTALGSLANIARQRPMFMSEVIQAYETLHANLPPTLAKSQVSSVRKNLKLHLLSVLKHPASLEFQAQITTLLVDLGTPQAEIARNMPSSKDTRKRPRDDSDSTLKKMKLEPNLGEDDEDKDLEPGPSGTSKASAQISGQSDTDITAEFLQPLLTPDNVANLVLISMVYLPEAMPASFQAIYTPVESAGTEAQIKHLARLMATQMTAAGLGPGVEQTKQCKEEPKEEKVVKKIFRLSDVLKPLTDAQVEAMKLGAVKRILRAEKAVACSGAAQVRIKILASLVTQFNSGLKAEVLSFILEDVRARLDLAFAWLYQEYNAYLAAGASGSLDKYEDCLIRLLSGLQEKPDQKDGIFTKVVLEAPLITESALEVVRKYCEDESRTYLGMSTLRDLIFKRPSRQFQYLHVLLDLSSHEKDKVRSQALLFIKRMYEKEQLREYVEKFALNYLQLLVHPNPPSVLFGADKDTEVAAPWTEETVKQCLYLYLALLPQNHKLIHELAAVYTEAIADIKRTVLRVIEQPIRGMGMNSPELLLLVENCPKGAETLVTRCLHSLTDKVPPSPELVKRVRDLYHKRLPDVRFLIPVLNGLEKKEVIQALPKLIKLNPIVVKEVFNRLLGTQHGEGNSALSPLNPGELLIALHNIDSVKCDMKSIIKATNLCFAERNVYTSEVLAVVMQQLMEQSPLPMLLMRTVIQSLTMYPRLGGFVMNILSRLIMKQVWKYPKVWEGFIKCCQRTKPQSFQVILQLPPQQLGAVFDKCPELREPLLAHVRSFTPHQQAHIPNSIMTILEASGKQEPEAKEAPAGPLEEDDLEPLTLAPAPAPRPPQDLIGLRLAQEKALKRQLEEEQKLKPGGVGAPSSSSPSPSPSARPGPPPSEEAMDFREEGPECETPGIFISMDDDSGLTEAALLDSSLEGPLPKETAAGGLTLKEERSPQTLAPVGEDAMKTPSPAAEDAREPEAKGNS

SEQ ID NO: 833168 - protein, 1187 aa, Homo sapiens
MRSSHSKQTSQSNKRDIELLLKLIANLNMLLRDENVNVVKKAILTMTQLYKVALQWMVKSRVISELQEACWDMVSAMAGDIILLLDSDNDGIRTHAIKFVEGLIVTLSPRMADSEIPRRQEHDISLDRIPRDHPYIQYNVLWEEGKAALEQLLKFMVHPAISSINLTTALGSLANIARQRPMFMSEVIQAYETLHANLPPTLAKSQVSSVRKNLKLHLLSVLKHPASLEFQAQITTLLVDLGTPQAEIARNMPSSKDTRKRPRDDSDSTLKKMKLEPNLGEDDEDKDLEPGPSGTSKASAQISGQSDTDITAEFLQPLLTPDNVANLVLISMVYLPEAMPASFQAIYTPVESAGTEAQIKHLARLMATQMTAAGLGPGVEQTKQCKEEPKEEKVVKTESVLIKRRLSAQGQAISVVGSLSSMSPLEEEAPQAKRRPEPIIPVTQPRLAGAGGRKKIFRLSDVLKPLTDAQVEAMKLGAVKRILRAEKAVACSGAAQVRIKILASLVTQFNSGLKAEVLSFILEDVRARLDLAFAWLYQEYNAYLAAGASGSLDKYEDCLIRLLSGLQEKPDQKDGIFTKVVLEAPLITESALEVVRKYCEDESRTYLGMSTLRDLIFKRPSRQFQYLHVLLDLSSHEKDKVRSQALLFIKRMYEKEQLREYVEKFALNYLQLLVHPNPPSVLFGADKDTEVAAPWTEETVKQCLYLYLALLPQNHKLIHELAAVYTEAIADIKRTVLRVIEQPIRGMGMNSPELLLLVENCPKGAETLVTRCLHSLTDKVPPSPELVKRVRDLYHKRLPDVRFLIPVLNGLEKKEVIQALPKLIKLNPIVVKEVFNRLLGTQHGEGNSALSPLNPGELLIALHNIDSVKCDMKSIIKATNLCFAERNVYTSEVLAVVMQQLMEQSPLPMLLMRTVIQSLTMYPRLGGFVMNILSRLIMKQVWKYPKVWEGFIKCCQRTKPQSFQVILQLPPQQLGAVFDKCPELREPLLAHVRSFTPHQQAHIPNSIMTILEASGKQEPEAKEAPAGPLEEDDLEPLTLAPAPAPRPPQDLIGLRLAQEKALKRQLEEEQKLKPGGVGAPSSSSPSPSPSARPGPPPSEEAMDFREEGPECETPGIFISMDDDSGLTEAALLDSSLEGPLPKETAAGGLTLKEERSPQTLAPVGEDAMKTPSPAAEDAREPEAKGNS

SEQ ID NO: 833169 - protein, 1009 aa, Homo sapiens
MASGSGDSVTRRSVASQFFTQEEGPGIDGMTTSERVVDLLNQAALITNDSKITVLKQVQELIINKDPTLLDNFLDEIIAFQADKSIEVRKFVIGFIEEACKRDIELLLKLIANLNMLLRDENVNVVKKAILTMTQLYKVALQWMVKSRVISELQEACWDMVSAMAGDIILLLDSDNDGIRTHAIKFVEGLIVTLSPRMADSEIPRRQEHDISLDRIPRDHPYIQYNVLWEEGKAALEQLLKFMVHPAISSINLTTALGSLANIARQRPMFMSEVIQAYETLHANLPPTLAKSQVSSVRKNLKLHLLSVLKHPASLEFQAQITTLLVDLGTPQAEIARNMPSSKDTRKRPRDDSDSTLKKMKLEPNLGEDDEDKDLEPGPSGTSKASAQISGQSDTDITAEFLQPLLTPDNVANLVLISMVYLPEAMPASFQAIYTPVESAGTEAQIKHLARLMATQMTAAGLGPGVEQTKQCKEEPKEEKVVKTESVLIKRRLSAQGQAISVVGSLSSMSPLEEEAPQAKRRPEPIIPVTQPRLAGAGGRKKIFRLSDVLKPLTDAQVEAMKLGAVKRILRAEKAVACSGAAQVRIKILASLVTQFNSGLKAEVLSFILEDVRARLDLAFAWLYQEYNAYLAAGASGSLDKYEDCLIRLLSGLQEKPDQKDGIFTKVVLEAPLITESALEVVRKYCEDESRTYLGMSTLRDLIFKRPSRQFQYLHVLLDLSSHEKDKVRSQALLFIKRMYEKEQLREYVEKFALNYLQLLVHPNPPSVLFGADKDTEVAAPWTEETVKQCLYLYLALLPQNHKLIHELAAVYTEAIADIKRTVLRVIEQPIRGMGMNSPELLLLVENCPKGAETLVTRCLHSLTDKVPPSPELVKRVRDLYHKRLPDVRFLIPVLNGLEKKEVIQALPKLIKLNPIVVKEVFNRLLGTQHGEGNSALSPLNPGELLIALHNIDSVKCDMKSIIKATNLCFAERNVYTSEALLEEIERHGKKVEECQRFAKQYTCRWSTT

SEQ ID NO: 833170 - protein, 552 aa, Homo sapiens
VGLLHVRSFTPHQQAHIPNSIMTILEASGKQEPEAKEAPAGPLEEDDLEPLTLAQVAAPWTEETVKQCLYLYLALLPQNHKLIHELAAVYTEAIADIKRTVLRVIEQPIRGMGMNSPELLLLVENCPKGAETLVTRCLHSLTDKVPPSPELVKRVRDLYHKRLPDVRFLIPVLNGLEKKEVIQALPKLIKLNPIVVKEVFNRLLGTQHGEGNSALSPLNPGELLIALHNIDSVKCDMKSIIKATNLCFAERNVYTSEVLAVVMQQLMEQSPLPMLLMRTVIQSLTMYPRLGGFVMNILSRLIMKQVWKYPKVWEGFIKCCQRTKPQSFQVILQLPPQQLGAVFDKCPELREPLLAHVRSFTPHQQAHIPNSIMTILEASGKQEPEAKEAPAGPLEEDDLEPLTLAPAPAPRPPQDLIGLRLAQEKALKRQLEEEQKLKPGGVGAPSSSSPSPSPSARPGPPPSEEAMDFREEGPECETPGIFISMDDDSGLTEAALLDSSLEGPLPKETAAGGLTLKEERSPQTLAPVGEDAMKTPSPAAEDAREPEAKGNS

SEQ ID NO: 833171 - protein, 475 aa, Homo sapiens
SHRGVARRRTAQPGLGAGAGPCLEELQGDAKIRGMGMNSPELLLLVENCPKGAETLVTRCLHSLTDKVPPSPELVKRVRDLYHKRLPDVRFLIPVLNGLEKKEVIQALPKLIKLNPIVVKEVFNRLLGTQHGEGNSALSPLNPGELLIALHNIDSVKCDMKSIIKATNLCFAERNVYTSEVLAVVMQQLMEQSPLPMLLMRTVIQSLTMYPRLGGFVMNILSRLIMKQVWKYPKVWEGFIKCCQRTKPQSFQVILQLPPQQLGAVFDKCPELREPLLAHVRSFTPHQQAHIPNSIMTILEASGKQEPEAKEAPAGPLEEDDLEPLTLAPAPAPRPPQDLIGLRLAQEKALKRQLEEEQKLKPGGVGAPSSSSPSPSPSARPGPPPSEEAMDFREEGPECETPGIFISMDDDSGLTEAALLDSSLEGPLPKETAAGGLTLKEERSPQTLAPVGEDAMKTPSPAAEDAREPEAKGNS

SEQ ID NO: 833172 - protein, 316 aa, Homo sapiens
MKSIIKATNLCFAERNVYTSEVLAVVMQQLMEQSPLPMLLMRTVIQSLTMYPRLGGFVMNILSRLIMKQVWKYPKVWEGFIKCCQRTKPQSFQVILQLPPQQLGAVFDKCPELREPLLAHVRSFTPHQQAHIPNSIMTILEASGKQEPEAKEAPAGPLEEDDLEPLTLAPAPAPRPPQDLIGLRLAQEKALKRQLEEEQKLKPGGVGAPSSSSPSPSPSARPGPPPSEEAMDFREEGPECETPGIFISMDDDSGLTEAALLDSSLEGPLPKETAAGGLTLKEERSPQTLAPVGEDAMKTPSPAAEDAREPEAKGNS

SEQ ID NO: 833173 - protein, 241 aa, Homo sapiens
MASGSGDSVTRRSVASQFFTQEEGPGIDGMTTSERVVDLLNQAALITNDSKITVLKQVQELIINKDPTLLDNFLDEIIAFQADKSIEVRKFVIGFIEEACKRDIELLLKLIANLNMLLRDENVNVVKKAILTMTQLYKVALQWMVKSRVISELQEACWDMVSAMAGDIILLLDSDNDGIRTHAIKFVEGLIVTLSPRMADSEIPRRQEHDISLDRIPRDHPYIQYNGRWRGGAAECRKRHC

SEQ ID NO: 833174 - protein, 62 aa, Homo sapiens
MRPHCLPPPFLPPAAGEGNSALSPLNPGELLIALHNIDSVKCDMKSIIKGEALPPHSSGLAP

SEQ ID NO: 833175 - protein, 1274 aa, Homo sapiens; identical to SEQ ID NO: 833165

SEQ ID NO: 833176 - protein, 1222 aa, Homo sapiens
PISFQVQELIINKDPTLLDNFLDEIIAFQADKSIEVRKFVIGFIEEACKRDIELLLKLIANLNMLLRDENVNVVKKAILTMTQLYKVALQWMVKSRVISELQEACWDMVSAMAGDIILLLDSDNDGIRTHAIKFVEGLIVTLSPRMADSEIPRRQEHDISLDRIPRDHPYIQYNVLWEEGKAALEQLLKFMVHPAISSINLTTALGSLANIARQRPMFMSEVIQAYETLHANLPPTLAKSQVSSVRKNLKLHLLSVLKHPASLEFQAQITTLLVDLGTPQAEIARNMPSSKDTRKRPRDDSDSTLKKMKLEPNLGEDDEDKDLEPGPSGTSKASAQISGQSDTDITAEFLQPLLTPDNVANLVLISMVYLPEAMPASFQAIYTPVESAGTEAQIKHLARLMATQMTAAGLGPGVEQTKQCKEEPKEEKVVKTESVLIKRRLSAQGQAISVVGSLSSMSPLEEEAPQAKRRPEPIIPVTQPRLAGAGGRKKIFRLSDVLKPLTDAQVEAMKLGAVKRILRAEKAVACSGAAQVRIKILASLVTQFNSGLKAEVLSFILEDVRARLDLAFAWLYQEYNAYLAAGASGSLDKYEDCLIRLLSGLQEKPDQKDGIFTKVVLEAPLITESALEVVRKYCEDESRTYLGMSTLRDLIFKRPSRQFQYLHVLLDLSSHEKDKVRSQALLFIKRMYEKEQLREYVEKFALNYLQLLVHPNPPSVLFGADKDTEVAAPWTEETVKQCLYLYLALLPQNHKLIHELAAVYTEAIADIKRTVLRVIEQPIRGMGMNSPELLLLVENCPKGAETLVTRCLHSLTDKVPPSPELVKRVRDLYHKRLPDVRFLIPVLNGLEKKEVIQALPKLIKLNPIVVKEVFNRLLGTQHGEGNSALSPLNPGELLIALHNIDSVKCDMKSIIKATNLCFAERNVYTSEVLAVVMQQLMEQSPLPMLLMRTVIQSLTMYPRLGGFVMNILSRLIMKQVWKYPKVWEGFIKCCQRTKPQSFQVILQLPPQQLGAVFDKCPELREPLLAHVRSFTPHQQAHIPNSIMTILEASGKQEPEAKEAPAGPLEEDDLEPLTLAPAPAPRPPQDLIGLRLAQEKALKRQLEEEQKLKPGGVGAPSSSSPSPSPSARPGPPPSEEAMDFREEGPECETPGIFISMDDDSGLTEAALLDSSLEGPLPKETAAGGLTLKEERSPQTLAPVGEDAMKTPSPAAEDAREPEAKGNS

SEQ ID NO: 833177 - protein, 887 aa, Homo sapiens
MASGSGDSVTRRSVASQFFTQEEGPGIDGMTTSERVVDLLNQAALITNDSKITVLKQVQELIINKDPTLLDNFLDEIIAFQADKSIEVRKFVIGFIEEACKRDIELLLKLIANLNMLLRDENVNVVKKAILTMTQLYKVALQWMVKSRVISELQEACWDMVSAMAGDIILLLDSDNDGIRTHAIKFVEGLIVTLSPRMADSEIPRRQEHDISLDRIPRDHPYIQYNVLWEEGKAALEQLLKFMVHPAISSINLTTALGSLANIARQRPMFMSEVIQAYETLHANLPPTLAKSQVSSVRKNLKLHLLSVLKHPASLEFQAQITTLLVDLGTPQAEIARNMPSSKDTRKRPRDDSDSTLKKMKLEPNLGEDDEDKDLEPGPSGTSKASAQISGQSDTDITAEFLQPLLTPDNVANLVLISMVYLPEAMPASFQAIYTPVESAGTEAQIKHLARLMATQMTAAGLGPGVEQTKQCKEEPKEEKVVKTESVLIKRRLSAQGQAISVVGSLSSMSPLEEEAPQAKRRPEPIIPVTQPRLAGAGGRKKIFRLSDVLKPLTDAQVEAMKLGAVKRILRAEKAVACSGAAQVRIKILASLVTQFNSGLKAEVLSFILEDVRARLDLAFAWLYQEYNAYLAAGASGSLDKYEDCLIRLLSGLQEKPDQKDGIFTKVVLEAPLITESALEVVRKYCEDESRTYLGMSTLRDLIFKRPSRQFQYLHVLLDLSSHEKDKVRSQALLFIKRMYEKEQLREYVEKFALNYLQLLVHPNPPSVLFGADKDTEVAAPWTEETVKQCLYLYLALLPQNHKLIHELAAVYTEAIADIKRTVLRVIEQPIRGMGMNSPELLLLVDPTLPRAGEAGPGSLPQATARRPLPHPGAQWAGEERGDPGPA

SEQ ID NO: 833178 - protein, 899 aa, Homo sapiens
MASGSGDSVTRRSVASQFFTQEEGPGIDGMTTSERVVDLLNQAALITNDSKITVLKQVQELIINKDPTLLDNFLDEIIAFQADKSIEVRKFVIGFIEEACKRDIELLLKLIANLNMLLRDENVNVVKKAILTMTQLYKVALQWMVKSRVISELQEACWDMVSAMAGDIILLLDSDNDGIRTHAIKFVEGLIVTLSPRMADSEIPRRQEHDISLDRIPRDHPYIQYNVLWEEGKAALEQLLKFMVHPAISSINLTTALGSLANIARQRPMFMSEVIQAYETLHANLPPTLAKSQVSSVRKNLKLHLLSVLKHPASLEFQAQITTLLVDLGTPQAEIARNMPSSKDTRKRPRDDSDSTLKKMKLEPNLGEDDEDKDLEPGPSGTSKASAQISGQSDTDITAEFLQPLLTPDNVANLVLISMVYLPEAMPASFQAIYTPVESAGTEAQIKHLARLMATQMTAAGLGPGVEQTKQCKEEPKEEKVVKTESVLIKRRLSAQGQAISVVGSLSSMSPLEEEAPQAKRRPEPIIPVTQPRLAGAGGRKKIFRLSDVLKPLTDAQVEAMKLGAVKRILRAEKAVACSGAAQVRIKILASLVTQFNSGLKAEVLSFILEDVRARLDLAFAWLYQEYNAYLAAGASGSLDKYEDCLIRLLSGLQEKPDQKDGIFTKVVLEAPLITESALEVVRKYCEDESRTYLGMSTLRDLIFKRPSRQFQYLHVLLDLSSHEKDKVRSQALLFIKRMYEKEQLREYVEKFALNYLQLLVHPNPPSVLFGADKDTEVAAPWTEETVKQCLYLYLALLPQNHKLIHELAAVYTEAIADIKRTVLRVIEQPVRPLSPPGPAHPRARLCPQLQLFPNLLHLRVCQARRVVTPGRPRLCSLQAVRMSLLRKRQVARQLGAWS

SEQ ID NO: 833179 - protein, 441 aa, Homo sapiens
MGMNSPELLLLVENCPKGAETLVTRCLHSLTDKVPPSPELVKRVRDLYHKRLPDVRFLIPVLNGLEKKEVIQALPKLIKLNPIVVKEVFNRLLGTQHGEGNSALSPLNPGELLIALHNIDSVKCDMKSIIKATNLCFAERNVYTSEVLAVVMQQLMEQSPLPMLLMRTVIQSLTMYPRLGGFVMNILSRLIMKQVWKYPKVWEGFIKCCQRTKPQSFQVILQLPPQQLGAVFDKCPELREPLLAHVRSFTPHQQAHIPNSIMTILEASGKQEPEAKEAPAGPLEEDDLEPLTLAPAPAPRPPQDLIGLRLAQEKALKRQLEEEQKLKPGGVGAPSSSSPSPSPSARPGPPPSEEAMDFREEGPECETPGIFISMDDDSGLTEAALLDSSLEGPLPKETAAGGLTLKEERSPQTLAPVGEDAMKTPSPAAEDAREPEAKGNS

SEQ ID NO: 833180 - protein, 662 aa, Homo sapiens
MASGSGDSVTRRSVASQFFTQEEGPGIDGMTTSERVVDLLNQAALITNDSKITVLKQVQELIINKDPTLLDNFLDEIIAFQADKSIEVRKFVIGFIEEACKRDIELLLKLIANLNMLLRDENVNVVKKAILTMTQLYKVALQWMVKSRVISELQEACWDMVSAMAGDIILLLDSDNDGIRTHAIKFVEGLIVTLSPRMADSEIPRRQEHDISLDRIPRDHPYIQYNVLWEEGKAALEQLLKFMVHPAISSINLTTALGSLANIARQRPMFMSEVIQAYETLHANLPPTLAKSQVSSVRKNLKLHLLSVLKHPASLEFQAQITTLLVDLGTPQAEIARNMPSSKDTRKRPRDDSDSTLKKMKLEPNLGEDDEDKDLEPGPSGTSKASAQISGQSDTDITAEFLQPLLTPDNVANLVLISMVYLPEAMPASFQAIYTPVESAGTEAQIKHLARLMATQMTAAGLGPGVEQTKQCKEEPKEEKVVKTESVLIKRRLSAQGQAISVVGSLSSMSPLEEEAPQAKRRPEPIIPVTQPRLAGAGGRKKIFRLSDVLKPLTDAQVEAMKLGAVKRILRAEKAVACSGAAQVRIKILASLVTQFNSGLKAEVLSFILEDVRARLDLAFAWLYQEYNAYLAAGASGSLDKYEDCLIRLLSGLQEKPDQKDG

SEQ ID NO: 833181 - protein, 96 aa, Homo sapiens
PNLGEDDEDKDLEPGPSGTSKASAQISGQSDTDITAEFLQPLLTPDNVANLVRMGGERFPPGQEGRISSVFHLPPLHTIHLLQSTLLINKEKGFNW

SEQ ID NO: 833182 - protein, 74 aa, Homo sapiens
FAERNVYTSEVLAVVMQQLMEQSPLPMLLMRTVIQSLTMYPRLGGFVMNILSRLIMKQVTHPRPPRLQAADSSF

SEQ ID NO: 833183 - protein, 79 aa, Homo sapiens
MSILYFHPFSRDLHSKLSPLDPQVTMEEEDESRGKTEESGEDRGDGPPDRDPTLSPSAFILRAIQQLWTCSGQICRDPL

SEQ ID NO: 833184 - protein, 1064 aa, Homo sapiens
MEEEDESRGKTEESGEDRGDGPPDRDPTLSPSAFILRAIQQAVGSSLQGDLPNDKDGSRCHGLRWRRCRSPRSEPRSQESGGTDTATVLDMATDSFLAGLVSVLDPPDTWVPSRLDLRPGESEDMLELVAEVRIGDRDPIPLPVPSLLPRLRAWRTGKTVSPQSNSSRPTCARHLTLGTGDGGPAPPPAPSSASSSPSPSPSSSSPSPPPPPPPPAPPAPPAPRFDIYDPFHPTDEAYSPPPAPEQKYDPFEPTGSNPSSSAGTPSPEEEEEEEEEEEEEEEDEEEEEGLSQSISRISETLAGIYDDNSLSQDFPGDESPRPDAQPTQPTPAPGTPPQVDSTRADGAMRRRVFVVGTEAEACREGKVSVEVVTAGGAALPPPLLPPGDSEIEEGEIVQPEEEPRLALSLFRPGGRAARPTPAASATPTAQPLPQPPAPRAPEGDDFLSLHAESDGEGALQVDLGEPAPAPPAADSRWGGLDLRRKILTQRRERYRQRSPSPAPAPAPAAAAGPPTRKKSRRERKRSGEAKEAASSSSGTQPAPPAPASPWDSKKHRSRDRKPGSHASSSARRRSRSRSRSRSTRRRSRSTDRRRGGSRRSRSREKRRRRRRSASPPPATSSSSSSRRERHRGKHRDGGGSKKKKKRSRSRGEKRSGDGSEKAPAPAPPPSGSTSCGDRDSRRRGAVPPSIQDLTDHDLFAIKRTITVGRLDKSDPRGPSPAPASSPKREVLYDSEGLSGEERGGKSSQKDRRRSGAASSSSSSREKGSRRKALDGGDRDRDRDRDRDRDRSSKKARPPKESAPSSGPPPKPPVSSGSGSSSSSSSCSSRKVKLQSKVAVLIREGVSSTTPAKDAASAGLGSIGVKFSRDRESRSPFLKPDERAPTEMAKAAPGSTMPWNLPAGVDCTTSGVLALTALLFKMEEANLASRAKAQELIQATNQISAQKSTSVLGMTQFRGHSGGWARAPKPVGRPLGGLRWTPNPRVRHREHKEEAALRPGEPNDLRKERKEEEERRDNDTYRKDTEEDTHGHQPNRRNPSQRRPRTRRTDPHQARATRNQHEQLD

SEQ ID NO: 833185 - protein, 147 aa, Homo sapiens
MGDGEEVSLGGEEGDRIFSRPPGPVPLALGHPSSRGTEGLWPGYWGSSSYRSSKLRPTVLGGWGPGSLVVTPTVPGPPDLPQQKWGNQPSEGEQPGAGLRPALPLLPQARSQARGPPRAPTAAQGARAPRQGWPGPAPAPSLRALAS

SEQ ID NO: 833186 - protein, 1312 aa, Homo sapiens
MEEEDESRGKTEESGEDRGDGPPDRDPTLSPSAFILRAIQQAVGSSLQGDLPNDKDGSRCHGLRWRRCRSPRSEPRSQESGGTDTATVLDMATDSFLAGLVSVLDPPDTWVPSRLDLRPGESEDMLELVAEVRIGDRDPIPLPVPSLLPRLRAWRTGKTVSPQSNSSRPTCARHLTLGTGDGGPAPPPAPSSASSSPSPSPSSSSPSPPPPPPPPAPPAPPAPRFDIYDPFHPTDEAYSPPPAPEQKYDPFEPTGSNPSSSAGTPSPEEEEEEEEEEEEEEEDEEEEEGLSQSISRISETLAGIYDDNSLSQDFPGDESPRPDAQPTQPTPAPGTPPQVDSTRADGAMRRRVFVVGTEAEACREGKVSVEVVTAGGAALPPPLLPPGDSEIEEGEIVQPEEEPRLALSLFRPGGRAARPTPAASATPTAQPLPQPPAPRAPEGDDFLSLHAESDGEGALQVDLGEPAPAPPAADSRWGGLDLRRKILTQRRERYRQRSPSPAPAPAPAAAAGPPTRKKSRRERKRSGEAKEAASSSSGTQPAPPAPASPWDSKKHRSRDRKPGSHASSSARRRSRSRSRSRSTRRRSRSTDRRRGGSRRSRSREKRRRRRRSASPPPATSSSSSSRRERHRGKHRDGGGSKKKKKRSRSRGEKRSGDGSEKAPAPAPPPSGSTSCGDRDSRRRGAVPPSIQDLTDHDLFAIKRTITVGRLDKSDPRGPSPAPASSPKREVLYDSEGLSGEERGGKSSQKDRRRSGAASSSSSSREKGSRRKALDGGDRDRDRDRDRDRDRSSKKARPPKESAPSSGPPPKPPVSSGSGSSSSSSSCSSRKVKLQSKVAVLIREGVSSTTPAKDAASAGLGSIGVKFSRDRESRSPFLKPDERAPTEMAKAAPGSTKPKKTKVKAKAGAKKTKGTKGKTKPSKTRKKVRSGGGSGGSGGQVSLKKSKADSCSQAAGTKGAEETSWSGEERAAKVPSTPPPKAAPPPPALTPDSQTVDSSCKTPEVSFLPEEATEEAGVRGGAEEEEEEEEEEEEEEEEEEQQPATTTATSTAAAAPSTAPSAGSTAGDSGAEDGPASRVSQLPTLPPPMPWNLPAGVDCTTSGVLALTALLFKMEEANLASRAKAQELIQATNQILSHRKPPSSLGMTPAPVPTSLGLPPGPSSYLLPGSLPLGGCGSTPPTPTGLAATSDKREGSSSSEGRGDTDKYLKKLHTQERAVEEVKLAIKPYYQKKDITKEEYKDILRKAVHKICHSKSGEINPVKVSNLVRAYVQRYRYFRKHGRKPGDPPGPPRPPKEPGPPDKGGPGLPLPPL

SEQ ID NO: 833187 - protein, 1337 aa, Homo sapiens
MSILYFHPFSRDLHSKLSPLDPQVTMEEEDESRGKTEESGEDRGDGPPDRDPTLSPSAFILRAIQQAVGSSLQGDLPNDKDGSRCHGLRWRRCRSPRSEPRSQESGGTDTATVLDMATDSFLAGLVSVLDPPDTWVPSRLDLRPGESEDMLELVAEVRIGDRDPIPLPVPSLLPRLRAWRTGKTVSPQSNSSRPTCARHLTLGTGDGGPAPPPAPSSASSSPSPSPSSSSPSPPPPPPPPAPPAPPAPRFDIYDPFHPTDEAYSPPPAPEQKYDPFEPTGSNPSSSAGTPSPEEEEEEEEEEEEEEEDEEEEEGLSQSISRISETLAGIYDDNSLSQDFPGDESPRPDAQPTQPTPAPGTPPQVDSTRADGAMRRRVFVVGTEAEACREGKVSVEVVTAGGAALPPPLLPPGDSEIEEGEIVQPEEEPRLALSLFRPGGRAARPTPAASATPTAQPLPQPPAPRAPEGDDFLSLHAESDGEGALQVDLGEPAPAPPAADSRWGGLDLRRKILTQRRERYRQRSPSPAPAPAPAAAAGPPTRKKSRRERKRSGEAKEAASSSSGTQPAPPAPASPWDSKKHRSRDRKPGSHASSSARRRSRSRSRSRSTRRRSRSTDRRRGGSRRSRSREKRRRRRRSASPPPATSSSSSSRRERHRGKHRDGGGSKKKKKRSRSRGEKRSGDGSEKAPAPAPPPSGSTSCGDRDSRRRGAVPPSIQDLTDHDLFAIKRTITVGRLDKSDPRGPSPAPASSPKREVLYDSEGLSGEERGGKSSQKDRRRSGAASSSSSSREKGSRRKALDGGDRDRDRDRDRDRDRSSKKARPPKESAPSSGPPPKPPVSSGSGSSSSSSSCSSRKVKLQSKVAVLIREGVSSTTPAKDAASAGLGSIGVKFSRDRESRSPFLKPDERAPTEMAKAAPGSTKPKKTKVKAKAGAKKTKGTKGKTKPSKTRKKVRSGGGSGGSGGQVSLKKSKADSCSQAAGTKGAEETSWSGEERAAKVPSTPPPKAAPPPPALTPDSQTVDSSCKTPEVSFLPEEATEEAGVRGGAEEEEEEEEEEEEEEEEEEQQPATTTATSTAAAAPSTAPSAGSTAGDSGAEDGPASRVSQLPTLPPPMPWNLPAGVDCTTSGVLALTALLFKMEEANLASRAKAQELIQATNQILSHRKPPSSLGMTPAPVPTSLGLPPGPSSYLLPGSLPLGGCGSTPPTPTGLAATSDKREGSSSSEGRGDTDKYLKKLHTQERAVEEVKLAIKPYYQKKDITKEEYKDILRKAVHKICHSKSGEINPVKVSNLVRAYVQRYRYFRKHGRKPGDPPGPPRPPKEPGPPDKGGPGLPLPPL

SEQ ID NO: 833188 - protein, 225 aa, Homo sapiens
MEEEDESRGKTEESGEDRGDGPPDRDPTLSPSAFILRAIQQAVGSSLQGDLPNDKDGSRCHGLRWRRCRSPRSEPRSQESGGTDTATVLDMATDSFLAGLVSVLDPPDTWVPSRLDLRPGESEDMLELVAEVRIGDRDPIPLPVPSLLPRLRAWRTGKTVSPQSNSSRPTCARHLTLGTGDGGPAPPPAPSSASSSPSPSPSSSSPSPPPPPPPPAPPAPPAPRF

SEQ ID NO: 833189 - protein, 111 aa, Homo sapiens
RRSPVVSEPFRALGPGTALVLRNCGQDQGGRHLEVSQGKDHKGLRPETQTDAHKDSPSDSPPTTIHVPQVSVPAREDARLEARKDLNTAPYIPSWLEQIPRQQNCQLHLMG

SEQ ID NO: 833190 - protein, 505 aa, Homo sapiens
GASALARHGGGLAGGVGWDCGACASRCQGVMEGLLTRCRALPALATCSRQLSGYVPCRFHHCAPRRGRRLLLSRVFQPQNLREDRVLSLQDKSDDLTCKSQRLMLQVGLIYPASPGCYHLLPYTVRAMEKLVRVIDQEMQAIGGQKVNMPSLSPAELWQATNRWDLMGKELLRLRDRHGKEYCLGPTHEEAITALIASQKKLSYKQLPFLLYQVTRKFRDEPRPRFGLLRGREFYMKDMYTFDSSPEAAQQTYSLVCDAYCSLFNKLGLPFVKVQADVGTIGGTVSHEFQLPVDIGEDRLAICPRCSFSANMETLDLSQMNCPACQGPLTKTKGIEVGHTFYLGTKYSSIFNAQFTNVCGKPTLAEMGCYGLGVTRILAAAIEVLSTEDCVRWPSLLAPYQACLIPPKKGSKEQAASELIGQLYDHITEAVPQLHGEVLLDDRTHLTIGNRLKDANKFGYPFVIIAGKRALEDPAHFEVWCQNTGEVAFLTKDGVMDLLTPVQTV

SEQ ID NO: 833191 - protein, 1572 aa, Homo sapiens
MRTTKVYKLVIHKKGFGGSDDELVVNPKVFPHIKLGDIVEIAHPNDEYSPLLLQVKSLKEDLQKETISVDQTVTQVFRLRPYQDVYVNVVDPKDVTLDLVELTFKDQYIGRGDMWRLKKSLVSTCAYITQKVEFAGIRAQAGELWVKNEKVMCGYISEDTRVVFRSTSAMVYIFIQMSCEMWDFDIYGDLYFEKAVNGFLADLFTKWKEKNCSHEVTVVLFSRTFYDAKSVDEFPEINRASIRQDHKGRFYEDFYKVVVQNERREEWTSLLVTIKKLFIQYPVLVRLEQAEGFPQGDNSTSAQGNYLEAINLSFNVFDKHYINRNFDRTGQMSVVITPGVGVFEVDRLLMILTKQRMIDNGIGVDLVCMGEQPLHAVPLFKLHNRSAPRDSRLGDDYNIPHWINHSFYTSKSQLFCNSFTPRIKLAGKKPASEKAKNGRDTSLGSPKESENALPIQVDYDAYDAQVFRLPGPSRAQCLTTCRSVRERESHSRKSASSCDVSSSPSLPSRTLPTEEVRSQASDDSSLGKSANILMIPHPHLHQYEVSSSLGYTSTRDVLENMMEPPQRDSSAPGRFHVGSAESMLHVRPGGYTPQRALINPFAPSRMPMKLTSNRRRWMHTFPVGPSGEAIQIHHQTRQNMAELQGSGQRDPTHSSAELLELAYHEAAGRHSNSRQPGDGMSFLNFSGTEELSVGLLSNSGAGMNPRTQNKDSLEDSVSTSPDPMPGFCCTVGVDWKSLTTPACLPLTTDYFPDRQGLQNDYTEGCYDLLPEADIDRRDEDGVQMTAQQVFEEFICQRLMQGYQIIVQPKTQKPNPAVPPPLSSSPLYSRGLVSRNRPEEEDQYWLSMGRTFHKVTLKDKMITVTRYLPKYPYESAQIHYTYSLCPSHSDSEFVSCWVEFSHERLEEYKWNYLDQYICSAGSEDFSLIESLKFWRTRFLLLPACVTATKRITEGEAHCDIYGDRPRADEDEWQLLDGFVRFVEGLNRIRRRHRSDRMMRKGTAMKGLQMTGPISTHSLESTAPPVGKKGTSALSALLEMEASQKCLGEQQAAVHGGKSSAQSAESSSVAMTPTYMDSPRKVSVDQTATPMLDGTSLGICTGQSMDRGNSQTFGNSQNIGEQGYSSTNSSDSSSQQLVASSLTSSSTLTEILEAMKHPSTGVQLLSEQKGLSPYCFISAEVVHWLVNHVEGIQTQAMAIDIMQKMLEEQLITHASGEAWRTFIYGFYFYKIVTDKEPDRVAMQQPATTWHTAGVDDFASFQRKWFEVAFVAEELVHSEIPAFLLPWLPSRPASYASRHSSFSRSFGGRSQAAALLAATVPEQRTVTLDVDVNNRTDRLEWCSCYYHGNFSLNAAFEIKLHWMAVTAAVLFEMVQGWHRKATSCGFLLVPVLEGPFALPSYLYGDPLRAQLFIPLNISCLLKEGSEHLFDSFEPETYWDRMHLFQEAIAHRFGFVQDKYSASAFNFPAENKPQYIHVTGTVFLQLPYSKRKFSGQQRRRRNSTSSTNQNMFCEERVGYNWAYNTMLTKTWRSSATGDEKFADRLLKDFTDFCINRDNRLVTFWTSCLEKMHASAP

SEQ ID NO: 833192 - protein, 1658 aa, Homo sapiens
MRTTKVYKLVIHKKGFGGSDDELVVNPKVFPHIKLGDIVEIAHPNDEYSPLLLQVKSLKEDLQKETISVDQTVTQVFRLRPYQDVYVNVVDPKDVTLDLVELTFKDQYIGRGDMWRLKKSLVSTCAYITQKVEFAGIRAQAGELWVKNEKVMCGYISEDTRVVFRSTSAMVYIFIQMSCEMWDFDIYGDLYFEKAVNGFLADLFTKWKVHFFLHTKSHYVNITQSDFENALFLLNCPKLSYFGKTRTPDLNYPNNLNFMRIYEKHKANITLNGKRLKTFPQDQYKEKNCSHEVTVVLFSRTFYDAKSVDEFPEINRASIRQDHKGRFYEDFYKVVVQNERREEWTSLLVTIKKLFIQYPVLVRLEQAEGFPQGDNSTSAQGNYLEAINLSFNVFDKHYINRNFDRTGQMSVVITPGVGVFEVDRLLMILTKQRMIDNGIGVDLVCMGEQPLHAVPLFKLHNRSAPRDSRLGDDYNIPHWINHSFYTSKSQLFCNSFTPRIKLAGKKPASEKAKNGRDTSLGSPKESENALPIQVDYDAYDAQVFRLPGPSRAQCLTTCRSVRERESHSRKSASSCDVSSSPSLPSRTLPTEEVRSQASDDSSLGKSANILMIPHPHLHQYEVSSSLGYTSTRDVLENMMEPPQRDSSAPGRFHVGSAESMLHVRPGGYTPQRALINPFAPSRMPMKLTSNRRRWMHTFPVGPSGEAIQIHHQTRQNMAELQGSGQRDPTHSSAELLELAYHEAAGRHSNSRQPGDGMSFLNFSGTEELSVGLLSNSGAGMNPRTQNKDSLEDSVSTSPDPILTLSAPPVVPGFCCTVGVDWKSLTTPACLPLTTDYFPDRQGLQNDYTEGCYDLLPEADIDRRDEDGVQMTAQQVFEEFICQRLMQGYQIIVQPKTQKPNPAVPPPLSSSPLYSRGLVSRNRPEEEDQYWLSMGRTFHKVTLKDKMITVTRYLPKYPYESAQIHYTYSLCPSHSDSEFVSCWVEFSHERLEEYKWNYLDQYICSAGSEDFSLIESLKFWRTRFLLLPACVTATKRITEGEAHCDIYGDRPRADEDEWQLLDGFVRFVEGLNRIRRRHRSDRMMRKGTAMKGLQMTGPISTHSLESTAPPVGKKGTSALSALLEMEASQKCLGEQQAAVHGGKSSAQSAESSSVAMTPTYMDSPRKVSVDQTATPMLDGTSLGICTGQSMDRGNSQTFGNSQNIGEQGYSSTNSSDSSSQQLVASSLTSSSTLTEILEAMKHPSTGVQLLSEQKGLSPYCFISAEVVHWLVNHVEGIQTQAMAIDIMQKMLEEQLITHASGEAWRTFIYGFYFYKIVTDKEPDRVAMQQPATTWHTAGVDDFASFQRKWFEVAFVAEELVHSEIPAFLLPWLPSRPASYASRHSSFSRSFGGRSQAAALLAATVPEQRTVTLDVDVNNRTDRLEWCSCYYHGNFSLNAAFEIKLHWMAVTAAVLFEMVQGWHRKATSCGFLLVPVLEGPFALPSYLYGDPLRAQLFIPLNISCLLKEGSEHLFDSFEPETYWDRMHLFQEAIAHRFGFVQDKYSASAFNFPAENKPQYIHVTGTVFLQLPYSKRKFSGQQRRRRNSTSSTNQNMFCEERVGYNWAYNTMLTKTWRSSATGDEKFADRLLKDFTDFCINRDNRLVTFWTSCLEKMHASAP

SEQ ID NO: 833193 - protein, 1282 aa, Homo sapiens
TKLNFSSQPELHTPVFSISDEFPEINRASIRQDHKGRFYEDFYKVVVQNERREEWTSLLVTIKKLFIQYPVLVRLEQAEGFPQGDNSTSAQGNYLEAINLSFNVFDKHYINRNFDRTGQMSVVITPGVGVFEVDRLLMILTKQRMIDNGIGVDLVCMGEQPLHAVPLFKLHNRSAPRDSRLGDDYNIPHWINHSFYTSKSQLFCNSFTPRIKLAGKKPASEKAKNGRDTSLGSPKESENALPIQVDYDAYDAQVFRLPGPSRAQCLTTCRSVRERESHSRKSASSCDVSSSPSLPSRTLPTEEVRSQASDDSSLGKSANILMIPHPHLHQYEVSSSLGYTSTRDVLENMMEPPQRDSSAPGRFHVGSAESMLHVRPGGYTPQRALINPFAPSRMPMKLTSNRRRWMHTFPVGMNPRTQNKDSLEDSVSTSPDPMPGFCCTVGVDWKSLTTPACLPLTTDYFPDRQGLQNDYTEGCYDLLPEADIDRRDEDGVQMTAQQVFEEFICQRLMQGYQIIVQPKTQKPNPAVPPPLSSSPLYSRGLVSRNRPEEEDQYWLSMGRTFHKVTLKDKMITVTRYLPKYPYESAQIHYTYSLCPSHSDSEFVSCWVEFSHERLEEYKWNYLDQYICSAGSEDFSLIESLKFWRTRFLLLPACVTATKRITEGEAHCDIYGDRPRADEDEWQLLDGFVRFVEGLNRIRRRHRSDRMMRKGTAMKGLQMTGPISTHSLESTAPPVGKKGTSALSALLEMEASQKCLGEQQAAVHGGKSSAQSAESSSVAMTPTYMDSPRKVSVDQTATPMLDGTSLGICTGQSMDRGNSQTFGNSQNIGEQGYSSTNSSDSSSQQLVASSLTSSSTLTEILEAMKHPSTGVQLLSEQKGLSPYCFISAEVVHWLVNHVEGIQTQAMAIDIMQKMLEEQLITHASGEAWRTFIYGFYFYKIVTDKEPDRVAMQQPATTWHTAGVDDFASFQRKWFEVAFVAEELVHSEIPAFLLPWLPSRPASYASRHSSFSRSFGGRSQAAALLAATVPEQRTVTLDVDVNNRTDRLEWCSCYYHGNFSLNAAFEIKLHWMAVTAAVLFEMVQGWHRKATSCGFLLVPVLEGPFALPSYLYGDPLRAQLFIPLNISCLLKEGSEHLFDSFEPETYWDRMHLFQEAIAHRFGFVQDKYSASAFNFPAENKPQYIHVTGTVFLQLPYSKRKFSGQQRRRRNSTSSTNQNMFCEERVGYNWAYNTMLTKTWRSSATGDEKFADRLLKDFTDFCINRDNRLVTFWTSCLEKMHASAP

SEQ ID NO: 833194 - protein, 1253 aa, Homo sapiens
TKLNFSSQPELHTPVFSISDEFPEINRASIRQDHKGRFYEDFYKVVVQNERREEWTSLLVTIKKLFIQYPVLVRLEQAEGFPQGDNSTSAQGNYLEAINLSFNVFDKHYINRNFDRTGQMSVVITPGVGVFEVDRLLMILTKQRMIDNGIGVDLVCMGEQPLHAVPLFKLHNRSAPRDSRLGDDYNIPHWINHSFYTSKSQLFCNSFTPRIKLAGKKPASEKAKNGRDTSLGSPKESENALPIQVDYDAYDAQVFRLPGPSRAQCLTTCRSVRERESHSRKSASSCDVSSSPSLPSRTLPTEEVRSQASDDSSLGKSANILMIPHPHLHQYEVSSSLGYTSTRDVLENMMEPPQRDSSAPGRFHVGSAESMLHVRPGGYTPQRALINPFAPSRMPMKLTSNRRRWMHTFPVGPSGEAIQIHHQTRQNMAELQGSGQRDPTHSSAELLELAYHEAAGRHSNSRQPGDGMSFLNFSGTEELSVGLLSNSGAGMNPRTQNKDSLEDSVSTSPDPILTLSAPPVVPGFCCTVGVDWKSLTTPACLPLTTDYFPDRQGLQNDYTEGCYDLLPEADIDRRDEDGVQMTAQQVFEEFICQRLMQGYQIIVQPKTQKPNPAVPPPLSSSPLYSRGLVSRNRPEEEDQYWLSMGRTFHKVTLKDKMITVTRYLPKYPYESAQIHYTYSLCPSHSDSEFVSCWVEFSHERLEEYKWNYLDQYICSAGSEDFSLIESLKFWRTRFLLLPACVTATKRITEGEAHCDIYGDRPRADEDEWQLLDGFVRFVEGLNRIRRRHRSDRMMRKGTAMKGLQMTGPISTHSLESTAPPVGKKGTSALSALLEMEASQKCLGEQQAAVHGGKSSAQSAESSSVAMTPTYMDSPRKVSVDQTATPMLDGTSLGICTGQSMDRGNSQTFGNSQNIGEQGYSSTNSSDSSSQQLVASSLTSSSTLTEILEAMKHPSTGVQLLSEQKGLSPYCFISAEVVHWLVNHVEGIQTQAMAIDIMQKMLEEQLITHASGEAWRTFIYGFYFYKIVTDKEPDRVAMQQPATTWHTAGVDDFASFQRKWFEVAFVAEELVHSEIPAFLLPWLPSRPASYASRHSSFSRSFGGRSQAAALLAATVPEQRTVTLDVDVNNRTDRLEWCSCYYHGNFSLNAAFEIKLHWMAVTAAVLFEMVQGWHRKATSCGFLLVPVLEGPFALPSYQIVRGRAPVSGKRAGGPHECPRKGVAPGSILFLHHLWDIRGRICHFLPRSVHRCKIIL

SEQ ID NO: 833195 - protein, 1249 aa, Homo sapiens
TKLNFSSQPELHTPVFSISDEFPEINRASIRQDHKGRFYEDFYKVVVQNERREEWTSLLVTIKKLFIQYPVLVRLEQAEGFPQGDNSTSAQGNYLEAINLSFNVFDKHYINRNFDRTGQMSVVITPGVGVFEVDRLLMILTKQRMIDNGIGVDLVCMGEQPLHAVPLFKLHNRSAPRDSRLGDDYNIPHWINHSFYTSKSQLFCNSFTPRIKLAGKKPASEKAKNGRDTSLGSPKESENALPIQVDYDAYDAQVFRLPGPSRAQCLTTCRSVRERESHSRKSASSCDVSSSPSLPSRTLPTEEVRSQASDDSSLGKSANILMIPHPHLHQYEVSSSLGYTSTRDVLENMMEPPQRDSSAPGRFHVGSAESMLHVRPGGYTPQRALINPFAPSRMPMKLTSNRRRWMHTFPVGPSGEAIQIHHQTRQNMAELQGSGQRDPTHSSAELLELAYHEAAGRHSNSRQPGDGMSFLNFSGTEELSVGLLSNSGAGMNPRTQNKDSLEDSVSTSPDPILTLSAPPVVPGFCCTVGVDWKSLTTPACLPLTTDYFPDRQGLQNDYTEGCYDLLPEADIDRRDEDGVQMTAQQVFEEFICQRLMQGYQIIVQPKTQKPNPAVPPPLSSSPLYSRGLVSRNRPEEEDQYWLSMGRTFHKVTLKDKMITVTRYLPKYPYESAQIHYTYSLCPSHSDSEFVSCWVEFSHERLEEYKWNYLDQYICSAGSEDFSLIESLKFWRTRFLLLPACVTATKRITEGEAHCDIYGDRPRADEDEWQLLDGFVRFVEGLNRIRRRHRSDRMMRKGTAMKGLQMTGPISTHSLESTAPPVGKKGTSALSALLEMEASQKCLGEQQAAVHGGKSSAQSAESSSVAMTPTYMDSPRKVSVDQTATPMLDGTSLGICTGQSMDRGNSQTFGNSQNIGEQGYSSTNSSDSSSQQLVASSLTSSSTLTEILEAMKHPSTGVQLLSEQKGLSPYCFISAEVVHWLVNHVEGIQTQAMAIDIMQKMLEEQLITHASGEAWRTFIYGFYFYKIVTDKEPDRVAMQQPATTWHTAGVDDFASFQRKWFEVAFVAEELVHSEIPAFLLPWLPSRPASYASRHSSFSRSFGGRSQAAALLAATVPEQRTVTLDVDVNNRTDRLEWCSCYYHGNFSLNAAFEIKLHWMAVTAAVLFEMVQGWHRKATSCGFLLVPVLEGPFALPSYLYGDPLRAQLFIPLNISCLLKEGSEHLFDSFEPETYWDRMHLFQEAIAHSCKDL

SEQ ID NO: 833196 - protein, 617 aa, Homo sapiens
TKLNFSSQPELHTPVFSISDEFPEINRASIRQDHKGRFYEDFYKVVVQNERREEWTSLLVTIKKLFIQYPVLVRLEQAEGFPQGDNSTSAQGNYLEAINLSFNVFDKHYINRNFDRTGQMSVVITPGVGVFEVDRLLMILTKQRMIDNGIGVDLVCMGEQPLHAVPLFKLHNRSAPRDSRLGDDYNIPHWINHSFYTSKSQLFCNSFTPRIKLAGKKPASEKAKNGRDTSLGSPKESENALPIQVDYDAYDAQVFRLPGPSRAQCLTTCRSVRERESHSRKSASSCDVSSSPSLPSRTLPTEEVRSQASDDSSLGKSANILMIPHPHLHQYEVSSSLGYTSTRDVLENMMEPPQRDSSAPGRFHVGSAESMLHVRPGGYTPQRALINPFAPSRMPMKLTSNRRRWMHTFPVGPSGEAIQIHHQTRQNMAELQGSGQRDPTHSSAELLELAYHEAAGRHSNSRQPGDGMSFLNFSGTEELSVGLLSNSGAGMNPRTQNKDSLEDSVSTSPDPILTLSAPPVVPGFCCTVGVDWKSLTTPACLPLTTDYFPDRQGLQNDYTEGCYDLLPEADIDRSVSEKKALGLVGEGFGYIPHMHQNTGFVLASATHILKLERYRGD

SEQ ID NO: 833197 - protein, 495 aa, Homo sapiens
TKLNFSSQPELHTPVFSISDEFPEINRASIRQDHKGRFYEDFYKVVVQNERREEWTSLLVTIKKLFIQYPVLVRLEQAEGFPQGDNSTSAQGNYLEAINLSFNVFDKHYINRNFDRTGQMSVVITPGVGVFEVDRLLMILTKQRMIDNGIGVDLVCMGEQPLHAVPLFKLHNRSAPRDSRLGDDYNIPHWINHSFYTSKSQLFCNSFTPRIKLAGKKPASEKAKNGRDTSLGSPKESENALPIQVDYDAYDAQVFRLPGPSRAQCLTTCRSVRERESHSRKSASSCDVSSSPSLPSRTLPTEEVRSQASDDSSLGKSANILMIPHPHLHQYEVSSSLGYTSTRDVLENMMEPPQRDSSAPGRFHVGSAESMLHVRPGGYTPQRALINPFAPSRMPMKLTSNRRRWMHTFPVGPSGEAIQIHHQTRQNMAELQGSGQRDPTHSSAELLELAYHEAAGRHSNSRQPGDGMSFLNFSGTEELSVGLLSNSGAGNQSKR

SEQ ID NO: 833198 - protein, 130 aa, Homo sapiens
PSPGPPSHTCHGDHMYLFPLLREAVLTLSAPPVVPGFCCTVGVDWKSLTTPACLPLTTDYFPDRQGLQNDYTEGCYDLLPEADIDRSVSEKKALGLVGEGFGYIPHMHQNTGFVLASATHILKLERYRGD

SEQ ID NO: 833199 - protein, 1369 aa, Homo sapiens
TKLNFSSQPELHTPVFSISDEFPEINRASIRQDHKGRFYEDFYKVVVQNERREEWTSLLVTIKKLFIQYPVLVRLEQAEGFPQGDNSTSAQGNYLEAINLSFNVFDKHYINRNFDRTGQMSVVITPGVGVFEVDRLLMILTKQRMIDNGIGVDLVCMGEQPLHAVPLFKLHNRSAPRDSRLGDDYNIPHWINHSFYTSKSQLFCNSFTPRIKLAGKKPASEKAKNGRDTSLGSPKESENALPIQVDYDAYDAQVFRLPGPSRAQCLTTCRSVRERESHSRKSASSCDVSSSPSLPSRTLPTEEVRSQASDDSSLGKSANILMIPHPHLHQYEVSSSLGYTSTRDVLENMMEPPQRDSSAPGRFHVGSAESMLHVRPGGYTPQRALINPFAPSRMPMKLTSNRRRWMHTFPVGPSGEAIQIHHQTRQNMAELQGSGQRDPTHSSAELLELAYHEAAGRHSNSRQPGDGMSFLNFSGTEELSVGLLSNSGAGMNPRTQNKDSLEDSVSTSPDPILTLSAPPVVPGFCCTVGVDWKSLTTPACLPLTTDYFPDRQGLQNDYTEGCYDLLPEADIDRRDEDGVQMTAQQVFEEFICQRLMQGYQIIVQPKTQKPNPAVPPPLSSSPLYSRGLVSRNRPEEEDQYWLSMGRTFHKVTLKDKMITVTRYLPKYPYESAQIHYTYSLCPSHSDSEFVSCWVEFSHERLEEYKWNYLDQYICSAGSEDFSLIESLKFWRTRFLLLPACVTATKRITEGEAHCDIYGDRPRADEDEWQLLDGFVRFVEGLNRIRRRHRSDRMMRKGTAMKGLQMTGPISTHSLESTAPPVGKKGTSALSALLEMEASQKCLGEQQAAVHGGKSSAQSAESSSVAMTPTYMDSPRKVSVDQTATPMLDGTSLGICTGQSMDRGNSQTFGNSQNIGEQGYSSTNSSDSSSQQLVASSLTSSSTLTEILEAMKHPSTGVQLLSEQKGLSPYCFISAEVVHWLVNHVEGIQTQAMAIDIMQKMLEEQLITHASGEAWRTFIYGFYFYKIVTDKEPDRVAMQQPATTWHTAGVDDFASFQRKWFEVAFVAEELVHSEIPAFLLPWLPSRPASYASRHSSFSRSFGGRSQAAALLAATVPEQRTVTLDVDVNNRTDRLEWCSCYYHGNFSLNAAFEIKLHWMAVTAAVLFEMVQGWHRKATSCGFLLVPVLEGPFALPSYLYGDPLRAQLFIPLNISCLLKEGSEHLFDSFEPETYWDRMHLFQEAIAHRFGFVQDKYSASAFNFPAENKPQYIHVTGTVFLQLPYSKRKFSGQQRRRRNSTSSTNQNMFCEERVGYNWAYNTMLTKTWRSSATGDEKFADRLLKDFTDFCINRDNRLVTFWTSCLEKMHASAP

SEQ ID NO: 833200 - protein, 1109 aa, Homo sapiens
MVTFCLLPGRSVRERESHSRKSASSCDVSSSPSLPSRTLPTEEVRSQASDDSSLGKSANILMIPHPHLHQYEVSSSLGYTSTRDVLENMMEPPQRDSSAPGRFHVGSAESMLHVRPGGYTPQRALINPFAPSRMPMKLTSNRRRWMHTFPVGPSGEAIQIHHQTRQNMAELQGSGQRDPTHSSAELLELAYHEAAGRHSNSRQPGDGMSFLNFSGTEELSVGLLSNSGAGMNPRTQNKDSLEDSVSTSPDPILTLSAPPVVPGFCCTVGVDWKSLTTPACLPLTTDYFPDRQGLQNDYTEGCYDLLPEADIDRRDEDGVQMTAQQVFEEFICQRLMQGYQIIVQPKTQKPNPAVPPPLSSSPLYSRGLVSRNRPEEEDQYWLSMGRTFHKVTLKDKMITVTRYLPKYPYESAQIHYTYSLCPSHSDSEFVSCWVEFSHERLEEYKWNYLDQYICSAGSEDFSLIESLKFWRTRFLLLPACVTATKRITEGEAHCDIYGDRPRADEDEWQLLDGFVRFVEGLNRIRRRHRSDRMMRKGTAMKGLQMTGPISTHSLESTAPPVGKKGTSALSALLEMEASQKCLGEQQAAVHGGKSSAQSAESSSVAMTPTYMDSPRKVSVDQTATPMLDGTSLGICTGQSMDRGNSQTFGNSQNIGEQGYSSTNSSDSSSQQLVASSLTSSSTLTEILEAMKHPSTGVQLLSEQKGLSPYCFISAEVVHWLVNHVEGIQTQAMAIDIMQKMLEEQLITHASGEAWRTFIYGFYFYKIVTDKEPDRVAMQQPATTWHTAGVDDFASFQRKWFEVAFVAEELVHSEIPAFLLPWLPSRPASYASRHSSFSRSFGGRSQAAALLAATVPEQRTVTLDVDVNNRTDRLEWCSCYYHGNFSLNAAFEIKLHWMAVTAAVLFEMVQGWHRKATSCGFLLVPVLEGPFALPSYLYGDPLRAQLFIPLNISCLLKEGSEHLFDSFEPETYWDRMHLFQEAIAHRFGFVQDKYSASAFNFPAENKPQYIHVTGTVFLQLPYSKRKFSGQQRRRRNSTSSTNQNMFCEERVGYNWAYNTMLTKTWRSSATGDEKFADRLLKDFTDFCINRDNRLVTFWTSCLEKMHASAP

SEQ ID NO: 833201 - protein, 302 aa, Homo sapiens
TKLNFSSQPELHTPVFSISDEFPEINRASIRQDHKGRFYEDFYKVVVQNERREEWTSLLVTIKKLFIQYPVLVRLEQAEGFPQGDNSTSAQGNYLEAINLSFNVFDKHYINRNFDRTGQMSVVITPGVGVFEVDRLLMILTKQRMIDNGIGVDLVCMGEQPLHAVPLFKLHNRSAPRDSRLGDDYNIPHWINHSFYTSKSQLFCNSFTPRIKLAGKKPASEKAKNGRDTSLGSPKESENALPIQVDYDAYDAQVFRLPGPSRAQCLTTCSCAGGRWVSHCPQTRGGGFQAGSRSQVSVCCYQ

SEQ ID NO: 833202 - protein, 1199 aa, Homo sapiens
TKLNFSSQPELHTPVFSISDEFPEINRASIRQDHKGRFYEDFYKVVVQNERREEWTSLLVTIKKLFIQYPVLVRLEQAEGFPQGDNSTSAQGNYLEAINLSFNVFDKHYINRNFDRTGQMSVVITPGVGVFEVDRLLMILTKQRMIDNGIGVDLVCMGEQPLHAVPLFKLHNRSAPRDSRLGDDYNIPHWINHSFYTSKSQLFCNSFTPRIKLAGKKPASEKAKNGRDTSLGSPKESENALPIQVDYDAYDAQVFRLPGPSRAQCLTTCRSVRERESHSRKSASSCDVSSSPSLPSRTLPTEEVRSQASDDSSLGKSANILMIPHPHLHQYEVSSSLGYTSTRDVLENMMEPPQRDSSAPGRFHVGSAESMLHVRPGGYTPQRALINPFAPSRMPMKLTSNRRRWMHTFPVGPSGEAIQIHHQTRQNMAELQGSGQRDPTHSSAELLELAYHEAAGRHSNSRQPGDGMSFLNFSGTEELSVGLLSNSGAGMNPRTQNKDSLEDSVSTSPDPILTLSAPPVVPGFCCTVGVDWKSLTTPACLPLTTDYFPDRQGLQNDYTEGCYDLLPEADIDRRDEDGVQMTAQQVFEEFICQRLMQGYQIIVQPKTQKPNPAVPPPLSSSPLYSRGLVSRNRPEEEDQYWLSMGRTFHKVTLKDKMITVTRYLPKYPYESAQIHYTYSLCPSHSDSEFVSCWVEFSHERLEEYKWNYLDQYICSAGSEDFSLIESLKFWRTRFLLLPACVTATKRITEGEAHCDIYGDRPRADEDEWQLLDGFVRFVEGLNRIRRRHRSDRMMRKGTAMKGLQMTGPISTHSLESTAPPVGKKGTSALSALLEMEASQKCLGEQQAAVHGGKSSAQSAESSSVAMTPTYMDSPRKVSVDQTATPMLDGTSLGICTGQSMDRGNSQTFGNSQNIGEQGYSSTNSSDSSSQQLVASSLTSSSTLTEILEAMKHPSTGVQLLSEQKGLSPYCFISAEVVHWLVNHVEGIQTQAMAIDIMQKMLEEQLITHASGEAWRTFIYGFYFYKIVTDKEPDRVAMQQPATTWHTAGVDDFASFQRKWFEVAFVAEELVHSEIPAFLLPWLPSRPASYASRHSSFSRSFGGRSQAAALLAATVPEQRTVTLDVDVNNRTDRLEWCSCYYHGNFSLNAAFEIKLHWMAVTAAVLFEMVQGWHRKATSCGFLLVPVLEGPFALPSYRGSW

SEQ ID NO: 833203 - protein, 325 aa, Homo sapiens
TKLNFSSQPELHTPVFSISDEFPEINRASIRQDHKGRFYEDFYKVVVQNERREEWTSLLVTIKKLFIQYPVLVRLEQAEGFPQGDNSTSAQGNYLEAINLSFNVFDKHYINRNFDRTGQMSVVITPGVGVFEVDRLLMILTKQRMIDNGIGVDLVCMGEQPLHAVPLFKLHNRSAPRDSRLGDDYNIPHWINHSFYTSKSQLFCNSFTPRIKLAGKKPASEKAKNGRDTSLGSPKESENALPIQVDYDAYDAQVFRLPGPSRAQCLTTCRSVRERESHSRKSASSCDVSSSPSLPSRTLPTEEVRSQASDDSSLGRGCSESRSHH

SEQ ID NO: 833204 - protein, 37 aa, Homo sapiens
MRTTKVYKLVIHKKGFGGSGQYRLVFRGFVSWLRFWC

SEQ ID NO: 833205 - protein, 107 aa, Homo sapiens
EWEDMIEDAAHETVPIMLVGNKADIRDTAATEGQKCVPGHFGEKLAMTYGALFCETSAKDGSNIVEAVLHLAREVKKRTDKDDSRSITNLTGTNSKKSPQMKNCCNG

SEQ ID NO: 833206 - protein, 107 aa, Homo sapiens; identical to SEQ ID NO: 833205

SEQ ID NO: 833207 - protein, 131 aa, Homo sapiens [sequence omitted]

SEQ ID NO: 833208 - protein, 131 aa, Homo sapiens [sequence omitted]

SEQ ID NO: 833209 - protein, 131 aa, Homo sapiens [sequence omitted]

SEQ ID NO: 833210 - protein, 131 aa, Homo sapiens [sequence omitted]

SEQ ID NO: 833211 - protein, 107 aa, Homo sapiens
AGRRSGSRVRGTSGVKSPQAGNKPRPNSHPPAFLQLDLEAASPVWDAADARLLALAASPRLRSSVAAATVTRSPRPAQFSSTLGERESQMPLLNSLFKTHLLGDWTR

SEQ ID NO: 833212 - protein, 1408 aa, Homo sapiens
MKAPAVLAPGILVLLFTLVQRSNGECKEALAKSEMNVNMKYQLPNFTAETPIQNVILHEHHIFLGATNYIYVLNEEDLQKVAEYKTGPVLEHPDCFPCQDCSSKANLSGGVWKDNINMALVVDTYYDDQLISCGSVNRGTCQRHVFPHNHTADIQSEVHCIFSPQIEEPSQCPDCVVSALGAKVLSSVKDRFINFFVGNTINSSYFPDHPLHSISVRRLKETKDGFMFLTDQSYIDVLPEFRDSYPIKYVHAFESNNFIYFLTVQRETLDAQTFHTRIIRFCSINSGLHSYMEMPLECILTEKRKKRSTKKEVFNILQAAYVSKPGAQLARQIGASLNDDILFGVFAQSKPDSAEPMDRSAMCAFPIKYVNDFFNKIVNKNNVRCLQHFYGPNHEHCFNRTLLRNSSGCEARRDEYRTEFTTALQRVDLFMGQFSEVLLTSISTFIKGDLTIANLGTSEGRFMQVVVSRSGPSTPHVNFLLDSHPVSPEVIVEHTLNQNGYTLVITGKKITKIPLNGLGCRHFQSCSQCLSAPPFVQCGWCHDKCVRSEECLSGTWTQQICLPAIYKVFPNSAPLEGGTRLTICGWDFGFRRNNKFDLKKTRVLLGNESCTLTLSESTMNTLKCTVGPAMNKHFNMSIIISNGHGTTQYSTFSYVDPVITSISPKYGPMAGGTLLTLTGNYLNSGNSRHISIGGKTCTLKSVSNSILECYTPAQTISTEFAVKLKIDLANRETSIFSYREDPIVYEIHPTKSFISTWWKEPLNIVSFLFCFASGGSTITGVGKNLNSVSVPRMVINVHEAGRNFTVACQHRSNSEIICCTTPSLQQLNLQLPLKTKAFFMLDGILSKYFDLIYVHNPVFKPFEKPVMISMGNENVLEIKGNDIDPEAVKGEVLKVGNKSCENIHLHSEAVLCTVPNDLLKLNSELNIEWKQAISSTVLGKVIVQPDQNFTGLIAGVVSISTALLLLLGFFLWLKKRKQIKDLGSELVRYDARVHTPHLDRLVSARSVSPTTEMVSNESVDYRATFPEDQFPNSSQNGSCRQVQYPLTDMSPILTSGDSDISSPLLQNTVHIDLSALNPELVQAVQHVVIGPSSLIVHFNEVIGRGHFGCVYHGTLLDNDGKKIHCAVKSLNRITDIGEVSQFLTEGIIMKDFSHPNVLSLLGICLRSEGSPLVVLPYMKHGDLRNFIRNETHNPTVKDLIGFGLQVAKGMKYLASKKFVHRDLAARNCMLDEKFTVKVADFGLARDMYDKEYYSVHNKTGAKLPVKWMALESLQTQKFTTKSDVWSFGVLLWELMTRGAPPYPDVNTFDITVYLLQGRRLLQPEYCPDPLYEVMLKCWHPKAEMRPSFSELVSRISAIFSTFIGEHYVHVNATYVNVKCVAPYPSLLSSEDNADDEVDTRPASFWETS

SEQ ID NO: 833213 - protein, 1408 aa, Homo sapiens; identical to SEQ ID NO: 833212

SEQ ID NO: 833214 - protein, 523 aa, Homo sapiens
MAAVLQQVLERTELNKLPKSVQNKLEKFLADQQSEIDGLKGRHEKFKVESEQQYFEIEKRLSHSQERLVNETRECQSLRLELEKLNNQLKALTEKNKELEIAQDRNIAIQSQFTRTKEELEAEKRDLIRTNERLSQELEYLTDQFPNSSQNGSCRQVQYPLTDMSPILTSGDSDISSPLLQNTVHIDLSALNPELVQAVQHVVIGPSSLIVHFNEVIGRGHFGCVYHGTLLDNDGKKIHCAVKSLNRITDIGEVSQFLTEGIIMKDFSHPNVLSLLGICLRSEGSPLVVLPYMKHGDLRNFIRNETHNPTVKDLIGFGLQVAKGMKYLASKKFVHRDLAARNCMLDEKFTVKVADFGLARDMYDKEYYSVHNKTGAKLPVKWMALESLQTQKFTTKSDVWSFGVLLWELMTRGAPPYPDVNTFDITVYLLQGRRLLQPEYCPDPLYEVMLKCWHPKAEMRPSFSELVSRISAIFSTFIGEHYVHVNATYVNVKCVAPYPSLLSSEDNADDEVDTRPASFWETS

SEQ ID NO: 833215 - protein, 932 aa, Homo sapiens
MGQFSEVLLTSISTFIKGDLTIANLGTSEGRFMQVVVSRSGPSTPHVNFLLDSHPVSPEVIVEHTLNQNGYTLVITGKKCGWCHDKCVRSEECLSGTWTQQICLPAIYKVFPNSAPLEGGTRLTICGWDFGFRRNNKFDLKKTRVLLGNESCTLTLSESTMNTLKCTVGPAMNKHFNMSIIISNGHGTTQYSTFSYVDPVITSISPKYGPMAGGTLLTLTGNYLNSGNSRHISIGGKTCTLKSVSNSILECYTPAQTISTEFAVKLKIDLANRETSIFSYREDPIVYEIHPTKSFISGGSTITGVGKNLNSVSVPRMVINVHEAGRNFTVACQHRSNSEIICCTTPSLQQLNLQLPLKTKAFFMLDGILSKYFDLIYVHNPVFKPFEKPVMISMGNENVLEIKGNDIDPEAVKGEVLKVGNKSCENIHLHSEAVLCTVPNDLLKLNSELNIEWKQAISSTVLGKVIVQPDQNFTGLIAGVVSISTALLLLLGFFLWLKKRKQIKDLGSELVRYDARVHTPHLDRLVSARSVSPTTEMVSNESVDYRATFPEDQFPNSSQNGSCRQVQYPLTDMSPILTSGDSDISSPLLQNTVHIDLSALNPELVQAVQHVVIGPSSLIVHFNEVIGRGHFGCVYHGTLLDNDGKKIHCAVKSLNRITDIGEVSQFLTEGIIMKDFSHPNVLSLLGICLRSEGSPLVVLPYMKHGDLRNFIRNETHNPTVKDLIGFGLQVAKGMKYLASKKFVHRDLAARNCMLDEKFTVKVADFGLARDMYDKEYYSVHNKTGAKLPVKWMALESLQTQKFTTKSDVWSFGVLLWELMTRGAPPYPDVNTFDITVYLLQGRRLLQPEYCPDPLYEVMLKCWHPKAEMRPSFSELVSRISAIFSTFIGEHYVHVNATYVNVKCVAPYPSLLSSEDNADDEVDTRPASFWETS

SEQ ID NO: 833216 - protein, 490 aa, Homo sapiens
WGDSTAIPIEWKQAISSTVLGKVIVQPDQNFTGLIAGVVSISTALLLLLGFFLWLKKRKQIKDLGSELVRYDARVHTPHLDRLVSARSVSPTTEMVSNESVDYRATFPEDQFPNSSQNGSCRQVQYPLTDMSPILTSGDSDISSPLLQNTVHIDLSALNPELVQAVQHVVIGPSSLIVHFNEVIGRGHFGCVYHGTLLDNDGKKIHCAVKSLNRITDIGEVSQFLTEGIIMKDFSHPNVLSLLGICLRSEGSPLVVLPYMKHGDLRNFIRNETHNPTVKDLIGFGLQVAKGMKYLASKKFVHRDLAARNCMLDEKFTVKVADFGLARDMYDKEYYSVHNKTGAKLPVKWMALESLQTQKFTTKSDVWSFGVLLWELMTRGAPPYPDVNTFDITVYLLQGRRLLQPEYCPDPLYEVMLKCWHPKAEMRPSFSELVSRISAIFSTFIGEHYVHVNATYVNVKCVAPYPSLLSSEDNADDEVDTRPASFWETS

SEQ ID NO: 833217 - protein, 1408 aa, Homo sapiens; identical to SEQ ID NO: 833212

SEQ ID NO: 833218 - protein, 934 aa, Homo sapiens
MKAPAVLAPGILVLLFTLVQRSNGECKEALAKSEMNVNMKYQLPNFTAETPIQNVILHEHHIFLGATNYIYVLNEEDLQKVAEYKTGPVLEHPDCFPCQDCSSKANLSGGVWKDNINMALVVDTYYDDQLISCGSVNRGTCQRHVFPHNHTADIQSEVHCIFSPQIEEPSQCPDCVVSALGAKVLSSVKDRFINFFVGNTINSSYFPDHPLHSISVRRLKETKDGFMFLTDQSYIDVLPEFRDSYPIKYVHAFESNNFIYFLTVQRETLDAQTFHTRIIRFCSINSGLHSYMEMPLECILTEKRKKRSTKKEVFNILQAAYVSKPGAQLARQIGASLNDDILFGVFAQSKPDSAEPMDRSAMCAFPIKYVNDFFNKIVNKNNVRCLQHFYGPNHEHCFNRTLLRNSSGCEARRDEYRTEFTTALQRVDLFMGQFSEVLLTSISTFIKGDLTIANLGTSEGRFMQVVVSRSGPSTPHVNFLLDSHPVSPEVIVEHTLNQNGYTLVITGKKITKIPLNGLGCRHFQSCSQCLSAPPFVQCGWCHDKCVRSEECLSGTWTQQICLPAIYKVFPNSAPLEGGTRLTICGWDFGFRRNNKFDLKKTRVLLGNESCTLTLSESTMNTLKCTVGPAMNKHFNMSIIISNGHGTTQYSTFSYVDPVITSISPKYGPMAGGTLLTLTGNYLNSGNSRHISIGGKTCTLKSVSNSILECYTPAQTISTEFAVKLKIDLANRETSIFSYREDPIVYEIHPTKSFISGGSTITGVGKNLNSVSVPRMVINVHEAGRNFTVACQHRSNSEIICCTTPSLQQLNLQLPLKTKAFFMLDGILSKYFDLIYVHNPVFKPFEKPVMISMGNENVLEIKGNDIDPEAVKGEVLKVGNKSCENIHLHSEAVLCTVPNDLLKLNSELNIEVGFLHSSHDVNKEASVIMLFSGLK

SEQ ID NO: 833219 - protein, 1390 aa, Homo sapiens
MKAPAVLAPGILVLLFTLVQRSNGECKEALAKSEMNVNMKYQLPNFTAETPIQNVILHEHHIFLGATNYIYVLNEEDLQKVAEYKTGPVLEHPDCFPCQDCSSKANLSGGVWKDNINMALVVDTYYDDQLISCGSVNRGTCQRHVFPHNHTADIQSEVHCIFSPQIEEPSQCPDCVVSALGAKVLSSVKDRFINFFVGNTINSSYFPDHPLHSISVRRLKETKDGFMFLTDQSYIDVLPEFRDSYPIKYVHAFESNNFIYFLTVQRETLDAQTFHTRIIRFCSINSGLHSYMEMPLECILTEKRKKRSTKKEVFNILQAAYVSKPGAQLARQIGASLNDDILFGVFAQSKPDSAEPMDRSAMCAFPIKYVNDFFNKIVNKNNVRCLQHFYGPNHEHCFNRTLLRNSSGCEARRDEYRTEFTTALQRVDLFMGQFSEVLLTSISTFIKGDLTIANLGTSEGRFMQVVVSRSGPSTPHVNFLLDSHPVSPEVIVEHTLNQNGYTLVITGKKITKIPLNGLGCRHFQSCSQCLSAPPFVQCGWCHDKCVRSEECLSGTWTQQICLPAIYKVFPNSAPLEGGTRLTICGWDFGFRRNNKFDLKKTRVLLGNESCTLTLSESTMNTLKCTVGPAMNKHFNMSIIISNGHGTTQYSTFSYVDPVITSISPKYGPMAGGTLLTLTGNYLNSGNSRHISIGGKTCTLKSVSNSILECYTPAQTISTEFAVKLKIDLANRETSIFSYREDPIVYEIHPTKSFISGGSTITGVGKNLNSVSVPRMVINVHEAGRNFTVACQHRSNSEIICCTTPSLQQLNLQLPLKTKAFFMLDGILSKYFDLIYVHNPVFKPFEKPVMISMGNENVLEIKGNDIDPEAVKGEVLKVGNKSCENIHLHSEAVLCTVPNDLLKLNSELNIEWKQAISSTVLGKVIVQPDQNFTGLIAGVVSISTALLLLLGFFLWLKKRKQIKDLGSELVRYDARVHTPHLDRLVSARSVSPTTEMVSNESVDYRATFPEDQFPNSSQNGSCRQVQYPLTDMSPILTSGDSDISSPLLQNTVHIDLSALNPELVQAVQHVVIGPSSLIVHFNEVIGRGHFGCVYHGTLLDNDGKKIHCAVKSLNRITDIGEVSQFLTEGIIMKDFSHPNVLSLLGICLRSEGSPLVVLPYMKHGDLRNFIRNETHNPTVKDLIGFGLQVAKGMKYLASKKFVHRDLAARNCMLDEKFTVKVADFGLARDMYDKEYYSVHNKTGAKLPVKWMALESLQTQKFTTKSDVWSFGVLLWELMTRGAPPYPDVNTFDITVYLLQGRRLLQPEYCPDPLYEVMLKCWHPKAEMRPSFSELVSRISAIFSTFIGEHYVHVNATYVNVKCVAPYPSLLSSEDNADDEVDTRPASFWETS

SEQ ID NO: 833220 - protein, 1312 aa, Homo sapiens
MKAPAVLAPGILVLLFTLVQRSNGECKEALAKSEMNVNMKYQLPNFTAETPIQNVILHEHHIFLGATNYIYVLNEEDLQKVAEYKTGPVLEHPDCFPCQDCSSKANLSGGVWKDNINMALVVDTYYDDQLISCGSVNRGTCQRHVFPHNHTADIQSEVHCIFSPQIEEPSQCPDCVVSALGAKVLSSVKDRFINFFVGNTINSSYFPDHPLHSISVRRLKETKDGFMFLTDQSYIDVLPEFRDSYPIKYVHAFESNNFIYFLTVQRETLDAQTFHTRIIRFCSINSGLHSYMEMPLECILTEKRKKRSTKKEVFNILQAAYVSKPGAQLARQIGASLNDDILFGVFAQSKPDSAEPMDRSAMCAFPIKYVNDFFNKIVNKNNVRCLQHFYGPNHEHCFNRTLLRNSSGCEARRDEYRTEFTTALQRVDLFMGQFSEVLLTSISTFIKGDLTIANLGTSEGRFMQVVVSRSGPSTPHVNFLLDSHPVSPEVIVEHTLNQNGYTLVITGKKITKIPLNGLGCRHFQSCSQCLSAPPFVQCGWCHDKCVRSEECLSGTWTQQICLPAIYKVFPNSAPLEGGTRLTICGWDFGFRRNNKFDLKKTRVLLGNESCTLTLSESTMNTLKCTVGPAMNKHFNMSIIISNGHGTTQYSTFSYVDPVITSISPKYGPMAGGTLLTLTGNYLNSGNSRHISIGGKTCTLKSVSNSILECYTPAQTISTEFAVKLKIDLANRETSIFSYREDPIVYEIHPTKSFISGGSTITGVGKNLNSVSVPRMVINVHEAGRNFTVACQHRSNSEIICCTTPSLQQLNLQLPLKTKAFFMLDGILSKYFDLIYVHNPVFKPFEKPVMISMGNENVLEIKGNDIDPEAVKGEVLKVGNKSCENIHLHSEAVLCTVPNDLLKLNSELNIEWKQAISSTVLGKVIVQPDQNFTGLIAGVVSISTALLLLLGFFLWLKKRKQIKDLGSELVRYDARVHTPHLDRLVSARSVSPTTEMVSNESVDYRATFPEDQFPNSSQNGSCRQVQYPLTDMSPILTSGDSDISSPLLQNTVHIDLSALNPELVQAVQHVVIGPSSLIVHFNEVIGRGHFGCVYHGTLLDNDGKKIHCAVKSLNRITDIGEVSQFLTEGIIMKDFSHPNVLSLLGICLRSEGSPLVVLPYMKHGDLRNFIRNETHNPTVKDLIGFGLQVAKGMKYLASKKFVHRDLAARNCMLDEKFTVKVADFGLARDMYDKEYYSVHNKTGAKLPVKWMALESLQTQKFTTKSDVWSFGVLLWELMTRGAPPYPDVNTFDITVYLLQGRRLLQPEYCPDPL

SEQ ID NO: 833221 - protein, 569 aa, Homo sapiens [sequence omitted]

SEQ ID NO: 833222 - protein, 1301 aa, Homo sapiens
MKAPAVLAPGILVLLFTLVQRSNGECKEALAKSEMNVNMKYQLPNFTAETPIQNVILHEHHIFLGATNYIYVLNEEDLQKVAEYKTGPVLEHPDCFPCQDCSSKANLSGGVWKDNINMALVVDTYYDDQLISCGSVNRGTCQRHVFPHNHTADIQSEVHCIFSPQIEEPSQCPDCVVSALGAKVLSSVKDRFINFFVGNTINSSYFPDHPLHSISVRRLKETKDGFMFLTDQSYIDVLPEFRDSYPIKYVHAFESNNFIYFLTVQRETLDAQTFHTRIIRFCSINSGLHSYMEMPLECILTEKRKKRSTKKEVFNILQAAYVSKPGAQLARQIGASLNDDILFGVFAQSKPDSAEPMDRSAMCAFPIKYVNDFFNKIVNKNNVRCLQHFYGPNHEHCFNRTLLRNSSGCEARRDEYRTEFTTALQRVDLFMGQFSEVLLTSISTFIKGDLTIANLGTSEGRFMQVVVSRSGPSTPHVNFLLDSHPVSPEVIVEHTLNQNGYTLVITGKKITKIPLNGLGCRHFQSCSQCLSAPPFVQCGWCHDKCVRSEECLSGTWTQQICLPAIYKVFPNSAPLEGGTRLTICGWDFGFRRNNKFDLKKTRVLLGNESCTLTLSESTMNTLKCTVGPAMNKHFNMSIIISNGHGTTQYSTFSYVDPVITSISPKYGPMAGGTLLTLTGNYLNSGNSRHISIGGKTCTLKSVSNSILECYTPAQTISTEFAVKLKIDLANRETSIFSYREDPIVYEIHPTKSFISGGSTITGVGKNLNSVSVPRMVINVHEAGRNFTVACQHRSNSEIICCTTPSLQQLNLQLPLKTKAFFMLDGILSKYFDLIYVHNPVFKPFEKPVMISMGNENVLEIKGNDIDPEAVKGEVLKVGNKSCENIHLHSEAVLCTVPNDLLKLNSELNIEWKQAISSTVLGKVIVQPDQNFTGLIAGVVSISTALLLLLGFFLWLKKRKQIKDLGSELVRYDARVHTPHLDRLVSARSVSPTTEMVSNESVDYRATFPEDQFPNSSQNGSCRQVQYPLTDMSPILTSGDSDISSPLLQNTVHIDLSALNPELVQAVQHVVIGPSSLIVHFNEVIGRGHFGCVYHGTLLDNDGKKIHCAVKSLNRITDIGEVSQFLTEGIIMKDFSHPNVLSLLGICLRSEGSPLVVLPYMKHGDLRNFIRNETHNPTVKDLIGFGLQVAKGMKYLASKKFVHRDLAARNCMLDEKFTVKVADFGLARDMYDKEYYSVHNKTGAKLPVKWMALESLQTQKFTTKSDVWSFGVLLWELMTRGAPPYPDVNTFDITVYLLQGSK

SEQ ID NO: 833223 - protein, 325 aa, Homo sapiens
MANALASATCERCKGGFAPAEKIVNSNGELYHEQCFVCAQCFQQFPEGLFYEFEGRKYCEHDFQMLFAPCCHQCGEFIIGRVIKAMNNSWHPECFRCDLCQEVLADIGFVKNAGRHLCRPCHNREKARGLGKYICQKCHAIIDEQPLIFKNDPYHPDHFNCANCGKELTADARELKGELYCLPCHDKMGVPICGACRRPIEGRVVNAMGKQWHVEHFVCAKCEKPFLGHRHYERKGLAYCETHYNQLFGDVCFHCNRVIEGDVVSALNKAWCVNCFACSTCNTKLTLKNKFVEFDMKPVCKKCYEKFPLELKKRLKKLAETLGRK

SEQ ID NO: 833224 - protein, 325 aa, Homo sapiens; identical to SEQ ID NO: 833223

SEQ ID NO: 833225 - protein, 337 aa, Homo sapiens
MLGVAAGMTHSNMANALASATCERCKGGFAPAEKIVNSNGELYHEQCFVCAQCFQQFPEGLFYEFEGRKYCEHDFQMLFAPCCHQCGEFIIGRVIKAMNNSWHPECFRCDLCQEVLADIGFVKNAGRHLCRPCHNREKARGLGKYICQKCHAIIDEQPLIFKNDPYHPDHFNCANCGKELTADARELKGELYCLPCHDKMGVPICGACRRPIEGRVVNAMGKQWHVEHFVCAKCEKPFLGHRHYERKGLAYCETHYNQLFGDVCFHCNRVIEGDVVSALNKAWCVNCFACSTCNTKLTLKNKFVEFDMKPVCKKCYEKFPLELKKRLKKLAETLGRK

SEQ ID NO: 833226 - protein, 343 aa, Homo sapiens
LGQPADEGHIESRYMTCNMANALASATCERCKGGFAPAEKIVNSNGELYHEQCFVCAQCFQQFPEGLFYEFEGRKYCEHDFQMLFAPCCHQCGEFIIGRVIKAMNNSWHPECFRCDLCQEVLADIGFVKNAGRHLCRPCHNREKARGLGKYICQKCHAIIDEQPLIFKNDPYHPDHFNCANCGKELTADARELKGELYCLPCHDKMGVPICGACRRPIEGRVVNAMGKQWHVEHFVCAKCEKPFLGHRHYERKGLAYCETHYNQLFGDVCFHCNRVIEGDVVSALNKAWCVNCFACSTCNTKLTLKNKFVEFDMKPVCKKCYEKFPLELKKRLKKLAETLGRK

SEQ ID NO: 833227 - protein, 288 aa, Homo sapiens
MANALASATCERCKGGFAPAEKIVNSNGELYHEQCFVCAQCFQQFPEGLFYEFEGRKYCEHDFQMLFAPCCHQCGEFIIGRVIKAMNNSWHPECFRCDLCQEVLADIGFVKNAGRHLCRPCHNREKARGLGKYICQKCHAIIDEQPLIFKNDPYHPDHFNCANCGKELTADARELKGELYCLPCHDKMGVPICGACRRPIEGRVVNAMGKQWHVEHFVCAKCEKPFLGHRHYERKGLAYCETHYNQLFGDVCFHCNRVIEGDVVSALNKAWCVNCFACSTCNTKLTLK

SEQ ID NO: 833228 - protein, 117 aa, Homo sapiens
MAFSGRARPCIIPENEEIPRAALNTVHEANGTEDERAVSKLQRRHSDVKVYKEFCDFYAKFNMANALASATCERCKGGFAPAEKIVNSNGELYHEQCFVCAQCFQQFPEGLFYEERT

SEQ ID NO: 833229 - protein, 221 aa, Homo sapiens
MFLYEENLILHRCVVGKFEGRKYCEHDFQMLFAPCCHQCGEFIIGRVIKAMNNSWHPECFRCDLCQEVLADIGFVKNAGRHLCRPCHNREKARGLGKYICQKCHAIIDEQPLIFKNDPYHPDHFNCANCGKELTADARELKGELYCLPCHDKMGVPICGACRRPIEGRVVNAMGKQWHVEHFVCAKCEKPFLGHRHYERKGLAYCETHYNQLLVMLSLHRV

SEQ ID NO: 833230 - protein, 387 aa, Homo sapiens
MAFSGRARPCIIPENEEIPRAALNTVHEANGTEDERAVSKLQRRHSDVKVYKEFCDFYAKFNMANALASATCERCKGGFAPAEKIVNSNGELYHEQCFVCAQCFQQFPEGLFYEFEGRKYCEHDFQMLFAPCCHQCGEFIIGRVIKAMNNSWHPECFRCDLCQEVLADIGFVKNAGRHLCRPCHNREKARGLGKYICQKCHAIIDEQPLIFKNDPYHPDHFNCANCGKELTADARELKGELYCLPCHDKMGVPICGACRRPIEGRVVNAMGKQWHVEHFVCAKCEKPFLGHRHYERKGLAYCETHYNQLFGDVCFHCNRVIEGDVVSALNKAWCVNCFACSTCNTKLTLKNKFVEFDMKPVCKKCYEKFPLELKKRLKKLAETLGRK

SEQ ID NO: 833231 - protein, 334 aa, Homo sapiens
MGYQRKSYNMANALASATCERCKGGFAPAEKIVNSNGELYHEQCFVCAQCFQQFPEGLFYEFEGRKYCEHDFQMLFAPCCHQCGEFIIGRVIKAMNNSWHPECFRCDLCQEVLADIGFVKNAGRHLCRPCHNREKARGLGKYICQKCHAIIDEQPLIFKNDPYHPDHFNCANCGKELTADARELKGELYCLPCHDKMGVPICGACRRPIEGRVVNAMGKQWHVEHFVCAKCEKPFLGHRHYERKGLAYCETHYNQLFGDVCFHCNRVIEGDVVSALNKAWCVNCFACSTCNTKLTLKNKFVEFDMKPVCKKCYEKFPLELKKRLKKLAETLGRK

SEQ ID NO: 833232 - protein, 73 aa, Homo sapiens
KAKGKLSSRGVEGSEDNNMANALASATCERCKGGFAPAEKIVNSNGELYHEQCFVCAQCFQQFPEGLFYEERT

SEQ ID NO: 833233 - protein, 290 aa, Homo sapiens
MGHPPLLPLLLLLHTCVPASWGLRCMQCKTNGDCRVEECALGQDLCRTTIVRLWEEGEELELVEKSCTHSEKTNRTLSYRTGLKITSLTEVVCGLDLCNQGNSGRAVTYSRSRYLECISCGSSDMSCERGRHQSLQCRSPEEQCLDVVTHWIQEGEEVLELENLPQNGRQCYSCKGNSTHGCSSEETFLIDCRGPMNQCLVATGTHEPKNQSYMVRGCATASMCQHAHLGDAFSMNHIDVSCCTKSGCNHPDLDVQYRSGAAPQPGPAHLSLTITLLMTARLWGGTLLWT

SEQ ID NO: 833234 - protein, 330 aa, Homo sapiens
MDTNLNGRGLETWSSWGLRCMQCKTNGDCRVEECALGQDLCRTTIVRLWEEGEELELVEKSCTHSEKTNRTLSYRTGLKITSLTEVVCGLDLCNQGNSGRAVTYSRSRYLECISCGSSDMSCERGRHQSLQCRSPEEQCLDVVTHWIQEGEEGRPKDDRHLRGCGYLPGCPGSNGFHNNDTFHFLKCCNTTKCNEGPILELENLPQNGRQCYSCKGNSTHGCSSEETFLIDCRGPMNQCLVATGTHEPKNQSYMVRGCATASMCQHAHLGDAFSMNHIDVSCCTKSGCNHPDLDVQYRSGAAPQPGPAHLSLTITLLMTARLWGGTLLWT

SEQ ID NO: 833235 - protein, 211 aa, Homo sapiens
MSCERGRHQSLQCRSPEEQCLDVVTHWIQEGEEGRPKDDRHLRGCGYLPGCPGSNGFHNNDTFHFLKCCNTTKCNEGPILELENLPQNGRQCYSCKGNSTHGCSSEETFLIDCRGPMNQCLVATGTHEPKNQSYMVRGCATASMCQHAHLGDAFSMNHIDVSCCTKSGCNHPDLDVQYRSGAAPQPGPAHLSLTITLLMTARLWGGTLLWT

SEQ ID NO: 833236 - protein, 209 aa, Homo sapiens
MGHPPLLPLLLLLHTCVPASWGLRCMQCKTNGDCRVEECALGQDLCRTTIVRLWEEGEELELVEKSCTHSEKTNRTLSYRTGLKITSLTEVVCGLDLCNQGNSGRAVTYSRSRYLECISCGSSDMSCERGRHQSLQCRSPEEQCLDVVTHWIQEGEEGRPKDDRHLRGCGYLPGCPGSNGFHNNDTFHFLKCCNTTKCNEGPKHPWMLL

SEQ ID NO: 833237 - protein, 286 aa, Homo sapiens
MGHPPLLPLLLLLHTCVPASWGLRCMQCKTNGDCRVEECALGQDLCRTTIVRLWEEGEELELVEKSCTHSEKTNRTLSYRTGLKITSLTEVVCGLDLCNQGNSGRAVTYSRSRYLECISCGSSDMSCERGRHQSLQCRSPEEQCLDVVTHWIQEGEEGRPKDDRHLRGCGYLPGCPGSNGFHNNDTFHFLKCCNTTKCNEGPKPKNQSYMVRGCATASMCQHAHLGDAFSMNHIDVSCCTKSGCNHPDLDVQYRSGAAPQPGPAHLSLTITLLMTARLWGGTLLWT

SEQ ID NO: 833238 - protein, 281 aa, Homo sapiens
MGHPPLLPLLLLLHTCVPASWGLRCMQCKTNGDCRVEECALGQDLCRTTIVRLWEEGEELELVEKSCTHSEKTNRTLSYRTGLKITSLTEVVCGLDLCNQGNSGRAVTYSRSRYLECISCGSSDMSCERGRHQSLQCRSPEEQCLDVVTHWIQEGEEGRPKDDRHLRGCGYLPGCPGSNGFHNNDTFHFLKCCNTTKCNEGPILELENLPQNGRQCYSCKGNSTHGCSSEETFLIDCRGPMNQCLVATGTHERSLWGSWLPCKSTTALRPPCCEEAQATHV

SEQ ID NO: 833239 - protein, 281 aa, Homo sapiens; identical to SEQ ID NO: 833238

SEQ ID NO: 833240 - protein, 279 aa, Homo sapiens
MGHPPLLPLLLLLHTCVPASWGLRCMQCKTNGDCRVEECALGQDLCRTTIVRLWEEGEELELVEKSCTHSEKTNRTLSYRTGLKITSLTEVVCGLDLCNQGNSGRAVTYSRSRYLECISCGSSDMSCERGRHQSLQCRSPEEQCLDVVTHWIQEGEEGRPKDDRHLRGCGYLPGCPGSNGFHNNDTFHFLKCCNTTKCNEGPILELENLPQNGRQCYSCKGNSTHGCSSEETFLIDCRGPMNQCLVATGTHGCGHFCHGKVEFRLGAVAEACTLSTLGG

SEQ ID NO: 833241 - protein, 335 aa, Homo sapiens
MGHPPLLPLLLLLHTCVPASWGLRCMQCKTNGDCRVEECALGQDLCRTTIVRLWEEGEELELVEKSCTHSEKTNRTLSYRTGLKITSLTEVVCGLDLCNQGNSGRAVTYSRSRYLECISCGSSDMSCERGRHQSLQCRSPEEQCLDVVTHWIQEGEEGRPKDDRHLRGCGYLPGCPGSNGFHNNDTFHFLKCCNTTKCNEGPILELENLPQNGRQCYSCKGNSTHGCSSEETFLIDCRGPMNQCLVATGTHEPKNQSYMVRGCATASMCQHAHLGDAFSMNHIDVSCCTKSGCNHPDLDVQYRSGAAPQPGPAHLSLTITLLMTARLWGGTLLWT

SEQ ID NO: 833242 - protein, 310 aa, Homo sapiens [sequence omitted]

SEQ ID NO: 833243 - protein, 211 aa, Homo sapiens; identical to SEQ ID NO: 833235

SEQ ID NO: 833244 - protein, 281 aa, Homo sapiens; identical to SEQ ID NO: 833238

SEQ ID NO: 833245 - protein, 281 aa, Homo sapiens; identical to SEQ ID NO: 833238

SEQ ID NO: 833246 - protein, 105 aa, Homo sapiens
SWRGASGGSLCGPLCGSLCGSSRGTWYGPLRGSSCGSMCQHAHLGDAFSMNHIDVSCCTKSGCNHPDLDVQYRSGAAPQPGPAHLSLTITLLMTARLWGGTLLWT

SEQ ID NO: 833247 - protein, 92 aa, Homo sapiens
MSCERGRHQSLQCRSPEEQCLDVVTHWIQEGEEGRPKDDRHLRGCGYLPGCPGSNGFHNNDTFHFLKCCNTTKCNEGPILELEMVANPGYRA

SEQ ID NO: 833248 - protein, 803 aa, Homo sapiens
MDVAIEFCLEEWQCLDIAQQNLYRNVMLENYRNLVFLGIAVSKPDLITCLEQEKEPWEPMRRHEMVAKPPVMCSHFTQDFWPEQHIKDPFQKATLRRYKNCEHKNVHLKKDHKSVDECKVHRGGYNGFNQCLPATQSKIFLFDKCVKAFHKFSNSNRHKISHTEKKLFKCKECGKSFCMLPHLAQHKIIHTRVNFCKCEKCGKAFNCPSIITKHKRINTGEKPYTCEECGKVFNWSSRLTTHKKNYTRYKLYKCEECGKAFNKSSILTTHKIIRTGEKFYKCKECAKAFNQSSNLTEHKKIHPGEKPYKCEECGKAFNWPSTLTKHKRIHTGEKPYTCEECGKAFNQFSNLTTHKRIHTAEKFYKCTECGEAFSRSSNLTKHKKIHTEKKPYKCEECGKAFKWSSKLTEHKLTHTGEKPYKCEECGKAFNWPSTLTKHNRIHTGEKPYKCEVCGKAFNQFSNLTTHKRIHTAEKPYKCEECGKAFSRSSNLTKHKKIHIEKKPYKCEECGKAFKWSSKLTEHKITHTGEKPYKCEECGKAFNHFSILTKHKRIHTGEKPYKCEECGKAFTQSSNLTTHKKIHTGEKFYKCEECGKAFTQSSNLTTHKKIHTGGKPYKCEECGKAFNQFSTLTKHKIIHTEEKPYKCEECGKAFKWSSTLTKHKIIHTGEKPYKCEECGKAFKLSSTLSTHKIIHTGEKPYKCEKCGKAFNRSSNLIEHKKIHTGEQPYKCEECGKAFNYSSHLNTHKRIHTKEQPYKCKECGKAFNQYSNLTTHNKIHTGEKLYKPEDVTVILTTPQTFSNIK

SEQ ID NO: 833249 - protein, 739 aa, Homo sapiens
MVAKPPVMCSHFTQDFWPEQHIKDPFQKATLRRYKNCEHKNVHLKKDHKSVDECKVHRGGYNGFNQCLPATQSKIFLFDKCVKAFHKFSNSNRHKISHTEKKLFKCKECGKSFCMLPHLAQHKIIHTRVNFCKCEKCGKAFNCPSIITKHKRINTGEKPYTCEECGKVFNWSSRLTTHKKNYTRYKLYKCEECGKAFNKSSILTTHKIIRTGEKFYKCKECAKAFNQSSNLTEHKKIHPGEKPYKCEECGKAFNWPSTLTKHKRIHTGEKPYTCEECGKAFNQFSNLTTHKRIHTAEKFYKCTECGEAFSRSSNLTKHKKIHTEKKPYKCEECGKAFKWSSKLTEHKLTHTGEKPYKCEECGKAFNWPSTLTKHNRIHTGEKPYKCEVCGKAFNQFSNLTTHKRIHTAEKPYKCEECGKAFSRSSNLTKHKKIHIEKKPYKCEECGKAFKWSSKLTEHKITHTGEKPYKCEECGKAFNHFSILTKHKRIHTGEKPYKCEECGKAFTQSSNLTTHKKIHTGEKFYKCEECGKAFTQSSNLTTHKKIHTGGKPYKCEECGKAFNQFSTLTKHKIIHTEEKPYKCEECGKAFKWSSTLTKHKIIHTGEKPYKCEECGKAFKLSSTLSTHKIIHTGEKPYKCEKCGKAFNRSSNLIEHKKIHTGEQPYKCEECGKAFNYSSHLNTHKRIHTKEQPYKCKECGKAFNQYSNLTTHNKIHTGEKLYKPEDVTVILTTPQTFSNIK

SEQ ID NO: 833250 - protein, 818 aa, Homo sapiens
MPGHPGSWEMGPLTFMDVAIEFCLEEWQCLDIAQQNLYRNVMLENYRNLVFLGIAVSKPDLITCLEQEKEPWEPMRRHEMVAKPPVMCSHFTQDFWPEQHIKDPFQKATLRRYKNCEHKNVHLKKDHKSVDECKVHRGGYNGFNQCLPATQSKIFLFDKCVKAFHKFSNSNRHKISHTEKKLFKCKECGKSFCMLPHLAQHKIIHTRVNFCKCEKCGKAFNCPSIITKHKRINTGEKPYTCEECGKVFNWSSRLTTHKKNYTRYKLYKCEECGKAFNKSSILTTHKIIRTGEKFYKCKECAKAFNQSSNLTEHKKIHPGEKPYKCEECGKAFNWPSTLTKHKRIHTGEKPYTCEECGKAFNQFSNLTTHKRIHTAEKFYKCTECGEAFSRSSNLTKHKKIHTEKKPYKCEECGKAFKWSSKLTEHKLTHTGEKPYKCEECGKAFNWPSTLTKHNRIHTGEKPYKCEVCGKAFNQFSNLTTHKRIHTAEKPYKCEECGKAFSRSSNLTKHKKIHIEKKPYKCEECGKAFKWSSKLTEHKITHTGEKPYKCEECGKAFNHFSILTKHKRIHTGEKPYKCEECGKAFTQSSNLTTHKKIHTGEKFYKCEECGKAFTQSSNLTTHKKIHTGGKPYKCEECGKAFNQFSTLTKHKIIHTEEKPYKCEECGKAFKWSSTLTKHKIIHTGEKPYKCEECGKAFKLSSTLSTHKIIHTGEKPYKCEKCGKAFNRSSNLIEHKKIHTGEQPYKCEECGKAFNYSSHLNTHKRIHTKEQPYKCKECGKAFNQYSNLTTHNKIHTGEKLYKPEDVTVILTTPQTFSNIK

SEQ ID NO: 833251 - protein, 470 aa, Homo sapiens
MVAKPPVMCSHFTQDFWPEQHIKDPFQKATLRRYKNCEHKNVHLKKDHKSVDECKVHRGGYNGFNQCLPATQSKIFLFDKCVKAFHKFSNSNRHKISHTEKKLFKCKECGKSFCMLPHLAQHKIIHTRVNFCKCEKCGKAFNCPSIITKHKRINTGEKPYTCEECGKVFNWSSRLTTHKKNYTRYKLYKCEECGKAFNKSSILTTHKIIRTGEKFYKCKECAKAFNQSSNLTEHKKIHPGEKPYKCEECGKAFNWPSTLTKHKRIHTGEKPYTCEECGKAFNQFSNLTTHKRIHTAEKFYKCTECGEAFSRSSNLTKHKKIHTEKKPYKCEECGKAFKWSSKLTEHKLTHTGEKPYKCEECGKAFNWPSTLTKHNRIHTGEKPYKCEVCGKAFNQFSNLTTHKRIHTAEKPYKCEECGKAFSRSSNLTKHKKIHIEKKPYKCEECGKAFKWSSKLTEHKITHTGEKPYKL

SEQ ID NO: 833252 - protein, 809 aa, Homo sapiens
MGPLTFMDVAIEFCLEEWQCLDIAQQNLYRNVMLENYRNLVFLGIAVSKPDLITCLEQEKEPWEPMRRHEMVAKPPVMCSHFTQDFWPEQHIKDPFQKATLRRYKNCEHKNVHLKKDHKSVDECKVHRGGYNGFNQCLPATQSKIFLFDKCVKAFHKFSNSNRHKISHTEKKLFKCKECGKSFCMLPHLAQHKIIHTRVNFCKCEKCGKAFNCPSIITKHKRINTGEKPYTCEECGKVFNWSSRLTTHKKNYTRYKLYKCEECGKAFNKSSILTTHKIIRTGEKFYKCKECAKAFNQSSNLTEHKKIHPGEKPYKCEECGKAFNWPSTLTKHKRIHTGEKPYTCEECGKAFNQFSNLTTHKRIHTAEKFYKCTECGEAFSRSSNLTKHKKIHTEKKPYKCEECGKAFKWSSKLTEHKLTHTGEKPYKCEECGKAFNWPSTLTKHNRIHTGEKPYKCEVCGKAFNQFSNLTTHKRIHTAEKPYKCEECGKAFSRSSNLTKHKKIHIEKKPYKCEECGKAFKWSSKLTEHKITHTGEKPYKCEECGKAFNHFSILTKHKRIHTGEKPYKCEECGKAFTQSSNLTTHKKIHTGEKFYKCEECGKAFTQSSNLTTHKKIHTGGKPYKCEECGKAFNQFSTLTKHKIIHTEEKPYKCEECGKAFKWSSTLTKHKIIHTGEKPYKCEECGKAFKLSSTLSTHKIIHTGEKPYKCEKCGKAFNRSSNLIEHKKIHTGEQPYKCEECGKAFNYSSHLNTHKRIHTKEQPYKCKECGKAFNQYSNLTTHNKIHTGEKLYKPEDVTVILTTPQTFSNIK

SEQ ID NO: 833253 - protein, 470 aa, Homo sapiens; identical to SEQ ID NO: 833251

SEQ ID NO: 833254 - protein, 2058 aa, Homo sapiens
MDNFFTEGTRVWLRENGQHFPSTVNSCAEGIVVFRTDYGQVFTYKQSTITHQKVTAMHPTNEEGVDDMASLTELHGGSIMYNLFQRYKRNQIYTYIGSILASVNPYQPIAGLYEPATMEQYSRRHLGELPPHIFAIANECYRCLWKRHDNQCILISGESGAGKTESTKLILKFLSVISQQSLELSLKEKTSCVERAILESSPIMEAFGNAKTVYNNNSSRFGKFVQLNICQKGNIQGGRIVDYLLEKNRVVRQNPGERNYHIFYALLAGLEHEEREEFYLSTPENYHYLNQSGCVEDKTISDQESFREVITAMDVMQFSKEEVWEVSRLLAGILHLGNIEFITAGGAQVSFKTALGRSAELLGLDPTQLTDALTQRSMFLRGEEILTPLNVQQAVDSRDSLAMALYACCFEWVIKKINSRIKGNEDFKSIGILDIFGFENFEVNHFEQFNINYANEKLQEYFNKHIFSLEQLEYSREGLVWEDIDWIDNGECLDLIEKKLGLLALINEESHFPQATDSTLLEKLHSQHANNHFYVKPRVAVNNFGVKHYAGEVQYDVRGILEKNRDTFRDDLLNLLRESRFDFIYDLFEHVSSRNNQDTLKCGSKHRRPTVSSQFKDSLHSLMATLSSSNPFFVRCIKPNMQKMPDQFDQAVVLNQLRYSGMLETVRIRKAGYAVRRPFQDFYKRYKVLMRNLALPEDVRGKCTSLLQLYDASNSEWQLGKTKVFLRESLEQKLEKRREEEVSHAAMVIRAHVLGFLARKQYRKVLYCVVIIQKNYRAFLLRRRFLHLKKAAIVFQKQLRGQIARRVYRQLLAEKREQEEKKKQEEEEKKKREEEERERERERREAELRAQQEEETRKQQELEALQKSQKEAELTRELEKQKENKQVEEILRLEKEIEDLQRMKEQQELSLTEASLQKLQERRDQELRRLEEEACRAAQEFLESLNFDEIDECVRNIERSLSVGSEFSSELAESACEEKPNFNFSQPYPEEEVDEGFEADDDAFKDSPNPSEHGHSDQRTSGIRTSDDSSEEDPYMNDTVVPTSPSADSTVLLAPSVQDSGSLHNSSSGESTYCMPQNAGDLPSPDGDYDYDQDDYEDGAITSGSSVTFSNSYGSQWSPDYRCSVGTYNSSGAYRFSSEGAQSSFEDSEEDFDSRFDTDDELSYRRDSVYSCVTLPYFHSFLYMKGGLMNSWKRRWCVLKDETFLWFRSKQEALKQGWLHKKGGGSSTLSRRNWKKRWFVLRQSKLMYFENDSEEKLKGTVEVRTAKEIIDNTTKENGIDIIMADRTFHLIAESPEDASQWFSVLSQVHASTDQEIQEMHDEQANPQNAVGTLDVGLIDSVCASDSPDRPNSFVIITANRVLHCNADTPEEMHHWITLLQRSKGDTRVEGQEFIVRGWLHKEVKNSPKMSSLKLKKRWFVLTHNSLDYYKSSEKNALKLGTLVLNSLCSVVPPDEKIFKETGYWNVTVYGRKHCYRLYTKLLNEATRWSSAIQNVTDTKAPIDTPTQQLIQDIKENCLNSDVVEQIYKRNPILRYTHHPLHSPLLPLPYGDINLNLLKDKGYTTLQDEAIKIFNSLQQLESMSDPIPIIQGILQTGHDLRPLRDELYCQLIKQTNKVPHPGSVGNLYSWQILTCLSCTFLPSRGILKYLKFHLKRIREQFPGTEMEKYALFTYESLKKTKCREFVPSRDEIEALIHRQEMTSTVYCHGGGSCKITINSHTTAGEVVEKLIRGLAMEDSRNMFALFEYNGHVDKAIESRTVVADVLAKFEKLAATSEVGDLPWKFYFKLYCFLDTDNVPKDSVEFAFMFEQAHEAVIHGHHPAPEENLQVLAALRLQYLQGDYTLHAAIPPLEEVYSLQRLKARISQSTKTFTPCERLEKRRTSFLEGTLRRSFRTGSVVRQKVEEEQMLDMWIKEEVSSARASIIDKWRKFQGMNQEQAMAKYMALIKEWPGYGSTLFDVECKEGGFPQELWLGVSADAVSVYKRGEGRPLEVFQYEHILSFGAPLANTYKIVVDERELLFETSEVVDVAKLMKAYISMIVKKRYSTTRSASSQGSSR

SEQ ID NO: 833255 - protein, 87 aa, Homo sapiens
SYKQDTTMTRRRKETGEHAYTRESVTFSNSYGSQWSPDYRCSVGTYNSSGAYRFSSEGAQSSVSTCLACPSEMGGRSHPPLLHPQVE

SEQ ID NO: 833256 - protein, 1683 aa, Homo sapiens
MDNFFTEGTRVWLRENGQHFPSTVNSCAEGIVVFRTDYGQVFTYKQSTITHQKVTAMHPTNEEGVDDMASLTELHGGSIMYNLFQRYKRNQIYTYIGSILASVNPYQPIAGLYEPATMEQYSRRHLGELPPHIFAIANECYRCLWKRHDNQCILISGESGAGKTESTKLILKFLSVISQQSLELSLKEKTSCVERAILESSPIMEAFGNAKTVYNNNSSRFGKFVQLNICQKGNIQGGRIVDYLLEKNRVVRQNPGERNYHIFYALLAGLEHEEREEFYLSTPENYHYLNQSGCVEDKTISDQESFREVITAMDVMQFSKEEVWEVSRLLAGILHLGNIEFITAGGAQVSFKTALGRSAELLGLDPTQLTDALTQRSMFLRGEEILTPLNVQQAVDSRDSLAMALYACCFEWVIKKINSRIKGNEDFKSIGILDIFGFENFEVNHFEQFNINYANEKLQEYFNKHIFSLEQLEYSREGLVWEDIDWIDNGECLDLIEKKLGLLALINEESHFPQATDSTLLEKLHSQHANNHFYVKPRVAVNNFGVKHYAGEVQYDVRGILEKNRDTFRDDLLNLLRESRFDFIYDLFEHVSSRNNQDTLKCGSKHRRPTVSSQFKDSLHSLMATLSSSNPFFVRCIKPNMQKMPDQFDQAVVLNQLRYSGMLETVRIRKAGYAVRRPFQDFYKRYKVLMRNLALPEDVRGKCTSLLQLYDASNSEWQLGKTKVFLRESLEQKLEKRREEEVSHAAMVIRAHVLGFLARKQYRKVLYCVVIIQKNYRAFLLRRRFLHLKKAAIVFQKQLRGQIARRVYRQLLAEKREQEEKKKQEEEEKKKREEEERERERERREAELRAQQEEETRKQQELEALQKSQKEAELTRELEKQKENKQVEEILRLEKEIEDLQRMKEQQELSLTEASLQKLQERRDQELRRLEEEACRAAQEFLESLNFDEIDECVRNIERSLSVGSEFSSELAESACEEKPNFNFSQPYPEEEVDEGFEADDDAFKDSPNPSEHGHSDQRTSGIRTSDDSSEEDPYMNDTVVPTSPSADSTVLLAPSVQDSGSLHNSSSGESTYCMPQNAGDLPSPDGDYDYDQDDYEDGAITSGSSVTFSNSYGSQWSPDYRCSVGTYNSSGAYRFSSEGAQSSFEDSEEDFDSRFDTDDELSYRRDSVYSCVTLPYFHSFLYMKGGLMNSWKRRWCVLKDETFLWFRSKQEALKQGWLHKKGGGSSTLSRRNWKKRWFVLRQSKLMYFENDSEEKLKGTVEVRTAKEIIDNTTKENGIDIIMADRTFHLIAESPEDASQWFSVLSQVHASTDQEIQEMHDEQANPQNAVGTLDVGLIDSVCASDSPDRPNSFVIITANRVLHCNADTPEEMHHWITLLQRSKGDTRVEGQEFIVRGWLHKEVKNSPKMSSLKLKKRWFVLTHNSLDYYKSSEKNALKLGTLVLNSLCSVVPPDEKIFKETGYWNVTVYGRKHCYRLYTKLLNEATRWSSAIQNVTDTKAPIDTPTQQLIQDIKENCLNSDVVEQIYKRNPILRYTHHPLHSPLLPLPYGDINLNLLKDKGYTTLQDEAIKIFNSLQQLESMSDPIPIIQGILQTGHDLRPLRDELYCQLIKQTNKVPHPGSVGNLYSWQILTCLSCTFLPSRGILKYLKFHLKRIREQFPGTEMEKYALFTYESLKKTKCRE

SEQ ID NO: 833257 - protein, 1415 aa, Homo sapiens
MPDQFDQAVVLNQLRYSGMLETVRIRKAGYAVRRPFQDFYKRYKVLMRNLALPEDVRGKCTSLLQLYDASNSEWQLGKTKVFLRESLEQKLEKRREEEVSHAAMVIRAHVLGFLARKQYRKVLYCVVIIQKNYRAFLLRRRFLHLKKAAIVFQKQLRGQIARRVYRQLLAEKREQEEKKKQEEEEKKKREEEERERERERREAELRAQQEEETRKQQELEALQKSQKEAELTRELEKQKENKQVEEILRLEKEIEDLQRMKEQQELSLTEASLQKLQERRDQELRRLEEEACRAAQEFLESLNFDEIDECVRNIERSLSVGSEFSSELAESACEEKPNFNFSQPYPEEEVDEGFEADDDAFKDSPNPSEHGHSDQRTSGIRTSDDSSEEDPYMNDTVVPTSPSADSTVLLAPSVQDSGSLHNSSSGESTYCMPQNAGDLPSPDGDYDYDQDDYEDGAITSGSSVTFSNSYGSQWSPDYRCSVGTYNSSGAYRFSSEGAQSSFEDSEEDFDSRFDTDDELSYRRDSVYSCVTLPYFHSFLYMKGGLMNSWKRRWCVLKDETFLWFRSKQEALKQGWLHKKGGGSSTLSRRNWKKRWFVLRQSKLMYFENDSEEKLKGTVEVRTAKEIIDNTTKENGIDIIMADRTFHLIAESPEDASQWFSVLSQVHASTDQEIQEMHDEQANPQNAVGTLDVGLIDSVCASDSPDRPNSFVIITANRVLHCNADTPEEMHHWITLLQRSKGDTRVEGQEFIVRGWLHKEVKNSPKMSSLKLKKRWFVLTHNSLDYYKSSEKNALKLGTLVLNSLCSVVPPDEKIFKETGYWNVTVYGRKHCYRLYTKLLNEATRWSSAIQNVTDTKAPIDTPTQQLIQDIKENCLNSDVVEQIYKRNPILRYTHHPLHSPLLPLPYGDINLNLLKDKGYTTLQDEAIKIFNSLQQLESMSDPIPIIQGILQTGHDLRPLRDELYCQLIKQTNKVPHPGSVGNLYSWQILTCLSCTFLPSRGILKYLKFHLKRIREQFPGTEMEKYALFTYESLKKTKCREFVPSRDEIEALIHRQEMTSTVYCHGGGSCKITINSHTTAGEVVEKLIRGLAMEDSRNMFALFEYNGHVDKAIESRTVVADVLAKFEKLAATSEVGDLPWKFYFKLYCFLDTDNVPKDSVEFAFMFEQAHEAVIHGHHPAPEENLQVLAALRLQYLQGDYTLHAAIPPLEEVYSLQRLKARISQSTKTFTPCERLEKRRTSFLEGTLRRSFRTGSVVRQKVEEEQMLDMWIKEEVSSARASIIDKWRKFQGMNQEQAMAKYMALIKEWPGYGSTLFDVECKEGGFPQELWLGVSADAVSVYKRGEGRPLEVFQYEHILSFGAPLANTYKIVVDERELLFETSEVVDVAKLMKAYISMIVKKRYSTTRSASSQGSSR

SEQ ID NO: 833258 - protein, 2058 aa, Homo sapiens; identical to SEQ ID NO: 833254

SEQ ID NO: 833259 - protein, 300 aa, Homo sapiens
EILLQTLLLPGHIHGRSPTSDVAWKFYFKLYCFLDTDNVPKDSVEFAFMFEQAHEAVIHGHHPAPEENLQVLAALRLQYLQGDYTLHAAIPPLEEVYSLQRLKARISQSTKTFTPCERLEKRRTSFLEGTLRRSFRTGSVVRQKVEEEQMLDMWIKEEVSSARASIIDKWRKFQGMNQEQAMAKYMALIKEWPGYGSTLFDVECKEGGFPQELWLGVSADAVSVYKRGEGRPLEVFQYEHILSFGAPLANTYKIVVDERELLFETSEVVDVAKLMKAYISMIVKKRYSTTRSASSQGSSR

SEQ ID NO: 833260 - protein, 1457 aa, Homo sapiens
MDNFFTEGTRVWLRENGQHFPSTVNSCAEGIVVFRTDYGQVFTYKQSTITHQKVTAMHPTNEEGVDDMASLTELHGGSIMYNLFQRYKRNQIYTYIGSILASVNPYQPIAGLYEPATMEQYSRRHLGELPPHIFAIANECYRCLWKRHDNQCILISGESGAGKTESTKLILKFLSVISQQSLELSLKEKTSCVERAILESSPIMEAFGNAKTVYNNNSSRFGKFVQLNICQKGNIQGGRIVDYLLEKNRVVRQNPGERNYHIFYALLAGLEHEEREEFYLSTPENYHYLNQSGCVEDKTISDQESFREVITAMDVMQFSKEEVWEVSRLLAGILHLGNIEFITAGGAQVSFKTALGRSAELLGLDPTQLTDALTQRSMFLRGEEILTPLNVQQAVDSRDSLAMALYACCFEWVIKKINSRIKGNEDFKSIGILDIFGFENFEVNHFEQFNINYANEKLQEYFNKHIFSLEQLEYSREGLVWEDIDWIDNGECLDLIEKKLGLLALINEESHFPQATDSTLLEKLHSQHANNHFYVKPRVAVNNFGVKHYAGEVQYDVRGILEKNRDTFRDDLLNLLRESRFDFIYDLFEHVSSRNNQDTLKCGSKHRRPTVSSQFKDSLHSLMATLSSSNPFFVRCIKPNMQKMPDQFDQAVVLNQLRYSGMLETVRIRKAGYAVRRPFQDFYKRYKVLMRNLALPEDVRGKCTSLLQLYDASNSEWQLGKTKVFLRESLEQKLEKRREEEVSHAAMVIRAHVLGFLARKQYRKVLYCVVIIQKNYRAFLLRRRFLHLKKAAIVFQKQLRGQIARRVYRQLLAEKREQEEKKKQEEEEKKKREEEERERERERREAELRAQQEEETRKQQELEALQKSQKEAELTRELEKQKENKQVEEILRLEKEIEDLQRMKEQQELSLTEASLQKLQERRDQELRRLEEEACRAAQEFLESLNFDEIDECVRNIERSLSVGSEFSSELAESACEEKPNFNFSQPYPEEEVDEGFEADDDAFKDSPNPSEHGHSDQRTSGIRTSDDSSEEDPYMNDTVVPTSPSADSTVLLAPSVQDSGSLHNSSSGESTYCMPQNAGDLPSPDGDYDYDQDDYEDGAITSGSSVTFSNSYGSQWSPDYRCSVGTYNSSGAYRFSSEGAQSSFEDSEEDFDSRFDTDDELSYRRDSVYSCVTLPYFHSFLYMKGGLMNSWKRRWCVLKDETFLWFRSKQEALKQGWLHKKGGGSSTLSRRNWKKRWFVLRQSKLMYFENDSEEKLKGTVEVRTAKCQIQFDQAVVLNQLRYSGMLETVRIRKAGYAVRRPFQDFYKRYKVLMRNLALPEDVRGKCTSLLQLYDASNSEWQLGKTKVFLRESLEQKLEKRREEEVSHAAMVIRAHVLGFLARKQYRKVLYCVVIIQKNYRAFLLRRRFLHLKKAAIVFQKQLRGQIARRVYRQLLAEKREQEEKKKQEEEEKKKRE

SEQ ID NO: 833261 - protein, 1269 aa, Homo sapiens
MDNFFTEGTRVWLRENGQHFPSTVNSCAEGIVVFRTDYGQVFTYKQSTITHQKVTAMHPTNEEGVDDMASLTELHGGSIMYNLFQRYKRNQIYTYIGSILASVNPYQPIAGLYEPATMEQYSRRHLGELPPHIFAIANECYRCLWKRHDNQCILISGESGAGKTESTKLILKFLSVISQQSLELSLKEKTSCVERAILESSPIMEAFGNAKTVYNNNSSRFGKFVQLNICQKGNIQGGRIVDYLLEKNRVVRQNPGERNYHIFYALLAGLEHEEREEFYLSTPENYHYLNQSGCVEDKTISDQESFREVITAMDVMQFSKEEVWEVSRLLAGILHLGNIEFITAGGAQVSFKTALGRSAELLGLDPTQLTDALTQRSMFLRGEEILTPLNVQQAVDSRDSLAMALYACCFEWVIKKINSRIKGNEDFKSIGILDIFGFENFEVNHFEQFNINYANEKLQEYFNKHIFSLEQLEYSREGLVWEDIDWIDNGECLDLIEKKLGLLALINEESHFPQATDSTLLEKLHSQHANNHFYVKPRVAVNNFGVKHYAGEVQYDVRGILEKNRDTFRDDLLNLLRESRFDFIYDLFEHVSSRNNQDTLKCGSKHRRPTVSSQFKDSLHSLMATLSSSNPFFVRCIKPNMQKMPDQFDQAVVLNQLRYSGMLETVRIRKAGYAVRRPFQDFYKRYKVLMRNLALPEDVRGKCTSLLQLYDASNSEWQLGKTKVFLRESLEQKLEKRREEEVSHAAMVIRAHVLGFLARKQYRKVLYCVVIIQKNYRAFLLRRRFLHLKKAAIVFQKQLRGQIARRVYRQLLAEKREQEEKKKQEEEEKKKREEEERERERERREAELRAQQEEETRKQQELEALQKSQKEAELTRELEKQKENKQVEEILRLEKEIEDLQRMKEQQELSLTEASLQKLQERRDQELRRLEEEACRAAQEFLESLNFDEIDECVRNIERSLSVGSEFSSELAESACEEKPNFNFSQPYPEEEVDEGFEADDDAFKDSPNPSEHGHSDQRTSGIRTSDDSSEEDPYMNDTVVPTSPSADSTVLLAPSVQDSGSLHNSSSGESTYCMPQNAGDLPSPDGDYDYDQDDYEDGAITSGSSVTFSNSYGSQWSPDYRCSVGTYNSSGAYRFSSEGAQSSFEDSEEDFDSRFDTDDELSYRRDSVYSCVTLPYFHSFLYMKGGLMNSWKRRWCVLKDETFLWFRSKQEALKQGWLHKKGGGSSTLSRCCLRYPSTTLHRPRPRDMVTDSRAVVLGRRVGIADTML

SEQ ID NO: 833262 - protein, 942 aa, Homo sapiens
MDNFFTEGTRVWLRENGQHFPSTVNSCAEGIVVFRTDYGQVFTYKQSTITHQKVTAMHPTNEEGVDDMASLTELHGGSIMYNLFQRYKRNQIYTYIGSILASVNPYQPIAGLYEPATMEQYSRRHLGELPPHIFAIANECYRCLWKRHDNQCILISGESGAGKTESTKLILKFLSVISQQSLELSLKEKTSCVERAILESSPIMEAFGNAKTVYNNNSSRFGKFVQLNICQKGNIQGGRIVDYLLEKNRVVRQNPGERNYHIFYALLAGLEHEEREEFYLSTPENYHYLNQSGCVEDKTISDQESFREVITAMDVMQFSKEEVWEVSRLLAGILHLGNIEFITAGGAQVSFKTALGRSAELLGLDPTQLTDALTQRSMFLRGEEILTPLNVQQAVDSRDSLAMALYACCFEWVIKKINSRIKGNEDFKSIGILDIFGFENFEVNHFEQFNINYANEKLQEYFNKHIFSLEQLEYSREGLVWEDIDWIDNGECLDLIEKKLGLLALINEESHFPQATDSTLLEKLHSQHANNHFYVKPRVAVNNFGVKHYAGEVQYDVRGILEKNRDTFRDDLLNLLRESRFDFIYDLFEHVSSRNNQDTLKCGSKHRRPTVSSQFKDSLHSLMATLSSSNPFFVRCIKPNMQKMPDQFDQAVVLNQLRYSGMLETVRIRKAGYAVRRPFQDFYKRYKVLMRNLALPEDVRGKCTSLLQLYDASNSEWQLGKTKVFLRESLEQKLEKRREEEVSHAAMVIRAHVLGFLARKQYRKVLYCVVIIQKNYRAFLLRRRFLHLKKAAIVFQKQLRGQIARRVYRQLLAEKREQEEKKKQEEEEKKKREEEERERERERREAELRAQQEEETRKQQELEALQKSQKEAELTRELEKQKENKLMGSKMLQSSPISCGIMATERLANYTGGIYAEYQDTTYINHVFPWLVGITDDAASVR

SEQ ID NO: 833263 - protein, 547 aa, Homo sapiens
MDNFFTEGTRVWLRENGQHFPSTVNSCAEGIVVFRTDYGQVFTYKQSTITHQKVTAMHPTNEEGVDDMASLTELHGGSIMYNLFQRYKRNQIYTYIGSILASVNPYQPIAGLYEPATMEQYSRRHLGELPPHIFAIANECYRCLWKRHDNQCILISGESGAGKTESTKLILKFLSVISQQSLELSLKEKTSCVERAILESSPIMEAFGNAKTVYNNNSSRFGKFVQLNICQKGNIQGGRIVDYLLEKNRVVRQNPGERNYHIFYALLAGLEHEEREEFYLSTPENYHYLNQSGCVEDKTISDQESFREVITAMDVMQFSKEEVWEVSRLLAGILHLGNIEFITAGGAQVSFKTALGRSAELLGLDPTQLTDALTQRSMFLRGEEILTPLNVQQAVDSRDSLAMALYACCFEWVIKKINSRIKGNEDFKSIGILDIFGFENFEVNHFEQFNINYANEKLQEYFNKHIFSLEQLEYSREGLVLGDSDILGFFFCFSVFRVKASGGVVLFSVGEMGDVATSRVGVTGSGSITDRVIQILCALGVEQSLVL

SEQ ID NO: 833264 - protein, 2049 aa, Homo sapiens
MDNFFTEGTRVWLRENGQHFPSTVNSCAEGIVVFRTDYGQVFTYKQSTITHQKVTAMHPTNEEGVDDMASLTELHGGSIMYNLFQRYKRNQIYTYIGSILASVNPYQPIAGLYEPATMEQYSRRHLGELPPHIFAIANECYRCLWKRHDNQCILISGESGAGKTESTKLILKFLSVISQQSLELSLKEKTSCVERAILESSPIMEAFGNAKTVYNNNSSRFGKFVQLNICQKGNIQGGRIVDYLLEKNRVVRQNPGERNYHIFYALLAGLEHEEREEFYLSTPENYHYLNQSGCVEDKTISDQESFREVITAMDVMQFSKEEVWEVSRLLAGILHLGNIEFITAGGAQVSFKTALGRSAELLGLDPTQLTDALTQRSMFLRGEEILTPLNVQQAVDSRDSLAMALYACCFEWVIKKINSRIKGNEDFKSIGILDIFGFENFEVNHFEQFNINYANEKLQEYFNKHIFSLEQLEYSREGLVWEDIDWIDNGECLDLIEKKLGLLALINEESHFPQATDSTLLEKLHSQHANNHFYVKPRVAVNNFGVKHYAGEVQYDVRGILEKNRDTFRDDLLNLLRESRFDFIYDLFEHVSSRNNQDTLKCGSKHRRPTVSSQFKDSLHSLMATLSSSNPFFVRCIKPNMQKMPDQFDQAVVLNQLRYSGMLETVRIRKAGYAVRRPFQDFYKRYKVLMRNLALPEDVRGKCTSLLQLYDASNSEWQLGKTKVFLRESLEQKLEKRREEEVSHAAMVIRAHVLGFLARKQYRKVLYCVVIIQKNYRAFLLRRRFLHLKKAAIVFQKQLRGQIARRVYRQLLAEKREQEEKKKQEEEEKKKREEEERERERERREAELRAQQEEETRKQQELEALQKSQKEAELTRELEKQKENKQVEEILRLEKEIEDLQRMKEQQELSLTEASLQKLQERRDQELRRLEEEACRAAQEFLESLNFDEIDECVRNIERSLSVGSEFSSELAESACEEKPNFNFSQPYPEEEVDEGFEADDDAFKDSPNPSEHGHSDQRTSGIRTSDDSSEEDPYMNDTVVPTSPSADSTVLLAPSVQDSGSLHNSSSGESTYCMPQNAGDLPSPDGDYDYDQDDYEDGAITSGSSVTFSNSYGSQWSPDYRCSVGTYNSSGAYRFSSEGAQSSFEDSEEDFDSRFDTDDELSYRRDSVYSCVTLPYFHSFLYMKGGLMNSWKRRWCVLKDETFLWFRSKQEALKQGWLHKKGGGSSTLSRRNWKKRWFVLRQSKLMYFENDSEEKLKGTVEVRTAKEIIDNTTKENGIDIIMADRTFHLIAESPEDASQWFSVLSQVHASTDQEIQEMHDEQANPQNAVGTLDVGLIDSVCASDSPDRPNSFVIITANRVLHCNADTPEEMHHWITLLQRSKGDTRVEGQEFIVRGWLHKEVKNSPKMSSLKLKKRWFVLTHNSLDYYKSSEKNALKLGTLVLNSLCSVVPPDEKIFKETGYWNVTVYGRKHCYRLYTKLLNEATRWSSAIQNVTDTKAPIDTPTQQLIQDIKENCLNSDVVEQIYKRNPILRYTHHPLHSPLLPLPYGDINLNLLKDKGYTTLQDEAIKIFNSLQQLESMSDPIPIIQGILQTGHDLRPLRDELYCQLIKQTNKVPHPGSVGNLYSWQILTCLSCTFLPSRGILKYLKFHLKRIREQFPGTEMEKYALFTYESLKKTKCREFVPSRDEIEALIHRQEMTSTVYCHGGGSCKITINSHTTAGEVVEKLIRGLAMEDSRNMFALFEYNGHVDKAIESRTVVADVLAKFEKLAATSEVGDLPWKFYFKLYCFLDTDNVPKDSVEFAFMFEQAHEAVIHGHHPAPEENLQVLAALRLQYLQGDYTLHAAIPPLEEVYSLQRLKARISQSTKTFTPCERLEKRRTSFLEGTLRRSFRTGSVVRQKVEEEQMLDMWIKEEVSSARASIIDKWRKFQGMNQEQAMAKYMALIKEWPGYGSTLFDVEVRTGCHVLGWAGCWHLRTWITAKFMWREDKMEHFALSTSFFRAPKIVPLTPPFSSQFLFSCVVNASVILGMNAKLRCHLFFYPSLGKL

SEQ ID NO: 833265 - protein, 2035 aa, Homo sapiens
  misc_feature (258)..(258): Xaa can be any naturally occurring amino acid
MDNFFTEGTRVWLRENGQHFPSTVNSCAEGIVVFRTDYGQVFTYKQSTITHQKVTAMHPTNEEGVDDMASLTELHGGSIMYNLFQRYKRNQIYTYIGSILASVNPYQPIAGLYEPATMEQYSRRHLGELPPHIFAIANECYRCLWKRHDNQCILISGESGAGKTESTKLILKFLSVISQQSLELSLKEKTSCVERAILESSPIMEAFGNAKTVYNNNSSRFGKFVQLNICQKGNIQGGRIVDSFHNEDLLEKNRVVSXEIYEYYLRQNKIYLEDKTISDQESFREVITAMDVMQFSKEEVWEVSRLLAGILHLGNIEFITAGGAQVSFKTALGRSAELLGLDPTQLTDALTQRSMFLRGEEILTPLNVQQAVDSRDSLAMALYACCFEWVIKKINSRIKGNEDFKSIGILDIFGFENFEVNHFEQFNINYANEKLQEYFNKHIFSLEQLEYSREGLVWEDIDWIDNGECLDLIEKKLGLLALINEESHFPQATDSTLLEKLHSQHANNHFYVKPRVAVNNFGVKHYAGEVQYDVRGILEKNRDTFRDDLLNLLRESRFDFIYDLFEHVSSRNNQDTLKCGSKHRRPTVSSQFKDSLHSLMATLSSSNPFFVRCIKPNMQKMPDQFDQAVVLNQLRYSGMLETVRIRKAGYAVRRPFQDFYKRYKVLMRNLALPEDVRGKCTSLLQLYDASNSEWQLGKTKVFLRESLEQKLEKRREEEVSHAAMVIRAHVLGFLARKQYRKVLYCVVIIQKNYRAFLLRRRFLHLKKAAIVFQKQLRGQIARRVYRQLLAEKREQEEKKKQEEEEKKKREEEERERERERREAELRAQQEEETRKQQELEALQKSQKEAELTRELEKQKENKQVEEILRLEKEIEDLQRMKEQQELSLTEASLQKLQERRDQELRRLEEEACRAAQEFLESLNFDEIDECVRNIERSLSVGSEFSSELAESACEEKPNFNFSQPYPEEEVDEGFEADDDAFKDSPNPSEHGHSDQRTSGIRTSDDSSEEDPYMNDTVVPTSPSADSTVLLAPSVQDSGSLHNSSSGESTYCMPQNAGDLPSPDGDYDYDQDDYEDGAITSGSSVTFSNSYGSQWSPDYRCSVGTYNSSGAYRFSSEGAQSSFEDSEEDFDSRFDTDDELSYRRDSVYSCVTLPYFHSFLYMKGGLMNSWKRRWCVLKDETFLWFRSKQEALKQGWLHKKGGGSSTLSRRNWKKRWFVLRQSKLMYFENDSEEKLKGTVEVRTAKEIIDNTTKENGIDIIMADRTFHLIAESPEDASQWFSVLSQVHASTDQEIQEMHDEQANPQNAVGTLDVGLIDSVCASDSPDRPNSFVIITANRVLHCNADTPEEMHHWITLLQRSKGDTRVEGQEFIVRGWLHKEVKNSPKMSSLKLKKRWFVLTHNSLDYYKSSEKNALKLGTLVLNSLCSVVPPDEKIFKETGYWNVTVYGRKHCYRLYTKLLNEATRWSSAIQNVTDTKAPIDTPTQQLIQDIKENCLNSDVVEQIYKRNPILRYTHHPLHSPLLPLPYGDINLNLLKDKGYTTLQDEAIKIFNSLQQLESMSDPIPIIQGILQTGHDLRPLRDELYCQLIKQTNKVPHPGSVGNLYSWQILTCLSCTFLPSRGILKYLKFHLKRIREQFPGTEMEKYALFTYESLKKTKCREFVPSRDEIEALIHRQEMTSTVYCHGGGSCKITINSHTTAGEVVEKLIRGLAMEDSRNMFALFEYNGHVDKAIESRTVVADVLAKFEKLAATSEVGDLPWKFYFKLYCFLDTDNVPKDSVEFAFMFEQAHEAVIHGHHPAPEENLQVLAALRLQYLQGDYTLHAAIPPLEEVYSLQRLKARISQSTKTFTPCERLEKRRTSFLEGTLRRSFRTGSVVRQKVEEEQMLDMWIKEEVSSARASIIDKWRKFQGMNQEQAMAKYMALIKEWPGYGSTLFDVECKEGGFPQELWLGVSADAVSVYKRGEGRPLEVFQYEHILSFGAPLANTYKIVVDERELLFETSEVVDVAKLMKAYISMIVKKRYSTTRSASSQGSSR

SEQ ID NO: 833266 - protein, 741 aa, Homo sapiens
EARKKALSLGSHRGDADGRAKGLCFLLILWLRPNSFVIITANRVLHCNADTPEEMHHWITLLQRSKGDTRVEGQEFIVRGWLHKEVKNSPKMSSLKLKKRWFVLTHNSLDYYKSSEKNALKLGTLVLNSLCSVVPPDEKIFKETGYWNVTVYGRKHCYRLYTKLLNEATRWSSAIQNVTDTKAPIDTPTQQLIQDIKENCLNSDVVEQIYKRNPILRYTHHPLHSPLLPLPYGDINLNLLKDKGYTTLQDEAIKIFNSLQQLESMSDPIPIIQGILQTGHDLRPLRDELYCQLIKQTNKVPHPGSVGNLYSWQILTCLSCTFLPSRGILKYLKFHLKRIREQFPGTEMEKYALFTYESLKKTKCREFVPSRDEIEALIHRQEMTSTVYCHGGGSCKITINSHTTAGEVVEKLIRGLAMEDSRNMFALFEYNGHVDKAIESRTVVADVLAKFEKLAATSEVGDLPWKFYFKLYCFLDTDNVPKDSVEFAFMFEQAHEAVIHGHHPAPEENLQVLAALRLQYLQGDYTLHAAIPPLEEVYSLQRLKARISQSTKTFTPCERLEKRRTSFLEGTLRRSFRTGSVVRQKVEEEQMLDMWIKEEVSSARASIIDKWRKFQGMNQEQAMAKYMALIKEWPGYGSTLFDVECKEGGFPQELWLGVSADAVSVYKRGEGRPLEVFQYEHILSFGAPLANTYKIVVDERELLFETSEVVDVAKLMKAYISMIVKKRYSTTRSASSQGSSR

SEQ ID NO: 833267 - protein, 1852 aa, Homo sapiens
MDNFFTEGTRVWLRENGQHFPSTVNSCAEGIVVFRTDYGQVFTYKQSTITHQKVTAMHPTNEEGVDDMASLTELHGGSIMYNLFQRYKRNQIYTYIGSILASVNPYQPIAGLYEPATMEQYSRRHLGELPPHIFAIANECYRCLWKRHDNQCILISGESGAGKTESTKLILKFLSVISQQSLELSLKEKTSCVERAILESSPIMEAFGNAKTVYNNNSSRFGKFVQLNICQKGNIQGGRIVDYLLEKNRVVRQNPGERNYHIFYALLAGLEHEEREEFYLSTPENYHYLNQSGCVEDKTISDQESFREVITAMDVMQFSKEEVWEVSRLLAGILHLGNIEFITAGGAQVSFKTALGRSAELLGLDPTQLTDALTQRSMFLRGEEILTPLNVQQAVDSRDSLAMALYACCFEWVIKKINSRIKGNEDFKSIGILDIFGFENFEVNHFEQFNINYANEKLQEYFNKHIFSLEQLEYSREGLVWEDIDWIDNGECLDLIEKKLGLLALINEESHFPQATDSTLLEKLHSQHANNHFYVKPRVAVNNFGVKHYAGEVQYDVRGILEKNRDTFRDDLLNLLRESRFDFIYDLFEHVSSRNNQDTLKCGSKHRRPTVSSQFKDSLHSLMATLSSSNPFFVRCIKPNMQKMPDQFDQAVVLNQLRYSGMLETVRIRKAGYAVRRPFQDFYKRYKVLMRNLALPEDVRGKCTSLLQLYDASNSEWQLGKTKVFLRESLEQKLEKRREEEVSHAAMVIRAHVLGFLARKQYRKVLYCVVIIQKNYRAFLLRRRFLHLKKAAIVFQKQLRGQIARRVYRQLLAEKREQEEKKKQEEEEKKKREEEERERERERREAELRAQQEEETRKQQELEALQKSQKEAELTRELEKQKENKQVEEILRLEKEIEDLQRMKEQQELSLTEASLQKLQERRDQELRRLEEEACRAAQEFLESLNFDEIDECVRNIERSLSVGSEFSSELAESACEEKPNFNFSQPYPEEEVDEGFEADDDAFKDSPNPSEHGHSDQRTSGIRTSDDSSEEDPYMNDTVVPTSPSADSTVLLAPSVQDSGSLHNSSSGESTYCMPQNAGDLPSPDGDYDYDQDDYEDGAITSGSSVTFSNSYGSQWSPDYRCSVGTYNSSGAYRFSSEGAQSSFEDSEEDFDSRFDTDDELSYRRDSVYSCVTLPYFHSFLYMKGGLMNSWKRRWCVLKDETFLWFRSKQEALKQGWLHKKGGGSSTLSRRNWKKRWFVLRQSKLMYFENDSEEKLKGTVEVRTAKEIIDNTTKENGIDIIMADRTFHLIAESPEDASQWFSVLSQVHASTDQEIQEMHDEQANPQNAVGTLDVGLIDSVCASDSPDRPNSFVIITANRVLHCNADTPEEMHHWITLLQRSKGDTRVEGQEFIVRGWLHKEVKNSPKMSSLKLKKRWFVLTHNSLDYYKSSEKNALKLGTLVLNSLCSVVPPDEKIFKETGYWNVTVYGRKHCYRLYTKLLNEATRWSSAIQNVTDTKAPIDTPTQQLIQDIKENCLNSDVVEQIYKRNPILRYTHHPLHSPLLPLPYGDINLNLLKDKGYTTLQDEAIKIFNSLQQLESMSDPIPIIQGILQTGHDLRPLRDELYCQLIKQTNKVPHPGSVGNLYSWQILTCLSCTFLPSRGILKYLKFHLKRIREQFPGTEMEKYALFTYESLKKTKCREFVPSRDEIEALIHRQEMTSTVYCHGGGSCKITINSHTTAGEVVEKLIRGLAMEDSRNMFALFEYNGHVDKAIESRTVVADVLAKFEKLAATSEVGDLPWKFYFKLYCFLDTDNVPKDSVEFAFMFEQAHEAVIHGHHPAPEENLQVLAALRLQYLQGDYTLHGCIPETS

SEQ ID NO: 833268 - protein, 1349 aa, Homo sapiens
MDNFFTEGTRVWLRENGQHFPSTVNSCAEGIVVFRTDYGQVFTYKQSTITHQKVTAMHPTNEEGVDDMASLTELHGGSIMYNLFQRYKRNQIYTYIGSILASVNPYQPIAGLYEPATMEQYSRRHLGELPPHIFAIANECYRCLWKRHDNQCILISGESGAGKTESTKLILKFLSVISQQSLELSLKEKTSCVERAILESSPIMEAFGNAKTVYNNNSSRFGKFVQLNICQKGNIQGGRIVDYLLEKNRVVRQNPGERNYHIFYALLAGLEHEEREEFYLSTPENYHYLNQSGCVEDKTISDQESFREVITAMDVMQFSKEEVWEVSRLLAGILHLGNIEFITAGGAQVSFKTALGRSAELLGLDPTQLTDALTQRSMFLRGEEILTPLNVQQAVDSRDSLAMALYACCFEWVIKKINSRIKGNEDFKSIGILDIFGFENFEVNHFEQFNINYANEKLQEYFNKHIFSLEQLEYSREGLVWEDIDWIDNGECLDLIEKKLGLLALINEESHFPQATDSTLLEKLHSQHANNHFYVKPRVAVNNFGVKHYAGEVQYDVRGILEKNRDTFRDDLLNLLRESRFDFIYDLFEHVSSRNNQDTLKCGSKHRRPTVSSQFKDSLHSLMATLSSSNPFFVRCIKPNMQKMPDQFDQAVVLNQLRYSGMLETVRIRKAGYAVRRPFQDFYKRYKVLMRNLALPEDVRGKCTSLLQLYDASNSEWQLGKTKVFLRESLEQKLEKRREEEVSHAAMVIRAHVLGFLARKQYRKVLYCVVIIQKNYRAFLLRRRFLHLKKAAIVFQKQLRGQIARRVYRQLLAEKREQEEKKKQEEEEKKKREEEERERERERREAELRAQQEEETRKQQELEALQKSQKEAELTRELEKQKENKQVEEILRLEKEIEDLQRMKEQQELSLTEASLQKLQERRDQELRRLEEEACRAAQEFLESLNFDEIDECVRNIERSLSVGSEFSSELAESACEEKPNFNFSQPYPEEEVDEGFEADDDAFKDSPNPSEHGHSDQRTSGIRTSDDSSEEDPYMNDTVVPTSPSADSTVLLAPSVQDSGSLHNSSSGESTYCMPQNAGDLPSPDGDYDYDQDDYEDGAITSGSSVTFSNSYGSQWSPDYRCSVGTYNSSGAYRFSSEGAQSSFEDSEEDFDSRFDTDDELSYRRDSVYSCVTLPYFHSFLYMKGGLMNSWKRRWCVLKDETFLWFRSKQEALKQGWLHKKGGGSSTLSRRNWKKRWFVLRQSKLMYFENDSEEKLKGTVEVRTAKEIIDNTTKENGIDIIMADRTFHLIAESPEDASQWFSVLSQVHASTDQEIQEMHDEQANPQNAVGTLDVGLIDSVCASDSPDR

SEQ ID NO: 833269 - protein, 982 aa, Homo sapiens
MDNFFTEGTRVWLRENGQHFPSTVNSCAEGIVVFRTDYGQVFTYKQSTITHQKVTAMHPTNEEGVDDMASLTELHGGSIMYNLFQRYKRNQIYTYIGSILASVNPYQPIAGLYEPATMEQYSRRHLGELPPHIFAIANECYRCLWKRHDNQCILISGESGAGKTESTKLILKFLSVISQQSLELSLKEKTSCVERAILESSPIMEAFGNAKTVYNNNSSRFGKFVQLNICQKGNIQGGRIVDYLLEKNRVVRQNPGERNYHIFYALLAGLEHEEREEFYLSTPENYHYLNQSGCVEDKTISDQESFREVITAMDVMQFSKEEVWEVSRLLAGILHLGNIEFITAGGAQVSFKTALGRSAELLGLDPTQLTDALTQRSMFLRGEEILTPLNVQQAVDSRDSLAMALYACCFEWVIKKINSRIKGNEDFKSIGILDIFGFENFEVNHFEQFNINYANEKLQEYFNKHIFSLEQLEYSREGLVWEDIDWIDNGECLDLIEKKLGLLALINEESHFPQATDSTLLEKLHSQHANNHFYVKPRVAVNNFGVKHYAGEVQYDVRGILEKNRDTFRDDLLNLLRESRFDFIYDLFEHVSSRNNQDTLKCGSKHRRPTVSSQFKDSLHSLMATLSSSNPFFVRCIKPNMQKMPDQFDQAVVLNQLRYSGMLETVRIRKAGYAVRRPFQDFYKRYKVLMRNLALPEDVRGKCTSLLQLYDASNSEWQLGKTKVFLRESLEQKLEKRREEEVSHAAMVIRAHVLGFLARKQYRKVLYCVVIIQKNYRAFLLRRRFLHLKKAAIVFQKQLRGQIARRVYRQLLAEKREQEEKKKQEEEEKKKREEEERERERERREAELRAQQEEETRKQQELEALQKSQKEAELTRELEKQKENKQVEEILRLEKEIEDLQRMKEQQELSLTEASLQKLQERRDQELRRLEEEIFAPEKGSHSFPEATQRSDCSESLQTIAGREKGARRKEETGRGRKEETG

SEQ ID NO: 833270 - protein, 123 aa, Homo sapiens
MDNFFTEGTRVWLRENGQHFPSTVNSCAEGIVVFRTDYGQVFTYKQSTITHQKVTAMHPTNEEGVDDMASLTELHGGSIMYNLFQRYKRNQIYPFTGDVSVCWTPLTSRQDRHLSEQPLLLHI

SEQ ID NO: 833271 - protein, 70 aa, Homo sapiens
RVSPRNVLSSSKSETKQLFLEGSLHPCNVLMCPHTCVTNLPKPRQKQPGMCTTWAACEVREFPWGCTALG

SEQ ID NO: 833272 - protein, 1352 aa, Homo sapiens
SAPPDVTTYTSEHSIQVERPQGSTGSRTAPKYGNAELMETGDGVPVSSRVSAKIQQLVNTLKRPKRPPLREFFVDDFEELLEVQQPDPNQPKPEGAQMLAMRGEQLGVVTNWPPSLEAALQRWGTISPKAPCLTTMDTNGKPLYILTYGKLWTRSMKVAYSILHKLGTKQEPMVRPGDRVALVFPNNDPAAFMAAFYGCLLAEVVPVPIEVPLTRKDAGSQQIGFLLGSCGVTVALTSDACHKGLPKSPTGEIPQFKGWPKLLWFVTESKHLSKPPRDWFPHIKDANNDTAYIEYKTCKDGSVLGVTVTRTALLTHCQALTQACGYTEAETIVNVLDFKKDVGLWHGILTSVMNMMHVISIPYSLMKVNPLSWIQKVCQYKAKVACVKSRDMHWALVAHRDQRDINLSSLRMLIVADGANPWSISSCDAFLNVFQSKGLRQEVICPCASSPEALTVAIRRPTDDSNQPPGRGVLSMHGLTYGVIRVDSEEKLSVLTVQDVGLVMPGAIMCSVKPDGVPQLCRTDEIGELCVCAVATGTSYYGLSGMTKNTFEVFPMTSSGAPISEYPFIRTGLLGFVGPGGLVFVVGKMDGLMVVSGRRHNADDIVATALAVEPMKFVYRGRIAVFSVTVLHDERIVIVAEQRPDSTEEDSFQWMSRVLQAIDSIHQVGVYCLALVPANTLPKTPLGGIHLSETKQLFLEGSLHPCNVLMCPHTCVTNLPKPRQKQPEIGPASVMVGNLVSGKRIAQASGRDLGQIEDNDQARKFLFLSEVLQWRAQTTPDHILYTLLNCRGAIANSLTCVQLHKRAEKIAVMLMERGHLQDGDHVALVYPPGIDLIAAFYGCLYAGCVPITVRPPHPQNIATTLPTVKMIVEVSRSACLMTTQLICKLLRSREAAAAVDVRTWPLILDTDDLPKKRPAQICKPCNPDTLAYLDFSVSTTGMLAGVKMSHAATSAFCRSIKLQCELYPSREVAICLDPYCGLGFVLWCLCSVYSGHQSILIPPSELETNPALWLLAVSQYKVRDTFCSYSVMELCTKGLGSQTESLKARGLDLSRVRTCVVVAEERPRIALTQSFSKLFKDLGLHPRAVSTSFGCRVNLAICLQGTSGPDPTTVYVDMRALRHDRVRLVERGSPHSLPLMESGKILPGVRIIIANPETKGPLGDSHLGEIWVHSAHNASGYFTIYGDESLQSDHFNSRLSFGDTQTIWARTGYLGFLRRTELTDANGERHDALYVVGALDEAMELRGMRYHPIDIETSVIRAHKSVTECAVFTWTNLLVVVVELDGSEQEALDLVPLVTNVVLEEHYLIVGVVVVVDIGVIPINSRGEKQRMHLRDGFLADQLDPIYVAYNM

SEQ ID NO: 833273 - protein, 1352 aa, Homo sapiens; identical to SEQ ID NO: 833272

SEQ ID NO: 833274 - protein, 940 aa, Homo sapiens
MADDVIAPKYNLRINIKAIEIFIDVSTMKFDMLLQQENSWLFRENECLADYHPCSFAPDPIPVHWCRSYSRLPCFLYSPHLPPLTLHVLSCLLLAIMCSVKPDGVPQLCRTDEIGELCVCAVATGTSYYGLSGMTKNTFEVFPMTSSGAPISEYPFIRTGLLGFVGPGGLVFVVGKMDGLMVVSGRRHNADDIVATALAVEPMKFVYRGRIAVFSVTVLHDERIVIVAEQRPDSTEEDSFQWMSRVLQAIDSIHQVGVYCLALVPANTLPKTPLGGIHLSETKQLFLEGSLHPCNVLMCPHTCVTNLPKPRQKQPEIGPASVMVGNLVSGKRIAQASGRDLGQIEDNDQARKFLFLSEVLQWRAQTTPDHILYTLLNCRGAIANSLTCVQLHKRAEKIAVMLMERGHLQDGDHVALVYPPGIDLIAAFYGCLYAGCVPITVRPPHPQNIATTLPTVKMIVEVSRSACLMTTQLICKLLRSREAAAAVDVRTWPLILDTDDLPKKRPAQICKPCNPDTLAYLDFSVSTTGMLAGVKMSHAATSAFCRSIKLQCELYPSREVAICLDPYCGLGFVLWCLCSVYSGHQSILIPPSELETNPALWLLAVSQYKVRDTFCSYSVMELCTKGLGSQTESLKARGLDLSRVRTCVVVAEERPRIALTQSFSKLFKDLGLHPRAVSTSFGCRVNLAICLQGTSGPDPTTVYVDMRALRHDRVRLVERGSPHSLPLMESGKILPGVRIIIANPETKGPLGDSHLGEIWVHSAHNASGYFTIYGDESLQSDHFNSRLSFGDTQTIWARTGYLGFLRRTELTDANGERHDALYVVGALDEAMELRGMRYHPIDIETSVIRAHKSVTECAVFTWTNLLVVVVELDGSEQEALDLVPLVTNVVLEEHYLIVGVVVVVDIGVIPINSRGEKQRMHLRDGFLADQLDPIYVAYNM

SEQ ID NO: 833275 - protein, 69 aa, Homo sapiens
WLHRSVLVLKTSDVCFAPVSCMTRARSLQAALLKESYVLVPVIGPQGAIANSLTCVQLHKRAEKIAVML

SEQ ID NO: 833276 - protein, 1352 aa, Homo sapiens; identical to SEQ ID NO: 833272

SEQ ID NO: 833277 - protein, 1352 aa, Homo sapiens; identical to SEQ ID NO: 833272

SEQ ID NO: 833278 - protein, 1352 aa, Homo sapiens; identical to SEQ ID NO: 833272

SEQ ID NO: 833279 - protein, 310 aa, Homo sapiens
MKGQQKTAETEEGTVQIQEGAVATGEDPTSVAIASIQSAATFPDPNVKYVFRTENGGQVMYRVIQVSEGQLDGQTEGTGAISGYPATQSMTQAVIQGAFTSDDAVDTEGTAAETHYTYFPSTAVGDGAGGTTSGSTAAVVTTQGSEALLGQATPPGTGQFFVMMSPQEVLQGGSQRSIAPRTHPYSPKSEAPRTTRDEKRRAQHNEVERRRRDKINNWIVQLSKIIPDCSMESTKSGQSKGGILSKACDYIQELRQSNHRLSEELQGLDQLQLDNDVLRQQVEDLKNKNLLLRAQLRHHGLEVVIKNDSN

SEQ ID NO: 833280 - protein, 310 aa, Homo sapiens; identical to SEQ ID NO: 833279

SEQ ID NO: 833281 - protein, 166 aa, Homo sapiens
MKGQQKTAETEEGTVQIQEGAVATGEDPTSVAIASIQSAATFPDPNVKYVFRTENGGQVMYRVIQVSEGQLDGQTEGTGAISGYPATQSMTQAVIQGAFTSDDAVDTEGTAAETHYTYFPSTAVGDGAGGTTSGSTAAVVTTQGSEALLGQATPPGTGEILHEDAG

SEQ ID NO: 833282 - protein, 244 aa, Homo sapiens
MKGQQKTAETEEGTVQIQEGAVATGEDPTSVAIASIQSAATFPDPNVKYVFRTENGGQVMYRVIQVSEGQLDGQTEGTGAISGYPATQSMTQAVIQGAFTSDDAVDTEGTAAETHYTYFPSTAVGDGAGGTTSGSTAAVVTTQGSEALLGQATPPGTGQFFVMMSPQEVLQGGSQRSIAPRTHPYSPKSEAPRTTRDEKRRAQHNEVERRRRDKINNWIVQLSKIIPDCSMESTKSGQVMERPW

SEQ ID NO: 833283 - protein, 251 aa, Homo sapiens
MYRVIQVSEGQLDGQTEGTGAISGYPATQSMTQAVIQGAFTSDDAVDTEGTAAETHYTYFPSTAVGDGAGGTTSGSTAAVVTTQGSEALLGQATPPGTGQFFVMMSPQEVLQGGSQRSIAPRTHPYSPKSEAPRTTRDEKRRAQHNEVERRRRDKINNWIVQLSKIIPDCSMESTKSGQSKGGILSKACDYIQELRQSNHRLSEELQGLDQLQLDNDVLRQQVEDLKNKNLLLRAQLRHHGLEVVIKNDSN

SEQ ID NO: 833284 - protein, 437 aa, Homo sapiens
MTQFLPPNLLALFAPRDPIPYLPPLEKLPHEKHHNQPYCGIAPYIREFEDPRDAPPPTRAETREERMERKRREKIERRQQEVETELKMWDPHNDPNAQGDAFKTLFVARVNYDTTESKLRREFEVYGPIKRIHMVYSKRSGKPRGYAFIEYEHERDMHSAYKHADGKKIDGRRVLVDVERGRTVKGWRPRRLGGGLGGTRRGGADVNIRHSGRDDTSRYDERPGPSPLPHRDRDRDRERERRERSRERDKERERRRSRSRDRRRRSRSRDKEERRRSRERSKDKDRDRKRRSSRSRERARRERERKEELRGGGGDMAEPSEAGDAPPDDGPPGELGPDGPDGPEEKGRDRDRERRRSHRSERERRRDRDRDRDRDREHKRGERGSERGRDEARGGGGGQDNGLEGLGNDSRDMYMESEGGDGYLAPENGYLMEAAPE

SEQ ID NO: 833285 - protein, 278 aa, Homo sapiens
MTQFLPPNLLALFAPRDPIPYLPPLEKLPHEKHHNQPYCGIAPYIREFEDPRDAPPPTRAETREERMERKRREKIERRQQEVETELKMWDPHNDPNAQGDAFKTLFVARVNYDTTESKLRREFEVYGPIKRIHMVYSKRSGKPRGYAFIEYEHERDMHSAYKHADGKKIDGRRVLVDVERGRTVKGWRPRRLGGGLGGTRRGGADVNIRHSGRDELRRERPASRFAGRPDVEDQNGGRTGEGPDDREPTERGARERKREETWARTKREHRALTAKIGT

SEQ ID NO: 833286 - protein, 138 aa, Homo sapiens
MPFPTPLPWVQGPSGPSSEHGQHRLLDPCVPASADAAGGREHGFGGGEVTPGPRRGWAVCLVQCDSGIGEGGQVSEASLAFFVNSHEIVQGFPAPRGMRPEVGAVARTTGWRVWATTAETCTWSLRAATATWLRRMGI

SEQ ID NO: 833287 - protein, 428 aa, Homo sapiens
MTQFLPPNLLALFAPRDPIPYLPPLEKLPHEKHHNQPYCGIAPYIREFEDPRDAPPPTRAETREERMERKRREKIERRQQEVETELKMWDPHNDPNAQGDAFKTLFVARVNYDTTESKLRREFEVYGPIKRIHMVYSKRSGKPRGYAFIEYEHERDMHSAYKHADGKKIDGRRVLVDVERGRTVKGWRPRRLGGGLGGTRRGGADVNIRHSGRDDTSRYDERDRDRDRERERRERSRERDKERERRRSRSRDRRRRSRSRDKEERRRSRERSKDKDRDRKRRSSRSRERARRERERKEELRGGGGDMAEPSEAGDAPPDDGPPGELGPDGPDGPEEKGRDRDRERRRSHRSERERRRDRDRDRDRDREHKRGERGSERGRDEARGGGGGQDNGLEGLGNDSRDMYMESEGGDGYLAPENGYLMEAAPE

SEQ ID NO: 833288 - protein, 394 aa, Homo sapiens
MTQFLPPNLLALFAPRDPIPYLPPLEKLPHEKHHNQPYCGIAPYIREFEDPRDAPPPTRAETREERMERKRREKIERRQQEVETELKMWDPHNDPNAQGDAFKTLFVARVNYDTTESKLRREFEVYGPIKRIHMVYSKRSGKPRGYAFIEYEHERDMHSAYKHADGKKIDGRRVLVDVERGRTVKGWRPRRLGGGLGGTRRGGADVNIRHSGRDDTSRYDERPGPSPLPHRDRDRDRERERRERSRERDKERERRPAGVGSGPGGSGSARRSCVAAVATWRSPPRRVTRPLMMGLQGSSGLTALTVQRKRAGIVTGSDGGATGASASGAGTGIVTVTVTASTNGGSGAVSGAGMRPEVGAVARTTGWRVWATTAETCTWSLRAATATWLRRMGI

SEQ ID NO: 833289 - protein, 437 aa, Homo sapiens; identical to SEQ ID NO: 833284

SEQ ID NO: 833290 - protein, 122 aa, Homo sapiens
MAEPSEAGDAPPDDGPPGELGPDGPDGPEEKGRDRDRERRRSHRSERERRRDRDRDRDRDREHKRGERGSERGRDEARGGGGGQDNGLEGLGNDSRDMYMESEGGDGYLAPENGYLMEAAPE

SEQ ID NO: 833291 - protein, 122 aa, Homo sapiens; identical to SEQ ID NO: 833290

SEQ ID NO: 833292 - protein, 341 aa, Homo sapiens
MEQALHRFGRGLVWLSVAWLSVGRVRVRDDGDTGRGFCRAGPVLTRGPSGDSSPLPLPTSVTAAYKHADGKKIDGRRVLVDVERGRTVKGWRPRRLGGGLGGTRRGGADVNIRHSGRDDTSRYDERPGPSPLPHRDRDRDRERERRERSRERDKERERRRSRSRDRRRRSRSRDKEERRRSRERSKDKDRDRKRRSSRSRERARRERERKEELRGGGGDMAEPSEAGDAPPDDGPPGELGPDGPDGPEEKGRDRDRERRRSHRSERERRRDRDRDRDRDREHKRGERGSERGRDEARGGGGGQDNGLEGLGNDSRDMYMESEGGDGYLAPENGYLMEAAPE

SEQ ID NO: 833293 - protein, 391 aa, Homo sapiens
MTQFLPPNLLALFAPRDPIPYLPPLEKLPHEKHHNQPYCGIAPYIREFEDPRDAPPPTRAETREERMERKRREKIERRQQEVETELKMWDPHNDPNAQGDAFKTLFVARVNYDTTESKLRREFEVYGPIKRIHMVYSKRSGKPRGYAFIEYEHERDMHSAYKHADGKKIDGRRVLVDVERGRTVKGWRPRRLGGGLGGTRRGGADVNIRHSGRDDTSRYDERPGPSPLPHRDRDRDRERERRERSRERDKERERRRSRSRDRRRRSRSRDKEERRRSRERSKDKDRDRKRRSSRSRERARRERERKEELRGGGGDMAEPSEAGDAPPDDGPPGELGPDGPDGPEEKGRDRDRQDNGLEGLGNDSRDMYMESEGGDGYLAPENGYLMEAAPE

SEQ ID NO: 833294 - protein, 332 aa, Homo sapiens
MEQALHRFGRGLVWLSVAWLSVGRVRVRDDGDTGRGFCRAGPVLTRGPSGDSSPLPLPTSVTAAYKHADGKKIDGRRVLVDVERGRTVKGWRPRRLGGGLGGTRRGGADVNIRHSGRDDTSRYDERDRDRDRERERRERSRERDKERERRRSRSRDRRRRSRSRDKEERRRSRERSKDKDRDRKRRSSRSRERARRERERKEELRGGGGDMAEPSEAGDAPPDDGPPGELGPDGPDGPEEKGRDRDRERRRSHRSERERRRDRDRDRDRDREHKRGERGSERGRDEARGGGGGQDNGLEGLGNDSRDMYMESEGGDGYLAPENGYLMEAAPE

SEQ ID NO: 833295 - protein, 262 aa, Homo sapiens
YSWSVPSPFDGWRPRRLGGGLGGTRRGGADVNIRHSGRDDTSRYDERPGPSPLPHRDRDRDRERERRERSRERDKERERRRSRSRDRRRRSRSRDKEERRRSRERSKDKDRDRKRRSSRSRERARRERERKEELRGGGGDMAEPSEAGDAPPDDGPPGELGPDGPDGPEEKGRDRDRERRRSHRSERERRRDRDRDRDRDREHKRGERGSERGRDEARGGGGGQDNGLEGLGNDSRDMYMESEGGDGYLAPENGYLMEAAPE

SEQ ID NO: 833296 - protein, 318 aa, Homo sapiens
  misc_feature (309)..(309): Xaa can be any naturally occurring amino acid
MTQFLPPNLLALFAPRDPIPYLPPLEKLPHEKHHNQPYCGIAPYIREFEDPRDAPPPTRAETREERMERKRREKIERRQQEVETELKMWDPHNDPNAQGDAFKTLFVARVNYDTTESKLRREFEVYGPIKRIHMVYSKRSGKPRGYAFIEYEHERDMHSAYKHADGKKIDGRRVLVDVERGRTVKGWRPRRLGGGLGGTRRGGADVNIRHSGRDDTSRYDERPGPSPLPHRDRDRDRERERRERSRERDKERERRRSRSRDRRRRSRSRDKEERRRSRERSKDKDRDRKRRSSRSRERARRERTQESAXALQKRPPSG

SEQ ID NO: 833297 - protein, 341 aa, Homo sapiens; identical to SEQ ID NO: 833292

SEQ ID NO: 833298 - protein, 254 aa, Homo sapiens
MTQFLPPNLLALFAPRDPIPYLPPLEKLPHEKHHNQPYCGIAPYIREFEDPRDAPPPTRAETREERMERKRREKIERRQQEVETELKMWDPHNDPNAQGDAFKTLFVARVNYDTTESKLRREFEVYGPIKRIHMVYSKRSGKPRGYAFIEYEHERDMHSAYKHADGKKIDGRRVLGSDGGATGASASGAGTGIVTVTVTASTNGGSGAVSGAGMRPEVGAVARTTGWRVWATTAETCTWSLRAATATWLRRMGI

SEQ ID NO: 833299 - protein, 166 aa, Homo sapiens
MTQFLPPNLLALFAPRDPIPYLPPLEKLPHEKHHNQPYCGIAPYIREFEDPRDAPPPTRAETREERMERKRREKIERRQQEVETELKMWDPHNDPNAQGDAFKTLFVARVNYDTTESKLRREFEVYGPIKRIHMVYSKRSGKPRGYAFIEYEHERDMHSTTQLACS

SEQ ID NO: 833300 - protein, 149 aa, Homo sapiens
MTQFLPPNLLALFAPRDPIPYLPPLGDMAEPSEAGDAPPDDGPPGELGPDGPDGPEEKGRDRDRERRRSHRSERERRRDRDRDRDRDREHKRGERGSERGRDEARGGGGGQDNGLEGLGNDSRDMYMESEGGDGYLAPENGYLMEAAPE

SEQ ID NO: 833301 - protein, 102 aa, Homo sapiens
MGLQGSSGLTALTVQRKRAGIVTGSDGGATGASASGAGTGIVTVTVTASTNGGSGAVSGAGMRPEVGAVARTTGWRVWATTAETCTWSLRAATATWLRRMGI

SEQ ID NO: 833302 - protein, 166 aa, Homo sapiens; identical to SEQ ID NO: 833299

SEQ ID NO: 833303 - protein, 166 aa, Homo sapiens; identical to SEQ ID NO: 833299

SEQ ID NO: 833304 - protein, 66 aa, Homo sapiens
QQEINFIFKSKGPEQMRHLPLEDKLKCQDNGLEGLGNDSRDMYMESEGGDGYLAPENGYLMEAAPE

SEQ ID NO: 833305 - protein, 34 aa, Homo sapiens
MERKRREKIERRQQEVETELKMWDPHNDPNSTGG

SEQ ID NO: 833306 - protein, 437 aa, Homo sapiens; identical to SEQ ID NO: 833284

SEQ ID NO: 833307 - protein, 298 aa, Homo sapiens
MGVRGMNCTGGPGPVNTKPGAAFLPFALGVGSFLLLRALSLPRFTLLSVCPAPGGGLGGTRRGGADVNIRHSGRDDTSRYDERPGPSPLPHRDRDRDRERERRERSRERDKERERRRSRSRDRRRRSRSRDKEERRRSRERSKDKDRDRKRRSSRSRERARRERERKEELRGGGGDMAEPSEAGDAPPDDGPPGELGPDGPDGPEEKGRDRDRERRRSHRSERERRRDRDRDRDRDREHKRGERGSERGRDEARGGGGGQDNGLEGLGNDSRDMYMESEGGDGYLAPENGYLMEAAPE

SEQ ID NO: 833308 - protein, 437 aa, Homo sapiens; identical to SEQ ID NO: 833284

SEQ ID NO: 833309 - protein, 437 aa, Homo sapiens; identical to SEQ ID NO: 833284

SEQ ID NO: 833310 - protein, 437 aa, Homo sapiens; identical to SEQ ID NO: 833284

SEQ ID NO: 833311 - protein, 437 aa, Homo sapiens; identical to SEQ ID NO: 833284

SEQ ID NO: 833312 - protein, 505 aa, Homo sapiens
VDHMMLTALEARRLEEARWSRRGGADVNIRHSGRDDTSRYDERPGPSPLPHRDRDRDRERERRERSRERYKERERRRSRSRDRRRRYGVATRREKLPHEKHHNQPYCGIAPYIREFEDPRDAPPPTRAETREERMERKRREKIERRQQEVETELKMWDPHNDPNAQGDAFKTLFVARVNYDTTESKLRREFEVYGPIKRIHMVYSKRSGKPRGYAFIEYEHERDMHSAYKHADGKKIDGRRVLVDVERGRTVKGWRPRRLGGGLGGTRRGGADVNIRHSGRDDTSRYDERPGPSPLPHRDRDRDRERERRERSRERDKERERRRSRSRDRRRRSRSRDKEERRRSRERSKDKDRDRKRRSSRSRERARRERERKEELRGGGGDMAEPSEAGDAPPDDGPPGELGPDGPDGPEEKGRDRDRERRRSHRSERERRRDRDRDRDRDREHKRGERGSERGRDEARGGGGGQDNGLEGLGNDSRDMYMESEGGDGYLAPENGYLMEAAPE

SEQ ID NO: 833313 - protein, 397 aa, Homo sapiens
RYPVRRRLSDPRDAPPPTRAETREERMERKRREKIERRQQEVETELKMWDPHNDPNAQGDAFKTLFVARVNYDTTESKLRREFEVYGPIKRIHMVYSKRSGKPRGYAFIEYEHERDMHSAYKHADGKKIDGRRVLVDVERGRTVKGWRPRRLGGGLGGTRRGGADVNIRHSGRDDTSRYDERPGPSPLPHRDRDRDRERERRERSRERDKERERRRSRSRDRRRRSRSRDKEERRRSRERSKDKDRDRKRRSSRSRERARRERERKEELRGGGGDMAEPSEAGDAPPDDGPPGELGPDGPDGPEEKGRDRDRERRRSHRSERERRRDRDRDRDRDREHKRGERGSERGRDEARGGGGGQDNGLEGLGNDSRDMYMESEGGDGYLAPENGYLMEAAPE

SEQ ID NO: 833314 - protein, 122 aa, Homo sapiens; identical to SEQ ID NO: 833290

SEQ ID NO: 833315 - protein, 298 aa, Homo sapiens; identical to SEQ ID NO: 833307

SEQ ID NO: 833316 - protein, 289 aa, Homo sapiens
MGVRGMNCTGGPGPVNTKPGAAFLPFALGVGSFLLLRALSLPRFTLLSVCPAPGGGLGGTRRGGADVNIRHSGRDDTSRYDERDRDRDRERERRERSRERDKERERRRSRSRDRRRRSRSRDKEERRRSRERSKDKDRDRKRRSSRSRERARRERERKEELRGGGGDMAEPSEAGDAPPDDGPPGELGPDGPDGPEEKGRDRDRERRRSHRSERERRRDRDRDRDRDREHKRGERGSERGRDEARGGGGGQDNGLEGLGNDSRDMYMESEGGDGYLAPENGYLMEAAPE

SEQ ID NO: 833317 - protein, 234 aa, Homo sapiens
GRVGRPTRRGRVGSRYDERPGPSPLPHRDRDRDRERERRERSRERDKERERRRSRSRDRRRRSRSRDKEERRRSRERSKDKDRDRKRRSSRSRERARRERERKEELRGGGGDMAEPSEAGDAPPDDGPPGELGPDGPDGPEEKGRDRDRERRRSHRSERERRRDRDRDRDRDREHKRGERGSERGRDEARGGGGGQDNGLEGLGNDSRDMYMESEGGDGYLAPENGYLMEAAPE

SEQ ID NO: 833318 - protein, 230 aa, Homo sapiens
MTQFLPPNLLALFAPRDPIPYLPPLEKLPHEKHHNQPYCGIAPYIREFEDPRDAPPPTRAETREERMERKRREKIERRQQEVETELKMWDPHNDPNAQGDAFKTLFVARVNYDTTESKLRREFEVYGPIKRIHMVYSKRSGKPRGYAFIEYEHERDMHSAYKHADGKKIDGRRVLVDVERGRTVKGWRPRRLGGGLGGTRRGGADVNIRHSGRDDTSRYDESPHIRQPGQ

SEQ ID NO: 833319 - protein, 166 aa, Homo sapiens; identical to SEQ ID NO: 833299

SEQ ID NO: 833320 - protein, 166 aa, Homo sapiens; identical to SEQ ID NO: 833299

SEQ ID NO: 833321 - protein, 113 aa, Homo sapiens
MEQALHRFGRGLVWLSVAWLSVGRVRVRDDGDTGRGFCRAGPVLTRGPSGDSSPLPLPTSVTAAYKHADGKKIDGRRVLVDVERGRTVKGWRPRRLGGASVYQKRWEEGRYRA

SEQ ID NO: 833322 - protein, 1433 aa, Homo sapiens
AGCGRGGGGRRRLDAAAAADPGEPRSERSSESATRRGRNISVMAHSKTRTNDGKITYPPGVKEISDKISKEEMVRRLKMVVKTFMDMDQDSEEEKELYLNLALHLASDFFLKHPDKDVRLLVACCLADIFRIYAPEAPYTSPDKLKDIFMFITRQLKGLEDTKSPQFNRYFYLLENIAWVKSYNICFELEDSNEIFTQLYRTLFSVINNGHNQKVHMHMVDLMSSIICEGDTVSQELLDTVLVNLVPAHKNLNKQAYDLAKALLKRTAQAIEPYITNFFNQVLMLGKTSISDLSEHVFDLILELYNIDSHLLLSVLPQLEFKLKSNDNEERLQVVKLLAKMFGAKDSELASQNKPLWQCYLGRFNDIHVPIRLECVKFASHCLMNHPDLAKDLTEYLKVRSHDPEEAIRHDVIVSIVTAAKKDILLVNDHLLNFVRERTLDKRWRVRKEAMMGLAQIYKKYALQSAAGKDAAKQIAWIKDKLLHIYYQNSIDDRLLVERIFAQYMVPHNLETTERMKCLYYLYATLDLNAVKALNEMWKCQNLLRHQVKDLLDLIKQPKTDASVKAIFSKVMVITRNLPDPGKAQDFMKKFTQVLEDDEKIRKQLEVLVSPTCSCKQAEGCVREITKKLGNPKQPTNPFLEMIKFLLERIAPVHIDTESISALIKQVNKSIDGTADDEDEGVPTDQAIRAGLELLKVLSFTHPISFHSAETFESLLACLKMDDEKVAEAALQIFKNTGSKIEEDFPHIRSALLPVLHHKSKKGPPRQAKYAIHCIHAIFSSKETQFAQIFEPLHKSLDPSNLEHLITPLVTIGHIALLAPDQFAAPLKSLVATFIVKDLLMNDRLPGKKTTKLWVPDEEVSPETMVKIQAIKMMVRWLLGMKNNHSKSGTSTLRLLTTILHSDGDLTEQGKISKPDMSRLRLAAGSAIVKLAQEPCYHEIITLEQYQLCALAINDECYQVRQVFAQKLHKGLSRLRLPLEYMAICALCAKDPVKERRAHARQCLVKNINVRREYLKQHAAVSEKLLSLLPEYVVPYTIHLLAHDPDYVKVQDIEQLKDVKECLWFVLEILMAKNENNSHAFIRKMVENIKQTKDAQGPDDAKMNEKLYTVCDVAMNIIMSKSTTYSLESPKDPVLPARFFTQPDKNFSNTKNYLPPEMKSFFTPGKPKTTNVLGAVNKPLSSAGKQSQTKSSRMETVSNASSSSNPSSPGRIKGRLDSSEMDHSENEDYTMSSPLPGKKSDKRDDSDLVRSELEKPRGRKKTPVTEQEEKLGMDDLTKLVQEQKPKGSQRSRKRGHTASESDEQQWPEEKRLKEDILENEDEQNSPPKKGKRGRPPKPLGGGTPKEEPTMKTSKKGSKKKSGPPAPEEEEEEERQSGNTEQKSKSKQHRVSRRAQQRAESPESSAIESTQSTPQKGRGRPSKTPSPSQPKKNV

SEQ ID NO: 833323 - protein, 164 aa, Homo sapiens
AGCGRGGGGRRRLDAAAAADPGEPRSERSSESATRRGRNISVMAHSKTRTNDGKITYPPGVKEISDKISKEEMVRRLKMVVKTFMDMDQDSEEEKELYLNLALHLASDFFLKHPDKDVRLLVACCLADIFRIYAPEAPYTSPDKLKASTDLNNSKIDRYFDLSF

SEQ ID NO: 833324 - protein, 1489 aa, Homo sapiens
AGCGRGGGGRRRLDAAAAADPGEPRSERSSESATRRGRNISVMAHSKTRTNDGKITYPPGVKEISDKISKEEMVRRLKMVVKTFMDMDQDSEEEKELYLNLALHLASDFFLKHPDKDVRLLVACCLADIFRIYAPEAPYTSPDKLKDIFMFITRQLKGLEDTKSPQFNRYFYLLENIAWVKSYNICFELEDSNEIFTQLYRTLFSVINNGHNQKVHMHMVDLMSSIICEGDTVSQELLDTVLVNLVPAHKNLNKQAYDLAKALLKRTAQAIEPYITNFFNQVLMLGKTSISDLSEHVFDLILELYNIDSHLLLSVLPQLEFKLKSNDNEERLQVVKLLAKMFGAKDSELASQNKPLWQCYLGRFNDIHVPIRLECVKFASHCLMNHPDLAKDLTEYLKVRSHDPEEAIRHDVIVSIVTAAKKDILLVNDHLLNFVRERTLDKRWRVRKEAMMGLAQIYKKYALQSAAGKDAAKQIAWIKDKLLHIYYQNSIDDRLLVERIFAQYMVPHNLETTERMKCLYYLYATLDLNAVKALNEMWKCQNLLRHQVKDLLDLIKQPKTDASVKAIFSKVMVITRNLPDPGKAQDFMKKFTQVLEDDEKIRKQLEVLVSPTCSCKQAEGCVREITKKLGNPKQPTNPFLEMIKFLLERIAPVHIDTESISALIKQVNKSIDGTADDEDEGVPTDQAIRAGLELLKVLSFTHPISFHSAETFESLLACLKMDDEKVAEAALQIFKNTGSKIEEDFPHIRSALLPVLHHKSKKGPPRQAKYAIHCIHAIFSSKETQFAQIFEPLHKSLDPSNLEHLITPLVTIGHIALLAPDQFAAPLKSLVATFIVKDLLMNDRLPGKKTTKLWVPDEEVSPETMVKIQAIKMMVRWLLGMKNNHSKSGTSTLRLLTTILHSDGDLTEQGKISKPDMSRLRLAAGSAIVKLAQEPCYHEIITLEQYQLCALAINDECYQVRQVFAQKLHKGLSRLRLPLEYMAICALCAKDPVKERRAHARQCLVKNINVRREYLKQHAAVSEKLLSLLPEYVVPYTIHLLAHDPDYVKVQDIEQLKDVKECLWFVLEILMAKNENNSHAFIRKMVENIKQTKDAQGPDDAKMNEKLYTVCDVAMNIIMSKSTTYSLESPKDPVLPARFFTQPDKNFSNTKNYLPPEMKSFFTPGKPKTTNVLGAVNKPLSSAGKQSQTKSSRMETVSNASSSSNPSSPGRIKGRLDSSEMDHSENEDYTMSSPLPGKKSDKRDDSDLVRSELEKPRGRKKTPVTEQEEKLGMDDLTKLVQEQKPKGSQRSRKRGHTASESDEQQWPEEKRLKEDILENEDEQNSPPKKGKRGRPPKPLGGGTPKEEPTMKTSKKGSKKKSGPPAPEEEEEEERQSGNTEQKSKSKQHRVSRRAQQRAESPESSAIESTQSTPQKGRGRPSKTPSPSQPKKNVRVGRSKQAATKENDSSEEVDVFQGSSPVDDIPQEETEEEEVSTVNVRRRSAKRERR

SEQ ID NO: 833325 - protein, 1471 aa, Homo sapiens
AGCGRGGGGRRRLDAAAAADPGEPRSERSSESATRRGRNISVMAHSKTRTNDGKITYPPGVKEISDKISKEEMVRRLKMVVKTFMDMDQDSEEEKELYLNLALHLASDFFLKHPDKDVRLLVACCLADIFRIYAPEAPYTSPDKLKDIFMFITRQLKGLEDTKSPQFNRYFYLLENIAWVKSYNICFELEDSNEIFTQLYRTLFSVINNGHNQKVHMHMVDLMSSIICEGDTVSQELLDTVLVNLVPAHKNLNKQAYDLAKALLKRTAQAIEPYITNFFNQVLMLGKTSISDLSEHVFDLILELYNIDSHLLLSVLPQLEFKLKSNDNEERLQVVKLLAKMFGAKDSELASPIRLECVKFASHCLMNHPDLAKDLTEYLKVRSHDPEEAIRHDVIVSIVTAAKKDILLVNDHLLNFVRERTLDKRWRVRKEAMMGLAQIYKKYALQSAAGKDAAKQIAWIKDKLLHIYYQNSIDDRLLVERIFAQYMVPHNLETTERMKCLYYLYATLDLNAVKALNEMWKCQNLLRHQVKDLLDLIKQPKTDASVKAIFSKVMVITRNLPDPGKAQDFMKKFTQVLEDDEKIRKQLEVLVSPTCSCKQAEGCVREITKKLGNPKQPTNPFLEMIKFLLERIAPVHIDTESISALIKQVNKSIDGTADDEDEGVPTDQAIRAGLELLKVLSFTHPISFHSAETFESLLACLKMDDEKVAEAALQIFKNTGSKIEEDFPHIRSALLPVLHHKSKKGPPRQAKYAIHCIHAIFSSKETQFAQIFEPLHKSLDPSNLEHLITPLVTIGHIALLAPDQFAAPLKSLVATFIVKDLLMNDRLPGKKTTKLWVPDEEVSPETMVKIQAIKMMVRWLLGMKNNHSKSGTSTLRLLTTILHSDGDLTEQGKISKPDMSRLRLAAGSAIVKLAQEPCYHEIITLEQYQLCALAINDECYQVRQVFAQKLHKGLSRLRLPLEYMAICALCAKDPVKERRAHARQCLVKNINVRREYLKQHAAVSEKLLSLLPEYVVPYTIHLLAHDPDYVKVQDIEQLKDVKECLWFVLEILMAKNENNSHAFIRKMVENIKQTKDAQGPDDAKMNEKLYTVCDVAMNIIMSKSTTYSLESPKDPVLPARFFTQPDKNFSNTKNYLPPEMKSFFTPGKPKTTNVLGAVNKPLSSAGKQSQTKSSRMETVSNASSSSNPSSPGRIKGRLDSSEMDHSENEDYTMSSPLPGKKSDKRDDSDLVRSELEKPRGRKKTPVTEQEEKLGMDDLTKLVQEQKPKGSQRSRKRGHTASESDEQQWPEEKRLKEDILENEDEQNSPPKKGKRGRPPKPLGGGTPKEEPTMKTSKKGSKKKSGPPAPEEEEEEERQSGNTEQKSKSKQHRVSRRAQQRAESPESSAIESTQSTPQKGRGRPSKTPSPSQPKKNVRVGRSKQAATKENDSSEEVDVFQGSSPVDDIPQEETEEEEVSTVNVRRRSAKRERR

SEQ ID NO: 833326 - protein, 1433 aa, Homo sapiens; identical to SEQ ID NO: 833322

SEQ ID NO: 833327 - protein, 1489 aa, Homo sapiens; identical to SEQ ID NO: 833324

SEQ ID NO: 833328 - protein, 125 aa, Homo sapiens
MDDLTKLVQEQKPKGSQRSRKRGHTASESDEQQWPEEKRLKEDILENEDEQNSPPKKGKRGRPPKPLGGGTPKEEPTMKTSKKGSKKKSGPPAPEEEEEEERQSGNTEQKSKSKQHRVSRRAQQR

SEQ ID NO: 833329 - protein, 73 aa, Homo sapiens
LAAEGEGGGEGDWMRRRRRIPESPGVSGVASRQPGGVEIFLSWLIQRLGPMMEKLHIRLGSRKYQIKYLKRRW

SEQ ID NO: 833330 - protein, 848 aa, Homo sapiens
MIKFLLERIAPVHIDTESISALIKQVNKSIDGTADDEDEGVPTDQAIRAGLELLKVLSFTHPISFHSAETFESLLACLKMDDEKVAEAALQIFKNTGSKIEEDFPHIRSALLPVLHHKSKKGPPRQAKYAIHCIHAIFSSKETQFAQIFEPLHKSLDPSNLEHLITPLVTIGHIALLAPDQFAAPLKSLVATFIVKDLLMNDRLPGKKTTKLWVPDEEVSPETMVKIQAIKMMVRWLLGMKNNHSKSGTSTLRLLTTILHSDGDLTEQGKISKPDMSRLRLAAGSAIVKLAQEPCYHEIITLEQYQLCALAINDECYQVRQVFAQKLHKGLSRLRLPLEYMAICALCAKDPVKERRAHARQCLVKNINVRREYLKQHAAVSEKLLSLLPEYVVPYTIHLLAHDPDYVKVQDIEQLKDVKECLWFVLEILMAKNENNSHAFIRKMVENIKQTKDAQGPDDAKMNEKLYTVCDVAMNIIMSKSTTYSLESPKDPVLPARFFTQPDKNFSNTKNYLPPEMKSFFTPGKPKTTNVLGAVNKPLSSAGKQSQTKSSRMETVSNASSSSNPSSPGRIKGRLDSSEMDHSENEDYTMSSPLPGKKSDKRDDSDLVRSELEKPRGRKKTPVTEQEEKLGMDDLTKLVQEQKPKGSQRSRKRGHTASESDEQQWPEEKRLKEDILENEDEQNSPPKKGKRGRPPKPLGGGTPKEEPTMKTSKKGSKKKSGPPAPEEEEEEERQSGNTEQKSKSKQHRVSRRAQQRAESPESSAIESTQSTPQKGRGRPSKTPSPSQPKKNVRVGRSKQAATKENDSSEEVDVFQGSSPVDDIPQEETEEEEVSTVNVRRRSAKRERR

SEQ ID NO: 833331 - protein, 1389 aa, Homo sapiens
AGCGRGGGGRRRLDAAAAADPGEPRSERSSESATRRGRNISVMAHSKTRTNDGKITYPPGVKEISDKISKEEMVRRLKMVVKTFMDMDQDSEEEKELYLNLALHLASDFFLKHPDKDVRLLVACCLADIFRIYAPEAPYTSPDKLKDIFMFITRQLKGLEDTKSPQFNRYFYLLENIAWVKSYNICFELEDSNEIFTQLYRTLFSVINNGHNQKVHMHMVDLMSSIICEGDTVSQELLDTVLVNLVPAHKNLNKQAYDLAKALLKRTAQAIEPYITNFFNQVLMLGKTSISDLSEHVFDLILELYNIDSHLLLSVLPQLEFKLKSNDNEERLQVVKLLAKMFGAKDSELASQNKPLWQCYLGRFNDIHVPIRLECVKFASHCLMNHPDLAKDLTEYLKVRSHDPEEAIRHDVIVSIVTAAKKDILLVNDHLLNFVRERTLDKRWRVRKEAMMGLAQIYKKYALQSAAGKDAAKQIAWIKDKLLHIYYQNSIDDRLLVERIFAQYMVPHNLETTERMKCLYYLYATLDLNAVKALNEMWKCQNLLRHQVKDLLDLIKQPKTDASVKAIFSKVMVITRNLPDPGKAQDFMKKFTQVLEDDEKIRKQLEVLVSPTCSCKQAEGCVREITKKLGNPKQPTNPFLEMIKFLLERIAPVHIDTESISALIKQVNKSIDGTADDEDEGVPTDQAIRAGLELLKVLSFTHPISFHSAETFESLLACLKMDDEKVAEAALQIFKNTGSKIEEDFPHIRSALLPVLHHKSKKGPPRQAKYAIHCIHAIFSSKETQFAQIFEPLHKSLDPSNLEHLITPLVTIGHIALLAPDQFAAPLKSLVATFIVKDLLMNDRLPGKKTTKLWVPDEEVSPETMVKIQAIKMMVRWLLGMKNNHSKSGTSTLRLLTTILHSDGDLTEQGKISKPDMSRLRLAAGSAIVKLAQEPCYHEIITLEQYQLCALAINDECYQVRQVFAQKLHKGLSRLRLPLEYMAICALCAKDPVKERRAHARQCLVKNINVRREYLKQHAAVSEKLLSLLPEYVVPYTIHLLAHDPDYVKVQDIEQLKDVKECLWFVLEILMAKNENNSHAFIRKMVENIKQTKDAQGPDDAKMNEKLYTVCDVAMNIIMSKSTTYSLESPKDPVLPARFFTQPDKNFSNTKNYLPPEMKSFFTPGKPKTTNVLGAVNKPLSSAGKQSQTKSSRMETVSNASSSSNPSSPGRIKGRLDSSEMDHSENEDYTMSSPLPGKKSDKRDDSDLVRSELEKPRGRKKTPVTEQEEKLGMDDLTKLVQEQKPKGSQRSRKRGHTASESDEQQWPEEKRLKEDILENEDEQNSPPKKGKRGRPPKPLGGGTPKEEPTMKTSKKGSKKKSGPPAPEEEEEEERQSGNTEQKSKSKQTC

SEQ ID NO: 833332 - protein, 737 aa, Homo sapiens
MVVFNGLLKIKICEAVSLKPTAWSLRHAVGPRPQTFLLDPYIALNVDDSRIGQTATKQKTNSPAWHDEFVTDVCNGRKIELAVFHDAPIGYDDFVANCTIQFEELLQNGSRHFEDWIDLEPEGRVYVIIDLSGSSGEAPKDNEERVFRERMRPRKRQGAVRRRVHQVNGHKFMATYLRQPTYCSHCRDFIWGVIGKQGYQCQVCTCVVHKRCHELIITKCAGLKKQETPDQVGSQRFSVNMPHKFGIHNYKVPTFCDHCGSLLWGLLRQGLQCKVCKMNVHRRCETNVAPNCGVDARGIAKVLADLGVTPDKITNSGQRRKKLIAGAESPQPASGSSPSEEDRSKSAPTSPCDQEIKELENNIRKALSFDNRGEEHRAASSPDGQLMSPGENGEVRQGQAKRLGLDEFNFIKVLGKGSFGKVMLAELKGKDEVYAVKVLKKDVILQDDDVDCTMTEKRILALARKHPYLTQLYCCFQTKDRLFFVMEYVNGGDLMFQIQRSRKFDEPRSRFYAAEVTSALMFLHQHGVIYRDLKLDNILLDAEGHCKLADFGMCKEGILNGVTTTTFCGTPDYIAPEILQELEYGPSVDWWALGVLMYEMMAGQPPFEADNEDDLFESILHDDVLYPVWLSKEAVSILKAFMTKNPHKRLGCVASQNGEDAIKQHPFFKEIDWVLLEQKKIKPPFKPRIKTKRDVNNFDQDFTREEPVLTLVDEAIVKQINQEEFKGFSYFGEDLMP

SEQ ID NO: 833333 - protein, 125 aa, Homo sapiens
MVVFNGLLKIKICEAVSLKPTAWSLRHAVGPRPQTFLLDPYIALNVDDSRIGQTATKQKTNSPAWHDEFVTDVCNGRKIELAVFHDAPIGYDDFVANCTIQFEELLQNGSRHFEDWIFKSVLLLD

SEQ ID NO: 833334 - protein, 346 aa, Homo sapiens
MRPRKRQGAVRRRVHQVNGHKFMATYLRQPTYCSHCRDFIWGVIGKQGYQCQVCTCVVHKRCHELIITKCAGLKKQETPDQVGSQRFSVNMPHKFGIHNYKVPTFCDHCGSLLWGLLRQGLQCKVCKMNVHRRCETNVAPNCGVDARGIAKVLADLGVTPDKITNSGQRRKKLIAGAESPQPASGSSPSEEDRSKSAPTSPCDQEIKELENNIRKALSFDNRGEEHRAASSPDGQLMSPGENGEVRQGQAKRLGLDEFNFIKVLGKGSFGKVMLAELKGKDEVYAVKVLKKDVILQDDDVDCTMTEKRILALARKHPYLTQLYCCFQTKGTGFSIQGCACEGMREL

SEQ ID NO: 833335 - protein, 587 aa, Homo sapiens
MRPRKRQGAVRRRVHQVNGHKFMATYLRQPTYCSHCRDFIWGVIGKQGYQCQVCTCVVHKRCHELIITKCAGLKKQETPDQVGSQRFSVNMPHKFGIHNYKVPTFCDHCGSLLWGLLRQGLQCKVCKMNVHRRCETNVAPNCGVDARGIAKVLADLGVTPDKITNSGQRRKKLIAGAESPQPASGSSPSEEDRSKSAPTSPCDQEIKELENNIRKALSFDNRGEEHRAASSPDGQLMSPGENGEVRQGQAKRLGLDEFNFIKVLGKGSFGKVMLAELKGKDEVYAVKVLKKDVILQDDDVDCTMTEKRILALARKHPYLTQLYCCFQTKDRLFFVMEYVNGGDLMFQIQRSRKFDEPRSRFYAAEVTSALMFLHQHGVIYRDLKLDNILLDAEGHCKLADFGMCKEGILNGVTTTTFCGTPDYIAPEILQELEYGPSVDWWALGVLMYEMMAGQPPFEADNEDDLFESILHDDVLYPVWLSKEAVSILKAFMTKNPHKRLGCVASQNGEDAIKQHPFFKEIDWVLLEQKKIKPPFKPRIKTKRDVNNFDQDFTREEPVLTLVDEAIVKQINQEEFKGFSYFGEDLMP

SEQ ID NO: 833336 - protein, 553 aa, Homo sapiens
HCRDFIWGVIGKQRYQCQVCTCVVHKRCHELIITKCAGLKKQETPDQVGSQRFSVNMPHKFGIHNYKVPTFCDHCGSLLWGLLRQGLQCKVCKMNVHRRCETNVAPNCGVDARGIAKVLADLGVTPDKITNSGQRRKKLIAGAESPQPASGSSPSEEDRSKSAPTSPCDQEIKELENNIRKALSFDNRGEEHRAASSPDGQLMSPGENGEVRQGQAKRLGLDEFNFIKVLGKGSFGKVMLAELKGKDEVYAVKVLKKDVILQDDDVDCTMTEKRILALARKHPYLTQLYCCFQTKDRLFFVMEYVNGGDLMFQIQRSRKFDEPRSRFYAAEVTSALMFLHQHGVIYRDLKLDNILLDAEGHCKLADFGMCKEGILNGVTTTTFCGTPDYIAPEILQELEYGPSVDWWALGVLMYEMMAGQPPFEADNEDDLFESILHDDVLYPVWLSKEAVSILKAFMTKNPHKRLGCVASQNGEDAIKQHPFFKEIDWVLLEQKKIKPPFKPRIKTKRDVNNFDQDFTREEPVLTLVDEAIVKQINQEEFKGFSYFGEDLMP

SEQ ID NO: 833337 - protein, 125 aa, Homo sapiens; identical to SEQ ID NO: 833333

SEQ ID NO: 833338 - protein, 587 aa, Homo sapiens; identical to SEQ ID NO: 833335

SEQ ID NO: 833339 - protein, 125 aa, Homo sapiens; identical to SEQ ID NO: 833333

SEQ ID NO: 833340 - protein, 587 aa, Homo sapiens; identical to SEQ ID NO: 833335

SEQ ID NO: 833341 - protein, 83 aa, Homo sapiens
RAVTRRPCRRLLSGLQRAGPLAEQSGGAAGRRAHEGSAFPVSGGDGIPECQRTVAFPSCSSSRLRWWSAWPVEINENLPARKT

SEQ ID NO: 833342 - protein, 83 aa, Homo sapiens; identical to SEQ ID NO: 833341

SEQ ID NO: 833343 - protein, 83 aa, Homo sapiens; identical to SEQ ID NO: 833341

SEQ ID NO: 833344 - protein, 306 aa, Homo sapiens
GRGPTLRTRGFAMAMSSGGSGGGVPEQEDSVLFRRGTGQSDDSDIWDDTALIKAYDKAVASFKHALKNGDICETSGKPKTTPKRKPAKKNKSQKKNTAASLQQWKVGDKCSAIWSEDGCIYPATIASIDFKRETCVVVYTGYGNREEQNLSDLLSPICEVANNIEQNAQENENESQVSTDESENSRSPGNKSDNIKPKSAPWNSFLPPPPPMPGPRLGPGKPGLKFNGPPPPPPPPPPHLLSCWLPPFPSGPPIIPPPPPICPDSLDDADALGSMLISWYMSGYHTGYYMGFRQNQKEGRCSHSLN

SEQ ID NO: 833345 - protein, 292 aa, Homo sapiens
GRGPTLRTRGFAMAMSSGGSGGGVPEQEDSVLFRRGTGQSDDSDIWDDTALIKAYDKAVASFKHALKNGDICETSGKPKTTPKRKPAKKWKVGDKCSAIWSEDGCIYPATIASIDFKRETCVVVYTGYGNREEQNLSDLLSPICEVANNIEQNAQENENESQVSTDESENSRSPGNKSDNIKPKSAPWNSFLPPPPPMPGPRLGPGKPGLKFNGPPPPPPPPPPHLLSCWLPPFPSGPPIIPPPPPICPDSLDDADALGSMLISWYMSGYHTGYYMGFRQNQKEGRCSHSLN

SEQ ID NO: 833346 - protein, 97 aa, Homo sapiens
  misc_feature (3)..(3): Xaa can be any naturally occurring amino acid
LVXRTAAVWRFGVCSLDFRRVHAHAEYPAHLLSCWLPPFPSGPPIIPPPPPICPDSLDDADALGSMLISWYMSGYHTGYYMGFRQNQKEGRCSHSLN

SEQ ID NO: 833347 - protein, 306 aa, Homo sapiens; identical to SEQ ID NO: 833344

SEQ ID NO: 833348 - protein, 306 aa, Homo sapiens; identical to SEQ ID NO: 833344

SEQ ID NO: 833349 - protein, 306 aa, Homo sapiens
GRGPTLRTRGFAMAMSSGGSGGGVPEQEDSVLFRRGTGQSDDSDIWDDTALIKAYDKAVASFKHALKNGDICETSGKPKTTPKRKPAKKNKSQKKNTAASLQQWKVGDKCSAIWSEDGCIYPATIASIDFKRETCVVVYTGYGNREEQNLSDLLSPICEVANNIEQNAQENENESQVSTDESENSRSPGNKSDNIKPKSAPWNSFLPPPPPMPGPRLGPGKPGLKFNGPPPPPPPPPPHLLSCWLPPFPSGPPIIPPPPPICPDSLDDADALGSMLISWYMSGYHTGYYMVSNHSASFPDNFFVVM

SEQ ID NO: 833350 - protein, 83 aa, Homo sapiens; identical to SEQ ID NO: 833341

SEQ ID NO: 833351 - protein, 306 aa, Homo sapiens; identical to SEQ ID NO: 833344

SEQ ID NO: 833352 - protein, 294 aa, Homo sapiens
GRGPTLRTRGFAMAMSSGGSGGGVPEQEDSVLFRRGTGQSDDSDIWDDTALIKAYDKAVASFKHALKNGDICETSGKPKTTPKRKPAKKNKSQKKNTAASLQQWKVGDKCSAIWSEDGCIYPATIASIDFKRETCVVVYTGYGNREEQNLSDLLSPICEVANNIEQNAQENENESQVSTDESENSRSPGNKSDNIKPKSAPWNSFLPPPPPMPGPRLGPGKPGLKFNGPPPPPPPPPPHLLSCWLPPFPSGPPIIPPPPPICPDSLDDADALGSMLISWYMSGYHTGYYMEMLA

SEQ ID NO: 833353 - protein, 105 aa, Homo sapiens
MVTFVKLRVNQKPHLKENLLRRIKAKRRILQLPYNSGKLGTNVLPPFPSGPPIIPPPPPICPDSLDDADALGSMLISWYMSGYHTGYYMGFRQNQKEGRCSHSLN

SEQ ID NO: 833354 - protein, 83 aa, Homo sapiens; identical to SEQ ID NO: 833341

SEQ ID NO: 833355 - protein, 306 aa, Homo sapiens; identical to SEQ ID NO: 833344

SEQ ID NO: 833356 - protein, 83 aa, Homo sapiens; identical to SEQ ID NO: 833341

SEQ ID NO: 833357 - protein, 567 aa, Homo sapiens
MASHVDLLTELQLLEKVPTLERLRAAQKRRAQQLKKWAQYEQDLQHRKRKHERKRSTGGRRKKVSFEASVALLEASLRNDAEEVRYFLKNKVSPDLCNEDGLTALHQCCIDNFEEIVKLLLSHGANVNAKDNELWTPLHAAATCGHINLVKILVQYGADLLAVNSDGNMPYDLCEDEPTLDVIETCMAYQGITQEKINEMRVAPEQQMIADIHCMIAAGQDLDWIDAQGATLLHIAGANGYLRAAELLLDHGVRVDVKDWDGWEPLHAAAFWGQMQMAELLVSHGASLSARTSMDEMPIDLCEEEEFKVLLLELKHKHDVIMKSQLRHKSSLSRRTSSAGSRGKVVRRASLSDRTNLYRKEYEGEAILWQRSAAEDQRTSTYNGDIRETRTDQENKDPNPRLEKPVLLSEFPTKIPRGELDMPVENGLRAPVSAYQYALANGDVWKVHEVPDYSMAYGNPGVADATPPWSSYKEQSPQTLLELKRQRAAAKLLSHPFLSTHLGSSMARTGESSSEGKAPLIGGRTSPYSSNGTSVYYTVTSGDPPLLKFKAPIEEMEEKVHGCCRIS

SEQ ID NO: 833358 - protein, 596 aa, Homo sapiens
MASHVDLLTELQLLEKVPTLERLRAAQKRRAQQLKKWAQYEQDLQHRKRKHERKRSTGGRRKKVSFEASVALLEASLRNDAEEENEWRIHDVTTAPFPGLVQRRSRLLIVSQVRYFLKNKVSPDLCNEDGLTALHQCCIDNFEEIVKLLLSHGANVNAKDNELWTPLHAAATCGHINLVKILVQYGADLLAVNSDGNMPYDLCEDEPTLDVIETCMAYQGITQEKINEMRVAPEQQMIADIHCMIAAGQDLDWIDAQGATLLHIAGANGYLRAAELLLDHGVRVDVKDWDGWEPLHAAAFWGQMQMAELLVSHGASLSARTSMDEMPIDLCEEEEFKVLLLELKHKHDVIMKSQLRHKSSLSRRTSSAGSRGKVVRRASLSDRTNLYRKEYEGEAILWQRSAAEDQRTSTYNGDIRETRTDQENKDPNPRLEKPVLLSEFPTKIPRGELDMPVENGLRAPVSAYQYALANGDVWKVHEVPDYSMAYGNPGVADATPPWSSYKEQSPQTLLELKRQRAAAKLLSHPFLSTHLGSSMARTGESSSEGKAPLIGGRTSPYSSNGTSVYYTVTSGDPPLLKFKAPIEEMEEKVHGCCRIS

SEQ ID NO: 833359 - protein, 527 aa, Homo sapiens
MRNRSYENRCPLLARDPLCSERGNEPRGIPGTTLLGAAPLKAWVRYFLKNKVSPDLCNEDGLTALHQCCIDNFEEIVKLLLSHGANVNAKDNELWTPLHAAATCGHINLVKILVQYGADLLAVNSDGNMPYDLCEDEPTLDVIETCMAYQGITQEKINEMRVAPEQQMIADIHCMIAAGQDLDWIDAQGATLLHIAGANGYLRAAELLLDHGVRVDVKDWDGWEPLHAAAFWGQMQMAELLVSHGASLSARTSMDEMPIDLCEEEEFKVLLLELKHKHDVIMKSQLRHKSSLSRRTSSAGSRGKVVRRASLSDRTNLYRKEYEGEAILWQRSAAEDQRTSTYNGDIRETRTDQENKDPNPRLEKPVLLSEFPTKIPRGELDMPVENGLRAPVSAYQYALANGDVWKVHEVPDYSMAYGNPGVADATPPWSSYKEQSPQTLLELKRQRAAAKLLSHPFLSTHLGSSMARTGESSSEGKAPLIGGRTSPYSSNGTSVYYTVTSGDPPLLKFKAPIEEMEEKVHGCCRIS

SEQ ID NO: 833360 - protein, 567 aa, Homo sapiens; identical to SEQ ID NO: 833357

SEQ ID NO: 833361 - protein, 567 aa, Homo sapiens; identical to SEQ ID NO: 833357

SEQ ID NO: 833362 - protein, 181 aa, Homo sapiens
MASHVDLLTELQLLEKVPTLERLRAAQKRRAQQLKKWAQYEQDLQHRKRKHERKRSTGGRRKKVSFEASVALLEASLRNDAEEEEEQEPRLWSHVANHLEVRKMLCETEWVRCQRKHKLVSGDVSLQRQPPPASCRDGPAQPHLLQLEMERTRWPCLAQIPARLPGRCRRSSGVGARSRDT

SEQ ID NO: 833363 - protein, 33 aa, Homo sapiens
MASHVDLLTELQLLEKVPTLERLRAAQKRRAQQ

SEQ ID NO: 833364 - protein, 174 aa, Homo sapiens [sequence omitted]

SEQ ID NO: 833365 - protein, 699 aa, Homo sapiens
MASHVDLLTELQLLEKVPTLERLRAAQKRRAQQLKKWAQYEQDLQHRKRKHERKRSTGGRRKKVSFEASVALLEASLRNDAEEGMNGESMINHSPLPWACSEAVSPAHCEPRSVHLPVPLGAHGPSLYNKPSWLSLERPSHASWVPAHTFQSMKEQRGVAFWPKRVLGFSHLALQVLEPSEKCNSTSTLLHRALGNEPRGIPGTTLLGAAPLKAWVRYFLKNKVSPDLCNEDGLTALHQCCIDNFEEIVKLLLSHGANVNAKDNELWTPLHAAATCGHINLVKILVQYGADLLAVNSDGNMPYDLCEDEPTLDVIETCMAYQGITQEKINEMRVAPEQQMIADIHCMIAAGQDLDWIDAQGATLLHIAGANGYLRAAELLLDHGVRVDVKDWDGWEPLHAAAFWGQMQMAELLVSHGASLSARTSMDEMPIDLCEEEEFKVLLLELKHKHDVIMKSQLRHKSSLSRRTSSAGSRGKVVRRASLSDRTNLYRKEYEGEAILWQRSAAEDQRTSTYNGDIRETRTDQENKDPNPRLEKPVLLSEFPTKIPRGELDMPVENGLRAPVSAYQYALANGDVWKVHEVPDYSMAYGNPGVADATPPWSSYKEQSPQTLLELKRQRAAAKLLSHPFLSTHLGSSMARTGESSSEGKAPLIGGRTSPYSSNGTSVYYTVTSGDPPLLKFKAPIEEMEEKVHGCCRIS

SEQ ID NO: 833366 - protein, 567 aa, Homo sapiens; identical to SEQ ID NO: 833357

SEQ ID NO: 833367 - protein, 567 aa, Homo sapiens; identical to SEQ ID NO: 833357

SEQ ID NO: 833368 - protein, 169 aa, Homo sapiens
MASHVDLLTELQLLEKVPTLERLRAAQKRRAQQLKKWAQYEQDLQHRKRKHERKRSTGGRRKKVSFEASVALLEASLRNDAEEGMNGESMINHSPLPWACSEAVSPAHCEPRSVHLPVPLGAHGPSLYNKPSWLSLERPSHASWVPAHTFQSMKEQRGVALLAQEGAGF

SEQ ID NO: 833369 - protein, 109 aa, Homo sapiens
EVKWLAQGQGQCLQCEHHGAGFKQAFHSLPHGLLRGTWCVLTRARGPVPCLELTLPVCLSQCCIDNFEEIVKLLLSHGANVNAKDNELWTPLHAAATCGHINLVKILVQ

SEQ ID NO: 833370 - protein, 130 aa, Homo sapiens
MFADYLAHESRRDSIVAELDREMSRSVDVTNTTFLLMAASIYLHDQNPDAALRALHQGDSLECTAMTVQILLKLDRLDLARKELKRMQDLDEDATLTQLATAWVSLATDSGYPETLVNLIVLVPAPGQAP

SEQ ID NO: 833371 - protein, 70 aa, Homo sapiens
SGDEGSELRGPLTSSMLLLPGGEKLQDAYYIFQEMADKCSPTLLLLNGQAACHNGPGPLGRPLRACCRRR

SEQ ID NO: 833372 - protein, 158 aa, Homo sapiens
MFADYLAHESRRDSIVAELDREMSRSVDVTNTTFLLMAASIYLHDQNPDAALRALHQGDSLECTAMTVQILLKLDRLDLARKELKRMQDLDEDATLTQLATAWVSLATGGEKLQDAYYIFQEMADKCSPTLLLLNGQAACHNGPGPLGRPLRACCRRR

SEQ ID NO: 833373 - protein, 158 aa, Homo sapiens; identical to SEQ ID NO: 833372

SEQ ID NO: 833374 - protein, 158 aa, Homo sapiens; identical to SEQ ID NO: 833372

SEQ ID NO: 833375 - protein, 158 aa, Homo sapiens; identical to SEQ ID NO: 833372

SEQ ID NO: 833376 - protein, 158 aa, Homo sapiens; identical to SEQ ID NO: 833372

SEQ ID NO: 833377 - protein, 249 aa, Homo sapiens
MSASQGAPRVASSHQSWERGLGRPCPPASSWSQPCRHLDFRLTASRAVRNESLLSLTARAVVLCHSSSRTLRQVTSQGHCFSHPALTSPAGVKAGNPGSPRSSSCCEHHRKAAPESRRSRQGLVVRSSGCTAATSLAGRPGDKEHPLVIGFGFDFVFLRYGLALSFSLACSGTILAYCSLDLPGSGDHPTSASRIAGTAGTHHHAWLVCIFFRDGVLPGRAQWLTPVIPKRWGYRCEPQYPAPLVIVTP

SEQ ID NO: 833378 - protein, 249 aa, Homo sapiens; identical to SEQ ID NO: 833377

SEQ ID NO: 833379 - protein, 185 aa, Homo sapiens
MPYLGRKFGVVLDEIKPSSAPELQAVRMFADYLAHESRRDSIVAELDREMSRSVDVTNTTFLLMAASIYLHDQNPDAALRALHQGDSLECTAMTVQILLKLDRLDLARKELKRMQDLDEDATLTQLATAWVSLATGGEKLQDAYYIFQEMADKCSPTLLLLNGQAACHNGPGPLGRPLRACCRRR

SEQ ID NO: 833380 - protein, 158 aa, Homo sapiens; identical to SEQ ID NO: 833372

SEQ ID NO: 833381 - protein, 111 aa, Homo sapiens
MCLWRPADRPLALSCSTAMTVQILLKLDRLDLARKELKRMQDLDEDATLTQLATAWVSLATGGEKLQDAYYIFQEMADKCSPTLLLLNGQAACHNGPGPLGRPLRACCRRR

SEQ ID NO: 833382 - protein, 123 aa, Homo sapiens
MFADYLAHESRRDSIVAELDREMSRSVDVTNTTFLLMAASIYLHDQNPDAALRALHQGDSLECTAMTVQILLKLDRLDLARVVRSCRMPTTSSRRWLTSARPPCCCSMGRRPATMAQGRWGGR

SEQ ID NO: 833383 - protein, 144 aa, Homo sapiens
MFADYLAHESRRDSIVAELDREMSRSVDVTNTTFLLMAASIYLHDQNPDAALRALHQGDSLECTAMTVQILLKLDRLDLARKELKRMQDLDEDATLTQLATAYYIFQEMADKCSPTLLLLNGQAACHNGPGPLGRPLRACCRRR

SEQ ID NO: 833384 - protein, 112 aa, Homo sapiens
MFADYLAHESRRDSIVAELDREMSRSVDVTNTTFLLMAASIYLHDQNPDAALRALHQGDSLEWKELKRMQDLDEDATLTQLATAWVSLATDSGYPETLVNLIVLVPAPGQAP

SEQ ID NO: 833385 - protein, 158 aa, Homo sapiens; identical to SEQ ID NO: 833372

SEQ ID NO: 833386 - protein, 158 aa, Homo sapiens; identical to SEQ ID NO: 833372

SEQ ID NO: 833387 - protein, 158 aa, Homo sapiens; identical to SEQ ID NO: 833372

SEQ ID NO: 833388 - protein, 158 aa, Homo sapiens; identical to SEQ ID NO: 833372

SEQ ID NO: 833389 - protein, 249 aa, Homo sapiens; identical to SEQ ID NO: 833377

SEQ ID NO: 833390 - protein, 182 aa, Homo sapiens
MFADYLAHESRRDSIVAELDREMSRSVDVTNTTFLLMAASIYLHDQNPDAALRALHQGDSLECRVSSPGRALHLEAQPMEAASPDGRTAMTVQILLKLDRLDLARKELKRMQDLDEDATLTQLATAWVSLATGGEKLQDAYYIFQEMADKCSPTLLLLNGQAACHNGPGPLGRPLRACCRRR

SEQ ID NO: 833391 - protein, 249 aa, Homo sapiens; identical to SEQ ID NO: 833377

SEQ ID NO: 833392 - protein, 152 aa, Homo sapiens
MVSPKRDSIVAELDREMSRSVDVTNTTFLLMAASIYLHDQNPDAALRALHQGDSLECTAMTVQILLKLDRLDLARKELKRMQDLDEDATLTQLATAWVSLATGGEKLQDAYYIFQEMADKCSPTLLLLNGQAACHNGPGPLGRPLRACCRRR

SEQ ID NO: 833393 - protein, 107 aa, Homo sapiens
MFADYLAHESRSTAMTVQILLKLDRLDLARKELKRMQDLDEDATLTQLATAWVSLATGGEKLQDAYYIFQEMADKCSPTLLLLNGQAACHNGPGPLGRPLRACCRRR

SEQ ID NO: 833394 - protein, 130 aa, Homo sapiens; identical to SEQ ID NO: 833370

SEQ ID NO: 833395 - protein, 249 aa, Homo sapiens; identical to SEQ ID NO: 833377

SEQ ID NO: 833396 - protein, 1108 aa, Homo sapiens
LDILKRRQHDVKLEKLKERIRKQWEHSEETNGRGQKLGHIDHPVMVVNVDNSVTAKVRKVATAPPAPAYKGFNPSETKIRTPDGKVWQEAEFQNMSRELYRDLALHFADDISIKEKPAEKSKEKKVVKPVRKVQKVAQLSSTECRTGSSHLISTSSWRDGQKLVKKILGPAPRMEPKEQRTASSDRGGRERTAKSGGHIGRAESDPRLDVLHRHLQRNSERSRSKSRSENNIKKLASSLPDNKQEENTALNKDFLPIEIRGILDDLQLDSTAHTAKQDTVELQNQKSSAPVHAPRSHSPVKRKPDKITANEDPPVISKRRHYDTDEVRQYIVRQQEERKRKQNEEKKAQKEATEQKNKRLQELYRKQKEAFTKVKNVPPSEPSATRRLQETYSKLLLEKTLLEEPSHQHVTQETQAKPGYQPSGESDKENKVQERPPSASSSSDMSLSEPPQPLARKDLMESTWMQPERLSPQVHHSQPQPFAGTAGSLLSHLLSLEHVGILHKDFESILPTRKNHNMASRPLTFTPQPYVTSPAAYTDALLKPSASQYKSKLDRIEALKATAASLSSRIESEAKKLAGASINYGSAWNTEYDVQQAPQEDGPWTKAVTPPVKDDNEDVFSARIQKMLGSCVSHATFDDDLPGVGNLSEFKKLPEMIRPQSAISSFRVRSPGPKPEGLLAQLCKRQTDSSSSDMQACSQDKAKISLGSSIDSVSEGPLLSEGSLSEEEGDQDGQPLLKVAEILKEKEFCPGERNSYEPIKEFQKEAEKFLPLFGHIGGTQSKGPWEELAKGSPHSVINIFTKSYQLYGKGFEDKLDRGTSTSRPLNATATPLSGVSYEDDFVSSPGTGTSTEKKSTLEPHSTLSPQEDHSNRKSAYDPSSVDVTSQHSSGAQSAASSRSSTSSKGKKGKKEKTEWLDSFTGNVQNSLLDEEKAERGSHQGKKSGTSSKLSVKDFEQTLDTDSTLEDLSGHSVSVSSDKGRSQKTPTSPLSPSSQKSLQFDVAGTSSERSKSSVMPPTITGFKPNAPLTDLNPAASRTTTENMAPIPGSKRFSPAGLHHRMAAELSYLNAIEESVRQLSDVERVRGISLAQQESVSLAQIIKVFLEFFS

SEQ ID NO: 833397 - protein, 1252 aa, Homo sapiens [sequence omitted]

SEQ ID NO: 833398 - protein, 1252 aa, Homo sapiens [sequence omitted]

SEQ ID NO: 833399 - protein, 2217 aa, Homo sapiens
VNEEKTESGNWMIGNLSEFKKLPEMIRPQSAISSFRVRSPGPKPEGLLAQLCKRQTDSSSSDMQACSQDKAKISLGSSIDSVSEGPLLSEGSLSEEEGDQDGQPLLKVAEILKEKEFCPGERNSYEPIKEFQKEAEKFLPLFGHIGGTQSKGPWEELAKGSPHSVINIFTKSYQLYGKGFEDKLDRGTSTSRPLNATATPLSGVSYEDDFVSSPGTGTSTEKKSTLEPHSTLSPQEDHSNRKSAYDPSSVDVTSQHSSGAQSAASSRSSTSSKGKKGKKEKTEWLDSFTGNVQNSLLDEEKAERGSHQGKKSGTSSKLSVKDFEQTLDTDSTLEDLSGHSVSVSSDKGRSQKTPTSPLSPSSQKSLQFDVAGTSSERSKSSVMPPTITGFKPNAPLTDLNPAASRTTTENMAPIPGSKRFSPAGLHHRMAAELSYLNAIEESVRQLSDVERVRGISLAQQESVSLAQIIKAQQQRHERDLALLKLKAEQEALESQRQLEETRNKAAQVHAESLQQVVQSQREVTEVLQEATCKIAAQQSETARLTTDAARQICEMAELTRTHISDAVVASGAPLAILYDHQRQHLPDFVKQLRTRTETDRKSPSVSLSQSKEGTLDSKHQKYSASYDSYSESSGYKNHDRRSSSGSSRQESPSVPSCKENEKKLNGEKIESSIDEQVQTAADDSLRSDSVPSLPDEKDSTSIATEYSLKFDESMTEDEIEEQSFRSLLPSESHRRFNMEKRRGHHDDSDEEASPEKTTLSTAKELNMPFSGGQDSFSKFTMEMVRQYMKEEEMRAAHQSSLLRLREKALKEKTKAELAWLEHQKKHLRDKGEDDKMPPLRKKQRGLLLRLQQEKAEIKRLQEANKAARKERQLILKQQEEIEKIRQTTIKLQEKLKSAGESKLDSHSDDDTKDNKATSPGPTDLETRSPSPISISSSETSSIMQKLKKMRSRMDEKFLTKREQKLMQRRQHAEELLEWKRRLDAEEAEIRQMEKQALAAWDKELIKPKTPKKELEDQRTEQKEIASEEESPVPLYSHLNSESSIPEELGSPAVEYVPSESIGQEQPGSPDHSILTEEMICSQELESSTSPSKHSLPKSCTSVSKQESSKGSHRTGGQCHLPIKSHQHCYSWSDESLSMTQSETTSDQSDIEGRIRALKDELRKRKSVVNQLKKEQKKRQKERLKAQEASLIKQLESYDEFIKKTEAELSQDLETSPTAKPQIKTLSSASEKPKIKPLTPLHRSETAKNWKSLTESERSRGSLESIAEHVDASLSGSERSVSERSLSAYAKRVNEWDSRTEDFQTPSPVLRSSRKIREESGDSLENVPALHLLKELNATSRILDMSDGKVGESSKKSEIKEIEYTKLKKSKIEDAFSKEGKSDVLLKLVLEQGDSSEILSKKDLPLDSENVQKDLVGLAIENLHKSEEMLKERQSDQDMNHSPNIQSGKDIHEQKNTKEKDLSWSEHLFAPKEIPYSEDFEVSSFKKEISAELYKDDFEVSSLLSLRKDSQSCRDKPQPMRSSTSGATSFGSNEEISECLSEKSLSIHSNVHSDRLLELKSPTELMKSKERSDVEHEQQVTESPSLASVPTADELFDFHIGDRVLIGNVQPGILRFKGETSFAKGFWAGVELDKPEGNNNGTYDGIAYFECKEKHGIFAPPQKISHIPENFDDYVDINEDEDCYSDERYQCYNQEQNDTEGPKDREKDVSEYFYEKSLPSVNDIEASVNRSRSLKIETDNVQDISGVLEAHVHQQSSVDSQISSKENKDLISDATEKVSIAAEDDTLDNTFSEELEKQQQFTEEEDNLYAEASEKLCTPLLDLLTREKNQLEAQLKSSLNEEKKSKQQLEKISLLTDSLLKVFVKDTVNQLQQIKKTRDEKIQLSNQELLGDDQKKVTPQDLSQNVEEQSPSISGCFLSSELEDEKEEISSPDMCPRPESPVFGASGQEELAKRLAELELSREFLSALGDDQDWFDEDFGLSSSHKIQKNKAEETIVPLMAEPKRVTQQPCETLLAVPHTAEEVEILVHNAAEELWKWKELGHDLHSISIPTKLLGCASKGLDIESTSKRVYKQAVFDLTKEIFEEIFAEDPNLNQPVWMKPCRINSSYFRRVKNPNNLDEIKSFIASEVLKLFSLKKEPNHKTDWQKMMKFGRKKRDRVDHILVQELHEEEAQWVNYDEDELCVKMQLADGIFETLIKDTIDVLNQISEKQGRMLLV

SEQ ID NO: 833400 - protein, 2848 aa, Homo sapiens
LDILKRRQHDVKLEKLKERIRKQWEHSEETNGRGQKLGHIDHPVMVVNVDNSVTAKVRKVATAPPAPAYKGFNPSETKIRTPDGKVWQEAEFQNMSRELYRDLALHFADDISIKEKPAEKSKEKKVVKPVRKVQKVAQLSSTECRTGSSHLISTSSWRDGQKLVKKILGPAPRMEPKEQRTASSDRGGRERTAKSGGHIGRAESDPRLDVLHRHLQRNSERSRSKSRSENNIKKLASSLPDNKQEENTALNKDFLPIEIRGILDDLQLDSTAHTAKQDTVELQNQKSSAPVHAPRSHSPVKRKPDKITANEDPPVISKRRHYDTDEVRQYIVRQQEERKRKQNEEKKAQKEATEQKNKRLQELYRKQKEAFTKVKNVPPSEPSATRRLQETYSKLLLEKTLLEEPSHQHVTQETQAKPGYQPSGESDKENKVQERPPSASSSSDMSLSEPPQPLARKDLMESTWMQPERLSPQVHHSQPQPFAGTAGSLLSHLLSLEHVGILHKDFESILPTRKNHNMASRPLTFTPQPYVTSPAAYTDALLKPSASQYKSKLDRIEALKATAASLSSRIESEAKKLAGASINYGSAWNTEYDVQQAPQEDGPWTKAVTPPVKDDNEDVFSARIQKMLGSCVSHATFDDDLPGVGNLSEFKKLPEMIRPQSAISSFRVRSPGPKPEGLLAQLCKRQTDSSSSDMQACSQDKAKISLGSSIDSVSEGPLLSEGSLSEEEGDQDGQPLLKVAEILKEKEFCPGERNSYEPIKEFQKEAEKFLPLFGHIGGTQSKGPWEELAKGSPHSVINIFTKSYQLYGKGFEDKLDRGTSTSRPLNATATPLSGVSYEDDFVSSPGTGTSTEKKSTLEPHSTLSPQEDHSNRKSAYDPSSVDVTSQHSSGAQSAASSRSSTSSKGKKGKKEKTEWLDSFTGNVQNSLLDEEKAERGSHQGKKSGTSSKLSVKDFEQTLDTDSTLEDLSGHSVSVSSDKGRSQKTPTSPLSPSSQKSLQFDVAGTSSERSKSSVMPPTITGFKPNAPLTDLNPAASRTTTENMAPIPGSKRFSPAGLHHRMAAELSYLNAIEESVRQLSDVERVRGISLAQQESVSLAQIIKAQQQRHERDLALLKLKAEQEALESQRQLEETRNKAAQVHAESLQQVVQSQREVTEVLQEATCKIAAQQSETARLTTDAARQICEMAELTRTHISDAVVASGAPLAILYDHQRQHLPDFVKQLRTRTETDRKSPSVSLSQSKEGTLDSKHQKYSASYDSYSESSGYKNHDRRSSSGSSRQESPSVPSCKENEKKLNGEKIESSIDEQVQTAADDSLRSDSVPSLPDEKDSTSIATEYSLKFDESMTEDEIEEQSFRSLLPSESHRRFNMEKRRGHHDDSDEEASPEKTTLSTAKELNMPFSGGQDSFSKFTMEMVRQYMKEEEMRAAHQSSLLRLREKALKEKTKAELAWLEHQKKHLRDKGEDDKMPPLRKKQRGLLLRLQQEKAEIKRLQEANKAARKERQLILKQQEEIEKIRQTTIKLQEKLKSAGESKLDSHSDDDTKDNKATSPGPTDLETRSPSPISISSSETSSIMQKLKKMRSRMDEKFLTKREQKLMQRRQHAEELLEWKRRLDAEEAEIRQMEKQALAAWDKELIKPKTPKKELEDQRTEQKEIASEEESPVPLYSHLNSESSIPEELGSPAVEYVPSESIGQEQPGSPDHSILTEEMICSQELESSTSPSKHSLPKSCTSVSKQESSKGSHRTGGQCHLPIKSHQHCYSWSDESLSMTQSETTSDQSDIEGRIRALKDELRKRKSVVNQLKKEQKKRQKERLKAQEASLIKQLESYDEFIKKTEAELSQDLETSPTAKPQIKTLSSASEKPKIKPLTPLHRSETAKNWKSLTESERSRGSLESIAEHVDASLSGSERSVSERSLSAYAKRVNEWDSRTEDFQTPSPVLRSSRKIREESGDSLENVPALHLLKELNATSRILDMSDGKVGESSKKSEIKEIEYTKLKKSKIEDAFSKEGKSDVLLKLVLEQGDSSEILSKKDLPLDSENVQKDLVGLAIENLHKSEEMLKERQSDQDMNHSPNIQSGKDIHEQKNTKEKDLSWSEHLFAPKEIPYSEDFEVSSFKKEISAELYKDDFEVSSLLSLRKDSQSCRDKPQPMRSSTSGATSFGSNEEISECLSEKSLSIHSNVHSDRLLELKSPTELMKSKERSDVEHEQQVTESPSLASVPTADELFDFHIGDRVLIGNVQPGILRFKGETSFAKGFWAGVELDKPEGNNNGTYDGIAYFECKEKHGIFAPPQKISHIPENFDDYVDINEDEDCYSDERYQCYNQEQNDTEGPKDREKDVSEYFYEKSLPSVNDIEASVNRSRSLKIETDNVQDISGVLEAHVHQQSSVDSQISSKENKDLISDATEKVSIAAEDDTLDNTFSEELEKQQQFTEEEDNLYAEASEKLCTPLLDLLTREKNQLEAQLKSSLNEEKKSKQQLEKISLLTDSLLKVFVKDTVNQLQQIKKTRDEKIQLSNQELLGDDQKKVTPQDLSQNVEEQSPSISGCFLSSELEDEKEEISSPDMCPRPESPVFGASGQEELAKRLAELELSREFLSALGDDQDWFDEDFGLSSSHKIQKNKAEETIVPLMAEPKRVTQQPCETLLAVPHTAEEVEILVHNAAEELWKWKELGHDLHSISIPTKLLGCASKGLDIESTSKRVYKQAVFDLTKEIFEEIFAEDPNLNQPVWMKPCRINSSYFRRVKNPNNLDEIKSFIASEVLKLFSLKKEPNHKTDWQKMMKFGRKKRDRVDHILVQELHEEEAQWVNYDEDELCVKMQLADGIFETLIKDTIDVLNQISEKQGRMLLV

SEQ ID NO: 833401 - protein, 2879 aa, Homo sapiens
LDILKRRQHDVKLEKLKERIRKQWEHSEETNGRGQKLGHIDHPVMVVNVDNSVTAKVRKVATAPPAPAYKGFNPSETKIRTPDGKVWQEAEFQNMSRELYRDLALHFADDISIKEKPAEKSKEKKVVKPVRKVQKVAQLSSTECRTGSSHLISTSSWRDGQKLVKKILGPAPRMEPKEQRTASSDRGGRERTAKSGGHIGRAESDPRLDVLHRHLQRNSERSRSKSRSENNIKKLASSLPDNKQEENTALNKDFLPIEIRGILDDLQLDSTAHTAKQDTVELQNQKSSAPVHAPRSHSPVKRKPDKITANEDPPVISKRRHYDTDEVRQYIVRQQEERKRKQNEEKKAQKEATEQKNKRLQELYRKQKEAFTKVKNVPPSEPSATRRLQETYSKLLLEKTLLEEPSHQHVTQETQAKPGYQPSGESDKENKVQERPPSASSSSDMSLSEPPQPLARKDLMESTWMQPERLSPQVHHSQPQPFAGTAGSLLSHLLSLEHVGILHKDFESILPTRKNHNMASRPLTFTPQPYVTSPAAYTDALLKPSASQYKSKLDRIEALKATAASLSSRIESEAKKLAGASINYGSAWNTEYDVQQAPQEDGPWTKAVTPPVKDDNEDVFSARIQKMLGSCVSHATFDDDLPGVGNLSEFKKLPEMIRPQSAISSFRVRSPGPKPEGLLAQLCKRQTDSSSSDMQACSQDKAKISLGSSIDSVSEGPLLSEGSLSEEEGDQDGQPLLKVAEILKEKEFCPGERNSYEPIKEFQKEAEKFLPLFGHIGGTQSKGPWEELAKGSPHSVINIFTKSYQLYGKGFEDKLDRGTSTSRPLNATATPLSGVSYEDDFVSSPGTGTSTEKKSTLEPHSTLSPQEDHSNRKSAYDPSSVDVTSQHSSGAQSAASSRSSTSSKGKKGKKEKTEWLDSFTGNVQNSLLDEEKAERGSHQGKKSGTSSKLSVKDFEQTLDTDSTLEDLSGHSVSVSSDKGRSQKTPTSPLSPSSQKSLQFDVAGTSSERSKSSVMPPTITGFKPNAPLTDLNPAASRTTTENMAPIPGSKRFSPAGLHHRMAAELSYLNAIEESVRQLSDVERVRGISLAQQESVSLAQIIKAQQQRHERDLALLKLKAEQEALESQRQLEETRNKAAQVHAESLQQVVQSQREVTEVLQEATCKIAAQQSETARLTTDAARQICEMAELTRTHISDAVVASGAPLAILYDHQRQHLPDFVKQLRTRTETDRKSPSVSLSQSKEGTLDSKHQKYSASYDSYSESSGYKNHDRRSSSGSSRQESPSVPSCKENEKKLNGEKIESSIDEQVQTAADDSLRSDSVPSLPDEKETGSCSVTQAGLELLASRDPPTLASQNAGITDSTSIATEYSLKFDESMTEDEIEEQSFRSLLPSESHRRFNMEKRRGHHDDSDEEASPEKTTLSTAKELNMPFSGGQDSFSKFTMEMVRQYMKEEEMRAAHQSSLLRLREKALKEKTKAELAWLEHQKKHLRDKGEDDKMPPLRKKQRGLLLRLQQEKAEIKRLQEANKAARKERQLILKQQEEIEKIRQTTIKLQEKLKSAGESKLDSHSDDDTKDNKATSPGPTDLETRSPSPISISSSETSSIMQKLKKMRSRMDEKFLTKREQKLMQRRQHAEELLEWKRRLDAEEAEIRQMEKQALAAWDKELIKPKTPKKELEDQRTEQKEIASEEESPVPLYSHLNSESSIPEELGSPAVEYVPSESIGQEQPGSPDHSILTEEMICSQELESSTSPSKHSLPKSCTSVSKQESSKGSHRTGGQCHLPIKSHQHCYSWSDESLSMTQSETTSDQSDIEGRIRALKDELRKRKSVVNQLKKEQKKRQKERLKAQEASLIKQLESYDEFIKKTEAELSQDLETSPTAKPQIKTLSSASEKPKIKPLTPLHRSETAKNWKSLTESERSRGSLESIAEHVDASLSGSERSVSERSLSAYAKRVNEWDSRTEDFQTPSPVLRSSRKIREESGDSLENVPALHLLKELNATSRILDMSDGKVGESSKKSEIKEIEYTKLKKSKIEDAFSKEGKSDVLLKLVLEQGDSSEILSKKDLPLDSENVQKDLVGLAIENLHKSEEMLKERQSDQDMNHSPNIQSGKDIHEQKNTKEKDLSWSEHLFAPKEIPYSEDFEVSSFKKEISAELYKDDFEVSSLLSLRKDSQSCRDKPQPMRSSTSGATSFGSNEEISECLSEKSLSIHSNVHSDRLLELKSPTELMKSKERSDVEHEQQVTESPSLASVPTADELFDFHIGDRVLIGNVQPGILRFKGETSFAKGFWAGVELDKPEGNNNGTYDGIAYFECKEKHGIFAPPQKISHIPENFDDYVDINEDEDCYSDERYQCYNQEQNDTEGPKDREKDVSEYFYEKSLPSVNDIEASVNRSRSLKIETDNVQDISGVLEAHVHQQSSVDSQISSKENKDLISDATEKVSIAAEDDTLDNTFSEELEKQQQFTEEEDNLYAEASEKLCTPLLDLLTREKNQLEAQLKSSLNEEKKSKQQLEKISLLTDSLLKVFVKDTVNQLQQIKKTRDEKIQLSNQELLGDDQKKVTPQDLSQNVEEQSPSISGCFLSSELEDEKEEISSPDMCPRPESPVFGASGQEELAKRLAELELSREFLSALGDDQDWFDEDFGLSSSHKIQKNKAEETIVPLMAEPKRVTQQPCETLLAVPHTAEEVEILVHNAAEELWKWKELGHDLHSISIPTKLLGCASKGLDIESTSKRVYKQAVFDLTKEIFEEIFAEDPNLNQPVWMKPCRINSSYFRRVKNPNNLDEIKSFIASEVLKLFSLKKEPNHKTDWQKMMKFGRKKRDRVDHILVQELHEEEAQWVNYDEDELCVKMQLADGIFETLIKDTIDVLNQISEKQGRMLLV

SEQ ID NO: 833402 - protein, 2857 aa, Homo sapiens
LDILKRRQHDVKLEKLKERIRKQWEHSEETNGRGQKLGHIDHPVMVVNVDNSVTAKVRKVATAPPAPAYKGFNPSETKIRTPDGKVWQEAEFQNMSRELYRDLALHFADDISIKEKPAEKSKEKKVVKPVRKVQKVAQLSSTECRTGSSHLISTSSWRDGQKLVKKILGPAPRMEPKEQRTASSDRGGRERTAKSGGHIGRAESDPRLDVLHRHLQRNSERSRSKSRSENNIKKLASSLPDNKQEENTALNKDFLPIEIRGILDDLQLDSTAHTAKQDTVELQNQKSSAPVHAPRSHSPVKRKPDKITANEDPPVISKRRHYDTDEVRQYIVRQQEERKRKQNEEKKAQKEATEQKNKRLQELYRKQKEAFTKVKNVPPSEPSATRRLQETYSKLLLEKTLLEEPSHQHVTQETQAKPGYQPSGESDKENKVQERPPSASSSSDMSLSEPPQPLARKDLMESTWMQPERLSPQVHHSQPQPFAGTAGSLLSHLLSLEHVGILHKDFESILPTRKNHNMASRPLTFTPQPYVTSPAAYTDALLKPSASQYKSKLDRIEALKATAASLSSRIESEAKKLAGASINYGSAWNTEYDVQQAPQEDGPWTKAVTPPVKDDNEDVFSARIQKMLGSCVSHATFDDDLPGVGNLSEFKKLPEMIRPQSAISSFRVRSPGPKPEGLLAQLCKRQTDSSSSDMQACSQDKAKISLGSSIDSVSEGPLLSEGSLSEEEGDQDGQPLLKVAEILKEKEFCPGERNSYEPIKEFQKEAEKFLPLFGHIGGTQSKGPWEELAKGSPHSVINIFTKSYQLYGKGFEDKLDRGTSTSRPLNATATPLSGVSYEDDFVSSPGTGTSTEKKSTLEPHSTLSPQEDHSNRKSAYDPSSVDVTSQHSSGAQSAASSRSSTSSKGKKGKKEKTEWLDSFTGNVQNSLLDEEKAERGSHQGKKSGTSSKLSVKDFEQTLDTDSTLEDLSGHSVSVSSDKGRSQKTPTSPLSPSSQKSLQFDVAGTSSERSKSSVMPPTITGFKPNAPLTDLNPAASRTTTENMAPIPGSKRFSPAGLHHRMAAELSYLNAIEESVRQLSDVERVRGISLAQQESVSLAQIIKAQQQRHERDLALLKLKAEQEALESQRQLEETRNKAAQVHAESLQQVVQSQREVTEVLQEATCKIAAQQSETARLTTDAARQICEMAELTRTHISDAVVASGAPLAILYDHQRQHLPDFVKQLRTRTETDRKSPSVSLSQSKEGTLDSKHQKYSASYDSYSESSGYKNHDRRSSSGSSRQESPSVPSCKENEKKLNGEKIESSIDEQVQTAADDSLRSDSVPSLPDEKDSTSIATEYSLKFDESMTEDEIEEQSFRSLLPSESHRRFNMEKRRGHHDDSDEEASPEKTTLSTAKELNMPFSGGQDSFSKFTMEMVRQYMKEEEMRAAHQSSLLRLREKALKEKTKAELAWLEHQKKHLRDKGEDDKMPPLRKKQRGLLLRLQQEKAEIKRLQEANKAARKERQLILKQQEEIEKIRQTTIKLQEKLKSAGESKLDSHSDDDTKDNKATSPGPTDLETRSPSPISISSSETSSIMQKLKKMRSRMDEKFLTKREQKLMQRRQHAEELLEWKRRLDAEEAEIRQMEKQALAAWDKELIKPKTPKKELEDQRTEQKEIASEEESPVPLYSHLNSESSIPEELGSPAVEYVPSESIGQEQPGSPDHSILTEEMICSQELESSTSPSKHFPFGFLFEQSLPKSCTSVSKQESSKGSHRTGGQCHLPIKSHQHCYSWSDESLSMTQSETTSDQSDIEGRIRALKDELRKRKSVVNQLKKEQKKRQKERLKAQEASLIKQLESYDEFIKKTEAELSQDLETSPTAKPQIKTLSSASEKPKIKPLTPLHRSETAKNWKSLTESERSRGSLESIAEHVDASLSGSERSVSERSLSAYAKRVNEWDSRTEDFQTPSPVLRSSRKIREESGDSLENVPALHLLKELNATSRILDMSDGKVGESSKKSEIKEIEYTKLKKSKIEDAFSKEGKSDVLLKLVLEQGDSSEILSKKDLPLDSENVQKDLVGLAIENLHKSEEMLKERQSDQDMNHSPNIQSGKDIHEQKNTKEKDLSWSEHLFAPKEIPYSEDFEVSSFKKEISAELYKDDFEVSSLLSLRKDSQSCRDKPQPMRSSTSGATSFGSNEEISECLSEKSLSIHSNVHSDRLLELKSPTELMKSKERSDVEHEQQVTESPSLASVPTADELFDFHIGDRVLIGNVQPGILRFKGETSFAKGFWAGVELDKPEGNNNGTYDGIAYFECKEKHGIFAPPQKISHIPENFDDYVDINEDEDCYSDERYQCYNQEQNDTEGPKDREKDVSEYFYEKSLPSVNDIEASVNRSRSLKIETDNVQDISGVLEAHVHQQSSVDSQISSKENKDLISDATEKVSIAAEDDTLDNTFSEELEKQQQFTEEEDNLYAEASEKLCTPLLDLLTREKNQLEAQLKSSLNEEKKSKQQLEKISLLTDSLLKVFVKDTVNQLQQIKKTRDEKIQLSNQELLGDDQKKVTPQDLSQNVEEQSPSISGCFLSSELEDEKEEISSPDMCPRPESPVFGASGQEELAKRLAELELSREFLSALGDDQDWFDEDFGLSSSHKIQKNKAEETIVPLMAEPKRVTQQPCETLLAVPHTAEEVEILVHNAAEELWKWKELGHDLHSISIPTKLLGCASKGLDIESTSKRVYKQAVFDLTKEIFEEIFAEDPNLNQPVWMKPCRINSSYFRRVKNPNNLDEIKSFIASEVLKLFSLKKEPNHKTDWQKMMKFGRKKRDRVDHILVQELHEEEAQWVNYDEDELCVKMQLADGIFETLIKDTIDVLNQISEKQGRMLLV

SEQ ID NO: 833403 - protein, 2287 aa, Homo sapiens
GALCRGALCRGEAKKLAGASINYGSAWNTEYDVQQAPQEDGPWTKAVTPPVKDDNEDVFSARIQKMLGSCVSHATFDDDLPGVGNLSEFKKLPEMIRPQSAISSFRVRSPGPKPEGLLAQLCKRQTDSSSSDMQACSQDKAKISLGSSIDSVSEGPLLSEGSLSEEEGDQDGQPLLKVAEILKEKEFCPGERNSYEPIKEFQKEAEKFLPLFGHIGGTQSKGPWEELAKGSPHSVINIFTKSYQLYGKGFEDKLDRGTSTSRPLNATATPLSGVSYEDDFVSSPGTGTSTEKKSTLEPHSTLSPQEDHSNRKSAYDPSSVDVTSQHSSGAQSAASSRSSTSSKGKKGKKEKTEWLDSFTGNVQNSLLDEEKAERGSHQGKKSGTSSKLSVKDFEQTLDTDSTLEDLSGHSVSVSSDKGRSQKTPTSPLSPSSQKSLQFDVAGTSSERSKSSVMPPTITGFKPNAPLTDLNPAASRTTTENMAPIPGSKRFSPAGLHHRMAAELSYLNAIEESVRQLSDVERVRGISLAQQESVSLAQIIKAQQQRHERDLALLKLKAEQEALESQRQLEETRNKAAQVHAESLQQVVQSQREVTEVLQEATCKIAAQQSETARLTTDAARQICEMAELTRTHISDAVVASGAPLAILYDHQRQHLPDFVKQLRTRTETDRKSPSVSLSQSKEGTLDSKHQKYSASYDSYSESSGYKNHDRRSSSGSSRQESPSVPSCKENEKKLNGEKIESSIDEQVQTAADDSLRSDSVPSLPDEKDSTSIATEYSLKFDESMTEDEIEEQSFRSLLPSESHRRFNMEKRRGHHDDSDEEASPEKTTLSTAKELNMPFSGGQDSFSKFTMEMVRQYMKEEEMRAAHQSSLLRLREKALKEKTKAELAWLEHQKKHLRDKGEDDKMPPLRKKQRGLLLRLQQEKAEIKRLQEANKAARKERQLILKQQEEIEKIRQTTIKLQEKLKSAGESKLDSHSDDDTKDNKATSPGPTDLETRSPSPISISSSETSSIMQKLKKMRSRMDEKFLTKREQKLMQRRQHAEELLEWKRRLDAEEAEIRQMEKQALAAWDKELIKPKTPKKELEDQRTEQKEIASEEESPVPLYSHLNSESSIPEELGSPAVEYVPSESIGQEQPGSPDHSILTEEMICSQELESSTSPSKHSLPKSCTSVSKQESSKGSHRTGGQCHLPIKSHQHCYSWSDESLSMTQSETTSDQSDIEGRIRALKDELRKRKSVVNQLKKEQKKRQKERLKAQEASLIKQLESYDEFIKKTEAELSQDLETSPTAKPQIKTLSSASEKPKIKPLTPLHRSETAKNWKSLTESERSRGSLESIAEHVDASLSGSERSVSERSLSAYAKRVNEWDSRTEDFQTPSPVLRSSRKIREESGDSLENVPALHLLKELNATSRILDMSDGKVGESSKKSEIKEIEYTKLKKSKIEDAFSKEGKSDVLLKLVLEQGDSSEILSKKDLPLDSENVQKDLVGLAIENLHKSEEMLKERQSDQDMNHSPNIQSGKDIHEQKNTKEKDLSWSEHLFAPKEIPYSEDFEVSSFKKEISAELYKDDFEVSSLLSLRKDSQSCRDKPQPMRSSTSGATSFGSNEEISECLSEKSLSIHSNVHSDRLLELKSPTELMKSKERSDVEHEQQVTESPSLASVPTADELFDFHIGDRVLIGNVQPGILRFKGETSFAKGFWAGVELDKPEGNNNGTYDGIAYFECKEKHGIFAPPQKISHIPENFDDYVDINEDEDCYSDERYQCYNQEQNDTEGPKDREKDVSEYFYEKSLPSVNDIEASVNRSRSLKIETDNVQDISGVLEAHVHQQSSVDSQISSKENKDLISDATEKVSIAAEDDTLDNTFSEELEKQQQFTEEEDNLYAEASEKLCTPLLDLLTREKNQLEAQLKSSLNEEKKSKQQLEKISLLTDSLLKVFVKDTVNQLQQIKKTRDEKIQLSNQELLGDDQKKVTPQDLSQNVEEQSPSISGCFLSSELEDEKEEISSPDMCPRPESPVFGASGQEELAKRLAELELSREFLSALGDDQDWFDEDFGLSSSHKIQKNKAEETIVPLMAEPKRVTQQPCETLLAVPHTAEEVEILVHNAAEELWKWKELGHDLHSISIPTKLLGCASKGLDIESTSKRVYKQAVFDLTKEIFEEIFAEDPNLNQPVWMKPCRINSSYFRRVKNPNNLDEIKSFIASEVLKLFSLKKEPNHKTDWQKMMKFGRKKRDRVDHILVQELHEEEAQWVNYDEDELCVKMQLADGIFETLIKDTIDVLNQISEKQGRMLLV

SEQ ID NO: 833404 - protein, 2822 aa, Homo sapiens
LDILKRRQHDVKLEKLKERIRKQWEHSEETNGRGQKLGHIDHPVMVVNVDNSVTAKVRKVATAPPAPAYKGFNPSETKIRTPDGKVWQEAEFQNMSRELYRDLALHFADDISIKEKPAEKSKEKKVVKPVRKVQKVAQLSSTECRTGSSHLISTSSWRDGQKLVKKILGPAPRMEPKEQRTASSDRGGRERTAKSGGHIGRAESDPRLDVLHRHLQRNSERSRSKSRSENNIKKLASSLPDNKQEENTALNKDFLPIEIRGILDDLQLDSTAHTAKQDTVELQNQKSSAPVHAPRSHSPVKRKPDKITANEDPPVISKRRHYDTDEVRQYIVRQQEERKRKQNEEKKAQKEATEQKNKRLQELYRKQKEAFTKVKNVPPSEPSATRRLQETYSKLLLEKTLLEEPSHQHVTQETQAKPGYQPSGESDKENKVQERPPSASSSSDMSLSEPPQPLARKDLMESTWMQPERLSPQVHHSQPQPFAGTAGSLLSHLLSLEHVGILHKDFESILPTRKNHNMASRPLTFTPQPYVTSPAAYTDALLKPSASQYKSKLDRIEALKATAASLSSRIESEAKKLAGASINYGSAWNTEYDVQQAPQEDGPWTKAVTPPVKDDNEDVFSARIQKMLGSCVSHATFDDDLPGVGNLSEFKKLPEMIRPQSAISSFRVRSPGPKPEGLLAQLCKRQTDSSSSDMQACSQDKAKISLGSSIDSVSEGPLLSEGSLSEEEGDQDGQPLLKVAEILKEKEFCPGERNSYEPIKEFQKEAEKFLPLFGHIGGTQSKGPWEELAKGSPHSVINIFTKSYQLYGKGFEDKLDRGTSTSRPLNATATPLSGVSYEDDFVSSPGTGTSTEKKSTLEPHIHQEPSLLHRLVHLLLLKERKEKRKRQNGWIHSLEMFRTHFLMRKKQNVAPIKERNLGTSSKLSVKDFEQTLDTDSTLEDLSGHSVSVSSDKGRSQKTPTSPLSPSSQKSLQFDVAGTSSERSKSSVMPPTITGFKPNAPLTDLNPAASRTTTENMAPIPGSKRFSPAGLHHRMAAELSYLNAIEESVRQLSDVERVRGISLAQQESVSLAQIIKAQQQRHERDLALLKLKAEQEALESQRQLEETRNKAAQVHAESLQQVVQSQREVTEVLQEATCKIAAQQSETARLTTDAARQICEMAELTRTHISDAVVASGAPLAILYDHQRQHLPDFVKQLRTRTETDRKSPSVSLSQSKEGTLDSKHQKYSASYDSYSESSGYKNHDRRSSSGSSRQESPSVPSCKENEKKLNGEKIESSIDEQVQTAADDSLRSDSVPSLPDEKDSTSIATEYSLKFDESMTEDEIEEQSFRSLLPSESHRRFNMEKRRGHHDDSDEEASPEKTTLSTAKELNMPFSGGQDSFSKFTMEMVRQYMKEEEMRAAHQSSLLRLREKALKEKTKAELAWLEHQKKHLRDKGEDDKMPPLRKKQRGLLLRLQQEKAEIKRLQEANKAARKERQLILKQQEEIEKIRQTTIKLQEKLKSAGESKLDSHSDDDTKDNKATSPGPTDLETRSPSPISISSSETSSIMQKLKKMRSRMDEKFLTKREQKLMQRRQHAEELLEWKRRLDAEEAEIRQMEKQALAAWDKELIKPKTPKKELEDQRTEQKEIASEEESPVPLYSHLNSESSIPEELGSPAVEYVPSESIGQEQPGSPDHSILTEEMICSQELESSTSPSKHSLPKSCTSVSKQESSKGSHRTGGQCHLPIKSHQHCYSWSDESLSMTQSETTSDQSDIEGRIRALKDELRKRKSVVNQLKKEQKKRQKERLKAQEASLIKQLESYDEFIKKTEAELSQDLETSPTAKPQIKTLSSASEKPKIKPLTPLHRSETAKNWKSLTESERSRGSLESIAEHVDASLSGSERSVSERSLSAYAKRVNEWDSRTEDFQTPSPVLRSSRKIREESGDSLENVPALHLLKELNATSRILDMSDGKVGESSKKSEIKEIEYTKLKKSKIEDAFSKEGKSDVLLKLVLEQGDSSEILSKKDLPLDSENVQKDLVGLAIENLHKSEEMLKERQSDQDMNHSPNIQSGKDIHEQKNTKEKDLSWSEHLFAPKEIPYSEDFEVSSFKKEISAELYKDDFEVSSLLSLRKDSQSCRDKPQPMRSSTSGATSFGSNEEISECLSEKSLSIHSNVHSDRLLELKSPTELMKSKERSDVEHEQQVTESPSLASVPTADELFDFHIGDRVLIGNVQPGILRFKGETSFAKGFWAGVELDKPEGNNNGTYDGIAYFECKEKHGIFAPPQKISHIPENFDDYVDINEDEDCYSDERYQCYNQEQNDTEGPKDREKDVSEYFYEKSLPSVNDIEASVNRSRSLKIETDNVQDISGVLEAHVHQQSSVDSQISSKENKDLISDATEKVSIAAEDDTLDNTFSEELEKQQQFTEEEDNLYAEASEKLCTPLLDLLTREKNQLEAQLKSSLNEEKKSKQQLEKISLLTDSLLKVFVKDTVNQLQQIKKTRDEKIQLSNQELLGDDQKKVTPQDLSQNVEEQSPSISGCFLSSELEDEKEEISSPDMCPRPESPVFGASGQEELAKRLAELELSREFLSALGDDQDWFDEDFGLSSSHKIQKNKAEETIVPLMAEPKRVTQQPCETLLAVPHTAEEVEILVHNAAEELWKWKELGHDLHSISIPTKLLGCASKGLDIESTSKRVYKQAVFDLTKEIFEEIFAEDPNLNQPVWMKPCRINSSYFRRVKNPNNLDEIKSFIASEVLKLFSLKKEPNHKTDWQKMMKFGRKKRDRVDHILVQELHEEEAQWVNYDEDELCVKMQLADGIFETLIKDTIDVLNQISEKQGRMLLV

SEQ ID NO: 833405 - protein, 1291 aa, Homo sapiens
FTSHHWASLSVCFPNLHPKFQLYIYNQLVRFLTKREQKLMQRRQHAEELLEWKRRLDAEEAEIRQMEKQALAAWDKELIKPKTPKKELEDQRTEQKEIASEEESPVPLYSHLNSESSIPEELGSPAVEYVPSESIGQEQPGSPDHSILTEEMICSQELESSTSPSKHSLPKSCTSVSKQESSKGSHRTGGQCHLPIKSHQHCYSWSDESLSMTQSETTSDQSDIEGRIRALKDELRKRKSVVNQLKKEQKKRQKERLKAQEASLIKQLESYDEFIKKTEAELSQDLETSPTAKPQIKTLSSASEKPKIKPLTPLHRSETAKNWKSLTESERSRGSLESIAEHVDASLSGSERSVSERSLSAYAKRVNEWDSRTEDFQTPSPVLRSSRKIREESGDSLENVPALHLLKELNATSRILDMSDGKVGESSKKSEIKEIEYTKLKKSKIEDAFSKEGKSDVLLKLVLEQGDSSEILSKKDLPLDSENVQKDLVGLAIENLHKSEEMLKERQSDQDMNHSPNIQSGKDIHEQKNTKEKDLSWSEHLFAPKEIPYSEDFEVSSFKKEISAELYKDDFEVSSLLSLRKDSQSCRDKPQPMRSSTSGATSFGSNEEISECLSEKSLSIHSNVHSDRLLELKSPTELMKSKERSDVEHEQQVTESPSLASVPTADELFDFHIGDRVLIGNVQPGILRFKGETSFAKGFWAGVELDKPEGNNNGTYDGIAYFECKEKHGIFAPPQKISHIPENFDDYVDINEDEDCYSDERYQCYNQEQNDTEGPKDREKDVSEYFYEKSLPSVNDIEASVNRSRSLKIETDNVQDISGVLEAHVHQQSSVDSQISSKENKDLISDATEKVSIAAEDDTLDNTFSEELEKQQQFTEEEDNLYAEASEKLCTPLLDLLTREKNQLEAQLKSSLNEEKKSKQQLEKISLLTDSLLKVFVKDTVNQLQQIKKTRDEKIQLSNQELLGDDQKKVTPQDLSQNVEEQSPSISGCFLSSELEDEKEEISSPDMCPRPESPVFGASGQEELAKRLAELELSREFLSALGDDQDWFDEDFGLSSSHKIQKNKAEETIVPLMAEPKRVTQQPCETLLAVPHTAEEVEILVHNAAEELWKWKELGHDLHSISIPTKLLGCASKGLDIESTSKRVYKQAVFDLTKEIFEEIFAEDPNLNQPVWMKPCRINSSYFRRVKNPNNLDEIKSFIASEVLKLFSLKKEPNHKTDWQKMMKFGRKKRDRVDHILVQELHEEEAQWVNYDEDELCVKMQLADGIFETLIKDTIDVLNQISEKQGRMLLV

SEQ ID NO: 833406 - protein, 874 aa, Homo sapiens [sequence omitted]

SEQ ID NO: 833407 - protein, 219 aa, Homo sapiens [sequence omitted]

SEQ ID NO: 833408 - protein, 1203 aa, Homo sapiens
VNEEKTESGNWMIGNLSEFKKLPEMIRPQSAISSFRVRSPGPKPEGLLAQLCKRQTDSSSSDMQACSQDKAKISLGSSIDSVSEGPLLSEGSLSEEEGDQDGQPLLKVAEILKEKEFCPGERNSYEPIKEFQKEAEKFLPLFGHIGGTQSKGPWEELAKGSPHSVINIFTKSYQLYGKGFEDKLDRGTSTSRPLNATATPLSGVSYEDDFVSSPGTGTSTEKKSTLEPHSTLSPQEDHSNRKSAYDPSSVDVTSQHSSGAQSAASSRSSTSSKGKKGKKEKTEWLDSFTGNVQNSLLDEEKAERGSHQGKKSGTSSKLSVKDFEQTLDTDSTLEDLSGHSVSVSSDKGRSQKTPTSPLSPSSQKSLQFDVAGTSSERSKSSVMPPTITGFKPNAPLTDLNPAASRTTTENMAPIPGSKRFSPAGLHHRMAAELSYLNAIEESVRQLSDVERVRGISLAQQESVSLAQIIKAQQQRHERDLALLKLKAEQEALESQRQLEETRNKAAQVHAESLQQVVQSQREVTEVLQEATCKIAAQQSETARLTTDAARQICEMAELTRTHISDAVVASGAPLAILYDHQRQHLPDFVKQLRTRTETDRKSPSVSLSQSKEGTLDSKHQKYSASYDSYSESSGYKNHDRRSSSGSSRQESPSVPSCKENEKKLNGEKIESSIDEQVQTAADDSLRSDSVPSLPDEKDSTSIATEYSLKFDESMTEDEIEEQSFRSLLPSESHRRFNMEKRRGHHDDSDEEASPEKTTLSTAKELNMPFSGGQDSFSKFTMEMVRQYMKEEEMRAAHQSSLLRLREKALKEKTKAELAWLEHQKKHLRDKGEDDKMPPLRKKQRGLLLRLQQEKAEIKRLQEANKAARKERQLILKQQEEIEKIRQTTIKLQEKLKSAGESKLDSHSDDDTKDNKATSPGPTDLETRSPSPISISSSETSSIMQKLKKMRSRMDEKFLTKREQKLMQRRQHAEELLEWKRRLDAEEAEIRQMEKQALAAWDKELIKPKTPKKELEDQRTEQKEIASEEESPVPLYSHLNSESSIPEELGSPAVEYVPSESIGQEQPGSPDHSILTEEMICSQELESSTSPSKHSLPKSCTSVSKQESSKGSHRTGGQCHLPIKSHQHCYSWSDESLSMTQSETTSDQSDIEGRIRALKDELRKRKSVVNQLKKEQKKRQKERLKAQEASLIKQLEVRHRKKGV

SEQ ID NO: 833409 - protein, 416 aa, Homo sapiens
LDILKRRQHDVKLEKLKERIRKQWEHSEETNGRGQKLGHIDHPVMVVNVDNSVTAKVRKVATAPPAPAYKGFNPSETKIRTPDGKVWQEAEFQNMSRELYRDLALHFADDISIKEKPAEKSKEKKVVKPVRKVQKVAQLSSTECRTGSSHLISTSSWRDGQKLVKKILGPAPRMEPKEQRTASSDRGGRERTAKSGGHIGRAESDPRLDVLHRHLQRNSERSRSKSRSENNIKKLASSLPDNKQEENTALNKDFLPIEIRGILDDLQLDSTAHTAKQDTVELQNQKSSAPVHAPRSHSPVKRKPDKITANEDPPVISKRRHYDTDEVRQYIVRQQEETEEKTVEEEHPEGEEVYGEEADTKEVVEQVQRLELLVVTGLESSVIFRCGVAHGLYFCTQLLSPLYFCLWCEKPDSQCD

SEQ ID NO: 833410 - protein, 72 aa, Homo sapiens
LDILKRRQHDVKLEKLKERIRKQWEHSEETNGRGQKLGHIDHPVMVVNVDNSVTAKVRKVATAPPAPAYKGL

SEQ ID NO: 833411 - protein, 1252 aa, Homo sapiens [sequence omitted]

SEQ ID NO: 833412 - protein, 2217 aa, Homo sapiens; identical to SEQ ID NO: 833399

SEQ ID NO: 833413 - protein, 2802 aa, Homo sapiens
LDILKRRQHDVKLEKLKERIRKQWEHSEETNGRGQKLGHIDHPVMVVNVDNSVTAKVRKVATAPPAPAYKGFNPSETKIRTPDGKVWQEAEFQNMSRELYRDLALHFADDISIKEKPAEKSKEKKVVKPVRKVQKVAQLSSTECRTGSSHLISTSSWRDGQKLVKKILGPAPRMEPKEQRTASSDRGGRERTAKSGGHIGRAESDPRLDVLHRHLQRNSERSRSKSRSENNIKKLASSLPDNKQEENTALNKDFLPIEIRGILDDLQLDSTAHTAKQDTVELQNQKSSAPVHAPRSHSPVKRKPDKITANEDPPVISKRRHYDTDEVRQYIVRQQEERKRKQNEEKKAQKEATEQKNKRLQELYRKQKEAFTKVKNVPPSEPSATRRLQETYSKLLLEKTLLEEPSHQHVTQETQAKPGYQPSGESDKENKVQERPPSASSSSDMSLSEPPQPLARKDLMESTWMQPERLSPQVHHSQPQPFAGTAGSLLSHLLSLEHVGILHKDFESILPTRKNHNMASRPLTFTPQPYVTSPAAYTDALLKPSASQYKSKLDRIEALKATAASLSSRIESEAKKLAGASINYGSAWNTEYDVQQAPQEDGPWTKAVTPPVKDDNEDVFSARIQKMLGSCVSHATFDDDLPGVGNLSEFKKLPEMIRPQSAISSFRVRSPGPKPEGLLAQLCKRQTDSSSSDMQACSQDKAKISLGSSIDSVSEGPLLSEGSLSEEEGDQDGQPLLKVAEILKEKEFCPGERNSYEPIKEFQKEAEKFLPLFGHIGGTQSKGPWEELAKGSPHSVINIFTKSYQLYGKGFEDKLDRGTSTSRPLNATATPLSGVSYEDDFVSSPGTGTSTEKKSTLEPHSTLSPQEDHSNRKSAYDPSSVDVTSQHSSGAQSAASSRSSTSSKGKKGKKEKTEWLDSFTGNVQNSLLDEEKAERGSHQGKKSGTSSKLSVKDFEQTLDTDSTLEDLSGHSVSVSSDKGRSQKTPTSPLSPSSQKSLQFDVAGTSSERSKSSVMPPTITGFKPNAPLTDLNPAASRTTTENMAPIPGSKRFSPAGLHHRMAAELSYLNAIEESVRQLSDVERVRGISLAQQESVSLAQIIKAQQQRHERDLALLKLKAEQEALESQRQLEETRNKAAQVHAESLQQVVQSQREVTEVLQEATCKIAAQQSETARLTTDAARQICEEKSICFTLSDKEGTLDSKHQKYSASYDSYSESSGYKNHDRRSSSGSSRQESPSVPSCKENEKKLNGEKIESSIDEQVQTAADDSLRSDSVPSLPDEKDSTSIATEYSLKFDESMTEDEIEEQSFRSLLPSESHRRFNMEKRRGHHDDSDEEASPEKTTLSTAKELNMPFSGGQDSFSKFTMEMVRQYMKEEEMRAAHQSSLLRLREKALKEKTKAELAWLEHQKKHLRDKGEDDKMPPLRKKQRGLLLRLQQEKAEIKRLQEANKAARKERQLILKQQEEIEKIRQTTIKLQEKLKSAGESKLDSHSDDDTKDNKATSPGPTDLETRSPSPISISSSETSSIMQKLKKMRSRMDEKFLTKREQKLMQRRQHAEELLEWKRRLDAEEAEIRQMEKQALAAWDKELIKPKTPKKELEDQRTEQKEIASEEESPVPLYSHLNSESSIPEELGSPAVEYVPSESIGQEQPGSPDHSILTEEMICSQELESSTSPSKHSLPKSCTSVSKQESSKGSHRTGGQCHLPIKSHQHCYSWSDESLSMTQSETTSDQSDIEGRIRALKDELRKRKSVVNQLKKEQKKRQKERLKAQEASLIKQLESYDEFIKKTEAELSQDLETSPTAKPQIKTLSSASEKPKIKPLTPLHRSETAKNWKSLTESERSRGSLESIAEHVDASLSGSERSVSERSLSAYAKRVNEWDSRTEDFQTPSPVLRSSRKIREESGDSLENVPALHLLKELNATSRILDMSDGKVGESSKKSEIKEIEYTKLKKSKIEDAFSKEGKSDVLLKLVLEQGDSSEILSKKDLPLDSENVQKDLVGLAIENLHKSEEMLKERQSDQDMNHSPNIQSGKDIHEQKNTKEKDLSWSEHLFAPKEIPYSEDFEVSSFKKEISAELYKDDFEVSSLLSLRKDSQSCRDKPQPMRSSTSGATSFGSNEEISECLSEKSLSIHSNVHSDRLLELKSPTELMKSKERSDVEHEQQVTESPSLASVPTADELFDFHIGDRVLIGNVQPGILRFKGETSFAKGFWAGVELDKPEGNNNGTYDGIAYFECKEKHGIFAPPQKISHIPENFDDYVDINEDEDCYSDERYQCYNQEQNDTEGPKDREKDVSEYFYEKSLPSVNDIEASVNRSRSLKIETDNVQDISGVLEAHVHQQSSVDSQISSKENKDLISDATEKVSIAAEDDTLDNTFSEELEKQQQFTEEEDNLYAEASEKLCTPLLDLLTREKNQLEAQLKSSLNEEKKSKQQLEKISLLTDSLLKVFVKDTVNQLQQIKKTRDEKIQLSNQELLGDDQKKVTPQDLSQNVEEQSPSISGCFLSSELEDEKEEISSPDMCPRPESPVFGASGQEELAKRLAELELSREFLSALGDDQDWFDEDFGLSSSHKIQKNKAEETIVPLMAEPKRVTQQPCETLLAVPHTAEEVEILVHNAAEELWKWKELGHDLHSISIPTKLLGCASKGLDIESTSKRVYKQAVFDLTKEIFEEIFAEDPNLNQPVWMKPCRINSSYFRRVKNPNNLDEIKSFIASEVLKLFSLKKEPNHKTDWQKMMKFGRKKRDRVDHILVQELHEEEAQWVNYDEDELCVKMQLADGIFETLIKDTIDVLNQISEKQGRMLLV

SEQ ID NO: 833414 - protein, 2479 aa, Homo sapiens
LGDLEDPVRRKQLCFQASIRSSYSKLLLEKTLLEEPSHQHVTQETQAKPGYQPSGESDKENKVQERPPSASSSSDMSLSEPPQPLARKDLMESTWMQPERLSPQVHHSQPQPFAGTAGSLLSHLLSLEHVGILHKDFESILPTRKNHNMASRPLTFTPQPYVTSPAAYTDALLKPSASQYKSKLDRIEALKATAASLSSRIESEAKKLAGASINYGSAWNTEYDVQQAPQEDGPWTKAVTPPVKDDNEDVFSARIQKMLGSCVSHATFDDDLPGVGNLSEFKKLPEMIRPQSAISSFRVRSPGPKPEGLLAQLCKRQTDSSSSDMQACSQDKAKISLGSSIDSVSEGPLLSEGSLSEEEGDQDGQPLLKVAEILKEKEFCPGERNSYEPIKEFQKEAEKFLPLFGHIGGTQSKGPWEELAKGSPHSVINIFTKSYQLYGKGFEDKLDRGTSTSRPLNATATPLSGVSYEDDFVSSPGTGTSTEKKSTLEPHSTLSPQEDHSNRKSAYDPSSVDVTSQHSSGAQSAASSRSSTSSKGKKGKKEKTEWLDSFTGNVQNSLLDEEKAERGSHQGKKSGTSSKLSVKDFEQTLDTDSTLEDLSGHSVSVSSDKGRSQKTPTSPLSPSSQKSLQFDVAGTSSERSKSSVMPPTITGFKPNAPLTDLNPAASRTTTENMAPIPGSKRFSPAGLHHRMAAELSYLNAIEESVRQLSDVERVRGISLAQQESVSLAQIIKAQQQRHERDLALLKLKAEQEALESQRQLEETRNKAAQVHAESLQQVVQSQREVTEVLQEATCKIAAQQSETARLTTDAARQICEMAELTRTHISDAVVASGAPLAILYDHQRQHLPDFVKQLRTRTETDRKSPSVSLSQSKEGTLDSKHQKYSASYDSYSESSGYKNHDRRSSSGSSRQESPSVPSCKENEKKLNGEKIESSIDEQVQTAADDSLRSDSVPSLPDEKDSTSIATEYSLKFDESMTEDEIEEQSFRSLLPSESHRRFNMEKRRGHHDDSDEEASPEKTTLSTAKELNMPFSGGQDSFSKFTMEMVRQYMKEEEMRAAHQSSLLRLREKALKEKTKAELAWLEHQKKHLRDKGEDDKMPPLRKKQRGLLLRLQQEKAEIKRLQEANKAARKERQLILKQQEEIEKIRQTTIKLQEKLKSAGESKLDSHSDDDTKDNKATSPGPTDLETRSPSPISISSSETSSIMQKLKKMRSRMDEKFLTKREQKLMQRRQHAEELLEWKRRLDAEEAEIRQMEKQALAAWDKELIKPKTPKKELEDQRTEQKEIASEEESPVPLYSHLNSESSIPEELGSPAVEYVPSESIGQEQPGSPDHSILTEEMICSQELESSTSPSKHSLPKSCTSVSKQESSKGSHRTGGQCHLPIKSHQHCYSWSDESLSMTQSETTSDQSDIEGRIRALKDELRKRKSVVNQLKKEQKKRQKERLKAQEASLIKQLESYDEFIKKTEAELSQDLETSPTAKPQIKTLSSASEKPKIKPLTPLHRSETAKNWKSLTESERSRGSLESIAEHVDASLSGSERSVSERSLSAYAKRVNEWDSRTEDFQTPSPVLRSSRKIREESGDSLENVPALHLLKELNATSRILDMSDGKVGESSKKSEIKEIEYTKLKKSKIEDAFSKEGKSDVLLKLVLEQGDSSEILSKKDLPLDSENVQKDLVGLAIENLHKSEEMLKERQSDQDMNHSPNIQSGKDIHEQKNTKEKDLSWSEHLFAPKEIPYSEDFEVSSFKKEISAELYKDDFEVSSLLSLRKDSQSCRDKPQPMRSSTSGATSFGSNEEISECLSEKSLSIHSNVHSDRLLELKSPTELMKSKERSDVEHEQQVTESPSLASVPTADELFDFHIGDRVLIGNVQPGILRFKGETSFAKGFWAGVELDKPEGNNNGTYDGIAYFECKEKHGIFAPPQKISHIPENFDDYVDINEDEDCYSDERYQCYNQEQNDTEGPKDREKDVSEYFYEKSLPSVNDIEASVNRSRSLKIETDNVQDISGVLEAHVHQQSSVDSQISSKENKDLISDATEKVSIAAEDDTLDNTFSEELEKQQQFTEEEDNLYAEASEKLCTPLLDLLTREKNQLEAQLKSSLNEEKKSKQQLEKISLLTDSLLKVFVKDTVNQLQQIKKTRDEKIQLSNQELLGDDQKKVTPQDLSQNVEEQSPSISGCFLSSELEDEKEEISSPDMCPRPESPVFGASGQEELAKRLAELELSREFLSALGDDQDWFDEDFGLSSSHKIQKNKAEETIVPLMAEPKRVTQQPCETLLAVPHTAEEVEILVHNAAEELWKWKELGHDLHSISIPTKLLGCASKGLDIESTSKRVYKQAVFDLTKEIFEEIFAEDPNLNQPVWMKPCRINSSYFRRVKNPNNLDEIKSFIASEVLKLFSLKKEPNHKTDWQKMMKFGRKKRDRVDHILVQELHEEEAQWVNYDEDELCVKMQLADGIFETLIKDTIDVLNQISEKQGRMLLV

SEQ ID NO: 833415 - protein, 2217 aa, Homo sapiens; identical to SEQ ID NO: 833399

SEQ ID NO: 833416 - protein, 1449 aa, Homo sapiens
YGLSSTRRSKFTMEMVRQYMKEEEMRAAHQSSLLRLREKALKEKTKAELAWLEHQKKHLRDKGEDDKMPPLRKKQRGLLLRLQQEKAEIKRLQEANKAARKERQLILKQQEEIEKIRQTTIKLQEKLKSAGESKLDSHSDDDTKDNKATSPGPTDLETRSPSPISISSSETSSIMQKLKKMRSRMDEKFLTKREQKLMQRRQHAEELLEWKRRLDAEEAEIRQMEKQALAAWDKELIKPKTPKKELEDQRTEQKEIASEEESPVPLYSHLNSESSIPEELGSPAVEYVPSESIGQEQPGSPDHSILTEEMICSQELESSTSPSKHSLPKSCTSVSKQESSKGSHRTGGQCHLPIKSHQHCYSWSDESLSMTQSETTSDQSDIEGRIRALKDELRKRKSVVNQLKKEQKKRQKERLKAQEASLIKQLESYDEFIKKTEAELSQDLETSPTAKPQIKTLSSASEKPKIKPLTPLHRSETAKNWKSLTESERSRGSLESIAEHVDASLSGSERSVSERSLSAYAKRVNEWDSRTEDFQTPSPVLRSSRKIREESGDSLENVPALHLLKELNATSRILDMSDGKVGESSKKSEIKEIEYTKLKKSKIEDAFSKEGKSDVLLKLVLEQGDSSEILSKKDLPLDSENVQKDLVGLAIENLHKSEEMLKERQSDQDMNHSPNIQSGKDIHEQKNTKEKDLSWSEHLFAPKEIPYSEDFEVSSFKKEISAELYKDDFEVSSLLSLRKDSQSCRDKPQPMRSSTSGATSFGSNEEISECLSEKSLSIHSNVHSDRLLELKSPTELMKSKERSDVEHEQQVTESPSLASVPTADELFDFHIGDRVLIGNVQPGILRFKGETSFAKGFWAGVELDKPEGNNNGTYDGIAYFECKEKHGIFAPPQKISHIPENFDDYVDINEDEDCYSDERYQCYNQEQNDTEGPKDREKDVSEYFYEKSLPSVNDIEASVNRSRSLKIETDNVQDISGVLEAHVHQQSSVDSQISSKENKDLISDATEKVSIAAEDDTLDNTFSEELEKQQQFTEEEDNLYAEASEKLCTPLLDLLTREKNQLEAQLKSSLNEEKKSKQQLEKISLLTDSLLKVFVKDTVNQLQQIKKTRDEKIQLSNQELLGDDQKKVTPQDLSQNVEEQSPSISGCFLSSELEDEKEEISSPDMCPRPESPVFGASGQEELAKRLAELELSREFLSALGDDQDWFDEDFGLSSSHKIQKNKAEETIVPLMAEPKRVTQQPCETLLAVPHTAEEVEILVHNAAEELWKWKELGHDLHSISIPTKLLGCASKGLDIESTSKRVYKQAVFDLTKEIFEEIFAEDPNLNQPVWMKPCRINSSYFRRVKNPNNLDEIKSFIASEVLKLFSLKKEPNHKTDWQKMMKFGRKKRDRVDHILVQELHEEEAQWVNYDEDELCVKMQLADGIFETLIKDTIDVLNQISEKQGRMLLV

SEQ ID NO: 833417 - protein, 1247 aa, Homo sapiens
MTLLFVGDKNAVSNNMLKTMFISVIFPLTKIVSFFSCFHLLCLEIASEEESPVPLYSHLNSESSIPEELGSPAVEYVPSESIGQEQPGSPDHSILTEEMICSQELESSTSPSKHFPFGFLFEQSLPKSCTSVSKQESSKGSHRTGGQCHLPIKSHQHCYSWSDESLSMTQSETTSDQSDIEGRIRALKDELRKRKSVVNQLKKEQKKRQKERLKAQEASLIKQLESYDEFIKKTEAELSQDLETSPTAKPQIKTLSSASEKPKIKPLTPLHRSETAKNWKSLTESERSRGSLESIAEHVDASLSGSERSVSERSLSAYAKRVNEWDSRTEDFQTPSPVLRSSRKIREESGDSLENVPALHLLKELNATSRILDMSDGKVGESSKKSEIKEIEYTKLKKSKIEDAFSKEGKSDVLLKLVLEQGDSSEILSKKDLPLDSENVQKDLVGLAIENLHKSEEMLKERQSDQDMNHSPNIQSGKDIHEQKNTKEKDLSWSEHLFAPKEIPYSEDFEVSSFKKEISAELYKDDFEVSSLLSLRKDSQSCRDKPQPMRSSTSGATSFGSNEEISECLSEKSLSIHSNVHSDRLLELKSPTELMKSKERSDVEHEQQVTESPSLASVPTADELFDFHIGDRVLIGNVQPGILRFKGETSFAKGFWAGVELDKPEGNNNGTYDGIAYFECKEKHGIFAPPQKISHIPENFDDYVDINEDEDCYSDERYQCYNQEQNDTEGPKDREKDVSEYFYEKSLPSVNDIEASVNRSRSLKIETDNVQDISGVLEAHVHQQSSVDSQISSKENKDLISDATEKVSIAAEDDTLDNTFSEELEKQQQFTEEEDNLYAEASEKLCTPLLDLLTREKNQLEAQLKSSLNEEKKSKQQLEKISLLTDSLLKVFVKDTVNQLQQIKKTRDEKIQLSNQELLGDDQKKVTPQDLSQNVEEQSPSISGCFLSSELEDEKEEISSPDMCPRPESPVFGASGQEELAKRLAELELSREFLSALGDDQDWFDEDFGLSSSHKIQKNKAEETIVPLMAEPKRVTQQPCETLLAVPHTAEEVEILVHNAAEELWKWKELGHDLHSISIPTKLLGCASKGLDIESTSKRVYKQAVFDLTKEIFEEIFAEDPNLNQPVWMKPCRINSSYFRRVKNPNNLDEIKSFIASEVLKLFSLKKEPNHKTDWQKMMKFGRKKRDRVDHILVQELHEEEAQWVNYDEDELCVKMQLADGIFETLIKDTIDVLNQISEKQGRMLLV

SEQ ID NO: 833418 - protein, 106 aa, Homo sapiens [sequence omitted]

SEQ ID NO: 833419 - protein, 444 aa, Homo sapiens
LDILKRRQHDVKLEKLKERIRKQWEHSEETNGRGQKLGHIDHPVMVVNVDNSVTAKVRKVATAPPAPAYKGFNPSETKIRTPDGKVWQEAEFQNMSRELYRDLALHFADDISIKEKPAEKSKEKKVVKPVRKVQKVAQLSSTECRTGSSHLISTSSWRDGQKLVKKILGPAPRMEPKEQRTASSDRGGRERTAKSGGHIGRAESDPRLDVLHRHLQRNSERSRSKSRSENNIKKLASSLPDNKQEENTALNKDFLPIEIRGILDDLQLDSTAHTAKQDTVELQNQKSSAPVHAPRSHSPVKRKPDKITANEDPPVISKRRHYDTDEVRQYIVRQQEERKRKQNEEKKAQKEATEQKNKRLQELYRKQKEAFTKVKNVPPSEPSATRRLQETYSKLLLEKTLLEEPSHQHVTQETQVIVVTYTKESHSWLGNAYLLYYLKITHHS

SEQ ID NO: 833420 - protein, 625 aa, Homo sapiens
EGSEARHCWGEEGSEERGAGRGSSGGREEGARRREEGLAPRRNVNQSPEPRESPPICSDLTWLLAAALAAAEQINRRTRSTAQRGRQRGPKPGPAPDARRSPRAALSWAARGSGPLSVRAPRATMSFPQLGYQYIRPLYPSERPGAAGGSGGSAGARGGLGAGASELNASGSLSNVLSSVYGAPYAAAAAAAAAQGYGAFLPYAAELPIFPQLGAQYELKDSPGVQHPAAAAAFPHPHPAFYPYGQYQFGDPSRPKNATRESTSTLKAWLNEHRKNPYPTKGEKIMLAIITKMTLTQVSTWFANARRRLKKENKMTWAPRSRTDEEGNAYGSEREEEDEEEDEEDGKRELELEEEELGGEEEDTGGEGLADDDEDEEIDLENLDGAATEPELSLAGAARRDGDLGLGPISDSKNSDSEDSSEGLEDRPLPVLSLAPAPPPVAVASPSLPSPPVSLDPCAPAPAPASALQKPKIWSLAETATSPDNPRRSPPGAGGSPPGAAVAPSALQLSPAAAAAAAHRLVSAPLGKFPAWTNRPFPGPPPGPRPHPLSLLGSAPPHLLGLPGAAGHPAAAAAFARPAEPEGGTDRCSALEVEKKLLKTAFQPVPRRPQNHLDAALVLSALSSS

SEQ ID NO: 833421 - protein, 273 aa, Homo sapiens
EGSEARHCWGEEGSEERGAGRGSSGGREEGARRREEGLAPRRNVNQSPEPRESPPICSDLTWLLAAALAAAEQINRRTRSTAQRGRQRGPKPGPAPDARRSPRAALSWAARGSGPLSVRAPRATMSFPQLGYQYIRPLYPSERPGAAGGSGGSAGARGGLGAGASELNASGSLSNVLSSVYGAPYAAAAAAAAAQGYGAFLPYAAELPIFPQLIAVVPWKWRKSYSRQLSSPCPGGPRTIWTPPWSYRLSPHPSSLKKTKKQKKLFLIVVIIV

SEQ ID NO: 833422 - protein, 349 aa, Homo sapiens
EGSEARHCWGEEGSEERGAGRGSSGGREEGARRREEGLAPRRNVNQSPEPRESPPICSDLTWLLAAALAAAEQINRRTRSTAQRGRQRGPKPGPAPDARRSPRAALSWAARGSGPLSVRAPRATMSFPQLGYQYIRPLYPSERPGAAGGSGGSAGARGGLGAGASELNASGSLSNVLSSVYGAPYAAAAAAAAAQGYGAFLPYAAELPIFPQLGAQYELKDSPGVQHPAAAAAFPHPHPAFYPYGQYQFGDPSRPKNATRESTSTLKAWLNEHRKNPYPTKGEKIMLAIITKSLLWHPAFAVRFVCPVDFGGWSFSENKRVCLCVCVYIQRNVHMCEPNCTRKYLFLAK

SEQ ID NO: 833423 - protein, 159 aa, Homo sapiens
PWASYDTTRMGANVGTILTRRPWDRTLTGPIVKNETYIKKSGTLKAWLNEHRKNPYPTKGEKIMLAIITKMTLTQVSTWFANARRRLKKENKMTWAPRSRSEDEEEEENIDLEKNDEDEPQKPEDKGDPEGPEAGGAEQKAASGCERLQGPPTPAGKET

SEQ ID NO: 833424 - protein, 625 aa, Homo sapiens; identical to SEQ ID NO: 833420

SEQ ID NO: 833425 - protein, 220 aa, Homo sapiens
EGSEARHCWGEEGSEERGAGRGSSGGREEGARRREEGLAPRRNVNQSPEPRESPPICSDLTWLLAAALAAAEQINRRTRSTAQRGRQRGPKPGPAPDARRSPRAALSWAARGSGPLSVRAPRATMSFPQLGYQYIRPLYPSERPGAAPPSLGQRSPKAEQIAVVPWKWRKSYSRQLSSPCPGGPRTIWTPPWSYRLSPHPSSLKKTKKQKKLFLIVVIIV

SEQ ID NO: 833426 - protein, 113 aa, Homo sapiens
MIKGVTLGFRYKMRSVYAHFPINVVIQENGSLVEIRNFLGEKYIRRVRMRPGVACSVSQAQKDELILEGNDIELVSNSAALIQQATTVKNKDIRKFLDGIYVSEKGTVQQADE

SEQ ID NO: 833427 - protein, 136 aa, Homo sapiens
MKTILSNQTVDIPENVDITLKGRTVIVKGPRGTLRRDFNHINVELSLLGKKKKRLRVDKWWGNRKELATVRMRPGVACSVSQAQKDELILEGNDIELVSNSAALIQQATTVKNKDIRKFLDGIYVSEKGTVQQADE

SEQ ID NO: 833428 - protein, 91 aa, Homo sapiens
FFAASTARMKTILSNQTVDIPENVDITLKGRTVIVKGPRGTLRRDFNHINVELSLLGKKKKRLRVDKWWGNRKELATVRTICSHVQNMIKG

SEQ ID NO: 833429 - protein, 114 aa, Homo sapiens
FFAASTARMKTILSNQTVDIPENVDITLKGRTVIVKGPRGTLRRDFNHINVELSLLGKKKKRLRVDKWWGNRKELATVRGLCMLTSPSTLLSRRMGLLLKSEISWVKNTSAGFG

SEQ ID NO: 833430 - protein, 192 aa, Homo sapiens [sequence omitted]

SEQ ID NO: 833431 - protein, 194 aa, Homo sapiens
MKTILSNQTVDIPENVDITLKGRTVIVKGPRGTLRRDFNHINVELSLLGKKKKRLRVDKWWGNRKELATVRTICSHVQNMIKGVTLGFRYKMRSVYAHFPINVVIQENGSLVEIRNFLGEKYIRRVRMRPGVACSVSQAQKDELILEGNDIELVSNSAALIQQATTVVNPKATVNPQATVNPQATVNPQATVNP

SEQ ID NO: 833432 - protein, 192 aa, Homo sapiens [sequence omitted]

SEQ ID NO: 833433 - protein, 113 aa, Homo sapiens; identical to SEQ ID NO: 833426

SEQ ID NO: 833434 - protein, 222 aa, Homo sapiens
  misc_feature (117)..(117): Xaa can be any naturally occurring amino acid
FFAASTARMKTILSNQTVDIPENVDITLKGRTVIVKGPRGTLRRDFNHINVELSLLGKKKKRLRVDKWWGNRKELATVLPIGRCMVRRDHASTGVYTAARRYAVTKAMMSLVVNGVXLSPSDNAVGIVAGRRHVVLLAMITPEEFRGREESSTYRQGMRPGVACSVSQAQKDELILEGNDIELVSNSAALIQQATTVKNKDIRKFLDGIYVSEKGTVQQADE

SEQ ID NO: 833435 - protein, 184 aa, Homo sapiens
DTTGKEMLGDPVRLVLMIEPIRTVLVAENVNEKPPRLGRKPRLDTFEQNPPVRHVLEHFDGKWYEGGIASYTTKGVTLGFRYKMRSVYAHFPINVVIQENGSLVEIRNFLGEKYIRRVRMRPGVACSVSQAQKDELILEGNDIELVSNSAALIQQATTVKNKDIRKFLDGIYVSEKGTVQQADE

SEQ ID NO: 833436 - protein, 172 aa, Homo sapiens
MKTILSNQTVDIPENVDITLKGRTVIVKGPRGTLRRDFNHINVELSLLGKKKKRLRVDKWWGNRKELATVRTICSHVQNMIKGVTLGFRYKMRSVYAHFPINVVIQENGSLVEIRNFLGEKYIRRVRMRPGVACSVSQAQKDESKPLNLKQAICHFLQGLIRRPAANLVVVV

SEQ ID NO: 833437 - protein, 69 aa, Homo sapiens
QTPFWTLEMEGTLQVHASQSWSLRSPEPAPASGKMTPKWQPQSGGRVLENNRNRSICLPGVDKTVYVKP

SEQ ID NO: 833438 - protein, 340 aa, Homo sapiens
MADSVKTFLQDLARGIKDSIWGICTISKLDARIQQKREEQRRRRASSVLAQRRAQSIERKQESEPRIVSRIFQCCAWNGGVFWFSLLLFYRVFIPVLQSVTARIIGDPSLHGDVWSWLEFFLTSIFSALWVLPLFVLSKVVNAIWFQDIADLAFEVSGRKPHPFPSVSKIIADMLFNLLLQALFLIQGMFVSLFPIHLVGQLVSLLHMSLLYSLYCFEYRWFNKGIEMHQRLSNIERNWPYYFGFGLPLAFLTAMQSSYIISGCLFSILFPLFIISANEAKTPGKAYLFQLRLFSLVVFLSNRLFHKTVYLQSALSSSTSAEKFPSPHPSPAKLKATAGH

SEQ ID NO: 833439 - protein, 340 aa, Homo sapiens; identical to SEQ ID NO: 833438

SEQ ID NO: 833440 - protein, 340 aa, Homo sapiens; identical to SEQ ID NO: 833438

SEQ ID NO: 833441 - protein, 340 aa, Homo sapiens; identical to SEQ ID NO: 833438

SEQ ID NO: 833442 - protein, 340 aa, Homo sapiens; identical to SEQ ID NO: 833438

SEQ ID NO: 833443 - protein, 341 aa, Homo sapiens
EDGVMSDGEDDLRVARKGLSERGICTISKLDARIQQKREEQRRRRASSVLAQRRAQSIERKQESEPRIVSRIFQCCAWNGGVFWFSLLLFYRVFIPVLQSVTARIIGDPSLHGDVWSWLEFFLTSIFSALWVLPLFVLSKVVNAIWFQDIADLAFEVSGRKPHPFPSVSKIIADMLFNLLLQALFLIQGMFVSLFPIHLVGQLVSLLHMSLLYSLYCFEYRWFNKGIEMHQRLSNIERNWPYYFGFGLPLAFLTAMQSSYIISGCLFSILFPLFIISANEAKTPGKAYLFQLRLFSLVVFLSNRLFHKTVYLQSALSSSTSAEKFPSPHPSPAKLKATAGH

SEQ ID NO: 833444 - protein, 340 aa, Homo sapiens; identical to SEQ ID NO: 833438

SEQ ID NO: 833445 - protein, 251 aa, Homo sapiens
SEREGRCERPVTARIIGDPSLHGDVWSWLEFFLTSIFSALWVLPLFVLSKVVNAIWFQDIADLAFEVSGRKPHPFPSVSKIIADMLFNLLLQALFLIQGMFVSLFPIHLVGQLVSLLHMSLLYSLYCFEYRWFNKGIEMHQRLSNIERNWPYYFGFGLPLAFLTAMQSSYIISGCLFSILFPLFIISANEAKTPGKAYLFQLRLFSLVVFLSNRLFHKTVYLQSALSSSTSAEKFPSPHPSPAKLKATAGH

SEQ ID NO: 833446 - protein, 211 aa, Homo sapiens
MVRGWVSAYKVVNAIWFQDIADLAFEVSGRKPHPFPSVSKIIADMLFNLLLQALFLIQGMFVSLFPIHLVGQLVSLLHMSLLYSLYCFEYRWFNKGIEMHQRLSNIERNWPYYFGFGLPLAFLTAMQSSYIISGCLFSILFPLFIISANEAKTPGKAYLFQLRLFSLVVFLSNRLFHKTVYLQSALSSSTSAEKFPSPHPSPAKLKATAGH

SEQ ID NO: 833447 - protein, 197 aa, Homo sapiens
MADSVKTFLQDLARGIKDSIWGICTISKLDARIQQKREEQRRRRASSVLAQRRAQSIERKQESEPRIVSRIFQCCAWNGGVFWFSLLLFYRVFIPVLQSVTARIIGDPSLHGDVWSWLEFFLTSIFSALWVLPLFVLSKVVNAIWFQDIADLAFEVSGRKPHPFPSVSKIIADMLFNLLLQALFLIQELKCTSGCLT

SEQ ID NO: 833448 - protein, 263 aa, Homo sapiens
AGLSSKPIDSVGQCYSHLSVEYLLSLESGVALLCWRPLVSASHTMAADAHPSVYSEFCCNVRHQEGMLRRSEVHTAPIGRSSLEGTHIKFAIAPVSLITACPLEALFLMQGMFVSLFPIHLVGQLVSLLHMSLLYSLYCFEYRWFNKGIEMHQRLSNIERNWPYYFGFGLPLAFLTAMQSSYIISGCLFSILFPLFIISANEAKTPGKAYLFQLRLFSLVVFLSNRLFHKTVYLQSALSSSTSAEKFPSPHPSPAKLKATAGH

SEQ ID NO: 833449 - protein, 189 aa, Homo sapiens
RHEGLVSSFIPFPRVRRWSVDIFYTLWSDRVCDLIQGMFVSLFPIHLVGQLVSLLHMSLLYSLYCFEYRWFNKGIEMHQRLSNIERNWPYYFGFGLPLAFLTAMQSSYIISGCLFSILFPLFIISANEAKTPGKAYLFQLRLFSLVVFLSNRLFHKTVYLQSALSSSTSAEKFPSPHPSPAKLKATAGH

SEQ ID NO: 833450 - protein, 163 aa, Homo sapiens [sequence omitted]

SEQ ID NO: 833451 - protein, 340 aa, Homo sapiens; identical to SEQ ID NO: 833438

SEQ ID NO: 833452 - protein, 340 aa, Homo sapiens; identical to SEQ ID NO: 833438

SEQ ID NO: 833453 - protein, 340 aa, Homo sapiens; identical to SEQ ID NO: 833438

SEQ ID NO: 833454 - protein, 340 aa, Homo sapiens; identical to SEQ ID NO: 833438

SEQ ID NO: 833455 - protein, 326 aa, Homo sapiens
MADSVKTFLQDLARLDARIQQKREEQRRRRASSVLAQRRAQSIERKQESEPRIVSRIFQCCAWNGGVFWFSLLLFYRVFIPVLQSVTARIIGDPSLHGDVWSWLEFFLTSIFSALWVLPLFVLSKVVNAIWFQDIADLAFEVSGRKPHPFPSVSKIIADMLFNLLLQALFLIQGMFVSLFPIHLVGQLVSLLHMSLLYSLYCFEYRWFNKGIEMHQRLSNIERNWPYYFGFGLPLAFLTAMQSSYIISGCLFSILFPLFIISANEAKTPGKAYLFQLRLFSLVVFLSNRLFHKTVYLQSALSSSTSAEKFPSPHPSPAKLKATAGH

SEQ ID NO: 833456 - protein, 383 aa, Homo sapiens
MADSVKTFLQDLARGIKDSIWGICTISKLDARIQQKREEQRRRRASSVLAQRRAQSIERKQERRILALSPSCHLRLPWCNLSLLQPLPPRSKQFFCLSEPAGWKYSEPRIVSRIFQCCAWNGGVFWFSLLLFYRVFIPVLQSVTARIIGDPSLHGDVWSWLEFFLTSIFSALWVLPLFVLSKVVNAIWFQDIADLAFEVSGRKPHPFPSVSKIIADMLFNLLLQALFLIQGMFVSLFPIHLVGQLVSLLHMSLLYSLYCFEYRWFNKGIEMHQRLSNIERNWPYYFGFGLPLAFLTAMQSSYIISGCLFSILFPLFIISANEAKTPGKAYLFQLRLFSLVVFLSNRLFHKTVYLQSALSSSTSAEKFPSPHPSPAKLKATAGH

SEQ ID NO: 833457 - protein, 321 aa, Homo sapiens
MADSVKTFLQDLARGIKDSIWGICTISKLDARIQQKREEQRRRRASSVLAQRRAQSIERKQESEPRIVSRIFQCCAWNGGVFWFSLLLFYRVFIPVLQSVTARIIGDPSLHGDVWSWLEFFLTSIFSALWVLPLFVLSKVVNAIWFQDIADLAFEVSGRKPHPFPSVSGMFVSLFPIHLVGQLVSLLHMSLLYSLYCFEYRWFNKGIEMHQRLSNIERNWPYYFGFGLPLAFLTAMQSSYIISGCLFSILFPLFIISANEAKTPGKAYLFQLRLFSLVVFLSNRLFHKTVYLQSALSSSTSAEKFPSPHPSPAKLKATAGH

SEQ ID NO: 833458 - protein, 340 aa, Homo sapiens; identical to SEQ ID NO: 833438

SEQ ID NO: 833459 - protein, 171 aa, Homo sapiens
MVLGFRGFGIKIFHICSSGMFVSLFPIHLVGQLVSLLHMSLLYSLYCFEYRWFNKGIEMHQRLSNIERNWPYYFGFGLPLAFLTAMQSSYIISGCLFSILFPLFIISANEAKTPGKAYLFQLRLFSLVVFLSNRLFHKTVYLQSALSSSTSAEKFPSPHPSPAKLKATAGH

SEQ ID NO: 833460 - protein, 148 aa, Homo sapiens
MADSVKTFLQDLARGIKDSIWGICTISKLDARIQQKREEQRRRRASSVLAQRRAQSIERKQESEPRIVSRIFQCCAWNGGVFWFSLLLFYRVFIPVLQSVTARIIGDPSLHGDVWSWLEFFLCPSSVLAMTAQGPLPPSTCPPYRLYI

SEQ ID NO: 833461 - protein, 129 aa, Homo sapiens
IAASCLFPSRHLLTQCTQPWRTARSTSSPGHPTVPLHSSPSHPKNGFSSRAALASHSVPFTQFTGEDQGPRRSRHSARNARNANSTQPEVGLTQALATPRRPGGRQPLSRASATGDHLGAAAEWQLNRF

SEQ ID NO: 833462 - protein, 180 aa, Homo sapiens
MASTSYDYCRVPMEDGDKRCKLLLGIGILVLLIIVILGVPLIIFTIKANSEACRDGLRAVMECRNVTHLLQQELTEAQKGFQDVEAQAATCNHTVMALMASLDAEKAQGQKKVEELEGEITTLNHKLQDASAEVERLRRENQVLSVRIADKKYYPSSQDSSSAAAPQLLIVLLGLSALLQ

SEQ ID NO: 833463 - protein, 196 aa, Homo sapiens
GRLLLLNSRPRRREIWMASTSYDYCRVPMEDGDKRCKLLLGIGILVLLIIVILGVPLIIFTIKANSEACRDGLRAVMECRNVTHLLQQELTEAQKGFQDVEAQAATCNHTVMALMASLDAEKAQGQKKVEELEGEITTLNHKLQDASAEVERLRRENQVLSVRIADKKYYPSSQDSSSAAAPQLLIVLLGLSALLQ

SEQ ID NO: 833464 - protein, 241 aa, Homo sapiens
  misc_feature (65)..(65): Xaa can be any naturally occurring amino acid
  misc_feature (109)..(109): Xaa can be any naturally occurring amino acid
  misc_feature (119)..(119): Xaa can be any naturally occurring amino acid
SRPDSFQLKGRSRNGIYFVWLVDSHVPHEQTGAVEVGCRAIVLGIGIAGAPESVCDLRGRVRLLXCHLYSQYNGPKRGEDLAGSGACGDTFDREGVRTRLDYSLESAHXIADEPRADGXQQGVYCKLNDGSAPKVSARARCKSRRALMEWTLIVRSRGMHEERARDGTIDRRVERSLGGEITTLNHKLQDASAEVERLRRENQVLSVRIADKKYYPSSQDSSSAAAPQLLIVLLGLSALLQ

SEQ ID NO: 833465 - protein, 119 aa, Homo sapiens
PVWFWGGSSDVGDLGVVPESLSVALTLPMCSDGAVVLSDEQGVGGLGGPERPVRSDREITTLNHKLQDASAEVERLRRENQVLSVRIADKKYYPSSQDSSSAAAPQLLIVLLGLSALLQ

SEQ ID NO: 833466 - protein, 180 aa, Homo sapiens; identical to SEQ ID NO: 833462

SEQ ID NO: 833467 - protein, 180 aa, Homo sapiens; identical to SEQ ID NO: 833462

SEQ ID NO: 833468 - protein, 180 aa, Homo sapiens; identical to SEQ ID NO: 833462

SEQ ID NO: 833469 - protein, 180 aa, Homo sapiens; identical to SEQ ID NO: 833462

SEQ ID NO: 833470 - protein, 119 aa, Homo sapiens [sequence omitted]

SEQ ID NO: 833471 - protein, 198 aa, Homo sapiens
MVKVTFNSALAQKEAKKDEPKSGEEALIIPPDAVAVDCKDPDDVVPVGQRRAWCWCMCFGLAFMLAGVILGGAYLYKYFALQPDDVYYCGIKYIKDDVILNEPSADAPAALYQTIEENIKIFEEEEVEFISVPVPEFADSDPANIVHDFNKKLTAYLDLNLDKCYVIPLEHFHCYATQKPTGSYLLTSRLEPICLSPI

SEQ ID NO: 833472 - protein, 198 aa, Homo sapiens; identical to SEQ ID NO: 833471

SEQ ID NO: 833473 - protein, 198 aa, Homo sapiens; identical to SEQ ID NO: 833471

SEQ ID NO: 833474 - protein, 198 aa, Homo sapiens; identical to SEQ ID NO: 833471

SEQ ID NO: 833475 - protein, 142 aa, Homo sapiens
MCFGLAFMLAGVILGGAYLYKYFALQPDDVYYCGIKYIKDDVILNEPSADAPAALYQTIEENIKIFEEEEVEFISVPVPEFADSDPANIVHDFNKKLTAYLDLNLDKCYVIPLEHFHCYATQKPTGSYLLTSRLEPICLSPI

SEQ ID NO: 833476 - protein, 142 aa, Homo sapiens; identical to SEQ ID NO: 833475

SEQ ID NO: 833477 - protein, 198 aa, Homo sapiens; identical to SEQ ID NO: 833471

SEQ ID NO: 833478 - protein, 134 aa, Homo sapiens
RSPVFIKEGITCQIFALQPDDVYYCGIKYIKDDVILNEPSADAPAALYQTIEENIKIFEEEEVEFISVPVPEFADSDPANIVHDFNKKLTAYLDLNLDKCYVIPLEHFHCYATQKPTGSYLLTSRLEPICLSPI

SEQ ID NO: 833479 - protein, 196 aa, Homo sapiens
QRWCSQDYRLIHHKYVSTDGGLLCFISSHMKDLLKEEEDKPLPPIKPRKQENSSQENENKTKVSGTKRIKHEIPKYFALQPDDVYYCGIKYIKDDVILNEPSADAPAALYQTIEENIKIFEEEEVEFISVPVPEFADSDPANIVHDFNKKLTAYLDLNLDKCYVIPLEHFHCYATQKPTGSYLLTSRLEPICLSPI

SEQ ID NO: 833480 - protein, 137 aa, Homo sapiens
  misc_feature (12)..(12): Xaa can be any naturally occurring amino acid
VCCVVGQFVTAXPPPREILAGPDDVYYCGIKYIKDDVILNEPSADAPAALYQTIEENIKIFEEEEVEFISVPVPEFADSDPANIVHDFNKKLTAYLDLNLDKCYVIPLEHFHCYATQKPTGSYLLTSRLEPICLSPI

SEQ ID NO: 833481 - protein, 198 aa, Homo sapiens; identical to SEQ ID NO: 833471

SEQ ID NO: 833482 - protein, 198 aa, Homo sapiens; identical to SEQ ID NO: 833471

SEQ ID NO: 833483 - protein, 198 aa, Homo sapiens; identical to SEQ ID NO: 833471

SEQ ID NO: 833484 - protein, 180 aa, Homo sapiens
MVKVTFNSALAQKEAKKDEPKSGEEALIIPPDAVAVDCKDPDDVVPVGQRRAWCWCMCFGLAFMLAGVILGGAYLYKYFALQPDDVYYCGIKYIKDDVILNEPSADAPAALYQTIEENIADSDPANIVHDFNKKLTAYLDLNLDKCYVIPLEHFHCYATQKPTGSYLLTSRLEPICLSPI

SEQ ID NO: 833485 - protein, 158 aa, Homo sapiens
LSHEAFLETRSVSVCRSSPSYVLKSSLGAYARVAYGDTCVMDDSQLCDIAPILARMPRAWISKPMTRTNPEWSILEVDRTESLIKWSVDRGTLEFASYVRTAADIVHDFNKKLTAYLDLNLDKCYVIPLEHFHCYATQKPTGSYLLTSRLEPICLSPI

SEQ ID NO: 833486 - protein, 186 aa, Homo sapiens
MVKVTFNSALAQKEAKKDEPKSGEEALIIPPDAVAVDCKDPDDVVPVGQRRAWCWCMCFGLAFMLAGVILGGAYLYKYFALQPDDVYYCGIKYIKDDVILNEPSADAPAALYQTIEENIKIFEEEEVEFISVPVPEFADSDPANIVHDFNKKLTAYLDLNLDKCYVIPLEHFHCYATQNTVEGVPS

SEQ ID NO: 833487 - protein, 183 aa, Homo sapiens
MVKVTFNSALAQKEAKKDEPKSGEEALIIPPDAVAVDCKDPDDVVPVGQRRAWCWCMCFGLAFMLAGVILGGAYLYKYFALQPDDVYYCGIKYIKDDVILNEPSADAPAALYQTIEENIKIFEEEEVEFISVPVPEFADSDPANIVHDFNKKLPGFDSHDDYYELDSGSIEVQLQCNVSELTR

SEQ ID NO: 833488 - protein, 194 aa, Homo sapiens
MVKVTFNSALAQKEAKKDEPKSGEEALIIPPDAVAVDCKDPDDVVPVGQRRAWCWCMCFGLAFMLAGVILGGAYLYKYFALQPDDVYYCGIKYIKDDVILNEPSADAPAALYQTIEENIKIFEEEEKEDRRWKKKEKKEEKKEEERRAEGKKKKRRKEEEERTRGRREKKKKEGKKKEKEEEERIRKNKKDEEE

SEQ ID NO: 833489 - protein, 198 aa, Homo sapiens; identical to SEQ ID NO: 833471

SEQ ID NO: 833490 - protein, 198 aa, Homo sapiens; identical to SEQ ID NO: 833471

SEQ ID NO: 833491 - protein, 198 aa, Homo sapiens; identical to SEQ ID NO: 833471

SEQ ID NO: 833492 - protein, 198 aa, Homo sapiens; identical to SEQ ID NO: 833471

SEQ ID NO: 833493 - protein, 142 aa, Homo sapiens; identical to SEQ ID NO: 833475

SEQ ID NO: 833494 - protein, 198 aa, Homo sapiens; identical to SEQ ID NO: 833471

SEQ ID NO: 833495 - protein, 170 aa, Homo sapiens
MRWAAAISARKDEHMVEACPVGHWTQGHRPPMCAGHVKGQWLDSCIHIVQRLDVPDDVYYCGIKYIKDDVILNEPSADAPAALYQTIEENIKIFEEEEVEFISVPVPEFADSDPANIVHDFNKKLTAYLDLNLDKCYVIPLEHFHCYATQKPTGSYLLTSRLEPICLSPI

SEQ ID NO: 833496 - protein, 135 aa, Homo sapiens
TERDECTNTTLYGQLSSYAPDDVYYCGIKYIKDDVILNEPSADAPAALYQTIEENIKIFEEEEVEFISVPVPEFADSDPANIVHDFNKKLTAYLDLNLDKCYVIPLEHFHCYATQKPTGSYLLTSRLEPICLSPI

SEQ ID NO: 833497 - protein, 198 aa, Homo sapiens; identical to SEQ ID NO: 833471

SEQ ID NO: 833498 - protein, 198 aa, Homo sapiens; identical to SEQ ID NO: 833471

SEQ ID NO: 833499 - protein, 103 aa, Homo sapiens
AGPSFIVEASDAPAALYQTIEENIKIFEEEEVEFISVPVPEFADSDPANIVHDFNKKLTAYLDLNLDKCYVIPLEHFHCYATQKPTGSYLLTSRLEPICLSPI

SEQ ID NO: 833500 - protein, 99 aa, Homo sapiens
ARFGSTYTKMERYREDEHGPCARMTRKFVKRSIFFPEFADSDPANIVHDFNKKLTAYLDLNLDKCYVIPLEHFHCYATQKPTGSYLLTSRLEPICLSPI

SEQ ID NO: 833501 - protein, 198 aa, Homo sapiens; identical to SEQ ID NO: 833471

SEQ ID NO: 833502 - protein, 131 aa, Homo sapiens
MVKVTFNSALAQKEAKKDEPKSGEEALIIPPDAVAVDCKDPDDVVPVGQRRAWCWCMCFGLAFMLAGVILGGAYLYKYFALQAGTYLPQSYLIHEHMVITDRIENIDHLGFFIYRLCHDKETYKLQRRGNY

SEQ ID NO: 833503 - protein, 151 aa, Homo sapiens
MVKVTFNSALAQKEAKKDEPKSGEEALIIPPDAVAVDCKDPDDVVPVGQRRAWCWCMCFGLAFMLAGVILGGAYLYKYFALQPDDVYYCGIKYIKDDVILNEPSADAPAALYQTIEENNVLEGEEVIYRVPSRVRRGPPPVWLSRAIAVRL

SEQ ID NO: 833504 - protein, 519 aa, Homo sapiens
PPPRRSRCRPAGWALRREDPGGAAVPRAMAQSGGEARPGPKTAVQIRVAIQEAEDVDELEDEEEGAETRGAGDPARYLSPGWGSASEEEPSRGHSGTTASGGENEREDLEQEWKPPDEELIKKLVDQIEFYFSDENLEKDAFLLKHVRRNKLGYVSVKLLTSFKKVKHLTRDWRTTAHALKYSVVLELNEDHRKVRRTTPVPLFPNENLPSKMLLVYDLYLSPKLWALATPQKNGRVQEKVMEHLLKLFGTFGVISSVRILKPGRELPPDIRRISSRYSQVGTQECAIVEFEEVEAAIKAHEFMITESQGKENMKAVLIGMKPPKKKPAKDKNHDEEPTASIHLNKSLNKRVEELQYMGDESSANSSSDPESNPTSPMAGRRHAATNKLSPSGHQNLFLSPNASPCTSPWSSPLAQRKGVSRKSPLAEEGRLNCSTSPEIFRKCMDYSSDSSVTPSGSPWVRRRRQAEMGTQEKSPGTSPLLSRKMQTADGLPVGVLRLPRGPDNTRGFHGHERSRACV

SEQ ID NO: 833505 - protein, 491 aa, Homo sapiens
MAQSGGEARPGPKTAVQIRVAIQEAEDVDELEDEEEGAETRGAGDPARYLSPGWGSASEEEPSRGHSGTTASGGENEREDLEQEWKPPDEELIKKLVDQIEFYFSDENLEKDAFLLKHVRRNKLGYVSVKLLTSFKKVKHLTRDWRTTAHALKYSVVLELNEDHRKVRRTTPVPLFPNENLPSKMLLVYDLYLSPKLWALATPQKNGRVQEKVMEHLLKLFGTFGVISSVRILKPGRELPPDIRRISSRYSQVGTQECAIVEFEEVEAAIKAHEFMITESQGKENMKAVLIGMKPPKKKPAKDKNHDEEPTASIHLNKSLNKRVEELQYMGDESSANSSSDPESNPTSPMAGRRHAATNKLSPSGHQNLFLSPNASPCTSPWSSPLAQRKGVSRKSPLAEEGRLNCSTSPEIFRKCMDYSSDSSVTPSGSPWVRRRRQAEMGTQEKSPGTSPLLSRKMQTADGLPVGVLRLPRGPDNTRGFHGHERSRACV

SEQ ID NO: 833506 - protein, 472 aa, Homo sapiens
KCLPVHKSLEQPLGPTQRRFQKVPTGGGRLLNCSTSPEIFRKCMDYSSDSSVTPSGSPWVRRRRQAEYGDPGEKPRYKPLLSRKMQTADGLPLGVLRFPKGPDNFLRILMALDRNRALCIKYLSIFKNKLHWKPYSVVLELNEDHRKVRRTTPVPLFPNENLPSKMLLVYDLYLSPKLWALATPQKNGRVQEKVMEHLLKLFGTFGVISSVRILKPGRELPPDIRRISSRYSQVGTQECAIVEFEEVEAAIKAHEFMITESQGKENMKAVLIGMKPPKKKPAKDKNHDEEPTASIHLNKSLNKRVEELQYMGDESSANSSSDPESNPTSPMAGRRHAATNKLSPSGHQNLFLSPNASPCTSPWSSPLAQRKGVSRKSPLAEEGRLNCSTSPEIFRKCMDYSSDSSVTPSGSPWVRRRRQAEMGTQEKSPGTSPLLSRKMQTADGLPVGVLRLPRGPDNTRGFHGHERSRACV

SEQ ID NO: 833507 - protein, 104 aa, Homo sapiens
MAQSGGEARPGPKTAVQIRVAIQEAEDVDELEDEEEGAETRGAGDPARYLSPGWGSASEEEPSRGHRTAQLPWLESQQVFSLKPFLLPTGIELTPENPWGSSVS

SEQ ID NO: 833508 - protein, 228 aa, Homo sapiens
MAQSGGEARPGPKTAVQIRVAIQEAEDVDELEDEEEGAETRGAGDPARYLSPGWGSASEEEPSRGHSGTTASGGENEREDLEQEWKPPDEELIKKLVDQIEFYFSDENLEKDAFLLKHVRRNKAVRVLLDALKASSSILLTRGAKQCFTTGSVGETNSEQLLLEGYFKCVPWTLEVREPTRKGERTDAPHRGPLVARIETKASPTQECSLVYDSLSCLAKGCGLWACP

SEQ ID NO: 833509 - protein, 491 aa, Homo sapiens; identical to SEQ ID NO: 833505

SEQ ID NO: 833510 - protein, 384 aa, Homo sapiens
PPPRRSRCRPAGWALRREDPGGAAVPRAMAQSGGEARPGPKTAVQIRVAIQEAEDVDELEDEEEGAETRGAGDPARYLSPGWGSASEEEPSRGHSGTTASGGENEREDLEQEWKPPDEELIKKLVDQIEFYFSDENLEKDAFLLKHVRRNKLGYVSVKLLTSFKKVKHLTRDWRTTAHALKYSVVLELNEDHRKVRRTTPVPLFPNENLPSKMLLVYDLYLSPKLWALATPQKNGRVQEKVMEHLLKLFGTFGVISSVRILKPGRELPPDIRRISSRYSQVGTQECAIVEFEEEGRLNCSTSPEIFRKCMDYSSDSSVTPSGSPWVRRRRQAEMGTQEKSPGTSPLLSRKMQTADGLPVGVLRLPRGPDNTRGFHGHERSRACV

SEQ ID NO: 833511 - protein, 122 aa, Homo sapiens
YSGGTHREEGSAGWALRREDPGGAAVPRAMAQSGGEARPGPKTAVQIRVAIQEAEDVDELEDEEEGAETRGAGDPARYLSPGWGSASEEEPSRGHRNRSSVNSRTMLASFIVSSAPSTAPST

SEQ ID NO: 833512 - protein, 579 aa, Homo sapiens
AREKKGRKEGTRKGNKEKGEAGKGNELSGLRQGSWREKVLRRRRSECLAAPPEAQPPDQWSRGAGRGRRRRGGGCGAAAQPPGPESEDSAARPAAVAASPPRPVEPGRPGVASLAWVRGCASGEAEAMDPGQQPPPQPAPQGQGQPPSQPPQGQGPPSGPGQPAPAATQAAPQAPPAGHQIVHVRGDSETDLEALFNAVMNPKTANVPQTVPMRLRKLPDSFFKPPEPKSHSRQASTDAGTAGALTPQHVRAHSSPASLQLGAVSPGTLTPTGVVSGPAATPTAQHLRQSSFEIPDDVPLPAGWEMAKTSSGQRYFLNHIDQTTTWQDPRKAMLSQMNVTAPTSPPVQQNMMNSASAMNQRISQSAPVKQPPPLAPQSPQGGVMGGSNSNQQQQMRLQQLQMEKERLRLKQQELLRQVEELALRSQLPTLEQDGGTQNPVSSPGMSQELRTMTTNSSDPFLNSGTYHSRDESTDSGLSMSSYSVPRTPDDFLNSVDEMDTGDTINQSTLPSQQNRFPDYLEAIPGTNVDLGTLEGDGMNIEGEELMPSLQEALSSDILNDMESVLAATKLDKESFLTWL

SEQ ID NO: 833513 - protein, 579 aa, Homo sapiens; identical to SEQ ID NO: 833512

SEQ ID NO: 833514 - protein, 579 aa, Homo sapiens; identical to SEQ ID NO: 833512

SEQ ID NO: 833515 - protein, 579 aa, Homo sapiens; identical to SEQ ID NO: 833512

SEQ ID NO: 833516 - protein, 579 aa, Homo sapiens; identical to SEQ ID NO: 833512

SEQ ID NO: 833517 - protein, 579 aa, Homo sapiens; identical to SEQ ID NO: 833512

SEQ ID NO: 833518 - protein, 290 aa, Homo sapiens
MAKTSSGQRYFLNHIDQTTTWQDPRKAMLSQMNVTAPTSPPVQQNMMNSASAMNQRISQSAPVKQPPPLAPQSPQGGVMGGSNSNQQQQMRLQQLQMEKERLRLKQQELLRQVEAMRNINPSTANSPKCQELALRSQLPTLEQDGGTQNPVSSPGMSQELRTMTTNSSDPFLNSGTYHSRDESTDSGLSMSSYSVPRTPDDFLNSVDEMDTGDTINQSTLPSQQNRFPDYLEAIPGTNVDLGTLEGDGMNIEGEELMPSLQEALSSDILNDMESVLAATKLDKESFLTWL

SEQ ID NO: 833519 - protein, 175 aa, Homo sapiens [sequence omitted]

SEQ ID NO: 833520 - protein, 579 aa, Homo sapiens; identical to SEQ ID NO: 833512

SEQ ID NO: 833521 - protein, 579 aa, Homo sapiens; identical to SEQ ID NO: 833512

SEQ ID NO: 833522 - protein, 129 aa, Homo sapiens
VLQEFGTRSCLCSGTYHSRDESTDSGLSMSSYSVPRTPDDFLNSVDEMDTGDTINQSTLPSQQNRFPDYLEAIPGTNVDLGTLEGDGMNIEGEELMPSLQEALSSDILNDMESVLAATKLDKESFLTWL

SEQ ID NO: 833523 - protein, 368 aa, Homo sapiens
MLSIQDDAFINPHLAKIFERVRQSADFMPLKQMMKTLNNDLGPNWRDKLEYFEERPFAAASIGQVHLARMKGGREVAMKIQYPGVAQSINSDVNNLMAVLNMSNMLPEGLFPEHLIDVLRRELALECDYQREAACARKFRDLLKGHPFFYVPEIVDELCSPHVLTTELVSGFPLDQAEGLSQEIRNEICYNILVLCLRELFEFHFMQTDPNWSNFFYDPQQHKVALLDFGATREYDRSFTDLYIQIIRAAADRDRETVRAKSIEMKFLTGYEVKVMEDAHLDAILILGEAFASDEPFDFGTQSTTEKIHNLIPVMLRHRLVPPPEETYSLHRKMGGSFLICSKLKARFPCKAMFEEAYSNYCKRQAQQ

SEQ ID NO: 833524 - protein, 647 aa, Homo sapiens
MAAILGDTIMVAKGLVKLTQAAVETHLQHLGIGGELIMAARALQSTAVEQIGMFLGKVQGQDKHEEYFAENFGGPEGEFHFSVPHAAGASTDFSSASAPDQSAPPSLGHAHSEGPAPAYVASGPFREAGFPGQASSPLGRANGRLFANPRDSFSAMGFQRRFFHQDQSPVGGLTAEDIEKARQAKARPENKQHKQTLSEHARERKVPVTRIGRLANFGGLAVGLGFGALAEVAKKSLRSEDPSGKKAVLGSSPFLSEANAERIVRTLCKVRGAALKLGQMLSIQDDAFINPHLAKIFERVRQSADFMPLKQMMKTLNNDLGPNWRDKLEYFEERPFAAASIGQVHLARMKGGREVAMKIQYPGVAQSINSDVNNLMAVLNMSNMLPEGLFPEHLIDVLRRELALECDYQREAACARKFRDLLKGHPFFYVPEIVDELCSPHVLTTELVSGFPLDQAEGLSQEIRNEICYNILVLCLRELFEFHFMQTDPNWSNFFYDPQQHKVALLDFGATREYDRSFTDLYIQIIRAAADRDRETVRAKSIEMKFLTGYEVKVMEDAHLDAILILGEAFASDEPFDFGTQSTTEKIHNLIPVMLRHRLVPPPEETYSLHRKMGGSFLICSKLKARFPCKAMFEEAYSNYCKRQAQQ

SEQ ID NO: 833525 - protein, 647 aa, Homo sapiens; identical to SEQ ID NO: 833524

SEQ ID NO: 833526 - protein, 368 aa, Homo sapiens; identical to SEQ ID NO: 833523

SEQ ID NO: 833527 - protein, 430 aa, Homo sapiens
MAAILGDTIMVAKGLVKLTQAAVETHLQHLGIGGELIMAARALQSTAVEQIGMFLGKVQGQDKHEEYFAENFGGPEGEFHFSVPHAAGASTDFSSASAPDQSAPPSWRDKLEYFEERPFAAASIGQVHLARMKGGREVAMKIQYPGVAQSINSDVNNLMAVLNMSNMLPEGLFPEHLIDVLRRELALECDYQREAACARKFRDLLKGHPFFYVPEIVDELCSPHVLTTELVSGFPLDQAEGLSQEIRNEICYNILVLCLRELFEFHFMQTDPNWSNFFYDPQQHKVALLDFGATREYDRSFTDLYIQIIRAAADRDRETVRAKSIEMKFLTGYEVKVMEDAHLDAILILGEAFASDEPFDFGTQSTTEKIHNLIPVMLRHRLVPPPEETYSLHRKMGGSFLICSKLKARFPCKAMFEEAYSNYCKRQAQQ

SEQ ID NO: 833528 - protein, 647 aa, Homo sapiens; identical to SEQ ID NO: 833524

SEQ ID NO: 833529 - protein, 478 aa, Homo sapiens
MAAILGDTIMVAKGLVKLTQAAVETHLQHLGIGGELIMAARALQSTAVEQIGMFLGKVQGQDKHEEYFAENFGGPEGEFHFSVPHAAGASTDFSSASAPDQSAPPSLGHAHSEGPAPAYVASGPFREAGFPGQASSPLGRANGRLFANPRDSFSAMGFQRRFFHQDQSPVGGLTAEDIEKARQAKARPENKQHKQTLSEHARERKVPVTRIGRLANFGGLAVGLGFGALAEVAKKSLRSEDPSGKKAVLGSSPFLSEANAERIVRTLCKVRGAALKLGQMLSIQDDAFINPHLAKIFERVRQSADFMPLKQMMKTLNNDLGPNWRDKLEYFEERPFAAASIGQVHLARMKGGREVAMKIQYPGVAQSINSDVNNLMAVLNMSNMLPEGLFPEHLIDVLRRELALECDYQREAACARKFRDLLKGHPFFYVPEIVDELCSPHVLTTEARCCWKAGWDFLPLSGEAQVSPVPAKGSSQAL

SEQ ID NO: 833530 - protein, 159 aa, Homo sapiens
AEGVCARAPVFLASPVLLVGRVWWPGHPRSVPAQVLGAHFNPQVRPVSFSCLPDDAFINPHLAKIFERVRQSADFMPLKQMMVRSQGLCPLSVASAPTGWRGQTWGFSRWPRQGMLRAPPWPCPSENSQQRPGPQLAGQVGILRGAALRRRIHWAGALG

SEQ ID NO: 833531 - protein, 142 aa, Homo sapiens
VLQGVGWGQDTAGKPVGGWGSAPGRAHPSPWANSPASPIPPQYPGVAQSINSDVNNLMAVLNMSNMLPEGLRLGGWVKGRSGWQASVLGSGDQRGSSLQSPFLADALLPGPGLFPEHLIDVLRRELALECDYQREAACARKF

SEQ ID NO: 833532 - protein, 647 aa, Homo sapiens; identical to SEQ ID NO: 833524

SEQ ID NO: 833533 - protein, 647 aa, Homo sapiens; identical to SEQ ID NO: 833524

SEQ ID NO: 833534 - protein, 727 aa, Homo sapiens
MAAILGDTIMVAKGLVKLTQAAVETHLQHLGIGGELIMAARALQSTAVEQIGMFLGKVQGQDKHEEYFAENFGGPEGEFHFSVPHAAGASTDFSSASAPDQSAPPSLGHAHSEGPAPAYVASGPFREAGFPGQASSPLGRANGRLFANPRDSFSAMGFQRRFFHQDQSPVGGLTAEDIEKARQAKARPENKQHKQTLSEHARERKVPVTRIGRLANFGGLAVGLGFGALAEVAKKSLRSEDPSGKKAVLGSSPFLSEANAERIVRTLCKVRGAALKLGQMLSIQDDAFINPHLAKIFERVRQSADFMPLKQMMKTLNNDLGPNWRDKLEYFEERPFAAASIGQVHLARMKGGREVAMKIQYPGVAQSINSDVNNLMAVLNMSNMLPEGLFPEHLIDVLRRELALECDYQREAACARKFRCGPRPGPLRVCTREAEGTMFSSLVKAPPALRGRGLGLQPGPRPYPAWGEGGPSAWLGGVCGGGDGVEGLWLGRDLPPLPRDLLKGHPFFYVPEIVDELCSPHVLTTELVSGFPLDQAEGLSQEIRNEICYNILVLCLRELFEFHFMQTDPNWSNFFYDPQQHKVALLDFGATREYDRSFTDLYIQIIRAAADRDRETVRAKSIEMKFLTGYEVKVMEDAHLDAILILGEAFASDEPFDFGTQSTTEKIHNLIPVMLRHRLVPPPEETYSLHRKMGGSFLICSKLKARFPCKAMFEEAYSNYCKRQAQQ

SEQ ID NO: 833535 - protein, 629 aa, Homo sapiens
MAAILGDTIMVAKGLVKLTQAAVETHLQHLGIGGELIMAARALQSTAVEQIGMFLGKVQGQDKHEEYFAENFGGPEGEFHFSVPHAAGASTDFSSASAPDQSAPPSLGHAHSEGPAPAYVASGPFREAGFPGQASSPLGRANGRLFANPRDSFSAMGFQRRFFHQDQSPVGGLTAEDIEKARQAKARPENKQHKQTLSEHARERKVPVTRIGRLANFGGLAVGLGFGALAEVAKKSLRSEDPSGKKAVLGSSPFLSEANAERIVRTLCKVRGAALKLGQMLSIQDDAFINPHLAKIFERVRQSADFMPLKQMMEERPFAAASIGQVHLARMKGGREVAMKIQYPGVAQSINSDVNNLMAVLNMSNMLPEGLFPEHLIDVLRRELALECDYQREAACARKFRDLLKGHPFFYVPEIVDELCSPHVLTTELVSGFPLDQAEGLSQEIRNEICYNILVLCLRELFEFHFMQTDPNWSNFFYDPQQHKVALLDFGATREYDRSFTDLYIQIIRAAADRDRETVRAKSIEMKFLTGYEVKVMEDAHLDAILILGEAFASDEPFDFGTQSTTEKIHNLIPVMLRHRLVPPPEETYSLHRKMGGSFLICSKLKARFPCKAMFEEAYSNYCKRQAQQ

SEQ ID NO: 833536 - protein, 452 aa, Homo sapiens
MAAILGDTIMVAKGLVKLTQAAVETHLQHLGIGGELIMAARALQSTAVEQIGMFLGKVQGQDKHEEYFAENFGGPEGEFHFSVPHAAGASTDFSSASAPDQSAPPSLGHAHSEGPAPAYVASGPFREAGFPGQASSPLGRANGRLFANPRDSFSAMGFQRRFFHQDQSPVGGLTAEDIEKARQAKARPENKQHKQTLSEHARERKVPVTRIGRLANFGGLAVGLGFGALAEVAKKSLRSEDPSGKKAVLGSSPFLSEANAERIVRTLCKVRGAALKLGQMLSIQDDAFINPHLAKIFERVRQSADFMPLKQMMKTLNNDLGPNWRDKLEYFEERPFAAASIGQVHLARMKGGREVAMKIQYPGVAQSINSDVNNLMAVLNMSNMLPEGLFPEHLIDVLRRELALECDYQREAACARKFRDLLKGHPFFYVPEIVDELCSPHVLTTEVLTFDS

SEQ ID NO: 833537 - protein, 119 aa, Homo sapiens
NENSAPRALWEEPGLVEGSGVSPPFILPLLPQVMEDAHLDAILILGEAFASDEPFDFGTQSTTEKIHNLIPVMLRHRLVPPPEETYSLHRKMGGSFLICSKLKARFPCKAMFEEAYSNY

SEQ ID NO: 833538 - protein, 355 aa, Homo sapiens
MADNSSDECEEENNKVLREGMPQAPGHRGKDMDPVPPAPASLKCHQTPSHVLERVGWYRESQKHRKEKKKTSQLTPQRGFSENEDDDDDDDDSSETDSDSDDDDEEHGAPLEGAYDPADYEHLPVSAEIKELFQYISRYTPQLIDLDHKLKPFIPDFIPAVGDIDAFLKVPRPDGKPDNLGLLVLDEPSTKQSDPTVLSLWLTENSKQHNITQHMKVKSLEDAEKNPKAIDTWIESISELHRSKPPATVHYTRPMPDIDTLMQEWSPEFEELLGKVSLPTAEIDCSLAEYIDMICAILDIPVYKSRIQSLHLLFSLYSEFKNSQHFKALAEGKKAFTPSSNSTSQAGDMETLTFS

SEQ ID NO: 833539 - protein, 304 aa, Homo sapiens
MADNSSDECEEENNKEKKKTSQLTPQRGFSENEDDDDDDDDSSETDSDSDDDDEEHGAPLEGAYDPADYEHLPVSAEIKELFQYISRYTPQLIDLDHKLKPFIPDFIPAVGDIDAFLKVPRPDGKPDNLGLLVLDEPSTKQSDPTVLSLWLTENSKQHNITQHMKVKSLEDAEKNPKAIDTWIESISELHRSKPPATVHYTRPMPDIDTLMQEWSPEFEELLGKVSLPTAEIDCSLAEYIDMICAILDIPVYKSRIQSLHLLFSLYSEFKNSQHFKALAEGKKAFTPSSNSTSQAGDMETLTFS

SEQ ID NO: 833540 - protein, 526 aa, Homo sapiens
ALINRRTRTSGDRPSLLSLSAREPAGQHQFRGPQPGTRTTTTKFSQSKNAGPSQGQVPANEGVQLVGGWCGSGHDDRWTGVSSIGSPGDRAQEATLLPEPGAKALCPRPSGRGSSGPCPRPADKEKTTKVVENQTYDERLEINDSEEVASIYTPTPRHQGLPRSAHLPNKAMADNSSDECEEENNKVLREGMPQAPGHRGKDMDPVPPAPASLKCHQTPSHVLERVGWYRESQKHRKEKKKTSQLTPQRGFSENEDDDDDDDDSSETDSDSDDDDEEHGAPLEGAYDPADYEHLPVSAEIKELFQYISRYTPQLIDLDHKLKPFIPDFIPAVGDIDAFLKVPRPDGKPDNLGLLVLDEPSTKQSDPTVLSLWLTENSKQHNITQHMKVKSLEDAEKNPKAIDTWIESISELHRSKPPATVHYTRPMPDIDTLMQEWSPEFEELLGKVSLPTAEIDCSLAEYIDMICAILDIPVYKSRIQSLHLLFSLYSEFKNSQHFKALAEGKKAFTPSSNSTSQAGDMETLTFS

SEQ ID NO: 833541 - protein, 370 aa, Homo sapiens
CFLYSPKKLRWDPICKIRVKVETKVVENQTYDERLEINDSEEVASIYTPTPRHQGLPRSAHLPNKAMADNSSDECEEENNKEKKKTSQLTPQRGFSENEDDDDDDDDSSETDSDSDDDDEEHGAPLEGAYDPADYEHLPVSAEIKELFQYISRYTPQLIDLDHKLKPFIPDFIPAVGDIDAFLKVPRPDGKPDNLGLLVLDEPSTKQSDPTVLSLWLTENSKQHNITQHMKVKSLEDAEKNPKAIDTWIESISELHRSKPPATVHYTRPMPDIDTLMQEWSPEFEELLGKVSLPTAEIDCSLAEYIDMICAILDIPVYKSRIQSLHLLFSLYSEFKNSQHFKALAEGKKAFTPSSNSTSQAGDMETLTFS

SEQ ID NO: 833542 - protein, 304 aa, Homo sapiens; identical to SEQ ID NO: 833539

SEQ ID NO: 833543 - protein, 208 aa, Homo sapiens
MADNSSDECEEENNKEKKKTSQLTPQRGFSENEDDDDDDDDSSETDSDSDDDDEEHGAPLEGAYDPADYEHLPVSAEIKELFQYISRYTPQLIDLDHKLKPFIPDFIPAVGDIDAFLKVPRPDGKPDNLGLLVLDEPSTKQSDPTVLSLWLTENSKQHNITQHMKVKSLEDAEKNPKAIDTWIESISELHRSKPSYKGKKQEHTITHW

SEQ ID NO: 833544 - protein, 304 aa, Homo sapiens; identical to SEQ ID NO: 833539

SEQ ID NO: 833545 - protein, 178 aa, Homo sapiens
MADNSSDECEEENNKEKKKTSQLTPQRGFSENEDDDDDDDDSSETDSDSDDDDEEHGAPLEGAYDPADYEHLPVSAEIKELFQYISRYTPQLIDLDHKLKPFIPDFIPAVGDIDAFLKVPRPDGKPDNLGLLVLDEPSTKQSDPTVLSLWLTENSKQHNITQHLKEKPENAKPLRWAL

SEQ ID NO: 833546 - protein, 475 aa, Homo sapiens
ALINRRTRTSGDRPSLLSLSAREPAGQHQFRGPQPGTRTTTTKFSQSKNAGPSQGQVPANEGVQLVGGWCGSGHDDRWTGVSSIGSPGDRAQEATLLPEPGAKALCPRPSGRGSSGPCPRPADKEKTTKVVENQTYDERLEINDSEEVASIYTPTPRHQGLPRSAHLPNKAMADNSSDECEEENNKEKKKTSQLTPQRGFSENEDDDDDDDDSSETDSDSDDDDEEHGAPLEGAYDPADYEHLPVSAEIKELFQYISRYTPQLIDLDHKLKPFIPDFIPAVGDIDAFLKVPRPDGKPDNLGLLVLDEPSTKQSDPTVLSLWLTENSKQHNITQHMKVKSLEDAEKNPKAIDTWIESISELHRSKPPATVHYTRPMPDIDTLMQEWSPEFEELLGKVSLPTAEIDCSLAEYIDMICAILDIPVYKSRIQSLHLLFSLYSEFKNSQHFKALAEGKKAFTPSSNSTSQAGDMETLTFS

SEQ ID NO: 833547 - protein, 254 aa, Homo sapiens
MADNSSDECEEENNKEKKKTSQLTPQRGFSENEDDDDDDDDSSETDSDSDDDDEEHGAPLEGAYDPADYEHLPVSAEIKELFQYISRYTPQLIDLDHKLKPFIPDFIPAVGDIDAFLKVPRPDGKPDNLGLLVLDEPSTKQSDPTVLSLWLTENSKQHNITQHMKVKSLEDAEKNPKAIDTWIESISELHRSKPPATVHYTRPMPDIDTLMQEWSPEFEELLGKVSLPTAEIDCSLAEYIDMICAILDILSSVV

SEQ ID NO: 833548 - protein, 399 aa, Homo sapiens
MVPFPGHMVDPSPIQPFLPHHPERTIHPSFQNSTPANGISHLGIEPVFHRAALPQREPLPRWLLQPLQHLRFQGDLARIGGLAHLHLASQLQVAGLGARPGRGHVQDGRGAVHGFGQSRLHFGGDQDGRHLLPGLGLSQHVLAAAAGATAKGSAGSRAGAGPEPTRRPPPAAKKKIPRSGNSKQSGERAFGVPGWEWGTGHGAQRVPPGRMLPPGLTPLLGGLSRALGAQGLPPLANFLLGNRGLDAHINLSLHLRSEEAPLEETEAAATHESRSGGYGSEPARERASSQGRKGDSSEGRREEGRKGPKTSPPRGSCHPAREHRSVTRDAAEVRQEPPKGLSWGDSHRCPEGPRTESTLAPAGLHMLRELDRGKAVAVGRGRRDARLAGRAGLRSGAAA

SEQ ID NO: 833549 - protein, 109 aa, Homo sapiens
HESRSGGYGSEPARERASSQGRKGDSSEGRREEGRKGPKTSPPRGSCHPAREHRSVTRDAAEVRQEPPKGLSWGDSHRCPEGPRTESTLAPAGLHMLRELDRGKAVAVG

SEQ ID NO: 833550 - protein, 72 aa, Homo sapiens
GSVWKGRSHQFSSSHLPSPRPVTRATNTRIYHPGRRGLASAAILRQPPPPPPPPQQPAKALGVSSCRPQLVH

SEQ ID NO: 833551 - protein, 1759 aa, Homo sapiens
RACGRLRCQETGVASVWVTSVLLEGGIRVAGPWAATPAGLIASRPPRSSALPSVPPRPTTAWEASSSQPAAQPGSAPQSPTATGRGDTGRAGETRLQDRIAPTLDGAPRPSLPPSPPPSGRIPAPAAAAATAADLEACPSPPTVAPALGRSPFPRWPRRARLLRRGRGGGGVESLPHFGAPVPRARLQLTARRGHAGLRARMREAAAALVPPPAFAVTPAAAMEEPPPPPPPPPPPPEPETESEPECCLAARQEGTLGDSACKSPESDLEDFSDETNTENLYGTSPPSTPRQMKRMSTKHQRNNVGRPASRSNLKEKMNAPNQPPHKDTGKTVENVEEYSYKQEKKIRAALRTTERDHKKNVQCSFMLDSVGGSLPKKSIPDVDLNKPYLSLGCSNAKLPVSVPMPIARPARQTSRTDCPADRLKFFETLRLLLKLTSVSKKKDREQRGQENTSGFWLNRSNELIWLELQAWHAGRTINDQDFFLYTARQAIPDIINEILTFKVDYGSFAFVRDRAGFNGTSVEGQCKATPGTKIVGYSTHHEHLQRQRVSFEQVKRIMELLEYIEALYPSLQALQKDYEKYAAKDFQDRVQALCLWLNITKDLNQKLRIMGTVLGIKNLSDIGWPVFEIPSPRPSKGNEPEYEGDDTEGELKELESSTDESEEEQISDPRVPEIRQPIDNSFDIQSRDCISKKLERLESEDDSLGWGAPDWSTEAGFSRHCLTSIYRPFVDKALKQMGLRKLILRLHKLMDGSLQRARIALVKNDRPVEFSEFPDPMWGSDYVQLSRTPPSSEEKCSAVSWEELKAMDLPSFEPAFLVLCRVLLNVIHECLKLRLEQRPAGEPSLLSIKQLVRECKEVLKGGLLMKQYYQFMLQEVLEDLEKPDCNIDAFEEDLHKMLMVYFDYMRSWIQMLQQLPQASHSLKNLLEEEWNFTKEITHYIRGGEAQAGKLFCDIAGMLLKSTGSFLEFGLQESCAEFWTSADDSSASDEIRRSVIEISRALKELFHEARERASKALGFAKMLRKDLEIAAEFRLSAPVRDLLDVLKSKQYVKVQIPGLENLQMFVPDTLAEEKSIILQLLNAAAGKDCSKDSDDVLIDAYLLLTKHGDRARDSEDSWGTWEAQPVKVVPQVETVDTLRSMQVDNLLLVVMQSAHLTIQRKAFQQSIEGLMTLCQEQTSSQPVIAKALQQLKNDALELCNRISNAIDRVDHMFTSEFDAEVDESESVTLQQYYREAMIQGYNFGFEYHKEVVRLMSGEFRQKIGDKYISFARKWMNYVLTKCESGRGTRPRWATQGFDFLQAIEPAFISALPEDDFLSLQALMNECIGHVIGKPHSPVTGLYLAIHRNSPRPMKVPRCHSDPPNPHLIIPTPEGFRGSSVPENDRLASIAAELQFRSLSRHSSPTEERDEPAYPRGDSSGSTRRSWELRTLISQSKDTASKLGPIEAIQKSVRLFEEKRYREMRRKNIIGQVCDTPKSYDNVMHVGLRKVTFKWQRGNKIGEGQYGKVYTCISVDTGELMAMKEIRFQPNDHKTIKETADELKIFEGIKHPNLVRYFGVELHREEMYIFMEYCDEGTLEEVSRLGLQEHVIRLYSKQITIAINVLHEHGIVHRDIKGANIFLTSSGLIKLGDFGCSVKLKNNAQTMPGEVNSTLGTAAYMAPEVITRAKGEGHGRAADIWSLGCVVIEMVTGKRPWHEYEHNFQIMYKVGMGHKPPIPERLSPEGKDFLSHCLESDPKMRWTASQLLDHSFVKVCTDEE

SEQ ID NO: 833552 - protein, 1808 aa, Homo sapiens
RACGRLRCQETGVASVWVTSVLLEGGIRVAGPWAATPAGLIASRPPRSSALPSVPPRPTTAWEASSSQPAAQPGSAPQSPTATGRGDTGRAGETRLQDRIAPTLDGAPRPSLPPSPPPSGRIPAPAAAAATAADLEACPSPPTVAPALGRSPFPRWPRRARLLRRGRGGGGVESLPHFGAPVPRARLQLTARRGHAGLRARMREAAAALVPPPAFAVTPAAAMEEPPPPPPPPPPPPEPETESEPECCLAARQEGTLGDSACKSPESDLEDFSDETNTENLYGTSPPSTPRQMKRMSTKHQRNNVGRPASRSNLKEKMNAPNQPPHKDTGKTVENVEEYSYKQEKKIRAALRTTERDHKKNVQCSFMLDSVGGSLPKKSIPDVDLNKPYLSLGCSNAKLPVSVPMPIARPARQTSRTDCPADRLKFFETLRLLLKLTSVSKKKDREQRGQENTSGFWLNRSNELIWLELQAWHAGRTINDQDFFLYTARQAIPDIINEILTFKVDYGSFAFVRDRAGFNGTSVEGQCKATPGTKIVGYSTHHEHLQRQRVSFEQVKRIMELLEYIEALYPSLQALQKDYEKYAAKDFQDRVQALCLWLNITKDLNQKLRIMGTVLGIKNLSDIGWPVFEIPSPRPSKGNEPEYEGDDTEGELKELESSTDESEEEQISDPRVPEIRQPIDNSFDIQSRDCISKKLERLESEDDSLGWGAPDWSTEAGFSRHCLTSIYRPFVDKALKQMGLRKLILRLHKLMDGSLQRARIALVKNDRPVEFSEFPDPMWGSDYVQLSRTPPSSEEKCSAVSWEELKAMDLPSFEPAFLVLCRVLLNVIHECLKLRLEQRPAGEPSLLSIKQLVRECKEVLKGGLLMKQYYQFMLQEVLEDLEKPDCNIDAFEEDLHKMLMVYFDYMRSWIQMLQQLPQASHSLKNLLEEEWNFTKEITHYIRGGEAQAGKLFCDIAGMLLKSTGSFLEFGLQESCAEFWTSADDSSASDEIRRSVIEISRALKELFHEARERASKALGFAKMLRKDLEIAAEFRLSAPVRDLLDVLKSKQYVKVQIPGLENLQMFVPDTLAEEKSIILQLLNAAAGKDCSKDSDDVLIDAYLLLTKHGDRARDSEDSWGTWEAQPVKVVPQVETVDTLRSMQVDNLLLVVMQSAHLTIQRKAFQQSIEGLMTLCQEQTSSQPVIAKALQQLKNDALELCNRISNAIDRVDHMFTSEFDAEVDESESVTLQQYYREAMIQGYNFGFEYHKEVVRLMSGEFRQKIGDKYISFARKWMNYVLTKCESGRGTRPRWATQGFDFLQAIEPAFISALPEDDFLSLQALMNECIGHVIGKPHSPVTGLYLAIHRNSPRPMKVPRCHSDPPNPHLIIPTPEGFSTRSMPSDARSHGSPAAAAAAAAAVAASRPSPSGGDSVLPKSISSAHDTRGSSVPENDRLASIAAELQFRSLSRHSSPTEERDEPAYPRGDSSGSTRRSWELRTLISQSKDTASKLGPIEAIQKSVRLFEEKRYREMRRKNIIGQVCDTPKSYDNVMHVGLRKVTFKWQRGNKIGEGQYGKVYTCISVDTGELMAMKEIRFQPNDHKTIKETADELKIFEGIKHPNLVRYFGVELHREEMYIFMEYCDEGTLEEVSRLGLQEHVIRLYSKQITIAINVLHEHGIVHRDIKGANIFLTSSGLIKLGDFGCSVKLKNNAQTMPGEVNSTLGTAAYMAPEVITRAKGEGHGRAADIWSLGCVVIEMVTGKRPWHEYEHNFQIMYKVGMGHKPPIPERLSPEGKDFLSHCLESDPKMRWTASQLLDHSFVKVCTDEE

SEQ ID NO: 833553 - protein, 1573 aa, Homo sapiens
MREAAAALVPPPAFAVTPAAAMEEPPPPPPPPPPPPEPETESEPECCLAARQEGTLGDSACKSPESDLEDFSDETNTENLYGTSPPSTPRQMKRMSTKHQRNNVGRPASRSNLKGVRQISHAVSSSLNEEKMNAPNQPPHKDTGKTVENVEEYSYKQEKKIRAALRTTERDHKKNVQCSFMLDSVGGSLPKKSIPDVDLNKPYLSLGCSNAKLPVSVPMPIARPARQTSRTDCPADRLKFFETLRLLLKLTSVSKKKDREQRGQENTSGFWLNRSNELIWLELQAWHAGRTINDQDFFLYTARQAIPDIINEILTFKVDYGSFAFVRDRAGFNGTSVEGQCKATPGTKIVGYSTHHEHLQRQRVSFEQVKRIMELLEYIEALYPSLQALQKDYEKYAAKDFQDRVQALCLWLNITKDLNQKLRIMGTVLGIKNLSDIGWPVFEIPSPRPSKGNEPEYEGDDTEGELKELESSTDESEEEQISDPRVPEIRQPIDNSFDIQSRDCISKKLERLESEDDSLGWGAPDWSTEAGFSRHCLTSIYRPFVDKALKQMGLRKLILRLHKLMDGSLQRARIALVKNDRPVEFSEFPDPMWGSDYVQLSRTPPSSEEKCSAVSWEELKAMDLPSFEPAFLVLCRVLLNVIHECLKLRLEQRPAGEPSLLSIKQLVRECKEVLKGGLLMKQYYQFMLQEVLEDLEKPDCNIDAFEEDLHKMLMVYFDYMRSWIQMLQQLPQASHSLKNLLEEEWNFTKEITHYIRGGEAQAGKLFCDIAGMLLKSTGSFLEFGLQESCAEFWTSADDSSASDEIRRSVIEISRALKELFHEARERASKALGFAKMLRKDLEIAAEFRLSAPVRDLLDVLKSKQYVKVQIPGLENLQMFVPDTLAEEKSIILQLLNAAAGKDCSKDSDDVLIDAYLLLTKHGDRARDSEDSWGTWEAQPVKVVPQVETVDTLRSMQVDNLLLVVMQSAHLTIQRKAFQQSIEGLMTLCQEQTSSQPVIAKALQQLKNDALELCNRISNAIDRVDHMFTSEFDAEVDESESVTLQQYYREAMIQGYNFGFEYHKEVVRLMSGEFRQKIGDKYISFARKWMNYVLTKCESGRGTRPRWATQGFDFLQAIEPAFISALPEDDFLSLQALMNECIGHVIGKPHSPVTGLYLAIHRNSPRPMKVPRCHSDPPNPHLIIPTPEGFRGSSVPENDRLASIAAELQFRSLSRHSSPTEERDEPAYPRGDSSGSTRRSWELRTLISQSKDTASKLGPIEAIQKSVRLFEEKRYREMRRKNIIGQVCDTPKSYDNVMHVGLRKVTFKWQRGNKIGEGQYGKVYTCISVDTGELMAMKEIRFQPNDHKTIKETADELKIFEGIKHPNLVRYFGVELHREEMYIFMEYCDEGTLEEVSRLGLQEHVIRLYSKQITIAINVLHEHGIVHRDIKGANIFLTSSGLIKLGDFGCSVKLKNNAQTMPGEVNSTLGTAAYMAPEVITRAKGEGHGRAADIWSLGCVVIEMVTGKRPWHEYEHNFQIMYKVGMGHKPPIPERLSPEGKDFLSHCLESDPKMRWTASQLLDHSFVKVCTDEE

SEQ ID NO: 833554 - protein, 1603 aa, Homo sapiens
MREAAAALVPPPAFAVTPAAAMEEPPPPPPPPPPPPEPETESEPECCLAARQEGTLGDSACKSPESDLEDFSDETNTENLYGTSPPSTPRQMKRMSTKHQRNNVGRPASRSNLKGVRQISHAVSSSLNEEKMNAPNQPPHKDTGKTVENVEEYSYKQEKKIRAALRTTERDHKKNVQCSFMLDSVGGSLPKKSIPDVDLNKPYLSLGCSNAKLPVSVPMPIARPARQTSRTDCPADRLKFFETLRLLLKLTSVSKKKDREQRGQENTSGFWLNRSNELIWLELQAWHAGRTINDQDFFLYTARQAIPDIINEILTFKVDYGSFAFVRDRAGFNGTSVEGQCKATPGTKIVGYSTHHEHLQRQRVSFEQVKRIMELLEYIEALYPSLQALQKDYEKYAAKDFQDRVQALCLWLNITKDLNQKLRIMGTVLGIKNLSDIGWPVFEIPSPRPSKGNEPEYEGDDTEGELKELESSTDESEEEQISDPRVPEIRQPIDNSFDIQSRDCISKKLERLESEDDSLGWGAPDWSTEAGFSRHCLTSIYRPFVDKALKQMGLRKLILRLHKLMDGSLQRARIALVKNDRPVEFSEFPDPMWGSDYVQLSRTPPSSEEKCSAVSWEELKAMDLPSFEPAFLVLCRVLLNVIHECLKLRLEQRPAGEPSLLSIKQLVRECKEVLKGGLLMKQYYQFMLQEVLEDLEKPDCNIDAFEEDLHKMLMVYFDYMRSWIQMLQQLPQASHSLKNLLEEEWNFTKEITHYIRGGEAQAGKLFCDIAGMLLKSTGSFLEFGLQESCAEFWTSADDSSASDEIRRSVIEISRALKELFHEARERASKALGFAKMLRKDLEIAAEFRLSAPVRDLLDVLKSKQYVKVQIPGLENLQMFVPDTLAEEKSIILQLLNAAAGKDCSKDSDDVLIDAYLLLTKHGDRARDSEDSWGTWEAQPVKVVPQVETVDTLRSMQVDNLLLVVMQSAHLTIQRKAFQQSIEGLMTLCQEQTSSQPVIAKALQQLKNDALELCNRISNAIDRVDHMFTSEFDAEVDESESVTLQQYYREAMIQGYNFGFEYHKEVVRLMSGEFRQKIGDKYISFARKWMNYVLTKCESGRGTRPRWATQGFDFLQAIEPAFISALPEDDFLSLQALMNECIGHVIGKPHSPVTGLYLAIHRNSPRPMKVPRCHSDPPNPHLIIPTPEGFRGSSVPENDRLASIAAELQFRSLSRHSSPTEERDEPAYPRGDSSGSTRRSWELRTLISQSKDTASKLGPIEAIQKSVRLFEEKRYREMRRKNIIGQVCDTPKSYDNVMHVGLRKVTFKWQRGNKIGEGQYGKVYTCISVDTGELMAMKEIRFQPNDHKTIKETADELKIFEGIKHPNLVRYFGVELHRSTVTLPNSQEISMSYIISAFSLKLEEFLQNEEMYIFMEYCDEGTLEEVSRLGLQEHVIRLYSKQITIAINVLHEHGIVHRDIKGANIFLTSSGLIKLGDFGCSVKLKNNAQTMPGEVNSTLGTAAYMAPEVITRAKGEGHGRAADIWSLGCVVIEMVTGKRPWHEYEHNFQIMYKVGMGHKPPIPERLSPEGKDFLSHCLESDPKMRWTASQLLDHSFVKVCTDEE

SEQ ID NO: 833555 - protein, 429 aa, Homo sapiens
MPSDARSHGSPAAAAAAAAAVAASRPSPSGGDSVLPKSISSAHDTRGSSVPENDRLASIAAELQFRSLSRHSSPTEERDEPAYPRGDSSGSTRRSWELRTLISQSKDTASKLGPIEAIQKSVRLFEEKRYREMRRKNIIGQVCDTPKSYDNVMHVGLRKVTFKWQRGNKIGEGQYGKVYTCISVDTGELMAMKEIRFQPNDHKTIKETADELKIFEGIKHPNLVRYFGVELHREEMYIFMEYCDEGTLEEVSRLGLQEHVIRLYSKQITIAINVLHEHGIVHRDIKGANIFLTSSGLIKLGDFGCSVKLKNNAQTMPGEVNSTLGTAAYMAPEVITRAKGEGHGRAADIWSLGCVVIEMVTGKRPWHEYEHNFQIMYKVGMGHKPPIPERLSPEGKDFLSHCLESDPKMRWTASQLLDHSFVKVCTDEE

SEQ ID NO: 833556 - protein, 1573 aa, Homo sapiens; identical to SEQ ID NO: 833553

SEQ ID NO: 833557 - protein, 894 aa, Homo sapiens
MKQYYQFMLQEVLEDLEKPDCNIDAFEEDLHKMLMVYFDYMRSWIQMLQQLPQASHSLKNLLEEEWNFTKEITHYIRGGEAQAGKLFCDIAGMLLKSTGSFLEFGLQESCAEFWTSADDSSASDEIRRSVIEISRALKELFHEARERASKALGFAKMLRKDLEIAAEFRLSAPVRDLLDVLKSKQYVKVQIPGLENLQMFVPDTLAEEKSIILQLLNAAAGKDCSKDSDDVLIDAYLLLTKHGDRARDSEDSWGTWEAQPVKVVPQVETVDTLRSMQVDNLLLVVMQSAHLTIQRKAFQQSIEGLMTLCQEQTSSQPVIAKALQQLKNDALELCNRISNAIDRVDHMFTSEFDAEVDESESVTLQQYYREAMIQGYNFGFEYHKEVVRLMSGEFRQKIGDKYISFARKWMNYVLTKCESGRGTRPRWATQGFDFLQAIEPAFISALPEDDFLSLQALMNECIGHVIGKPHSPVTGLYLAIHRNSPRPMKVPRCHSDPPNPHLIIPTPEGFRGSSVPENDRLASIAAELQFRSLSRHSSPTEERDEPAYPRGDSSGSTRRSWELRTLISQSKDTASKLGPIEAIQKSVRLFEEKRYREMRRKNIIGQVCDTPKSYDNVMHVGLRKVTFKWQRGNKIGEGQYGKVYTCISVDTGELMAMKEIRFQPNDHKTIKETADELKIFEGIKHPNLVRYFGVELHREEMYIFMEYCDEGTLEEVSRLGLQEHVIRLYSKQITIAINVLHEHGIVHRDIKGANIFLTSSGLIKLGDFGCSVKLKNNAQTMPGEVNSTLGTAAYMAPEVITRAKGEGHGRAADIWSLGCVVIEMVTGKRPWHEYEHNFQIMYKVGMGHKPPIPERLSPEGKDFLSHCLESDPKMRWTASQLLDHSFVKVCTDEE

SEQ ID NO: 833558 - protein, 825 aa, Homo sapiens
CHFIPGRVYLMHLVPGDQLQEEWNFTKEITHYIRGGEAQAGKLFCDIAGMLLKSTGSFLEFGLQESCAEFWTSADDSSASDEIRRSVIEISRALKELFHEARERASKALGFAKMLRKDLEIAAEFRLSAPVRDLLDVLKSKQYVKLLNAAAGKDCSKDSDDVLIDAYLLLTKHGDRARDSEDSWGTWEAQPVKVVPQVETVDTLRSMQVDNLLLVVMQSAHLTIQRKAFQQSIEGLMTLCQEQTSSQPVIAKALQQLKNDALELCNRISNAIDRVDHMFTSEFDAEVDESESVTLQQYYREAMIQGYNFGFEYHKEVVRLMSGEFRQKIGDKYISFARKWMNYVLTKCESGRGTRPRWATQGFDFLQAIEPAFISALPEDDFLSLQALMNECIGHVIGKPHSPVTGLYLAIHRNSPRPMKVPRCHSDPPNPHLIIPTPEGFRGSSVPENDRLASIAAELQFRSLSRHSSPTEERDEPAYPRGDSSGSTRRSWELRTLISQSKDTASKLGPIEAIQKSVRLFEEKRYREMRRKNIIGQVCDTPKSYDNVMHVGLRKVTFKWQRGNKIGEGQYGKVYTCISVDTGELMAMKEIRFQPNDHKTIKETADELKIFEGIKHPNLVRYFGVELHREEMYIFMEYCDEGTLEEVSRLGLQEHVIRLYSKQITIAINVLHEHGIVHRDIKGANIFLTSSGLIKLGDFGCSVKLKNNAQTMPGEVNSTLGTAAYMAPEVITRAKGEGHGRAADIWSLGCVVIEMVTGKRPWHEYEHNFQIMYKVGMGHKPPIPERLSPEGKDFLSHCLESDPKMRWTASQLLDHSFVKVCTDEE

SEQ ID NO: 833559 - protein, 416 aa, Homo sapiens
PSDLELSPEGQVRTSGQADVKAAAKSISSAMIPGSSVPENDRLASIAAELQFRSLSRHSSPTEERDEPAYPRGDSSGSTRRSWELRTLISQSKDTASKLGPIEAIQKSVRLFEEKRYREMRRKNIIGQVCDTPKSYDNVMHVGLRKVTFKWQRGNKIGEGQYGKVYTCISVDTGELMAMKEIRFQPNDHKTIKETADELKIFEGIKHPNLVRYFGVELHREEMYIFMEYCDEGTLEEVSRLGLQEHVIRLYSKQITIAINVLHEHGIVHRDIKGANIFLTSSGLIKLGDFGCSVKLKNNAQTMPGEVNSTLGTAAYMAPEVITRAKGEGHGRAADIWSLGCVVIEMVTGKRPWHEYEHNFQIMYKVGMGHKPPIPERLSPEGKDFLSHCLESDPKMRWTASQLLDHSFVKVCTDEE

SEQ ID NO: 833560 - protein, 1410 aa, Homo sapiens
MREAAAALVPPPAFAVTPAAAMEEPPPPPPPPPPPPEPETESEPECCLAARQEGTLGDSACKSPESDLEDFSDETNTENLYGTSPPSTPRQMKRMSTKHQRNNVGRPASRSNLKGVRQISHAVSSSLNEEKMNAPNQPPHKDTGKTVENVEEYSYKQEKKIRAALRTTERDHKKNVQCSFMLDSVGGSLPKKSIPDVDLNKPYLSLGCSNAKLPVSVPMPIARPARQTSRTDCPADRLKFFETLRLLLKLTSVSKKKDREQRGQENTSGFWLNRSNELIWLELQAWHAGRTINDQDFFLYTARQAIPDIINEILTFKVDYGSFAFVRDRAGFNGTSVEGQCKATPGTKIVGYSTHHEHLQRQRVSFEQVKRIMELLEYIEALYPSLQALQKDYEKYAAKDFQDRVQALCLWLNITKDLNQKLRIMGTVLGIKNLSDIGWPVFEIPSPRPSKGNEPEYEGDDTEGELKELESSTDESEEEQISDPRVPEIRQPIDNSFDIQSRDCISKKLERLESEDDSLGWGAPDWSTEAGFSRHCLTSIYRPFVDKALKQMGLRKLILRLHKLMDGSLQRARIALVKNDRPVEFSEFPDPMWGSDYVQLSRTPPSSEEKCSAVSWEELKAMDLPSFEPAFLVLCRVLLNVIHECLKLRLEQRPAGEPSLLSIKQLVRECKEVLKGGLLMKQYYQFMLQEVLEDLEKPDCNIDAFEEDLHKMLMVYFDYMRSWIQMLQQLPQASHSLKNLLEEEWNFTKEITHYIRGGEAQAGKLFCDIAGMLLKSTGSFLEFGLQESCAEFWTSADDSSASDEIRRSVIEISRALKELFHEARERASKALGFAKMLRKDLEIAAEFRLSAPVRDLLDVLKSKQYVKVQIPGLENLQMFVPDTLAEEKSIILQLLNAAAGKDCSKDSDDVLIDAYLLLTKHGDRARDSEDSWGTWEAQPVKVVPQVETVDTLRSMQVDNLLLVVMQSAHLTIQRKAFQQSIEGLMTLCQEQTSSQPVIAKALQQLKNDALELCNRISNAIDRVDHMFTSEFDAEVDESESVTLQQYYREAMIQGYNFGFEYHKEVVRLMSGEFRQKIGDKYISFARKWMNYVLTKCESGRGTRPRWATQGFDFLQAIEPAFISALPEDDFLSLQALMNECIGHVIGKPHSPVTGLYLAIHRNSPRPMKVPRCHSDPPNPHLIIPTPEGFRGSSVPENDRLASIAAELQFRSLSRHSSPTEERDEPAYPRGDSSGSTRRSWELRTLISQSKDTASKLGPIEAIQKSVRLFEEKRYREMRRKNIIGQVCDTPKSYDNVMHVGLRKVTFKWQRGNKIGEGQYGKVYTCISVDTGELMAMKEIRFQPNDHKTIKETADELKIFEGIKHPNLVRYFGVELHRSTVTLPNSQEISMSYIISAFSLKLEEFLLKCKL

SEQ ID NO: 833561 - protein, 193 aa, Homo sapiens [sequence omitted]

SEQ ID NO: 833562 - protein, 171 aa, Homo sapiens
VVYRIPHRFAGYEEGCQSLMEYAWGRAAAAMLFCGFIILVICFILSFFALCGPQMLVFLRVIGGLLALAAVFQIISLVIYPVKYTQTFTLHANRAEPIHRFAGMAGCAILMTIALALLEQLPWMSYLSIVAILGFVAFFEVGPGPIPWFIVAELFSQGPRPAAIAVAGFSN

SEQ ID NO: 833563 - protein, 193 aa, Homo sapiens [sequence omitted]

SEQ ID NO: 833564 - protein, 193 aa, Homo sapiens [sequence omitted]

SEQ ID NO: 833565 - protein, 193 aa, Homo sapiens [sequence omitted]

SEQ ID NO: 833566 - protein, 193 aa, Homo sapiens [sequence omitted]

SEQ ID NO: 833567 - protein, 193 aa, Homo sapiens [sequence omitted]

SEQ ID NO: 833568 - protein, 193 aa, Homo sapiens [sequence omitted]

SEQ ID NO: 833569 - protein, 193 aa, Homo sapiens [sequence omitted]

SEQ ID NO: 833570 - protein, 105 aa, Homo sapiens
DIIALAGRGWLQSSDHGQTSSLWWKCSQEGGGSGSYEEGCQSLMEYGECPPPPPSPPPGSPRGRGLQKPPRVMGPHRVGGASAFQNACLGRARAHASDLNQMQQQ

SEQ ID NO: 833571 - protein, 193 aa, Homo sapiens [sequence omitted]

SEQ ID NO: 833572 - protein, 193 aa, Homo sapiens [sequence omitted]

SEQ ID NO: 833573 - protein, 193 aa, Homo sapiens [sequence omitted]

SEQ ID NO: 833574 - protein, 193 aa, Homo sapiens [sequence omitted]

SEQ ID NO: 833575 - protein, 193 aa, Homo sapiens [sequence omitted]

SEQ ID NO: 833576 - protein, 193 aa, Homo sapiens [sequence omitted]

SEQ ID NO: 833577 - protein, 193 aa, Homo sapiens [sequence omitted]

SEQ ID NO: 833578 - protein, 193 aa, Homo sapiens [sequence omitted]

SEQ ID NO: 833579 - protein, 193 aa, Homo sapiens [sequence omitted]

SEQ ID NO: 833580 - protein, 240 aa, Homo sapiens
GSKLRLGTRLGGPSLLEGYLALRLQAAFYGVFQLAIHFAVKMASGSGTKNLDFRRKWDKDEYEKLAEKRLTEEREKKDGKPVQPVKRELLRHRDYKVDLESKLGKTIVITKTTPQSEMGGYYCNVCDCVVKDSINFLDHINGKKHQRNLGMSMRVERSTLDQVKKRFEVNKKKMEEKQKDYDFEERMKELREEEEKAKAYKKEKQKEKKRRAEEDLTFEEDDEMAAVMGFSGFGSTKKSY

SEQ ID NO: 833581 - protein, 241 aa, Homo sapiens
ETLQSLARLEHKTPSLLEGYLALRLQAAFYGVFQLAIHFAVKMASGSGTKNLDFRRKWDKDEYEKLAEKRLTEEREKKDGKPVQPVKRELLRHRDYKVDLESKLGKTIVITKTTPQSEMGGYYCNVCDCVVKDSINFLDHINGKKHQRNLGMSMRVERSTLDQVKKRFEVNKKKMEEKQKDYDFEERMKELREEEEKAKAYKKEKQKEKKRRAEEDLTFEEDDEMAAVMGFSGFGSTKKSY

SEQ ID NO: 833582 - protein, 240 aa, Homo sapiens; identical to SEQ ID NO: 833580

SEQ ID NO: 833583 - protein, 240 aa, Homo sapiens; identical to SEQ ID NO: 833580

SEQ ID NO: 833584 - protein, 155 aa, Homo sapiens
GSKLRLGTRLGGPSLLEGYLALRLQAAFYGVFQLAIHFAVKMASGSGTKNLDFRRKWDKDEYEKLAEKRLTEEREKKDGKPVQPVKRELLRHRDYKVDLESKLGKTIVITKTTPQSEMGGYYCNVCDCVVKDSINFLDHINGKKQRETEGEEKEG

SEQ ID NO: 833585 - protein, 240 aa, Homo sapiens; identical to SEQ ID NO: 833580

SEQ ID NO: 833586 - protein, 290 aa, Homo sapiens
MASGSGTKNLDFRRKWDKDEYEKLAEKRLTEEREKKDGKPVQPVKRELLRHRDYKVDLESKLGKTIVITKTTPQSEMGGYYCNVCDCVVKDSINFLDHINGKKHQRNLGMSMRVERSTLDQVKKRFEVNKKKMEEKQKDYDFEERMKELREEKKKKKKKKKKKKKKKKKKKKKKKKRRKKKRGGGAIEKSPGGGDQRRATTINVVVKRRGGHRHTREREARININETREEGRGKENSSAGAEEQTEEAQGTTIWGKETHTHGVGVTNTMGNPRHQRGIRGPRRKTTSGRK

SEQ ID NO: 833587 - protein, 99 aa, Homo sapiens
CDDLPSGSSELSPEKRDASVAISCSKIQGDVAQLLLDVAHDFPLGRGGEAVASLSEDLHEVVGQVPASQVQTQDGVWNPRALLPWGLMFLASSEHVTGN

SEQ ID NO: 833588 - protein, 199 aa, Homo sapiens
AFSSPQTKNLDFRRKWDKDEYEKLAEKRLTEEREKKDGKPVQPVKRELLRHRDYKVDLESKLGKTIVITKTTPQSEMGGYYCNVCDCVVKDSINFLDHINGKKHQRNLGMSMRVERSTLDQVKKRFEVNKKKMEEKQKDYDFEERMKELREEEEKAKAYKKEKQKEKKRRAEEDLTFEEDDEMAAVMGFSGFGSTKKSY

SEQ ID NO: 833589 - protein, 240 aa, Homo sapiens; identical to SEQ ID NO: 833580

SEQ ID NO: 833590 - protein, 67 aa, Homo sapiens
GSKLRLGTRLGGPSLLEGYLALRLQAAFYGVFQLAIHFAVKMASGSGVGVVSEEEVLRGGEWFFRPE

SEQ ID NO: 833591 - protein, 912 aa, Homo sapiens
MSAPPVLRPPSPLLPVAAAAAAAAAALVPGSGPGPAPFLAPVAAPVGGISFHLQIGLSREPVLLLQDSSGDYSLAHVREMACSIVDQKFPECGFYGMYDKILLFRHDPTSENILQLVKAASDIQEGDLIEVVLSASATFEDFQIRPHALFVHSYRAPAFCDHCGEMLWGLVRQGLKCEGCGLNYHKRCAFKIPNNCSGVRRRRLSNVSLTGVSTIRTSSAELSTSAPDEPLLQKSPSESFIGREKRSNSQSYIGRPIHLDKILMSKVKVPHTFVIHSYTRPTVCQYCKKLLKGLFRQGLQCKDCRFNCHKRCAPKVPNNCLGEVTINGDLLSPGAESDVVMEEGSDDNDSERNSGLMDDMEEAMVQDAEMAMAECQNDSGEMQDPDPDHEDANRTISPSTSNNIPLMRVVQSVKHTKRKSSTVMKEGWMVHYTSKDTLRKRHYWRLDSKCITLFQNDTGSRYYKEIPLSEILSLEPVKTSALIPNGANPHCFEITTANVVYYVGENVVNPSSPSPNNSVLTSGVGADVARMWEIAIQHALMPVIPKGSSVGTGTNLHRDISVSISVSNCQIQENVDISTVYQIFPDEVLGSGQFGIVYGGKHRKTGRDVAIKIIDKLRFPTKQESQLRNEVAILQNLHHPGVVNLECMFETPERVFVVMEKLHGDMLEMILSSEKGRLPEHITKFLITQILVALRHLHFKNIVHCDLKPENVLLASADPFPQVKLCDFGFARIIGEKSFRRSVVGTPAYLAPEVLRNKGYNRSLDMWSVGVIIYVSLSGTFPFNEDEDIHDQIQNAAFMYPPNPWKEISHEAIDLINNLLQVKMRKRYSVDKTLSHPWLQDYQTWLDLRELECKIGERYITHESDDLRWEKYAGEQGLQYPTHLINPSASHSDTPETEETEMKALGERVSIL

SEQ ID NO: 833592 - protein, 408 aa, Homo sapiens
EFLLSSSSPFSSPSSSSSPPLPILIPLPSPSPGTFPESFYFPSGLSEKEAPGSAAAKLSCCRAASPRPPLPGPAPRRAMSAPPVLRPPSPLLPVAAAAAAAAAALVPGSGPGPAPFLAPVAAPVGGISFHLQIGLSREPVLLLQDSSGDYSLAHVREMACSIVDQKFPECGFYGMYDKILLFRHDPTSENILQLVKAASDIQEGDLIEVVLSASATFEDFQIRPHALFVHSYRAPAFCDHCGEMLWGLVRQGLKCEGCGLNYHKRCAFKIPNNCSGVRRRRLSNVSLTGVSTIRTSSAELSTSAPDEPLLQKSPSESFIGREKRSNSQSYIGRPIHLDKILMSKVKVPHTFVIHSYTRPTVCQYCKKLLKGLFRQGLQCKDCRFNCHKRCAPKVPNNCLGEVTINGGR

SEQ ID NO: 833593 - protein, 832 aa, Homo sapiens
MSAPPVLRPPSPLLPVAAAAAAAAAALVPGSGPGPAPFLAPVAAPVGGISFHLQIGLSREPVLLLQDSSGDYSLAHVREMACSIVDQKFPECGFYGMYDKILLFRHDPTSENILQLVKAASDIQEGDLIEVVLSASATFEDFQIRPHALFVHSYRAPAFCDHCGEMLWGLVRQGLKCEGCGLNYHKRCAFKIPNNCSGVRRRRLSNVSLTGVSTIRTSSAELSTSAPDEPLLQKSPSESFIGREKRSNSQSYIGRPIHLDKILMSKVKVPHTFVIHSYTRPTVCQYCKKLLKGLFRQGLQCKDCRFNCHKRCAPKVPNNCLGEVTINGDLLSPGAESDVVMEEGSDDNDSERNSGLMDDMEEAMVQDAEMAMAECQNDSGEMQDPDPDHEDANRTISPSTSNNIPLMRVVQSVKHTKRKSSTVMKEGWMVHYTSKDTLRKRHYWRLDSKCITLFQNDTGSRYYKEIPLSEILSLEPVKTSALIPNGANPHCFEITTANVVYYVGENVVNPSSPSPNNSVLTSGVGADVARMWEIAIQHALMPVIPKGSSVGTGTNLHRDISVSISVSNCQIQENVDISTVYQIFPDEVLGSGQFGIVYGGKHRKTGRDVAIKIIDKLRFPTKQESQLRNEVAILQNLHHPGVVNLECMFETPERVFVVMEKLHGDMLEMILSSEKGRLPEHITKFLITQILVALRHLHFKNIVHCDLKPENVLLASADPFPQVKLCDFGFARIIGEKSFRRSVVGTPAYLAPEVLRNKGYNRSLDMWSVGVIIYVSLSGTFPFNEDEDIHDQIQNAAFMYPPNPWKEISHEDVDLIQYNTYILGCLSSHCTA

SEQ ID NO: 833594 - protein, 114 aa, Homo sapiens
LDRDLESRYAEDAKRGIMVRHYAYSPDYVNSLDVQINKTARQNTTSHSLKLKGPGGASYPSRGACSVIDKPRSTSPRHSAPRHSAPRHRHHDTVHHDTGTTTQAPRHRHHDTGI

SEQ ID NO: 833595 - protein, 95 aa, Homo sapiens
LDRDLESRYAEDAKRGIMVRHYAYSPDYVNSLDVQINKTARQNTTSHSLKLKGPGGASYPSRGACSVIDKPRSTSPPLAQPIYRHLQQTLMKATK

SEQ ID NO: 833596 - protein, 158 aa, Homo sapiens
PAPAGQGRRPLLGRPAFHSRYTRGKVFPSPLPPSSRLLASSAPASAGGAHYARQFRHFAKTKSPRPEGGGGGRRAEREGRGDVSWEGGKCPGHPHPCILLRTPSCPNPGNSSVSPAVEHHAKCGDAERKDYSVLVPCCPRGHSAVGRGTRTYPVRLRI

SEQ ID NO: 833597 - protein, 340 aa, Homo sapiens
MVTLRKRTLKVLTFLVLFIFLTSFFLNYSHTMVATTWFPKQMVLELSENLKRLIKHRPCTCTHCIGQRKLSAWFDERFNQTMQPLLTAQNALLEDDTYRWWLRLQREKKPNNLNDTIKELFRVVPGNVDPMLEKRSVGCRRCAVVGNSGNLRESSYGPEIDSHDFVLRMNKAPTAGFEADVGTKTTHHLVYPESFRELGDNVSMILVPFKTIDLEWVVSAITTGTISHTYIPVPAKIRVKQDKILIYHPAFIKYVFDNWLQGHGRYPSTGILSVIFSMHVCDEVDLYGFGADSKGNWHHYWENNPSAGAFRKTGVHDADFESNVTATLASINKIRIFKGR

SEQ ID NO: 833598 - protein, 340 aa, Homo sapiens; identical to SEQ ID NO: 833597

SEQ ID NO: 833599 - protein, 340 aa, Homo sapiens; identical to SEQ ID NO: 833597

SEQ ID NO: 833600 - protein, 340 aa, Homo sapiens; identical to SEQ ID NO: 833597

SEQ ID NO: 833601 - protein, 340 aa, Homo sapiens; identical to SEQ ID NO: 833597

SEQ ID NO: 833602 - protein, 340 aa, Homo sapiens; identical to SEQ ID NO: 833597

SEQ ID NO: 833603 - protein, 210 aa, Homo sapiens
MLEKRSVGCRRCAVVGNSGNLRESSYGPEIDSHDFVLRMNKAPTAGFEADVGTKTTHHLVYPESFRELGDNVSMILVPFKTIDLEWVVSAITTGTISHTYIPVPAKIRVKQDKILIYHPAFIKYVFDNWLQGHGRYPSTGILSVIFSMHVCDEVDLYGFGADSKGNWHHYWENNPSAGAFRKTGVHDADFESNVTATLASINKIRIFKGR

SEQ ID NO: 833604 - protein, 340 aa, Homo sapiens; identical to SEQ ID NO: 833597

SEQ ID NO: 833605 - protein, 340 aa, Homo sapiens; identical to SEQ ID NO: 833597

SEQ ID NO: 833606 - protein, 340 aa, Homo sapiens; identical to SEQ ID NO: 833597

SEQ ID NO: 833607 - protein, 340 aa, Homo sapiens; identical to SEQ ID NO: 833597

SEQ ID NO: 833608 - protein, 340 aa, Homo sapiens; identical to SEQ ID NO: 833597

SEQ ID NO: 833609 - protein, 192 aa, Homo sapiens [sequence omitted]

SEQ ID NO: 833610 - protein, 248 aa, Homo sapiens
KAFGWSIALNQHKKIHTGEKPYKCEECGKAFSRSRNLTTHRRVHTREKPYKCEDRGRSFGWSTNLNEYKKIHTGDKLYKCKECGKVFKQSSHLNRHEKIHTGKKPYKCKECGKVITSSSSFAKHKRIHTGEKPFKCLECGKAFTSSTTLTKHRRIHTGEKPYTCEECGKAFRQSAILYVHRRIHTGEKPYTCGECGKTFRQSANLYAHKKIHTGEKPYTCGDCGKTFRQSANLYAHKKIHTGDKTIQV

SEQ ID NO: 833611 - protein, 248 aa, Homo sapiens; identical to SEQ ID NO: 833610

SEQ ID NO: 833612 - protein, 109 aa, Homo sapiens
MTQAGQSSGCTALWFPSMLFSLSLLSNLNQIGSSHLDRPHIPGQSAQLFIYQMSSQQLQQQPSANKKAGKIHNTPFANQLNPTQHLAKPFQQILPGRQSGSLTSPFLAC

SEQ ID NO: 833613 - protein, 109 aa, Homo sapiens; identical to SEQ ID NO: 833612

SEQ ID NO: 833614 - protein, 109 aa, Homo sapiens; identical to SEQ ID NO: 833612

SEQ ID NO: 833615 - protein, 109 aa, Homo sapiens
MHRDSCPLDCKVYVGNLGNNGNKTELERAFGYYGPLRSVWVARNPPGFAFVEFEDPRDAADAVRELDGRTLCGCRVRVELSNGEDYRRRSPPPRRRSPRRRSFSRSRSR

SEQ ID NO: 833616 - protein, 109 aa, Homo sapiens; identical to SEQ ID NO: 833612

SEQ ID NO: 833617 - protein, 109 aa, Homo sapiens; identical to SEQ ID NO: 833612

SEQ ID NO: 833618 - protein, 65 aa, Homo sapiens
  misc_feature (46)..(46): Xaa can be any naturally occurring amino acid
  misc_feature (52)..(52): Xaa can be any naturally occurring amino acid
  misc_feature (55)..(55): Xaa can be any naturally occurring amino acid
MATRRNWNGLLATMDHSEVCGLLETTACFVIEIRDHCISQSDETYXCGNGLXCRXNGTLGRAQYM

SEQ ID NO: 833619 - protein, 109 aa, Homo sapiens; identical to SEQ ID NO: 833612

SEQ ID NO: 833620 - protein, 120 aa, Homo sapiens
MHRDSCPLDCKVYVGNLGNNGNKTELERAFGYYGPLRSVWVARNPPGFAFVEFEDPRDAADAVRELDGRTLCGCRVRVELSNGEDYRRRSPPPRRRQVLERKLVKRYWCNGVASRSRYFS

SEQ ID NO: 833621 - protein, 109 aa, Homo sapiens; identical to SEQ ID NO: 833612

SEQ ID NO: 833622 - protein, 150 aa, Homo sapiens
KRRRASFVTFSTGRWRGLPAHSEGFLVLEWKNLYSSLGHEPGWGLPGSWEPQRGADSRVVFEMHRDSCPLDCKVYVGNLGNNGNKTELERAFGYYGPLRSVWVARNPPGFAFVEFEDPRDAADAVRELDGRTLCGCRVRVELSNGEQHTK

SEQ ID NO: 833623 - protein, 481 aa, Homo sapiens
MVMAAKKGPGPGGGVSGGKAEAEAASEVWCRRVRELGGCSQAGNRHCFECAQRGVTYVDITVGSFVCTTCSGLLRGLNPPHRVKSISMTTFTEPEVVFLQSRGNEVCRKIWLGLFDARTSLVPDSRDPQKVKEFLQEKYEKKRWYVPPDQVKGPTYTKGSASTPVQGSIPEGKPLRTLLGDPAPSLSVAASTSSQPVSQSHARTSQARSTQPPPHSSVKKASTDLLADIGGDPFAAPQMAPAFAAFPAFGGQTPSQGGFANFDAFSSGPSSSVFGSLPPAGQASFQAQPTPAGSSQGTPFGATPLAPASQPNSLADVGSFLGPGVPAAGVPSSLFGMAGQVPPLQSVTMGGGGGSSTGLAFGAFTNPFTAPAAQSPLPSTNPFQPNGLAPGPGFGMSSAGPGFPQAVPPTGAFASSFPAPLFPPQTPLVQQQNGSSFGDLGSAKLGQRPLSQPAGISTNPFMTGPSSSPFASKPPTTNPFL

SEQ ID NO: 833624 - protein, 481 aa, Homo sapiens; identical to SEQ ID NO: 833623

SEQ ID NO: 833625 - protein, 393 aa, Homo sapiens
MVMAAKKGPGPGGGVSGGKAEAEAASEVWCRRVRELGGCSQAGNRHCFECAQRGVTYVDITVGSFVCTTCSGLLRGLNPPHRVKSISMTTFTEPEVVFLQSRGNEVCRKIWLGLFDARTSLVPDSRDPQKVKEFLQEKYEKKRWYVPPDQVKGPTYTKGSASTPVQGSIPEGKPLRTLLGDPAPSLSVAASTSSQPVSQSHARTSQARSTQPPPHSSVKKASTDLLADIGGDPFAAPQMAPAFAAFPAFGGQTPSQGGFANFDAFSSGPSSSVFGSLPPAGQASFQAQPTPAGSSQGTPFGATPLAPASQPNSLADVGSFLGPGVPAAGVPSSLFGMAGQVPPLQSVTMGGGGGSSTGLAFGAFTNPFTAPAAQSPLPSTNPFHQLGSPPTPS

SEQ ID NO: 833626 - protein, 201 aa, Homo sapiens
MVMAAKKGPGPGGGVSGGKAEAEAASEVWCRRVRELGGCSQAGNRHCFECAQRGVTYVDITVGSFVCTTCSGLLRGLNPPHRVKSISMTTFTEPEVVFLQSRGNEVCRKIWLGLFDARTSLVPDSRDPQKVKEFLQEKYEKKRWYVPPDQVKGPTYTKGSASTPVQGSIPEGKPLRTLLGDPAPSLSVAASTSSQVTLRSA

SEQ ID NO: 833627 - protein, 155 aa, Homo sapiens
MVMAAKKGPGPGGGVSGGKAEAEAASEVWCRRVRELGGCSQAGNRHCFECAQRGVTYVDITVGSFVCTTCSGLLRGLNPPHRVKSISMTTFTEPEVVFLQSRGNEVCRKIWLGLFDARTSLVPDSRDPQKVKEFLQEKYEKKRWPDTFPRRLCQL

SEQ ID NO: 833628 - protein, 481 aa, Homo sapiens; identical to SEQ ID NO: 833623

SEQ ID NO: 833629 - protein, 236 aa, Homo sapiens [sequence omitted]

SEQ ID NO: 833630 - protein, 161 aa, Homo sapiens
MVMAAKKGPGPGGGVSGGKAEAEAASEVWCRRVRDSTGLAFGAFTNPFTAPAAQSPLPSTNPFQPNGLAPGPGFGMSSAGPGFPQAVPPTGAFASSFPAPLFPPQTPLVQQQNGSSFGDLGSAKLGQRPLSQPAGISTNPFMTGPSSSPFASKPPTTNPFL

SEQ ID NO: 833631 - protein, 223 aa, Homo sapiens
NREAAGDPGLPGLWATGAERARRGAGGSDRRREPAALTARRRTMEPAVSLAVCALLFLLWVRLKGLEFVLIHQRWVFVCLFLLPLSLIFDIYYYVRAWVVFKLSSAPRLHEQRVRDIQKQVREWKEQGSKTFMCTGRPGWLTVSLRVGKYKKTHKNIMINLMDILEVDTKKQIVRVEPLVTMGQVTALLTSIALRRQRNHPTHLASGGGRRKKETSSYILQSM

SEQ ID NO: 833632 - protein, 290 aa, Homo sapiens
NREAAGDPGLPGLWATGAERARRGAGGSDRRREPAALTARRRTMEPAVSLAVCALLFLLWVRLKGLEFVLIHQRWVFVCLFLLPLSLIFDIYYYVRAWVVFKLSSAPRLHEQRVRDIQKQVREWKEQGSKTFMCTGRPGWLTVSLRVGKYKKTHKNIMINLMDILEVDTKKQIVRVEPLVTMGQVTALLTSIGWTLPVLPELDDLTVGGLIMGTGIESSSHKYGLFQHICTAYELVLADGSFVRCTPYENSDLFYAVKPLPRSAISLLNSVNKLRTAVFQVDLSKGSLEP

SEQ ID NO: 833633 - protein, 212 aa, Homo sapiens
RLGTRPGGNRPREGLEYIPLRHYYHRHTRSIFWELQDIIPFGNNPIFRYLFGWMVPPKISLLKLTQGETLRKLYEQHHVVQDMLVPMKCLQQALHTFQNDIHVYPIWLCPFILPSQPGLVHPKGNEAELYIDIGAYGEPRVKHFEARSCMRQLEKFVRSVHGFQMLYADCYMNREEFWEMFDGSLYHKLREKLGCQDAFPEVYDKICKAARH

SEQ ID NO: 833634 - protein, 370 aa, Homo sapiens
RLGTRPGGNGRIESSSHKYGLFQHICTAYELVLADGSFVRCTPSENSDLFYAVPWSCGTLGFLVAAEIRIIPAKKYVKLRFEPVRGLEAICAKFTHESQRQENHFVEGLLYSLDEAVIMTGVMTDEAEPSKLNSIGNYYKPWFFKHVENYLKTNREGLEYIPLRHYYHRHTRSIFWELQDIIPFGNNPIFRYLFGWMVPPKISLLKLTQGETLRKLYEQHHVVQDMLVPMKCLQQALHTFQNDIHVYPIWLCPFILPSQPGLVHPKGNEAELYIDIGAYGEPRVKHFEARSCMRQLAGRGVFLGVFPPRGGPKIGPGAMVFQMLYADCYMNREEFWEMFDGSLYHKLREKLGCQDAFPEVYDKICKAARH

SEQ ID NO: 833635 - protein, 559 aa, Homo sapiens
NREAAGDPGLPGLWATGAERARRGAGGSDRRREPAALTARRRTMEPAVSLAVCALLFLLWVRLKGLEFVLIHQRWVFVCLFLLPLSLIFDIYYYVRAWVVFKLSSAPRLHEQRVRDIQKQVREWKEQGSKTFMCTGRPGWLTVSLRVGKYKKTHKNIMINLMDILEVDTKKQIVRVEPLVTMGQVTALLTSIGWTLPVLPELDDLTVGGLIMGTGIESSSHKYGLFQHICTAYELVLADGSFVRCTPSENSDLFYAVPWSCGTLGFLVAAEIRIIPAKKYVKLRFEPVRGLEAICAKFTHESQRQENHFVEGLLYSLDEAVIMTGVMTDEAEPSKLNSIGNYYKPWFFKHVENYLKTNREGLEYIPLRHYYHRHTRSIFWELQDIIPFGNNPIFRYLFGWMVPPKISLLKLTQGETLRKLYEQHHVVQDMLVPMKCLQQALHTFQNDIHVYPIWLCPFILPSQPGLVHPKGNEAELYIDIGAYGEPRVKHFEARSCMRQLEKFVRSVHGFQMLYADCYMNREEFWEMFDGSLYHKLREKLGCQDAFPEVYDKICKAARH

SEQ ID NO: 833636 - protein, 559 aa, Homo sapiens; identical to SEQ ID NO: 833635

SEQ ID NO: 833637 - protein, 559 aa, Homo sapiens; identical to SEQ ID NO: 833635

SEQ ID NO: 833638 - protein, 559 aa, Homo sapiens; identical to SEQ ID NO: 833635

SEQ ID NO: 833639 - protein, 559 aa, Homo sapiens; identical to SEQ ID NO: 833635

SEQ ID NO: 833640 - protein, 559 aa, Homo sapiens; identical to SEQ ID NO: 833635

SEQ ID NO: 833641 - protein, 559 aa, Homo sapiens; identical to SEQ ID NO: 833635

SEQ ID NO: 833642 - protein, 355 aa, Homo sapiens
RLGTRPGGNGRIESSSHKYGLFQHICTAYELVLADGSFVRCTPSENSDLFYAVPWSCGTLGFLVAAEIRIIPAKKYVKLRFEPVRGLEAICAKFTHESQRQENHFVEGLLYSLDEAVIMTGVMTDEAEPSKLNSIGNYYKPWFFKHVENYLKTNREGLEYIPLRHYYHRHTRSIFWELQDIIPFGNNPIFRYLFGWMVPPKISLLKLTQGETLRKLYEQHHVVQDMLVPMKCLQQALHTFQNDIHVYPIWLCPFILPSQPGLVHPKGNEAELYIDIGAYGEPRVKHFEARSCMRQLEKFVRSVHGFQMLYADCYMNREEFWEMFDGSLYHKLREKLGCQDAFPEVYDKICKAARH

SEQ ID NO: 833643 - protein, 559 aa, Homo sapiens; identical to SEQ ID NO: 833635

SEQ ID NO: 833644 - protein, 559 aa, Homo sapiens; identical to SEQ ID NO: 833635

SEQ ID NO: 833645 - protein, 95 aa, Homo sapiens
DDYVSELSGCITHLPRMDLLTLAGFLDRGPVLANPCGGTQKAKEPPYPFGLWRGQKKERNLILYFTKHVNSGISSHRRPMCFLAQCKTDDSTCCR

SEQ ID NO: 833646 - protein, 355 aa, Homo sapiens; identical to SEQ ID NO: 833642

SEQ ID NO: 833647 - protein, 355 aa, Homo sapiens; identical to SEQ ID NO: 833642

SEQ ID NO: 833648 - protein, 355 aa, Homo sapiens; identical to SEQ ID NO: 833642

SEQ ID NO: 833649 - protein, 559 aa, Homo sapiens; identical to SEQ ID NO: 833635

SEQ ID NO: 833650 - protein, 142 aa, Homo sapiens
FLLLPPLLCWSPHCTSHELSGASVLPSQNDIHVYPIWLCPFILPSQPGLVHPKGNEAELYIDIGAYGEPRVKHFEARSCMRQLEKFVRSVHGFQMLYADCYMNREEFWEMFDGSLYHKLREKLGCQDAFPEVYDKICKAARH

SEQ ID NO: 833651 - protein, 355 aa, Homo sapiens; identical to SEQ ID NO: 833642

SEQ ID NO: 833652 - protein, 142 aa, Homo sapiens; identical to SEQ ID NO: 833650

SEQ ID NO: 833653 - protein, 559 aa, Homo sapiens; identical to SEQ ID NO: 833635

SEQ ID NO: 833654 - protein, 559 aa, Homo sapiens; identical to SEQ ID NO: 833635

SEQ ID NO: 833655 - protein, 559 aa, Homo sapiens; identical to SEQ ID NO: 833635

SEQ ID NO: 833656 - protein, 190 aa, Homo sapiens [sequence omitted]

SEQ ID NO: 833657 - protein, 559 aa, Homo sapiens; identical to SEQ ID NO: 833635

SEQ ID NO: 833658 - protein, 559 aa, Homo sapiens; identical to SEQ ID NO: 833635

SEQ ID NO: 833659 - protein, 559 aa, Homo sapiens; identical to SEQ ID NO: 833635

SEQ ID NO: 833660 - protein, 559 aa, Homo sapiens; identical to SEQ ID NO: 833635

SEQ ID NO: 833661 - protein, 132 aa, Homo sapiens
  misc_feature (114)..(114): Xaa can be any naturally occurring amino acid
LVDSMCLNPRQQVLAGVRPESQRNGLCQVDSVLPGCCEGWGASRHSDSAEGTCSLAHLGLCGGGSYRTESDTVQSVNICSHTAHCDTSWRFSVCEYGGHRVLPCPLSPAVLHVXCISTCVLDSEVAYIHSAS

SEQ ID NO: 833662 - protein, 389 aa, Homo sapiens
NREAAGDPGLPGLWATGAERARRGAGGSDRRREPAALTARRRTMEPAVSLAVCALLFLLWVRLKGLEFVLIHQRWVFVCLFLLPLSLIFDIYYYVRAWVVFKLSSAPRLHEQRVRDIQKQVREWKEQGSKTFMCTGRPGWLTVSLRVGKYKKTHKNIMINLMDILEVDTKKQIVRVEPLVTMGQVTALLTSIGWTLPVLPELDDLTVGGLIMGTGIESSSHKYGLFQHICTAYELVLADGSFVRCTPSENSDLFYAVPWSCGTLGFLVAAEIRIIPAKKYVKLRFEPVRGLEAICAKFTHESQRQENHFVEGLLYSLDEAVIMTGVMTDEAEPSKLNSIGNYYKPWFFKHVENYLKTNREGLEYIPLRHYYHRHTRSIFWELQVRLGFL

SEQ ID NO: 833663 - protein, 465 aa, Homo sapiens
RRLSPPRQLPYTEPHSLAPPPPSLGAPPPPSGKKSTPNHSNPREASFHPWGDELSTVTSSSSPPKPPSPPPAPTPFWRRVKGPFKATAPSSGQTTGGDDHGSMADTDLFMECEEEELEPWQKISDVIEDSVVEDYNSVDKTTTVSVSQQPVSAPVPIAAHASVAGHLSTSTTVSSSGAQNSDSTKKTLVTLIANNNAGNPLVQQGGQPLILTQNPAPGLGTMVTQPVLRPVQVMQNANHVTSSPVASQPIFITTQGFPVRNVRPVQNAMNQVGIVLNVQQGQTVRPITLVPAPGTQFVKPTVGVPQVFSQMTPVRPGSTMPVRPTTNTFTTVIPATLTIRSTVPQSQSQQTKSTPSTSTTPTATQPTSLGQLAVQSPGQSNQTTNPKLAPSFPSPPAVSIASFVTVKRPGVTGENSNEVAKLVNTLNTIPSLGQSPGPVVVSNNSSAHGSQRTSGPESSMKGTIT

SEQ ID NO: 833664 - protein, 1459 aa, Homo sapiens
RRLSPPRQLPYTEPHSLAPPPPSLGAPPPPSGKKSTPNHSNPREASFHPWGDELSTVTSSSSPPKPPSPPPAPTPFWRRVKGPFKATAPSSGQTTGGDDHGSMADTDLFMECEEEELEPWQKISDVIEDSVVEDYNSVDKTTTAGNPLVQQGGQPLILTQNPAPGLGTMVTQPVLRPVQVMQNANHVTSSPVASQPIFITTQGFPVRNVRPVQNAMNQVGIVLNVQQGQTVRPITLVPAPGTQFVKPTVGVPQVFSQMTPVRPGSTMPVRPTTNTFTTVIPATLTIRSTVPQSQSQQTKSTPSTSTTPTATQPTSLGQLAVQSPGQSNQTTNPKLAPSFPSPPAVSIASFVTVKRPGVTGENSNEVAKLVNTLNTIPSLGQSPGPVVVSNNSSAHGSQRTSGPESSMKVTSSIPVFDLQDGGRKICPRCNAQFRVTEALRGHMCYCCPEMVEYQKKGKSLDSEPSVPSAAKPPSPEKTAPVASTPSSTPIPALSPPTKVPEPNENVGDAVQTKLIMLVDDFYYGRDGGKVAQLTNFPKVATSFRCPHCTKRLKNNIRFMNHMKHHVELDQQNGEVDGHTICQHCYRQFSTPFQLQCHLENVHSPYESTTKCKICEWAFESEPLFLQHMKDTHKPGEMPYVCQVCQYRSSLYSEVDVHFRMIHEDTRHLLCPYCLKVFKNGNAFQQHYMRHQKRNVYHCNKCRLQFLFAKDKIEHKLQHHKTFRKPKQLEGLKPGTKVTIRASRGQPRTVPVSSNDTPPSALQEAAPLTSSMDPLPVFLYPPVQRSIQKRAVRKMSVMGRQTCLECSFEIPDFPNHFPTYVHCSLCRYSTCCSRAYANHMINNHVPRKSPKYLALFKNSVSGIKLACTSCTFVTSVGDAMAKHLVFNPSHRSSSILPRGLTWIAHSRHGQTRDRVHDRNVKNMYPPPSFPTNKAATVKSAGATPAEPEELLTPLAPALPSPASTATPPPTPTHPQALALPPLATEGAECLNVDDQDEGSPVTQEPELASGGGGSGGVGKKEQLSVKKLRVVLFALCCNTEQAAEHFRNPQRRIRRWLRRFQASQGENLEGKYLSFEAEEKLAEWVLTQREQQLPVNEETLFQKATKIGRSLEGGFKISYEWAVRFMLRHHLTPHARRAVAHTLPKDVAENAGLFIDFVQRQIHNQDLPLSMIVAIDEISLFLDTEVLSSDDRKENALQTVGTGEPWCDVVLAILADGTVLPTLVFYRGQMDQPANMPDSILLEAKESGYSDDEIMELWSTRVWQKHTACQRSKGMLVMDCHRTHLSEEVLAMLSASSTLPAVVPAGCSSKIQPLDVCIKRTVKNFLHKKWKEQAREMADTACDSDVLLQLVLVWLGEVLGVIGDCPELVQRSFLVASVLPGPDGNINSPTRNADMQEELIASLEEQLKLSGEHSESSTPRPRSSPEETIEPESLHQLFEGESETESFYGFEEADLDLMEI

SEQ ID NO: 833665 - protein, 1512 aa, Homo sapiens
RRLSPPRQLPYTEPHSLAPPPPSLGAPPPPSGKKSTPNHSNPREASFHPWGDELSTVTSSSSPPKPPSPPPAPTPFWRRVKGPFKATAPSSGQTTGGDDHGSMADTDLFMECEEEELEPWQKISDVIEDSVVEDYNSVDKTTTVSVSQQPVSAPVPIAAHASVAGHLSTSTTVSSSGAQNSDSTKKTLVTLIANNNAGNPLVQQGGQPLILTQNPAPGLGTMVTQPVLRPVQVMQNANHVTSSPVASQPIFITTQGFPVRNVRPVQNAMNQVGIVLNVQQGQTVRPITLVPAPGTQFVKPTVGVPQVFSQMTPVRPGSTMPVRPTTNTFTTVIPATLTIRSTVPQSQSQQTKSTPSTSTTPTATQPTSLGQLAVQSPGQSNQTTNPKLAPSFPSPPAVSIASFVTVKRPGVTGENSNEVAKLVNTLNTIPSLGQSPGPVVVSNNSSAHGSQRTSGPESSMKVTSSIPVFDLQDGGRKICPRCNAQFRVTEALRGHMCYCCPEMVEYQKKGKSLDSEPSVPSAAKPPSPEKTAPVASTPSSTPIPALSPPTKVPEPNENVGDAVQTKLIMLVDDFYYGRDGGKVAQLTNFPKVATSFRCPHCTKRLKNNIRFMNHMKHHVELDQQNGEVDGHTICQHCYRQFSTPFQLQCHLENVHSPYESTTKCKICEWAFESEPLFLQHMKDTHKPGEMPYVCQVCQYRSSLYSEVDVHFRMIHEDTRHLLCPYCLKVFKNGNAFQQHYMRHQKRNVYHCNKCRLQFLFAKDKIEHKLQHHKTFRKPKQLEGLKPGTKVTIRASRGQPRTVPVSSNDTPPSALQEAAPLTSSMDPLPVFLYPPVQRSIQKRAVRKMSVMGRQTCLECSFEIPDFPNHFPTYVHCSLCRYSTCCSRAYANHMINNHVPRKSPKYLALFKNSVSGIKLACTSCTFVTSVGDAMAKHLVFNPSHRSSSILPRGLTWIAHSRHGQTRDRVHDRNVKNMYPPPSFPTNKAATVKSAGATPAEPEELLTPLAPALPSPASTATPPPTPTHPQALALPPLATEGAECLNVDDQDEGSPVTQEPELASGGGGSGGVGKKEQLSVKKLRVVLFALCCNTEQAAEHFRNPQRRIRRWLRRFQASQGENLEGKYLSFEAEEKLAEWVLTQREQQLPVNEETLFQKATKIGRSLEGGFKISYEWAVRFMLRHHLTPHARRAVAHTLPKDVAENAGLFIDFVQRQIHNQDLPLSMIVAIDEISLFLDTEVLSSDDRKENALQTVGTGEPWCDVVLAILADGTVLPTLVFYRGQMDQPANMPDSILLEAKESGYSDDEIMELWSTRVWQKHTACQRSKGMLVMDCHRTHLSEEVLAMLSASSTLPAVVPAGCSSKIQPLDVCIKRTVKNFLHKKWKEQAREMADTACDSDVLLQLVLVWLGEVLGVIGDCPELVQRSFLVASVLPGPDGNINSPTRNADMQEELIASLEEQLKLSGEHSESSTPRPRSSPEETIEPESLHQLFEGESETESFYGFEEADLDLMEI

SEQ ID NO: 833666 - protein, 1477 aa, Homo sapiens
GVSLPRASSRTRSRIPWPPHPPPSGPPRPPREKNPPRITRTRGRLPFTLGETSFQRLPLLRLPPSPRPLPLLPPPSGAGCKVPLRRRRLPRVQTTGGDDHGSMADTDLFMECEEEELEPWQKISDVIEDSVVEDYNSVDKTTTVSVSQQPVSAPVPIAAHASVAGHLSTSTTVSSSGAQNSDSTKKTLVTLIANNNAGNPLVQQGGQPLILTQNPAPGLGTMVTQPVLRPVQVMQNANHVTSSPVASQPIFITTQGFPVRNVRPVQNAMNQVGIVLNVQQGQTVRPITLVPAPGTQFVKPTVGVPQVFSQMTPVRPGSTMPVRPTTNTFTTVIPATLTIRSTVPQSQSQQTKSTPSTSTTPTATQPTSLGQLAVQSPGQSNQTTNPKLAPSFPSPPAVSIASFVTVKRPGVTGENSNEVAKLVNTLNTIPSLGQSPGPVVVSNNSSAHGSQRTSGPESSMKVLLPKKWLNTRRKESPWIQNPVSHQQQSPHPLRKTAPVASTPSSTPIPALSPPTKVPEPNENVGDAVQTKLIMLVDDFYYGRDGGKVAQLTNFPKVATSFRCPHCTKRLKNNIRFMNHMKHHVELDQQNGEVDGHTICQHCYRQFSTPFQLQCHLENVHSPYESTTKCKICEWAFESEPLFLQHMKDTHKPGEMPYVCQVCQYRSSLYSEVDVHFRMIHEDTRHLLCPYCLKVFKNGNAFQQHYMRHQKRNVYHCNKCRLQFLFAKDKIEHKLQHHKTFRKPKQLEGLKPGTKVTIRASRGQPRTVPVSSNDTPPSALQEAAPLTSSMDPLPVFLYPPVQRSIQKRAVRKMSVMGRQTCLECSFEIPDFPNHFPTYVHCSLCRYSTCCSRAYANHMINNHVPRKSPKYLALFKNSVSGIKLACTSCTFVTSVGDAMAKHLVFNPSHRSSSILPRGLTWIAHSRHGQTRDRVHDRNVKNMYPPPSFPTNKAATVKSAGATPAEPEELLTPLAPALPSPASTATPPPTPTHPQALALPPLATEGAECLNVDDQDEGSPVTQEPELASGGGGSGGVGKKEQLSVKKLRVVLFALCCNTEQAAEHFRNPQRRIRRWLRRFQASQGENLEGKYLSFEAEEKLAEWVLTQREQQLPVNEETLFQKATKIGRSLEGGFKISYEWAVRFMLRHHLTPHARRAVAHTLPKDVAENAGLFIDFVQRQIHNQDLPLSMIVAIDEISLFLDTEVLSSDDRKENALQTVGTGEPWCDVVLAILADGTVLPTLVFYRGQMDQPANMPDSILLEAKESGYSDDEIMELWSTRVWQKHTACQRSKGMLVMDCHRTHLSEEVLAMLSASSTLPAVVPAGCSSKIQPLDVCIKRTVKNFLHKKWKEQAREMADTACDSDVLLQLVLVWLGEVLGVIGDCPELVQRSFLVASVLPGPDGNINSPTRNADMQEELIASLEEQLKLSGEHSESSTPRPRSSPEETIEPESLHQLFEGESETESFYGFEEADLDLMEI

SEQ ID NO: 833667 - protein, 1244 aa, Homo sapiens
MNQVGIVLNVQQGQTVRPITLVPAPGTQFVKPTVGVPQVFSQMTPVRPGSTMPVRPTTNTFTTVIPATLTIRSTVPQSQSQQTKSTPSTSTTPTATQPTSLGQLAVQSPGQSNQTTNPKLAPSFPSPPAVSIASFVTVKRPGVTGENSNEVAKLVNTLNTIPSLGQSPGPVVVSNNSSAHGSQRTSGPESSMKVTSSIPVFDLQDGGRKICPRCNAQFRVTEALRGHMCYCCPEMVEYQKKGKSLDSEPSVPSAAKPPSPEKTAPVASTPSSTPIPALSPPTKVPEPNENVGDAVQTKLIMLVDDFYYGRDGGKVAQLTNFPKVATSFRCPHCTKRLKNNIRFMNHMKHHVELDQQNGEVDGHTICQHCYRQFSTPFQLQCHLENVHSPYESTTKCKICEWAFESEPLFLQHMKDTHKPGEMPYVCQVCQYRSSLYSEVDVHFRMIHEDTRHLLCPYCLKVFKNGNAFQQHYMRHQKRNVYHCNKCRLQFLFAKDKIEHKLQHHKTFRKPKQLEGLKPGTKVTIRASRGQPRTVPVSSNDTPPSALQEAAPLTSSMDPLPVFLYPPVQRSIQKRAVRKMSVMGRQTCLECSFEIPDFPNHFPTYVHCSLCRYSTCCSRAYANHMINNHVPRKSPKYLALFKNSVSGIKLACTSCTFVTSVGDAMAKHLVFNPSHRSSSILPRGLTWIAHSRHGQTRDRVHDRNVKNMYPPPSFPTNKAATVKSAGATPAEPEELLTPLAPALPSPASTATPPPTPTHPQALALPPLATEGAECLNVDDQDEGSPVTQEPELASGGGGSGGVGKKEQLSVKKLRVVLFALCCNTEQAAEHFRNPQRRIRRWLRRFQASQGENLEGKYLSFEAEEKLAEWVLTQREQQLPVNEETLFQKATKIGRSLEGGFKISYEWAVRFMLRHHLTPHARRAVAHTLPKDVAENAGLFIDFVQRQIHNQDLPLSMIVAIDEISLFLDTEVLSSDDRKENALQTVGTGEPWCDVVLAILADGTVLPTLVFYRGQMDQPANMPDSILLEAKESGYSDDEIMELWSTRVWQKHTACQRSKGMLVMDCHRTHLSEEVLAMLSASSTLPAVVPAGCSSKIQPLDVCIKRTVKNFLHKKWKEQAREMADTACDSDVLLQLVLVWLGEVLGVIGDCPELVQRSFLVASVLPGPDGNINSPTRNADMQEELIASLEEQLKLSGEHSESSTPRPRSSPEETIEPESLHQLFEGESETESFYGFEEADLDLMEI

SEQ ID NO: 833668 - protein, 1010 aa, Homo sapiens
MVEYQKKGKSLDSEPSVPSAAKPPSPEKTAPVASTPSSTPIPALSPPTKVPEPNENVGDAVQTKLIMLVDDFYYGRDGGKVAQLTNFPKVATSFRCPHCTKRLKNNIRFMNHMKHHVELDQQNGEVDGHTICQHCYRQFSTPFQLQCHLENVHSPYESTTKCKICEWAFESEPLFLQHMKDTHKPGEMPYVCQVCQYRSSLYSEVDVHFRMIHEDTRHLLCPYCLKVFKNGNAFQQHYMRHQKRNVYHCNKCRLQFLFAKDKIEHKLQHHKTFRKPKQLEGLKPGTKVTIRASRGQPRTVPVSSNDTPPSALQEAAPLTSSMDPLPVFLYPPVQRSIQKRAVRKMSVMGRQTCLECSFEIPDFPNHFPTYVHCSLCRYSTCCSRAYANHMINNHVPRKSPKYLALFKNSVSGIKLACTSCTFVTSVGDAMAKHLVFNPSHRSSSILPRGLTWIAHSRHGQTRDRVHDRNVKNMYPPPSFPTNKAATVKSAGATPAEPEELLTPLAPALPSPASTATPPPTPTHPQALALPPLATEGAECLNVDDQDEGSPVTQEPELASGGGGSGGVGKKEQLSVKKLRVVLFALCCNTEQAAEHFRNPQRRIRRWLRRFQASQGENLEGKYLSFEAEEKLAEWVLTQREQQLPVNEETLFQKATKIGRSLEGGFKISYEWAVRFMLRHHLTPHARRAVAHTLPKDVAENAGLFIDFVQRQIHNQDLPLSMIVAIDEISLFLDTEVLSSDDRKENALQTVGTGEPWCDVVLAILADGTVLPTLVFYRGQMDQPANMPDSILLEAKESGYSDDEIMELWSTRVWQKHTACQRSKGMLVMDCHRTHLSEEVLAMLSASSTLPAVVPAGCSSKIQPLDVCIKRTVKNFLHKKWKEQAREMADTACDSDVLLQLVLVWLGEVLGVIGDCPELVQRSFLVASVLPGPDGNINSPTRNADMQEELIASLEEQLKLSGEHSESSTPRPRSSPEETIEPESLHQLFEGESETESFYGFEEADLDLMEI

SEQ ID NO: 833669 - protein, 1010 aa, Homo sapiens; identical to SEQ ID NO: 833668

SEQ ID NO: 833670 - protein, 1512 aa, Homo sapiens; identical to SEQ ID NO: 833665

SEQ ID NO: 833671 - protein, 1512 aa, Homo sapiens; identical to SEQ ID NO: 833665

SEQ ID NO: 833672 - protein, 1512 aa, Homo sapiens; identical to SEQ ID NO: 833665

SEQ ID NO: 833673 - protein, 1454 aa, Homo sapiens
SDDRKENALQTVGTGEPWCDVVLAILADGTVLPTLVFYRGQMDQPANMPDSILLEAKELEPWQKISDVIEDSVVEDYNSVDKTTTVSVSQQPVSAPVPIAAHASVAGHLSTSTTVSSSGAQNSDSTKKTLVTLIANNNAGNPLVQQGGQPLILTQNPAPGLGTMVTQPVLRPVQVMQNANHVTSSPVASQPIFITTQGFPVRNVRPVQNAMNQVGIVLNVQQGQTVRPITLVPAPGTQFVKPTVGVPQVFSQMTPVRPGSTMPVRPTTNTFTTVIPATLTIRSTVPQSQSQQTKSTPSTSTTPTATQPTSLGQLAVQSPGQSNQTTNPKLAPSFPSPPAVSIASFVTVKRPGVTGENSNEVAKLVNTLNTIPSLGQSPGPVVVSNNSSAHGSQRTSGPESSMKVTSSIPVFDLQDGGRKICPRCNAQFRVTEALRGHMCYCCPEMVEYQKKGKSLDSEPSVPSAAKPPSPEKTAPVASTPSSTPIPALSPPTKVPEPNENVGDAVQTKLIMLVDDFYYGRDGGKVAQLTNFPKVATSFRCPHCTKRLKNNIRFMNHMKHHVELDQQNGEVDGHTICQHCYRQFSTPFQLQCHLENVHSPYESTTKCKICEWAFESEPLFLQHMKDTHKPGEMPYVCQVCQYRSSLYSEVDVHFRMIHEDTRHLLCPYCLKVFKNGNAFQQHYMRHQKRNVYHCNKCRLQFLFAKDKIEHKLQHHKTFRKPKQLEGLKPGTKVTIRASRGQPRTVPVSSNDTPPSALQEAAPLTSSMDPLPVFLYPPVQRSIQKRAVRKMSVMGRQTCLECSFEIPDFPNHFPTYVHCSLCRYSTCCSRAYANHMINNHVPRKSPKYLALFKNSVSGIKLACTSCTFVTSVGDAMAKHLVFNPSHRSSSILPRGLTWIAHSRHGQTRDRVHDRNVKNMYPPPSFPTNKAATVKSAGATPAEPEELLTPLAPALPSPASTATPPPTPTHPQALALPPLATEGAECLNVDDQDEGSPVTQEPELASGGGGSGGVGKKEQLSVKKLRVVLFALCCNTEQAAEHFRNPQRRIRRWLRRFQASQGENLEGKYLSFEAEEKLAEWVLTQREQQLPVNEETLFQKATKIGRSLEGGFKISYEWAVRFMLRHHLTPHARRAVAHTLPKDVAENAGLFIDFVQRQIHNQDLPLSMIVAIDEISLFLDTEVLSSDDRKENALQTVGTGEPWCDVVLAILADGTVLPTLVFYRGQMDQPANMPDSILLEAKESGYSDDEIMELWSTRVWQKHTACQRSKGMLVMDCHRTHLSEEVLAMLSASSTLPAVVPAGCSSKIQPLDVCIKRTVKNFLHKKWKEQAREMADTACDSDVLLQLVLVWLGEVLGVIGDCPELVQRSFLVASVLPGPDGNINSPTRNADMQEELIASLEEQLKLSGEHSESSTPRPRSSPEETIEPESLHQLFEGESETESFYGFEEADLDLMEI

SEQ ID NO: 833674 - protein, 1003 aa, Homo sapiens
  misc_feature (19)..(19): Xaa can be any naturally occurring amino acid
QKIVVIKGSDEPALLCNIXSATEVGRSSTSSTPIPALSPPTKVPEPNENVGDAVQTKLIMLVDDFYYGRDGGKVAQLTNFPKVATSFRCPHCTKRLKNNIRFMNHMKHHVELDQQNGEVDGHTICQHCYRQFSTPFQLQCHLENVHSPYESTTKCKICEWAFESEPLFLQHMKDTHKPGEMPYVCQVCQYRSSLYSEVDVHFRMIHEDTRHLLCPYCLKVFKNGNAFQQHYMRHQKRNVYHCNKCRLQFLFAKDKIEHKLQHHKTFRKPKQLEGLKPGTKVTIRASRGQPRTVPVSSNDTPPSALQEAAPLTSSMDPLPVFLYPPVQRSIQKRAVRKMSVMGRQTCLECSFEIPDFPNHFPTYVHCSLCRYSTCCSRAYANHMINNHVPRKSPKYLALFKNSVSGIKLACTSCTFVTSVGDAMAKHLVFNPSHRSSSILPRGLTWIAHSRHGQTRDRVHDRNVKNMYPPPSFPTNKAATVKSAGATPAEPEELLTPLAPALPSPASTATPPPTPTHPQALALPPLATEGAECLNVDDQDEGSPVTQEPELASGGGGSGGVGKKEQLSVKKLRVVLFALCCNTEQAAEHFRNPQRRIRRWLRRFQASQGENLEGKYLSFEAEEKLAEWVLTQREQQLPVNEETLFQKATKIGRSLEGGFKISYEWAVRFMLRHHLTPHARRAVAHTLPKDVAENAGLFIDFVQRQIHNQDLPLSMIVAIDEISLFLDTEVLSSDDRKENALQTVGTGEPWCDVVLAILADGTVLPTLVFYRGQMDQPANMPDSILLEAKESGYSDDEIMELWSTRVWQKHTACQRSKGMLVMDCHRTHLSEEVLAMLSASSTLPAVVPAGCSSKIQPLDVCIKRTVKNFLHKKWKEQAREMADTACDSDVLLQLVLVWLGEVLGVIGDCPELVQRSFLVASVLPGPDGNINSPTRNADMQEELIASLEEQLKLSGEHSESSTPRPRSSPEETIEPESLHQLFEGESETESFYGFEEADLDLMEI

SEQ ID NO: 833675 - protein, 1512 aa, Homo sapiens; identical to SEQ ID NO: 833665

SEQ ID NO: 833676 - protein, 434 aa, Homo sapiens
SDDRKENALQTVGTGEPWCDVVLAILADGTVLPTLVFYRGQMDQPANMPDSILLEAKELEPWQKISDVIEDSVVEDYNSVDKTTTVSVSQQPVSAPVPIAAHASVAGHLSTSTTVSSSGAQNSDSTKKTLVTLIANNNAGNPLVQQGGQPLILTQNPAPGLGTMVTQPVLRPVQVMQNANHVTSSPVASQPIFITTQGFPVRNVRPVQNAMNQVGIVLNVQQGQTVRPITLVPAPGTQFVKPTVGVPQVFSQMTPVRPGSTMPVRPTTNTFTTVIPATLTIRSTVPQSQSQQTKSTPSTSTTPTATQPTSLGQLAVQSPGQSNQTTNPKLGKASEEEMAEPGWDGGWRTDDYHLVTVAPSFPSPPAVSIASFVTVKRPGVTGENSNEVAKLVNTLNTIPSLGQSPGPVVVSNNSSAHGSQRTSGPESSMKGTIT

SEQ ID NO: 833677 - protein, 907 aa, Homo sapiens
MSGQTLTDRIAAAQYSVTGSAVARAVCKATTHEVMGPKKKHLDYLIQATNETNVNIPQMADTLFERATNSSWVVVFKALVTTHHLMVHGNERFIQYLASRNTLFNLSNFLDKSGSHGYDMSTFIRRYSRYLNEKAFSYRQMAFDFARVKKGADGVMRTMAPEKLLKSMPILQGQIDALLEFDVHPNELTNGVINAAFMLLFKDLIKLFACYNDGVINLLEKFFEMKKGQCKDALEIYKRFLTRMTRVSEFLKVAEQVGIDKGDIPDLTQAPSSLMETLEQHLNTLEGKKPGNNEGSGAPSPLSKSSPATTVTSPNSTPAKTIDTSPPVDLFATASAAVPVSTSKPSSDLLDLQPDFSSGGAAAAAAPAPPPPAGGATAWGDLLGEDSLAALSSVPSEAQISDPFAPEPTPPTTTAEIATASASASTTTTVTAVTAEVDLFGDAFAASPGEAPAASEGAAAPATPTPVAAALDACSGNDPFAPSEGSAEAAPELDLFAMKPPETSVPVVTPTASTAPPVPATAPSPAPAVAAAAAATTAATAAATTTTTTSAATATTAPPALDIFGDLFESTPEVAAAPKPDAAPSIDLFSTDAFSSPPQGASPVPESSLTADLLSVDAFAAPSPATTASPAKVDSSGVIDLFGDAFGSSASEPQPASQAASSSSASADLLAGFGGSFMAPSPSPVTPAQNNLLQPNFEAAFGTTPSTSSSSSFDPSVFDGLGDLLMPTMAPAGQPAPVSMVPPSPAMAASKALGSDLDSSLASLVGNLGISGTTTKKGDLQWNAGEKKLTGGANWQPKVAPATWSAGVPPSAPLQGAVPPTSSVPPVAGAPSVGQPGAGFGMPPAGTGMPMMPQQPVMFAQPMMRPPFGAAAVPGTQLSPSPTPASQSPKKPPAKDPLADLNIKDFL

SEQ ID NO: 833678 - protein, 907 aa, Homo sapiens; identical to SEQ ID NO: 833677

SEQ ID NO: 833679 - protein, 907 aa, Homo sapiens; identical to SEQ ID NO: 833677

SEQ ID NO: 833680 - protein, 881 aa, Homo sapiens
MSGQTLTDRIAAAQYSVTGSAVARAVCKATTHEVMGPKKKHLDYLIQATNETNVNIPQMADTLFERATNSSWVVVFKALVTTHHLMVHGNERFIQYLASRNTLFNLSNFLDKSGSHGYDMSTFIRRYSRYLNEKAFSYRQMAFDFARVKKGADGVMRTMAPEKLLKSMPILQGQIDALLEFDVHPNELTNGVINAAFMLLFKDLIKLFACYNDGVINLLEKFFEMKKGQCKDALEIYKRFLTRMTRVSEFLKVAEQVGIDKGDIPDLTQAPSSLMETLEQHLNTLEGKKPGNNEGSGAPSPLSKSSPATTVTSPNSTPAKTIDTSPPVDLFATASAAVPVSTSKPSSDLLDLQPDFSSGGAAAAAAPAPPPPAGGATAWGDLLGEDSLAALSSVPSEAQISDPFAPEPTPPTTTAEIATASASASTTTTVTAVTAEVDLFGDAFAASPGEAPAASEGAAAPATPTPVAAALDACSGNDPFAPSEGSAEAAPELDLFAMKPPETSVPVVTPTASTAPPVPATAPSPAPAVAAAAAATTAATAAATTTTTTSAATATTAPPALDIFGDLFESTPEVAAAPKPDAAPSIDLFSTDAFSSPPQGASPVPESSLTADLLSVDAFAAPSPATTASPAKVDSSGVIDLFGDAFGSSASEPQPASQAASSSSASADLLAGFGGSFMAPSPSPVTPAQNNLLQPNFEAAFGTTPSTSSSSSFDPSVFDGLGDLLMPTMAPAGQPAPVSMVPPSPAMAASKALGSDLDSSLASLVGNLGISGTTTKKGDLQWNAGEKKLTGGANWQPKVAPATWSAGVPPSAPLQGAVPPTSSVPPVAGAPSVGQPGAGFGMPPAGTGMPMMPQQPVMFAQPMMRPPFGAAAVPGTQLQYL

SEQ ID NO: 833681 - protein, 527 aa, Homo sapiens
LWGNIDSLAALSSVPSEAQISDPFAPEPTPPTTTAEIATASASASTTTTVTAVTAEVDLFGDAFAASPGEAPAASEGAAAPATPTPVAAALDACSGNDPFAPSEGSAEAAPELDLFAMKPPETSVPVVTPTASTAPPVPATAPSPAPAVAAAAAATTAATAAATTTTTTSAATATTAPPALDIFGDLFESTPEVAAAPKPDAAPSIDLFSTDAFSSPPQGASPVPESSLTADLLSVDAFAAPSPATTASPAKVDSSGVIDLFGDAFGSSASEPQPASQAASSSSASADLLAGFGGSFMAPSPSPVTPAQNNLLQPNFEAAFGTTPSTSSSSSFDPSVFDGLGDLLMPTMAPAGQPAPVSMVPPSPAMAASKALGSDLDSSLASLVGNLGISGTTTKKGDLQWNAGEKKLTGGANWQPKVAPATWSAGVPPSAPLQGAVPPTSSVPPVAGAPSVGQPGAGFGMPPAGTGMPMMPQQPVMFAQPMMRPPFGAAAVPGTQLSPSPTPASQSPKKPPAKDPLADLNIKDFL

SEQ ID NO: 833682 - protein, 481 aa, Homo sapiens
GDAARSARETRRRWQKRRRRAAGEAPAASEGAAAPATPTPVAAALDACSGNDPFAPSEGSAEAAPELDLFAMKPPETSVPVVTPTASTAPPVPATAPSPAPAVAAAAAATTAATAAATTTTTTSAATATTAPPALDIFGDLFESTPEVAAAPKPDAAPSIDLFSTDAFSSPPQGASPVPESSLTADLLSVDAFAAPSPATTASPAKVDSSGVIDLFGDAFGSSASEPQPASQAASSSSASADLLAGFGGSFMAPSPSPVTPAQNNLLQPNFEAAFGTTPSTSSSSSFDPSVFDGLGDLLMPTMAPAGQPAPVSMVPPSPAMAASKALGSDLDSSLASLVGNLGISGTTTKKGDLQWNAGEKKLTGGANWQPKVAPATWSAGVPPSAPLQGAVPPTSSVPPVAGAPSVGQPGAGFGMPPAGTGMPMMPQQPVMFAQPMMRPPFGAAAVPGTQLSPSPTPASQSPKKPPAKDPLADLNIKDFL

SEQ ID NO: 833683 - protein, 550 aa, Homo sapiens
MSGQTLTDRIAAAQYSVTGSAVARAVCKATTHEVMGPKKKHLDYLIQATNETNVNIPQMADTLFERATNSSWVVVFKALVTTHHLMVHGNERFIQYLASRNTLFNLSNFLDKSGSHGYDMSTFIRRYSRYLNEKAFSYRQMAFDFARVKKGADGVMRTMAPEKLLKSMPILQGQIDALLEFDVHPNELTNGVINAAFMLLFKDLIKLFACYNDGVINLLEKFFEMKKGQCKDALEIYKRFLTRMTRVSEFLKVAEQVGIDKGDIPDLTQAPSSLMETLEQHLNTLEGKKPGNNEGSGAPSPLSKSSPATTVTSPNSTPAKTIDTSPPVDLFATASAAVPVSTSKPSSDLLDLQPDFSSGGAAAAAAPAPPPPAGGATAWGDLLGEDSLAALSSVPSEAQISDPFAPEPTPPTTTAEIATASASASTTTTVTAVTAEVDLFGDAFAASPGEAPAASEGAAAPATPTPVAAALDACSGNDPFAPSEGSAEAAPELDLFAMKPPETSVPVVTPTASTAPPVPATAPSPAPAVAAAAAATTAAESAALGSSRRG

SEQ ID NO: 833684 - protein, 194 aa, Homo sapiens
LEDPNAADSAPAPPPPAGGATAWGDLLGEDSLAALSSVPSEAQISDPFAPEPTPPTTTAEIATASASASTTTTVTAVTAEVDLFGDAFAASPGEAPAASEGAAAPATPTPVAAALDACSGNDPFAPSEGSAEAAPELDLFAMKPPETSVPVVTPTASTAPPVPATAPSPAPAVAAAAAATTAAESAALGSSRRG

SEQ ID NO: 833685 - protein, 907 aa, Homo sapiens; identical to SEQ ID NO: 833677

SEQ ID NO: 833686 - protein, 813 aa, Homo sapiens
MSGQTLTDRIAAAQYSVTGSAVARAVCKATTHEVMGPKKKHLDYLIQATNETNVNIPQMADTLFERATNSSWVVVFKALVTTHHLMVHGNERFIQYLASRNTLFNLSNFLDKSGSHGYDMSTFIRRYSRYLNEKAFSYRQMAFDFARVKKGADGVMRTMAPEKLLKSMPILQGQIDALLEFDVHPNELTNGVINAAFMLLFKDLIKLFACYNDGVINLLEKFFEMKKGQCKDALEIYKRFLTRMTRVSEFLKVAEQVGIDKGDIPDLTQAPSSLMETLEQHLNTLEGKKPGNNEGSGAPSPLSKSSPATTVTSPNSTPAKTIDTSPPVDLFATASAAVPVSTSKPSSDLLDLQPDFSSGGAAAAAAPAPPPPAGGATAWGDLLGEDSLAALSSVPSEAQISDPFAPEPTPPTTTAEIATASASASTTTTVTAVTAEVDLFGDAFAASPGEAPAASEGAAAPATPTPVAAALDACSGNDPFAPSEGSAEAAPELDLFAMKPPETSVPVVTPTASTAPPVPATAPSPAPAVAAAAAATTAATAAATTTTTTSAATATTAPPALDIFGDLFESTPEVAAAPKPDAAPSIDLFSTDAFSSPPQGASPVPESSLTADLLSVDAFAAPSPATTASPAKVDSSGVIDLFGDAFGSSASEPQPASQAASSSSASADLLAGFGGSFMAPSPSPVTPAQNNLLQPNFEAAFGTTPSTSSSSSFDPSVFDGLGDLLMPTMAPAGQPAPVSMVPPSPAMAASKALGSDLDSSLASLVGNLGISGTTTKNKELYLQPVQFLLLPGPHRLDNLEQDLECLLLGQACP

SEQ ID NO: 833687 - protein, 551 aa, Homo sapiens
LEDPNAADSAPAPPPPAGGATAWGDLLGEDSLAALSSVPSEAQISDPFAPEPTPPTTTAEIATASASASTTTTVTAVTAEVDLFGDAFAASPGEAPAASEGAAAPATPTPVAAALDACSGNDPFAPSEGSAEAAPELDLFAMKPPETSVPVVTPTASTAPPVPATAPSPAPAVAAAAAATTAATAAATTTTTTSAATATTAPPALDIFGDLFESTPEVAAAPKPDAAPSIDLFSTDAFSSPPQGASPVPESSLTADLLSVDAFAAPSPATTASPAKVDSSGVIDLFGDAFGSSASEPQPASQAASSSSASADLLAGFGGSFMAPSPSPVTPAQNNLLQPNFEAAFGTTPSTSSSSSFDPSVFDGLGDLLMPTMAPAGQPAPVSMVPPSPAMAASKALGSDLDSSLASLVGNLGISGTTTKKGDLQWNAGEKKLTGGANWQPKVAPATWSAGVPPSAPLQGAVPPTSSVPPVAGAPSVGQPGAGFGMPPAGTGMPMMPQQPVMFAQPMMRPPFGAAAVPGTQLSPSPTPASQSPKKPPAKDPLADLNIKDFL

SEQ ID NO: 833688 - protein, 481 aa, Homo sapiens
SFYSFNFCCFKNRTQDAFAASPGEAPAASEGAAAPATPTPVAAALDACSGNDPFAPSEGSAEAAPELDLFAMKPPETSVPVVTPTASTAPPVPATAPSPAPAVAAAAAATTAATAAATTTTTTSAATATTAPPALDIFGDLFESTPEVAAAPKPDAAPSIDLFSTDAFSSPPQGASPVPESSLTADLLSVDAFAAPSPATTASPAKVDSSGVIDLFGDAFGSSASEPQPASQAASSSSASADLLAGFGGSFMAPSPSPVTPAQNNLLQPNFEAAFGTTPSTSSSSSFDPSVFDGLGDLLMPTMAPAGQPAPVSMVPPSPAMAASKALGSDLDSSLASLVGNLGISGTTTKKGDLQWNAGEKKLTGGANWQPKVAPATWSAGVPPSAPLQGAVPPTSSVPPVAGAPSVGQPGAGFGMPPAGTGMPMMPQQPVMFAQPMMRPPFGAAAVPGTQLSPSPTPASQSPKKPPAKDPLADLNIKDFL

SEQ ID NO: 833689 - protein, 196 aa, Homo sapiens
MICLVLTIFANLFPAGEPRGAGRGRVAGAGPASRPVPACPAACTGAHERTFLAVKPDGVQRRLVGEIVRRFERKGFKLVALKLVQRASEELLREHYAELRERPFYGRLVKYMASGPVVAMVWQGLDVVRTSRALIGATNPADAPPGTIRGDFCIEVGKNLIHGSDSVESARREIALWFRADELLCWEDSAGHWLYE

SEQ ID NO: 833690 - protein, 165 aa, Homo sapiens
MVARLGGRPAACTGAHERTFLAVKPDGVQRRLVGEIVRRFERKGFKLVALKLVQRASEELLREHYAELRERPFYGRLVKYMASGPVVAMVWQGLDVVRTSRALIGATNPADAPPGTIRGDFCIEVGKNLIHGSDSVESARREIALWFRADELLCWEDSAGHWLYE

SEQ ID NO: 833691 - protein, 226 aa, Homo sapiens
GDLASAAALRPPTAAGFRGASEAASPRRPQRPDQASLSAGPAPGATAPPRGSRSRTAIMICLVLTIFANLFPAACTGAHERTFLAVKPDGVQRRLVGEIVRRFERKGFKLVALKLVQRGAVSERGRGVGGRGAGTWGRLGAGCGRRRPDPSAGPPRSCCVSTTPSCVNARSTAALSSIWPPGRWWPWFGRGWTWCAPRGRSSEPRTRPTPRPAPSAGISASRLART

SEQ ID NO: 833692 - protein, 174 aa, Homo sapiens
MICLVLTIFANLFPAGEPRGAGRGLGGRCWAGLTARPRLPRSLHRRTRTHLPGREAGRRAAAAGASEELLREHYAELRERPFYGRLVKYMASGPVVAMVWQGLDVVRTSRALIGATNPADAPPGTIRGDFCIEVGKNLIHGSDSVESARREIALWFRADELLCWEDSAGHWLYE

SEQ ID NO: 833693 - protein, 287 aa, Homo sapiens
GDLASAAALRPPTAAGFRGASEAASPRRPQRPDQASLSAGPAPGATAPPRGSRSRTAIMICLVLTIFANLFPAACTGAHERTFLAVKPDGVQRRLVGEIVRRFERKGFKLVALKLVQRGAVSERGRGVGGRGAGTWGRLGAGCGRRRPDPSAGPPRSCCVSTTPSCVNARSTAALSSIWPPGRWWPWSSIREAGGRLRDPHPRVIPRPFLRTGLAGAGRGAHLAGAHRSHEPGRRPARHHPRGFLHRGWQEPDSRQRLGGECPPRDRSLVPRRRAPLLGGQRWALAV

SEQ ID NO: 833694 - protein, 228 aa, Homo sapiens
GDLASAAALRPPTAAGFRGASEAASPRRPQRPDQASLSAGPAPGATAPPRGSRSRTAIMICLVLTIFANLFPAACTGAHERTFLAVKPDGVQRRLVGEIVRRFERKGFKLVALKLVQRASEELLREHYAELRERPFYGRLVKYMASGPVVAMVWQGLDVVRTSRALIGATNPADAPPGTIRGDFCIEVGKNLIHGSDSVESARREIALWFRADELLCWEDSAGHWLYE

SEQ ID NO: 833695 - protein, 165 aa, Homo sapiens; identical to SEQ ID NO: 833690

SEQ ID NO: 833696 - protein, 90 aa, Homo sapiens
GDLASAAALRPPTAAGFRGASEAASPRRPQRPDQASLSAGPAPGATAPPRGSRSRTAIMICLVLTIFANLFPAGEPRGAGRGRVAGAGPA

SEQ ID NO: 833697 - protein, 109 aa, Homo sapiens
MASGPVVAMVSIREAGGRLRDPHPRVIPRPFLRTGLAGAGRGAHLAGAHRSHEPGRRPARHHPRGFLHRGWQEPDSRQRLGGECPPRDRSLVPRRRAPLLGGQRWALAV

SEQ ID NO: 833698 - protein, 104 aa, Homo sapiens
MSTHSRPPTGESRGRMRATNARHVDANSTPARGEPDDADSVWVRPHLRGVIYTRRWMTKKGSTHDARIKLGTDTLACAKVTTKPAADHRRHGRRRPPYPPPPLL

SEQ ID NO: 833699 - protein, 68 aa, Homo sapiens
  misc_feature (14)..(14): Xaa can be any naturally occurring amino acid
YVCDKAVLIVTLCXALRETLMRKKVLQNLNFGRVHYQRQMKNHRKKNLMSIFRICFYETRERSLRSLM

SEQ ID NO: 833700 - protein, 315 aa, Homo sapiens
MHGHGGYDSDFSDDERCGESSKRKKRTVEDDLLLQKPFQKEKHGKVAHKQVAAELLDREEARNRRFHLIAMDAYQRHTKFVNDYILYYGGKKEDFKRLGENDKTDLDVIRENHRFLWNEEDEMDMTWEKRLAKKYYDKLFKEYCIADLSKYKENKFGFRWRVEKEVISGKGQFFCGNKYCDKKEGLKSWEVNFGYIEHGEKRNALVKLRLCQECSIKLNFHHRRKEIKSKKRKDKTKKDCEESSHKKSRLSSAEEASKKKDKGHSSSKKSEDSLLRNSDEEESASESELWKGPLPETDEKSQEEEFDEYFQDLFL

SEQ ID NO: 833701 - protein, 382 aa, Homo sapiens
GTRRERRVAGGGGGGGGGGGCGEAVRQGARDLSCSGSLRPWVVAAAAGKEGNDDSGGELGTQGGRERMHGHGGYDSDFSDDERCGESSKRKKRTVEDDLLLQKPFQKEKHGKVAHKQVAAELLDREEARNRRFHLIAMDAYQRHTKFVNDYILYYGGKKEDFKRLGENDKTDLDVIRENHRFLWNEEDEMDMTWEKRLAKKYYDKLFKEYCIADLSKYKENKFGFRWRVEKEVISGKGQFFCGNKYCDKKEGLKSWEVNFGYIEHGEKRNALVKLRLCQECSIKLNFHHRRKEIKSKKRKDKTKKDCEESSHKKSRLSSAEEASKKKDKGHSSSKKSEDSLLRNSDEEESASESELWKGPLPETDEKSQEEEFDEYFQDLFL

SEQ ID NO: 833702 - protein, 369 aa, Homo sapiens
GTRRERRVAGGGGGGGGGGGCGEAVRQGARDLSCSGSLRPWVVAAAAGKEGNDDSGGELGTQGGRERMHGHGGYDSDFSDDERCGESSKRKKRTVEDDLLLQKPFQKEKHGKVAHKQVAAELLDREEARNRRFHLIAMDAYQRHTKFVNDYILYYGGKKEDFKRLGENDKTDLDVIRENHRFLWNEEDEMDMTWEKRLAKKYYDKLFKEYCIADLSKYKENKFGFRWRVEKEVISGKGQFFCGNKYCDKKEGLKSWEVNFGYIEHGEKRNALVKLRLCQECSIKLNFHHRRKEIKSKKRKDKTKKDCEESSHKKSRLSSAEEASKKKDKGHSSSKKSEDSLLRNSDEEESASESELWKGPLPETDEKSQ

SEQ ID NO: 833703 - protein, 382 aa, Homo sapiens; identical to SEQ ID NO: 833701

SEQ ID NO: 833704 - protein, 369 aa, Homo sapiens; identical to SEQ ID NO: 833702

SEQ ID NO: 833705 - protein, 725 aa, Homo sapiens
MAVIESGILFSRLKFYHLYVDALEYKMPSPTFAIFARIGVRIDSVRSKVQTHMLIQGSESNRKKARTTVTNQCCFIFMLCLTKGHSVLTGHICAIFFFRLIIIIGEELSANVTTLGVIVLLSDNFDSIFKFLVDYIQVIYLKHIYFVIFNKMSLLFLLILKVIHAHCLKYKQFENFKIESKSIPGPQVISSVKFGWLLQTYNTYIKLHVCISCAYVFNISIILCILFVTFEKFDIEWTFFYCSTYRYANVFKQLYEYLFNQSLIPNWWGIEVFCCCCYTVCIFVHMYQRCLFMYVSNQIPKSSIAGQRVMRFKLIYIARFFSRKRFTEFSLPAMCENASFFPETGFFSLCNQHWFFKMSDNFFENNLTELVLHTSSVLKVANPNVNMFSTNVNLNLRVFCVTKKKKKLDQRQLLLQEIIDLQELILDIATLTQCNLEKFRGDLKSLAFLLRFFGNPWLIYICFKRIYCTCESELNFQRVIKVEAELNKKLIVLANNSKCALSIIGFYKSSFLNEQETLMRKKVLQNLNFGRVHYQRQMKNHSEVLILIEICTFSISLGSYNHSFINGKIQHHGDLFNAKDCLAWYRLELIPSHCHKQPTHPASSWKINLSSVHFNRRTSGPCLDFFRDGCFLSFQRSLFHHTVIIINLCKGIPCMGSTLLYCYPTGLLKSKIIIFTVTNTLYIYYAQCSKKNYSLRRFTQFPLVIPQYNLGLHFSLKIVSFLFTS

SEQ ID NO: 833706 - protein, 548 aa, Homo sapiens
MNIEVVEVLTLNQEVAGPRNAQIQALYAEDGSLSADAPSEQVQQQGKHPGDPEAARQRFRQFRYKDMTGPREALDQLRELCHQWLQPKARSKEQILELLVLEQFLGALPVKLRTWVESQHPENCQEVVALVEGVTWMSEEEVLPAGQPAEGTTCCLEVTAQQEEKQEDAAICPVTVLPEEPVTFQDVAVDFSREEWGLLGPTQRTEYRDVMLETFGHLVSVGWETTLENKELAPNSDIPEEEPAPSLKVQESSRDCALSSTLEDTLQGGVQEVQDTVLKQMESAQEKDLPQKKHFDNRESQANSGALDTNQVSLQKIDNPESQANSGALDTNQVLLHKIPPRKRLRKRDSQVKSMKHNSRVKIHQKSCERQKAKEGNGCRKTFSRSTKQITFIRIHKGSQVCRCSECGKIFRNPRYFSVHKKIHTGERPYVCQDCGKGFVQSSSLTQHQRVHSGERPFECQECGRTFNDRSAISQHLRTHTGAKPYKCQDCGKAFRQSSHLIRHQRTHTGERPYACNKCGKAFTQSSHLIGHQRTHNRTKRKKKQPTS

SEQ ID NO: 833707 - protein, 611 aa, Homo sapiens
MLENYRNLVSVEHQLSKPDVVSQLEEAEDFWPVERGIPQDTIPEYPELQLDPKLDPLPAESPLMNIEVVEVLTLNQEVAGPRNAQIQALYAEDGSLSADAPSEQVQQQGKHPGDPEAARQRFRQFRYKDMTGPREALDQLRELCHQWLQPKARSKEQILELLVLEQFLGALPVKLRTWVESQHPENCQEVVALVEGVTWMSEEEVLPAGQPAEGTTCCLEVTAQQEEKQEDAAICPVTVLPEEPVTFQDVAVDFSREEWGLLGPTQRTEYRDVMLETFGHLVSVGWETTLENKELAPNSDIPEEEPAPSLKVQESSRDCALSSTLEDTLQGGVQEVQDTVLKQMESAQEKDLPQKKHFDNRESQANSGALDTNQVSLQKIDNPESQANSGALDTNQVLLHKIPPRKRLRKRDSQVKSMKHNSRVKIHQKSCERQKAKEGNGCRKTFSRSTKQITFIRIHKGSQVCRCSECGKIFRNPRYFSVHKKIHTGERPYVCQDCGKGFVQSSSLTQHQRVHSGERPFECQECGRTFNDRSAISQHLRTHTGAKPYKCQDCGKAFRQSSHLIRHQRTHTGERPYACNKCGKAFTQSSHLIGHQRTHNRTKRKKKQPTS

SEQ ID NO: 833708 - protein, 338 aa, Homo sapiens
MASRLPTAWSCEPVTFEDVTLGFTPEEWGLLDLKQKSLYREVMLENYRNLVSVEHQLSKPDVVSQLEEAEDFWPVERGIPQDTIPEYPELQLDPKLDPLPAESPLMNIEVVEVLTLNQEVAGPRNAQIQALYAEDGSLSADAPSEQVQQQGKHPGDPEAARQRFRQFRYKDMTGPREALDQLRELCHQWLQPKARSKEQILELLVLEQFLGALPVKLRTWVESQHPENCQEVVALVEGVTWMSEEEVLPAGQPAEGTTCCLEVTAQQEEKQEDAAICPVTVLPEEPVTFQDVAVDFSREEWGLLGPTQRTEYRDVMLETFGHLVSVGWETPLKHICDH

SEQ ID NO: 833709 - protein, 621 aa, Homo sapiens
MASRLPTAWSCEPVTFEDVTLGFTPEEWGLLDLKQKSLYREVMLENYRNLVSVEYPELQLDPKLDPLPAESPLMNIEVVEVLTLNQEVAGPRNAQIQALYAEDGSLSADAPSEQVQQQGKHPGDPEAARQRFRQFRYKDMTGPREALDQLRELCHQWLQPKARSKEQILELLVLEQFLGALPVKLRTWVESQHPENCQEVVALVEGVTWMSEEEVLPAGQPAEGTTCCLEVTAQQEEKQEDAAICPVTVLPEEPVTFQDVAVDFSREEWGLLGPTQRTEYRDVMLETFGHLVSVGWETTLENKELAPNSDIPEEEPAPSLKVQESSRDCALSSTLEDTLQGGVQEVQDTVLKQMESAQEKDLPQKKHFDNRESQANSGALDTNQVSLQKIDNPESQANSGALDTNQVLLHKIPPRKRLRKRDSQVKSMKHNSRVKIHQKSCERQKAKEGNGCRKTFSRSTKQITFIRIHKGSQVCRCSECGKIFRNPRYFSVHKKIHTGERPYVCQDCGKGFVQSSSLTQHQRVHSGERPFECQECGRTFNDRSAISQHLRTHTGAKPYKCQDCGKAFRQSSHLIRHQRTHTGERPYACNKCGKAFTQSSHLIGHQRTHNRTKRKKKQPTS

SEQ ID NO: 833710 - protein, 653 aa, Homo sapiens
MASRLPTAWSCEPVTFEDVTLGFTPEEWGLLDLKQKSLYREVMLENYRNLVSVEHQLSKPDVVSQLEEAEDFWPVERGIPQDTIPEYPELQLDPKLDPLPAESPLMNIEVVEVLTLNQEVAGPRNAQIQALYAEDGSLSADAPSEQVQQQGKHPGDPEAARQRFRQFRYKDMTGPREALDQLRELCHQWLQPKARSKEQILELLVLEQFLGALPVKLRTWVESQHPENCQEVVALVEGVTWMSEEEVLPAGQPAEGTTCCLEVTAQQEEKQEDAAICPVTVLPEEPVTFQDVAVDFSREEWGLLGPTQRTEYRDVMLETFGHLVSVGWETTLENKELAPNSDIPEEEPAPSLKVQESSRDCALSSTLEDTLQGGVQEVQDTVLKQMESAQEKDLPQKKHFDNRESQANSGALDTNQVSLQKIDNPESQANSGALDTNQVLLHKIPPRKRLRKRDSQVKSMKHNSRVKIHQKSCERQKAKEGNGCRKTFSRSTKQITFIRIHKGSQVCRCSECGKIFRNPRYFSVHKKIHTGERPYVCQDCGKGFVQSSSLTQHQRVHSGERPFECQECGRTFNDRSAISQHLRTHTGAKPYKCQDCGKAFRQSSHLIRHQRTHTGERPYACNKCGKAFTQSSHLIGHQRTHNRTKRKKKQPTS

SEQ ID NO: 833711 - protein, 630 aa, Homo sapiens
EVLTELTVLGLSCFGDLLRDTNPGPQEFYWEHQLSKPDVVSQLEEAEDFWPVERGIPQDTIPEYPELQLDPKLDPLPAESPLMNIEVVEVLTLNQEVAGPRNAQIQALYAEDGSLSADAPSEQVQQQGKHPGDPEAARQRFRQFRYKDMTGPREALDQLRELCHQWLQPKARSKEQILELLVLEQFLGALPVKLRTWVESQHPENCQEVVALVEGVTWMSEEEVLPAGQPAEGTTCCLEVTAQQEEKQEDAAICPVTVLPEEPVTFQDVAVDFSREEWGLLGPTQRTEYRDVMLETFGHLVSVGWETTLENKELAPNSDIPEEEPAPSLKVQESSRDCALSSTLEDTLQGGVQEVQDTVLKQMESAQEKDLPQKKHFDNRESQANSGALDTNQVSLQKIDNPESQANSGALDTNQVLLHKIPPRKRLRKRDSQVKSMKHNSRVKIHQKSCERQKAKEGNGCRKTFSRSTKQITFIRIHKGSQVCRCSECGKIFRNPRYFSVHKKIHTGERPYVCQDCGKGFVQSSSLTQHQRVHSGERPFECQECGRTFNDRSAISQHLRTHTGAKPYKCQDCGKAFRQSSHLIRHQRTHTGERPYACNKCGKAFTQSSHLIGHQRTHNRTKRKKKQPTS

SEQ ID NO: 833712 - protein, 952 aa, Homo sapiens
MGVRHPPCSHRLLAVCALVSLATAALLGHILLHDFLLVPRELSGSSPVLEETHPAHQQGASRPGPRDAQAHPGRPRAVPTQCDVPPNSRFDCAPDKAITQEQCEARGCCYIPAKQGLQGAQMGQPWCFFPPSYPSYKLENLSSSEMGYTATLTRTTPTFFPKDILTLRLDVMMETENRLHFTIKDPANRRYEVPLETPRVHSRAPSPLYSVEFSEEPFGVIVHRQLDGRVLLNTTVAPLFFADQFLQLSTSLPSQYITGLAEHLSPLMLSTSWTRITLWNRDLAPTPGANLYGSHPFYLALEDGGSAHGVFLLNSNAMDVVLQPSPALSWRSTGGILDVYIFLGPEPKSVVQQYLDVVGYPFMPPYWGLGFHLCRWGYSSTAITRQVVENMTRAHFPLDVQWNDLDYMDSRRDFTFNKDGFRDFPAMVQELHQGGRRYMMIVDPAISSSGPAGSYRPYDEGLRRGVFITNETGQPLIGKVWPGSTAFPDFTNPTALAWWEDMVAEFHDQVPFDGMWIDMNEPSNFIRGSEDGCPNNELENPPYVPGVVGGTLQAATICASSHQFLSTHYNLHNLYGLTEAIASHRALVKARGTRPFVISRSTFAGHGRYAGHWTGDVWSSWEQLASSVPEILQFNLLGVPLVGADVCGFLGNTSEELCVRWTQLGAFYPFMRNHNSLLSLPQEPYSFSEPAQQAMRKALTLRYALLPHLYTLFHQAHVAGETVARPLFLEFPKDSSTWTVDHQLLWGEALLITPVLQAGKAEVTGYFPLGTWYDLQTVPIEALGSLPPPPAAPREPAIHSEGQWVTLPAPLDTINVHLRAGYIIPLQGPGLTTTESRQQPMALAVALTKGGEARGELFWDDGESLEVLERGAYTQVIFLARNNTIVNELVRVTSEGAGLQLQKVTVLGVATAPQQVLSNGVPVSNFTYSPDTKVLDICVSLLMGEQFLVSWC

SEQ ID NO: 833713 - protein, 952 aa, Homo sapiens; identical to SEQ ID NO: 833712

SEQ ID NO: 833714 - protein, 962 aa, Homo sapiens
MGVRHPPCSHRLLAVCALVSLATAALLGHILLHDFLLVPRELSGSSPVLEETHPAHQQGASRPGPRDAQAHPGRPRAVPTQCDVPPNSRFDCAPDKAITQEQCEARGCCYIPAKQGLQGAQMGQPWCFFPPSYPSYKLENLSSSEMGYTATLTRTTPTFFPKDILTLRLDVMMETENRLHFTIKDPANRRYEVPLETPRVHSRAPSPLYSVEFSEEPFGVIVHRQLDGRVLLNTTVAPLFFADQFLQLSTSLPSQYITGLAEHLSPLMLSTSWTRITLWNRDLAPTPGANLYGSHPFYLALEDGGSAHGVFLLNSNAMDVVLQPSPALSWRSTGGILDVYIFLGPEPKSVVQQYLDVVGYPFMPPYWGLGFHLCRWGYSSTAITRQVVENMTRAHFPLDVQWNDLDYMDSRRDFTFNKDGFRDFPAMVQELHQGGRRYMMIVDPAISSSGPAGSYRPYDEGLRRGVFITNETGQPLIGKVWPGSTAFPDFTNPTALAWWEDMVAEFHDQVPFDGMWIDMNEPSNFIRGSEDGCPNNELENPPYVPGVVGGTLQAATICASSHQFLSTHYNLHNLYGLTEAIASHRALVKARGTRPFVISRSTFAGHGRYAGHWTGDVWSSWEQLASSVPAEDQPDSALPEILQFNLLGVPLVGADVCGFLGNTSEELCVRWTQLGAFYPFMRNHNSLLSLPQEPYSFSEPAQQAMRKALTLRYALLPHLYTLFHQAHVAGETVARPLFLEFPKDSSTWTVDHQLLWGEALLITPVLQAGKAEVTGYFPLGTWYDLQTVPIEALGSLPPPPAAPREPAIHSEGQWVTLPAPLDTINVHLRAGYIIPLQGPGLTTTESRQQPMALAVALTKGGEARGELFWDDGESLEVLERGAYTQVIFLARNNTIVNELVRVTSEGAGLQLQKVTVLGVATAPQQVLSNGVPVSNFTYSPDTKVLDICVSLLMGEQFLVSWC

SEQ ID NO: 833715 - protein, 952 aa, Homo sapiens; identical to SEQ ID NO: 833712

SEQ ID NO: 833716 - protein, 753 aa, Homo sapiens
  misc_feature (8)..(8): Xaa can be any naturally occurring amino acid
PRLVPPRXWLSSTQALAFGVRRAPADWTGAVLLNTTVAPLFFADQFLQLSTSLPSQYITGLAEHLSPLMLSTSWTRITLWNRDLAPTPGANLYGSHPFYLALEDGGSAHGVFLLNSNAMDVVLQPSPALSWRSTGGILDVYIFLGPEPKSVVQQYLDVVGYPFMPPYWGLGFHLCRWGYSSTAITRQVVENMTRAHFPLDVQWNDLDYMDSRRDFTFNKDGFRDFPAMVQELHQGGRRYMMIVDPAISSSGPAGSYRPYDEGLRRGVFITNETGQPLIGKVWPGSTAFPDFTNPTALAWWEDMVAEFHDQVPFDGMWIDMNEPSNFIRGSEDGCPNNELENPPYVPGVVGGTLQAATICASSHQFLSTHYNLHNLYGLTEAIASHRALVKARGTRPFVISRSTFAGHGRYAGHWTGDVWSSWEQLASSVPEILQFNLLGVPLVGADVCGFLGNTSEELCVRWTQLGAFYPFMRNHNSLLSLPQEPYSFSEPAQQAMRKALTLRYALLPHLYTLFHQAHVAGETVARPLFLEFPKDSSTWTVDHQLLWGEALLITPVLQAGKAEVTGYFPLGTWYDLQTVPIEALGSLPPPPAAPREPAIHSEGQWVTLPAPLDTINVHLRAGYIIPLQGPGLTTTESRQQPMALAVALTKGGEARGELFWDDGESLEVLERGAYTQVIFLARNNTIVNELVRVTSEGAGLQLQKVTVLGVATAPQQVLSNGVPVSNFTYSPDTKVLDICVSLLMGEQFLVSWC

SEQ ID NO: 833717 - protein, 344 aa, Homo sapiens
SSQACVIGRGDSWEQLASSVPEILQFNLLGVPLVGADVCGFLGNTSEELCVRWTQLGAFYPFMRNHNSLLSLPQEPYSFSEPAQQAMRKALTLRYALLPHLYTLFHQAHVAGETVARPLFLEFPKDSSTWTVDHQLLWGEALLITPVLQAGKAEVTGYFPLGTWYDLQTVPIEALGSLPPPPAAPREPAIHSEGQWVTLPAPLDTINVHLRAGYIIPLQGPGLTTTESRQQPMALAVALTKGGEARGELFWDDGESLEVLERGAYTQVIFLARNNTIVNELVRVTSEGAGLQLQKVTVLGVATAPQQVLSNGVPVSNFTYSPDTKVLDICVSLLMGEQFLVSWC

SEQ ID NO: 833718 - protein, 269 aa, Homo sapiens
PESSKSSGTLSSREQNSASSCASPGWAYEPAPSHSSPVCLCAHPPCRFPKDSSTWTVDHQLLWGEALLITPVLQAGKAEVTGYFPLGTWYDLQTVPIEALGSLPPPPAAPREPAIHSEGQWVTLPAPLDTINVHLRAGYIIPLQGPGLTTTESRQQPMALAVALTKGGEARGELFWDDGESLEVLERGAYTQVIFLARNNTIVNELVRVTSEGAGLQLQKVTVLGVATAPQQVLSNGVPVSNFTYSPDTKVLDICVSLLMGEQFLVSWC

SEQ ID NO: 833719 - protein, 270 aa, Homo sapiens
MGVRHPPCSHRLLAVCALVSLATAALLGHILLHDFLLVPRELSGSSPVLEETHPAHQQGASRPGPRDAQAHPGRPRAVPTQCDVPPNSRFDCAPDKAITQEQCEARGCCYIPAKQGLQGAQMGQPWCFFPPSYPSYKLENLSSSEMGYTATLTRTTPTFFPKDILTLRLDVMMETENRLHFTIKDPANRRYEVPLETPRVHSRAPSPLYSVEFSEEPFGVIVHRQLDGRVLCCSAPTRPLPGCPEGWMPAGPRASLGTQENSQDLGDSKS

SEQ ID NO: 833720 - protein, 151 aa, Homo sapiens
MGVRHPPCSHRLLAVCALVSLATAALLGHILLHDFLLVPRELSGSSPVLEETHPAHQQGASRPGPRDAQAHPGRPRAVPTQCDVPPNSRFDCAPDKAITQEQCEARGCCYIPAKQGLQGAQMGQPWCFFPPSYPSYKLENLSSSEMGTHYV

SEQ ID NO: 833721 - protein, 952 aa, Homo sapiens; identical to SEQ ID NO: 833712

SEQ ID NO: 833722 - protein, 952 aa, Homo sapiens; identical to SEQ ID NO: 833712

SEQ ID NO: 833723 - protein, 952 aa, Homo sapiens; identical to SEQ ID NO: 833712

SEQ ID NO: 833724 - protein, 939 aa, Homo sapiens
MGVRHPPCSHRLLAVCALVSLATAALLGHILLHDFLLVPRELSGSSPVLEETHPAHQQGASRPGPRDAQAHPGRPRAVPTQCDVPPNSRFDCAPDKAITQEQCEARGCCYIPAKQGLQGAQMGQPWCFFPPSYPSYKLENLSSSEMGYTATLTRTTPTFFPKDILTLRLDVMMETENRLHFTIKDPANRRYEVPLETPRVHSRAPSPLYSVEFSEEPFGVIVHRQLDGRVLLNTTVAPLFFADQFLQLSTSLPSQYITGLAEHLSPLMLSTSWTRITLWNRDLAPTPGANLYGSHPFYLALEDGGSAHGVFLLNSNAMDVVLQPSPALSWRSTGGILDVYIFLGPEPKSVVQQYLDVVGYPFMPPYWGLGFHLCRWGYSSTAITRQVVENMTRAHFPLDVQWNDLDYMDSRRDFTFNKDGFRDFPAMVQELHQGGRRYMMIVDPAISSSGPAGSYRPYDEGLRRGVFITNETGQPLIGKVWPGSTAFPDFTNPTALAWWEDMVAEFHDQVPFDGMWIDMNEPSNFIRGSEDGCPNNELENPPYVPGVVGGTLQAATICASSHQFLSTHYNLHNLYGLTEAIASHSSRSTFAGHGRYAGHWTGDVWSSWEQLASSVPEILQFNLLGVPLVGADVCGFLGNTSEELCVRWTQLGAFYPFMRNHNSLLSLPQEPYSFSEPAQQAMRKALTLRYALLPHLYTLFHQAHVAGETVARPLFLEFPKDSSTWTVDHQLLWGEALLITPVLQAGKAEVTGYFPLGTWYDLQTVPIEALGSLPPPPAAPREPAIHSEGQWVTLPAPLDTINVHLRAGYIIPLQGPGLTTTESRQQPMALAVALTKGGEARGELFWDDGESLEVLERGAYTQVIFLARNNTIVNELVRVTSEGAGLQLQKVTVLGVATAPQQVLSNGVPVSNFTYSPDTKVLDICVSLLMGEQFLVSWC

SEQ ID NO: 833725 - protein, 615 aa, Homo sapiens
  misc_feature (7)..(7): Xaa can be any naturally occurring amino acid
ASKLGSXRTRQERVQQYLDVVGYPFMPPYWGLGFHLCRWGYSSTAITRQVVENMTRAHFPLDVQWNDLDYMDSRRDFTFNKDGFRDFPAMVQELHQGGRRYMMIVDPAISSSGPAGSYRPYDEGLRRGVFITNETGQPLIGKVWPGSTAFPDFTNPTALAWWEDMVAEFHDQVPFDGMWIDMNEPSNFIRGSEDGCPNNELENPPYVPGVVGGTLQAATICASSHQFLSTHYNLHNLYGLTEAIASHRALVKARGTRPFVISRSTFAGHGRYAGHWTGDVWSSWEQLASSVPEILQFNLLGVPLVGADVCGFLGNTSEELCVRWTQLGAFYPFMRNHNSLLSLPQEPYSFSEPAQQAMRKALTLRYALLPHLYTLFHQAHVAGETVARPLFLEFPKDSSTWTVDHQLLWGEALLITPVLQAGKAEVTGYFPLGTWYDLQTVPIEALGSLPPPPAAPREPAIHSEGQWVTLPAPLDTINVHLRAGYIIPLQGPGLTTTESRQQPMALAVALTKGGEARGELFWDDGESLEVLERGAYTQVIFLARNNTIVNELVRVTSEGAGLQLQKVTVLGVATAPQQVLSNGVPVSNFTYSPDTKVLDICVSLLMGEQFLVSWC

SEQ ID NO: 833726 - protein, 952 aa, Homo sapiens; identical to SEQ ID NO: 833712

SEQ ID NO: 833727 - protein, 948 aa, Homo sapiens
MGVRHPPCSHRLLAVCALVSLATAALLGHILLHDFLLVPRELSGSSPVLEETHPAHQQGASRPGPRDAQAHPGRPRAVPTQCDVPPNSRFDCAPDKAITQEQCEARGCCYIPAKQGLQGAQMGQPWCFFPPSYPSYKLENLSSSEMGYTATLTRTTPTFFPKDILTLRLDVMMETENRLHFTIKDPANRRYEVPLETPRVHSRAPSPLYSVEFSEEPFGVIVHRQLDGRVLLNTTVAPLFFADQFLQLSTSLPSQYITGLAEHLSPLMLSTSWTRITLWNRDLAPTPGANLYGSHPFYLALEDGGSAHGVFLLNSNAMDVVLQPSPALSWRSTGGILDVYIFLGPEPKSVVQQYLDVVGYPFMPPYWGLGFHLCRWGYSSTAITRQVVENMTRAHFPLDVQWNDLDYMDSRRDFTFNKDGFRDFPAMVQELHQGGRRYMMIVDPAISSSGPAGSYRPYDEGLRRGVFITNETGQPLIGKVWPGSTAFPDFTNPTALAWWEDMVAEFHDQVPFDGMWIDMNEPSNFIRGSEDGCPNNELENPPYVPGVVGGTLQAATICASSHQFLSTHYNLHNLYGLTEAIASHRALVKARGTRPFVISRSTFAGHGRYAGHWTGDVWSSWEQLASSVPEILQFNLLGVPLVGADVCGFLGNTSEELCVRWTQLGAFYPFMRNHNSLLSLPQEPYSFSEPAQQAMRKALTLRYALLPHLYTLFHQAHVAGETVARPLFLEFPKDSSTWTVDHQLLWGEALLITPVLQAGKAEVTGYFPLGTWYDLQTVPIEALGSLPPPPAAPREPAIHSEGQWVTLPAPLDTINVHLRAGYIIPLQGPGLTTTESRQQPMALAVALTKGGEARGELFWDDGESLEVLERGAYTQVIFLARNNTIVNELVRVTSEGAGLQLQKVTVLGVATAPQQVLSNGVPVSNFTYSPDTKVLDICVSLFTGLGRF

SEQ ID NO: 833728 - protein, 152 aa, Homo sapiens
RSPPRLLLPGVQGPAAAMSGSFELSVQDLNDLLSDGSGCYSLPSQPCNEVTPRIYVGNASVAQDIPKLQKLGITHVLNAAEGRSFMHVNTNANFYKDSSDLVMIEVQSGEYLGEDDIVRFDDIYAVRPPTCKNDMLYLTDHPDPYRREISMS

SEQ ID NO: 833729 - protein, 275 aa, Homo sapiens
ICDQLGKLLQGGRNDPQVPQPFMLRHLSGWRNTKVGIVLTLGNDLEEVGKRSPGRFQPLGQKPGWKALEIGKKKTERLDPPHTQPACMAEVELRSPGDSGFMFFALVLLCLRGRCPHSSASDSQTLNYVGNASVAQDIPKLQKLGITHVLNAAEGRSFMHVNTNANFYKDSGITYLGIKANDTQEFNLSAYFERAADFIDQALAQKNGRVLVHCREGYSRSPTLVIAYLMMRQKMDVKSALSIVRQNREIGPNDGFLAQLCQLNDRLAKEGKLKP

SEQ ID NO: 833730 - protein, 202 aa, Homo sapiens
RSPPRLLLPGVQGPAAAMSGSFELSVQDLNDLLSDGSGCYSLPSQPCNEVTPRIYVGNASVAQDIPKLQKLGITHVLNAAEGRSFMHVNTNANFYKDSGITYLGIKANDTQEFNLSAYFERAADFIDQALAQKNGRVLVHCREGYSRSPTLVIAYLMMRQKMDVKSALSIVRQNREIGPNDGFLAQLCQLNDRLAKEGKLKP

SEQ ID NO: 833731 - protein, 113 aa, Homo sapiens
SSSVPSRPQGITYLGIKANDTQEFNLSAYFERAADFIDQALAQKNGRVLVHCREGYSRSPTLVIAYLMMRQKMDVKSALSIVRQNREIGPNDGFLAQLCQLNDRLAKEGKLKP

SEQ ID NO: 833732 - protein, 202 aa, Homo sapiens; identical to SEQ ID NO: 833730

SEQ ID NO: 833733 - protein, 202 aa, Homo sapiens; identical to SEQ ID NO: 833730

SEQ ID NO: 833734 - protein, 235 aa, Homo sapiens
ICDQLGKLLQGGRNDPQVPQPFMLRHLSGWRNTKVGIVLTLGNDLEEVGKRSPGRFQPLGQKPGWKALEIGKKKTERLDPPHTQPACMAEVERGVLETLASCSLLLFFCASGVAAHIVQRLSQTLNYVGNASVAQDIPKLQKLGITHVLNAAEGRSFMHVNTNANFYKDSGITYLGIKANDTQEFNLSAYFERAADFIDQALAQKNGKGPPTRKRWEAALTGLSLWKTGPQQVSS

SEQ ID NO: 833735 - protein, 202 aa, Homo sapiens; identical to SEQ ID NO: 833730

SEQ ID NO: 833736 - protein, 202 aa, Homo sapiens; identical to SEQ ID NO: 833730

SEQ ID NO: 833737 - protein, 117 aa, Homo sapiens
  misc_feature (6)..(6): Xaa can be any naturally occurring amino acid
  misc_feature (9)..(9): Xaa can be any naturally occurring amino acid
TGWYPXAVXDIDRPRRSGGRASQKRGQKTSREVKGPRHTPCPLQVALTALWCQHGIPEVTQPGRHETWRSVQMDPLLVVEQKNPNTINLSKDFLRMILECTSPHMCMHICQNIRVLF

SEQ ID NO: 833738 - protein, 157 aa, Homo sapiens
CVRDYKDRVNVLFMSVAQDIPKLQKLGITHVLNAAEGRSFMHVNTNANFYKDSGITYLGIKANDTQEFNLSAYFERAADFIDQALAQKNGRVLVHCREGYSRSPTLVIAYLMMRQKMDVKSALSIVRQNREIGPNDGFLAQLCQLNDRLAKEGKLKP

SEQ ID NO: 833739 - protein, 127 aa, Homo sapiens
AALRLACSCRACRAPPPPCRARSSSRCRISTTCSRTAAAATASRASPATRSPRGSTWATRRVLVHCREGYSRSPTLVIAYLMMRQKMDVKSALSIVRQNREIGPNDGFLAQLCQLNDRLAKEGKLKP

SEQ ID NO: 833740 - protein, 187 aa, Homo sapiens
VAFCEEFGANLPHAAVAAGTLAGFSWSGGGGNMAETAAGVGRFKTNYAVERKIEPFYKGGKAQVTSLGKGSGAGSQRPRGVLNVAWLRPLCPLDQTGQHLFCVCGTRVNILEVASGAVLRSLEQEDQEDITAFDLSPDNEVLVTASRALLLAQWAWQEGSVTRLWKAIHTAPVATMAFDPTSTLLAT

SEQ ID NO: 833741 - protein, 76 aa, Homo sapiens
MAFDPTSTLLATGGCDGAVRVWDIVRHYGTHHFRGSPGVVHLVAFHPDPTRLLLFSSATDAAIRVWSLRTGHAWLC

SEQ ID NO: 833742 - protein, 602 aa, Homo sapiens
VAFCEEFGANLPHAAVAAGTLAGFSWSGGGGNMAETAAGVGRFKTNYAVERKIEPFYKGGKAQLDQTGQHLFCVCGTRVNILEVASGAVLRSLEQEDQEDITAFDLSPDNEVLVTASRALLLAQWAWQEGSVTRLWKAIHTAPVATMAFDPTSTLLATGGCDGAVRVWDIVRHYGTHHFRGSPGVVHLVAFHPDPTRLLLFSSATDAAIRVWSLQDRSCLAVLTAHYSAVTSLAFSADGHTMLSSGRDKICIIWDLQSCQATRTVPVFESVEAAVLLPEEPVSQLGVKSPGLYFLTAGDQGTLRVWEAASGQCVYTQAQPPGPGQELTHCTLAHTAGVVLTATADHNLLLYEARSLRLQKQFAGYSEEVLDVRFLGPEDSHVVVASNSPCLKVFELQTSACQILHGHTDIVLALDVFRKGWLFASCAKDQSVRIWRMNKAGQVMCVAQGSGHTHSVGTVCCSRLKESFLVTGSQDCTVKLWPLPKALLSKNTAPDNGPILLQAQTTQRCHDKDINSVAIAPNDKLLATGSQDRTAKLWALPQCQLLGVFSGHRRGLWCVQFSPMDQVLATASADGTIKLWALQDFSCLKVSGAPDPPHFPPW

SEQ ID NO: 833743 - protein, 92 aa, Homo sapiens
VAFCEEFGANLPHAAVAAGTLAGFSWSGGGGNMAETAAGVGRFKTNYAVERKIEPFYKGGKAQLDQTGQHLFCPRGHHGLRPHLHSASHRWL

SEQ ID NO: 833744 - protein, 104 aa, Homo sapiens
  misc_feature (30)..(30): Xaa can be any naturally occurring amino acid
GAEYDVTLRAALHADPAVRRAGLLALYTCXGIEGRARVPAMAEAASPAIVRQADEHGTRRGPTKAFDPSSTLLPQVAVMGPCASGTSCGTTGHTTSEARPVSCT

SEQ ID NO: 833745 - protein, 169 aa, Homo sapiens
LVTASRALLLAQWAWQEGSVTRLWKAIHTAPVATMAFDPTSTLLATGRALPCRWVVGTDAGALGIPPPHLASPQVAVMGPCASGTSCGTTGHTTSEARPVSCSELEGGGGGQRHHPGCTAHPSCPVRPQPSGLPPGPYTPAALLLGHGCRHPRVVTAGPVMPGCADCPL

SEQ ID NO: 833746 - protein, 260 aa, Homo sapiens
VAFCEEFGANLPHAAVAAGTLAGFSWSGGGGNMAETAAGVGRFKTNYAVERKIEPFYKGGKAQLDQTGQHLFCVCGTRVNILEVASGAVLRSLEQEDQEDITAFDLSPDNEVLVTASRALLLAQWAWQEGSVTRLWKAIHTAPVATMAFDPTSTLLATGGCDGAVRVWDIVRHYGTHHFRGSPGVVHLVAFHPDPTRLLLFSSATDAAIRVWSLQDRSCWWVMHKALTYGLRRGKQVKSGTDWSLGLSGARTAGWNGSGV

SEQ ID NO: 833747 - protein, 840 aa, Homo sapiens
VAFCEEFGANLPHAAVAAGTLAGFSWSGGGGNMAETAAGVGRFKTNYAVERKIEPFYKGGKAQLDQTGQHLFCVCGTRVNILEVASGAVLRSLEQEDQEDITAFDLSPDNEVLVTASRALLLAQWAWQEGSVTRLWKAIHTAPVATMAFDPTSTLLATGGCDGAVRVWDIVRHYGTHHFRGSPGVVHLVAFHPDPTRLLLFSSATDAAIRVWSLQDRSCLAVLTAHYSAVTSLAFSADGHTMLSSGRDKICIIWDLQSCQATRTVPVFESVEAAVLLPEEPVSQLGVKSPGLYFLTAGDQGTLRVWEAASGQCVYTQAQPPGPGQELTHCTLAHTAGVVLTATADHNLLLYEARSLRLQKQFAGYSEEVLDVRFLGPEDSHVVVASNSPCLKVFELQTSACQILHGHTDIVLALDVFRKGWLFASCAKDQSVRIWRMNKAGQVMCVAQGSGHTHSVGTVCCSRLKESFLVTGSQDCTVKLWPLPKALLSKNTAPDNGPILLQAQTTQRCHDKDINSVAIAPNDKLLATGSQDRTAKLWALPQCQLLGVFSGHRRGLWCVQFSPMDQVLATASADGTIKLWALQDFSCLKTFEGHDASVLKVAFVSRGTQLLSSGSDGLVKLWTIKNNECVRTLDAHEDKVWGLHCSRLDDHALTGASDSRVILWKDVTEAEQAEEQARQEEQVVRQQELDNLLHEKRYLRALGLAISLDRPHTVLTVIQAIRRDPEACEKLEATMLRLRRDQKEALLRFCVTWNTNSRHCHEAQAVLGVLLRREAPEELLAYEGVRAALEALLPYTERHFQRLSRTLQAAAFLDFLWHNMKLPVPAAAPTPWETHKGALP

SEQ ID NO: 833748 - protein, 81 aa, Homo sapiens
VAFCEEFGANLPHAAVAAGTLAGFSWSGGGGNMAETAAGVGRFKTNYAVERKIEPFYKGGKAQVPAWGRAAGRAARGRGGC

SEQ ID NO: 833749 - protein, 100 aa, Homo sapiens
SLTRCIGAVGHLVAPPGEKGAGIPANGASIGLNATNEHSDEDEDDHMLHGRMQEACTDVDRSDVKGMDCMECLQAIYAIRGSYPRCAPWGSTQSMHAHGT

SEQ ID NO: 833750 - protein, 149 aa, Homo sapiens
ESLVQPCFYRFLGCFGIAFAKAMHGYSSVIAPRAHGLSLLCTKCVELALRTSCRGCLFNSGHFCFPGGESRKHLESLDSENFMLLSGICACMCVCACVCMRACMCISMICSSAFSQVIFLNCMIYCLLCKCNRLTQQLVHNLPPSTQPS

SEQ ID NO: 833751 - protein, 206 aa, Homo sapiens
MRWKALIEMEKQQQDQVDRNIKEAREKLEMEMEAARHEHQVMLMRQDLMRRQEELRRMEELHNQEVQKRKQLELRQEEERRRREEEMRRQQEEMMRRQQEGFKGTFPDAREQEIRMGQMAMGGAMGINNRGAMPPAPVPAGTPAPPGPATMMPDGTLGLTPPTTERFGQAATMEGIGAIGGTPPAFNGVLDELPKKCDTIVRSFST

SEQ ID NO: 833752 - protein, 113 aa, Homo sapiens
MDSPLGCQLYPGSDHCNLRADRLCNFLWTASHWLYYSNCPPGIQASLFQGYGTGAYDTTTATVTTTQASYAAQSAYGTQPAYSAQHTSSNSSSRHHRQYLQMGNRPAAKVCIC

SEQ ID NO: 833753 - protein, 203 aa, Homo sapiens
MRWKALIEMEKQQQDQVDRNIKEAREKLEMEMEAARHEHQVMLMRQDLMRRQEELRRMEELHNQEVQKRKQLELRQEEERRRREEEMRRQQEEMMRRQQEGFKGTFPDAREQEIRMGQMAMGGAMGINNRGAMPPAPVPAGTPAPPGPATMMPDGTLGLTPPTTERFGQAATMEGIGAIGGTPPAFNRAAPGAEFAPNKRRRY

SEQ ID NO: 833754 - protein, 203 aa, Homo sapiens; identical to SEQ ID NO: 833753

SEQ ID NO: 833755 - protein, 203 aa, Homo sapiens; identical to SEQ ID NO: 833753

SEQ ID NO: 833756 - protein, 203 aa, Homo sapiens; identical to SEQ ID NO: 833753

SEQ ID NO: 833757 - protein, 203 aa, Homo sapiens; identical to SEQ ID NO: 833753

SEQ ID NO: 833758 - protein, 203 aa, Homo sapiens; identical to SEQ ID NO: 833753

SEQ ID NO: 833759 - protein, 203 aa, Homo sapiens; identical to SEQ ID NO: 833753

SEQ ID NO: 833760 - protein, 203 aa, Homo sapiens; identical to SEQ ID NO: 833753

SEQ ID NO: 833761 - protein, 203 aa, Homo sapiens; identical to SEQ ID NO: 833753

SEQ ID NO: 833762 - protein, 203 aa, Homo sapiens; identical to SEQ ID NO: 833753

SEQ ID NO: 833763 - protein, 203 aa, Homo sapiens; identical to SEQ ID NO: 833753

SEQ ID NO: 833764 - protein, 203 aa, Homo sapiens; identical to SEQ ID NO: 833753

SEQ ID NO: 833765 - protein, 181 aa, Homo sapiens
MRWKALIEMEKQQQDQVDRNIKEAREKLEMEMEAARHEHQVMLMRQDLMRRQEELRRMEELHNQEVQKRKQLELRQEEERRRREEEMRRQQEEMMRRQQEGFKGTFPDAREQEIRMGQMAMGGAMGINNRGAMPPAPVPAGTPAPPGPATMMPDGTLGLTPPTTDALVRLLLLCNGVYSRV

SEQ ID NO: 833766 - protein, 203 aa, Homo sapiens; identical to SEQ ID NO: 833753

SEQ ID NO: 833767 - protein, 122 aa, Homo sapiens
MRWKALIEMEKQQQDQVDRNIKEAREKLEMEMEAARHEHQVMLMRQDLMRRQEELRRMEELHNQEVQKRKQLELRQEEERRRREEEMRRQQEEMMRRQQEGFKGTFPDAVYLPCARDVPDQS

SEQ ID NO: 833768 - protein, 203 aa, Homo sapiens; identical to SEQ ID NO: 833753

SEQ ID NO: 833769 - protein, 91 aa, Homo sapiens
MRWKALIEMEKQQQDQVDRNIKEAREKLEMEMEAARHEHQVMLMRQDLMRRQEELRRMEELHNQEVQKRKQLELSREEEPTAREDSSRRSG

SEQ ID NO: 833770 - protein, 106 aa, Homo sapiens
MRWKALIEMEKQQQDQVDRNIKEAREKLEMEMEAARHEHQVMLMRQVCEGQEKFGVGKRTPSGKEALGAGTGREQIGPQKMATVGRHTVQNTGTRECNKTPLRHHQ

SEQ ID NO: 833771 - protein, 244 aa, Homo sapiens
PSNTSSPSDCYYGPEDPQQFHKEREQPPRFAQPGSFEYEYAMRWKALIEMEKQQQDQVDRNIKEAREKLEMEMEAARHEHQVMLMRQDLMRRQEELRRMEELHNQEVQKRKQLELRQEEERRRREEEMRRQQEEMMRRQQEGFKGTFPDAREQEIRMGQMAMGGAMGINNRGAMPPAPVPAGTPAPPGPATMMPDGTLGLTPPTTERFGQAATMEGIGAIGGTPPAFNRAAPGAEFAPNKRRRY

SEQ ID NO: 833772 - protein, 184 aa, Homo sapiens
VSKDPVFRCHGHTAACSTRPEQKMSLPSLGLDLYAIRRMEELHNQEVQKRKQLELRQEEERRRREEEMRRQQEEMMRRQQEGFKGTFPDAREQEIRMGQMAMGGAMGINNRGAMPPAPVPAGTPAPPGPATMMPDGTLGLTPPTTERFGQAATMEGIGAIGGTPPAFNRAAPGAEFAPNKRRRY

SEQ ID NO: 833773 - protein, 117 aa, Homo sapiens
MRRQQEEMMRRQQEGFKGTFPDAREQEIRMGQMAMGGAMGINNRGAMPPAPVPAGTPAPPGPATMMPDGTLGLTPPTTERFGQAATMEGIGAIGGTPPAFNRAAPGAEFAPNKRRRY

SEQ ID NO: 833774 - protein, 119 aa, Homo sapiens
LCHKVVTWNNTSPVRKYSWGTFPDAREQEIRMGQMAMGGAMGINNRGAMPPAPVPAGTPAPPGPATMMPDGTLGLTPPTTERFGQAATMEGIGAIGGTPPAFNRAAPGAEFAPNKRRRY

SEQ ID NO: 833775 - protein, 203 aa, Homo sapiens; identical to SEQ ID NO: 833753

SEQ ID NO: 833776 - protein, 473 aa, Homo sapiens
MSLTSLMGEDCHQVMLMRQDLMRRQEELRRMEELHNQEVQKRKQLELRQEEERRRREEEMRRQQEEMMRRQQEGFKGTFPDAREQEILDWVQTVLCGRCYWALNTHECASAPSARCAQAGTTMLTPWSLTTSDDRMRTLADLTHTKQLDTLYGSVLLPTAKRISRAHLRGNLQLLTYQTCARSMDDCNFDPQTKASADYLTNACTLSLAFSVNKRVNNEGALILRLAQQFIPCETQRSAAYHFAKLRYYPDLLLTLGEYACEDSSVPRAVVWHLDQRYNSWCGNHRHNSDYMMNGQSPESLYLVDCLKNTATKPTVTSSNQPYTPRYTCTHTAKYLNNMGATPVSKYAMSNKPRGKKRDINHNHTPRRRTCTERINPSNNIRKLFIPTAATAHHTNQLNTHYHPKLTHHQHHNTRSYHIYPTQHTKYTSHSHKRLKHIQTYNSPLHSPYHHHTTTNIQQPQTNSQYDNHSCYT

SEQ ID NO: 833777 - protein, 203 aa, Homo sapiens; identical to SEQ ID NO: 833753

SEQ ID NO: 833778 - protein, 122 aa, Homo sapiens; identical to SEQ ID NO: 833767

SEQ ID NO: 833779 - protein, 117 aa, Homo sapiens; identical to SEQ ID NO: 833773

SEQ ID NO: 833780 - protein, 203 aa, Homo sapiens; identical to SEQ ID NO: 833753

SEQ ID NO: 833781 - protein, 203 aa, Homo sapiens; identical to SEQ ID NO: 833753

SEQ ID NO: 833782 - protein, 203 aa, Homo sapiens; identical to SEQ ID NO: 833753

SEQ ID NO: 833783 - protein, 203 aa, Homo sapiens; identical to SEQ ID NO: 833753

SEQ ID NO: 833784 - protein, 203 aa, Homo sapiens; identical to SEQ ID NO: 833753

SEQ ID NO: 833785 - protein, 206 aa, Homo sapiens; identical to SEQ ID NO: 833751

SEQ ID NO: 833786 - protein, 160 aa, Homo sapiens
MRWKALIEMEKQQQDQVDRNIKEAREKLEMEMEAARHEHQVMLMRQDLMRRQEELRRMEELHNQEVQKRKQLELRQEEERRRREEEMRRQQEEMMRRQQEGFKGTFPDAREQEIRMGQMAMGGAMGINNRGAMPPAPVPAGTPAPPGPATMMPDGTLGLL

SEQ ID NO: 833787 - protein, 203 aa, Homo sapiens; identical to SEQ ID NO: 833753

SEQ ID NO: 833788 - protein, 203 aa, Homo sapiens; identical to SEQ ID NO: 833753

SEQ ID NO: 833789 - protein, 90 aa, Homo sapiens
MRWKALIEMEKQQQDQVDRNIKEAREKLEMEMEAARHEHQVMLMRQDLMRRQEELRRMEELHNQCGTAYRPSTRTRARDRRRAPEVVVAA

SEQ ID NO: 833790 - protein, 203 aa, Homo sapiens; identical to SEQ ID NO: 833753

SEQ ID NO: 833791 - protein, 203 aa, Homo sapiens; identical to SEQ ID NO: 833753

SEQ ID NO: 833792 - protein, 169 aa, Homo sapiens
GLCAARRWLFVLAAVHMACLHCNHRLGCSQDLVSLEDRSDVWPIQSFRPCLKLVSYVNLKNKMHFYPTLPAREKLEMEMEAARHEHQVMLMRQDLMRRQEELRRMEELHNQEVQKRKQLELRQEEERRRREEEMRRQQEEMMRRQQEGFKGTFPDAVYLPCARDVPDQS

SEQ ID NO: 833793 - protein, 186 aa, Homo sapiens
MSLQWTAVATFLYAEVFVVLLLCIPFISPKRWQKIFKSRLVELLVSYGNTFFVVLIVILVLLVIDAVREIRKYDDVTEKVNLQNNPGAMEHFHMKLFRAQRNLYIAGFSLLLSFLLRRLVTLISQQATLLASNEAFKKQAESASEAAKKYMEENDQLKKGAAVDGGKLDVGNAEVKLDGREQEPEG

SEQ ID NO: 833794 - protein, 322 aa, Homo sapiens
SRPSAGPLPHHRDVGRPRGLEKRPSPARQSPAPPRPRARSTPPCSPGARGASSSPARSAGPPLRGGVGSGGGRSLRGLARAGGRCPAGASGFRPRYEGRGRGCCGRVRLLRRGLHVDCGKLGNKLTSSCGKPSSNRMSLQWTAVATFLYAEVFVVLLLCIPFISPKRWQKIFKSRLVELLVSYGNTFFVVLIVILVLLVIDAVREIRKYDDVTEKVNLQNNPGAMEHFHMKLFRAQRNLYIAGFSLLLSFLLRRLVTLISQQATLLASNEAFKKQAESASEAAKKYMEENDQLKKGAAVDGGKLDVGNAEVKLDGREQEPEG

SEQ ID NO: 833795 - protein, 322 aa, Homo sapiens; identical to SEQ ID NO: 833794

SEQ ID NO: 833796 - protein, 252 aa, Homo sapiens
AGFSLLLSFLLRRLVTLISQQATLLASNEAFKKQAESAVRRRGLHVDCGKLGNKLTSSCGKPSSNRMSLQWTAVATFLYAEVFVVLLLCIPFISPKRWQKIFKSRLVELLVSYGNTFFVVLIVILVLLVIDAVREIRKYDDVTEKVNLQNNPGAMEHFHMKLFRAQRNLYIAGFSLLLSFLLRRLVTLISQQATLLASNEAFKKQAESASEAAKKYMEENDQLKKGAAVDGGKLDVGNAEVKLDGREQEPEG

SEQ ID NO: 833797 - protein, 186 aa, Homo sapiens; identical to SEQ ID NO: 833793

SEQ ID NO: 833798 - protein, 186 aa, Homo sapiens; identical to SEQ ID NO: 833793

SEQ ID NO: 833799 - protein, 217 aa, Homo sapiens
AFFPIVLNGCQIRELQATEADFAWAIRPLEKSTKLDFHFAQGPRARVCAFSSTPVLFVFFSRWQKIFKSRLVELLVSYGNTFFVVLIVILVLLVIDAVREIRKYDDVTEKVNLQNNPGAMEHFHMKLFRAQRNLYIAGFSLLLSFLLRRLVTLISQQATLLASNEAFKKQAESASEAAKKYMEENDQLKKGAAVDGGKLDVGNAEVKLDGREQEPEG

SEQ ID NO: 833800 - protein, 182 aa, Homo sapiens
KVRLGTRPGVVIGRGVVLCIPFISPKRWQKIFKSRLVELLVSYGNTFFVVLIVILVLLVIDAVREIRKYDDVTEKVNLQNNPGAMEHFHMKLFRAQRNLYIAGFSLLLSFLLRRLVTLISQQATLLASNEAFKKQAESASEAAKKYMEENDQLKKGAAVDGGKLDVGNAEVKLDGREQEPEG

SEQ ID NO: 833801 - protein, 134 aa, Homo sapiens
VVRPLVRDQSVDRARVLPRRYDDVTEKVNLQNNPGAMEHFHMKLFRAQRNLYIAGFSLLLSFLLRRLVTLISQQATLLASNEAFKKQAESASEAAKKYMEENDQLKKGAAVDGGKLDVGNAEVKLDGREQEPEG

SEQ ID NO: 833802 - protein, 322 aa, Homo sapiens; identical to SEQ ID NO: 833794

SEQ ID NO: 833803 - protein, 322 aa, Homo sapiens; identical to SEQ ID NO: 833794

SEQ ID NO: 833804 - protein, 322 aa, Homo sapiens; identical to SEQ ID NO: 833794

SEQ ID NO: 833805 - protein, 322 aa, Homo sapiens; identical to SEQ ID NO: 833794

SEQ ID NO: 833806 - protein, 300 aa, Homo sapiens
SRPSAGPLPHHRDVGRPRGLEKRPSPARQSPAPPRPRARSTPPCSPGARGASSSPARSAGPPLRGGVGSGGGRSLRGLARAGGRCPAGASGFRPRYEGRGRGCCGRVRLLRRGLHVDCGKLGNKLTSSCGKPSSNRMSLQWTAVATFLYAEVFVVLLLCIPFISPKRWQKIFKSRLVELLVSYGNTFFVVLIVILVLLVIDAVREIRKYDDVTEKVNLQNNPGAMEHFHMKLFRAQRNLYIAGFSLLLSFLLRRLVTLISQQATLLASNEAFKKQAESASEAAKKYMEENDQLKKKRTGA

SEQ ID NO: 833807 - protein, 139 aa, Homo sapiens
RTRGSTHASVILVLLVIDAVREIRKYDDVTEKVNLQNNPGAMEHFHMKLFRAQRNLYIAGFSLLLSFLLRRLVTLISQQATLLASNEAFKKQAESASEAAKKYMEENDQLKKGAAVDGGKLDVGNAEVKLDGREQEPEG

SEQ ID NO: 833808 - protein, 190 aa, Homo sapiens
MGAEASSSWCPGTALPEERLSVKRASEISGFLGQGSSGEAALDVLTHVLEGAGNKLTSSCGKPSSNRMSLQWTAVATFLYAEVFVVLLLCIPFISPKRWQKIFKSRLVELLVSYGNTPASPSSTSVCALLLPPFPSTAHSSSSRPLSTLSKHITGDLIATRSECVCCHPAWPGQAWHSLGLPRLSVESTS

SEQ ID NO: 833809 - protein, 145 aa, Homo sapiens
KVRLGTRPGCVIGRGARGASSSPARSAGPPLRGGVGSGGGRSLRGLARAGGRCPAGASGFRPRYEGRGRGCCGRVRLLRRGLHVDCGKLGERAPRAGLGSGTAEAPRPIDEGERRAARGGPGAGESRGPQPTCVKQAHIFLWETF

SEQ ID NO: 833810 - protein, 117 aa, Homo sapiens
GSQLQAGEEGGPYSSFLSMGPSTAACSFACSSSKRSYSLVRPSDPASPSSTSVCALLLPPFPSTAHSSSSRPLSTLSKHITGDLIATRSECVCCHPAWPGQAWHSLGLPRLSVESTS

SEQ ID NO: 833811 - protein, 322 aa, Homo sapiens; identical to SEQ ID NO: 833794

SEQ ID NO: 833812 - protein, 303 aa, Homo sapiens
MTSYELWKGMGEAEGQQTEVLEEENRSLKADLQKLEDELASTKQKLEKAENQVLAMRKQSEGLTKEYDRLLEEHAKLQAAEMARCGRVRLLRRGLHVDCGKLGNKLTSSCGKPSSNRMSLQWTAVATFLYAEVFVVLLLCIPFISPKRWQKIFKSRLVELLVSYGNTFFVVLIVILVLLVIDAVREIRKYDDVTEKVNLQNNPGAMEHFHMKLFRAQRNLYIAGFSLLLSFLLRRLVTLISQQATLLASNEAFKKQAESASEAAKKYMEENDQLKKGAAVDGGKLDVGNAEVKLDGREQEPEG

SEQ ID NO: 833813 - protein, 186 aa, Homo sapiens; identical to SEQ ID NO: 833793

SEQ ID NO: 833814 - protein, 322 aa, Homo sapiens; identical to SEQ ID NO: 833794

SEQ ID NO: 833815 - protein, 253 aa, Homo sapiens
MGAEASSSWCPGTALPEERLSVKRASEISGFLGQGSSGEAALDVLTHVLEGAGNKLTSSCGKPSSNRMSLQWTAVATFLYAEVFVVLLLCIPFISPKRWQKIFKSRLVELLVSYGNTFFVVLIVILVLLVIDAVREIRKYDDVTEKVNLQNNPGAMEHFHMKLFRAQRNLYIAGFSLLLSFLLRRLVTLISQQATLLASNEAFKKQAESASEAAKKYMEENDQLKKGAAVDGGKLDVGNAEVKLDGREQEPEG

SEQ ID NO: 833816 - protein, 322 aa, Homo sapiens; identical to SEQ ID NO: 833794

SEQ ID NO: 833817 - protein, 322 aa, Homo sapiens; identical to SEQ ID NO: 833794

SEQ ID NO: 833818 - protein, 217 aa, Homo sapiens
CVADSVFPFGILGSTPRNKLTSSCGKPSSNRMSLQWTAVATFLYAEVFVVLLLCIPFISPKRWQKIFKSRLVELLVSYGNTFFVVLIVILVLLVIDAVREIRKYDDVTEKVNLQNNPGAMEHFHMKLFRAQRNLYIAGFSLLLSFLLRRLVTLISQQATLLASNEAFKKQAESASEAAKKYMEENDQLKKGAAVDGGKLDVGNAEVKLDGREQEPEG

SEQ ID NO: 833819 - protein, 186 aa, Homo sapiens; identical to SEQ ID NO: 833793

SEQ ID NO: 833820 - protein, 142 aa, Homo sapiens
HKDDNENHKEGVAILVLLVIDAVREIRKYDDVTEKVNLQNNPGAMEHFHMKLFRAQRNLYIAGFSLLLSFLLRRLVTLISQQATLLASNEAFKKQAESASEAAKKYMEENDQLKKGAAVDGGKLDVGNAEVKLDGREQEPEG

SEQ ID NO: 833821 - protein, 322 aa, Homo sapiens; identical to SEQ ID NO: 833794

SEQ ID NO: 833822 - protein, 126 aa, Homo sapiens
CPIAATIPAAIIAFDDEIVSLQYNHRDMELHYLTHFQIPDRISTVRRFTLLLSFLLRRLVTLISQQATLLASNEAFKKQAESASEAAKKYMEENDQLKKGAAVDGGKLDVGNAEVKLDGREQEPEG

SEQ ID NO: 833823 - protein, 109 aa, Homo sapiens
GRSRLELGVEWEQPGGAPASPSCSFSHFSLLFVNNCSLLRRLVTLISQQATLLASNEAFKKQAESASEAAKKYMEENDQLKKGAAVDGGKLDVGNAEVKLDGREQEPEG

SEQ ID NO: 833824 - protein, 322 aa, Homo sapiens; identical to SEQ ID NO: 833794

SEQ ID NO: 833825 - protein, 322 aa, Homo sapiens; identical to SEQ ID NO: 833794

SEQ ID NO: 833826 - protein, 113 aa, Homo sapiens [sequence omitted]

SEQ ID NO: 833827 - protein, 113 aa, Homo sapiens [sequence omitted]

SEQ ID NO: 833828 - protein, 114 aa, Homo sapiens
AGVALQWPRPRGFSPPLVPFSWLLTVNCSSAGSSGGLSKWPPSSPACSWLPPGTCLLLPESPASPSSTSVCALLLPPFPSTAHSSSSRPLSTLSKHITGDLIATLPRLSVESTS

SEQ ID NO: 833829 - protein, 1134 aa, Homo sapiens
MSEPHRVQFTSLPGSLNPAFLKKSRKEEAGAGEQHQDCEPAAAAVRITLTLFEPDHKRCPEFFYPELVKNIRGKVKGLQPGDKKKDLSDPFNDEEKERHKVEALARKFEEKYGGKKRRKDRIQDLIDMGYGYDESDSFIDNSEAYDELVPASLTTKYGGFYINSGTLQFRQASESEDDFIKEKKKKSPKKRKLKEGGEKIKKKKKDDTYDKEKKSKKSKFSKAGFTALNASKEKKKKKYSGALSVKEMLKKFQKEKEAQKKREEEHKPVAVPSAEVQGLRELEGASDPLLSLFGSTSDNDLLQAATAMDSLTDLDLEHLLSESPEGSPFRDMDDGSDSLGVGLDQEFRQPSSLPEGLPAPLEKRVKELAQAARAAEGESRQKFFTQDINGILLDIEAQTRELSSQVRSGVYAYLASFLPCSKDALLKRARKLHLYEQGGRLKEPLQKLKEAIGRAMPEQMAKYQDECQAHTQAKVAKMLEEEKDKEQRDRICSDEEEDEEKGGRRIMGPRKKFQWNDEIRELLCQVVKIKLESQDLERNNKAQAWEDCVKGFLDAEVKPLWPKGWMQARTLFKESRRGHGHLTSILAKKKVMAPSKIKVKESSTKPDKKVSVPSGQIGGPIALPSDHQTGGLSIGASSRELPSQASGGLANPPPVNLEDSLDEDLIRNPASSVEAVSKELAALNSRAAGNSEFTLPAPSKAPAEKVGGVLCTEEKRNFAKPSPSAPPPASSLQSPLNFLAEQALALGQSSQEKKPESSGYKELSCQAPLNKGLPEVHQSKAKHHSLPRTSHGPQVAVPVPGPQVKVFHAGTQQQKNFTPPSPFANKLQGPKASPTQCHRSLLQLVKTAAKGQGFHPSAPATSGGLSASSSSSHKTPASSSSALSHPAKPHSVSSAGSSYKNNPFASSISKHGVSSGSSSSGGTPVQSSVSGSLVPGIQPPSVGQATSRPVPSSAGKKMPVSQKLTLVAPPGGPNGDSSGGTQGVAKLLTSPSLKPSAVSSVTSSTSLSKGASGTVLLAGSSLMASPYKSSSPKLSGAMSSNSLGIITPVPIPVHVLSFSADSSAKAGVSKDAIVTGPAPGSFHHGLGHSLLAGLHSSPPHAAPLPHAAVPTHIPQSLPGASQLHGKGPAVPRKL

SEQ ID NO: 833830 - protein, 1134 aa, Homo sapiens; identical to SEQ ID NO: 833829

SEQ ID NO: 833831 - protein, 1085 aa, Homo sapiens
MSEPHRVQFTSLPGSLNPAFLKKSRKEEAGAGEQHQDCEPAAAAVRITLTLFEPDHKRCPEFFYPELVKNIRGKVKGLQPGDKKKDLSDPFNDEEKERHKVEALARKFEEKYGGKKRRKDRIQDLIDMGYGYDESDSFIDNSEAYDELVPASLTTKYGGFYINSGTLQFRQASESEDDFIKEKKKKSPKKRKLKEGGEKIKKKKKDDTYDKEKKSKKSKFSKAGFTALNASKEKKKKKYSGALSVKEMLKKFQKEKEAQKKREEEHKPVAVPSAEVQGLRELEGASDPLLSLFGSTSDNDLLQAATAMDSLTDLDLEHLLSESPEGSPFRDMDDGSDSLGVGLDQEFRQPSSLPEGLPAPLEKRVKELAQAARAAEGESRQKFFTQDINGILLDIEAQTRELSSQVRSGVYAYLASFLPCSKDALLKRARKLHLYEQGGRLKEPLQKLKEAIGRAMPEQMAKYQDECQAHTQAKVAKMLEEEKDKEQRDRICSDEEEDEEKGGRRIMGPRKKFQWNDEIRTLFKESRRGHGHLTSILAKKKVMAPSKIKVKESSTKPDKKVSVPSGQIGGPIALPSDHQTGGLSIGASSRELPSQASGGLANPPPVNLEDSLDEDLIRNPASSVEAVSKELAALNSRAAGNSEFTLPAPSKAPAEKVGGVLCTEEKRNFAKPSPSAPPPASSLQSPLNFLAEQALALGQSSQEKKPESSGYKELSCQAPLNKGLPEVHQSKAKHHSLPRTSHGPQVAVPVPGPQVKVFHAGTQQQKNFTPPSPFANKLQGPKASPTQCHRSLLQLVKTAAKGQGFHPSAPATSGGLSASSSSSHKTPASSSSALSHPAKPHSVSSAGSSYKNNPFASSISKHGVSSGSSSSGGTPVQSSVSGSLVPGIQPPSVGQATSRPVPSSAGKKMPVSQKLTLVAPPGGPNGDSSGGTQGVAKLLTSPSLKPSAVSSVTSSTSLSKGASGTVLLAGSSLMASPYKSSSPKLSGAMSSNSLGIITPVPIPVHVLSFSADSSAKAGVSKDAIVTGPAPGSFHHGLGHSLLAGLHSSPPHAAPLPHAAVPTHIPQSLPGASQLHGKGPAVPRKL

SEQ ID NO: 833832 - protein, 1102 aa, Homo sapiens
PRERVIRTAAAAVRITLTLFEPDHKRCPEFFYPELVKNIRGKVKGLQPGDKKKDLSDPFNDEEKERHKVEALARKFEEKYGGKKRRKDRIQDLIDMGYGYDESDSFIDNSEAYDELVPASLTTKYGGFYINSGTLQFRQASESEDDFIKEKKKKSPKKRKLKEGGEKIKKKKKDDTYDKEKKSKKSKFSKAGFTALNASKEKKKKKYSGALSVKEMLKKFQKEKEAQKKREEEHKPVAVPSAEVQGLRELEGASDPLLSLFGSTSDNDLLQAATAMDSLTDLDLEHLLSESPEGSPFRDMDDGSDSLGVGLDQEFRQPSSLPEGLPAPLEKRVKELAQAARAAEGESRQKFFTQDINGILLDIEAQTRELSSQVRSGVYAYLASFLPCSKDALLKRARKLHLYEQGGRLKEPLQKLKEAIGRAMPEQMAKYQDECQAHTQAKVAKMLEEEKDKEQRDRICSDEEEDEEKGGRRIMGPRKKFQWNDEIRELLCQVVKIKLESQDLERNNKAQAWEDCVKGFLDAEVKPLWPKGWMQARTLFKESRRGHGHLTSILAKKKVMAPSKIKVKESSTKPDKKVSVPSGQIGGPIALPSDHQTGGLSIGASSRELPSQASGGLANPPPVNLEDSLDEDLIRNPASSVEAVSKELAALNSRAAGNSEFTLPAPSKAPAEKVGGVLCTEEKRNFAKPSPSAPPPASSLQSPLNFLAEQALALGQSSQEKKPESSGYKELSCQAPLNKGLPEVHQSKAKHHSLPRTSHGPQVAVPVPGPQVKVFHAGTQQQKNFTPPSPFANKLQGPKASPTQCHRSLLQLVKTAAKGQGFHPSAPATSGGLSASSSSSHKTPASSSSALSHPAKPHSVSSAGSSYKNNPFASSISKHGVSSGSSSSGGTPVQSSVSGSLVPGIQPPSVGQATSRPVPSSAGKKMPVSQKLTLVAPPGGPNGDSSGGTQGVAKLLTSPSLKPSAVSSVTSSTSLSKGASGTVLLAGSSLMASPYKSSSPKLSGAMSSNSLGIITPVPIPVHVLSFSADSSAKAGVSKDAIVTGPAPGSFHHGLGHSLLAGLHSSPPHAAPLPHAAVPTHIPQSLPGASQLHGKGPAVPRKL

SEQ ID NO: 833833 - protein, 929 aa, Homo sapiens
MSEPHRVQFTSLPGSLNPAFLKKSRKEEAGAGEQHQDCEPAAAAVRITLTLFEPDHKRCPEFFYPELVKNIRGKVKGLQPGDKKKDLSDPFNDEEKERHKVEALARKFEEKYGGKKRRKDRIQDLIDMGYGYDESDSFIDNSEAYDELVPASLTTKYGGFYINSGTLQFRQASESEDDFIKEKKKKSPKKRKLKEGGGKRKYKALSSTLYTSKLYNHRNYPVVNVYLFIHFETKSHSVAQTGVQWHDLGSLQPPPPKFKRISCLSLPSSWDYRHSPPRLANFVFLVETGFHHVGQAGLELLTSGDPPALASKSAGITGVSHCAWPVDIYMRDELLRTRDTSKVLEAESQLSGACTDAWCSVSFRTLFKESRRGHGHLTSILAKKKVMAPSKIKVKESSTKPDKKVSVPSGQIGGPIALPSDHQTGGLSIGASSRELPSQASGGLANPPPVNLEDSLDEDLIRNPASSVEAVSKELAALNSRAAGNSEFTLPAPSKAPAEKVGGVLCTEEKRNFAKPSPSAPPPASSLQSPLNFLAEQALALGQSSQEKKPESSGYKELSCQAPLNKGLPEVHQSKAKHHSLPRTSHGPQVAVPVPGPQVKVFHAGTQQQKNFTPPSPFANKLQGPKASPTQCHRSLLQLVKTAAKGQGFHPSAPATSGGLSASSSSSHKTPASSSSALSHPAKPHSVSSAGSSYKNNPFASSISKHGVSSGSSSSGGTPVQSSVSGSLVPGIQPPSVGQATSRPVPSSAGKKMPVSQKLTLVAPPGGPNGDSSGGTQGVAKLLTSPSLKPSAVSSVTSSTSLSKGASGTVLLAGSSLMASPYKSSSPKLSGAMSSNSLGIITPVPIPVHVLSFSADSSAKAGVSKDAIVTGPAPGSFHHGLGHSLLAGLHSSPPHAAPLPHAAVPTHIPQSLPGASQLHGKGPAVPRKL

SEQ ID NO: 833834 - protein, 679 aa, Homo sapiens
MPEQMAKYQDECQAHTQAKVAKMLEEEKDKEQRDRICSDEEEDEEKGGRRIMGPRKKFQWNDEIRELLCQVVKIKLESQDLERNNKAQAWEDCVKGFLDAEVKPLWPKGWMQARTLFKESRRGHGHLTSILAKKKVMAPSKIKVKESSTKPDKKVSVPSGQIGGPIALPSDHQTGGLSIGASSRELPSQASGGLANPPPVNLEDSLDEDLIRNPASSVEAVSKELAALNSRAAGNSEFTLPAPSKAPAEKVGGVLCTEEKRNFAKPSPSAPPPASSLQSPLNFLAEQALALGQSSQEKKPESSGYKELSCQAPLNKGLPEVHQSKAKHHSLPRTSHGPQVAVPVPGPQVKVFHAGTQQQKNFTPPSPFANKLQGPKASPTQCHRSLLQLVKTAAKGQGFHPSAPATSGGLSASSSSSHKTPASSSSALSHPAKPHSVSSAGSSYKNNPFASSISKHGVSSGSSSSGGTPVQSSVSGSLVPGIQPPSVGQATSRPVPSSAGKKMPVSQKLTLVAPPGGPNGDSSGGTQGVAKLLTSPSLKPSAVSSVTSSTSLSKGASGTVLLAGSSLMASPYKSSSPKLSGAMSSNSLGIITPVPIPVHVLSFSADSSAKAGVSKDAIVTGPAPGSFHHGLGHSLLAGLHSSPPHAAPLPHAAVPTHIPQSLPGASQLHGKGPAVPRKL

SEQ ID NO: 833835 - protein, 1134 aa, Homo sapiens; identical to SEQ ID NO: 833829

SEQ ID NO: 833836 - protein, 1134 aa, Homo sapiens; identical to SEQ ID NO: 833829

SEQ ID NO: 833837 - protein, 1134 aa, Homo sapiens; identical to SEQ ID NO: 833829

SEQ ID NO: 833838 - protein, 1067 aa, Homo sapiens
MSEPHRVQFTSLPGSLNPAFLKKSRKEEAGAGEQHQDCEPAAAAVRITLTLFEPDHKRCPEFFYPELVKNIRGKVKGLQPGDKKKDLSDPFNDEEKERHKVEALARKFEEKYGGKKRRKDRIQDLIDMGYGYDESDSFIDNSEAYDELVPASLTTKYGGFYINSGTLQFRQASESEDDFIKEKKKKSPKKRKLKEGGEKIKKKKKDDTYDKEKKSKKSKFSKAGFTALNASKEKKKKKYSGALSVKEMLKKFQKEKEAQKKREEEHKPVAVPSAEVQGLRELEGASDPLLSLFGSTSDNDLLQAATAMDSLTDLDLEHLLSESPEGSPFRDMDDGSDSLGVGLDQEFRQPSSLPEGLPAPLEKRVKELAQAARAAEGESRQKFFTQDINGILLDIEAQTRELSSQVRSGVYAYLASFLPCSKDALLKRARKLHLYEQGGRLKEPLQKLKEAIGRAMPEQMAKYQDECQAHTQAKVAKMLEEEKDKEQRDRICSDEEEDEEKGGRRIMGPRKKFQWNDEIRELLCQVVKIKLESQDLERNNKAQAWEDCVKGFLDAEVKPLWPKGWMQARTLFKESRRGHGHLTSILAKKKVMAPSKIKVKESSTKPDKKVSVPSGQIGGPIALPSDHQTGGLSIGASSRELPSQASGGLANPPPVNLEDSLDEDLIRNPASSVEAVSKELAALNSRAAGNSEFTLPAPSKAPAEKVGGVLCTEEKRNFAKPSPSAPPPASSLQSPLNFLAEQALALGQSSQEKKPESSGYKELSCQAPLNKGLPEVHQSKAKHHSLPRTSHGPQVAVPVPGPQVKVFHAGTQQQKNFTPPSPFANKLQGPKASPTQCHRSLLQLVKTAAKGQGFHPSAPATSGGLSASSSSSHKTPASSSSALSHPAKPHSVSSAGSSYKNNPFASSISKHGVSSGSSSSGGTPVQSSVSGSLVPGIQPPSVGQATSRPVPSSAGKKMPVSQKLTLVAPPGGPNGDSSGGTQGVAKLLTSPSLKPSAVSSVTSSTSLSKGASGTVLLAGSSLMASPYKSSSPKLSGAMSSNSSGSGGCRGFPGAAKVSEHLPGVTVS

SEQ ID NO: 833839 - protein, 216 aa, Homo sapiens
MSEPHRVQFTSLPGSLNPAFLKKSRKEEAGAGEQHQDCEPAAAAVRITLTLFEPDHKRCPEFFYPELVKNIRGKVKGLQPGDKKKDLSDPFNDEEKERHKVEALARKFEEKYGGKKRRKDRIQDLIDMGYGYDESDSFIDNSEAYDELVPASLTTKYGGFYINSGTLQFRQASESEDDFIKEKKKKSPKKRKLKEGGEKIKKKKKDDTFARVPARF

SEQ ID NO: 833840 - protein, 204 aa, Homo sapiens
MSEPHRVQFTSLPGSLNPAFLKKSRKEEAGAGEQHQDCEPAAAAVRITLTLFEPDHKRCPEFFYPELVKNIRGKVKGLQPGDKKKDLSDPFNDEEKERHKVEALARKFEEKYGGKKRRKDRIQDLIDMGYGYDESDSFIDNSEAYDELVPASLTTKYGGFYINSGTLQFRQASESEDDFIKEKKKKSPKKRKLKEGGESGSIKR

SEQ ID NO: 833841 - protein, 184 aa, Homo sapiens
PRERVIRTAAAAVRITLTLFEPDHKRCPEFFYPELVKNIRGKVKGLQPGDKKKDLSDPFNDEEKERHKVEALARKFEEKYGGKKRRKDRIQDLIDMGYGYDESDSFIDNSEAYDELVPASLTTKYGGFYINSGTLQFRQASESEDDFIKEKKKKSPKKRKLKEGGEKIKKKKKDDTFARVPARF

SEQ ID NO: 833842 - protein, 543 aa, Homo sapiens
MAPSKIKVKESSTKPDKKVSVPSGQIGGPIALPSDHQTGGLSIGASSRELPSQASGGLANPPPVNLEDSLDEDLIRNPASSVEAVSKELAALNSRAAGNSEFTLPAPSKAPAEKVGGVLCTEEKRNFAKPSPSAPPPASSLQSPLNFLAEQALALGQSSQEKKPESSGYKELSCQAPLNKGLPEVHQSKAKHHSLPRTSHGPQVAVPVPGPQVKVFHAGTQQQKNFTPPSPFANKLQGPKASPTQCHRSLLQLVKTAAKGQGFHPSAPATSGGLSASSSSSHKTPASSSSALSHPAKPHSVSSAGSSYKNNPFASSISKHGVSSGSSSSGGTPVQSSVSGSLVPGIQPPSVGQATSRPVPSSAGKKMPVSQKLTLVAPPGGPNGDSSGGTQGVAKLLTSPSLKPSAVSSVTSSTSLSKGASGTVLLAGSSLMASPYKSSSPKLSGAMSSNSLGIITPVPIPVHVLSFSADSSAKAGVSKDAIVTGPAPGSFHHGLGHSLLAGLHSSPPHAAPLPHAAVPTHIPQSLPGASQLHGKGPAVPRKL

SEQ ID NO: 833843 - protein, 1161 aa, Homo sapiens
MSEPHRVQFTSLPGSLNPAFLKKSRKEEAGAGEQHQDCEPAAAAVRITLTLFEPDHKRCPEFFYPELVKNIRGKVKGLQPGDKKKDLSDPFNDEEKERHKVEALARKFEEKYGGKKRRKDRIQDLIDMGYGYDESDSFIDNSEAYDELVPASLTTKYGGFYINSGTLQFRQASESEDDFIKEKKKKSPKKRKLKEGGEKIKKKKKDDTYDKEKKSKKSKFSKAGFTALNASKEKKKKKYSGALSVKEMLKKFQKEKEAQKKREEEHKPVAVPSAEVQGLRELEGASDPLLSLFGSTSDNDLLQAATAMDSLTDLDLEHLLSESPEGSPFRDMDDGSDSLGVGLDQEFRQPSSLPEGLPAPLEKRVKELAQAARAAEGESRQKFFTQDINGILLDIEAQTRELSSQVRSGVYAYLASFLPCSKDALLKRARKLHLYEQGGRLKEPLQKLKEAIGRAMPEQMAKYQDECQAHTQAKVAKMLEEEKDKEQRDRICSDEEEDEEKGGRRIMGPRKKFQWNDEIRELLCQVVKIKLESQDLERNNKAQAWEDCVKGFLDAEVKPLWPKGWMQARTLFKESRRGHGHLTSILAKKKVMAPSKIKVKESSTKPDKKVSVPSGQIGGPIALPSDHQTGGLSIGASSRELPSQASGGLANPPPVNLEDSLDEDLIRNPASSVEAVSKELAALNSRAAGNSEFTLPAPSKAPAEKVGGVLCTEEKRNFAKPSPSAPPPASSLQSPLNFLAEQALALGQSSQEKKPESSGYKELSCQAPLNKGLPEVHQSKAKHHSLPRTSHGPQVAVPVPGPQVKVFHAGTQQQKNFTPPSPFANKLQGPKASPTQCHRSLLQLVKTAAKGQGFHPSAPATSGGLSASSSSSHKTPASSSSALSHPAKPHSVSSAGSSYKNNPFASSISKHGVSSGSSSSGGTPVQSSVSGSLVPGIQPPSVGQATSRPVPSSAGKKMPVSQKLTLVAPPGGPNGDSSGGTQGVAKLLTSPSLKPSAVSSVTSSTSLSKGASGTVLLAGSSLMASPYKSSSPKLSGAMSSNSLGIITPVPIPVHVLSFSADSSAKAGVSKDAIVTGPAPGSFHHGLGHSLLAGLHSSPPHAAPLPHAAVPTHIPQSLPGNHPTVSVPRAPCAFALSTPRCFAAAKGLGVFALTLLLFWFVL

SEQ ID NO: 833844 - protein, 1039 aa, Homo sapiens
MSEPHRVQFTSLPGSLNPAFLKKSRKEEAGAGEQHQDCEPAAAAVRITLTLFEPDHKRCPEFFYPELVKNIRGKVKGLQPGDKKKDLSDPFNDEEKERHKVEALARKFEEKYGGKKRRKDRIQDLIDMGYGYDESDSFIDNSEAYDELVPASLTTKYGGFYINSGTLQFRQASESEDDFIKEKKKKSPKKRKLKEGGEKIKKKKKDDTYDKEKKSKKSKFSKAGFTALNASKEKKKKKYSGALSVKEMLKKFQKEKEAQKKREEEHKPVAVPSAEVQGLRELEGASDPLLSLFGSTSDNDLLQAATAMDSLTDLDLEHLLSESPEGSPFRDMDDGSDSLGVGLDQEFRQPSSLPEGLPAPLEKRVKELAQAARAAEGESRQKFFTQDINGILLDIEAQTRELSSQVRSGVYAYLASFLPCSKDALLKRARKLHLYEQGGRLKEPLQKLKEAIGRAMPEQMAKYQDECQAHTQAKVAKMLEEEKDKEQRDRICSDEEEDEEKGGRRIMGPRKKFQWNDEIRELLCQVVKIKLESQDLERNNKAQAWEDCVKGFLDAEVKPLWPKGWMQARTLFKESRRGHGHLTSILAKKKVMAPSKIKVKESSTKPDKKVSVPSGQIGGPIALPSDHQTGGLSIGASSRELPSQASGGLANPPPVNLEDSLDEDLIRNPASSVEAVSKELAALNSRAAGNSEFTLPAPSKAPAEKVGGVLCTEEKRNFAKPSPSAPPPASSLQSPLNFLAEQALALGQSSQEKKPESSGYKELSCQAPLNKGLPEVHQSKAKHHSLPRTSHGPQVAVPVPGPQVKVFHAGTQQQKNFTPPSPFANKLQGPKASPTQCHRSLLQLVKTAAKGQGFHPSAPATSGGLSASSSSSHKTPASSSSALSHPAKPHSVSSAGSSYKNNPFASSISKHGVSSGSSSSGGTPVQSSVSGSLVPGIQPPSVGQATSRPVPSSAGKKMPVSQKLTLVAPPGGPNGDSSGGTQGVAKLLTSPSLKPSAVSSVTSSTSLSVSICHSSLPCPTHRGLGDEDCLALPRVESEI

SEQ ID NO: 833845 - protein, 425 aa, Homo sapiens
MNAMLETPELPAVFDGVKLAAVAAVLYVIVRCLNLKSPTAPPDLYFQDSGLSRFLLKSCPLLTKEYIPPLIWGKSGHIQTALYGKMGRVRSPHPYGHRKFITMSDGATSTFDLFEPLAEHCVGDDITMVICPGIANHSEKQYIRTFVDYAQKNGYRCAVLNHLGALPNIELTSPRMFTYGCTWEFGAMVNYIKKTYPLTQLVVVGFSLGGNIVCKYLGETQANQEKVLCCVSVCQGYSALRAQETFMQWDQCRRFYNFLMADNMKKIILSHRQALFGDHVKKPQSLEDTDLSRLYTATSLMQIDDNVMRKFHGYNSLKEYYEEESCMRYLHRIYVPLMLVNAADDPLVHESLLTIPKSLSEKRENVMFVLPLHGGHLGFFEGSVLFPEPLTWMDKLVVEYANAICQWERNKLQCSDTEQVEADLE

SEQ ID NO: 833846 - protein, 255 aa, Homo sapiens
MNAMLETPELPAVFDGVKLAAVAAVLYVIVRCLNLKSPTAPPDLYFQDSGLSRFLLKSCPLLTKEYIPPLIWGKSGHIQTALYGKMGRVRSPHPYGHRKFITMSDGATSTFDLFEPLAEHCVGDDITMVICPGIANHSEKQYIRTFVDYAQKNGYRCAVLNHLGALPNIELTSPRMFTYGCTWEFGAMVNYIKKTYPLTQLVVVGFSLGGNIVCKYLGETQANQEKVLCCVSVCQGYSALSLLLLVLKTSVLFKK

SEQ ID NO: 833847 - protein, 142 aa, Homo sapiens
MNAMLETPELPAVFDGVKLAAVAAVLYVIVRCLNLKSPTAPPDLYFQDSGLSRFLLKSCPLLTKEYIPPLIWGKSGHIQTALYGKMGRVRSPHPYGHRKFITMSDGATSTFDLFEPLAEHCVGDDITMVICPGIAKQFKSWI

SEQ ID NO: 833848 - protein, 425 aa, Homo sapiens; identical to SEQ ID NO: 833845

SEQ ID NO: 833849 - protein, 425 aa, Homo sapiens; identical to SEQ ID NO: 833845

SEQ ID NO: 833850 - protein, 852 aa, Homo sapiens
WRYIHTGTAMPCLRIPVLKKLSLTVTQRVTSSPATHGPLKGEEGVSPTVGPVVAPWVLESFLRSFQGQTLGLGSRLYSSDSQTQQDGCDRETLGGDPGAHHELRALAVAPVEGVEAVGEGGRRGQATYGYHLGSGKSSWEDQGRAAGSTQGRKMRWLLLYYALCFSLSKASAHTVELNNMFGQIQSPGYPDSYPSDSEVTWNITVPDGFRIKLYFMHFNLESSYLCEYDYVKVETEDQVLATFCGRETTDTEQTPGQEVVLSPGSFMSITFRSDFSNEERFTGFDAHYMAVDVDECKEREDEELSCDHYCHNYIGGYYCSCRFGYILHTDNRTCRVECSDNLFTQRTGVITSPDFPNPYPKSSECLYTIELEEGFMVNLQFEDIFDIEDHPEVPCPYDYIKIKVGPKVLGPFCGEKAPEPISTQSHSVLILFHSDNSGENRGWRLSYRAAGNECPELQPPVHGKIEPSQAKYFFKDQVLVSCDTGYKVLKDNVEMDTFQIECLKDGTWSNKIPTCKIVDCRAPGELEHGLITFSTRNNLTTYKSEIKYSCQEPYYKMLNNNTGIYTCSAQGVWMNKVLGRSLPTCLPVCGLPKFSRKLMARIFNGRPAQKGTTPWIAMLSHLNGQPFCGGSLLGSSWIVTAAHCLHQSLDPEDPTLRDSDLLSPSDFKIILGKHWRLRSDENEQHLGVKHTTLHPQYDPNTFENDVALVELLESPVLNAFVMPICLPEGPQQEGAMVIVSGWGKQFLQRFPETLMEIEIPIVDHSTCQKAYAPLKKKVTRDMICAGEKEGGKDACAGDSGGPMVTLNRERGQWYLVGTVSWGDDCGKKDRYGVYSYIHHNKDWIQRVTGVRN

SEQ ID NO: 833851 - protein, 380 aa, Homo sapiens
MRWLLLYYALCFSLSKASAHTVELNNMFGQIQSPGYPDSYPSDSEVTWNITVPDGFRIKLYFMHFNLESSYLCEYDYVKVETEDQVLATFCGRETTDTEQTPGQEVVLSPGSFMSITFRSDFSNEERFTGFDAHYMAVDVDECKEREDEELSCDHYCHNYIGGYYCSCRFGYILHTDNRTCRVECSDNLFTQRTGVITSPDFPNPYPKSSECLYTIELEEGFMVNLQFEDIFDIEDHPEVPCPYDYIKIKVGPKVLGPFCGEKAPEPISTQSHSVLILFHSDNSGENRGWRLSYRAAGNECPELQPPVHGKIEPSQAKYFFKDQVLVSCDTGYKVLKDNVEMDTFQIECLKDGTWSNKIPTCKKNEIDLESELKSEQVTE

SEQ ID NO: 833852 - protein, 399 aa, Homo sapiens
MRWLLLYYALCFSLSKASAHTVELNNMFGQIQSPGYPDSYPSDSEVTWNITVPDGFRIKLYFMHFNLESSYLCEYDYVKVETEDQVLATFCGRETTDTEQTPGQEVVLSPGSFMSITFRSDFSNEERFTGFDAHYMAVDVDECKEREDEELSCDHYCHNYIGGYYCSCRFGYILHTDNRTCRVECSDNLFTQRTGVITSPDFPNPYPKSSECLYTIELEEGFMVNLQFEDIFDIEDHPEVPCPYDYIKIKVGPKVLGPFCGEKAPEPISTQSHSVLILFHSDNSGENRGWRLSYRAAGNECPELQPPVHGKIEPSQAKYFFKDQVLVSCDTGYKVLKVQSLALGKGSAQATETLRNLPLPRADGLPELVIVPAQNFLAAHQLLKCSRNSKACVPGGLTL

SEQ ID NO: 833853 - protein, 349 aa, Homo sapiens
MPANSRDTQGPQNKDKASRTPHRARAHRQVKLGGPRPGSREHPRQENEVETEDQVLATFCGRETTDTEQTPGQEVVLSPGSFMSITFRSDFSNEERFTGFDAHYMAVDVDECKEREDEELSCDHYCHNYIGGYYCSCRFGYILHTDNRTCRVECSDNLFTQRTGVITSPDFPNPYPKSSECLYTIELEEGFMVNLQFEDIFDIEDHPEVPCPYDYIKIKVGPKVLGPFCGEKAPEPISTQSHSVLILFHSDNSGENRGWRLSYRAAGNECPELQPPVHGKIEPSQAKYFFKDQVLVSCDTGYKVLKDNVEMDTFQIECLKDGTWSNKIPTCKKNEIDLESELKSEQVTE

SEQ ID NO: 833854 - protein, 380 aa, Homo sapiens; identical to SEQ ID NO: 833851

SEQ ID NO: 833855 - protein, 399 aa, Homo sapiens; identical to SEQ ID NO: 833852

SEQ ID NO: 833856 - protein, 399 aa, Homo sapiens; identical to SEQ ID NO: 833852

SEQ ID NO: 833857 - protein, 252 aa, Homo sapiens
MRWLLLYYALCFSLSKASAHTVELNNMFGQIQSPGYPDSYPSDSEVTWNITVPDGFRIKLYFMHFNLESSYLCEYDYVKVETEDQVLATFCGRETTDTEQTPGQEVVLSPGSFMSITFRSDFSNEERFTGFDAHYMAVDVDECKEREDEELSCDHYCHNYIGGYYCSCRFGYILHTDNRTCRVECSDNLFTQRTGVITSPDFPNPYPKSSECLYTIELEEGFMVNLQFEDIFDIEDHPEVPCPYDYIKVSLQ

SEQ ID NO: 833858 - protein, 728 aa, Homo sapiens
MRWLLLYYALCFSLSKASAHTVELNNMFGQIQSPGYPDSYPSDSEVTWNITVPDGFRIKLYFMHFNLESSYLCEYDYVKVETEDQVLATFCGRETTDTEQTPGQEVVLSPGSFMSITFRSDFSNEERFTGFDAHYMAVDVDECKEREDEELSCDHYCHNYIGGYYCSCRFGYILHTDNRTCRVECSDNLFTQRTGVITSPDFPNPYPKSSECLYTIELEEGFMVNLQFEDIFDIEDHPEVPCPYDYIKIKVGPKVLGPFCGEKAPEPISTQSHSVLILFHSDNSGENRGWRLSYRAAGNECPELQPPVHGKIEPSQAKYFFKDQVLVSCDTGYKVLKDNVEMDTFQIECLKDGTWSNKIPTCKIVDCRAPGELEHGLITFSTRNNLTTYKSEIKYSCQEPYYKMLNNNTGIYTCSAQGVWMNKVLGRSLPTCLPECGQPSRSLPSLVKRIIGGRNAEPGLFPWQALIVVEDTSRVPNDKWFGSGALLSASWILTAAHVLRSQRRDTTVIPVSKEHVTVYLGLHDVRDKSGAVNSSAARVVLHPDFNIQNYNHDIALVQLQEPVPLGPHVMPVCLPRLEPEGPAPHMLGLVAGWGISNPNVTVDEIISSGTRTLSDVLQYVKLPVVPHAECKTSYESRSGNYSVTENMFCAGYYEGGKDTCLGDSGGAFVIFDDLSQRWVVQGLVSWGGPEECGSKQVYGVYTKVSNYVDWVWEQMGLPQSVVEPQVER

SEQ ID NO: 833859 - protein, 730 aa, Homo sapiens
SGTGTQTSSPNTGKSSWEDQGRAAGSTQGRKMRWLLLYYALCFSLSKASAHTVELNNMFGQIQSPGYPDSYPSDSEVTWNITVPDGFRIKLYFMHFNLESSYLCEYDYVKVETEDQVLATFCGRETTDTEQTPGQEVVLSPGSFMSITFRSDFSNEERFTGFDAHYMAVDVDECKEREDEELSCDHYCHNYIGGYYCSCRFGYILHTDNRTCRVECSDNLFTQRTGVITSPDFPNPYPKSSECLYTIELEEGFMVNLQFEDIFDIEDHPEVPCPYDYIKIKVGPKVLGPFCGEKAPEPISTQSHSVLILFHSDNSGENRGWRLSYRAAGNECPELQPPVHGKIEPSQAKYFFKDQVLVSCDTGYKVLKDNVEMDTFQIECLKDGTWSNKIPTCKIVDCRAPGELEHGLITFSTRNNLTTYKSEIKYSCQEPYYKMLNNNTGIYTCSAQGVWMNKVLGRSLPTCLPVCGLPKFSRKLMARIFNGRPAQKGTTPWIAMLSHLNGQPFCGGSLLGSSWIVTAAHCLHQSLDPEDPTLRDSDLLSPSDFKIILGKHWRLRSDENEQHLGVKHTTLHPQYDPNTFENDVALVELLESPVLNAFVMPICLPEGPQQEGAMVIVSGWGKQFLQRFPETLMEIEIPIVDHSTCQKAYAPLKKKVTRDMICAGEKEGGKDACAGDSGGPMVTLNRERGQWYLVGTVSWGDDCGKKDRYGVYSYIHHNKDWIQRVTGVRN

SEQ ID NO: 833860 - protein, 387 aa, Homo sapiens
MRPTFMSFRWLLLYYALCFSLSKASAHTVELNNMFGQIQSPGYPDSYPSDSEVTWNITVPDGFRIKLYFMHFNLESSYLCEYDYVKVETEDQVLATFCGRETTDTEQTPGQEVVLSPGSFMSITFRSDFSNEERFTGFDAHYMAVDVDECKEREDEELSCDHYCHNYIGGYYCSCRFGYILHTDNRTCRVECSDNLFTQRTGVITSPDFPNPYPKSSECLYTIELEEGFMVNLQFEDIFDIEDHPEVPCPYDYIKIKVGPKVLGPFCGEKAPEPISTQSHSVLILFHSDNSGENRGWRLSYRAAGNECPELQPPVHGKIEPSQAKYFFKDQVLVSCDTGYKVLKDNVEMDTFQIECLKDGTWSNKIPTCKKNEIDLESELKSEQVTE

SEQ ID NO: 833861 - protein, 380 aa, Homo sapiens; identical to SEQ ID NO: 833851

SEQ ID NO: 833862 - protein, 399 aa, Homo sapiens; identical to SEQ ID NO: 833852

SEQ ID NO: 833863 - protein, 109 aa, Homo sapiens
MICAGEKEGGLRGWHTTGALPAREWCRASKGAQRPPNLVGWQCGGAGDWRKAVGGGIPQEKMHRRKDIYRMLIIPFPSSVFPLRKRPWPGTVVHACNPSTLGGRGGWIT

SEQ ID NO: 833864 - protein, 120 aa, Homo sapiens
MIEARKNHGLVFVKDKIFAVGGQNGLGGLDNVEYYDIKLNEWKMVSPMPWKGVTVKCAAVGSIVYVLAGFQGVGRLGHILEYNTETDKWVANSKVRAFPVTSCLICVVDTCGANEETLET

SEQ ID NO: 833865 - protein, 586 aa, Homo sapiens
MAASGVEKSSKKKTEKKLAAREEAKLLAGFMGVMNNMRKQKTLCDVILMVQERKIPAHRVVLAAASHFFNLMFTTNMLESKSFEVELKDAEPDIIEQLVEFAYTARISVNSNNVQSLLDAANQYQIEPVKKMCVDFLKEQVDASNCLGISVLAECLDCPELKATADDFIHQHFTEVYKTDEFLQLDVKRVTHLLNQDTLTVRAEDQVYDAAVRWLKYDEPNRQPFMVDILAKVRFPLISKNFLSKTVQAEPLIQDNPECLKMVISGMRYHLLSPEDREELVDGTRPRRKKHDYRIALFGGSQPQSCRYFNPKDYSWTDIRCPFEKRRDAACVFWDNVVYILGGSQLFPIKRMDCYNVVKDSWYSKLGPPTPRDSLAACAAEGKIYTSGGSEVGNSALYLFECYDTRTESWHTKPSMLTQRCSHGMVEANGLIYVCGGSLGNNVSGRVLNSCEVYDPATETWTELCPMIEARKNHGLVFVKDKIFAVGGQNGLGGLDNVEYYDIKLNEWKMVSPMPWKGVTVKCAAVGSIVYVLAGFQGVGRLGHILEYNTETDKWVANSKVRAFPVTSCLICVVDTCGANEETLET

SEQ ID NO: 833866 - protein, 586 aa, Homo sapiens; identical to SEQ ID NO: 833865

SEQ ID NO: 833867 - protein, 538 aa, Homo sapiens
MVQERKIPAHRVVLAAASHFFNLMFTTNMLESKSFEVELKDAEPDIIEQLVEFAYTARISVNSNNVQSLLDAANQYQIEPVKKMCVDFLKEQVDASNCLGISVLAECLDCPELKATADDFIHQHFTEVYKTDEFLQLDVKRVTHLLNQDTLTVRAEDQVYDAAVRWLKYDEPNRQPFMVDILAKVRFPLISKNFLSKTVQAEPLIQDNPECLKMVISGMRYHLLSPEDREELVDGTRPRRKKHDYRIALFGGSQPQSCRYFNPKDYSWTDIRCPFEKRRDAACVFWDNVVYILGGSQLFPIKRMDCYNVVKDSWYSKLGPPTPRDSLAACAAEGKIYTSGGSEVGNSALYLFECYDTRTESWHTKPSMLTQRCSHGMVEANGLIYVCGGSLGNNVSGRVLNSCEVYDPATETWTELCPMIEARKNHGLVFVKDKIFAVGGQNGLGGLDNVEYYDIKLNEWKMVSPMPWKGVTVKCAAVGSIVYVLAGFQGVGRLGHILEYNTETDKWVANSKVRAFPVTSCLICVVDTCGANEETLET

SEQ ID NO: 833868 - protein, 564 aa, Homo sapiens
MLGGTDCRTFLTSHINLKKTLCDVILMVQERKIPAHRVVLAAASHFFNLMFTTNMLESKSFEVELKDAEPDIIEQLVEFAYTARISVNSNNVQSLLDAANQYQIEPVKKMCVDFLKEQVDASNCLGISVLAECLDCPELKATADDFIHQHFTEVYKTDEFLQLDVKRVTHLLNQDTLTVRAEDQVYDAAVRWLKYDEPNRQPFMVDILAKVRFPLISKNFLSKTVQAEPLIQDNPECLKMVISGMRYHLLSPEDREELVDGTRPRRKKHDYRIALFGGSQPQSCRYFNPKDYSWTDIRCPFEKRRDAACVFWDNVVYILGGSQLFPIKRMDCYNVVKDSWYSKLGPPTPRDSLAACAAEGKIYTSGGSEVGNSALYLFECYDTRTESWHTKPSMLTQRCSHGMVEANGLIYVCGGSLGNNVSGRVLNSCEVYDPATETWTELCPMIEARKNHGLVFVKDKIFAVGGQNGLGGLDNVEYYDIKLNEWKMVSPMPWKGVTVKCAAVGSIVYVLAGFQGVGRLGHILEYNTETDKWVANSKVRAFPVTSCLICVVDTCGANEETLET

SEQ ID NO: 833869 - protein, 494 aa, Homo sapiens
MAASGVEKSSKKKTEKKLAAREEAKLLAGFMGVMNNMRKQKTLCDVILMVQERKIPAHRVVLAAASHFFNLMFTTNMLESKSFEVELKDAEPDIIEQLVEFAYTARISVNSNNVQSLLDAANQYQIEPVKKMCVDFLKEQVDASNCLGISVLAECLDCPELKATADDFIHQHFTEVYKTDEFLQLDVKRVTHLLNQDTLTVRAEDQVYDAAVRWLKYDEPNRQPFMVDILAKVRFPLISKNFLSKTVQAEPLIQDNPECLKMVISGMRYHLLSPEDREELVDGTRPRRKKHDYRIALFGGSQPQSCRYFNPKDYSWTDIRCPFEKRRDAACVFWDNVVYILGGSQLFPIKRMDCYNVVKDSWYSKLGPPTPRDSLAACAAEGKIYTSGGSEVGNSALYLFECYDTRTESWHTKPSMLTQRCSHGMVEANGLIYVCGGSLGNNVSGRVLNSCEVYDPATETWTELCPMIEARKNHGLVFVKDKIFAVGGQNGLVR

SEQ ID NO: 833870 - protein, 166 aa, Homo sapiens
MAASGVEKSSKKKTEKKLAAREEAKLLAGFMGVMNNMRKQKTLCDVILMVQERKIPAHRVVLAAASHFFNLMFTTNMLESKSFEVELKDAEPDIIEQLVEFAYTARISVNSNNVQSLLDAANQYQIEPVKKMCVDFLKEQVDASNCLGEAEKVDQSLPECGMLFTV

SEQ ID NO: 833871 - protein, 136 aa, Homo sapiens
MLGGTDCRTFLTSHINLKKTLCDVILMVQERKIPAHRVVLAAASHFFNLMFTTNMLESKSFEVELKDAEPDIIEQLVEFAYTARISVNSNNVQSLLDAANQYQIEPVKKMCVDFLKEQVDASNCLGKKYQIPVVCL

SEQ ID NO: 833872 - protein, 166 aa, Homo sapiens; identical to SEQ ID NO: 833870

SEQ ID NO: 833873 - protein, 564 aa, Homo sapiens; identical to SEQ ID NO: 833868

SEQ ID NO: 833874 - protein, 564 aa, Homo sapiens; identical to SEQ ID NO: 833868

SEQ ID NO: 833875 - protein, 464 aa, Homo sapiens
MAASGVEKSSKKKTEKKLAAREEAKLLAGFMGVMNNMRKQKTLCDVILMVQERKIPAHRVVLAAASHFFNLMFTTNMLESKSFEVELKDAEPDIIEQLVEFAYTARISVNSNNVQSLLDAANQYQIEPVKKMCVDFLKEQVDASNCLGISVLAECLDCPELKATADDFIHQHFTEVYKTDEFLQLDVKRVTHLLNQDTLTVRAEDQVYDAAVRWLKYDEPNRQPFMVDILAKVRFPLISKNFLSKTVQAEPLIQDNPECLKMVISGMRYHLLSPEDREELVDGTRPRRKKHDYRIALFGGSQPQSCRYFNPKDYSWTDIRCPFEKRRDAACVFWDNVVYILGGSQLFPIKRMDCYNVVKDSWYSKLGPPTPRDSLAACAAEGKIYTSGGSEVGNSALYLFECYDTRTESWHTKPSMLTQRCSHGMVEANGLIYVCGGSLGNNVSGRVLNSCEVYDPATETYVSI

SEQ ID NO: 833876 - protein, 278 aa, Homo sapiens
MAASGVEKSSKKKTEKKLAAREEAKLLAGFMGVMNNMRKQKTLCDVILMVQERKIPAHRVVLAAASHFFNLMFTTNMLESKSFEVELKDAEPDIIEQLVEFAYTARISVNSNNVQSLLDAANQYQIEPVKKMCVDFLKEQVDASNCLGISVLAECLDCPELKATADDFIHQHFTEVYKTDEFLQLDVKRVTHLLNQDTLTVRAEDQVYDAAVRWLKYDEPNRQPFMVAAEKLPSFGAWAELNWGKASSLSFSDHQLSSYHRTLLPFQSRRKTEKTVEK

SEQ ID NO: 833877 - protein, 111 aa, Homo sapiens
KFTQLIFLKSCFILNVYLVFLKMIFYSFIFFLCLGISVLAECLDCPELKATADDFIHQHFTEVYKTDEFLQLDVKRVTHLLNQDTLTVRAEDQVTKLPSHIFLNKNVFIGF

SEQ ID NO: 833878 - protein, 268 aa, Homo sapiens
FSLPSFFQKKMQSRVTFDTMDFIAEEGHFPPKAIQIMQKKPSWRTEDEIQAVCNILQVLDSYRNYAEPLQLLLAKVMRFERFGRRRVIIKKGQKGNSFYFIYLGTVAITKDEDGSSAFLDPHPKLLHKGSCFGEMDVLHASVRRSTIVCMEETEFLVVDREDFFANKLDQEVQKDAQYRFEFFRKMELFASWSDEKLWQLVAMAKIERFSYGQLISKDFGESPFIMFISKGSCEVLRLLDLGASPSYRRWIWQHLELIDGRPLKTHLS
